United States Patent Application Publication US 2005/0228172 A9 - sequence listing, part 203

SEQ ID NO: 919714 - DNA, 595 bp, Homo sapiens
tttactttacctaaattcataagaggaatcactgtctatggtagctctagccttatgaaaaagatttcttaaataataagacttcgaagtctaaattactccttggtctataggctgcagaatggatgttgtgctgggaggcatgaaaacaatattaatcttcatgcacatttccctcagagctaccgagtgaccagatgccttgccaaagagtagtaatgttttgaaataaatctttttttctgaacagcagttcttaacagtaggcttataatgttcactaaaccatgctgtaaacataaaagggctgtcatccaggctttgtcattccatgtatagagcagaagcagagtagatttagcataaagcttaagggccctrtaacttttggaatggtaaataggcactggtttccacttaaagtaacaagctgcattagctgctaacaagaaagtcagcctgtgttttcaagctttgaagccagacattgacttctcctctctagctattaaagtcctaaatgacatctttttttcaatataagactctttcatccacattgaaaatctgttgttttgtatagttgagaggtgaa

SEQ ID NO: 919715 - DNA, 593 bp, Homo sapiens
caccaaaatatgaagaccaacaacactgtgaagaaattacatcaacttttgtgcaaaataaccagctagaatcataaaaacaggatcaaattcacacataacaatactaaccttaaatgtcaatgggctaagtgccccaattaaaagacacacacaggcaaattggataaaaagtcaagaccaatcagtgtgctaccttcaggagacccatctcacgtgcaaagacacacataggctcaaaataaagggatgaaggaaaatttaccaagcaaatggaaagcaaaaaaagcagggkttgcaatcctagtctctgataaaaccaactttaaaccaacagaggtcaaaatggacaaagaagggcaccacataatggtgaagggatcaatgcaacaaaaagagctaactattctaaacatatatgcacccaatacaggtgcacccagactcataaagcaagctcttagagacctacaaagactcccacacaataacagtgggagactttaacactccactgtcaatattagacaattcaacaagacagaaaatcaacaaggatattcaggacttgaactcagctctggaccaagcag

SEQ ID NO: 919716 - DNA, 728 bp, Homo sapiens
gaggatcacctgagcccaggaggtagaggctatggtgagccatgatcatgccactgcattccagcctgggtgacagagcaagaccctgtctcaaaaaagaagaaaagaaaaaagaaagaaaagaaaagagagattatgctaagtaaaatcacccaaacacaaaaggatattacagattccacttacatgaagtgtccrgcatatttccagaataggcaaatttataaagacataaagtagattaaaggttatgatgggctggggaggggagaaaggggagttagggctgaatgggtacagggttcctgtttggggcaatgaaaaagttttggaaatatgtaaatggtgatggttgcaccacattgtgaatgtacttagtgccactaaactgtgcgcttaaaaatagttaaaatggcaaaacttatatgatgtagattttacagttttaaaaaatctcatcacaagagaaacaaaaagcctgctttataaaggaggaaaattatagaaattcttttctcatccacctcagcccctagaccttatgtgtagcgcacagcccagcctatagtagatgcacatttctgtttttgtcaagccttactgggaacataatcattctatttgtagttgaaaatggcactgaggctgttgagtgtaaattttactaccatggcaactgtggaacacaaagatgataaatatgaacatgcagcaatatttttggcagg

SEQ ID NO: 919717 - DNA, 420 bp, Homo sapiens
agcatgttagaaccatattggttttcaactaattttaatcaaagattatgcaatgtattactttactttcattcttataaaaagcagtgcttaagtggtgaaatataagctgttacataaatgtatttgtttctatgtgtataattgagctgcagcgctgtgctgcttgttccactaaaatctgatgtgtatttgctcattaatttttatttttattttttgagatggagtattcctctgttgcccgggctggaatgcagwggtgagatcatggctcaatacaacctcctctttctgggctcaaggaatcctcctgcctcagcctcctgagtagctgggactacaggtgcatgccaccatacctggctactttttgtgttttttgtagagaaggggtttcgctatgttgcccaggctggt

SEQ ID NO: 919718 - DNA, 798 bp, Homo sapiens
agaactccctttcttgatcagtcacactggtgacagatttctgtgatccttcttagggaaacatttgagtttgcctgcctaccctgccaggctccctaagctgctctagttattcttgttgccagtccaggtttacctcctagcacttcacagtctaggtcctaattttctagtgctgattcaaagtcaaagtgagtacctagaagagcgggcacatctagtgcaagactatcctcaacaaaactgtaacagggaatctatctgtgttcagtgttgctcccctgaacaccrtgctcttcactcagccttcacacccctcacatggtattctatttaaaaaaataataataatgtgaatttagagatggggtttagctatgttgcccaggctagagtgctgaggttattcacaggtacaatcatcctgcactacagcctcgaactcctagactcaagcaatcctcctgctacttagtctcctaagtagctgggattacaggcatctgctacagtattctttttttttttttttttttttttttttttttttttttttgagacagaatctcactctgttgcccaagctggagtgcagtggcatgatcttggctcactgcaaactctgcctcctggattcaagtgattctcctgtctcagcctcccgagtagctgggactacaggcgcgcaccaccacgcccagctaatttttgtatttttagtagagactgggtttcaccatgttggccaggatggtctccatctcttgacctcatgatcggcctaccttggcctcccaa

SEQ ID NO: 919719 - DNA, 576 bp, Homo sapiens
tttaagttgcatttctccaatgactgatgacatcgagcttacttgttcgcctttttataacctgggttgttcattttcttgtgttttgaaagttctttatttctatttataagacttctaccaaatatgtgatttgcaaatattttcttccagttcgtggcatgtcttttccctctcttaagagcatttttcagagaacagaagtttttcattttgataaagacaaatttattcacactttcttttatgcatcacgctgtgtccagaattagtgggttcttggtctcactgacttcaagaatgaagccgcggacgctcgyggtgagcgttacagttcttaaagatggtgtgttcagggtttgttccttcagatgtgtctggagtttcttccttctggtgggttcatggtcttgctggcctcaggagtgaagctgcagaccttctcggtgagagttacagctcttaaaggtggcgcatctggagttgttcgttcctcccgtccagagttgtttatccctcccggtgcattcatggtctcgctggcttcaggagtgaagctgcagacctttgcggtga

SEQ ID NO: 919720 - DNA, 494 bp, Homo sapiens
cagctgggtggggagcaatttattcctcgccgtcccatcccagcccatctttggttactccaccctacccctcccatccctcctcctcctcctcctcttcctcctccttctctaacaacgcccgcactaccttctgattctccacctcctcttcatcctccatcccccttttacttctctctcccccgtctctcctccctcccgcctcctttctccctctccccctccctctctcctctgaataagcaagcttttgcctctaaaagtcacaagtaatcctcgtgtgtgacagaragagagagagagagagagagagagagagagagagagagaaacgagctggcggagaggagcagaaggcaggaggggaaatctggcacaacggctgggagaggaaacttgatgcttctgggccaccatttgccagggcctcgctcgaggtaagcacactggggtcccgcggagtccgtacctgtcagggtccagcccccgcc

SEQ ID NO: 919721 - DNA, 636 bp, Homo sapiens
atcacctcctgaagtttcctcccactccccttactattattgtgtgtgtgtgtgtgtgtgtgtgtagagtaggaatacttaagatctatccttttagcaaactttaagtattcaatacagtattgctagctgtaagcactgtgctatataacagatctccagaaggttttttgcataacaaactttgtatctttagactgtgacctccctgtttccctgccctttattaaccactattctctgcttccatgagtttgactgttttagatgacgtcatttagtatttgtctgtctctggctgattgcacttagcataatttcttccaggtttatctatttagtcacaaagagcaarattctcttcttcctctttttattttttaaatttctatctgtttacacttactctttggtgagccattggtctcacactttcctttaattcatcagacatggttcttttagtgctttgaacatccttatggcacttggtcaccttagtagttggctgatgactggacagatgtccttaaatgccttgcggtctctgccaaggaagcctatgtgtgttggggtatgcggtcagcactccgacatgcaggtcatgattctgtcttcaccttcccttcctgcttg

SEQ ID NO: 919722 - DNA, 621 bp, Homo sapiens
cctcataaactctttcctgaacccattctcccctcttcccttataaagaatgaaataaggccaggcctggtgactcacacttgtaattctaacactttgagaagctaaggtgggaggatgtcttgaagccagaagctcaagaccagcctggggaacatggcaagaccctgtctctacaaaaacatttaaaaattaggccgggcatggtggctcacacctgtaatcccagcactttgagaggccgaggtgggtggatcacaaggtcaggagatcgaggccatcctggctaatatggtgaaaccccatctctactgaaaaaaaaaaatacraaaaattagctgggcctgtagtcccagctactcaggaggctgagacaggagaaccacttgaacctgggaggcggaggttgcagtgagctgagatttcaccactgcactccagcctggacgacagagagagactccatctcaaaaaaaaaaattaaaaattagccaggtgtggtgatgtgcacctgtagtcccagctattcaggaggctgaggcaggaagatcacttgagcccaggagttccaggctgcagtgagctgtaattgtgccactgcactccagcctggatgacaga

SEQ ID NO: 919723 - DNA, 800 bp, Homo sapiens
aaatcttatatatagacttctacttttggtcaagatggaatacctgtcactctatcctcctgcctgaagcaactaaaaaactgaacaacgtaggtaaaacaatgtcacttaagacacgggccatcaggcactgaagaacagtaactgctgaccraacatgaaacaaaagaggtaagccctgccgctgccccagaatttatttcctgaacaacatttctaggccataatgcaagggaggggaaacccagaccagagtccaccaatttttccagattttaagagacagaggcaagagtcagggaggctaaagggctacagttcaatctttcataaactctcccaagaatagacaaagaggaaacaacttccagctctttccacgaggacatttttacattaacaccaaaatctgacaagggtatgaaaagaaaggaaaattatacaccacctctctcttgaatacagatgctaaaattctaaatgaaatattgcagccgggcgcagtggctcactcctgtaatctcagcactttaggaggctgaggtgggcggatcacgaggtcaggagatcgagaccatccgggcgaacgcggtgaaatcctgtctctactaaaaacacaaaaaaattagctgggcgtggtggcaggagcctgtagtcccagctactcgggaggctgaggcaggagaatggtgtgaacccaggaggcggagcttgcagtgagccaagatcacgccactgcactccagcctgggcaacagagcgagactctgtctcaaatgaaaaaaaaaaaaaagaaagaa

SEQ ID NO: 919724 - DNA, 637 bp, Homo sapiens
catataaggacttcctaacttaggaatagcttaaggtaagaaagttaaagtcaaccaactattttggacccaaaacacttttttttccccaaagaaatagtgctataatggtggttatattccctgtctagtacacattaaggaatttacccacagygtagcacaactacaataacaaatacaaatatgatgggttacaatacatcatccatagtgcctgtgactgaccaaaacttggaaagaggttgcttacatctcagaaggactactggtgttgtttctcaaaagaggcaaggatactgtgggaaggcagataggcaagtgccccttacttaaaatggatctcaggactctattgcccccacccccgccaccattatgaagacagtgcaagcttttcccttcttattatgggattggagaaggtgggattaagaggataacctaggatataaagtgatacagtagcaggaatttggaaaatgtgaccttgtggccaactagaagtacagcagtcagataaaccacaaacactacagcagcaataacaataaaatccacttcaggcaatgtgaatagcactaacaagcagttactactcgaaacaactatactgagaagggagtagaattcccaa

SEQ ID NO: 919725 - DNA, 570 bp, Homo sapiens
tggcctattgtgggacttcaccttgtgatcgtgtgagtcaattctcctaataaactccccttcttatattcatatatcctattagttctgtccctttagagaactctgactaatacaattcccttgaaaagtggcacaagacaaggatgccctctctcactacttgtawtcaacatagtataggaagttctggccagggaaatcaggcaagagaaaaaaagtaaagggcatccaaataggaagagaggaagtcaaattatccctgtttgcagatgacatgatcctgtatctagaaaaccccactgcctcagcccaaaagcttcttgagctgataagcaacttcagcaaagtctcaggatacaaaatcaatgtgcaaaaattgctagcactcctatacaccaacaaaactcaagcagagagccaaattacaaactaactcccattcacaattgccacaaaaagaattaagtacctaggaatacagtggaggtgaaagatctcgataaggagaactacaaaccactgcccaaaaatcagagatgacacaaacaaatggaaaaacactcaatg

SEQ ID NO: 919726 - DNA, 570 bp, Homo sapiens
tggcctattgtgggacttcaccttgtgatcgtgtgagtcaattctcctaataaactccccttcttatattcatatatcctattagttctgtccctttagagaactctgactaatacaattcccttgaaaagtggcacaagacaaggatgccctctctcactacttgtattcaacatagtataggaagttctggccagggaaatcaggcaagagaaaaaaagtaaagggcatccaaataggaagagaggaagtcaaattatccctgtttgcagatgacatgatcctgtatctagaaaaccccactgcctcagcccaaaagcttcttgagctgataagcaacttcagcaaagtctcaggatacaaaatcaatgtgcaaaaattgctagcactcctatacaccaacaaaactcaagcagagagccaaattacaaacwaactcccattcacaattgccacaaaaagaattaagtacctaggaatacagtggaggtgaaagatctcgataaggagaactacaaaccactgcccaaaaatcagagatgacacaaacaaatggaaaaacactcaatg

SEQ ID NO: 919727 - DNA, 623 bp, Homo sapiens
ttcagtatggtattggctatgggtttatcataaatagctcttattatttagagatatgttccatcaatacctagtttattgaaagtttttagcatgaagggatgttgaattttatcaaaggccttttctgcatctattgtgataatcatgtggtctttgtctttatagtaaaatttgtttatattggttctatttatgcgaagaattatgtttgttgatttgtgtatgttgaaccagccttgcatcccagggatgaagctgacttgattgtggtggataagctttttgatgtgtgctgctggattyggtttgccagtattttattgaggattttcacactgatgttcatcagggatattagcctaaaattttccttgttatgtctctgccaggttttggtatcaggatgatgccatttagggaggattccctctttttctattgtttggaataatttcagaaggaatggtaccagctcctctttgtacctctggtagaattcggctatgaatctgtctggtcctgagctttttgtggttggtaggctgttaattactgcctcaatttcagaactcattgttggtctattcagggattcgacctcttcctggtttagttttggg

SEQ ID NO: 919728 - DNA, 542 bp, Homo sapiens
acacattctacagctatatagaaatattttatttctttatatccttattctggaaccttttttctattacaaaatatatatatttttttaacttttcaaacttttttttttccaagacagagtattactcttttgcccagcctagagtacagtggcttgatcttggctcactgcaacctccamctactgggttcaagcaattctcctgcctcagcctcccatgtagctgggattacaggtgtgcaccaccacacccagctaatttttgtgtttttggtagagatgaggtttcaccatgttggccaggctggtcttgaactcctgacctcaagtgatcctccagccttggcctcccagagtgctgggattacaggcatgagccactgtgcctggcctcaaacttttttattaaaaactaagacacaaacacacacattagcctaggcatacacagggtcaggatcatcaatatcactgtcttcacacctccaaatcttgtcccactggaaggtcttcaggggcaataacacatacacagctgt

SEQ ID NO: 919729 - DNA, 542 bp, Homo sapiens
acacattctacagctatatagaaatattttatttctttatatccttattctggaaccttttttctattacaaaatatatatatttttttaacttttcaaacttttttttttccaagacagagtattactcttttgcccagcctagagtacagtggcttgatcttggctcactgcaacctccacctactgggttcaagcaattctcctgcctcagcctcccatgtagctgggattacaggtgtgcaccaccacacccagctaatttttgtgtttttggtagagatgaggtttcaccatgttggccaggctggtcttgaactcctgacctcaagtgatcctccagccttggcctcccagagtgctgggattacaggcatgagccactgtgyctggcctcaaacttttttattaaaaactaagacacaaacacacacattagcctaggcatacacagggtcaggatcatcaatatcactgtcttcacacctccaaatcttgtcccactggaaggtcttcaggggcaataacacatacacagctgt

SEQ ID NO: 919730 - DNA, 632 bp, Homo sapiens
caagttcacctttaaaaactgttgctaccgactcccatatgtactcaaagatagatgcctaagaattttcacatgcacgttatttgcagtaataaacaaccaaaaaccatttaaatgttaatgaatagactaacgatagtgtagaatattgacaggatggaaaactatgcagccattaaaaggaacaaggcaagtcagtgtgtgctgatatggaacaatctccaagatatattgataattgtaaaaagcaagatgtcaaaaagccaaaggaaaacctatactgacctgtgtttgcctatgcrtagactgtctctggttagattcagaagacactattaacaattgttcactggccaaggggattggggcaggagagactttacacggggaacctttggatactgtttcactttataattaaaagataattcgagaagatatatcaaggcctatttcttggaggccagagcgctcctaacccctgagcctgcctcagcctctggctcccacccccgcagccgccccgtcgcctctgagcaggacggggccccactcacccttcccggccgcagacagagcgcgggcgcccgggggagccctgcagcgggcagctccgcagcaggaggccccgc

SEQ ID NO: 919731 - DNA, 580 bp, Homo sapiens
gttctaactctctaatcacatggttggtttttctggctaccagcccccatcctgaagctacctaggactgctctcctctccacaagagtcatctcattaacattcaaaaaatagtaaatctcaaatgttttatgaattctgtgtcaggaactgggaataaagaccaaatatttaatttttattataccacagcatctttataaaaaataaattgaccatagatgtatgggttgatttctagactctcaattctgttccttcatctgtgtctattcttatgcgactactatactgtcttttatttatttatttatttttgagacagagtcttactctgctgcccagggaatggcacgatcttgtctgactgcaacctccacctcccgggttcaagcrattctcttgcttcagcctcccaaatagctgggattacaagcacgctccaccatacctggataatttttgtatttttagtagagatggggttttcccattttggccaggctggtctcaaactcctgacctcaagtgatccacccacctcgaccccccaaagtgctgggatttcaggtatcagcca

SEQ ID NO: 919732 - DNA, 580 bp, Homo sapiens
gttctaactctctaatcacatggttggtttttctggctaccagcccccatcctgaagctacctaggactgctctcctctccacaagagtcatctcattaacattcaaaaaatagtaaatctcaaatgttttatgaattctgtgtcaggaactgggaataaagaccaaatatttaatttttattataccacagcatctttataaaaaataaattgaccatagatgtatgggttgatttctagactctcaattctgttccttcatctgtgtctattcttatgcgactactatactgtcttttatttatttatttatttttgagacagagtcttactctgctgcccagggaatggcacgatcttgtctgactgcaacctccacctcccgggttcaagcaattctcttgcttcagcctcccraatagctgggattacaagcacgctccaccatacctggataatttttgtatttttagtagagatggggttttcccattttggccaggctggtctcaaactcctgacctcaagtgatccacccacctcgaccccccaaagtgctgggatttcaggtatcagcca

SEQ ID NO: 919733 - DNA, 776 bp, Homo sapiens
tatgaaaaagtgatcctaaattttcctcctgctctaaaatttcatgacttcatgatattaatgaacttgtcggtctaacaatagctctttttcatttcttattttaggcatgagtttaaaatgaatgctctgaattatagaggattgttatactggcttccatgattccattgcctacaaagttcttttgtaatttgttccttagctttatcattgtaacttaaaaagctcatagaggagcccatagaaatacttcatatccctgacagcatccattaaaaatagttacaggccgggcgcagtggctgacgtctataatcccagcactttgggaggccaaggtgggcggatcacgacgtcaggagatcgagaccatcctgactaacacggtgaaaccccgtctctactaaaaatacaaaaaattagccgggcgcggtggcaggcgcctgtagtcccagctactgggaagcctgaagcaggagaatggsgtgaacccgggaggcggagcttgcagcgagccgagatggcgccactgcactccagcctgggcgacagagcaagagtctgtctcaaaaaaaaaaaaaaaaaagttacaaagaatcagtccatcagatctaggaaaagcttgcaccatagcttgcatttagcatcacctatacaattctgacctgaagtacagcagtgctctgagtttgggtgccaatagcatggctgaatgtgtcagtcttcaatgctgcacttttttttactgggtacaagtgagacaatgacaagta

SEQ ID NO: 919734 - DNA, 657 bp, Homo sapiens
acctctcaattttaccaaagctttgattggaatgtcatattttcagataccaccagactgttttcagggtttgaagttcacttttatggatccaattaaaaaaaataaaatttgaaaaactggcctgacaccttgtccacagcctttcctttcaggatttttagaattgtggtaagtaggctaagcatggtggctcacgcctgtaatccagcactttgggagactgaggcgggcggatcacaagttcaggagattgagaccatcctggctaatayggtgaaaccccgtctctactgaaaatacaaaaaaatagctggatgtggaggcagattcctgtaatcccagctactcaggaggctaaggcagggaaatcacttgaacctgggaggcggagtttgcagtgagctgagattgcatcactgccctccagccggtgtgacagagtgagacgccatctcaacaaaacaaaaaaaaaacaaaaaagaattgtggtaagtaaagaatgtcactttctgacaggccaaggaaactcaagatattttggggacctcataaatagagtagattaagcaatttgtacaggtattaccgacacaatttgagggtgagtcaaatctttgcctggcttcataagactccagaggcttttaaaagtct

SEQ ID NO: 919735 - DNA, 762 bp, Homo sapiens
actaacttacttttgattttacaggctcataggtggaagggacttgccttgtctcagatgagactttggactgtggacttctgagttaatgatgaaatgacttaagattttgggggactgttgggaacacatgactagttttgaaatgtgaggrcatgagatttgggaggtaccaggggtggaatgatacagtttggctctgtcctcacccaaatttcatcttgaattcccatgtgttgttggaggaacctggtgggaggtaattgaatcatgagggcaagtcttccccatgctattctcatgaaagtgagtaagtctcatgagatctcatagtttttaaaaaaaggctgccccccacacaagctatctctcattttttgcctgccaccattcatgtaagacgcgacttgcttctctttgccttctgccatgattgtaagacttccccagccacatggaactataagttcaattaagcctctttcttttgtaaattgctcagtttcacatatgtctttatcagcagcatgaaaattgactaatacaccctgagagctggttattaaaagagcttggcacctcctcctgtctctcttgcttcctctcttgctatgtgatctctgtacccactaggttccctttgccttcgaccatgaacaaaagcagcctgaggttctcatcagaagccaagaagtttctggtgctgtgcttcttgtacagcctgcctaaccatgaggtgaatagatttattttctttataaa

SEQ ID NO: 919736 - DNA, 769 bp, Homo sapiens
gtctaggaagtaactaacttacttttgattttacaggctcataggtggaagggacttgccttgtctcagatgagactttggactgtggacttctgagttaatgatgaaatgacttaagattttgggggactgttgggaacacatgactagttttgaaatgtgagggcatgagatttgggaggtaccaggggtggaatgatacagtttggctctgtcctcacccaaatttcatcttgaattcccatgtgttgttggaggaacctggtgggaggtaattgaatcatgagggcaagtcttccccatgctattctcatgaaagtgagtaagtctcatgagatctcatagtttttaaaaaaaggctgycccccacacaagctatctctcattttttgcctgccaccattcatgtaagacgcgacttgcttctctttgccttctgccatgattgtaagacttccccagccacatggaactataagttcaattaagcctctttcttttgtaaattgctcagtttcacatatgtctttatcagcagcatgaaaattgactaatacaccctgagagctggttattaaaagagcttggcacctcctcctgtctctcttgcttcctctcttgctatgtgatctctgtacccactaggttccctttgccttcgaccatgaacaaaagcagcctgaggttctcatcagaagccaagaagtttctggtgctgtgcttcttgtacagcctgcctaaccatgaggtgaatagatttattttcttt

SEQ ID NO: 919737 - DNA, 762 bp, Homo sapiens
actaacttacttttgattttacaggctcataggtggaagggacttgccttgtctcagatgagactttggactgtggacttctgagttaatgatgaaatgacttaagattttgggggactgttgggaacacatgactagttttgaaatgtgagggcatgagatttgggaggtaccaggggtggaatgatacagtttggctctgtcctcacccaaatttcatcttgaattcccatgtgttgttggaggaacctggtgggaggtaattgaatcatgagggcaagtcttccccatgctattctcatgaaagtgagtaagtctcatgagatctcatagtttttaaaaaaaggctgccccccacacaagctatctctcattttttgcctgccaccattcatgtaagaygcgacttgcttctctttgccttctgccatgattgtaagacttccccagccacatggaactataagttcaattaagcctctttcttttgtaaattgctcagtttcacatatgtctttatcagcagcatgaaaattgactaatacaccctgagagctggttattaaaagagcttggcacctcctcctgtctctcttgcttcctctcttgctatgtgatctctgtacccactaggttccctttgccttcgaccatgaacaaaagcagcctgaggttctcatcagaagccaagaagtttctggtgctgtgcttcttgtacagcctgcctaaccatgaggtgaatagatttattttctttataaa

SEQ ID NO: 919738 - DNA, 762 bp, Homo sapiens
actaacttacttttgattttacaggctcataggtggaagggacttgccttgtctcagatgagactttggactgtggacttctgagttaatgatgaaatgacttaagattttgggggactgttgggaacacatgactagttttgaaatgtgagggcatgagatttgggaggtaccaggggtggaatgatacagtttggctctgtcctcacccaaatttcatcttgaattcccatgtgttgttggaggaacctggtgggaggtaattgaatcatgagggcaagtcttccccatgctattctcatgaaagtgagtaagtctcatgagatctcatagtttttaaaaaaaggctgccccccacacaagctatctctcattttttgcctgccaccattcatgtaagacgcgacttgcttctctttgccttctgccatgattgtaagacttccccagccacatggaactataagttcaattaagcctctttcttttgtaaattgctcagtttcacatatgtctttatcagcagcatgaaaattgactaatacaccctgagagctggttattaaaagagcttggcacctcctccygtctctcttgcttcctctcttgctatgtgatctctgtacccactaggttccctttgccttcgaccatgaacaaaagcagcctgaggttctcatcagaagccaagaagtttctggtgctgtgcttcttgtacagcctgcctaaccatgaggtgaatagatttattttctttataaa

SEQ ID NO: 919739 - DNA, 762 bp, Homo sapiens
actaacttacttttgattttacaggctcataggtggaagggacttgccttgtctcagatgagactttggactgtggacttctgagttaatgatgaaatgacttaagattttgggggactgttgggaacacatgactagttttgaaatgtgagggcatgagatttgggaggtaccaggggtggaatgatacagtttggctctgtcctcacccaaatttcatcttgaattcccatgtgttgttggaggaacctggtgggaggtaattgaatcatgagggcaagtcttccccatgctattctcatgaaagtgagtaagtctcatgagatctcatagtttttaaaaaaaggctgccccccacacaagctatctctcattttttgcctgccaccattcatgtaagacgcgacttgcttctctttgccttctgccatgattgtaagacttccccagccacatggaactataagttcaattaagcctctttcttttgtaaattgctcagtttcacatatgtctttatcagcagcatgaaaattgactaatacaccctgagagctggttattaaaagagcttggcacctcctcctgtctctcttgcttcctctcttgctatgtgatctctrtacccactaggttccctttgccttcgaccatgaacaaaagcagcctgaggttctcatcagaagccaagaagtttctggtgctgtgcttcttgtacagcctgcctaaccatgaggtgaatagatttattttctttataaa

SEQ ID NO: 919740 - DNA, 545 bp, Homo sapiens
gatctctgctggctgcaagctccgcctcccaggttcacgccattctgtctcagccgccctagtagctgggactacaggtgcctgccaccacgtccagctaattttttttgtatttttagtagagacggggtttcaccgtgttagccaggatggtctcgatctcctgacctcgtgatcctcccacctcggcctcccaaagtgctgggattacaggcctgagccaccgcacccggcctgtactaaaagtctactaatgttaattaaaccttataaacaaaaacacaacaaaaataaaaactttgctcttcaatgatttcatctkatttttaaaacataataaaattggattgaacaattgttatacattcagactagttgcttaatttggtagctttaatttgaaaatatatgcaaaattcaataggacccaggtaaaatggaacatttatataaactgacaagcctttacatttagtaattctaattattttattttattgtaaaatataaacggacaagtactagctcaagttgtaacactgctt

SEQ ID NO: 919741 - DNA, 598 bp, Homo sapiens
tgatttcccctcgaaagtgtccttcccctcctgctgggtgctgggtgaggccagctcacggtggagtgctggggaaggagtagctcaccctcacaaccgcccatgcaggagcccctctctgtcctccccctggaaaagggaacttggcattctgtgtagcactgctggcctcaggaaacctggtgggctgcatgcccgcatggcctgagaggacactgccagcactcagcagaagggtcacgttggccagctcactccctgccagcccctgaagtcgaagctgcctgaaactgcggtgctggtttgccactgccargagatgccagcagcctaatttacatggctgtccagggtacccccagccatgcgacagccaggaaaactgcaccccatcttagaaaactcaggaacctgagggaggaagtccaaactgaaaaacctcaattagccaggcgtggtggcttgtgtctgtaatcctagctactcagaggctgaggcaggaaaattgcttgaactcgggagatggaggttgcagtgagccgaatcatgacactgcactccagcctgggcgacagagcgagactccatctcaaaaaaa

SEQ ID NO: 919742 - DNA, 521 bp, Homo sapiens
gaattgtgctgcaataaatgtgcagttgtcttttcgatacagtgacttcttttcctttgggtagatagtagtgggattgctggatcaaacggtagatctacttgtagttctttgagaaatctccatagtgttttccacagaggttgtactaatttacattcccaccagcagtgtataagtgttcccttttcatcacatccatgcattatctattgcttttwgactttttagtaataaccattgtagctggggtaaggtggtatctcattgtggctttaatttgcatttccctaatgaatattttttcatgtttggccatttgtttatcttctttagagaaatgtctgtcatttgcccactttttaatgggattttttttcttgttgatttgtttgagttccttgtagattctggatattagtcctttgtcagatacatggtttgcaaatattttctcccgttttgtgggttgtctgtttactctgatgatgatttctttgactgtgcggatgcttcttaat

SEQ ID NO: 919743 - DNA, 693 bp, Homo sapiens
ctggggaggacttcagtgatcatggagttcatcccgcggccaagttgtcaagtgaggaaacagaggcccagagaggggtagcaacttttccaaggccacactgcagctcaggttcagagcatggggaggaccctgccccggccctggacttaggggtcagatgcttttccaggaagcagggattgaggaagcactggcattgataggcaactcaagatttttcctttcttttcccctcatttcccctccatgaaaacctgagtmttcagcatttgatgggaccccaggagctggtggctcttctgcttccccacgctgctccttctcgcttgctcctctgtctggccaccctggtcctcacactaacccatattcaagccctcgcagccacacgcagtgatccttggggtgcccacactcaaccaggccatatacaaagtgcatctttgtgctatgcttgtgtgtccacagggccacacacaggacacaccccacacacaggcacctcaggcatagcgtgaacacgcacaaccccgcacacacacacacacacacacagcccccccccttcacccctcaccattcccaccccaggcagttccctgcctctcctcagcacagtgggaacaagggatgctgactctagatgagctctagggaaggggttccctaggaatagaccactgcagacca

SEQ ID NO: 919744 - DNA, 693 bp, Homo sapiens
ctggggaggacttcagtgatcatggagttcatcccgcggccaagttgtcaagtgaggaaacagaggcccagagaggggtagcaacttttccaaggccacactgcagctcaggttcagagcatggggaggaccctgccccggccctggacttaggggtcagatgcttttccaggaagcagggattgaggaagcactggcattgataggcaactcaagatttttcctttcttttcccctcatttcccctccatgaaaacctgagtcttcagcatttgatgggaccccaggmgctggtggctcttctgcttccccacgctgctccttctcgcttgctcctctgtctggccaccctggtcctcacactaacccatattcaagccctcgcagccacacgcagtgatccttggggtgcccacactcaaccaggccatatacaaagtgcatctttgtgctatgcttgtgtgtccacagggccacacacaggacacaccccacacacaggcacctcaggcatagcgtgaacacgcacaaccccgcacacacacacacacacacacagcccccccccttcacccctcaccattcccaccccaggcagttccctgcctctcctcagcacagtgggaacaagggatgctgactctagatgagctctagggaaggggttccctaggaatagaccactgcagacca

SEQ ID NO: 919745 - DNA, 693 bp, Homo sapiens
ctggggaggacttcagtgatcatggagttcatcccgcggccaagttgtcaagtgaggaaacagaggcccagagaggggtagcaacttttccaaggccacactgcagctcaggttcagagcatggggaggaccctgccccggccctggacttaggggtcagatgcttttccaggaagcagggattgaggaagcactggcattgataggcaactcaagatttttcctttcttttcccctcatttcccctccatgaaaacctgagtcttcagcatttgatgggaccccaggagctggtggctcttctgcttccccacgctgctccttctcgcttgctcctctgtctggccaccctggtcctcacactaacccatattmaagccctcgcagccacacgcagtgatccttggggtgcccacactcaaccaggccatatacaaagtgcatctttgtgctatgcttgtgtgtccacagggccacacacaggacacaccccacacacaggcacctcaggcatagcgtgaacacgcacaaccccgcacacacacacacacacacacagcccccccccttcacccctcaccattcccaccccaggcagttccctgcctctcctcagcacagtgggaacaagggatgctgactctagatgagctctagggaaggggttccctaggaatagaccactgcagacca

SEQ ID NO: 919746 - DNA, 418 bp, Homo sapiens
ctaaagtgggaggatcaattgcttgaacccaggagttgaaggctgcagtgagttatgattgcaaccactgcactccagcctgggtgacagagcaagacgttgtctcaaagaaagaaggaagaaagaaaaaaagaaggaaggaaggaaggaagtgttagatatgrgttctaaatttattttcaaagaatcaatatgtcagtatgttcaattctttaccttctacttttaaacttaacttccttataaagcaaccttttttgattacctgctccaccctgactcatttcaatcacctgctccaccctgactcattctgattacctgctctgtcataaccatttttcctgccaaagcactcaccccgttattagccaatcagaattagtttagcctgtgcggtctaactctaccaataggg

SEQ ID NO: 919747 - DNA, 418 bp, Homo sapiens
ctaaagtgggaggatcaattgcttgaacccaggagttgaaggctgcagtgagttatgattgcaaccactgcactccagcctgggtgacagagcaagacgttgtctcaaagaaagaaggaagaaagaaaaaaagaaggaaggaaggaaggaagtgttagatatgagttctaaatttattttcaaagaatcaatatgtcagtatgttcaattctttaccttctacttttaaacttaacttccttataragcaaccttttttgattacctgctccaccctgactcatttcaatcacctgctccaccctgactcattctgattacctgctctgtcataaccatttttcctgccaaagcactcaccccgttattagccaatcagaattagtttagcctgtgcggtctaactctaccaataggg

SEQ ID NO: 919748 - DNA, 763 bp, Homo sapiens
tcctgagtagctgggattacaggcacatgccaccacacccggctaatcttttattttagtagacacggggtttcaccatattggccaggctggttttgaactcctgacctcaggtgatccacctgtctcggcctcccaaagtactgggattacaagcatgagccactgcacccggcttttttttttttttttttttttttttgagacagagtctcactctgtcgcccaggctagagtgctggagtgcaatggcgtgatctcagctcactgcaacctccacctcctgggttcaaccaattctcatgcctcagcctccccagtagctgggattacagacgcctgccatcatgcccagctaatttttgtatttttagtagagatggggttttgttatgttggtcaggctggtctcaaactcctgacctcaagtgatctgcccacctcggcctcccaaaatgctgggattaggcgtgacctacggtgcccggcctaattccatccctcttgaatgtgagctggccttagtgacttgcttctgatgagtagaatgtggctgaagggatactacacracactccaggctagattagaaaaggccatgccacttctgtctggctcccttggaactcaacaggcgtgctgcaaagaagcccaggctataaggcaaggccacatacaggtgatctggttgactgccctactgagatcccaggtgacagttaatctcaagtccagatatgtgcaagcagaagttttcaagatg

SEQ ID NO: 919749 - DNA, 587 bp, Homo sapiens
atatttttacaacttttctcagtcttttgcagctattatatatacccccaattccactcaatttaatcaagactttccaaaatattcgacttggtgttcataggtgcaacattctattctacccattgatttaataacattttattaacttaagtaactacctaaagaatacaactggcaagtcaggtttggaacaaatgtaactgcctcctggccagcattcatctcaggggacagaagttctatcatacaccaggagcaaagtttgctttgataccagtcaatatgttttacagagtgaatagagagcttccrttaatatagtgagtctgtttctgtacctaattattgtaaaattggtatgttaggtaggactcttgtttcagcgagtttactccccctgcatggttctggcacactcagacccattctgtgaagccaggatttccccatctcttagataaaatcacaagcagcttccataattttctctcattattcagaaacaataaaaagttctaattactttatctcaaaatactgtcactgtggtagtcaatatgtccagtttactgtaataataaaaa

SEQ ID NO: 919750 - DNA, 621 bp, Homo sapiens
gatatttgtgagtggttgaggcctatggtgaaaaaggaaatatcttcacgtaaaaactagatagaagctttttgagaaacttctttgtgatgtttgcattcatctcacagaattgaacctgtcttttcatagagcagtttggaaacactctttttgtacaatctcaaatrgatatttctgcacgtcttgaggcctatggtgaaaaagaaatatcttcacaaaaactagacagaaactttcagagaaacttcactgtgatgtgtgctttattatcacacagacgaacctttcttttgattgagcagtttggaaacagtctttttgaagtttatgcagagagatatttgtgagcagtttgatgtctatggtgtaaaaggaaatatcttcacataaaaattagacagaagttttctgataaacttctttgtgatgtgtgcattcatatcacagaggtgaacctttgttttgattgagcagtttggaaacaatctttttctacactctgcaaagggatatttctgagcaatttgaggcctatggtgaaaaagaagtattatcacataaaaactagaaagaagcattctgagaaacttttttgtgatgtgtgcattcatcgaacag

SEQ ID NO: 919751 - DNA, 592 bp, Homo sapiens
cttaagacgactgagctcctggaacgaggggcggcagccatcactgtaactccagcctgctgttttcccctggtggtgctggggaaactggatggtgtggagtcaggaaggattccccacagagcagcacagtggctgtggcagattgtggccagactgactctttaggctggacccagaccaggcstccctgtgggaatttcagcaactctagccaggggcttagggacagaactgtgatctccttgagatggagcccctagagggaggggcggacgtgatctccacagatcagagaatttagtctttccccctgctggctttgaggaatcaaggcagtccctgacgagtgggatttcctggtgccaccaagtggcagccagagtgctttgttaagcaggtgtctgatcctgtgccttctgactgggtgagacccccaaataggggtcaccagacaccttatgcaggagtgtttccgttggcatcaggtcggtgcccctccgggacagaactcccagaggaagaagcaggcagccatctttgctgttctgcagctcccactggtgacaccaccagatgcgagagggaccca

SEQ ID NO: 919752 - DNA, 597 bp, Homo sapiens
aatcccagcactttgggaggctgaggcaggtggatcacctgaggtcaggagtttgagaccagcccggccaacatgatgaacgaaaccccatctctacaaaaatacaaaaattagccaggtgtggtggcacgcacctgtaatcccagctactagaaagccagaggcaagagaatcacttgaactcgagaggtagaggttgaggttgcagtgagccgagayagtgtcactgcactccagcctgggcgacacaatgagactccatctcaaaaaacaaacaaacaaaaaagtttgttccttttcgttgctgaaaagtataccactgtatggaggtaccagagtttgtttatccagtcaacaattgaaaggcatttggattgtttccagttatggatcattatgaataagcttctataaacattcatgtacaggtttctgtgtgaatatctctagggtaaatagctaggagtgggactgctaaatcacatggaaactgtatgtttaatagcagccaccaaatggttttccaaagtggctgtaccattttgcacttccaccagtgattatgagttccagttgctccatatcatctccaggact

SEQ ID NO: 919753 - DNA, 739 bp, Homo sapiens
cctgggcaacatggtgaaactgtatctttacaaatgatacaaaaattagccaggtgtggtggcacgtgcctgtagtcccagctacttgggaggctgaggcaggaggattgcttgaacctgggaggtggaggctgcagtgagcccagatggtgccactgcactctagcctgggggacaaagtgagactctgtctcaaaaaaaataaaaaaawaaataaagaataaatgaattacagggatggcaaacaataccaagtactggtgagactgtggaatctcatatattgcttatgggagtgtaaattgggatgaccacactggaaaattgtttgacatttgctactaaagaatatatgtgggccaggtgccgtggctcatgcctgtaatcccaacactttgggtggccgaggtgggtggatcacttgaggtcaggagttaagaccagcctggccaacatggtgaaaccctgtctctactaaaaatacaaaaattagctgagcatggtggtggatacctgtaagcccaggtactcgggaggctgaggcaggagaatcacttgaacccggcaggcagagattgcagtgaaccaagatcatgccattgcactccagcctaggcaacaaaagtgtaactccatctcaaaaaaaaaagaaaatatgcatgcaacttatgatccagaaattccaactctaggtagatacacaacagaaatgcatacatctatttactataaaacagga

SEQ ID NO: 919754 - DNA, 757 bp, Homo sapiens
tttatcattgcctcaaaacttttatgacgtatctctgtgcattttaacattagaactctccagtaaataatatagaacaaagaagtctagtggaaacaactgtactttagaatcaaaaagacaaagttcaaacccagtactaaccatttattgggtatctttaggaggttatttttaattgtggtaggaacatttaacataagatctactctcttgacaaatttataactgtacagtttgttaattataggtacaatgttgtacagcagatttctggaacttatttgtcttgctcaactgaaacgttgtacccgtttgactagcaaytctccatttctccctccccctgcccctggcatccaactttccactttgattctatgtatctgactattttagacatttcatgtaagtggaatcatgcagtatatgtccttctatgacaagtttatttcacttagtataattttctagaggttcatccatgctatcagatattgtagaatttcctagttttttaagtctcagtaacatttcactttacttatacactacattttctttatccattcatccatcaataaacatttagctgttttcacatcttggctattatgaatagcacagcaatgaacatagagatgataatatctcttcaagacccagatttcagttcttttaggtggaaacccagtagtgagattgctgaatcatatgcagtcctatttttaatttttgagcaatcttcataccattt

SEQ ID NO: 919755 - DNA, 596 bp, Homo sapiens
gattctagttttcaaacttgacacatccagaatttttattttttaaagaacccggattcaagaagtataatgcccctattttcctactaatgttactctgggtaacaagtctgctagaattaccgttagaaatgagtgcaatagggccgggcgtggtggctcatgcctgtaatcccagcactttgggaggttgaggcaggcggatcacgtggtcaggagatcgagaccatcctggctaacacggtgaaaccccgtctctactaaaaatatgaaaaattagccaggcgtggtggtgggcgcctgtagtcccagctactggggaggctgaggcaggagaatggcgtgaacccgggaggtggagcttgcagtgagtggagatcgcgtcactgcactccagcctggacgacagagcgagactccgtctcaaaaaaaaaaaaaraaagaaagaaaagaaagaaatgaatgcaacaagaattgttctaactgccattcttttgtctgtattacacaaatgaatgtcaagcttcatctttcagtactctaggattccaatgttactactttattttgttttggagaggggggttggagggaaa

SEQ ID NO: 919756 - DNA, 571 bp, Homo sapiens
gggtgccatgtcctgaggctggacaggtgttggggggaccctgggcccagcccacaaaaccatttttcctccaaggcctctgagcctgtgacaggagggccagctgccaagatctctgacatgccctggagacattgtccccattgtcttggtcattaataatgcagctcctcattgctcattcaaatttctgcaccccagcaggcttgaatttttccycagaaaatgggtttttcttttctatcacatcatcaggctacaaattttccaaacttgtttgctgtgcttctgttttaaacataagttccaatttcaaaccatctctttgtgaatgcataatactgaatgatttcagaataatccaggtcatgtcttgaatgctttgctgcttagaaatgtcttccaccagataccctaaatcatctctctcaagttcaaagttccacagatctctagggcaggggcaaaatgccaccagtctctttgctaaagcatagcatgagttacctttataccagttcccaacaagtttctcatcttcatctgagaccacctcagcctggacttcatt

SEQ ID NO: 919757 - DNA, 571 bp, Homo sapiens
gggtgccatgtcctgaggctggacaggtgttggggggaccctgggcccagcccacaaaaccatttttcctccaaggcctctgagcctgtgacaggagggccagctgccaagatctctgacatgccctggagacattgtccccattgtcttggtcattaataatgcagctcctcattgctcattcaaatttctgcaccccagcaggcttgaatttttcctcagaaaatgggtttttcttttctatcacatcatcaggctacaaattttccaaacttgtttgctgtgcttctgttttaaacataagttccaatttcaaaccatctctttgtgaatgcataatactgaatgatttcagaataatccaggtcatgtcttgaatgctttgctgcttagaaatktcttccaccagataccctaaatcatctctctcaagttcaaagttccacagatctctagggcaggggcaaaatgccaccagtctctttgctaaagcatagcatgagttacctttataccagttcccaacaagtttctcatcttcatctgagaccacctcagcctggacttcatt

SEQ ID NO: 919758 - DNA, 605 bp, Homo sapiens
accagaatgcagtgagcagagctctgaggtggcacagggcagtgagacatggagggatcccctggccagacccgcaaaaccattttgccctcctagagctctgggcctgtgaggggccatatcgatgatctcagaaatgccttcaggactgtttcccctttttctcaatgattagcacctggtcccttctattcctgctcatctctagtgaccagtcactcagccacacccttgctgtgttctccctaacttgtttttctgttcttcacattgccaaactgtgaattttccaaatttttatacttggcttccattttaattattattctgcttgaaatcatctctttgctcccatatctcactgtaagcattcaagaacagccatgcagtatccrgaacactttgtggcttagatttttttttttttttggcccagctcaccactcttaggttccaccttccataatgtcctaggacatggacataatgcagccaagttctttcctgctttataacaaggatgacctttatttctatctgagaccttgttagaatggcctttcctgtacacatttctactagcattctggtcatgactacttaag

SEQ ID NO: 919759 - DNA, 593 bp, Homo sapiens
acaggcaagcgccaccacacccagctaattttgtatttagtagagacagggtttctccatgttggtcaggctggtcttgaactcccgacatcaggtgatccgccagccccggcctaccaaagtgctgggattacaggcgtgagccacagcgcccggcccctgtaatcagtattttttaaactaaatagatattttacayttttttgtgttgtcatgaaaacagatcaaccaacccaaattttaggtttaagtttacagtttggcctcgtctttgcatctttaaataaatgagcatcatagttctttcctggggtttctcccagcggttcactcccattcccttctgaaggccaggcagttctaagctcccagcaatggctactccccactcctgcgccacaaccctaagctggggttggcctgggtctgagagactctctcctgcccttctggggttctatcctcctttggagcctgccagatccagaaagttccctctggtcccctgagggcctgggtgctggggaaggaagcgttttgtcttgtggaagggctgggatttccagtctccctgttcactgagtgtggatagg

SEQ ID NO: 919760 - DNA, 593 bp, Homo sapiens
acaggcaagcgccaccacacccagctaattttgtatttagtagagacagggtttctccatgttggtcaggctggtcttgaactcccgacatcaggtgatccgccagccccggcctaccaaagtgctgggattacaggcgtgagccacagcgcccggcccctgtaatcagtattttttaaactaaatagatattttacatttttttgtgttgtcatgaaaacagatcaaccaacccaaattttaggtttaagtttacagtttggcctcgtctttgcatctttaaataaatgagcatcatagttctttcctggggtttctcccagcggttcactcccattcccttctgaaggccaggcagttctaagctcccagcaatggctactccccacycctgcgccacaaccctaagctggggttggcctgggtctgagagactctctcctgcccttctggggttctatcctcctttggagcctgccagatccagaaagttccctctggtcccctgagggcctgggtgctggggaaggaagcgttttgtcttgtggaagggctgggatttccagtctccctgttcactgagtgtggatagg

SEQ ID NO: 919761 - DNA, 631 bp, Homo sapiens
cactattggttgatgtgcgtctagtcattaacccacatacacatatcaaattcagtttctttttcctttttttttttttatttgggacaagaaactaaatgccttttcagtggttcatttgaatctaccatacttcaaaaattataaatctaccatcaccaaagaagtacagcgccatytgtattagttgcaaaattaggctatttacttttctgtatgtacttttgtgaggtttaaaacgttaggcttattacttctccttggtatgagagaaaaagcacaggcactggaaagaaaaaggaataggtgtgaaatcttgattttgtgaattaggatgaatgtgaccttatgtaaattacaaagttcctgaatctgtttgcgcagatgaaaatggaaatatactaactgcacctaccaaacacggctgactgaggattaaataaaacaatacatgtaaaggtagtgcctggtgcacagtagaaactccaggccgggcgcgatggctcacgcctgtaatcccagcactttgggaggccgaggcgggtggatcacgaggtcagaagttcgagaccagcacggccaagatggtgaaatcccgtctctactaaaaatacaaaaattagccgggtgt

SEQ ID NO: 919762 - DNA, 631 bp, Homo sapiens
cactattggttgatgtgcgtctagtcattaacccacatacacatatcaaattcagtttctttttcctttttttttttttatttgggacaagaaactaaatgccttttcagtggttcatttgaatctaccatacttcaaaaattataaatctaccatcaccaaagaagtacagcgccatttgtattagttgcaaaattaggctatttacttttctgtatgtacttttgtgaggtttaaaacgttaggcttattacttctccttggtatgagagaaaaagcacaggcactggaaagaaaaaggaataggtgtgaaatcttgattttgtgaattaggatgaatgtgaccttatgtaaattacaaagttcctgaatctgtttgcgcagatgaaaatggaaatatactaactgcacctaccaaacacggctgactgaggattaaataaaacaatacatgtaaaggtagtgcctggtgcacagtagaaactccargccgggcgcgatggctcacgcctgtaatcccagcactttgggaggccgaggcgggtggatcacgaggtcagaagttcgagaccagcacggccaagatggtgaaatcccgtctctactaaaaatacaaaaattagccgggtgt

SEQ ID NO: 919763 - DNA, 493 bp, Homo sapiens
atgatgggcttccctttgagggtaacctgacctttctctctggctgcacttaacactttttccttcatttcaaccttggtgaatctgaaaattttgtgtcttggggttgctcttctcgaggagtatctttgtggtgttcactgtatttcctgaatttgaatgttggctttgcttgctaggttggggaagttctcctggataatgccctgaagtgtgttttccaacttggttccattttccccatcactttcaggtccacaatcaaacgtagatttggtcttttcacatagtcccatatttcttggaggctttgttgatttctttttactcttttttctctaaacttctcttytcactttatttcattaatttgatcttcaatcactgataccctttcttccacttgatcaagttggctattgaagcttgtgcatgcatcacgaagttctcatgccatggttttcagctccatcaggtcatttaaggtcttctc

SEQ ID NO: 919764 - DNA, 729 bp, Homo sapiens
ttgagtaggattgatactagttctttaaatgtttggtagaatgtagcagtaaagccattgggttctaggctttttactggtacagcttcaatctcgttagttgttattggttggttcaggttttggatttcttcatggttcaatcttggtagattgtatgtgtctaggaatttgttcatttcttctatactttccaatgtattggcatatagttgctcatagtagccattaatgaccctttaaatttctatggtgtcaattgtaacatcactgttttcatctctgattttgagttttctttttttttttcttagtctggctaaatgttaattctgttttcaaaaaaccaattttttgttgatcttttgcactgttttgtattgcatttatttctgctctgatctttatttcctttcttctaattttggttttggtttgctcttgcttttctggttcttcaagatgcatcatcwggttatatatttgaggcttttcttcttgatataggcacttatagctataagtttctctcttagtactgctttctctgtatcccataggttttgatatattgtgtttccattatttgttttgagaaaattttcaatttctttatttcttcattgacccactggtcatttagaaacatattaatttccttgtgcttatataatttccaaaattcctcttgttttgatttctggttttggtgtgtgctttttcaatata

SEQ ID NO: 919765 - DNA, 453 bp, Homo sapiens
ggagtggatgagaaccccttttctggattgagtccatagatactttgttcctgaagctaggaaattccttgctagtaagtgactgccttttaaagtttttttgatattggacaatccccctggcatcccagaaccccatgagttcaacaccaaaggcattgaagtggtcamcttgcccccagtcacaaagtttgtaattcagcctaaagatcagggtcataaggacctttagggctcattacacttggtatttatggaaaggattttcaacactatgcaagagaatcttaatagaatatcatgcaagtctggaagggtgacatcattaaagatgtcattgttgttatagaaaaagctgtgaaagccatgaggcctgaaacagtgcattcctgctgaagaaaaccgtgtctatatgttgagcatgacttcacaggatttatgacacaaccaatc

SEQ ID NO: 919766 - DNA, 751 bp, Homo sapiens
catatgcattcacaaggagataatcagaaattggaacttatgtttaaaagggaagcagagcacaaaagtttgggaaatttgcagcctaatcatgtggtagaacagaaaaacccattttctggggagaactgtaaacttttggctgcagaaatttgcgtaactaaaatgaaactgaatgttaatagccaarataatggggaaaaagtctccagggcatttcagagatcttcacagcaatccctcctatcaaagacctggaggcctaggagagaaaaatggttttgtgggccatgctcagggtcctgctgctctgtgcagcccggggacatggtgccctgtgtcccagccactccagctccagccatggctaaaaagggccaagatacagcttgggccatgactgtagagggtgcaagccccaacccttggtgacttccatgtggtgttgtacctgagggtgcacagaagcccagagttgaggtttggaaacctctacctagatttcaggggaggtatggagatgcctggatgtccaggcagaagtctgctgcaggagttgagctctcatggagaaccactactaaggcaatgctgaggggaaatgttgggttggagcccccatatagagtccacactggggcactgactagtgaagctgtgagaaaagggtcaccatcctccaaccccagaatgatagatccattgacagcttgcaccatgtgcctggaaaagcttcaggcactcaacacca

SEQ ID NO: 919767 - DNA, 792 bp, Homo sapiens
taagctgtattagtccattctcatgctgctatgaagaaatacctgagacttggtaatttataaaggaaagagatttaattaactcacagttccgtattgctggggaggcctcaggaaacttacaatcatggcagaaggcaaaggaaaagcatgcaccttcttcayagggtggcaggatggagtgagtgccaagtgaagaggggaagccccttataaaaccattggatctcatgaaaactcactcattatcataagaacagcatagaggaaactgcccctatgattcaattatctgcacctgttccaccctcaacatatggggattatggggattaaaattcaagatgagatttgggtggggacacagagcctaaccatatcataagctaatcaatacagaaacagaaaaacaaataccacatcttttcacttataagttggagctaaacagtggatactcatggacataaatatggaaacaatagacactggagaccgctaaaggggcaagggaagggggagggcaagggttgaaaagctattgggtactatgatcactgtctgggtgacagggtcaatcataccccaaacctcagcatcatacagtatacccaggaaacaaacctacacatttattccttgaatctaaaataaaagttgaaattattttttaaaaattgaattaattagatgattttttctttttcactaggctgaccctttgacccttccttggttttcttggggcttttttttcttttatcagtgtatgttggtattttgggttgcagg

SEQ ID NO: 919768 - DNA, 591 bp, Homo sapiens
cccctcagcaggacatgcactctggcctcacgttgagttgcataagtagggatttcaattttttaaaaaaatttactttatcaatgaggatgctgtttatgacagcaaggacatcaagcccctttgtttggacataaggtctagggaaaaacccctaactcctccctcttctcccttctcagcagtctgagtttgccccaagttgcagtgcatttcaggttataataraacaggaggagagtctcatctgggaagaaaaatgggaaggaccaagtggaaaactatcagggcttaggtattcaaaagtatggcatcaactggcagatatgctacatgttttttgaggtttctctacttctgaccattttggctccataagccatatttatcaataaacaaggagtaatctaccagacatattcaaagtgtggcccatgggcaggaggcattatctgggagcttctgggagaaatgcagattctcagactctaacctagagctgctaaatcagaatctccaggggtgggacccaggaatctgtgttttaataatccttccagatgattcttaggcaacctaggcaaccctctg

SEQ ID NO: 919769 - DNA, 628 bp, Homo sapiens
caaggccagcaatattccttcactgtcctacctcaactctttggttttgtgttataatcttgttctcagagatcttgatcatttttttccttcctcaggatatcacactgctccattatgttgataacattttgctgattagatccagcaagtgagaagtagaaaacactggacttattggtgaggcatttgtgtgccattggatgggaaataaatctgactaaaatacaggaaccttctacctcagtaaaatttctagggatccagtggtttggggcctgtcgagataccccttctatggtgaaggataagttgccacatttggcccctcctacaaccaagaaataagcacaatgcctagtaggcctagttgggctttggaggcaacacattkcttctgtgggtgtgttactatagcccatttatagagtgacccaataggttgccagttttgagtggggtcaaaaacaagagagggctctgcaacaggtccaggttgctgtacaagctgctctgccacctgagccataagaccctgcagatccaatgatgcttgagatgacaatggcagatagggatgtgtttggagcctttggcaggcccccatagatgaatcacagtggaggcc

SEQ ID NO: 919770 - DNA, 715 bp, Homo sapiens
aagaaataagcacaatgcctagtaggcctagttgggctttggaggcaacacatttcttctgtgggtgtgttactatagcccatttatagagtgacccaataggttgccagttttgagtggggtcaaaaacaagagagggctctgcaacaggtccaggttgctgtrcaagctgctctgccacctgagccataagaccctgcagatccaatgatgcttgagatgacaatggcagatagggatgtgtttggagcctttggcaggcccccatagatgaatcacagtggaggcctctatgattttggagcaaggccctgagatcttctgcaaataactactctccttttgcgagacagcttttggcctgttactgggctttggtagaaactgaacatttgactatgggtcatcaagtcaccatgcaatctgaactgtctatcatgaactgggtgttttctggcacatatctccattaagtgggtcatgcacagcagcattccatcatcaaatggaagtgctatatatgtgattgggctcaagcaggtcctgcttgaggacatgaaaaagtggctcaaatgtccatggtctccactcctgccaccaagccttctctcccccagcctgcactgatatcctcatagggagttccctatgatcagttgacagaggaagagaagactatggcctggtttacagatggctttgcacgatatgcagg

SEQ ID NO: 919771 - DNA, 715 bp, Homo sapiens
aagaaataagcacaatgcctagtaggcctagttgggctttggaggcaacacatttcttctgtgggtgtgttactatagcccatttatagagtgacccaataggttgccagttttgagtggggtcaaaaacaagagagggctctgcaacaggtccaggttgctgtacaagctgctctgccacctgagccataagaccctgcagatccaatgatgcttgagatgacaatggcagatagggatgtgtttggagcctttggcaggcccccatagatgaatcacagtggaggcctctatgattttggagcaaggccctgmgatcttctgcaaataactactctccttttgcgagacagcttttggcctgttactgggctttggtagaaactgaacatttgactatgggtcatcaagtcaccatgcaatctgaactgtctatcatgaactgggtgttttctggcacatatctccattaagtgggtcatgcacagcagcattccatcatcaaatggaagtgctatatatgtgattgggctcaagcaggtcctgcttgaggacatgaaaaagtggctcaaatgtccatggtctccactcctgccaccaagccttctctcccccagcctgcactgatatcctcatagggagttccctatgatcagttgacagaggaagagaagactatggcctggtttacagatggctttgcacgatatgcagg

SEQ ID NO: 919772 - DNA, 715 bp, Homo sapiens
aagaaataagcacaatgcctagtaggcctagttgggctttggaggcaacacatttcttctgtgggtgtgttactatagcccatttatagagtgacccaataggttgccagttttgagtggggtcaaaaacaagagagggctctgcaacaggtccaggttgctgtacaagctgctctgccacctgagccataagaccctgcagatccaatgatgcttgagatgacaatggcagatagggatgtgtttggagcctttggcaggcccccatagatgaatcacagtggaggcctctatgattttggagcaaggccctgagatcttctgcarataactactctccttttgcgagacagcttttggcctgttactgggctttggtagaaactgaacatttgactatgggtcatcaagtcaccatgcaatctgaactgtctatcatgaactgggtgttttctggcacatatctccattaagtgggtcatgcacagcagcattccatcatcaaatggaagtgctatatatgtgattgggctcaagcaggtcctgcttgaggacatgaaaaagtggctcaaatgtccatggtctccactcctgccaccaagccttctctcccccagcctgcactgatatcctcatagggagttccctatgatcagttgacagaggaagagaagactatggcctggtttacagatggctttgcacgatatgcagg

SEQ ID NO: 919773 - DNA, 715 bp, Homo sapiens
aagaaataagcacaatgcctagtaggcctagttgggctttggaggcaacacatttcttctgtgggtgtgttactatagcccatttatagagtgacccaataggttgccagttttgagtggggtcaaaaacaagagagggctctgcaacaggtccaggttgctgtacaagctgctctgccacctgagccataagaccctgcagatccaatgatgcttgagatgacaatggcagatagggatgtgtttggagcctttggcaggcccccatagatgaatcacagtggaggcctctatgattttggagcaaggccctgagatcttctgcaaataactactctccttttgcragacagcttttggcctgttactgggctttggtagaaactgaacatttgactatgggtcatcaagtcaccatgcaatctgaactgtctatcatgaactgggtgttttctggcacatatctccattaagtgggtcatgcacagcagcattccatcatcaaatggaagtgctatatatgtgattgggctcaagcaggtcctgcttgaggacatgaaaaagtggctcaaatgtccatggtctccactcctgccaccaagccttctctcccccagcctgcactgatatcctcatagggagttccctatgatcagttgacagaggaagagaagactatggcctggtttacagatggctttgcacgatatgcagg

SEQ ID NO: 919774 - DNA, 655 bp, Homo sapiens
ggaaaactaacaaacagaaaggacatccacaccaaaaacccatctgtacgtcaccatcatcaaagaccaaaggtagataaaatcacaaagatggggaaaaaacagagcagaaaaactggaaactctaaaaatcagagtgcctctcctcctccaaaggaacgcagctcctcatcagcaatggaacaaagctgagcggagaatgactttgacgagttgagagakcaaggcttcagaagatcaaactactccaagctaaaggaggaagttcgaaccaatggcaaagaagttaaaaaatttgaaaaaagaattagactaatggataactagaataacccatgcagagaagtccttaaaggacctgatggatctgaaaaccatggcatgagaactacgtgatgaatgcacaagcctcagtaaccgatgcgatcaactggaagaaagggtgtcagtgatggaagacgaaatgaatgaaatgaagcatgaagagaagtccttaaaggacctgatggatctgaaaaccatggcacgagaactacgtgatgaatgcacaagcctcagtaaccgatgcgatcaactggaagaaagggtgtcagtgatggaagacgaaatgaatgaaatgaagcatgaagagaagtttagagaaaaaagaataaaa

SEQ ID NO: 919775 - DNA, 655 bp, Homo sapiens
ggaaaactaacaaacagaaaggacatccacaccaaaaacccatctgtacgtcaccatcatcaaagaccaaaggtagataaaatcacaaagatggggaaaaaacagagcagaaaaactggaaactctaaaaatcagagtgcctctcctcctccaaaggaacgcagctcctcatcagcaatggaacaaagctgagcggagaatgactttgacgagttgagagatcaaggcttcagaagatcaaactactccaagctaaaggaggaagttcgaaccaatggcaaagaagttaaaaaatttgaaaaaagaattagactaatggataactagaataaccmatgcagagaagtccttaaaggacctgatggatctgaaaaccatggcatgagaactacgtgatgaatgcacaagcctcagtaaccgatgcgatcaactggaagaaagggtgtcagtgatggaagacgaaatgaatgaaatgaagcatgaagagaagtccttaaaggacctgatggatctgaaaaccatggcacgagaactacgtgatgaatgcacaagcctcagtaaccgatgcgatcaactggaagaaagggtgtcagtgatggaagacgaaatgaatgaaatgaagcatgaagagaagtttagagaaaaaagaataaaa

SEQ ID NO: 919776 - DNA, 608 bp, Homo sapiens
tagaataacccatgcagagaagtccttaaaggacctgatggatctgaaaaccatggcatgagaactacgtgatgaatgcacaagcctcagtaaccgatgcgatcaactggaagaaagggtgtcagtgatggaagacgaaatgaatgaaatgaagcatgaagagaagtccttaaaggacctgatggatctgaaaaccatggcaygagaactacgtgatgaatgcacaagcctcagtaaccgatgcgatcaactggaagaaagggtgtcagtgatggaagacgaaatgaatgaaatgaagcatgaagagaagtttagagaaaaaagaataaaaggaaatgaacaaagcccctaagaaatatgggactatgtggaaagaccaaatctatgtctaattggtgtacctgaaagtgacggggagaatggaaccaagttggaaaacactctgcaggatattatacaggagaacttccccaatctagcaaggcaggccaacattcaaattcaggaaatacagagaacgccacaaagatactccttgagaagagcaattccaagacacataattgtcagattcaccaaagttgaaatgatggaaaaaatgttaaggg

SEQ ID NO: 919777 - DNA, 501 bp, Homo sapiens
cctatttctggaattaatttctaaacatggctcttggattgagtctgtgccacacttgcacgggtacatgtgctagttttgttatatctttaactatatcttcaactacttgcccctgatcatctgtgtgtagacaacaattagtaaggttaaattttctacaaacttctccttcagctgctagcaagtagtcaagagctagtctattttgatagacagcatttctcatcagagtcyctcatggggcaagaacagtcaaggcttgaccagttttattagtaataatttttaaaaacagcttgtaaccctatgatttggttgagcctgtagatgggggctcgatatccttatgagccatcttgtgcctaagtggcaggtctatagtattgtatgattttttcagggggccattcattatctttctaatcacctatggctatgcttcatttttcatgggaagcatagactgggaagcctagaaattcacctgtttttatggac

SEQ ID NO: 919778 - DNA, 786 bp, Homo sapiens
aagtagtcaagagctagtctattttgatagacagcatttctcatcagagtccctcatggggcaagaacagtcaaggcttgaccagttttattagtaataatttttaaaaacagcttgtaaccctatgatttggttgagcctgtagatgggggctcgatatccttatgagccatcttgtgcctaagtggcrggtctatagtattgtatgattttttcagggggccattcattatctttctaatcacctatggctatgcttcatttttcatgggaagcatagactgggaagcctagaaattcacctgtttttatggacagcaagaagaaatggacagcttaatggtgccaattacacagctacctgtctactgatcaggtagcttagcataagctctgtgtctatagatccagtataacctggtgggggctgtccagtcccgtggaattctgggtggacttaacaggctgcaactttggaaatttactgaatggatttctttctgtgtaattggaacttcaccatgtaactgtttttgtggtattattacacagcttttgtcctaggcaactaagtcaacttacagaatgagtgaattttgttctttttctggatatgcaatattgtccaataattgagacttttagaacctagaaatgatcagggtgattcttttgggccaggaattcatcaggaactgggtccgtaggcactaattcttgggcttcttatggccattgatcttttattacagtttatttacaaacataacatgaagtgatatttag

SEQ ID NO: 919779 - DNA, 775 bp, Homo sapiens
agtcaattataccatctaggtttgtgtaggtacagtctatgatgtttgcacaatgacgaaaatcacctaatgatgcatttctcagaaggtattcccattgttaaagcgacactggactgtattatatgtattacctatattctaccaatgaactatcaaaaattaaaatttaaaagattccatttacaatagcatttacaaaccccatagaatacttagaaataaattagcaaaagctgtggaagatctatgcacagacaactgcaaaacagttgcaaattttctcttaaaaagccagatagtatgaggttggtacaaaagtaattgcggtttgaaagtaatggcaaaaaccacaattacttttgcaccagcctaataagtagcatagcctttgtgggtcacgttgtctgtgacacagackctttgtgtttctgtgtattctgctgcaactctttaaaattgttaataggatccttcactcactggccttacatgtaggctacaggctaaatttgttggcccataggctgcagtgctgacccttgctgcgaaatatttctaggagaaaatactcaagacctaaatctatggagatatatatcatccctgtggcctggaaaagttaatattggcaagttgtccatcttggccaggaccctgaaagatagtctatgttattgtaagaaagattggtgtccttgggggcatgggcttttaagccagggtggaatctgcagaagtctgaggtgccatttcctgtccctatacctgggag

SEQ ID NO: 919780 - DNA, 755 bp, Homo sapiens
gaagatgtagccagacagctttgtaaagtgagtcaccaatcccattccacctcactgggcaggacctcccaaatggggtcttcagccacccatgccagtgcactccaaccatagagactgaaaacttccctggtacagagctcccaggggasgggctggctgccatctttgctgtttgagtgatttaactatcctgggcattggggtttggagtctttgaggtaaccaggtgctgaagcggacccccagcacagcacagttgctctacaaaaatgtggccggactgctttttaaattgggtccccaatcccattcctcctcattgagcaggacctccaaactgtgatttccagccatgtcctacagttgcattggggctggcagtaggtccatacctccctggggtggagctcccagagggagggccaggctgctgtctttgcttttttgccaccttcactggttgatacctccaggtactagaaaatttgaggtgactagggaatggagcaagcccccagcatactgcagcagccctttgggaaggtggccagactgttacatgggtgcctgttcccataactcctcactggacaggtccttcaggcctgggcctccagccacttgccgctggagctattaagtcagtagcaacttggcaactgcctgggtggagtctctggggaaaattgaaagcttctttgccactgcttcttcagtggaactggtcttgctaccctcagaataatgaagga

SEQ ID NO: 919781 - DNA, 587 bp, Homo sapiens
aaacaacttcagcaaagtttcagaatacaaaatcaatgtacaaaaatcactataattcctatacaccaacaacgcccaaactgagagccaaatcagaaaggcaatttcatttccaattgccataaaaagaacaaaatacctaggaatacagctaacaagggaggtggaagaactctacagtgagaattacaaaacactgctcaaataaatcagagaagacacaaacacattgaaaaacattccatgctcatggatagaaagaatcaatatcattaaaatcaccatactgccaaaagaaatttacagattcaatgctattcctgtcaaactaccartgactttcttcacagaactagaaaaaactatttaaaaattaatatggaacccaaaaagagactgaatagcagaggaaagactaagcaaaaataacgaagttggaggtatcacattacctgacttcaaactataccacagggctacagtaaccaaaaaacatggtactggtacaaaaacagacacatagaccaatggaacagaacagagagcccagaaataaggccacatacctacacccacttgatcgtcaa

SEQ ID NO: 919782 - DNA, 570 bp, Homo sapiens
catgtctaaagaattaaaataatatttgagaataatgaatcaccaatagaaaatgtgagtaaatacataaaaattatttttttagaaaatagaaattttgaaatagaaaagtacagtaaataaaatggaacaactttactaatttttttcttttgctcatccctagggaractcaacagcatatttgaactagaaaagaaaaacatcagtaaacttgaaaataggtcaagtgagagtatgtactctaagtaatccaatgaaaaatgaacagaacatcagaatctatagaacaatatcaaatgtgtcatatcataaataatgtgagtccaagaagaagggaaagggggacagaaagaatcaagaattaatggccataaacttcctaaaatggataaaaacattaatctacacgtcttatttgctcaaggaactctaaatagtacaaatttaaagatatataaacttatacataaagtagtaaaagataaaaagccaaagggaaaacataataatcttgaaagcaataagagaaaaataatttcttcatacaaaagattctcaatgtaatta

SEQ ID NO: 919783 - DNA, 559 bp, Homo sapiens
ggcctttagctaagtcttaaagtatcatataatgggtattatcagagggagtagatgaaaacatacaatgactttattccattttggcttgctcagctcagcaaatgtagcaggaggtaaatccattttgtccttgtgtgtctgtsctatcagctacactacaatcaaaatttttctgcaggaccgtaaccactgaggaagtaaatgggcaccttattcaacaggtgatcgtcatggcacttattatgtgttgagagtggtaggaaactgcccctctactaggactgctccccaatatctaagcatctaagcatccatgattcttatgactcttgaataaaggcttgcacaataatattgctttttataattttattccaagaaagaagagtctcttaaggatagttgacattttactggctaataagaattatgtagcccctaacataaaacttttcaccttgaacttcaatttaatgctcatttgcagtaactagcctaggtttggggatatatttatttctgtcttctagtaacagggcttttattttatgaatca

SEQ ID NO: 919784 - DNA, 559 bp, Homo sapiens
ggcctttagctaagtcttaaagtatcatataatgggtattatcagagggagtagatgaaaacatacaatgactttattccattttggcttgctcagctcagcaaatgtagcaggaggtaaatccattttgtccttgtgtgtctgtgctatcagctacactacaatcaaaatttttctgcaggaccrtaaccactgaggaagtaaatgggcaccttattcaacaggtgatcgtcatggcacttattatgtgttgagagtggtaggaaactgcccctctactaggactgctccccaatatctaagcatctaagcatccatgattcttatgactcttgaataaaggcttgcacaataatattgctttttataattttattccaagaaagaagagtctcttaaggatagttgacattttactggctaataagaattatgtagcccctaacataaaacttttcaccttgaacttcaatttaatgctcatttgcagtaactagcctaggtttggggatatatttatttctgtcttctagtaacagggcttttattttatgaatca

SEQ ID NO: 919785 - DNA, 559 bp, Homo sapiens
ggcctttagctaagtcttaaagtatcatataatgggtattatcagagggagtagatgaaaacatacaatgactttattccattttggcttgctcagctcagcaaatgtagcaggaggtaaatccattttgtccttgtgtgtctgtgctatcagctacactacaatcaaaatttttctgcaggaccgtaaccactgaggaagtaaatgggcaccttattcaacaggtgatcgtcatggcacttattatgtgttgagagtggtaggaaactgcccctctactaggactgctccccaatatctaagcatctaagcatccatgattcttatgactcttgaataaaggcttgcacrataatattgctttttataattttattccaagaaagaagagtctcttaaggatagttgacattttactggctaataagaattatgtagcccctaacataaaacttttcaccttgaacttcaatttaatgctcatttgcagtaactagcctaggtttggggatatatttatttctgtcttctagtaacagggcttttattttatgaatca

SEQ ID NO: 919786 - DNA, 559 bp, Homo sapiens
ggcctttagctaagtcttaaagtatcatataatgggtattatcagagggagtagatgaaaacatacaatgactttattccattttggcttgctcagctcagcaaatgtagcaggaggtaaatccattttgtccttgtgtgtctgtgctatcagctacactacaatcaaaatttttctgcaggaccgtaaccactgaggaagtaaatgggcaccttattcaacaggtgatcgtcatggcacttattatgtgttgagagtggtaggaaactgcccctctactaggactgctccccaatatctaagcatctaagcatccatgattcttatgactcttgaataaaggcttgcacaataatattgctttttataattttattccaagaaagaagagtctcttaaggatagttgacaytttactggctaataagaattatgtagcccctaacataaaacttttcaccttgaacttcaatttaatgctcatttgcagtaactagcctaggtttggggatatatttatttctgtcttctagtaacagggcttttattttatgaatca

SEQ ID NO: 919787 - DNA, 711 bp, Homo sapiens
tttcttgacaacatgtgacatggacaggagttggataatccttggttcataagctactctgccaatttcagttattttatttaggtaaagcatctcattctctgttcagcataaatatctgcatcctcctcctccactcatcaccgattgatcagaataaaaaagttatttaatttctcaaagccacattttcctcatctttaacatgggtacgattatatctgcctcataatgttttagaaattttataagataatgtatatacctggtatgtagtaagcacacaataaatttaaccatgacttcgttgttgtctgaaatgcmttaaaaaagatacttagactgcaaaactctttgatggcagaaagtatgtctggctcatatatacatacataatctttagggtctagctcactggtttttacattgtaggtcaatcaatgcatgttttattcaattgaattgaatctactgtgttgagtctgatttttcctgtgaaagaggaaatgactacgataaaggaacaatgacttcctttatatggacaagtagaatagaaacctgcttttctcccaaaacaagttaaactaagctgcatggtcctaccaccatcctggtgacatctacaagctgtccttatggttctgagactggcactattccatagactccttcacaaggtgagcctggctcctggaggccactcagctc

SEQ ID NO: 919788 - DNA, 614 bp, Homo sapiens
gcctcagtagatctgtgttgcaccagggctgtgagtctcctgcctggaaagccactgcagaaggtaccaacaggagtctgcggacctctgccagcaggaatggtaggactacttctgggaagatctagtttaaatttaaaaggagtgcaggttcatacaggagtaattgatttggattgtaayggggaaattcaaatcgttatatctacctctgttccttaaaaggcagaaccgggagagcgtatagggcagcttctgattttaccgtatgtgggactaggaaaaagtgaaactaaaagaacaaggggatttggcagtacaaataaacaagggagagccacctactgggtaaatcaaattactgataaccatcctacctgtgaaaaaactattcagcgaaagaaatttaaaggtttggtagatacaggagtggacatttcaatcatatctctacatcactggccgtctgcatggccaattcagcctgctcaatttaacatagttggagttgataaagcccctgaagtatatcaaagtagttatactttgcattgtaaagggcccgatggacaacctgggactattcaaccaattataacttctatacctataaa

SEQ ID NO: 919789 - DNA, 614 bp, Homo sapiens
gcctcagtagatctgtgttgcaccagggctgtgagtctcctgcctggaaagccactgcagaaggtaccaacaggagtctgcggacctctgccagcaggaatggtaggactacttctgggaagatctagtttaaatttaaaaggagtgcaggttcatacaggagtaattgatttggattgtaacggggaaattcaaatcgttatatctacctctgttccttaaaaggcagaaccgggagagcgtatagggcagcttctgattttaccgtatgtgggactaggaaaaagtgaaactaaaagaacaaggggatttggcagtacaaataaacaagggagagccacctactgggtaaatcaaattactgataaccatcctacctgtgaaawaactattcagcgaaagaaatttaaaggtttggtagatacaggagtggacatttcaatcatatctctacatcactggccgtctgcatggccaattcagcctgctcaatttaacatagttggagttgataaagcccctgaagtatatcaaagtagttatactttgcattgtaaagggcccgatggacaacctgggactattcaaccaattataacttctatacctataaa

SEQ ID NO: 919790 - DNA, 614 bp, Homo sapiens
gcctcagtagatctgtgttgcaccagggctgtgagtctcctgcctggaaagccactgcagaaggtaccaacaggagtctgcggacctctgccagcaggaatggtaggactacttctgggaagatctagtttaaatttaaaaggagtgcaggttcatacaggagtaattgatttggattgtaacggggaaattcaaatcgttatatctacctctgttccttaaaaggcagaaccgggagagcgtatagggcagcttctgattttaccgtatgtgggactaggaaaaagtgaaactaaaagaacaaggggatttggcagtacaaataaacaagggagagccacctactgggtaaatcaaattactgataaccatcctacctgtgaaaaaactattcagsgaaagaaatttaaaggtttggtagatacaggagtggacatttcaatcatatctctacatcactggccgtctgcatggccaattcagcctgctcaatttaacatagttggagttgataaagcccctgaagtatatcaaagtagttatactttgcattgtaaagggcccgatggacaacctgggactattcaaccaattataacttctatacctataaa

SEQ ID NO: 919791 - DNA, 780 bp, Homo sapiens
gattagaaaaaataactaatggatactaggcttaatacctgggtgatgaaataatctgtataacaaacccccatgatataagtttacctatgtaagaaacctgtacttctatccctgaacttaaaacacaaattgaaaataattatttattttcaaatatgtatgaatcttgatcaatagtaaccccttaacacttattttctatacttrtaacatgtattaatataaaaacaaaatatattaaccgtacttaaagtgccaatttttcattaatattgccatggaaaatagagaatatattttatttttataacttaataagaataagatctaggaataacaaatagtataatgtagaaatatggaggacacagacagatattataaaagaaatagggcagaactcagcaaaatgcacttaccctttagttcatgacattcttggctttgcttcaagattgaaacaaactgagaaatgatacagtggttttgtccatgaacctaccttcaactactataattaagcacattctgaaacatttcagaagtaactaactgaacaagaagttaagaaaaacatcatggatgtgaagtgacttctgttatttgtattcccttcatacaaaatagagagaaaaaaaccctagtggtcatgcacgctgagaatttcagttttcatatgaatcatctattcacatgtcacagaattagctagatgagaaggataaaactgcattgaactgggaattaaactctgagtcaggtatctcagtttgccct

SEQ ID NO: 919792 - DNA, 814 bp, Homo sapiens
gagggtgtaccctgcacagccacctcttacatcagcgtgacctggatgtgagacatgaagacaaaggagatcattttggaactttaagatctgactgtcccactgggtatcagacttgcatggaccttgtaacccctttgttgtggccaatttctccaatttgtaatggctgcatttacccaatacckgtacctccattgtatctggaaagtaactaccttgcttttgattttacaggctcataggtgaaagggacttgccttgtctcagatgagacttgggactgtggacttttgggttaatgctgaagtgaattaagactttgggggactgttgagaaggcatgaggttggtttttcaaatgtgaggacacaagatttggaggggccaggagcagaatgatatggtttggctctgggccctcaaccaaatctcatcttgaattgtactcccataatttccatgcattgtggaagggaccccgtgggaggtaatttgaatcatgggggcggtttcccccatactgttctcgttgtagtgaatcagtctcaagagatctgatggttttatcaggggtttatgcttttgcatcttcttcagtttctcttgccaccaccttgtaaaaattgccttttgcctcctgccatgattctgaggcttcccaagcaatctgaaactgtaagtccaattaaacctctttttcttccaagtctcaggtatgtctttatctgcagcatgaaaactgactaatacaccaagaatctgtttagatatccatatacaaagatttcaaattaaacaacactatacattt

SEQ ID NO: 919793 - DNA, 814 bp, Homo sapiens
gagggtgtaccctgcacagccacctcttacatcagcgtgacctggatgtgagacatgaagacaaaggagatcattttggaactttaagatctgactgtcccactgggtatcagacttgcatggaccttgtaacccctttgttgtggccaatttctccaatttgtaatggctgcatttacccaataccggtacctccattgtatctggaaagtaactaccttgcttttgattttacaggctcataggtgaaaggracttgccttgtctcagatgagacttgggactgtggacttttgggttaatgctgaagtgaattaagactttgggggactgttgagaaggcatgaggttggtttttcaaatgtgaggacacaagatttggaggggccaggagcagaatgatatggtttggctctgggccctcaaccaaatctcatcttgaattgtactcccataatttccatgcattgtggaagggaccccgtgggaggtaatttgaatcatgggggcggtttcccccatactgttctcgttgtagtgaatcagtctcaagagatctgatggttttatcaggggtttatgcttttgcatcttcttcagtttctcttgccaccaccttgtaaaaattgccttttgcctcctgccatgattctgaggcttcccaagcaatctgaaactgtaagtccaattaaacctctttttcttccaagtctcaggtatgtctttatctgcagcatgaaaactgactaatacaccaagaatctgtttagatatccatatacaaagatttcaaattaaacaacactatacattt

SEQ ID NO: 919794 - DNA, 674 bp, Homo sapiens
cagggggctgaggtgggagaatctcttgagcctgggagtttgaggttgcagtgagctatgatctcaccactgcactccagcctgggccacagagtgagactctgtctcagtaaataagtaagtaaaataaagctgatcatggatagaccgatggtcccaagaattgcattgtttcatttattctataaacctgaggctctatacaaatatttaaaaaagaattttaaaatgtttaaaggttttaaggagaagcgtttagaggaagcaaaggagagtagggtgggggaggggaacagctcaggggtggctgtgggggtggggaactggtggcagccaacaagaagccctgagctgggaacgctgtgtgacacttggtggcatttttgtcactttcttgcagctctcagtgtcttccccattttgcaaagtcttctgagcggggtggtgcygatgtcccgataaggatggggtcaggcttctggggggcactgtgaggacgggggtctcagaatccttcccttgactttcgatgggtggggaaggccaggggaggaagggggcttattcaggctgggtgcccacccgggtcaacccctccgcatgcctctgggcctcttctgttgtgggcttgtgggttcccgagaaatagggccacagatggcactgacggtccc

SEQ ID NO: 919795 - DNA, 684 bp, Homo sapiens
tctgcaagccaagaagagagtcctcaccaggaaccaactctgctgacaccttgctgttggacttccagcctctataaatgtgagaaggaaatttctgttgtttaagccactcagtctatggtattttctttgttgttgtcatttttgagacaaagtcttgctctcttgcccagactggagtgcagtggcatgatctcggctcactacaacctccacgtcctgggttcaagcaattctcctgcctcagcctcccaggtagctgggattacaggtgcccaacaccatgcccggctaatttttgtatttttagcagagacggggtttcaccatgttggccatgctggtctcgaactcctgacctcaggtgatccacctgcctcggcctcccaaagtgctaggattacaggtgtgagctactgckcccagccaatttatcgtattttcttatggcagcctgtgatgtttattctgcgttatcaacttaactaaggggtacccagagacctggtgaaacatgatttctgcctgtgtctgtgaggctttctggaagagattagtgtttgaattagtagactgaggaaagaagatccaccctccctaatgtaggtgggcatcatccaatccattgaggacatggctagaaccaaaaggcagaggaaggttaaattcattctctctgctcca

SEQ ID NO: 919796 - DNA, 684 bp, Homo sapiens
tctgcaagccaagaagagagtcctcaccaggaaccaactctgctgacaccttgctgttggacttccagcctctataaatgtgagaaggaaatttctgttgtttaagccactcagtctatggtattttctttgttgttgtcatttttgagacaaagtcttgctctcttgcccagactggagtgcagtggcatgatctcggctcactacaacctccacgtcctgggttcaagcaattctcctgcctcagcctcccaggtagctgggattacaggtgcccaacaccatgcccggctaatttttgtatttttagcagagacggggtttcaccatgttggccatgctggtctcgaactcctgacctcaggtgatccacctgcctcggcctcccaaagtgctaggattacaggtgtgagctactgcgcccrgccaatttatcgtattttcttatggcagcctgtgatgtttattctgcgttatcaacttaactaaggggtacccagagacctggtgaaacatgatttctgcctgtgtctgtgaggctttctggaagagattagtgtttgaattagtagactgaggaaagaagatccaccctccctaatgtaggtgggcatcatccaatccattgaggacatggctagaaccaaaaggcagaggaaggttaaattcattctctctgctcca

SEQ ID NO: 919797 - DNA, 684 bp, Homo sapiens
tctgcaagccaagaagagagtcctcaccaggaaccaactctgctgacaccttgctgttggacttccagcctctataaatgtgagaaggaaatttctgttgtttaagccactcagtctatggtattttctttgttgttgtcatttttgagacaaagtcttgctctcttgcccagactggagtgcagtggcatgatctcggctcactacaacctccacgtcctgggttcaagcaattctcctgcctcagcctcccaggtagctgggattacaggtgcccaacaccatgcccggctaatttttgtatttttagcagagacggggtttcaccatgttggccatgctggtctcgaactcctgacctcaggtgatccacctgcctcggcctcccaaagtgctaggattacaggtgtgagctactgcgcccagccaatttatcgtattttcttatggcagcctgtgatgtttattctgygttatcaacttaactaaggggtacccagagacctggtgaaacatgatttctgcctgtgtctgtgaggctttctggaagagattagtgtttgaattagtagactgaggaaagaagatccaccctccctaatgtaggtgggcatcatccaatccattgaggacatggctagaaccaaaaggcagaggaaggttaaattcattctctctgctcca

SEQ ID NO: 919798 - DNA, 511 bp, Homo sapiens
tggagtgcagtggcatgatctcggctcactgcaacctgtctcctgggttcagatgattctcctgcctcagccttccaagtacctgggattacaggcgtgtgccaccatgcctggctaatttttgtgtttttagtagagacgggtatcaccatgttggccaggctggtctcgaactcctggcctcaagtgatccgcctgccttggcctcccaaagtgctgggattacagacacyagctattacgcccggccagcttatttttattagagacggggtcttgttacattgccagatgggatttcaactgttaggctcgcaggatcctcctgcctcagcctccccattagctgggactccaggcatgtgccactgtgctgccactcctcacccttaactactctccccccaccacccactggcacccccagctcctcagcctgacattcagggccctccaggactggcctctgctgctctctgctgtcccagctccagtctcccccaagacacct

SEQ ID NO: 919799 - DNA, 642 bp, Homo sapiens
gttgaccttcagagctctgcgtttcattacagtcagcattttcctgggtgtttgttgaatatctgtctccatttgtagatacgaaactcctcagggcaggggccaggtctgtcttcactgggtatacccagtgactagaagagtacctggcctatggtaggtgcccagtaaacatttcttgatttactgagcctttcaattcccaacactccacaactccacacccctgcacgccttcctctatctggtcagtgctcagtgcttcgttcttttttttttttcttctaatacagagttttgctcttgttgcccaggctggagtgcaatggcacaatctcagctcactgcaacctctgcctcccgggttccagcaattctcctgcctcagcctccggagtagctgggattacaggcgcgtgccaccacgcccggctaatttttgtatttttartagagacagggtttcaccatgttggccaaaatggttttgatctcctgatctcgagatccatccgcctcggcctcccaaagtgctgggattacaggcgtgagacactacgccaggcctcattctccattcttatcaccctgtcccccggacagtcgtgctaatagttttgtgtgtgcgttcttggaaaatgt

SEQ ID NO: 919800 - DNA, 672 bp, Homo sapiens
tctcatacattgtttataggaatacaaaattgtaaaaccacttttgaaaagcgattgttagtttcttcataagctaaacataccactaccacatgacccaaccatgcttcccctggccacttacccaagagaaataaggtggctgtccatacgatgctttacatacaaatctttgtgtctttgtttatatagcycaaaactggaaacaacccaaatgtccagcaacagttgaaaggataaacaaaatgtggtacatccatatagtaaatactactcagcaataaaaggaaattaattattgatatatgcaccaatgtggacgcatctcaaaataattgtcctgaaggaaagaagccagacaaaaacagtacttattgtatgactcattttatacgtaattttagaaaatgcaaactatagtgacagaaagtagatcagttgttgcctggagatgggatgggaaaggcgtagaaaaaggcaggaaagggagattaccaaaaaaataaggggaagcttttaggggaatagatatggccattatgtgttgatcatagtgatggttttacaggtgtatacacatgtcaaaacttatcaaatcgtacattttaaacatgtagagcttgttgtatgtcaattatacctgaatgaagttattaagaaaaaagagactct

SEQ ID NO: 919801 - DNA, 672 bp, Homo sapiens
tctcatacattgtttataggaatacaaaattgtaaaaccacttttgaaaagcgattgttagtttcttcataagctaaacataccactaccacatgacccaaccatgcttcccctggccacttacccaagagaaataaggtggctgtccatacgatgctttacatacaaatctttgtgtctttgtttatatagctcaaaactggaaacaacccaaatgtccagcaacagttgaaaggataaacaaaatgtggtacatccatatagtaaatactactcagcaataaaaggaaattaattattgatatatgcaccaatgtggacgcatctcaaaataattgtcctgaaggaaagaagccagacaaaaacagtacttattgtatgactcmttttatacgtaattttagaaaatgcaaactatagtgacagaaagtagatcagttgttgcctggagatgggatgggaaaggcgtagaaaaaggcaggaaagggagattaccaaaaaaataaggggaagcttttaggggaatagatatggccattatgtgttgatcatagtgatggttttacaggtgtatacacatgtcaaaacttatcaaatcgtacattttaaacatgtagagcttgttgtatgtcaattatacctgaatgaagttattaagaaaaaagagactct

SEQ ID NO: 919802 - DNA, 653 bp, Homo sapiens
aacaaaatgtggtacatccatatagtaaatactactcagcaataaaaggaaattaattattgatatatgcaccaatgtggacgcatctcaaaataattgtcctgaaggaaagaagccagacaaaaacagtacttattgtatgactcattttatacgtaattttagaaaatgcaaactatagtgacagaaagtagatcagttgttgcctggagatgggatgggaaaggcgtagaaaaaggcaggaaagggagattaccaaaaaaataaggggaagcttttaggggaatagatatggccattatgtgttgatcatagtgatggttttacaggtgtatacacatgtcaaaacttatcaaatcgtacattttaaacatgtagagcttgttgtatgtcaattatacctgaatgaagttattaagaaaaaagagactctccatattttgaccccatcttattagccttgtttattactgaatcttttattccactgagtctataaccatatcmcttgtagggactaccccaaaacatttctttcccttgtccattaaacatatattcactgggtccctgttatgaaacagaccttagaataggagttaggcatccatcagtgatcaagacagtcccagtttcttctctcttaagcttca

SEQ ID NO: 919803 - DNA, 575 bp, Homo sapiens
tctctttcttggaaatatacccagaactgggccatattttcaccttttctcctgcaaacactttgatcagtgtctccattacctttttctggaatgatcacaataaccttctaactggactcccttcatccctggcatccccctaaagacatacacacatacatacacacatacatacatacacacacaaacacacagagacccacacacagacatacacacacataattgttattagggcagacaaactgattttatgaaaatacagtctctatttgaaatcttccaatagctctgcacctcactcagaataaaagtcaatgtcattatcatgatcacaggcccccaattacttcaacaagctcatatcctgttactgtttctcatgctcattctgctgtagtcagaacaatggcaagctgtctgtttattgaacatwctaggtgagttcctatctcaaggcgtttgtactgtggtttcctctgtctggaatgttctttaccagatatctgcatgggtcacttcttcagttcttttattctgccatcaccatctcactgaagtcttccttgtcc

SEQ ID NO: 919804 - DNA, 475 bp, Homo sapiens
atgactgagcccaggggaatgctaaggccagtccattcctggtagatgtgagattcttcagattgctggctaggctggaagactctctttatctttgtcaaaactttatgagacttgcacaggagatttttcctacrtatgttccttacttctttccctcctccacaggggccagacatgcattgtggtctaatggctctcccagccccctccggctccctctccatttccctttgcaagcatgttctctgaaaaatctcttgatgcctgtttctcagaggaacagagctaagctactcatttaattttctgtttctgctcagtagagtatgaactgtgtgaaagaaggagccaagtctgtcttgttcacatttataacttctgtacctagcacatagtagctactcataagtatttgtcaggtcagtgttgttaaagtttggatctaatactacctttgctctgactccaaagc

SEQ ID NO: 919805 - DNA, 609 bp, Homo sapiens
agtgggaaacctctagagggtatttaagccccagaaaattctgtaactgggttcttaaacaactatgctcagtcgggctcccaccttgtggagtgtacttttgttttcaataaatctctgcttttgttgcttcattctttccttgctttgtttgtgcattttgtccaattctttgttcaggatgccaagaacctggacaccctccacaggtaacaactgagcctggggagcatactgtgagatcaggaccatgcagagacttgtaggccatactaaggcctttacttttgtttctctttgctattaaagaagccartgaaacattttaaactggaaagacatgattttcaaaaagatccctcttggctgcagggagaaaatgaatggaggtgggaaagatgaggagatataggctatttcactagtctaaataagggataacagtcacttgggcttagatagtgacagtagagatggtgggaagagatagaaagaaaataaaggcagcaggactgccaaatatctaggcctcacacttactggctgtgtgaccttaagcagatgcttaacctctctgagtcactatttctacccctttaaaaattggag

SEQ ID NO: 919806 - DNA, 624 bp, Homo sapiens
caggtggtgcctgcatatcgtgcaaagccatctgtaaaccaggccatagtcttctcttcctctgtcaactgatcatagggaactccctatgaggatatcagtgcaggctgggggagagaaggcttggtggcaggagtggagaccatggacatttgagccactttttcatgtcctcaagcaggacctgcttgagcccaatcacatatatagcacttccatttgatgatggaatgctgctgtgcatgacccacttaatggagatatgtgccagaaaacacccagttcatgatagacagttcagattgcatggtgacttgatgacccatagtcaaatgttcagtttctaccaaagcccagtaacaggccaaaagctgtctcgcaaaaggagagtagttatytgcagaagatctcagggccttgctccaaaatcatagaggcctccactgtgattcatctatgggggcctgccaaaggctccaaacacatccctatctgccattgtcatctcaagcatcattggatctgcagggtcttatggctcaggtggcagagcagcttgtacagcaacctggacctgttgcagagccctctcttgtttttgaccccactcaaaactggcaacct

SEQ ID NO: 919807 - DNA, 702 bp, Homo sapiens
gtgcctgcatatcgtgcaaagccatctgtaaaccaggccatagtcttctcttcctctgtcaactgatcatagggaactccctatgaggatatcagtgcaggctgggggagagaaggcttggtggcaggagtggagaccatggacatttgagccactttttcatgtcctcaagcaggacctgcttgagcccaatcacatatatagcacttccatttgatgatggaatgctgctgtgcatgacccacttaatggagatatgtgccagaaaacacccagttcatgatagacagttcagattgcatggtgacttgatgacccatagtcaaatgttcagtttctaccaaagcccagtaacaggccaaaagctgtctcgcaaaaggagagtagttatctgcagaagatckcagggccttgctccaaaatcatagaggcctccactgtgattcatctatgggggcctgccaaaggctccaaacacatccctatctgccattgtcatctcaagcatcattggatctgcagggtcttatggctcaggtggcagagcagcttgtacagcaacctggacctgttgcagagccctctcttgtttttgaccccactcaaaactggcaacctattgggtcactctataaatgggctatagtaacacacccacagaagaaatgtgttgcctccaaagcccaactaggcctactaggc

SEQ ID NO: 919808 - DNA, 737 bp, Homo sapiens
cccatagtcaaatgttcagtttctaccaaagcccagtaacaggccaaaagctgtctcgcaaaaggagagtagttatctgcagaagatctcagggccttgctccaaaatcatagaggcctccactgtgattcatctatgggggcctgccaaaggctccaaacacatccctatctgccattgtcatctcaagcatcattggatctgcagggtcttatggctcaggtggcagagcagcttgyacagcaacctggacctgttgcagagccctctcttgtttttgaccccactcaaaactggcaacctattgggtcactctataaatgggctatagtaacacacccacagaagaaatgtgttgcctccaaagcccaactaggcctactaggcattgtgcttatttcttggttgtaggaggggccaaatgtggcaacttatccttcaccatagaaggggtatctcgacaggccccaaaccactggatccctagaaattttactgaggtagaaggttcctgtattttagtcagatttatttcccatccaatggcacacaaatgcctcaccaataagtccagtgttttctacttctcacttgctggatctaatcagcaaaatgttatcaacataatggagcagtgtgatatcctgaggaaggaaaaaaatgatcaagatctctgagaacaagattataacacaaaaccaaagagttgaggtaggacagtgaaggaatattgctgg

SEQ ID NO: 919809 - DNA, 632 bp, Homo sapiens
catagaggcctccactgtgattcatctatgggggcctgccaaaggctccaaacacatccctatctgccattgtcatctcaagcatcattggatctgcagggtcttatggctcaggtggcagagcagcttgtacagcaacctggacctgttgcagagccctctcttgtttttgaccccactcaaaactggcaacctattgggtcactctataaatgggctatagtaacacacccacagaagmaatgtgttgcctccaaagcccaactaggcctactaggcattgtgcttatttcttggttgtaggaggggccaaatgtggcaacttatccttcaccatagaaggggtatctcgacaggccccaaaccactggatccctagaaattttactgaggtagaaggttcctgtattttagtcagatttatttcccatccaatggcacacaaatgcctcaccaataagtccagtgttttctacttctcacttgctggatctaatcagcaaaatgttatcaacataatggagcagtgtgatatcctgaggaaggaaaaaaatgatcaagatctctgagaacaagattataacacaaaaccaaagagttgaggtaggacagtgaaggaatattgctggcct

SEQ ID NO: 919810 - DNA, 580 bp, Homo sapiens
aaaacttaaatatggagattggatgattaaataaattgtctaataagtagaacaagagatggaaaagaagaaaaaaattataatttagagtctcagaaaatcaacacaggaggtgcaatatttaatgagattctggttaaagtgagactgtagaaaactcaatggataaattattactaaaacataacaagaaaatttctcagaacttacagtaagagtctatatgttaacagggtatgcctgcatggccagattaataaataaaatgcctgtattaaggtcttttcagattaccaggaaaaagtttttcaatscttccaggaaaggaggtaagagagaaggacacaaagagaggtggaatcaaaatcaagtcagtcttctgaagaaactcgacatgcaatgagtaaaagagacagcttcagctttcaaaatttgagggaaaattattttcaaactagaattttatacccagtcaaactatcaagcaaatgaaaacaaacaaaaaagatgtcttcacaatgtaaggagacaattttttaaaaatctcttctgcattcgtttatatgaaggtcttgagaga

SEQ ID NO: 919811 - DNA, 745 bp, Homo sapiens
cacctttctccttttacacttcttcttttttttttttaatgttcccacaaaactttatttactgacacaaaaattcctcttttatattaaaagagccctaggaggggaggaaaggcgttcacagtgtcaacagatgagggaacggaggctctgagaggctggattacctaaagttttcaaggagctctctggctgcataacccaaacacattctattttccaccacagatattccccaactaacttacagttataaggctgtaaaatagatgtgtggctaaaccaagatacatggtaaagactttatgttctgtgatcggagagcccatggccacaaactgtccaaattgtgttgactcaatgaacaacagaatgaaaatattttctcctgaaagggagaaataataacatttttagccakagccaaggcttatacaccatggcactcttttaagcttctccaagctctatacagagcccttgatggttttctgataggaaatgtccccgacactgacatcctattgcatgacaagaagacaacagtggcaagaaggggctttcccgaatgtgactccaagatgtcattgagatgttgtcaggttctaaaatagtcacttccatccgaagtcttacagggtaattatagctttgccattattcctggcctggctgtgatccacgactctgctctcattacctcctgcttcttcatcttgggtctgatagagccctttcatccaga

SEQ ID NO: 919812 - DNA, 627 bp, Homo sapiens
tgacatcacatgtcggcagcttccatgatgcccacctgagccacaaaaccagcaagttttattagggatttcaaaaggtgaggggtgtaagaatagggagtgggtcacagagatcacatgcttcatagggcaataaaagatctcaacgcaagggggcagagcaagatcacaaggcgaaggtgaaattagaattacagatgaaggtccatgtcctgctgggcacacattgtcattgataaacatcttaacaggaaacagggttcgagagcagacaaccggtctgackagaattcgccaggctggaatttcctaatcctagaaagcctgagggcgctgcaggagaccagggcgtatttcatcccttatctttaactgcataagacagacactcccagagcggccattttagatacctccccctgggaatgcattcctttcccagggctattccttgctgagaaaagaattcagtgatatttcttctatttgctttctgtaagaaaagaaatatgactctgttctgcctggccctgcaggcagtcagaccttgtggttatctcccttgttccctgaaaatcactgttatcctgctccttttttaggatgcccagatttcatattgttcaa

SEQ ID NO: 919813 - DNA, 808 bp, Homo sapiens
  misc_feature 431: n = A,T,C or G
tgactgtaatcacgtgagtttatttctgaacttcctactgtgttctgttggtctatatgtctgccatataatccagcaatcccacttctgagtatagatcccaaagaaatgaagtcaggatctcaaagagatatctatactgtcatgcccactgctgtattatttacaatagccatgatatgaaaacaacccaaaagtccatcaacagataaatggatttaacaacatggcatatacatacagtggaataatattcagcctctctaaaaatgaaaatcctaccatttgtgacaacatgaatgaacctgaaggacatcatactaagtgaaataagccagtcacagaaggacaaatactgcatgattccacttattggcgtaatattacataatcaaactcatagaagcagagaatagaatagtggttgccangggctggtaggagagggaaatggagagctgttgctcgataggtataaagtctcagttacacaaaacaaacaagttccatttatctactgtaccatgtagggtctacagttaacgatatgatgttatgcatttaaaactttgttggggtagatcttgtgttatttgttcttagcataaaaaaagaaagaaaaataaaaaaaaaacagaaaagagcacaggaaaatttttsaagttttgtaaaaaaaaaaaaaaaaaagtatgtttaatacttgattgtgataatgatatcacaagtgtatgcatatatccagactcatcaaattatcaaattgaatatattaaacgtgtgccataaagtatgcgaagcaatatatatt

SEQ ID NO: 919814 - DNA, 825 bp, Homo sapiens
gatgagatcagagatcagaaacttaaatgcctagagaggttgataaaaacaaaaatgaaagcagggcacagatgtacataaaagagagtggtgggggccgggcgcagtggctcacacctgtaatctcagcactgtgggaggccgaggtgggcggatcacctgaggtcaggagttcgagaccagcctggccaacatggcaaaaccctgtctctactaaaaatacgaaaattagccaggtatggtggcaggtgcctgtaatcctagctactcgggaggctgaggcaggagaatcacttgaatcgggaggcagaggttgcagtgagccaagatcacgccattgcactccagcctgggtgacaagagcaaaactccatctcaaaaagagaaagtggcggggactgyggcaaactagagaactcaggccacatcccaaggaggtagctgctactcagctccaatcaaatttgccctgctggattgtgggtccagtatggattaatcatccaccttttcaaaagaaactgagaattcaggtatttatggaaagactttgatttttaagggttagccgccaatttcccagcactttgggaggccaaggtaggaggatcacttgagcactaggaagtcaagaccagcctaggcaacatacaaagaccctatctgagagagaaagagagagacagagagagagagagagagaagaaaagaaagaaagaagaaagagagaaagagagaaaaagaaagaaagaaagaaagaaagaaagaaagaaagaaagaaagaaagaaagaaagaaagaaaaagaaagaaaatagaaaacctac

SEQ ID NO: 919815 - DNA, 777 bp, Homo sapiens
gacagctgaacacaaggaggttcctagaaggtggcaagcccagggaccgtgcaagcccagagtcccttccctaacacctcaccctatgcctctcttcatctgtatcctttgtgatatcctttataataagccagtaaaggttagtaaatttccttgagttctgtgagccactctagtaattaattgaacccaaagagggtgtcatgggaaccccaacttgaaactggctggtcagaagttctgcaggcccaaaggcgaggcacaggggaacagtcttgtgggactgagctctcaacctatgggatctgaggctatctccaggtagaaaatgtcaggatttaattgaattagaagatccaagtgagttgggctatacctatactattcaagaggctgaggcgggaggattrcttgagcccagaagttggaggccagctagtggtctcctctcgaataataacaggtcaatcctgcttagctaccaagatcaggagacatcagacacattcagggtggcagggctatgaactctatatcatgaaaacctttcaaaggtatttccttttttttttttttttgacaggatctcactctgtcagccaggctagaatgcagtggcgtgatctcggttcactgcaacctccacctcggggacgtaagcgatcctcccacctcagcctcctgagtagctgggactgaaggtgtgcactaccatgctcagctaatttttgtatttttcatagagataggggtctcactatgttgcccaagctggtc

SEQ ID NO: 919816 - DNA, 467 bp, Homo sapiens
ttgcccactttctgctgctgctgctgctgctggttcatgctggccgccgccgccgggggccggggctgcgggcaggtgggcgggaggcggcagcggtggcggggcggcctcctcctcctcctcccgcgcgtcatcggcagcaattttattgatcttttcaaagaaccaactttcggttttgttggttttctctgttgattttctgttttcaatttcattgattttgactctaattcttactagtttttctcttctgcttactttggattttatttgctcttcttttgctarttttccaaggtagaaacttagattattcattttgaatctttcatcttttctaatatctacctttaatgctataaatttccctctacacacgacttccaccacattccacaaattttgataagttgtgcttttgttttcatttaatttaatatatttttaaatttctcttgagattt

SEQ ID NO: 919817 - DNA, 612 bp, Homo sapiens
cctcttctgtagggctgctgcagtttgctgggggtgcactccagaccctattcatctgggtccctcctgtcaccagtggaggctgcagaacagcaaatatggctgcctgctccttcctctgggagctctgtcctagaggggcactggcctgatgccagtggaaatgttcctgtatgtgtctggtgacccttgttgggagagtgtcacccagtgaggaggcatgggatcagggacytgcttaatgaagcactctggctgcgggttggtggagggggtgcattgcactgggcggtggggagctcactcgtctgaaatgcctggattcttcagagccagcaaggggaaagcttaagtccactgatctgcagccactgcagccctggctggggttgctgaaattcccaaagggaggccctgcgtggtgagaagggatgggtcagggtctagcctaaagaggctgtctggccataatctgtcacagccactgtgctgcgctgtggggaattcctcctgggtccaaagtgcccagtctccctggcactggcaagggaaaactgacagactggagctgcagtgatagctgatgcccccctcgccaggtgctcagtcttc

SEQ ID NO: 919818 - DNA, 557 bp, Homo sapiens
ggtccctcctgtcaccagtggaggctgcagaacagcaaatatggctgcctgctccttcctctgggagctctgtcctagaggggcactggcctgatgccagtggaaatgttcctgtatgtgtctggtgacccttgttgggagagtgtcacccagtgaggaggcatgggatcagggacctgcttaatgaagcactctggctgcgggttggtggaggrggtgcattgcactgggcggtggggagctcactcgtctgaaatgcctggattcttcagagccagcaaggggaaagcttaagtccactgatctgcagccactgcagccctggctggggttgctgaaattcccaaagggaggccctgcgtggtgagaagggatgggtcagggtctagcctaaagaggctgtctggccataatctgtcacagccactgtgctgcgctgtggggaattcctcctgggtccaaagtgcccagtctccctggcactggcaagggaaaactgacagactggagctgcagtgatagctgatgcccccctcgccaggtgctcagtcttctta

SEQ ID NO: 919819 - DNA, 612 bp, Homo sapiens
cctcttctgtagggctgctgcagtttgctgggggtgcactccagaccctattcatctgggtccctcctgtcaccagtggaggctgcagaacagcaaatatggctgcctgctccttcctctgggagctctgtcctagaggggcactggcctgatgccagtggaaatgttcctgtatgtgtctggtgacccttgttgggagagtgtcacccagtgaggaggcatgggatcagggacctgcttaatgaagcactctggctgcgggttggtggagggggtgcattgcactgggcggtggggagctcactcrtctgaaatgcctggattcttcagagccagcaaggggaaagcttaagtccactgatctgcagccactgcagccctggctggggttgctgaaattcccaaagggaggccctgcgtggtgagaagggatgggtcagggtctagcctaaagaggctgtctggccataatctgtcacagccactgtgctgcgctgtggggaattcctcctgggtccaaagtgcccagtctccctggcactggcaagggaaaactgacagactggagctgcagtgatagctgatgcccccctcgccaggtgctcagtcttc

SEQ ID NO: 919820 - DNA, 557 bp, Homo sapiens
ggtccctcctgtcaccagtggaggctgcagaacagcaaatatggctgcctgctccttcctctgggagctctgtcctagaggggcactggcctgatgccagtggaaatgttcctgtatgtgtctggtgacccttgttgggagagtgtcacccagtgaggaggcatgggatcagggacctgcttaatgaagcactctggctgcgggttggtggagggggtgcattgcactgggcggtggggagctcactcgtctgaaatgcctggattcttcagagccagcaaggggaaagcttaagtccactgatctgcagccactgcagccctggctggggttgctgaaattcccaaarggaggccctgcgtggtgagaagggatgggtcagggtctagcctaaagaggctgtctggccataatctgtcacagccactgtgctgcgctgtggggaattcctcctgggtccaaagtgcccagtctccctggcactggcaagggaaaactgacagactggagctgcagtgatagctgatgcccccctcgccaggtgctcagtcttctta

SEQ ID NO: 919821 - DNA, 612 bp, Homo sapiens
cctcttctgtagggctgctgcagtttgctgggggtgcactccagaccctattcatctgggtccctcctgtcaccagtggaggctgcagaacagcaaatatggctgcctgctccttcctctgggagctctgtcctagaggggcactggcctgatgccagtggaaatgttcctgtatgtgtctggtgacccttgttgggagagtgtcacccagtgaggaggcatgggatcagggacctgcttaatgaagcactctggctgcgggttggtggagggggtgcattgcactgggcggtggggagctcactcgtctgaaatgcctggattcttcagagccagcaaggggaaagcttaagtccactgatctgcagccactgcagccctggctggggttgctgaaattcccaaagggaggccstgcgtggtgagaagggatgggtcagggtctagcctaaagaggctgtctggccataatctgtcacagccactgtgctgcgctgtggggaattcctcctgggtccaaagtgcccagtctccctggcactggcaagggaaaactgacagactggagctgcagtgatagctgatgcccccctcgccaggtgctcagtcttc

SEQ ID NO: 919822 - DNA, 603 bp, Homo sapiens
gccaagaatctgcacagctctgtgcttgggacccaaggctctggtggtgtggctcatgagggggatctcgtgatactcaggatgcacagatccgtgtacagagtgtggtttcctgggtggggtagcaaaatcactcaccacctcctctggctaggggtgagccctgtgcagttccctggtaggctgtyactccatcctgcttttccttactctccatgggtcacaccaactgcctagtcagtcccagtgagagaacctggatacctcagttgctggtgcacaattcacttgccatttaccttcttctctgtgggagcctcccacagctatttctagttggccatcttggcccctctccaagttattttgcccttattttttgtttttatttttgcgttccataatttccttgccttttgtggttttaattaagcactgtatattatttcattttctgtcttttcttaccatataaattacacatttttaaaacttgttttagtggttgccctagaatttgcactatacatttacaactaattcaagttcattaacaaataacaatgtgctacttcatggctagtacaggtaccttgtagtaac

SEQ ID NO: 919823 - DNA, 634 bp, Homo sapiens
tctaagcataataaacaacactcagaaccacaaactgatggtggatattgtgagttttacttgcatcataaacttagggaattaaagtggttgcctgctttctggaaaatggcaattggactctagtttaatataacacaaaaattattttatgtgagaacacagcattctctatagtgagttttgttcttggcaaaggatatatcgtgtagctggcttgttcctcaagcccatctggagggagtggtcactgaaatgtatgtgctggagtctgtgtctccaaagttgcatgttttcttttcaaacatcctatttctttaaggggaacaaatgttttctccacaaaggcygcctctgcctcccgcctggctgctcaggtttctgccttccttttggttactgtgtggctggtgagttctcagtgtcccaaagggggactcggcactagctgttggggctgaacaaacaatcccagccgaaaccagaacagaatcttagcgcactgctttcaccatcatggtcttcagctctgtttcagttttccttgccaaaatagatataatatcaaacattgagatgctgccaaactcagcagtgaaacagactcacaataattgctgccgtttattgaatg

SEQ ID NO: 919824 - DNA, 634 bp, Homo sapiens
tctaagcataataaacaacactcagaaccacaaactgatggtggatattgtgagttttacttgcatcataaacttagggaattaaagtggttgcctgctttctggaaaatggcaattggactctagtttaatataacacaaaaattattttatgtgagaacacagcattctctatagtgagttttgttcttggcaaaggatatatcgtgtagctggcttgttcctcaagcccatctggagggagtggtcactgaaatgtatgtgctggagtctgtgtctccaaagttgcatgttttcttttcaaacatcctatttctttaaggggaacaaatgttttctccacaaaggccgcctctgcctcccgcctggctgctcaggtttctgccttccttttggttacygtgtggctggtgagttctcagtgtcccaaagggggactcggcactagctgttggggctgaacaaacaatcccagccgaaaccagaacagaatcttagcgcactgctttcaccatcatggtcttcagctctgtttcagttttccttgccaaaatagatataatatcaaacattgagatgctgccaaactcagcagtgaaacagactcacaataattgctgccgtttattgaatg

SEQ ID NO: 919825 - DNA, 772 bp, Homo sapiens
  misc_feature 158: n = A,T,C or G
atccttctactaacctcacaagctaactgttcttgctcattcctgcgtataagctaagccaactatgggaggaattcgtttacagtttaactttaagacaagatgataagagtcccttcctgaaactaaccccttccttgctcagggaccaaaactgnctttgtaaacctaataaattgcccacaaggtgagagttatggtaggggcctaaattctgttagaatgtgggcatagttaaattctaaccagtcattgttttataatttgtctttttataactgcttactgcccaggtgtcatgtagctggaggtcatctgtaacttccccaattggtcctatagataacatcactattgtcaaacctaagacaacatttgagatctttttcagacttttgcattctggtgaccaactaactccacttggacctgtgactcataccaagaaacagactcgaaaggtcctgtgtcccccacccagaaatggactcagtgcacaacgacagttttgacattcctatgatttcatccccaaccaatcagcagtacmcattctctagtccctgcccactaaattattcttaaaaaccctagcttccgagttcttgggaaggcagaattgagaaatatctcctgtctttctgctcagcagcctggtgataattaaactctctatcgcaacactttctgtctcagtgtattggtggctttttctgcgttgtgggcaagaagaacctggttgggcaattcaataggtagttactgttcccat

SEQ ID NO: 919826 - DNA, 702 bp, Homo sapiens
ttcttcaggacaattacatttaataatacaatcaacaatccattcacactgcatgtacatgtgtttttttgttattttggtggggggggtttcaaatgtttatcagaaaaatttttaggaaatttaaagtagctctgattgttgcagtttcctcaggtgaaaaaagtaatgatagtcactatggtaaccaagatggagataacgacaagtaaaatcagacccatacgacagaattttgaatgcttctcttgtttctcttcctttttcaataaagtgtcaaaacctggagtgtacatgtctcccaaccaaaaccgcaggtcattaggattttcctaaaagaaaattacatagagaatatgattaatcagtaatcagtcagtgttacaaattaattgagattgcagaacaagacactgtcatggggactgatggtccatattcactctgtcctgggcaaggcttcaatgtcatggctcacatgagcrgtatgaggcttccttgaatagcataaaattgcagctacagtctcctggctgacaaggaatccctgcaattccaatttgtaggtctgcatcagaattaattaggaggccttcatgattctttaattaaattgctcacatcagagggtcagaaacacaacggtgtttctatcacattgtagccaatttggtgttccttacatcctataaatagtgcatg

SEQ ID NO: 919827 - DNA, 451 bp, Homo sapiens
aggaggtggaggttgcagtgagccaagactgcgccattgcgctccagcctgggcaacaggagcaaaactccatttcaaaaaaaaaagaatagtataatcaaaggcacagaggacagaggtaggtaagccacaggttcaggaaatgatatgcaagaaggacatgactttgtttcttatttcacgcagaaaataaaagcaaacgagaataattcatatgctttcactacacccayatattcttcttacttcttttaaattgatgaatgctctctttttaaacctgaagttcactggatcctgttccatctgttcactaaatccctttctctcccctcgaggacttgccttctgcaattgacactgacccttctctttcttgcactgacaaaatattttcctctaccaggtcattcctatcaacagataaacatgttaaaatatattccatctt

SEQ ID NO: 919828 - DNA, 560 bp, Homo sapiens
ataaaggctatctggctgagagttagggtggaaaaggaagtactgacattttgaaaagagaaaatgtgaatcaatcacttagataatgaatgaaatgggtatgtgtattttgattatctggagtaatagtctgtttaaagtcaatggtcatgaatttaggatgataccagtccttatgatgtatgttaccttctagcaatgtacagcatgygagtgcacttgtgaagtgagtttggaaattgccaagtgagtatgataaagtaagagaggagtaagtgcttgacctgaggttgtatgcaagaggctgaaagtggtggatcatggaatttaggtgcaataggaggaatataaagatatgggggctggaaagacagtaaaatggtgataggattgatggagtatagggtcttgaggggttaaagaattcttagtctcagggtgctaaagggaaagacttgttagtctcatggcactaaaaggctagaaatatagaggatgatatcagaaaatagagctgagattatagaacagaaagggagaggggtctggtagtggcaggg

SEQ ID NO: 919829 - DNA, 718 bp, Homo sapiens
tgggacagtcgtgaagagccacatatggcaatgtcatctctcaggaacccaagacgccaaggcccctcactgtaatgtggcaataacgccagctagcatgcagaactgttgtggggtaatgaatggaagctaatgtatgagaaggagctgttacactccaggactctagataccaaattttatsgttatcagtttcacagcaaaaaaaaaaaaaaaaaaaaaagaaagtactcttattctcaaattattcttattagttctggtgtgcacttacatgagaaatggcaaagggatattctgcttgcagtcttttgccctctggcaaaaactttccagacagggtgtcatcgtgtgcagcttccgtgatgcagtttgatcctgataggtaacaagagtgacacgttttatcagaatctttttacatggctcaaggtcacttccaccgacaccagtgctattaatatttcccccattaagccaacccgtcctaagagccaaagagaataccatagttccaggtttcggtttgaaggtgctgatggatgagagtagaagggagtgaatgaggaagcccagaccttcctgcaggagcagggaagcaagacccaggccagcactgcccaccccccaatagccttcccaagggtgaggggcagccatgcggaaactggcactcactaggccaagacagcacaggcctccaaccttcagacaaaag

SEQ ID NO: 919830 - DNA, 756 bp, Homo sapiens
gccggccccgcacccgggcgcggccaggccgtgaggggtgcgctctgcctctctgagcccagcctgccggccggcccgctcaccttgtggctctggtaagtctcgagcgcccggatcgccgtctcggtgagcttcacatgcagtacggtgatgttgtcctgccccagccgtccgcacgacagcccatagcgctgctcctcccgcaggccccctgtcccccccgccgccatcttaaactccccggggtgccgccgccgccgccgctccggctctagcctccactgcggccgcggctgcttgggcttctgcagccgccgccactgctagggccatcccgctgctgacgtactgtcatatactgcgcggagccagacctcggactgccaccgccgccacccgccccaccctccggccccgcgccccgccccgggmtcgtctcattggtcttgttcccttcagaaccgccctcatcggccgccctccactctcacgggggcgggcccaaagtcactagagttttgctcctgggacgggacgtccgagaggtaagaggctgacgtctaggtgacgcgccaacttaatcatgtctgacgtcacgtctggtcgtcttggctagccggccgagattggccaggctggcttggggactcccctgctaattggaagtccaggttgcctggtctggttacctggagttggagccccgcccctgtgggggatagtagtgaaaagtcagaattggggaatctcgcccta

SEQ ID NO: 919831 - DNA, 598 bp, Homo sapiens
actgtgctctaaagtattgcgtgtttgctttatagggtttgtgggctttgttcttaagtgtgtttttgtggtagtaggtattgttctttcatgtccatgtttagaactcccttaaggatatcttgtgaggctagtctagtggtaataaattctcttactgtttgcttatctggaagattttatttctcccttgcttatgaagcttaatttagtagaatataaaattcttggttagaatgtttaattctttaagaatgctgaacatagaacgccaatctcttctggcttgtaaagtttctgctgagaagtatgtttttagccagatgggtttccctttgtacatgatatgttttttttgtctagctgctattaagaktttttttcttgagtatcgatcttggaaagtccagtaaccatatgccttggtgacattcattttgtatagtatatcgcaggtgttctctggatttcttgtatctagtgtctacatctctagcaatattaggaaattttttttgaattatttcctcaaatatatttttgatttggtttactttttctctctctctttcagaaattccaataatgcatacgtttg

SEQ ID NO: 919832 - DNA, 613 bp, Homo sapiens
cttggcaggtggattatctgtctgccttagtttcttcattataatttgaggatgataatagtacatagttcagggtggttgtgagaatcatgacttgatacatctaaggtgttcagaagagtgtttagcccatagcacatgctaaacaaatgtttgtttgtttgttttttatctcttgtgatggctaacattaagtgtcaacttgattggattgaaggatgcaaagtgttgttcctrggtgtatctctgagggtgttgccaaagagattaacatttgaatcagtaaactaagagaggcagacccaacctcactgtgggtgggcaccatctaatcaactgtcagagtggctagaataaagcatgaagaaggtgggagaagccgacttgctgagtcttccagtcaccatctttctgctgtgctggatgcttcatgcccttgaacatcagactccaagttcttcagcttttggactcttggacttacaccagtggtttgccaggggctctcaggccttcaaccacagactgaaggctgcactgtcagcttccctacttttgaggttttgggactcagactggtttccttgctcctcagcttgcagatggcctattg

SEQ ID NO: 919833 - DNA, 576 bp, Homo sapiens
gtgagccgagatcgtgccactgcactccagcctgggtaacagagcaagactccatctcaaaaaacaaaaagaaaagaaaatggaattggactaggagatatcttgacactccccacccttgcaacttagcagcgactcaacaatgaagctgccaaccctcgttccaaaaccttacaagacctgaggctcgtatatacactagtcccccaggaaagccttccctaaccctagagcctctctccccagagccccatcaggtttcctttttggggcctcctgttgttcatctttatctaaacctggattcatgtttgggcagagaagctgtagttgaggttgtcaccgccttctcaaccctcytggggaaggcttgggctagacctggcagaaggggttggataggggatgtccctctccaggtctccccgtggagtgagaccctttccccttgagtgccatggtggctccccaggcatcatcaagccacctggcatcttggtgctttgacatgagatccagtagacaccctgtaaaggaggactgtgggcactgcctgctctctcggcatgggcttct

SEQ ID NO: 919834 - DNA, 672 bp, Homo sapiens
ctgagtctggtggggaggtggagaatctttatgtctagctcagggattgtaaaaacaccaatcggcactctctatctagctcaaggtttgtaaacacaccaatcagcaccctgtgtctagctcagggtttgtgagtgcaccaatcgacactgtatctagctgctctggtggggccttggagaacctttgtgtggatactcygtatctaactaatctgatggggatgaggagaacctttgtatctagctcagggattgtaaacgcaccaatcagcaccctgccaaaacaggccactcggctctaccaatcagcaggatgtgggtggggccaaataagagaataaaagcaggctgcctgagccagcagtcgcaacccgctcgggtccccttccacactgtggaagccttgttcttttgctctttgcaataaatcttgctactgctcactctttgggtccccactgcttttatgagctataacacttaccgtgaaagtctgcagcttcactcctgaagccagcgagaccacgagcccaccgggaggaacgaacaactccagacgtgccgcaacactcaccgcgaaagtctgcagtttcacccctgagccagcgagaccacgaacccaccagaaggaagaaactctgaacacatccgaacatcagaaggaacaaac

SEQ ID NO: 919835 - DNA, 672 bp, Homo sapiens
ctgagtctggtggggaggtggagaatctttatgtctagctcagggattgtaaaaacaccaatcggcactctctatctagctcaaggtttgtaaacacaccaatcagcaccctgtgtctagctcagggtttgtgagtgcaccaatcgacactgtatctagctgctctggtggggccttggagaacctttgtgtggatactctgtatctaactaatctgatggggatgaggagaacctttgtatctagctcagggattgtaaacgcaccaatcagcaccctgccaaaacaggccactcggctctaccaatcagcaggatgtgggtggggccaaataagagaataaaagcaggctgcctgagccagcagtcgcaayccgctcgggtccccttccacactgtggaagccttgttcttttgctctttgcaataaatcttgctactgctcactctttgggtccccactgcttttatgagctataacacttaccgtgaaagtctgcagcttcactcctgaagccagcgagaccacgagcccaccgggaggaacgaacaactccagacgtgccgcaacactcaccgcgaaagtctgcagtttcacccctgagccagcgagaccacgaacccaccagaaggaagaaactctgaacacatccgaacatcagaaggaacaaac

SEQ ID NO: 919836 - DNA, 672 bp, Homo sapiens
ctgagtctggtggggaggtggagaatctttatgtctagctcagggattgtaaaaacaccaatcggcactctctatctagctcaaggtttgtaaacacaccaatcagcaccctgtgtctagctcagggtttgtgagtgcaccaatcgacactgtatctagctgctctggtggggccttggagaacctttgtgtggatactctgtatctaactaatctgatggggatgaggagaacctttgtatctagctcagggattgtaaacgcaccaatcagcaccctgccaaaacaggccactcggctctaccaatcagcaggatgtgggtggggccaaataagagaataaaagcaggctgcctgagccagcagtcgcaacccgctcgggtycccttccacactgtggaagccttgttcttttgctctttgcaataaatcttgctactgctcactctttgggtccccactgcttttatgagctataacacttaccgtgaaagtctgcagcttcactcctgaagccagcgagaccacgagcccaccgggaggaacgaacaactccagacgtgccgcaacactcaccgcgaaagtctgcagtttcacccctgagccagcgagaccacgaacccaccagaaggaagaaactctgaacacatccgaacatcagaaggaacaaac

SEQ ID NO: 919837 - DNA, 838 bp, Homo sapiens
gcggaatcacgctcaggatgccctggaggcagtccacagtgtggggcagctcaattgtcttatacgcaaacttggaactttcagtatcgtccttggagcacagtataatggggcgaccctagagcagagaaatagcatcataaaatagaccctctctgaaagaagctatccctgatgcatacagagtatctggaagctacattactgtgatgagaacagtcctcttttgcatttgctggagtcatgggtgaggtggtatgtgtgggacacaaatgcttggaaaggataaagtgtctgatgctttttgggggtttcttccccttccctggtaaggagattgccatcctgctgcatcatttggcacccatttgtgccttgccgagagcggggcagactcactcctaactctagcggggctcatagtctagtggtagaaaacaaaaacctagacaagcaaaccaagaaataaagatgaattccaggccgggcgtggtggctcacgcctgtaatcccaacactttgggaggctgaggcgggyggatcacgaggtcaggagatcgagaccatcctggctaacatggtgaaaccctgtctctactaaaaaatacaaaaaattagccgggtgtggtggcgggggcctgtagtcccagctactggggaggctgaggcaggagaatggcgtgaacctgggaggcggagcttgcagtgagccgagatggcgccactgcactccagcctgggcgacagagccagactccgtcacaaaaaaaaaaaaaaaatgaattccaaagaaatgccaccaaggctagaaaacaggataatgtcattgggagactgg

SEQ ID NO: 919838 - DNA, 838 bp, Homo sapiens
gcggaatcacgctcaggatgccctggaggcagtccacagtgtggggcagctcaattgtcttatacgcaaacttggaactttcagtatcgtccttggagcacagtataatggggcgaccctagagcagagaaatagcatcataaaatagaccctctctgaaagaagctatccctgatgcatacagagtatctggaagctacattactgtgatgagaacagtcctcttttgcatttgctggagtcatgggtgaggtggtatgtgtgggacacaaatgcttggaaaggataaagtgtctgatgctttttgggggtttcttccccttccctggtaaggagattgccatcctgctgcatcatttggcacccatttgtgccttgccgagagcggggcagactcactcctaactctagcggggctcatagtctagtggtagaaaacaaaaacctagacaagcaaaccaagaaataaagatgaattccaggccgggcgtggtggctcacgcctgtaatcccaacactttgggaggctgaggcgggtggatcacgaggtcaggagatcgagaccatcctggctaacatggtgaaaccctgtctctactaaaaaatacaaaaaatkagccgggtgtggtggcgggggcctgtagtcccagctactggggaggctgaggcaggagaatggcgtgaacctgggaggcggagcttgcagtgagccgagatggcgccactgcactccagcctgggcgacagagccagactccgtcacaaaaaaaaaaaaaaaatgaattccaaagaaatgccaccaaggctagaaaacaggataatgtcattgggagactgg

SEQ ID NO: 919839 - DNA, 722 bp, Homo sapiens
atgtctaacaaacaccaaaatcagcttgctactcaatgggatggctgcttctcttgagacaagcatcacacttcagtgtagagcagaaaggctttttctctttttccagacggagttttgctcttgttgcccagactggagtgcaacggcgtgatctcagctcattgcaacctctgcttcccaggttcaagtgattctcctgactcagcctcccaagtagctgggattaaaggcgcacaccaccacacccagctatttttagtagagatggggtttcactgygttggtcaggctggtctcgaactcctgacctcaggtgatccgctcgccttggcctcccaaagtgctgggattacaggcatgagccaccacgcctggccccagtagaaaggcgctacgtgtactccccatttcatcataaaggatattacaaagagttgcaatttacagactaataatttttaccacctcatcaaggccattccttttttttttttgagatggagtatcactctgtcacccaggctggagtgcagtggtgcgatctcggctcactgcaaactctgcctcccaggttcacgccattcttctgcctcagccccccgagtagctgggactacaggtgcccaccaccacgcccggctaattttttgtatttttagtagagacggggtttcaccatgttagccaggatggtctcgatctcctgacctcatgatctg

SEQ ID NO: 919840 - DNA, 722 bp, Homo sapiens
atgtctaacaaacaccaaaatcagcttgctactcaatgggatggctgcttctcttgagacaagcatcacacttcagtgtagagcagaaaggctttttctctttttccagacggagttttgctcttgttgcccagactggagtgcaacggcgtgatctcagctcattgcaacctctgcttcccaggttcaagtgattctcctgactcagcctcccaagtagctgggattaaaggcgcacaccaccacacccagctatttttagtagagatggggtttcactgcgttggtcaggctggtctcgaactcctgacctcaggtgatccgctcgccttggcctcccaaagtgctgggattacaggcatgagccaccacgcctggccccagtagaaaggcgctacgtgtactccccatttcatcataaaggatattacaaagagttgcaatttacagactaataatttttaccacctcatcaaggccattccttttttttttttgagatggagtmtcactctgtcacccaggctggagtgcagtggtgcgatctcggctcactgcaaactctgcctcccaggttcacgccattcttctgcctcagccccccgagtagctgggactacaggtgcccaccaccacgcccggctaattttttgtatttttagtagagacggggtttcaccatgttagccaggatggtctcgatctcctgacctcatgatctg

SEQ ID NO: 919841 - DNA, 722 bp, Homo sapiens
atgtctaacaaacaccaaaatcagcttgctactcaatgggatggctgcttctcttgagacaagcatcacacttcagtgtagagcagaaaggctttttctctttttccagacggagttttgctcttgttgcccagactggagtgcaacggcgtgatctcagctcattgcaacctctgcttcccaggttcaagtgattctcctgactcagcctcccaagtagctgggattaaaggcgcacaccaccacacccagctatttttagtagagatggggtttcactgcgttggtcaggctggtctcgaactcctgacctcaggtgatccgctcgccttggcctcccaaagtgctgggattacaggcatgagccaccacgcctggccccagtagaaaggcgctacgtgtactccccatttcatcataaaggatattacaaagagttgcaatttacagactaataatttttaccacctcatcaaggccattccttttttttttttgagatggagtatcrctctgtcacccaggctggagtgcagtggtgcgatctcggctcactgcaaactctgcctcccaggttcacgccattcttctgcctcagccccccgagtagctgggactacaggtgcccaccaccacgcccggctaattttttgtatttttagtagagacggggtttcaccatgttagccaggatggtctcgatctcctgacctcatgatctg

SEQ ID NO: 919842 - DNA, 614 bp, Homo sapiens
gaagcacaagcaggcacatcacatggtgaaagcaggagcaaaagagagagaaaggggaggcgctacacctttttttttttttaaatagagacagagtctcgctctgttgcccaggctggagtgcagtagtgcagtctcagctcattgccaacctccgctgcccaggttcaagcgattctcgtgcctcagcctctagagtagctaggactacagtcatgtaccacaatgtctggctaattttttttgtatttttatttagtagagayggggtttctccatgttggccaggctagtctcaaactcctgacctcaggtgatctgcccgccttggcctcccaaagtgctgggattacaggcatgagccactgtgcccggcccaccacacacttttaaatgaccagatctcatgggaattacttactataacaaggacagcaccaagggggtgacactaaataactcatgagaaatctgcccccacaatccaatcacttcccactaggctccacctccaacattggggattaaatttcaacatgagatttggatagggaaaatatacaaactgactcctgaaccagctggacagtcttctcatgaccttatgtcatgga

SEQ ID NO: 919843 - DNA, 725 bp, Homo sapiens
caggagcacgaaccatattgtgaactgtgcatgtgagggatgtaggttgtgtgctctttataagcatctgactaatgcctgatgatctgagggggaacggtttcaccctgaaaccattgctaccccccatactgccaccctactccccmcatccgtggaaaaattgtcttccatgaaaccatccatggagccaaaaaggctggggaccactggtatagcctactacacacctaggctatacagtctagtctatgctcctaggctacaaatctgtacagcgtgttactatactgattactgtaggcaattgtaacacaatggtaagtatttgcgtatctaaacatatctaaacagaggaccgggctcggtggctcacacctgtaatcccagcactttgggagaccaaggcgggcggatcacctgaggtcaggaactcaagaccagcctggccaacatggtgaaaccctgtctctactaaaaatacaaaattagccaggtgtggtggcgcctgcctgtaatcccagttactcggaggctgagacaggaaaatcacctgagcccgggaggcggaggttgcagtgagccgagattacgccacttcactccagtctgggtgacagagcgagactccatctcaaaaaaaaaaaaccaaaaataaaaaaattagccaggcatggtggcacacacctgtaattgcagctactcaggaggctgaggcacaagaa

SEQ ID NO: 919844 - DNA, 591 bp, Homo sapiens
tgacacagaagacgggtgatttctgcatttccatgttagataccgggttcatctcactagggagtgccagacagcgggcgcaggccagtgggtgtgcacaccgtgcgcgagccgaagcagggtgaggcattgcctcacttgggaagcgcaaggggtcagggagttccctttcagagtcaaagaaaggggtgatggayggcacctggaaaatcgggtcactcccacacgaatactgctcttttccgtcgggcttaaaaaacggcgcactacgagattatgtcccacacctggttcggagggtcttacgcccacggagtctcgctgattgctagcacagcagtctgagatcaaactgcaaggcggcagcgaggctgggggaggggcgccctccattgcccaggcttgcttaggtaaacaaagcagcctcgaagctccaactgggtggagcccaccacagctcaaggaggcctgcctgcctctgtaggctccacctcttggggcagggcacagacaaacaaaaagacagcagtaacctctgcagacttaaatgtccctatctgacagctttgaagagagcagtggttctcccag

SEQ ID NO: 919845 - DNA, 591 bp, Homo sapiens
tgacacagaagacgggtgatttctgcatttccatgttagataccgggttcatctcactagggagtgccagacagcgggcgcaggccagtgggtgtgcacaccgtgcgcgagccgaagcagggtgaggcattgcctcacttgggaagcgcaaggggtcagggagttccctttcagagtcaaagaaaggggtgatggatggcacctggaaaatcgggtcactcccacacgaatactgctcttttccgtcgggcttaaaaaacggcgcactacgagattatgtcccacacctggttcggagggtcytacgcccacggagtctcgctgattgctagcacagcagtctgagatcaaactgcaaggcggcagcgaggctgggggaggggcgccctccattgcccaggcttgcttaggtaaacaaagcagcctcgaagctccaactgggtggagcccaccacagctcaaggaggcctgcctgcctctgtaggctccacctcttggggcagggcacagacaaacaaaaagacagcagtaacctctgcagacttaaatgtccctatctgacagctttgaagagagcagtggttctcccag

SEQ ID NO: 919846 - DNA, 589 bp, Homo sapiens
ctaacacttttgttttcgtatttcaatatgcattttcaggagagacccgagtagggaaaaagcaagtatttctgagcactcaaactatattgtttgcccatatatctaactgcgtgagatagaaagtttgttatcctttctctctgaattaggttcagcaaatttcactcttcttatgagtaactaactgcatgattacgtgggtccttagattgctagtgcrtgctagcccctcatttcacaggctgaacttgtacaaagcaagttcctagcagatttgtgacaggaatcaggtctccaaacttgccatccttattcacttcatctcacagctctacctcctctcttaagaaaattttattattagaaacttgtacatgaaaaaaatatattcatttatttttttaaaatgtactttttctgcttgtaggtagacatgggtaaccaaaattattaaataaaactggacagactctttttcctttgtccaatacactgttatttcagttgtaaattttaagtgaaaaatcacctgaggatgtcactttgatgaatgttttccttcattatcatcaaattccataaatcc

SEQ ID NO: 919847 - DNA, 624 bp, Homo sapiens
tcacctgtagtttactagcagctattaagaaatgctgccccgggcgggggcgcggtggctcctgcctgtaatcccagcactttgggaggccgaggcgggtggatcacgaggtcagaagatcgagaccatcctggctgacatggtgaaaccccgtctctactaaaaatacaaaaaattagccgggcgtggkggcgggcgcctgtagtcccagctactcgggaggctgaggcaggagaatggcgtgaacccaggaggcgaagcttgcagtgagccgagatcacgccactgcactccagcctgggcgacagagtgagactccgcctggaagaaaaacgaaagaaaaataaaataaaataaaataaaataaagaaatgctgcccctgccacccccacatcctattctaaaagcaagccatattcctctccccacaccacactgagcaggataagtaggttccattccactctaaaaagtgtttgcgtttccaaggaagatgcaggttgtcttggaagaaagaatttaggactatcagtcattcacactctagtgagaattaacaaactacaaaagtgacaagtaattggactctactttgtaaactgaaacaggagacatgaccagat

SEQ ID NO: 919848 - DNA, 624 bp, Homo sapiens
tcacctgtagtttactagcagctattaagaaatgctgccccgggcgggggcgcggtggctcctgcctgtaatcccagcactttgggaggccgaggcgggtggatcacgaggtcagaagatcgagaccatcctggctgacatggtgaaaccccgtctctactaaaaatacaaaaaattagccgggcgtggtggcgggygcctgtagtcccagctactcgggaggctgaggcaggagaatggcgtgaacccaggaggcgaagcttgcagtgagccgagatcacgccactgcactccagcctgggcgacagagtgagactccgcctggaagaaaaacgaaagaaaaataaaataaaataaaataaaataaagaaatgctgcccctgccacccccacatcctattctaaaagcaagccatattcctctccccacaccacactgagcaggataagtaggttccattccactctaaaaagtgtttgcgtttccaaggaagatgcaggttgtcttggaagaaagaatttaggactatcagtcattcacactctagtgagaattaacaaactacaaaagtgacaagtaattggactctactttgtaaactgaaacaggagacatgaccagat

SEQ ID NO: 919849 - DNA, 684 bp, Homo sapiens
gggcttccccttgtgggtaacccaacctttctctctggctgcgcttaacattttttccttcattacagctttagtgaatctgacaattatgtgtcttggagttgctcttctcgaggagtatctttgtggcgttctctgtatttcctgagtttgaatgttggcctgccttgctagattggggaagttctcctggataatatcctgcagagtgtcttccaacttggttccattctccccgtcactttcaggtacaccaatcagacgtagatttggtcttttcacatagtcccacatttcttggaggctttgttcatttctttttattttttttttctctaaacttctcttctcacttcatttcattcatttcatcttccatcactgataccctttcttccagttgattgcatcagctactgaggcttctgcattcgtcacatagttctcgtgccacagttttcagctccatcaggtcctttaaggacttmtctgcattggttattctagttagccgttcatctaattttttttttaaggtttttaacttctttgccatgggtttgaacttcctcctttagctcggagtagtttgatcgtctgaagccttcttctctcaactcatcaaagtcattctccatccagctttgttctgttgctggtgaggagctgcgttcctttggagga

SEQ ID NO: 919850 - DNA, 580 bp, Homo sapiens
ggcgctgcagctgccttcttacctgcaggacccgggcatctctgcagcctgcaccctcgggggccccagaaaggacccctcccttcccccacttctgtccctgtaggctctggggcgtctgctcccactacctggcttttctccactcctggcaactgctccgatcttggatcggatttggggccgagccctgggggccttgaatgaccacaggaggcagacggagtccttggcggaagggggaaggtccccagtaaaggtccctctttcaggtcagggcgggccttgaaggctgggctgccagtcctgcggacctgagtggagactcgtggtgcctcttctggacccgcccatggccacgcatgggccaatcggcatgcacttcctccccgcctgaggyctataaaagtcccgggaccaggcggactcggcaggagaacgaccagccagagaggacggcggagaggctgctggacagaccaatagctggaaagagaagggtactcgctccactgcgagatgcagggacttgccggcagagaggagctactgtctttgcttagagcttcggagacctgca

SEQ ID NO: 919851 - DNA, 432 bp, Homo sapiens
agtggctcacacctgtaatcccagaactttgggaggccgaggtgggtggattgcttgaggtcaggagtttgagaccaacctggccaacatggcaaaaccccatctctactaaaaatacaaaaatttagccaggcggggtggcgcctgcctgtaatcccagctacttaggaggctgaggcaggataatcgtttgaagccggaagacagaggttgcagtgagccgagatcrcgccactgcactccagcctaggctacaaagtgagactttgtctcaaaaaaaattaaaaaaataaaaaaactgttggctcttactgtgagtgagatgggagctgcctggcctagcaagggacttccaggacctgtttccactaaagctggcaggactttttctcctccgggtacaaagactggcctgccatggagcttctcttc

SEQ ID NO: 919852 - DNA, 569 bp, Homo sapiens
cagctgggagtttcagcaagactcacgtctccaacaactgagctccccaggtgagcaattcctgttccttttgagggcttacagctctaagggagtctgcctgagagggtcatgatcagttgagcaagcagggggtacatgactgggggctacwtgcacaggtagtcagaacagaacagaacaggacagggattttcacaatgcttttccatacaatgtctggaaactatggctaacataactggttaggtcaggggtcgatctttaaccaggcccagggcacggcgctgggctgtctgcctgtggatttcatttctgccttttagtttttacttcttctttctttggaggcagaaattgggcataagacaatatgaggggtggtcacctcctttagtgtatgtattttattaatttcttaaaaaaaaaaaaaacagattctgggccaggcacggtggctcatgcctgtgatcccagcacttttggaggccaaggtgggtggatcacgaggtcaggagtttgagaccagcctgaccaacatggtgataccccatctctactaaaaatat

SEQ ID NO: 919853 - DNA, 610 bp, Homo sapiens
gagctcggttacagagatatctgggaggcaacatcatgaaaaggtagggtggtgtcctatagaatgtggtacattaatttaataagcagtcaatatatggagctgtctccccactatcaggatgcacaggtctcagagccaaagggtagaaggagtgtttctgttcaatagtatacctaagaatctacgtgaatartttttgcttcccattcccaaaatgttgggcttggtgggtttagaaattctagagtccaagagtagaacacttccttcaggaaaaataatcatgttttgatgatttaggagccgagactggccctggccttttgaggttcctcatgccattaaagtaacagaaaagcagctcaatggactggccagggtagctaattccagttatcagaggaaaactgtgtttctgttttacaatggaaacaagaaggctatataggctatatatggaaacgaggaaattcactggaatgcctcttagtgctaacagtcctagtcagtggaaaactgcagcaacccagtaaagacaggcctatcaacggctcaattctgtagaaatgaaggtttaggtcacttcattagacaaagaatcccatct

SEQ ID NO: 919854 - DNA, 590 bp, Homo sapiens
ggataatacggcttcctcattttgggacattcatcctttgaaccctgggttaccacattaaaggaaagccaagccgtatggagcaactgcgtgcaggtgctgtgttctgcaggcttagctttaggtcattccaatgcagacttttagaaaattccagtttatagctgtcaactctcctccaggcttcaagtcttcccaagtgaggttccagacatctaggagccaaccctgcagtaccctgtctaaattccagacccagggaacataggaacataatgaaatgattgttttcagccgctaagtgttggcgtagtttgttatgcagcaattggtatctgaaacacagcaactgggtgctccccacgtcagagtcctcagcctacagcaacaagcctgaaaccaagcaggggctcaataacagcagttgagtaaatggggagggaatatyggaatgaatcagcatgcacctttatgttttatattttattaattttatttcattatttattttttatagagatgggtgtcttgttatggtgcccaggctggtctcaaactgctggcctcaagcgatccatctgccttggctt

SEQ ID NO: 919855 - DNA, 430 bp, Homo sapiens
ctgcacggaagctagactggaggcaaagttgccagttaggaagccactgcaatacagcaggtgagagatggcagtggctaggctcaagccaacagcaaaggaagtggtggaaagtggtcatattacgaatatattctgamgatagcataaacaagtcttcctgatggattggatgttgctgtaagagtaaaaaagagtaatcaaaaatgaccttaaagttttggcctgatgagtgggaaaacggagttgctccttcttgagatggggaagacttcaggaagaacacagaagctctcactatgctaagacctctgtttttgaaacattagtttgagatgcctgtggacgtaggcttcccaaaatggcgctgtatggtggtggctatatgtatctgaaattctgggaagaggtccagggtggagccatcacc

SEQ ID NO: 919856 - DNA, 430 bp, Homo sapiens
ctgcacggaagctagactggaggcaaagttgccagttaggaagccactgcaatacagcaggtgagagatggcagtggctaggctcaagccaacagcaaaggaagtggtggaaagtggtcatattacgaatatattctgaagwtagcataaacaagtcttcctgatggattggatgttgctgtaagagtaaaaaagagtaatcaaaaatgaccttaaagttttggcctgatgagtgggaaaacggagttgctccttcttgagatggggaagacttcaggaagaacacagaagctctcactatgctaagacctctgtttttgaaacattagtttgagatgcctgtggacgtaggcttcccaaaatggcgctgtatggtggtggctatatgtatctgaaattctgggaagaggtccagggtggagccatcacc

SEQ ID NO: 919857 - DNA, 597 bp, Homo sapiens
gagagggagaggcttgcaacaatgtggggtgagaggaatgcaaccacaatgactgcctgcctctttatctgcacctgtctgatcagaagcagcaatcagcaatcagagcacagatccccaacatgtggagcacggggtcctttttgcccactctggctcttgcaagttgtgtgcaggttccttcagaaacacatgcatgcctgcctgccatgtagctgaggggtagagaatgagtagttgcaaccttactaagccaaaattgacacaaattaactacaatttactatttaagccttccccagaaagttgcaagccttcaatagacttcagacttccgaaatagttgcatcagatgattctgccagtacaattrttggtaggtagagagacagattcctggtgcatcctactcagccatcttcccagaaccctcagatttcatgtattttctgttacatttccagttgttgccaaaattcttttttaattttacttttatgttctgggagacatgtgcagaatgtgcaggttttttacataggtatacatgtgccatggtggttggctgcacctatcaacccatcatgtaagttttaa

SEQ ID NO: 919858 - DNA, 756 bp, Homo sapiens
ttaaatatagaacccaatctgtagccctgggcaccctaaccagaagtattaattttatagtttagcaaatacggtaatgcaccaaataacaacatttcagtcagggacagacctcatatacaacagtggtcccataagattataatggaactgccctatatagtgtaaccgtttttatcttctatacagtgtttttactgtactttttctatggttagacatgttgagatattaaaatacttatcattgtgttataattgcctacagtattcaggacagtaacatgctgtaccggtttgaagcctggtagcaacaggctatgccatacagcttaggtgtgaagtagggtttaccatctaggtttgtgtaagtgcactctatgatgtttgcacaatgacaaaatcgcctaaggaktcatgtctcagaatgtatccccatggctaactggtgcacgactgtacttactaagtctatcctatgtaccagccattgttctaagtgtggggaccaaaaagacaacttctgaccctcttgaagcttacattctgagaaagcgagtcagacagtgaccaaaatcagtaaaccatatagtgatttagaagtcttaagtgcaatggaaaggaacagaaagggaggatggagaattgggggcaaggagatgatgcagtttgatcagggcaagccctgctgagaaaaaatgattttggaggaaacacccaaacagagtgtgaaagtaatccatgttcatgaagaaga

SEQ ID NO: 919859 - DNA, 756 bp, Homo sapiens
ttaaatatagaacccaatctgtagccctgggcaccctaaccagaagtattaattttatagtttagcaaatacggtaatgcaccaaataacaacatttcagtcagggacagacctcatatacaacagtggtcccataagattataatggaactgccctatatagtgtaaccgtttttatcttctatacagtgtttttactgtactttttctatggttagacatgttgagatattaaaatacttatcattgtgttataattgcctacagtattcaggacagtaacatgctgtaccggtttgaagcctggtagcaacaggctatgccatacagcttaggtgtgaagtagggtttaccatctaggtttgtgtaagtgcactctatgatgtttgcacaatgacaaaatcgcctaaggatkcatgtctcagaatgtatccccatggctaactggtgcacgactgtacttactaagtctatcctatgtaccagccattgttctaagtgtggggaccaaaaagacaacttctgaccctcttgaagcttacattctgagaaagcgagtcagacagtgaccaaaatcagtaaaccatatagtgatttagaagtcttaagtgcaatggaaaggaacagaaagggaggatggagaattgggggcaaggagatgatgcagtttgatcagggcaagccctgctgagaaaaaatgattttggaggaaacacccaaacagagtgtgaaagtaatccatgttcatgaagaaga

SEQ ID NO: 919860 - DNA, 756 bp, Homo sapiens
ttaaatatagaacccaatctgtagccctgggcaccctaaccagaagtattaattttatagtttagcaaatacggtaatgcaccaaataacaacatttcagtcagggacagacctcatatacaacagtggtcccataagattataatggaactgccctatatagtgtaaccgtttttatcttctatacagtgtttttactgtactttttctatggttagacatgttgagatattaaaatacttatcattgtgttataattgcctacagtattcaggacagtaacatgctgtaccggtttgaagcctggtagcaacaggctatgccatacagcttaggtgtgaagtagggtttaccatctaggtttgtgtaagtgcactctatgatgtttgcacaatgacaaaatcgcctaaggattcatgtctcagaatgtatccccatggctaactggtgcacgactgtacttactaagtctatcctatgtaccagccatygttctaagtgtggggaccaaaaagacaacttctgaccctcttgaagcttacattctgagaaagcgagtcagacagtgaccaaaatcagtaaaccatatagtgatttagaagtcttaagtgcaatggaaaggaacagaaagggaggatggagaattgggggcaaggagatgatgcagtttgatcagggcaagccctgctgagaaaaaatgattttggaggaaacacccaaacagagtgtgaaagtaatccatgttcatgaagaaga

SEQ ID NO: 919861 - DNA, 726 bp, Homo sapiens
caacatgccctgcaggtgcttccgatgaggcccaaggttgaaaatcgcagctgtaatgaataggtgggaggttgtgcagagaggatgctcaggcgtgggtgtggaaggacagagtaaatgggcaggttggttggcaggttggccaacaagttccaataccttcacccggctttcaaggctctrtatctttggtccacccttggcagttcgtttctgttccattttttccagcatggtttttagaacaaacctgaccaatgaccagatcatgtatgaatgaatgaatgaatgaatgaatgaattaggtaattaatgtttgtttggggtttcaacagtcacagaaagaaaaattcacaagcccccagggcagaaaagtgaatgcattgcggccagttgtcagcagcatccacatagggagtccagcgggtatggagagggtaggaggtgataggtgggagcaggtggcagagggcctgattgcaagccaagggtgacccctttgttctgcagacaatacaagtgctgttagggatctttgaggaagaccatgatagggtgggtccagaccttaggaaaacacagtctctgtggaactctcagatctgcctagttctgacccaaccccaggttccattttgggttctgccatttatgcactgggcaaccctggggaaagtgttaattaaacctcggtttcctcatgtgtaaagggtgtgatcatgcctc

SEQ ID NO: 919862 - DNA, 549 bp, Homo sapiens
gttgtgcagagaggatgctcaggcgtgggtgtggaaggacagagtaaatgggcaggttggttggcaggttggccaacaagttccaataccttcacccggctttcaaggctctgtatctttggtccacccttggcagttcrtttctgttccattttttccagcatggtttttagaacaaacctgaccaatgaccagatcatgtatgaatgaatgaatgaatgaatgaatgaattaggtaattaatgtttgtttggggtttcaacagtcacagaaagaaaaattcacaagcccccagggcagaaaagtgaatgcattgcggccagttgtcagcagcatccacatagggagtccagcgggtatggagagggtaggaggtgataggtgggagcaggtggcagagggcctgattgcaagccaagggtgacccctttgttctgcagacaatacaagtgctgttagggatctttgaggaagaccatgatagggtgggtccagaccttaggaaaacacagtctctgtggaactctcagatctgcctagttctgaccc

SEQ ID NO: 919863 - DNA, 563 bp, Homo sapiens
cttagaagcactagataggatccctcccaggtgggctcgagcttcccttctttccaacccttgatgaggacgttgtctccaggctggtggtggtgaactggaaattcgaggggtggcctctgtgctaggaggcctttggttctaagggaagasaaagtggaggatggaccaagtatatagtttttggggaatagatcttttgtttcaaatgtaggaatgtcagcagtggagtgtaaacaaagcaacccaaacagcatttcataaggggtaagccaacatcttttggaggggcagttcagattctcaacaagacaatggaaaggcatttaatccacggtaattgaatctctaggactaatttggttaggtgtttcttcagagtctagttcattcttctcttcctgatgaaggtgggtgccaggggatatggtagtcccatgttatatccagtacttgggctagtttcttaatgacatttgtagtgaaatgagtcctattatctgaatcaacattttctattaatctgaacctgggtatagtattttcaacaaatgtcttgactg

SEQ ID NO: 919864 - DNA, 629 bp, Homo sapiens
gtaagaaatttttacccttttgctgccagcatattaggcttctgggttcccttccccttagttcaactttaagccaaacattttaaggtttggagaattaacttttcccaagttgaaagtacacaaagaaaagatgcaattttaaaccacaagagaaggaaaaacaccatagaaaggagttctactaagggttaagaggtaatacctctcttcctgttgggaatggtgtttcccctatttctttgccttccctattttctcttttcccttctggcctactataggagacatattgcttatctccaaaattttcttctgcttgcrgaactgcctattttagctaaaatgagggtttgactttgcagcaacataaccttccctccatgtgagatcaaatacctgagttaaattttggaaagcttccatgtatctaacaggttcatcaaaagatcagccttagtttctctttacttgcctaaggtcctgcaatgagaagggaactttaaggagcgccaaataagggagacccttagatgacttccctgaaagttactttaattttgggaactattttccccgagcctgcccgatatggccacaaaagaaaataagccactttttcttcagag

SEQ ID NO: 919865 - DNA, 629 bp, Homo sapiens
gtaagaaatttttacccttttgctgccagcatattaggcttctgggttcccttccccttagttcaactttaagccaaacattttaaggtttggagaattaacttttcccaagttgaaagtacacaaagaaaagatgcaattttaaaccacaagagaaggaaaaacaccatagaaaggagttctactaagggttaagaggtaatacctctcttcctgttgggaatggtgtttcccctatttctttgccttccctattttctcttttcccttctggcctactataggagacatattgcttatctccaaaattttcttctgcttgcggarctgcctattttagctaaaatgagggtttgactttgcagcaacataaccttccctccatgtgagatcaaatacctgagttaaattttggaaagcttccatgtatctaacaggttcatcaaaagatcagccttagtttctctttacttgcctaaggtcctgcaatgagaagggaactttaaggagcgccaaataagggagacccttagatgacttccctgaaagttactttaattttgggaactattttccccgagcctgcccgatatggccacaaaagaaaataagccactttttcttcagag

SEQ ID NO: 919866 - DNA, 629 bp, Homo sapiens
gtaagaaatttttacccttttgctgccagcatattaggcttctgggttcccttccccttagttcaactttaagccaaacattttaaggtttggagaattaacttttcccaagttgaaagtacacaaagaaaagatgcaattttaaaccacaagagaaggaaaaacaccatagaaaggagttctactaagggttaagaggtaatacctctcttcctgttgggaatggtgtttcccctatttctttgccttccctattttctcttttcccttctggcctactataggagacatattgcttatctccaaaattttcttctgcttgcggaactgcctattttagctaaaatgagggtttgactttgcagcaacataaccttccctccatgtgagrtcaaatacctgagttaaattttggaaagcttccatgtatctaacaggttcatcaaaagatcagccttagtttctctttacttgcctaaggtcctgcaatgagaagggaactttaaggagcgccaaataagggagacccttagatgacttccctgaaagttactttaattttgggaactattttccccgagcctgcccgatatggccacaaaagaaaataagccactttttcttcagag

SEQ ID NO: 919867 - DNA, 629 bp, Homo sapiens
gtccactccagaccctgtttgcctgggtatcacctgcagaggctgcagaacagcaactattgcagaatggcaaatgttgctgcctgatccttcctctggaagctttgtctcagaggggcacccaaatgtgtgaggtgtcagtcggcccctactgggagatgtctgccagttaggttactcgggggtcagggacccacttgagraggcagtctgtccgttctcagatctcaaactccatgctgggagaaccactactctcttcaaagctgtcagacaaggaagtttacatctgcagaagtttctgctgccttttgttcagctatgccctgcctccagaggtggcctctacagaggcaggcaagccttcttgagctgtggtgggctccacccagttcaagcttcctggccactttgtttacctactcaagcctcagcaatggcagacgcccctcccccagcctcactgctgccttgcaatttgatctcagactgctgtgctagtggtgagcaaggctccgtgggtgtggggccctccaagccaggcatgggatataatcttctggcatgccatttgctaagaccattggaaaagcgcagtagtagggtgggagtgtcctgattttccaggt

SEQ ID NO: 919868 - DNA, 586 bp, Homo sapiens
ctcaattttcagatgggaaactgcagtgcagggaaggaacgtgcctgtgtttttggtcacctagctctttcgcactagacccccgggtctcctgactcctgcccctggcttgtttgctccacagaactctccgctaatgtggaggggaactgactctgcagggaccagcagtcacacttgcctcctccatttcaatcttggacttggccaggaggagcttgcggtcaaagtcacgctgcttctgctcccgctcggcctccaggtcagtcacctgcttctgcaaatcagccagcttctgacgcagctcagtgatctgggttcagaggcagagaggagtgtgtgaggcaaggatgtagagcacttgcaggatgtgggcagggcctggctgcccctgggccctccaacactgcccccaacttctcctctgggccatactggggctcagcgkggccactccccaaggttcaaagctgctaaagaggcagcgagatgaagaccaggcatgccctgtgggcgtggccaggaaccccacattaccttctgctcatactgctgcttcatggaccggaaatgctggtcccactgc

SEQ ID NO: 919869 - DNA, 586 bp, Homo sapiens
ctcaattttcagatgggaaactgcagtgcagggaaggaacgtgcctgtgtttttggtcacctagctctttcgcactagacccccgggtctcctgactcctgcccctggcttgtttgctccacagaactctccgctaatgtggaggggaactgactctgcagggaccagcagtcacacttgcctcctccatttcaatcttggacttggccaggaggagcttgcggtcaaagtcacgctgcttctgctcccgctcggcctccaggtcagtcacctgcttctgcaaatcagccagcttctgacgcagctcagtgatctgggttcagaggcagagaggagtgtgtgaggcaaggatgtagagcacttgcaggatgtgggcagggcctggctgcccctgggccctccaacactgcccccaacttctcctctgggccatactggggctcagcgtgkccactccccaaggttcaaagctgctaaagaggcagcgagatgaagaccaggcatgccctgtgggcgtggccaggaaccccacattaccttctgctcatactgctgcttcatggaccggaaatgctggtcccactgc

SEQ ID NO: 919870 - DNA, 543 bp, Homo sapiens
ttcccaaagtgctgggattacaggcatgagccaccacacctggcctgagattctttcttctgcttgatcgtgtctattgttgaaactttcaaatgtattttgtatttcattgaataagttcttcagttccagaatatttttgttcttttttgtgatgtatatctctgtggcaaatttctcatttatatcctgaattattytgtgatttctttgtattgtttttctgaattgtcttttatctcactgagcttcttcatcaaaattttgaattttttttgagatttcatgactttctttttgttctgatctgttgctggagaattgtgttctcttagaggtgcaatatttccttaatttttttcatgtttcctgtgtccttacattaataatctggacgtctggtgtaacagtcacttcttccaatttttttttatttttgagatggagtctcgctctgtcgcccaggctggagttcagtggcgcaatctcggctcactgcaagctccgcctcctgtgttcacaccattctcccacctcagcctc

SEQ ID NO: 919871 - DNA, 600 bp, Homo sapiens
gtccagaggaggtgactaagtgaaactagcaatgcagccttcaaaatcacagcttcagatagcctagcatttgaatacaaccacgcagcccaccaactcactacaacaattctttgagctcatctccaaggactcatgtttttcttttttcccrtggctcccaccaatcttcacttcccttccctgctccactaaaataatgtccttcgaaatatcctcagttcccatgacccgcaattcctagggtaaaatcctgcaggaacctgaccagccatgaggccccactcaccctcagactacatcagtgcagataaacaatgatagggattattcaaccagacaaaagagtatagatgtaattcacaatgcattgccttaaatttcccagaaatttaactacctttcttcattatgttccatctctagtctcagcaacactggcaaccccctccttactttcatctgataatcttgcctcattctctttaagaatctctagaagctgtaagatgcgaattttatcccaaatctagaagccctttgtgtctacacccatcttttcctactcttttatttcaatgggaaaaaaaaaaacctcaa

SEQ ID NO: 919872 - DNA, 542 bp, Homo sapiens
catagagcagtgagccctggacccattccaggaaactatttttccctcctaggcctgtgatgggagggtatgctgtgaagttctctgacatacctagagacattttccccattgccttagtgattaacatttggctccttgtttcttagacaaatttctgcagctagcttgaatttctccccagaaaatgagattttgttttctatcacattgtcaggctgtcaattttccaaacttttatgctctgcttcttcttgaatgatttcctgcttagaaatttcttctgccagatatgctaaattatctctgtaaagttcaaagttccacagatctctagggcaagggcaaaatgccatcagtttcttygcatagcaaaagtgacctttactctagttcctaacaagttcctcgtctctatctaagaccacctcaacctggactttactgtctacatcactattggcattttggttaaagcatttcaacaagtctctaggaagttccaaacgttcccacatcttcctgtcttcggagccctccaa

SEQ ID NO: 919873 - DNA, 549 bp, Homo sapiens
actagccactagaggtaagggccttggagctggaagtcagggtcccaggccacctcctcactgctgggccaccctagagtgccaagtcctggctttccttttccccacacgctggtgcctttgtgtccaaggtacagtagtctctgtggagggctggtctcatatttttcatgctacacacgctcctcctgaagacctggtgggatcatattgtcacatctcaagtcgcaaagtgattccttcccttgtgccttctttttgaacagcaaaagacttcattcggaacctgatggagaaggacccgaataaaagatacacgtgtgagcaggcagctcggcacccatggtaaggaaatgcacccgctcagcagaccgtgccatttaatgccayctggggggggcacgaaacttcctgttggccgttgtcatttatgaaatccacacaggattattacaaatttcatctcattctggccagtgactttcctcctctccccaagccaacatttgaactcttgtgcccccaggacacagcttctggaagcaccat

SEQ ID NO: 919874 - DNA, 555 bp, Homo sapiens
tcaggtgatctgcccgcctcggcctcccaaagtgctgggactacaggcatgagccaccgtgcccagccctggctgcatttttattttagatttttatcttattaaaaatttttaactattaaaaataactattttaactattttgacataatttaaaactcacactcccagagaagttgcaaaaatcccttttatccagattaaccagatctttttttttttttttttttgagatggagtcttgctgtgtggcccaggctggagtgcagtggatctccactcactgcaacctctgcctcccgggttcaggcaagtctcctgtctcaacctcctgagtagctgggactacagttgcacaccaccacgcccagctaatttttttgtttttttagtagatgtgggctttcatyatggtggttaggctggtctcgaactcttgacctcaggtgatccacccacctctgcctcccaaagtgctgggattacaggcgtgagccactgtacctggccagatgttaatctttttaaccgcatttgccttattattcttttttt

SEQ ID NO: 919875 - DNA, 582 bp, Homo sapiens
tggagccctattatgtactggacacaggaggaagcaaaacagttatcatttacattctggccagccaggcatggtggcacacaccatgtaatcccagcactttaggaggccgaggcgggaggattgctttagcacaggagtttgagatcagcctaggcaacatggcaaaaccccatctctacaaaaactacaaaaattagccaggcgtggtactgagcgcctgtagtcccagctactcgagaggctgaggtgggaagacagcttgtgcctgagaggcagaggttgcagtaagctgagattgtgttagtgcactccagcctsggtgacagagccagaccctgtctcaacccgcccccccgcaaaattacattcagcacgggggtgcggggggcatgacatattaaaggtaattatgctataacggctaattgctagttcttactatttacacattagcaactctttaaaacctccaaccccatgatcacatgcgatatatctccatttgatgaggaaactgaggcagggagaggttcagtgacttgcttaatgtcacacagacacagatgatacatacaaaca

SEQ ID NO: 919876 - DNA, 537 bp, Homo sapiens
gggctgggctgccacatcccattcatactccctcctccttgctgactcaatgctgccctccccacccaagacctaaaaggtcaggaaggtagggtggggcaagggaggaagtcgaagcaggggaaaaaggaggcggaaaccccgccatggggtgtggtgtggtgggggctgggggtacggtgsgggggccaacccagagcagaggcctgctcctgagctccctctggtgggcaaggggcagaggcaggaagccagggaggagacagtagggctgagtcaacacatctttattaaacacctgaagttactgggaggaggccatgatgctggacacacctgtggggaaggagagaccagactgaaggtgagaagggcgggagacaaacctccagccacctgctacagcacccacaattctttagggggagatcataaactccttccaggccccagttaccatcacaaaggcagtttggtgcagtattttaaaaagatggactctggagcaaggagggctaggttcaaatcccagctctg

SEQ ID NO: 919877 - DNA, 609 bp, Homo sapiens
gctctttccattgataaaccactttgttcttttgatttttgcctcatctctctgtagtgatggctttcaaattcctagcttcatgctgaatctccaaatatgcacctaaagttacagaattttgatgttagttcaaacgtggtgtaatmcatattgaacagtttctctttcccacacaaagcagcacgtctagggctcacctctaacaatttctttcatttcacctatgtgcactgaaaaaaaaatttcatcttaaatcctaatggccaccacctttgacctggcctcctcatctcttacatgggctacaataaattcctacattgctctaccttcaccccaccctatacagaacagccagacctgtttcactacaaaaatgacttcaccaaaccatgctctgctcaatagtatcctgggttactcagtcctccattcattttcacagcaaggacattctcaccatgtcccaaaataccactcccctgaactgggtttgcaggaacactgccaatgctctcacaggccctgcccctcctgggcttaaaacaaaagtgctcttaagtatttttgtgccaaatatcccttcagcaatctggtgaagagccc

SEQ ID NO: 919878 - DNA, 609 bp, Homo sapiens
gctctttccattgataaaccactttgttcttttgatttttgcctcatctctctgtagtgatggctttcaaattcctagcttcatgctgaatctccaaatatgcacctaaagttacagaattttgatgttagttcaaacgtggtgtaatccatattgaacagtttctctttcccacacaaagcagcacgtctagggctcacctctaacaatttctttcatttcacctatgtgcamtgaaaaaaaaatttcatcttaaatcctaatggccaccacctttgacctggcctcctcatctcttacatgggctacaataaattcctacattgctctaccttcaccccaccctatacagaacagccagacctgtttcactacaaaaatgacttcaccaaaccatgctctgctcaatagtatcctgggttactcagtcctccattcattttcacagcaaggacattctcaccatgtcccaaaataccactcccctgaactgggtttgcaggaacactgccaatgctctcacaggccctgcccctcctgggcttaaaacaaaagtgctcttaagtatttttgtgccaaatatcccttcagcaatctggtgaagagccc

SEQ ID NO: 919879 - DNA, 609 bp, Homo sapiens
gctctttccattgataaaccactttgttcttttgatttttgcctcatctctctgtagtgatggctttcaaattcctagcttcatgctgaatctccaaatatgcacctaaagttacagaattttgatgttagttcaaacgtggtgtaatccatattgaacagtttctctttcccacacaaagcagcacgtctagggctcacctctaacaatttctttcatttcacctatgtgcactgaaaaaaaaatttcatcttaaatcctaatggccaccacctttgacctggcctcctcatctcttacatgggctacaataaattcctacattgctctaccttcaccccaccctatacagaacagccagacctgtttcactacaaaaatgacttcaccaaaccatgctctgctcartagtatcctgggttactcagtcctccattcattttcacagcaaggacattctcaccatgtcccaaaataccactcccctgaactgggtttgcaggaacactgccaatgctctcacaggccctgcccctcctgggcttaaaacaaaagtgctcttaagtatttttgtgccaaatatcccttcagcaatctggtgaagagccc

SEQ ID NO: 919880 - DNA, 614 bp, Homo sapiens
actatataatgtccctctttgtctctttcaactgctattgctttaaagtttgttttgtctgatacaagaatagctacccttgcttgtttttggtgtccatttgcataaaatgtcttattccacccctttactttaagtttatgtgagtccttatgtgttaggtgagtctcctaaagacagcagatggttggtgagttcttgcctattctgtggttctgtatcttttaaatggagcatttaggccatttacattcccatgttagtaatgaaatgtgaggtactgctgcattcatcatgctttttgttgctggtgtaatttggttttttgtttttgctttttaacttgtatttttgttttgtaggtcctgtgtgattcatgctttaaagaggttcygtttctatgtgtttccaggatttgtttcaagatttagagctccttttagtagttcctgtagtggtggcttggtaatggtgaattctctcagcatttgttcgaaaaagactgtatgtttccttcatatatgatgcttagtttgctggatacaaaattcttggctgaaaatagttttgtttgaggaggctaaagatagggccccaatctcttctagcttgta

SEQ ID NO: 919881 - DNA, 615 bp, Homo sapiens
gtgaaaacttgtctcaataaatgaataaataaaacaaaataatacactgtgatcaagtgggatttatcacagaaatacaaggatcacttaacatacacaaatcagtaaatgtaatacatcatgtcaacagaatggacaaaagccataggataatctcaacaactacagaagaaaaacaattgataaaattcaatatccctccatgataaatactctcaacaaattaggtatagaaggaacatacctaaacacaataaaagacatatatgatgaacccgtagctaacatactgagtggggaaaaacagaaagcatttcctctaagaagtgtcacaaggatggcccctttcacaactcgtattcatcatgggactgaaaatcataaccagagcaattacaaaagagaaagaaatttaaaaagagaaagycaaattgtccctcttcgcagatgatataatcttatatatagaaactctaaagaaccaccaaaaacttttagaactcaaaaataattttagtgaagtttcaggatactaaatcagcatacaaaaatcagtagcatttccatacaccaatagtgaactagctgaaaaagaaatcaagaaagcaatgccat

SEQ ID NO: 919882 - DNA, 698 bp, Homo sapiens
tcttgcctcagcctcctgagtagctgggattacaggcacgcaccaccacacctggctaatttttgtatttttagtagagatggggttttaccatgttggccaggctggtctcaaactcctgacctcaagtgatccacccacctcggtctcccaaactgctaggattataggcgtgagccatcacgcccggccagatatatgtcttttaagtctcttttaacctgcagttccctcctccatcccttttattcctttaaaatttttttttttttttttttttttttgagatggagtcttgctctgtcaccaaggctggagtgcagtggtgcaatctcagctcactgcaacctctgcctcccaggatcaagtgattctccggcctcagcctcccaagtatgtgggactacaggcacacaccaccacgtccggctcatttttgtatttttttgtagagatgggatttctccatgttgggcaggctggtctcaaactcctgacctcargtgatctgcccgcctcggcctcccaaagtgctggaatcacagatgtgagccactgcccccagcctatttcttacaatttatctgttgaagaatgtaggttgttagccttgtagagttcctctctgtctggatttttctgatcacacacttacggtctaattcagcatttatttgtctctcctctgtgtttcctgg

SEQ ID NO: 919883 - DNA, 569 bp, Homo sapiens
cacagtagaacaagacaccaggtagatttctaaggtttttgactccagtccctggcttactgactgcatttctggacccacccagagctttgggaaacttgctgccctgacgaaaaggatataagcctggctgcatttggarcctgctggttttagagccctagggccttaagcaaatatagccagcagccaggtagcggttatagtgggctttggtcgagacccagtgcagtcccagtgctactggccacagtggtgcttgtgtcaccctatccccacctccaggtggctcagctccctttgtttgggagaaagtaaaagaagagaacaagagcctctgcctggtaatccagataattcttctggatgttatccaagaccactaaggcagtacctctatgagtctgcaagaaccgtagcagaccgggtgtggtggctcacgcctgtaatcccaacactctgggaggctgaggtgaatggatcacttgaggcccagagtttgagaccagcctggccaacatgatgaaacctagtctctgctaaaatcacaaagattagccaggcgtggt

SEQ ID NO: 919884 - DNA, 569 bp, Homo sapiens
cacagtagaacaagacaccaggtagatttctaaggtttttgactccagtccctggcttactgactgcatttctggacccacccagagctttgggaaacttgctgccctgacgaaaaggatataagcctggctgcatttggaacctgctggttttagagccctagggccttaagcaaatatagccagcagccaggtagcgsttatagtgggctttggtcgagacccagtgcagtcccagtgctactggccacagtggtgcttgtgtcaccctatccccacctccaggtggctcagctccctttgtttgggagaaagtaaaagaagagaacaagagcctctgcctggtaatccagataattcttctggatgttatccaagaccactaaggcagtacctctatgagtctgcaagaaccgtagcagaccgggtgtggtggctcacgcctgtaatcccaacactctgggaggctgaggtgaatggatcacttgaggcccagagtttgagaccagcctggccaacatgatgaaacctagtctctgctaaaatcacaaagattagccaggcgtggt

SEQ ID NO: 919885 - DNA, 588 bp, Homo sapiens
ttcagctattgatacttgtttatgcctcacaaagttctcatgctgtgtttcagctccatcaggtcatttatgttcttctctaaactggttactctagttagcagttcctgtaaccttttatcaaggttcttagcttccttgcattggatttgaacatgctcctttwactcaggggggcttgttattacccacctgctgaagcctacttctgtcaattcatcaaactcattctctgtccagttttgttcccttgctggtgaggagttgtgatcctttggaggagaagaggcattctggttttgaaattttcagcatttttacactggcatttcctaatctttgtggatttatctacctttggtctttaacgttggtgacctttggatggggtttttgcgtggttgtcattttgttaatgctgatgctattgctttctatttgctagttttccttctgacagtcaggcccttctgctgcaggtctgctggagtttgctggaggtacactccagaccctgtttgcctgtgtatcaccagcagaggctgtagaacagcaaagattgctgcctgctccttcctctggaagttt

SEQ ID NO: 919886 - DNA, 588 bp, Homo sapiens
ttcagctattgatacttgtttatgcctcacaaagttctcatgctgtgtttcagctccatcaggtcatttatgttcttctctaaactggttactctagttagcagttcctgtaaccttttatcaaggttcttagcttccttgcattggatttgaacatgctcctttaactcaggggggyttgttattacccacctgctgaagcctacttctgtcaattcatcaaactcattctctgtccagttttgttcccttgctggtgaggagttgtgatcctttggaggagaagaggcattctggttttgaaattttcagcatttttacactggcatttcctaatctttgtggatttatctacctttggtctttaacgttggtgacctttggatggggtttttgcgtggttgtcattttgttaatgctgatgctattgctttctatttgctagttttccttctgacagtcaggcccttctgctgcaggtctgctggagtttgctggaggtacactccagaccctgtttgcctgtgtatcaccagcagaggctgtagaacagcaaagattgctgcctgctccttcctctggaagttt

SEQ ID NO: 919887 - DNA, 634 bp, Homo sapiens
ccattataacaaaacaaccctgtagggaccaatgttattgtcagacctgaagtgtaatgaagcgccccctttttctaagtgggtctcactcacagagatgccattaaaaattattcctggccaggcgcagtggctcacgcctgtaatcccagtacttcgagaggccgaggcgggtgaatcacctgaagtcaggagttcgagatcagcttggccaacacggtgaaacgccgtctctcctaaaaatactaaaattagccgggcgtctgtaatcccagctactcgggaggctgaggcaggagaatagcttgaacccgggaggcggagcttgcagtgagccaagatcatgccactgcactccagcctgggcaacagagtgacactccatctcaaaaaaagaaaggaagggaggaaggaaggaaggaaggaaggaaggaaggaaggaaggaaggaaggaaggaaggaaggaaggaargaaagaaagaaaaaagactcctaactcccagcttgtcactcttggaatagagtgccgtctcttttacagggtatgaggaagtgggagggaaggtgaaaggagtcattgccagaagggcccagagtctcccaagactaacgcatccttcctggtttcacgatg

SEQ ID NO: 919888 - DNA, 587 bp, Homo sapiens
gtccattttatttccataatgattttaaaatcagtttttcaatttctgggaaaaactttgatgctatgggatgtgctgaatctatagatatctggggagaaatgatacctgaacagtatttagtctttgataactccctgttttttcaaatctttaactcctcccataaatgtgtaacagttttcagtatcgtagggctttcatgtcattagtaaagtgcatctctgagtatttaacattcttttagtttgttttggtttttctttttattattattattattatgctttaagttttagggtacatgtgcacaatgtgccggttagttacatatgtatacatgtgccatgctcaggtgctgcacccattaactcatcatttarcattaggtatatctcctgatgctatccctcccacctccccccaaccgagtatttaacattcttatgatattataaatagttatgctttcttaatttcaatttctgattgttcattgattacatacagaagtacaattgatctttgtcaaactttatattacacacttgctagattcatttattagttctagtagctttttttgt

SEQ ID NO: 919889 - DNA, 587 bp, Homo sapiens
gtccattttatttccataatgattttaaaatcagtttttcaatttctgggaaaaactttgatgctatgggatgtgctgaatctatagatatctggggagaaatgatacctgaacagtatttagtctttgataactccctgttttttcaaatctttaactcctcccataaatgtgtaacagttttcagtatcgtagggctttcatgtcattagtaaagtgcatctctgagtatttaacattcttttagtttgttttggtttttctttttattattattattattatgctttaagttttagggtacatgtgcacaatgtgccggttagttacatatgtatacatgtgccatgctcaggtgctgcacccattaactcatcatttagcattaggtatatctcctratgctatccctcccacctccccccaaccgagtatttaacattcttatgatattataaatagttatgctttcttaatttcaatttctgattgttcattgattacatacagaagtacaattgatctttgtcaaactttatattacacacttgctagattcatttattagttctagtagctttttttgt

SEQ ID NO: 919890 - DNA, 782 bp, Homo sapiens
aggaaaagatgcctcaacagaaactggccattctggatcctgatcttggatttccagcttccagagctgtaagaatatacatttctgttgttaggcaatctggtctgtggtattttattatggcagtccaagctgactaacataccaaatttggggagtttttaagtctacgtgagcactgacttgccctcactggcactccatgacattggagacagcttacagaactacacctcatccccaaacctgctgcgtcactaacataaggcctcaattctgtgtctgtcatctggggaagggagatattgcctgtcctcatttacttctcagggttccttggggcatcaaaatatgaccacaggcataaaacagatggtcaaagctaaaggaagcccggctttcactttattctgctgtttcctcttcccagtcaagtccataagtgccaggactgcattaaatagtgatagggtcagcactcaaacacagggcatttgacttccagtccaatgctctctccaaggcaccaaaagaaaggaagagccactggagacagcgacatgtgcccacgcacagtggctcrcgcctgtagtcccagcactttgggaggccaaggcgggcagatcatgaggtcaggagttagagcccagcctgcccaatatggtgaaaccctgtctctactaaaactacaaaaattaccagggcgtggtggcaggtgcctgtaatcccagctacttgggaggctgaagtaggagaattgcttgaacccaggaggcggaggt

SEQ ID NO: 919891 - DNA, 782 bp, Homo sapiens
aggaaaagatgcctcaacagaaactggccattctggatcctgatcttggatttccagcttccagagctgtaagaatatacatttctgttgttaggcaatctggtctgtggtattttattatggcagtccaagctgactaacataccaaatttggggagtttttaagtctacgtgagcactgacttgccctcactggcactccatgacattggagacagcttacagaactacacctcatccccaaacctgctgcgtcactaacataaggcctcaattctgtgtctgtcatctggggaagggagatattgcctgtcctcatttacttctcagggttccttggggcatcaaaatatgaccacaggcataaaacagatggtcaaagctaaaggaagcccggctttcactttattctgctgtttcctcttcccagtcaagtccataagtgccaggactgcattaaatagtgatagggtcagcactcaaacacagggcatttgacttccagtccaatgctctctccaaggcaccaaaagaaaggaagagccactggagacagcgacatgtgcccacgcacagtggctcgcgcctgtagtcccagcactttgggaggccaaggcgggcrgatcatgaggtcaggagttagagcccagcctgcccaatatggtgaaaccctgtctctactaaaactacaaaaattaccagggcgtggtggcaggtgcctgtaatcccagctacttgggaggctgaagtaggagaattgcttgaacccaggaggcggaggt

SEQ ID NO: 919892 - DNA, 643 bp, Homo sapiens
gcacagctcagagtcaccacccaaccaacaatggcagttatcattgatgcgaagagtgaggctgagcccacggcaggggcgaaggcccagccttccgccctcacgtgcactgaggggcgcactccatgttgtcatgccaacagaggaaccagcaaggctctacctgtgtggcaggccaggaggaaaacaccctgmgtttttcctagaggaaaagtttccaccggaagagagcctcttggcctgacagccaggctccttccctcacaagatggaggagctgggtgatgtgtcccagctctgtcacttcctaccatacacaagtcatgggtcctctctgaacctcagtatcctcatctgtaaaatgggctgctttgaggattatagagaatctttaaacaaacagtattggtattaattttaatcagggaggcaaaataaagtggagatagcccagactctgatctcagatagatcagggccgaaaaaccccagctcccccaaaaagccgctgagcagccatgggcaagtttctcagcctctgtttcctaatccttgtgggataaataactgagatggatgcgaagcccttagttcagtctgggatgtagtaaggacttttaaaaatggttgctgttgttattac

SEQ ID NO: 919893 - DNA, 799 bp, Homo sapiens
gctggggatgggggtgctactggtgtctagtgggtagagaccagggacactgctaaccatcttacaaggcacaggacagccccccacaataaagaattaagtgcacaaaatgtcaatagtgccaaacttgagaaactcctgcttaatgggtgtgtgccctgcagactgctgggaagataaaccttaaaatcctgaaagtgaagacatcatgggaaggctgactaacctagattttggggtggctttaaaatgcctacagattctttgatactcctctcctcaaaagatgggttctaatttcactctcctccagtgtgggctaggcttagtaacttactctttttttttttttttttttgtgatcagtctcactctgtcgcccaggctggagtgcggtggcrtgatctcggctcactgcaacatccatctcctgggttcaagcgattctcctgcctcagcctcccaagtagctgagattacaggtgcgcgccaccacacccagctaatttttgtattttttgtagagacggggtttcaccatgttggccaggctggtcctgaactcctgacctcaggtgatcctcctacctcagcctcccaaagtgctgggattacaggtgtgagccactgcgcctggccaagacttagtaacttatttccaataaacagagtaaagtgggactgatcatgcagacctcagggactaggtgctgaaaagccaggtgaggccgatttcaaaatccacactaatgaccctgcgccaccccgcatctctttgtagaacatttatttacattcc

SEQ ID NO: 919894 - DNA, 597 bp, Homo sapiens
aagccaaggcagatggatcgcttgaggccagcagtttgagaccagcctgggcaccataacaagacacccatctctataaaaaataaataatgaaataaaattaataaaatataaaacataaaggtgcatgctgattcattccratattccctccccatttactcaactgctgttattgagcccctgcttggtttcaggcttgttgctgtaggctgaggactctgacgtggggagcacccagttgctgtgtttcagataccaattgctgcataacaaactacgccaacacttagcggctgaaaacaatcatttcattatgttcctatgttccctgggtctggaatttagacagggtactgcagggttggctcctagatgtctggaacctcacttgggaagacttgaagcctggaggagagttgacagctataaactggaattttctaaaagtctgcattggaatgacctaaagctaagcctgcagaacacagcacctgcacgcagttgctccatacggcttggctttcctttaatgtggtaacccagggttcaaaggatgaatgtcccaaaatgaggaagccgtattatcctttggtc

SEQ ID NO: 919895 - DNA, 637 bp, Homo sapiens
ctaggaataccatttgacccagccatcccattactgggtatatacccaaaggattataaatcatgctgctataaagacacatgcacacgtatgtttattgcggcattattcacaatagcaaagacttagaaccaccccaaatgtccaacaatgatagactggattaagaaaatgtggcacatatacaccatggaatactatgcagccataaaaaaggatgagttcatgtcctttgtagggacgtggatgatgctggaaaccatcattctcagcaaactatcgcaaggacgaaaacccaaacgccgcatrttgtcactcataggtgggaattgaacaatgagaacacatggacacaggaaggggaacatcacacaccggggactgttgtggggtggggggaggggggagggatagcattaggtgatatacctaatgctaaatgacgagttaatgggtgcagcacaccaacatggcacatgtatgcatatgtaacaaacctgcatgttgtgcacatataccctaaaacttaaagtataatcataataaaattaaaaaagaaatcaatgttttcttgatcttttgtatgttttagactgtactttgttaatttctgctctgatctttgttatttctttcc

SEQ ID NO: 919896 - DNA, 637 bp, Homo sapiens
ctaggaataccatttgacccagccatcccattactgggtatatacccaaaggattataaatcatgctgctataaagacacatgcacacgtatgtttattgcggcattattcacaatagcaaagacttagaaccaccccaaatgtccaacaatgatagactggattaagaaaatgtggcacatatacaccatggaatactatgcagccataaaaaaggatgagttcatgtcctttgtagggacgtggatgatgctggaaaccatcattctcagcaaactatcgcaaggacgaaaacccaaacgccgcatattgtcactcataggtgggaattgaacaatgagaacacatggacacaggaaggggaacatcacacaccggggactgttgtggggtsgggggaggggggagggatagcattaggtgatatacctaatgctaaatgacgagttaatgggtgcagcacaccaacatggcacatgtatgcatatgtaacaaacctgcatgttgtgcacatataccctaaaacttaaagtataatcataataaaattaaaaaagaaatcaatgttttcttgatcttttgtatgttttagactgtactttgttaatttctgctctgatctttgttatttctttcc

SEQ ID NO: 919897 - DNA, 609 bp, Homo sapiens
tgcacttggactaggatcatagctttctaactgttctcactgcttcctcccttggctctctccaattcattccccgcaaggcggaggaatgtactttaaaaaaatgtatatcccagaaagagctacctactatatggtcctgtgtatacgacattatagaaaaggccaaactagaaggaaacaatgttttccaggactttggtctaggggagggcattaactgcaaagcagaaaaagggatttttttttttttttttttttttgagacagagtctcgctctgttgcccaggctggagtgcagtggtgygatctcggctcactgcaagctccgcctcgaaaaagggaactttttagggctgatggaaatattctatatcttgattgtggcattggttatatgagtgtaggtattgtcaaaacttattaatctgtacacttaaaatagtaaattttattatatatgaatatgctacaataaacctgactttaaaaaaatataaaaagatccaatcttagggcttgttttatttgtctaatgcagagctctgctctgtatggacagccttatctttggggaatttgtcaaaaacaagcagtagcaattgata

SEQ ID NO: 919898 - DNA, 609 bp, Homo sapiens
tgcacttggactaggatcatagctttctaactgttctcactgcttcctcccttggctctctccaattcattccccgcaaggcggaggaatgtactttaaaaaaatgtatatcccagaaagagctacctactatatggtcctgtgtatacgacattatagaaaaggccaaactagaaggaaacaatgttttccaggactttggtctaggggagggcattaactgcaaagcagaaaaagggatttttttttttttttttttttttgagacagagtctcgctctgttgcccaggctggagtgcagtggtgcgatmtcggctcactgcaagctccgcctcgaaaaagggaactttttagggctgatggaaatattctatatcttgattgtggcattggttatatgagtgtaggtattgtcaaaacttattaatctgtacacttaaaatagtaaattttattatatatgaatatgctacaataaacctgactttaaaaaaatataaaaagatccaatcttagggcttgttttatttgtctaatgcagagctctgctctgtatggacagccttatctttggggaatttgtcaaaaacaagcagtagcaattgata

SEQ ID NO: 919899 - DNA, 581 bp, Homo sapiens
caagcagtgggaccagcatttccggtccatgaagcagcagtatgagcagaaggtaatgtggggttcctggccacgcccacagggcatgcctggtcttcatctcgctgcctctttagcagctttgaaccttggggagtggmcacgctgagccccagtatggcccagaggagaagttgggggcagtgttggagggcccaggggcagccaggccctgcccacatcctgcaagtgctctacatccttgcctcacacactcctctctgcctctgaacccagatcactgagctgcgtcagaagctggctgatttgcagaagcaggtgactgacctggaggccgagcgggagcagaagcagcgtgactttgaccgcaagctcctcctggccaagtccaagattgaaatggaggaggcaagtgtgactgctggtccctgcagagtcagttcccctccacattagcggagagttctgtggagcaaacaagccaggggcaggagtcaggagacccgggggtctagtgcgaaagagctaggtgaccaaaaacacaggcacgttccttccctgcactgcagtttcccatctga

SEQ ID NO: 919900 - DNA, 581 bp, Homo sapiens
caagcagtgggaccagcatttccggtccatgaagcagcagtatgagcagaaggtaatgtggggttcctggccacgcccacagggcatgcctggtcttcatctcgctgcctctttagcagctttgaaccttggggagtggccmcgctgagccccagtatggcccagaggagaagttgggggcagtgttggagggcccaggggcagccaggccctgcccacatcctgcaagtgctctacatccttgcctcacacactcctctctgcctctgaacccagatcactgagctgcgtcagaagctggctgatttgcagaagcaggtgactgacctggaggccgagcgggagcagaagcagcgtgactttgaccgcaagctcctcctggccaagtccaagattgaaatggaggaggcaagtgtgactgctggtccctgcagagtcagttcccctccacattagcggagagttctgtggagcaaacaagccaggggcaggagtcaggagacccgggggtctagtgcgaaagagctaggtgaccaaaaacacaggcacgttccttccctgcactgcagtttcccatctga

SEQ ID NO: 919901 - DNA, 729 bp, Homo sapiens
ctattcctagggcgctctgctgagtcctgcctcctcgcctgtgcccaagctggtccctccgcctagaatctccacctaaagtccgctccctccacgaaactacccccaagggaccctggtgcctggctgaaccgcgcagcccagccactgaccacctggtcaccccaagcaaccttctgaaccctgcacgggttgggcaaggacttcccagtctgaccctagatgcttgagcgggaaccctggtgggtgccccgaccccgggggagcgcagcctgctccccaaccccactccctccagcgccgcggccccggctttgatccggctgcctctgcgccccaacctgattggcatcgaattacgccgcgcggcggaggcagataatggcgggaggcgcggcagacatgaaagggggggcgcagcggcagtccgagccgttgttaatgacccaataaaaaggaagaggggggagaaataaccctcccttccctccccgcccccagaccgcggccggtgcacacaaagccgccgccgactcggaaattaccgaggctcagcccagagcagygtgactgggggtgggggctgcgctcacctggcggggcgcgggagggcggacggcagccgcggggacactagcggaggcacagacagagccacacggataggcacatacactgaacctgtctttaatagtctattttcatcattttttgcattgtgcttttttt

SEQ ID NO: 919902 - DNA, 675 bp, Homo sapiens
acaccttcactgtcctacctcagcgtacaacaactctcgattttgtgtcataatcttgttcacagagattttgatccattttcccttccacaaggtatcacactggtccataacactgataacattatgctgactggatcctataagcaagcagtagcaagcacactggacttattggtgagacacttgcatgccagaggttgagaaataaatctgactaaaattcaggtaccttctacctcagtgaaattcctaggggtccagtggtgtggggcctgttgagataytccttgtaaggtgaaggataagttgctgcatttggcccctcctacaaccaagaaagaggcacaatgcctagtggacctatgtagattttggaggcaacacattactccagcccatttattgagtgacccaaaaggctgccagtttcgagtccagaacaggagaaggctctgcaacaagtccaggctgttgtgcaagctgctctgccacttgagccatatgacccagcagatccaatggtgcttgaggtgtcagtggcagatagggatactttggcaggccctcataggtgaattacagcaaaggcctctaagatttttggagcaaggccctgccatcatctgcagataactactctccttttgagagacagctcttggcctgttactt

SEQ ID NO: 919903 - DNA, 573 bp, Homo sapiens
tcacagcagccaaagtggcccttttcaatcctctaacagatccttcctcacttcctactccctctcactcaccctggtccagccacaccagcttcctcaccggcaactataataggcacgttccctcactgccacctataacaggcttttgagtgcttctycctctacctagaaagcttctccctcattctgttcagttgttgttccaggtcatgttttcagagaggtgttatctacccaccccatctaaaacagcaactagctcccataattctctatccccagacctggctttacttttcttctgtgcatttaccatggtctggtgtgtgcatgcacacacacacacacaaacatacacactcacatacacacaccacacacatacaatgtttgcttgttggttggttggtttattgtctgtttgtctaacaaattataagctccataatgataggaacttcatcggttttgttcactgttaacatcctcactgccttaaacattaccttgcaacacagcaggttgaatccatgaaaaataaggaaggagcagaagaaaaggtgagcaggt

SEQ ID NO: 919904 - DNA, 573 bp, Homo sapiens
tcacagcagccaaagtggcccttttcaatcctctaacagatccttcctcacttcctactccctctcactcaccctggtccagccacaccagcttcctcaccggcaactataataggcacgttccctcactgccacctataacaggcttttgagtgcttctccctctacctagaaagcttctccctcattctgttcagttgttgttccaggtcatgttttcagagaggtgttatctacccaccccatctaaaacagcaactagctcccatmattctctatccccagacctggctttacttttcttctgtgcatttaccatggtctggtgtgtgcatgcacacacacacacacaaacatacacactcacatacacacaccacacacatacaatgtttgcttgttggttggttggtttattgtctgtttgtctaacaaattataagctccataatgataggaacttcatcggttttgttcactgttaacatcctcactgccttaaacattaccttgcaacacagcaggttgaatccatgaaaaataaggaaggagcagaagaaaaggtgagcaggt

SEQ ID NO: 919905 - DNA, 675 bp, Homo sapiens
acaccttcactgtcctacctcagcgtacaacaactctcgattttgtgtcataatcttgttcacagagattttgatccattttcccttccacaaggtatcacactggtccataacactgataacattatgctgactggatcctataagcaagcagtagcaagcacactggacttattggtgagacacttgcatgccagaggttgagaaataaatctgactaaaattcaggtaccttctacctcagtgaaattcctaggggtccagtggtgtggggcctgttgagatactccttgtaaggtgaaggataagttgctgcatttggcccctcctacaaccaagaaagaggcacaatgcytagtggacctatgtagattttggaggcaacacattactccagcccatttattgagtgacccaaaaggctgccagtttcgagtccagaacaggagaaggctctgcaacaagtccaggctgttgtgcaagctgctctgccacttgagccatatgacccagcagatccaatggtgcttgaggtgtcagtggcagatagggatactttggcaggccctcataggtgaattacagcaaaggcctctaagatttttggagcaaggccctgccatcatctgcagataactactctccttttgagagacagctcttggcctgttactt

SEQ ID NO: 919906 - DNA, 675 bp, Homo sapiens
acaccttcactgtcctacctcagcgtacaacaactctcgattttgtgtcataatcttgttcacagagattttgatccattttcccttccacaaggtatcacactggtccataacactgataacattatgctgactggatcctataagcaagcagtagcaagcacactggacttattggtgagacacttgcatgccagaggttgagaaataaatctgactaaaattcaggtaccttctacctcagtgaaattcctaggggtccagtggtgtggggcctgttgagatactccttgtaaggtgaaggataagttgctgcatttggcccctcctacaaccaagaaagaggcacaatgcctagtggacctatgtagattttggaggcracacattactccagcccatttattgagtgacccaaaaggctgccagtttcgagtccagaacaggagaaggctctgcaacaagtccaggctgttgtgcaagctgctctgccacttgagccatatgacccagcagatccaatggtgcttgaggtgtcagtggcagatagggatactttggcaggccctcataggtgaattacagcaaaggcctctaagatttttggagcaaggccctgccatcatctgcagataactactctccttttgagagacagctcttggcctgttactt

SEQ ID NO: 919907 - DNA, 620 bp, Homo sapiens
ctctccattcagagactacataccttctgctagaacaggggcttctcaacagagagaagctgagacgctctccactctcggcaaccacagagcacccccactcctcgacacctattatttcaccccacacatctgctcgtctgtcagaacctttctcctaatccctacctgacacaccttacagtctctattgcttattctctattattaaagtttaaggtgagtcaactgcagttggaactgtaattatagagtacagattttattgagagaaatacatttttttttatgtgataaagaaacaggctgggtgtgctggctcatacctgtaatcccagcactttgtgaggccgaggtgggtggatcacttgagaccaggagttcaagagcstccagcctggccagcatggtgaaaccccacctttactaaaaatacaaaaattagccagaggtggtggcgcattccacccaactattcgggagtctgaggcaagagaatcgcttgaaccagggaggcggaggttgcagtgagccaagattgcaccactgcactctagcctaggcaacagcgagactctgtctgaaaaaaaaaaaaaaaaaaaagaaaaagaaacaattga

SEQ ID NO: 919908 - DNA, 620 bp, Homo sapiens
ctctccattcagagactacataccttctgctagaacaggggcttctcaacagagagaagctgagacgctctccactctcggcaaccacagagcacccccactcctcgacacctattatttcaccccacacatctgctcgtctgtcagaacctttctcctaatccctacctgacacaccttacagtctctattgcttattctctattattaaagtttaaggtgagtcaactgcagttggaactgtaattatagagtacagattttattgagagaaatacatttttttttatgtgataaagaaacaggctgggtgtgctggctcatacctgtaatcccagcactttgtgaggccgaggtgggtggatcacttgagaccaggagttcaagagcctccagcctggccagcatggtsaaaccccacctttactaaaaatacaaaaattagccagaggtggtggcgcattccacccaactattcgggagtctgaggcaagagaatcgcttgaaccagggaggcggaggttgcagtgagccaagattgcaccactgcactctagcctaggcaacagcgagactctgtctgaaaaaaaaaaaaaaaaaaaagaaaaagaaacaattga

SEQ ID NO: 919909 - DNA, 567 bp, Homo sapiens
aagaggcccccgtaagctgagatcctgactttgttggagagggcacagctatgcttactgagtggtagagagtcactagagtgccaccccagcaaagttcacaggaaatctgcctgctagggtgctggaggaagaaacacatggtgaggtatctcatggaagacattctgctacaaaaccacccaagggaatgggtgctgggagaagctrttggtcgctggatgccggtgattgctgcacaccgcaggagctaggcaatggagaagctacgcgtactgcaggagctagacatggagaggccatgcacgctgcaggaggctagtgccagagacgccacccgtgctgcctgcctactgaacacaccagaaccagggtgaaaaaagcctttccttctgcagtgtctctccagcatcttctactaaccactgttaacatcatgttagctggcaagggaaacacgtttaagggcccagaaccatttttgcatagcaggcagtgaaggtgggtttggggctgagaggcaataaattaataactgactgtctcagtgagtttgggctgctgcaa

SEQ ID NO: 919910 - DNA, 567 bp, Homo sapiens
aagaggcccccgtaagctgagatcctgactttgttggagagggcacagctatgcttactgagtggtagagagtcactagagtgccaccccagcaaagttcacaggaaatctgcctgctagggtgctggaggaagaaacacatggtgaggtatctcatggaagacattctgctacaaaaccacccaagggaatgggtgctgggagaagctgttggtygctggatgccggtgattgctgcacaccgcaggagctaggcaatggagaagctacgcgtactgcaggagctagacatggagaggccatgcacgctgcaggaggctagtgccagagacgccacccgtgctgcctgcctactgaacacaccagaaccagggtgaaaaaagcctttccttctgcagtgtctctccagcatcttctactaaccactgttaacatcatgttagctggcaagggaaacacgtttaagggcccagaaccatttttgcatagcaggcagtgaaggtgggtttggggctgagaggcaataaattaataactgactgtctcagtgagtttgggctgctgcaa

SEQ ID NO: 919911 - DNA, 653 bp, Homo sapiens
aaaattcagtaataagaaaccaacaaccaaatttttcaaatggtcaaaggtattaacagacacataacaaaaaaaagatgtacagagggaaataagcatgcaaaaagatgctcagtatcattgttcattagagaacacattaagattaaaaccacrttaagatatcaccacatacatattagaaaggctaaaatttaaaagactgatcatactaagtgttggtgaggatgtggggaaactgaaattctcatatactgctgctgggaatgtaaaatggtgccaccacagttaaatatacacataatccagccattctactcctgggtatttacccaagagaaataaaagcatatggtcacagaaagacttgtacatgaatttcacggtaactttgtaatagcacaaaactagaaacaacccacatgtccatcaacaggtaaatggaaaagtaaaccatggtataaccacacaaaggaatattatttcccaataaaaagggaacaaactattgatacatgctacatgaatgaatctcaaaataatcatggtcactgaaaaaaggaagtttttttttttttaaagagtacataccgtatgattccatttgtataaaactctagaaaatacaaactaatctatggtgatagagggca

SEQ ID NO: 919912 - DNA, 573 bp, Homo sapiens
aatgaacaacttctatagagcccctttcaagactttgaaagggacctgtgcaagcttatgctccattaacctcaaggtgaatctgactctgtctagcactctataattctatcaactaatccctaattttgaggatgagaggagttgggatgggagccttctcaaagcctctaacattacacgacacaaagagctttctctatttcttgtttaatcttaaattttcttttttgaatttttaacttatattttaggttcaagtgtacatgtggaggttacacaggtaaactcatgtcacaagggtttattgtgcagcttgtcaccaagatactaagcctattgtccaattttttactttttcagatcttctccctcctcttaccctccacastgaagtaggctccaatgactgttgttcccctctatgtgttcatgtgtcctcatcatttaggtcccccttgtaaatgagaacatgtggtatttggttttctgtttctgcattagtttgctaagattaatggcctcaagctccatccatgtccctgcaaatgacatgatctcattcttttttat

SEQ ID NO: 919913 - DNA, 641 bp, Homo sapiens
ccactgccctctatcaccatagattagtttgtattttctagagttttatacaaatggaatcatacggtatgtactctttaaaaaaaaaaaaacttccttttttcagtgaccatgattattttgagattcattcatgtagcatgtatcaatagtttgttccctttttattgggaaataatattcctttgtgtggttataccatggtttacttttccatttacctgttgatggacatgtgggttgtttctagttttgtgctattacaaagttaccgtgaaattcatgtacaagtctttctgtgaccatatgcttttatttctcttgggtaaatacccaggagtagaatggctggattatgtgtatatttaactgtggtggcaccattttacattcccagcagcagtatatgagaatttcagtttccccacatcctcaccaacacttagtatgatcagtcttttaaattttagcctttctaatatgtatgtggtgatatcttaaygtggttttaatcttaatgtgttctctaatgaacaatgatactgagcatctttttgcatgcttatttccctctgtacatcttttttttgttatgtgtctgttaatacctttgaccatttgaaaaatttggttgttggttt

SEQ ID NO: 919914 - DNA, 749 bp, Homo sapiens
ccatgtttagtgctaccttcaggagctcttgtaaggcaggcctggtggtgacaaaatctctcagcatttgcttgtctgtaaaggattttatttctccttcacttatgaagcttagtttggttggatatgaaattctgggttgaaaattcttttctttaagaatgttgaatattggcccccactctcttctggcttgtagagtttctgccaagagatctgctgttcgtctgatgggcttccatttgttggtaacctgacctttctctctggctgcccttaacattttttccttcatttcaaccttggtgaatctaatgattatgtgttttggagttgctcttctcaaggagtatatttgtggtgttctctgtatttcctgaatttgaatgttggcctgccttgctaggttggggaagttctcctggataatatcctgtagagtgttttccaacttggttccattctccccatcactttcaggtacaccartcagacatagatttggtcttttcacgtagtcccatatttcttggaggctttgtttctttttactcttttttctttttttttcttttttgcttttaaatttgtttatttatttattattatttttttttcggtcagattttatttaaatttcaacttttagattcgggggtacacatataggtttgttacgtgggtatattggggtatgaggttggggtgctgaggttggggtgcaattgaatctgtcaccctggtagtaa

SEQ ID NO: 919915 - DNA, 749 bp, Homo sapiens
ccatgtttagtgctaccttcaggagctcttgtaaggcaggcctggtggtgacaaaatctctcagcatttgcttgtctgtaaaggattttatttctccttcacttatgaagcttagtttggttggatatgaaattctgggttgaaaattcttttctttaagaatgttgaatattggcccccactctcttctggcttgtagagtttctgccaagagatctgctgttcgtctgatgggcttccatttgttggtaacctgacctttctctctggctgcccttaacattttttccttcatttcaaccttggtgaatctaatgattatgtgttttggagttgctcttctcaaggagtatatttgtggtgttctctgtatttcctgaatttgaatgttggcctgccttgctaggttggggaagttctcctggataatatcctgtagagtgttttccaacttggttccattctccccatcactttcaggtacaccaatcagacatagatttggtcttttcaygtagtcccatatttcttggaggctttgtttctttttactcttttttctttttttttcttttttgcttttaaatttgtttatttatttattattatttttttttcggtcagattttatttaaatttcaacttttagattcgggggtacacatataggtttgttacgtgggtatattggggtatgaggttggggtgctgaggttggggtgcaattgaatctgtcaccctggtagtaa

SEQ ID NO: 919916 - DNA, 607 bp, Homo sapiens
tcatgtggtatttgtcattctgtttctggctagtttcacttaacataatgttctccaggttcatgcatatcattccaaatggcagcatttccttctttttaaaggctgagtagtattccatttgtatatataccacattttctttatccacttaaccattcatggacacagtttgatttcatatcttagctattatgaataatggtgaaatgaatatgggagtgcagacatttctttgacatactgattttgtttcttttggttatacacccagtaatgggatgcagaaacatttggtagttctatttttaattttgtgcagaacccccatactctttttccataatgrctatactaatttacattcccaccaacagtgtgcaagcattcccttttctccatatcctcactcttacttatcttttgtctatttgataaaaactattctaatgggtgtgaggtaatatctaatcgtagttttagtttgcattttcttgattaatgatgttaagcatttttatatacctattgaccatttgtatgttgtctttcgaaaaatgtctattcagttcctttacccatttttattatgttttttttcatcttt

SEQ ID NO: 919917 - DNA, 598 bp, Homo sapiens
gcaggtctgtttagtgtcggagccggacagtcggggggaggaggcgcctgtagccctcctaatccaatttgtttaaacccagtctctgtggcttatttgccagtgagggaggactgggtgtgcgctgtgccggggtgcacgtttgcacacatttgtggggcctgcaggggtgaacaggtggaccatgttatgtaagacaggcctgggccttgtcccacatccctggatgtcagctcctttcctggaacccggcctcctcctcccttctcctctgctcacctccaaatcttcctgcactttttccatccacatgagaactggtgccagaattctcctttgcaactgactctacatgcaactctgagtgaatgctttcacctctccaggcctcagtttctccacttatcttatggagctggcacctcaccctacctgttccaccatgtgcatgaamttaaaaaattggcaagtgtgggaataatgtgatgaatggtaaaaactgctctgtattcttgagtttcactatgtgccaagggctgtgcctggggacaccagcccaacctcacaaatcctctcaaagccctatgagctggctctt

SEQ ID NO: 919918 - DNA, 594 bp, Homo sapiens
cacctttgttaacatgacccagcactctgtggctgagtccctgctgcaggtgggcgtcacgcagcgctttattgatgatgtcgtttctgctgtcctgcgggccagctatggccagtcagcagcgatgcccgcctttgcaggtaagcgtccaacccttggcctgcccacmtgcccctcctccacccaaggtgctcagaatgggctgggggtccccataataacctcacttttatccagctcattgcagtcacataggcactctgctgccccatcctgcctgattctgggactggccatgagttggcaggagatagtatcaccccacttcacagacagtgaaagcaaggctcagatcacaggtccagtgtgtttctaccactcccaattgcttcataatcccttgcatgtgtgtaaatgttagagctgagataatgctctgctctctacactttggtttcaagaactgccctgttgaggcctttgagccactgtgagagcacctcctcttcccagctcttcacgggagtggctgggcctgtgtgtagctcactgtctgctagcacagaccacaggagtggagaatgtaggcttcac

SEQ ID NO: 919919 - DNA, 594 bp, Homo sapiens
cacctttgttaacatgacccagcactctgtggctgagtccctgctgcaggtgggcgtcacgcagcgctttattgatgatgtcgtttctgctgtcctgcgggccagctatggccagtcagcagcgatgcccgcctttgcaggtaagcgtccaacccttggcctgcccacctgcccstcctccacccaaggtgctcagaatgggctgggggtccccataataacctcacttttatccagctcattgcagtcacataggcactctgctgccccatcctgcctgattctgggactggccatgagttggcaggagatagtatcaccccacttcacagacagtgaaagcaaggctcagatcacaggtccagtgtgtttctaccactcccaattgcttcataatcccttgcatgtgtgtaaatgttagagctgagataatgctctgctctctacactttggtttcaagaactgccctgttgaggcctttgagccactgtgagagcacctcctcttcccagctcttcacgggagtggctgggcctgtgtgtagctcactgtctgctagcacagaccacaggagtggagaatgtaggcttcac

SEQ ID NO: 919920 - DNA, 711 bp, Homo sapiens; identical to SEQ ID NO: 919787

SEQ ID NO: 919921 - DNA, 588 bp, Homo sapiens
aagcctggctctattgcccaggccagagtgcagtggtgccatctccacttccatgcactgcaacctcctcctcacaggctcaaggcatcctcccatctcagcctcctgactagctgggactacaggcatgcaacactatgcctggcttttggtatcttttgtagagacagggtttcgccatcytgtctcaaactcatgagctcaagcaatcctcctgtcatggcctcccaaaatgctgggattataggcatgagctatcacctgtggccaagtctacgttgaacatttggtagtcttttgtcagtaaagccatctggatctgaattttcctttgtggagaatttttggattagtaactcaatttctttacttgttataattttatttaaatttcctatttcgttttgagtcaattttggcatttctttttttgtaggaatttgttcatttcatctacattttctaatttgttggcatacaattactcagtcttcctttaaaatcctttatatttttcttagcttgggagaagagtctcttctttcatttttgattttagttattcatgtttttttggctgttgttctt

SEQ ID NO: 919922 - DNA, 588 bp, Homo sapiens
aagcctggctctattgcccaggccagagtgcagtggtgccatctccacttccatgcactgcaacctcctcctcacaggctcaaggcatcctcccatctcagcctcctgactagctgggactacaggcatgcaacactatgcctggcttttggtatcttttgtagagacagggtttcgccatcttgtctcaaactcatgagctcaagcaatcctcctgtcatggcctcccaaaatgctgggattataggcatgagctatcacctgtggccaagtctacrttgaacatttggtagtcttttgtcagtaaagccatctggatctgaattttcctttgtggagaatttttggattagtaactcaatttctttacttgttataattttatttaaatttcctatttcgttttgagtcaattttggcatttctttttttgtaggaatttgttcatttcatctacattttctaatttgttggcatacaattactcagtcttcctttaaaatcctttatatttttcttagcttgggagaagagtctcttctttcatttttgattttagttattcatgtttttttggctgttgttctt

SEQ ID NO: 919923 - DNA, 636 bp, Homo sapiens
actctgtatccattcaacgtaattcctcatttctcccttttcttcctcttgtaaccaccattctattttctgtctttatgaattttcattcataccttgtatgaatgaaatcatacactgcttgtccttttgtgtctgccttatttcatttagcataatgttttcaaggtttatcgatgttgtagcatgtgtcagaaattcattcctttttatgactgaataacattccrttgtatatacataccacattttgtttatccatttgtctattgatggacacttgggttgcttccacttcttaactattgtgaataatgccgctctgaacatgagtgtgcaagtatctgttcgagtccccattttcaatacttttggttatatatccagaagtggaattgctggatcatatggtaattttgtttttaaatttgtgaggaactgtcacgctgcacactgttttccatggttactgtaccattttacattcccaccagcaatgcacaatggttccaatttctccatatcttcaccagcacttattttctgtttttttgataatagccatcttaatgagtctgaagtggttcctcattgtggattttatttgcatttatctaataattagtgaagttgaac

SEQ ID NO: 919924 - DNA, 644 bp, Homo sapiens
atgaaaaaattatctggagaagagccattctccctgcctcccccaatacctattccacagtagtccacattggagctgatggcctctctgcttgccctcctgttgacaaatccaacctccactgcagcaagagtgatcaattcaaaatataaatataaatataaaatgtaaatcaggtcttctcattcccctgcttcaaatcttcagcttaggacttaagatgtaaccaaagcctttgcctgtgtgatgtggtcccagctagctcagtggcycctccctggccctcatcccttcattctctatactccagccactgtaatcttttgcttgttccctggacaagccgagctcattcctgcctcatggcctttgcacttgctgttccattagcctggaacactcttcccccagatctttaaatgaaaagatactttcttattattcatgcctccagtcaaatgacacctcttcacagaggcctttcttgagcacctaaagtcactgtctattcatttgtgatcacaccgccattttctttttcttcagagcgttaagcactcaggaatgattttgttcatttatgtggcttcattatcattgtcagtcttggacattctaatataaactctttctctatgttgttt

SEQ ID NO: 919925 - DNA, 491 bp, Homo sapiens
tggttatttctccagtgcctcacctggtatagcatattttctgatatgaacagattacttttaggaattcaggttgacttaacagagctcataaaaagcccgttggaaagactggcctggtaccttgtcaacacagtyccttgacctgtgataagaaagaatggcactttttttttttttttttttttttgacagagtctcgctctgttgcccaggctggagtgcagtggtgctatctcggctcactacaatctccacctcctgggttcacgcctttctcctgcctcagcctcccgagtagctgggactacaggcacctgttaccatgcctggataattttttgtatttttagtagagacggggtttcgctgtgttagccaggatggtcttgatctcctgacctcgtgatccacccacatcggcctcccaaagtgctgggattacaggcgtgagccactgcgcccagccaagaatggcactttttgacagg

SEQ ID NO: 919926 - DNA, 671 bp, Homo sapiens
tgtgtgtttttagtagaaactggctatgttggccaggctggtctcaaactcctggcctcaagtaatccactcacctcggcctcccaaaatgctgggattataggcatgagccatcatgcccatcctcaggtatttctttatagcagcatgagaatggactaatacagtaaattggtaccacagagagtggggtgctgctataaagatgcctgaaaatgtagaagtgactttggagctgggtaacagggagaggttagaacagtttggagggctcagaagaagataggaaaacgtgggaaagttyggaacttcctaaaatcttgttgaataactttgaccaaaatgttgatagtgatatggacaataaagtccaagctgaggtgatctcagatggagatgagaaaattattgggaactggaataaaggtgattcttgttatgctttagcaaagagactggtagaattttgccccttcactagagatctgtggaactaggaacttgagagagatgatttagggtatctggcagaagaagtttccaagcagcaaagcattcaagaggaagcagaacataaaagtttggaaaatttgcagcctgaagatgggatagaaaagaaaaacctattttctggaaagaaattcaagcctgttgcagacatttgcataagt

SEQ ID NO: 919927 - DNA, 610 bp, Homo sapiens
ctggcaggtgcccctctgggacaaggcttccagaggaaggaacaggcagcaatctttgctgttctgcagcctccgctagtgatacccaggcaaattgggtctggagtggacctccggccaacagggtctggagttgacctccagcaaactccagcagacctgcagcagaggtgtctattagaaggaaaacttaacaaacagaaaggaatagcatcaacatcaacaaaaacratgtccacacagaaaccgcatccaaaggtcaccaacatcaaagaccaaaggtagataaatcaacaaagatgagcaaaagccagcacaaaaaggctgaaaattccaaaaaaacagaatgcctctcctcctccaatggatcacaactcctctgcagcaagggaacaaaactagatggaaagtgagtttgacgagttgacagaagtaggcttcagaaggtaggtaataacaaactcctctgagctaaagaagtatgttctaacccaatgcaaggaagctaagaaatttgataaaaggttgcaggaactgctaactaaaataactagtatcgagaaaaacatagtgacctgatggaactgaaaaacacagcacgagaacttcg

SEQ ID NO: 919928 - DNA, 610 bp, Homo sapiens
ctggcaggtgcccctctgggacaaggcttccagaggaaggaacaggcagcaatctttgctgttctgcagcctccgctagtgatacccaggcaaattgggtctggagtggacctccggccaacagggtctggagttgacctccagcaaactccagcagacctgcagcagaggtgtctattagaaggaaaacttaacaaacagaaaggaatagcatcaacatcaacaaaaacaatgtccacacagaaaccgcayccaaaggtcaccaacatcaaagaccaaaggtagataaatcaacaaagatgagcaaaagccagcacaaaaaggctgaaaattccaaaaaaacagaatgcctctcctcctccaatggatcacaactcctctgcagcaagggaacaaaactagatggaaagtgagtttgacgagttgacagaagtaggcttcagaaggtaggtaataacaaactcctctgagctaaagaagtatgttctaacccaatgcaaggaagctaagaaatttgataaaaggttgcaggaactgctaactaaaataactagtatcgagaaaaacatagtgacctgatggaactgaaaaacacagcacgagaacttcg

SEQ ID NO: 919929 - DNA, 645 bp, Homo sapiens
aagaagtataattgatatgctaaaacaagagagaaaataaaatcatataaaatgttcaattaaaaccagagaaggcagaaaaagagtgaaagggggaaaaaaagaaacaaagaacaaggaaatagagaacagttaaaatgtggtcagagattaatccaactatatcaaaaatcacttcacatttgagtggtctaaatatactacttgaaagagagatggcaaagtggatgggaaaagaccaactacagattgtctacaggagcacacctgtaataaacaattaaagtaaakcacttctccatcagttgatttcctacctggtttaaataatatctgttggtattcacctgaaaaaaaggtctaacattaaaaatatataaaattccaaaattaatgcataaaaataatatcgtttttgtttttggaacaaaaagagaaacatactaaatataaacatattaaatttatgataaatccaatgcaatcaaaaataagaaaaagatgaatagttgctatgtggagttgcgataattcagaccagttggcaagatgggtttgaatatccctatgctatttttcaaagattacaactcctttataagtctttataatgtaaaagagtttgtaattctctatttaaataat

SEQ ID NO: 919930 - DNA, 598 bp, Homo sapiens
agagagggagaggcttgcaacaatgtggggtgagaggaatgcaaccacaatgactgcctgcctctttatctgcacctgtctgatcagaagcagcaatcagcaatcagagcacagatccccaacatgtggagcacggggtcctttttgcccactctggctcttgcaagttgtgtgcaggttccttcagaaacacatgcatgcctgcctgccatgtagctgaggggtagagaatgagtagttgcaaccttactaagccaaaattgacacaaattaactacaatttactatttaagccttccccagaaagttgcaagccttcaatagacttcagacttccgaaatagttgcatcagatgattctgccagtacaattrttggtaggtagagagacagattcctggtgcatcctactcagccatcttcccagaaccctcagatttcatgtattttctgttacatttccagttgttgccaaaattcttttttaattttacttttatgttctgggagacatgtgcagaatgtgcaggttttttacataggtatacatgtgccatggtggttggctgcacctatcaacccatcatgtaagttttaa

SEQ ID NO: 919931 - DNA, 642 bp, Homo sapiens
tatactctaaggtgctatcgacgtttacctggggtggagaaacacaatgcacttttcatttttttaagttattaaaaatactgcatttatgtttactgaaatattagtgaatctatagcataacccaatacaaaatatattagctccttgttatagcaaatttggatgtaatacctcaaatgcttcaatatatcaatctatactgaccccttcgacaaggatgatttagaataaaattgttgaataaagaaaatacagcctttattccatcaatgacccaacaacatgttgcctttatataatgtacaaattkgaattcagtaacacaacaggcacatttctatcttctgccttcctaaagcatggtgcatacgctaagaagaagagatgcttgtaccaaaacactctcacacactcacaagtaccttttgctatatcaatcaaataggctttagatgaccaccagggttgattgccttccttggccaattgaaatgttaataaaaccatgaagggattatatttataaatggactgttctttcacttaatccaaatccagatgtcaaaatgttttaaaatacccatctttggattttgaagctagctattaattattttccctacaaagtaaaataaatta

SEQ ID NO: 919932 - DNA, 645 bp, Homo sapiens
tcatgattagattgatgatgagcttcaaggtaggcactttcagccggaatattatataggtgatgagttcttctcaaggtactcactcacaatgtctgtctgcccctcgttggtgatgctaactttgatcatctgcttgaagtgttgtctgatttgtttaccatatagtcactgtttttttctttttacaacctcaaccaatatgcagtctgttggaggatactgaaggtcatgctaatagcctgctcctcatcaccatttctccccagatttagcatccgttgatgattcttgccagatccaaactttattgtgatggttgcaaaatgatgattttctagctgtaacatttcttccatgtgtaccagtgggcttggcattctgctgtaaggtagagttctcccttctctcttacrtatttgtttacccatttattatggactcaggggttctgatttttcaatggtctgtaatgttactatccttaattattgtggtgctcaaattgtccgatttttggccagtgggcccccgcttcccatgtccttaggggatgtcctcatcattttttttttggagaacctctttcctttttggcattaaaaaatgttccaggcccatcttgtatctgccctgccttcactc

SEQ ID NO: 919933 - DNA, 608 bp, Homo sapiens
tcctcccacctcagcctcatgtgtagctgggaccacagttgtgaaccaccatgcctgactaattttgcttttgaatttttgtttttgttttgtcgagatgagttcttaccatgttgcccaggctagtctcaaaaacctggcttcaaacaatcctcctacttcagcctcccaaaaggctaggattatcagtgtgagccaacacacttggccttggtttttgtttttaattctgtttatgtgaagtatcacatttattgacttgtgtaagttaaattatccctgcttccctaagataaaactcacttgatcatcatgtattatctttttgatgtgttgttggatttggctagctagcatatatatatatatatatatatatatatatatakagagagagagagagagagagagagagagagagagagagagagagagagaggattttcttatctatgtgcatcagggatattggttcacggttttatctttttgttatgtctgctcctgattttgatatgagggtgatactggcctcataaaatgagttaggaaggattctgtctttctcaatcttttggaatagtttcagtagaattggtaccaattct

SEQ ID NO: 919934 - DNA, 620 bp, Homo sapiens
acttggtctacagtgcagattaattctgatgtttctttattgtttctttctgtctggaagatctgtccagtgctgaaaatgagtgactgaagtctccatctattattgtattggagcctatctctctctttagctcgataatrtttcctttacatatctagatgctatagtgttgggtgcatatatatttaaaattgttatatcttctttctgaattgactcctttatccttatatggtgaccttccttgtctcttcttatagtttttgttttaaaagctattttgtttgatataagtatagtgagtcttacttttaaaaaatttctactagcatagaacaccatgttccatccctttattttcagactatgtagtcttaataagtgaaatgtgtttcttgtaggcaacagatcaatgggtcttgttttttcatacattcagccagtctatgtcttttaattagagagttaagtccatttacaatcaatgttattattgataagtaagaacttactcttaccatttatttatttgttttctggttgttttataatattctgtttcttttttctttccttcctgtctgcctctactgaaggttattttctcttgtgatatg

SEQ ID NO: 919935 - DNA, 620 bp, Homo sapiens
tgtattatttttaaaggtaaatgtcaaaattcaatctgaatccttaatgtcatttcatttaatgtataaagacacttaaagaaactttgtaggatttaaagtataagaaaaaattataacagaatacattcatgccctttcttctrtgtcttctattattgtagttctgttttaaatctagaggtattttaaaccgatacatcattttactgatttttaaaatttcatagatgttcaattgtcttttaaataatataactcagagaaaaataatctttatatttaccatttcagcgctcttaattctttttttgtagatctgaattttcagttgttaatttcttcatttattctggataaattcctttacaagttttagtctcagctcttatttatataacattttcattattttgtattcatttttgatgtatatttcagtgaatatttttacataatataaattttctttcttattgctttatttcacttagtactttagatggccttccaatgtattctagcttcgtgctatagctgatgttgttactataattctgattattatttccttgcatgagtatgtctttttatttagctgttgttaaaatatgttcttt

SEQ ID NO: 919936 - DNA, 568 bp, Homo sapiens
gactgcccgattgcctcggaagcctacaggaccaccacagatgctctgggtaactctcacaggaaggtaagtccgtccccttcttaatcaatatggaggcaacccactccacattaccttcttttcaaagacctgtttcccttgcctccataactgttgtaggtactgacrgccaggcttctaaacctcttaaaatttcccaactctaactctggtgccaacttagaaaatactcttttaagcactcctgtttagttatccccacctgcccagttcccttattaggccaggacactttagctaaattatctgcttccctgactattcctgggctacatgccgccttttcccccagttcaaagcctccttcacatcctccccttgtaactccccaccttagcccacaagtgtaagatacctctactccctccttggcgaccgatcatgcaccccttaccatctcattaaaacctaatcacccttaccccgctcaacgccaatatcccatcccacagcacgctttaaaaggattaaagcctgttatcacttgcctgctacagcatggcct

SEQ ID NO: 919937 - DNA, 568 bp, Homo sapiens
gactgcccgattgcctcggaagcctacaggaccaccacagatgctctgggtaactctcacaggaaggtaagtccgtccccttcttaatcaatatggaggcaacccactccacattaccttcttttcaaagacctgtttcccttgcctccataactgttgtaggtactgacggccaggcttctaaacctcttaaaatttcccaactctaactctggtgccaacttagaaaatactcttttaagcactcctgtttagttatccccacctgcccagttcccttattrggccaggacactttagctaaattatctgcttccctgactattcctgggctacatgccgccttttcccccagttcaaagcctccttcacatcctccccttgtaactccccaccttagcccacaagtgtaagatacctctactccctccttggcgaccgatcatgcaccccttaccatctcattaaaacctaatcacccttaccccgctcaacgccaatatcccatcccacagcacgctttaaaaggattaaagcctgttatcacttgcctgctacagcatggcct

SEQ ID NO: 919938 - DNA, 568 bp, Homo sapiens
gactgcccgattgcctcggaagcctacaggaccaccacagatgctctgggtaactctcacaggaaggtaagtccgtccccttcttaatcaatatggaggcaacccactccacattaccttcttttcaaagacctgtttcccttgcctccataactgttgtaggtactgacggccaggcttctaaacctcttaaaatttcccaactctaactctggtgccaacttagaaaatactcttttaagcactcctgtttagttatccccacctgcccagttcccttattaggccaggacactttagctaaattatctgcttccctgactattcctgggctacatgccgccttttccyccagttcaaagcctccttcacatcctccccttgtaactccccaccttagcccacaagtgtaagatacctctactccctccttggcgaccgatcatgcaccccttaccatctcattaaaacctaatcacccttaccccgctcaacgccaatatcccatcccacagcacgctttaaaaggattaaagcctgttatcacttgcctgctacagcatggcct

SEQ ID NO: 919939 - DNA, 574 bp, Homo sapiens
taattgaatttggaaagaatttcagttttacaagatgaagagttatagaaatggatagtgggtgatggttgagcaatattatgaatgtatacggtaccagtgaaatgtatgtatacttaaaaatggagggccgggcscggtggctcacgcctgtaatcccagcactttgggaagccgaggagggcggatcacgaggtcaggagattgagaccatcctggctaacacggtgaaacccagtctctactaaaaatacaaaaaaaaattagccgggtgtggtggcgggcgcctgtagtcccagctactggggaggctgaggcaggagaatggcgtgaacccgggaggcggagcttgcagtgagccgagatggcgccacagccgtccagcctgggctacagaaccagactccatctgtaaaaaaaaaaaaaaaaaaaaaaaaaaatggagaatatggtaaattttacgttacatgtattttctcacaataaaaaaatttaaaacaaaattgacttgcagaggttcactttcgtcacacagcgatgggggaatggactgtctcccctcccagctctcagc

SEQ ID NO: 919940 - DNA, 574 bp, Homo sapiens
taattgaatttggaaagaatttcagttttacaagatgaagagttatagaaatggatagtgggtgatggttgagcaatattatgaatgtatacggtaccagtgaaatgtatgtatacttaaaaatggagggccgggcgcggtggctcacgcctgtaatcccagcactttgggaagccgaggagggcggatcacgaggtcaggagattgagaccatcctggctaacacggtgaaacccagtctctactaaaaatacaaaaaaaaattagccgggtgtggtggcgggcgcctgtagtcccagctactggggaggctgaggcaggagaatggcgtgaacccgggaggcggagcttgcagtgagccragatggcgccacagccgtccagcctgggctacagaaccagactccatctgtaaaaaaaaaaaaaaaaaaaaaaaaaaatggagaatatggtaaattttacgttacatgtattttctcacaataaaaaaatttaaaacaaaattgacttgcagaggttcactttcgtcacacagcgatgggggaatggactgtctcccctcccagctctcagc

SEQ ID NO: 919941 - DNA, 688 bp, Homo sapiens
agtgttgatatgtcatattctcattatcatttagttcaaaattaccatgatttaattaccatgaggttgcttttttgatacatgagttacttagaaattgaattaggctaggcatggtggctcccacctataatcctagcactttggaaggccaaggcaggaggattgcttgagtttgaggccagtctaggcaatatagtgagacctcatctccacaaaaaagtacaaaaaaactagccaggcatggtgacacatgcctatagttccagctactcaagaggctgaggtgggaggattgcttgagcctgggaggcagaggttgcagtgagtggagatcacaccagtgcacttcatcctggatgacatagcgagaccctgtctcaaaaaaagaaaaaaagaaattgaactatattgcttgatttccaaatgtttttgaggattttctaattttcttttggctattgatatgttgcttaattcaactctggacaaaaacagtctataacttcaattctttaarcttttttgagattgactttatggcccaggaaatggtcacttttggtaaatattctatgtgcacttgaaaaaatttatagtactttatgattgctgagtacagagctccatacgtctcaatgagacaagtttgttaattatgttgctcagatcttctatacccctattg

SEQ ID NO: 919942 - DNA, 731 bp, Homo sapiens
gtgaggatatttgacaggttgtagacaatagggtcaaaaggaccagcgaacaaaaagcgtggaagatttcaagtttcttgctagttggaacaaagtaactttccttagctgagcttgttcagcctttttcatagtraacattattcttggagggccccttctggaaactgtcagttgaaggactccctctgccctgtaagtgaagggaattgatgttcattgggcacctgcagagtgctagcaactgttaagtgccttgtgtatgttatctggcttgattattaaagttgcttcagaaagaaaaaggatgagttaaatgtactgaccaaggcactggtggttcttgaatatctgcatgtttattcctgcatttaacacactgtttttagcagccaactgcatgctacacactgtgctagccactgcctacaggatgaacaaaaattgtgtacacaattggggatgaacaaaaattgtgtcatggaggttatagttgagcatcaggctcaagcggagaacttgtaaagcatagataggtgcccagctccatccccaggaattctgattcggtgagacaggaaatagagggtgtattaggtccctagggctactgtgacaacgtgccacaaacttggggctttattctctcacagttgtggagaccagaagtctgacatcggggtgtcagcagaccatggttccctctgaaggctctaggggaaggtccttcc

SEQ ID NO: 919943 - DNA, 712 bp, Homo sapiens
atccgtggtcttccttggcttgtagctgcatcattccagtttctgcctccatcttcacaaggccttctcctccttgtctgtcctcacctcgtcttccctctgtgtctctgtctctgtttactcttcctataagaacacaaaacactgattagcgcctatcctgatctaatatgacctcattttaacttgattgcatctgtaaagactctattttcttatttatttatttatttgagacagagtctcgctctgtcrcccaggctggagtgcagtggcgcgatctcggctcactacaacctccagtgcccgggttcaagagatctcctgcctcagcctcccgagtagctgggactacgggtgtgcaccaccatgcccagctaattttttgtatttttagtagagacagggtttcacctgttggacaggatggtctcgatctcttgacctcgtgaaccgccctccttggcctcccaaagtgctgggattacaggtgtgagccactgtgcccggctgactattttcaaataaggtcacattctgaggttttgagtagacaagaattgtcagggaaatactattcatcccagtacgggggggaaccccctttttaaataggtccccaggggatttgaatgcgtgtggtcaactggcaacccatttgagaaacctttggactgtagatgggtagggaagtagagtcgcagcgaggggg

SEQ ID NO: 919944 - DNA, 575 bp, Homo sapiens
ccctcatcctttgagctctcggcatctcttgcctccaatgtgcaggagtctcactaagtctgaaacaatcccttgatctggatctggaaggagtttgatagcaccttgatcctcttcctttaattctcctgccagatctagtaactaaaagtcgtctctggtatgaagcaggctgggagttagatagattacattctctttctctttttctctctctctctggcttttcctttccattgcatcagctataggaggactttttctcatyaggaaatctattttcaggtataggagggatcttttctggatggacagtagactggggttgtgctctaagattttcagcttcactcttactagattcactcttcttgcttttctttcacttcttcttttccttcttgtgtttttgggaatttttcctaagttttttcctcttttctttgatttctcttcagaagcattttcggaatcacaggaatcaggtgagaactgagaatcatttgagctatcttagtcactagatcatgaggaggaagatgatgatgatttatacattttcttttcttctttct

SEQ ID NO: 919945 - DNA, 582 bp, Homo sapiens
tacattcccaacaacagtgtgaaagcattccagaatctctgggacacagttaaagcagtgttaagagggaaaattctagcactaaatgcccacattaaaaagctagaaagatctcaaatcgacgtcctaacatcacaactcaaagaactagagaaccaagagcaaacaaatttcaaagctcgcagaagamaagaaataaccaggatcagagcagaactgaaggagatagggacacaaaaaaaccttcaaaaactcaataaatccaggagttgggtttttgaaaaaattaataaaatatatagacttctggctagattaatagagaagaatcaaatagacacaaaaaatgataaagaggatatcaccactgaacccacagaaatataaaccaccatcagagaattctataaacacacctgtgcaaataaactacaaaatctaaaagaaatggataaattactagacacatacaccctccccaagactgaaccaggaagaagttgaatccctgaatagaccaataataagttctgaaattgaggcagtaataaatagcctaccaaccaaagaaagcccaggacc

SEQ ID NO: 919946 - DNA, 591 bp, Homo sapiens
ggcctgtagccttttaattttggccaatttgtcccatttggaagggctatatttacccaatgcctgtaccgcactgtatctaggaagtaactaacttgcttttgattttataggctcataattatgtggaaggggtttgccttgtctcagatgagatgtcggactgtgaatttttgagttaatgttgacacgagttaagactatctcatcttgaattgtaactcccacaattcccatgtgtcacgggaggaacscagtgggagattattgaattatggggcaggtctttcctgcactgttctcatgatagtgaatgagtctcatgagatctgatggttttaaaaacatgagtttccctgcacaagctctctctttgcctgctgccatccaagtaagatgtgacttgcccttcctttccttccaccatgattgtgaggcctccccagccatgtggaactgtaagtccattaaacctctttcttttgtaagttgcccagtctggggtatgtctttatcagcagcatgaaaacagactaatacagtgatcaaactaaaatacattattttgggaggaaatggcagaaggaaatc

SEQ ID NO: 919947 - DNA, 591 bp, Homo sapiens
ggcctgtagccttttaattttggccaatttgtcccatttggaagggctatatttacccaatgcctgtaccgcactgtatctaggaagtaactaacttgcttttgattttataggctcataattatgtggaaggggtttgccttgtctcagatgagatgtcggactgtgaatttttgagttaatgttgacacgagttaagactatctcatcttgaattgtaactcccacaattcccatgtgtcacgggaggaacgcagtgggagattattgaattatggggcaggtctttcctgcactgttctcatgatagtgaatgagtctcatgagatctgatggttttaaaaacatsagtttccctgcacaagctctctctttgcctgctgccatccaagtaagatgtgacttgcccttcctttccttccaccatgattgtgaggcctccccagccatgtggaactgtaagtccattaaacctctttcttttgtaagttgcccagtctggggtatgtctttatcagcagcatgaaaacagactaatacagtgatcaaactaaaatacattattttgggaggaaatggcagaaggaaatc

SEQ ID NO: 919948 - DNA, 859 bp, Homo sapiens
  misc_feature 1, 2, 3, 4, 5, 6, 7, 8, 9, 10, 11, 12, 13, 14, 15, 16, 17,18, 19, 20, 21, 22, 23, 24, 25, 26, 27, 28: n = A,T,C or G
nnnnnnnnnnnnnnnnnnnnnnnnnnnntcctggggcccttaagaattacactaaatctattctgcctgtgctctaaatggaacagcaaagcctgaatagagcacatctgtttacagcatggtttactgtatattttaaacccactgttgagacctactgcctagaaaacyagatttatttcaaaatattactgctcattgacaatgcacctagtcacccaagagctctgatggagaagtacaaggagattaatgttttccggcctgctaacaacatccattctgcagcccacagattaaggagtcatttttgagaaatattatttgagaaatacgttttgaaaggctatcgctaccaaaacaatagttcctctgatggatctgaacaaagtaaattgaacatcttctgggacgcactcaccattcattctaggtgccattaagaacattcatgatttaaggaaggaggtcaaaatatcaacattaataggagtttggaaacacttgattccaactctcgtagatgactttgaggggctcaagacttcagtggaggaagtcactgcagttgtggtggaaatagaaaaaaaaaaaaactagaactaaaaatggagcctgaagatgggtcttaattgctgcagcctcatggtaaaattttaacagatgaggaattgcttcttatggataagcaaagagtggtttattgaggtgggatctactctgatgaagatgctgtgaatcttgttgaaatgacaacaaaggatttagaatatcacgtcaatattaataaagctgtgttaataaagttaataaagcagcaacagtgcttgagcggattgtctctaattttgaaagaagt

SEQ ID NO: 919949 - DNA, 584 bp, Homo sapiens
ccatcttgccaccatatgaagcctaggaatggtagaatccaatatggcacagttgtttagagcaaaggttggtaaattcttcttataaagggtcagatagtaaatattttaagcttagcaggtgatatggtttgctgtgtgtcgccaaccaaatctcatgtcgaattgtgattcccaatgttggggagggacctggtgggaagtgattggatcatgggagctaatttctcccttgctgttcttgtgatagtgagttctcaggagatctggttatttgaaagtgtggtatacctcccccttcgttctctcttccttattctctggtcatgtaagacatgctgcttccccttcacttcccagtcatgctttctgtacagcctgcagaactgtgggtcaattaaacctcttttcttcataaattaaccagtctcargtagttctttgtagcagtgtaataacagactaatacagaaaattcgtaccagagaagtggggcactgctatacagatacctgaaaatgtggaaccgactttggaactgggtaatgggcaggagttagtagagtttggagagctcagaagac

SEQ ID NO: 919950 - DNA, 565 bp, Homo sapiens
ggcccaggggttgaggacccctgctgtaagattataatggagctgaaaaattcctgtcacctagtgactttctagccaatataacactgtagcacaataccattactcatgtgtttgcagtgatgctgctgtaaacaaacctactctgctgccagtcatataaaagtataacataaaattatgtacagtacataatacttggtaatgataataaatatgttactggttcatgtgcctactatactatactttttatcattactttggagcatatgcctatttatttaaaaaaagttaactgtaaaacagcctcaggtccttcaggaggtattccagaagaaggcattgttatcatagaatgtgatagctctgtgtgtgttattgtccctgaagatcttccagtggrgccagatgtggaggtgaaagccagcaccaatgatcctggacactgtgtaggcctaggctaatgggtgtttgtgtcttaatttttaacaagaaagtttaaaaagttaaaaaatttttaagaagatagcttatagaataaggatataaagaaaaaatattt

SEQ ID NO: 919951 - DNA, 740 bp, Homo sapiens
ggccccctaaaaggtccccagggtcttcctccttggaaaacctctcctagcctcggtgctccaccatacactgtactcacaggatctcttgacctcctctgcacaacctggacctcgctctaaccttcctctttgtgccctcccaggtcactgggtgccccaccccgcaggcctccaggcctctccctcccctccttctagccctttccagggtctgcgtgttggcctatgctacatactcaagcctttcctgaccccctccatacaagccaagcctattcacaggggctccgacgttaggacccccaggttccggccctctctccagccacgtgtctgaacaactccgtgctcccacccgtccacccacctcaggttctctctagtcctcgcccggcctccaccaggctcgttctaggtcccagcgctctccggggttccacccccggggccgcagccctcgctttctgggcctttctgtgtaagttctcgccccctccaagctccagaacagccccctccggcgyctgccccactcccgccccggcccaggtaccctccacgcggtccagcccctcccgccgcccgcccccagcccccttcctcctcccggcccccgtacccagtgcagcagcctctcaggtccgggcgactccaagcggccccgggctaccctcgcagttgcaggcggcggcgagaaggggacctctgggtgtgccccaggaactggcggcgccggc

SEQ ID NO: 919952 - DNA, 714 bp, Homo sapiens
actgcaacctccacctcctgggttcaagcgattctcgtgtcttagtctcccgagtagctgggattacaggcagcagccacaacacctggctaatttttgcatttttagtagaaacggtatttgccatgttggccaggctggtttcgaactcctgacctcaggtgatctgcctacctcagcctcccaatgtgctggtattacaggcctgagccaccgtgcccagccagaaataatttttttttaactagctggatgtggtggtgcatgcctgtaatcccagctactcagggagatgaagtgggaggatcgcttgagcccaggaggtcaaggttgcaatgagccacgatcgcgccagggcaacagagtgaggccctgtctgaaaataacagaggagcccaagctttaataattggggcgtgctggggcggtcctgaggcaggttccacargctcctctttcttctcctcttgcccaggtcctggtgcctgatgactgccggcctggcacacccccgagtgacctcatcgagatccaggtggtgaaggtgacggacaccacgctggtccctgagcccccggagccaggttctttccactgtgccttgtgccctgctgccttccggctggtttccgagctgctgttccacgaacatggccacttggctggggccgagggaggcgggcagggtggggacccgagccggtgccacgtgtg

SEQ ID NO: 919953 - DNA, 591 bp, Homo sapiens
agccactgcgcctggctctggctgacatctgatggtaacctcaggagagatcccgagcctaaaccacccagctaagctcctgaatttctctcacacgaaaaccatgagataataaatatttgttaagtggctaagttttggtgaacacctgttacacagcaatagataacttgtaaatggctgaggtgtgatttggactcaggtagtctggttccagaacccaacatcccagcatcaatcataatatcaaaaattagaaattttggggcttggcgtggtggctcacgcctgtgagcggggaagcaggcaggaggatcatctaaggccaggagttcgagaccagcctggccaacatggtgaaaccccgtctctactaaaaaaatacaaaaaattagctgggtgtggtggcacgtgcctgtaatcccagytactcaggaggttgaggcaggagaattgcttgaacctgggaggcagaggttgcagtgagccgagatcacgccactgcactccagcctgggcaacaagagtgaaactccatctcaaaaaacaaaagaaagaaagaaagaaagtttgtaaatgttactgggcaca

SEQ ID NO: 919954 - DNA, 750 bp, Homo sapiens
gcaccccccgtgatcagctagtccccccggggagggaggcctagaggaggagccttggactttccacccacctcctcccagccaggcctcacggttgctgctgtgaaagccaacctgggacagagccaggagccccaggtgaacacccagccagaacccagtggggaaggaggtcaccaacccagccagaagcccaggagggaccagccccaaggcgacgtctgccccaaccagggcccgtctcctggtggccctcgaggacatgggcatgggagagggcccaggagccaggccaggcccaggagtgggcatgtgagcatcagccaagagcggcctcccttccgggccagggccaggccgcctgcatcacacaggggagcccgaagaacggggggaaaggcctgtaggcggggctgcccagaaccctgccaaccaaggcacgggggcacacgtggccagcagcaccgggcagcaccaggcatctgagaccccagacccagcctgcctaaaggggctgccttcaggtgacaccactggctttttccttccagagccaccaagagaggaaggagaaggtgacttgcyccatttcccagttgtaggcactgggacttggcaggaactgacagaaacagaagatgtgggcactttgcttcccaggcttgcgcggggaagctggcagggcctcggggtctctacctcctgtgccttcccaggacccaggcgtccctcactgccatgcactcagcc

SEQ ID NO: 919955 - DNA, 522 bp, Homo sapiens
gagctcaagcaatcctcccacctgagcctcccaagtagctggaactacaggtgtgcaccactatgcctggttatttttttattttttatttttgtagagatgaggtctcactgtgttgctcaggctggtcttaaactcctggcctccagcaattctcttgccttggtctcccaaagtgctgggattacaggcacctgccaccgcaccctggcctgctcctacaactttgaagggcttccccctaccaaggggctttgctcgcccagcagcagcagaggcaggaggggaggcagttctgataatccccatttacagggcacgcagctagtgacggaaccatcctcttcccccgtgccaagctgacyttgaggaggaaagcagaactccccagccacccctcaagcacccacctccgtggggtttggcccttactttcaccttctgctctggcccggggggttacgggcccagagtcggggggtggggggaaacccaacttcccggggttcaggatgtgtgtca

SEQ ID NO: 919956 - DNA, 727 bp, Homo sapiens
ctccttggtcaaggccatgggcaactgcgcgtgaggcgcgcggctgtgggaccgccctgggccagcctccggcggggacccagggagtggtttggggtcgccggatctcgaggcttgcccgagccgtgcgagccaggactaggagattccggtgcctcctgaaagcctggcctgctccgcgtgtcccctcccttcctctgcgccggacttggtgcgtctaagatgagggggccaggcggtggcttctccctgcgaggaggggagaattcttggggctgagctgggagcccggcaactctagtatttaggataaccttgtgccttggaaatgcaaactcaccgctccaatgcctactgagtagggggagcaaatcgtgccttgtcattttatttggaggtttcctgcctccttcccgaggctacagcagacccccatgagagaaggaggggagcaggcccgtggcaggaggrgggctcagggagctgagatcccgacaagcccgccagccccagccgctcctccacgcctgtccttagaaaggggtggaaacatagggacttggggcttggaacctaaggttgttcccctagttctacatgaaggtggagggtctctagttccacgcctctcccacctccctccgcacacaccccaccccagcctgctataggctgggcttccccttggggcggaactcactgcgatgggggtcaccaggtgaccagt

SEQ ID NO: 919957 - DNA, 667 bp, Homo sapiens
tcccgggaacagagtcacccttggccacccaccgcttcctgcagggttcctcacagttcccctcctgactacagccttcaggaagaaccattccaagagcccagcactgaacacacctcaagtatttatcagatgcctactgtatgccagggcctgygccaaagatggggcactgggctgggaacaagccgactctgctctggctcttggggagctcacacccttgaggccctaagctgtggtttaaggttgccaagtgcaatgaaggggatctcagagtgtgaacagggtccaccagggagggctttatggaggcagcagctttgatgaaatacctggggagggtggcctcctgctggccccagtcccaagatgcctggatgcttctcctttgccctgatcgatctccccttgacatgtagcacctgactgcagggacctcgccccccttgctgcgccactcctgagccctgtgtcccgtgacagcgctgttcagggttagctggccttcaaggaaagggcaagggtagaagggagggaggcatctcctctgctgccagatgcgtcctgatggcttagtgctgtcacggatattactgttatctcctggatctcctgggaatctgtgaacgtggggtttggccctgacacctgcgatgagccactg

SEQ ID NO: 919958 - DNA, 593 bp, Homo sapiens
acagactgacaaatgtgtgcagatacagagaggggctggggggtcctgggggctagaaggacttactaaagtgatagagaaacagaaaaacaggccaggcacagtggctcatgcctgtaatcccagcactttgggaggctgaggcaggcagattacttgaggtcaggagttcaagaccagcctggtcaacatggcaaaaccccatctctactaaaaatacaaaattagccaggcrtggtggcgcacacctgtaatcccagctactcgggaggctgaggcaggagaatcgcttgagcccaagaggtggaggttgcagtgagccaagatcgtgccactgcactccagcctgggcaacagagtgagattttgtctcaaaataagaaacagaaaaacagagagaagggactgagtgagagcaagaaagggaagaggtgacccaaggtcaggagacagagggagtgaaaaggagagagcaagacggtgagtggtggggtgcgaggctggatgggccctccctggccctgcccatactgcctagacaccatgggttagggcaggacaatgattttactggctcgacccctgccaggtac

SEQ ID NO: 919959 - DNA, 593 bp, Homo sapiens
acagactgacaaatgtgtgcagatacagagaggggctggggggtcctgggggctagaaggacttactaaagtgatagagaaacagaaaaacaggccaggcacagtggctcatgcctgtaatcccagcactttgggaggctgaggcaggcagattacttgaggtcaggagttcaagaccagcctggtcaacatggcaaaaccccatctctactaaaaatacaaaattagccaggcgtggtggcgcacacctgtaatcccagctactcgggaggctgaggcaggagaatcgcttgagcccaagaggtggaggttgcagtgagccaagatygtgccactgcactccagcctgggcaacagagtgagattttgtctcaaaataagaaacagaaaaacagagagaagggactgagtgagagcaagaaagggaagaggtgacccaaggtcaggagacagagggagtgaaaaggagagagcaagacggtgagtggtggggtgcgaggctggatgggccctccctggccctgcccatactgcctagacaccatgggttagggcaggacaatgattttactggctcgacccctgccaggtac

SEQ ID NO: 919960 - DNA, 593 bp, Homo sapiens
acagactgacaaatgtgtgcagatacagagaggggctggggggtcctgggggctagaaggacttactaaagtgatagagaaacagaaaaacaggccaggcacagtggctcatgcctgtaatcccagcactttgggaggctgaggcaggcagattacttgaggtcaggagttcaagaccagcctggtcaacatggcaaaaccccatctctactaaaaatacaaaattagccaggcgtggtggcgcacacctgtaatcccagctactcgggaggctgaggcaggagaatcgcttgagcccaagaggtggaggttgcagtgagccaagatcgtgccactgcactccagcctgggcaacagagtgagattttgtctcaaaataagaaacagaaaaacagagagaagggrctgagtgagagcaagaaagggaagaggtgacccaaggtcaggagacagagggagtgaaaaggagagagcaagacggtgagtggtggggtgcgaggctggatgggccctccctggccctgcccatactgcctagacaccatgggttagggcaggacaatgattttactggctcgacccctgccaggtac

SEQ ID NO: 919961 - DNA, 731 bp, Homo sapiens
gattaactgtgatggtttatgcacattagctgcattaagataataatgaagaaaaaataattatctctatagtgacaaaatctgtcagagagctctttaaccaagtgaatcattaacatgaactgcactaggacaaattttttttttttttttttttgagacggagtctcgctctgctgcccaggctggagtgcagtggtgcaatctcagctcactgcaagctccgcctcctgggttcacggcattctcccgcctcagcctcccaagtagctggggccacaggtgcccaccaccatgcccggctaattttttttttttttgtatttttagtagagacggggtttcaccattcccaggatggtctagatctcctgaccttgtgatctgcctgccttagcctcccaaagtgctgggattacaggctgagccaccgcgcccatcctaggacatatttttatgatgtgttgatgcacatgaaatgacacagcatcacggctgtgatactgctcctccaaactatagtctgaattttaacattaaaaaatcagttttakgcaaagttcaggatacagatatcttccctgtctataatttgtaatagtaattttaaatcatctttctttagcaccctagagagcaggtatctcctgataattttttttttagaactttctgggtaataaatgtcatcttgtttaactaagcatttccttgatcctgttttgcacaga

SEQ ID NO: 919962 - DNA, 627 bp, Homo sapiens
tatcagaagtaacaatataaaacagtggccccaattttttttggacacatctattcattgtaccaaccatataatgcttaattcacccatgtatccagttgttagtctagacatgttcctggatagtaaggatcatgactgcttcatctgttttttgaatggccatataaaatgaaaacaattactttatctgtttgagtcaccagacctcctattgctttcatccaagtatcaggaaacttgagaaactctcatctgggtaccaaccaaagttatctcttgtataaggggagaaaaaaacacagaattgccaggcatggtggctcacacctgtgatcccagcattttgggaggctgaggtgggcggatcacaaggtcaggagttcaagaccagcctgtgcaatatggtgaaaccctgtctttaytaaaaatgcaaaaattagccaggcatggtggcaagtgcctgtattcccagctatttgggaggctgaggcagaagagtcacttgaacccgggaggcggaggttgcagtgagccgagatcgcgccactgcactccagcctgggcgatagagcaatactccgtctaaaaaaagaaaaaaaaccctaaaaaaaccacacacacaca

SEQ ID NO: 919963 - DNA, 757 bp, Homo sapiens
agtgacagtgaataggtatctactgtgatgagtgagtgggtgacagctaacaagttaccgctgtgatgtatgagtgggtgagagtgaacaggttccacggtggcaattgagttggtggcaatgaacaggttttcactgtggtgactgtgtgggtgacagtgaacaggttgccactgtgatgtgtcagtggctgacagtgaacagcttctcactgtggttaatgggtggctgacagtgaacaggttcctactgtgatgaataagttactgagagtaaagaggttcgtccrgtaatgaataagtgggagacagtgagcagtttcccattgtggtgaatgagtgggtgagagtgaaaagattcctaatgtggtgaatgaatggctgaccatgaacaggttctcactgtgatgagtgagtgacagtgaacagattcccactatgataaatgtgtgggtgacagtaaacagatttccactgtagtgaaggagtgaatgacagtaaactggttcccactgtggtgaatgagtggctgactgtaaacaggttcccactgtggtgactgagtggcttacagtgaacaggtttctactgcggtgaacgagtggttgacagtaaattacttcccactgtggtgaatgagtgggtgacagtgaaatggttcccattctgatgaatgaatgtctgacagtgaacaggttaccactgtggtgaatgtgtggtcgacagtgaacagtttcccactttgataaattagtggg

SEQ ID NO: 919964 - DNA, 563 bp, Homo sapiens
agtggtctaaataaaatttttcacaggctcctgaacttggagctaccctcaatctgagccaatatacaactccattttatgtccctcctaagaacatgctgacttcagggtaaaacattctctgatctaaaatctgattatttcacccttcatttgtcagtcacctccaacttcttttttttttttttaagatggaatctggccctgtcacccaggctggagtgcagtggcgcgatctaggctcactgccagctccrcctcctgggtttacgccattctcctgcctcagcctcccgagtagctgggactacaggcgcccgtgaccacgcccggctgatttttttgtatttttagtagagacggggtttcaccatgttagccaggatggtctccatctcctgacctcatgatccgcctgcctcggcctcccaaagtgctgagattacaggtgtgagccacagcatccggccgtctccaacttctaattttgtttgctcctccccatgaaagaaagcccttttctgcctaaactttgcaatccttaaggttcttacagttggtat

SEQ ID NO: 919965 - DNA, 625 bp, Homo sapiens
cctcagctgcaggtctgttggagtttgctggaggtccgctccagatcctgtttgcctgggtatcaccagcagaggctgccgaacagcaaatatttcagaacagcaaatattgctgtctaatccttcctctggaagcttcatctcagaggggcacccggctgtatgaggtgtcagtcagcccctactgggagctgtctccaagttaggctacataggggtcagggacccacttgaggaggcattctatccattctgagatctcaaacactgtgctgggagaaccactgctctcttcagagctgtcagacagagacgtttaagtctgcagaaatttctgctcccttttgttcagctatkccctgcccccagaggtggagtctacataggcaggttggcctcagtgtcccgtggtgggctccaaccagtttgagcttccaggctgctttgtttatgtacttaagcatcagcaatggcagacactactcccccagccaggcttgccaccttgcagtttggtcttggacaagcagtgagcaaggctccatgggcatgggacccgctgagccaagcatgggatataatctcttggtgtgccatttgctcagttggaaatgcagaaatcacc

SEQ ID NO: 919966 - DNA, 619 bp, Homo sapiens
tcggggcgcagattgtgcagctgactgccgggaggcctgagtcccgccacagccacttcccacccattacaaccagcccctcccctctctggggatgtcggacccggcactctcaccatttctaggcttccaggggttcctggcgtcttagctgtagatctcccaatacctgcrggtcacagggccacagagcctggacctctaggagcagaggacacagagcgctgaagacgagacctggagctcaggccacagcgagggacaaaggccccgccaaacccggaagccgccctgtccgcttcacctgcgtgcctgattggacggttccctgcctagcgtctctgattggataacatttaaatccccgccccctcaggccatgattgacggaagatgtgatgagatgcggggctgaaagaagagtgacagcttgggctgcatccttctctgacagggcttcctccctgagctgagccaggcccaccccagaggttatttgcatttaaccttgtgtgtaaggtcatatgcatttataaataatatatggggccggtcacggtggctcacgcccgtaatcccaacattttggaaggctgaagcgggcagatgacctgaggtc

SEQ ID NO: 919967 - DNA, 726 bp, Homo sapiens
acatgtagaccactgtgtcccagttgctgtttggaggggatttctcttccaaatatcagacagtaaacaatggatgatagggcctcagaaggaggaaaccccatgtcttcacatctcttcacagtgttgacctccaaagttcagatgtggagggaatagatkaaaggctgatatggtttggctctttgtcccaacccaaatctcatcttgagttgtaatccccacatgtcggggaggggccttgtgggaggtgattgagtcgtgggggcagacttcctcttgctgctctctgatagagttctcaggagatctggttgtttgataagtctatagtgctttctctctctttcactctctcctgccacctgttgaagacatgcctttcttcccttttgccttctgccacgattgtacgtttcctgaggcctccccagccatgcagaattttgagtcaattaaatctcttctcttcataaactactctgtttcaggtagtttttttgtttgtttgtttgttttttggggttttttttgacagagtctcactcttgtcgcccaggctggagtgcagtgacgcgatctgtgctcactgcaacctccgcctcccatgttcaagcaattcttctgcctcagcctcccgagtaactgggattacaggtgcctgccactacaaccagctaattttttgtgtttttagtagagacggggtttcaccgtgttagccag

SEQ ID NO: 919968 - DNA, 726 bp, Homo sapiens
acatgtagaccactgtgtcccagttgctgtttggaggggatttctcttccaaatatcagacagtaaacaatggatgatagggcctcagaaggaggaaaccccatgtcttcacatctcttcacagtgttgacctccaaagttcagatgtggagggaatagattaaaggctgatatggtttggctctttgtcccaacccaaatctcatcttgagttgtaatccccacatgtcggggaggggccttgtgggaggtgattgagtcgtgggggcagacttcctcytgctgctctctgatagagttctcaggagatctggttgtttgataagtctatagtgctttctctctctttcactctctcctgccacctgttgaagacatgcctttcttcccttttgccttctgccacgattgtacgtttcctgaggcctccccagccatgcagaattttgagtcaattaaatctcttctcttcataaactactctgtttcaggtagtttttttgtttgtttgtttgttttttggggttttttttgacagagtctcactcttgtcgcccaggctggagtgcagtgacgcgatctgtgctcactgcaacctccgcctcccatgttcaagcaattcttctgcctcagcctcccgagtaactgggattacaggtgcctgccactacaaccagctaattttttgtgtttttagtagagacggggtttcaccgtgttagccag

SEQ ID NO: 919969 - DNA, 726 bp, Homo sapiens
acatgtagaccactgtgtcccagttgctgtttggaggggatttctcttccaaatatcagacagtaaacaatggatgatagggcctcagaaggaggaaaccccatgtcttcacatctcttcacagtgttgacctccaaagttcagatgtggagggaatagattaaaggctgatatggtttggctctttgtcccaacccaaatctcatcttgagttgtaatccccacatgtcggggaggggccttgtgggaggtgattgagtcgtgggggcagacttcctcttgctgctctctgatagagttctcaggagatctggttgtttgataagtctatagtgctttctctctctttcactctctcctgccacctgttgaagacatgcctttcttcccttttgccttctgccaygattgtacgtttcctgaggcctccccagccatgcagaattttgagtcaattaaatctcttctcttcataaactactctgtttcaggtagtttttttgtttgtttgtttgttttttggggttttttttgacagagtctcactcttgtcgcccaggctggagtgcagtgacgcgatctgtgctcactgcaacctccgcctcccatgttcaagcaattcttctgcctcagcctcccgagtaactgggattacaggtgcctgccactacaaccagctaattttttgtgtttttagtagagacggggtttcaccgtgttagccag

SEQ ID NO: 919970 - DNA, 498 bp, Homo sapiens
catggctcactgcagcctcaaccttctgggctctagcaatcctcccacctcagcctcccatgtagctgggactacaggtgtgcgccaccacacctggttaattttttaatcttttgtagagacagggtcttgctgtgttgcctagcctggtcttaaactcctgggctcaatgatcctcctgcctcggcctcccaaagtactgggattacaggcatgagccaccgtgcctgactgtggagcacataattgaaagtcmgggcaggggtgaggggagcaggacctggaagagaatagattgagcaaagatgagatcctaggtaaagtcccggtttggcttgctccacaagggtggggggacactgtggagttatctcaccatgagaagaggagtgggctttttacccctgcatcagtcattagctgcccctgggagtaggtgacacctcccaagcatctccaaggtgtggtggctcccaaaagccatgggcaggtccagag

SEQ ID NO: 919971 - DNA, 621 bp, Homo sapiens
aaaggaaaattgcaacttggggctccaaactcaactgtggcaaaagggaaaagtgaagcttgggaactgagtcaggcgaaaactgctttccttttgttccgaaggagatagctgtaatttcacttgcttactctgtcttacgtaaaatgtagatttactgagctggagccgattgcataatctacccctctcttttcacatgtaaaatgcagattcactaagcggtaatcaaagcctcacatgaatgaaaccacttgcctcattgcctactctctcccctatttttcccttcctccttcccctcctttttgctttttccccttaaatttgttttaatttttttctcttctttgagatggagtcttgctttgtcacccaggctggagtgcaatgatgtgatctcggttcattgcaacctctgcctcycgagttcaagcgattctcatacctgagcctcccaagtagctgggattacaggcacatgctgccacattcggctaattttttgtatttttagtagagatggggtttcaccatgttggccaggctggtcttgaactcctggcctcaagtgatctgcccgccttgacctcccaaagtgtgggattacaggtatgagcc

SEQ ID NO: 919972 - DNA, 725 bp, Homo sapiens
tgagacacacctccccaattgcttcactttctgaggacttccttactttctggcactgcaagatgttccaggctcaccttgtatatttcctgccccagccctagaatcagccacttctgtaaggagccggctcctgttattggagaatagtattggaaaccaacaacaggctcctaggtagcaaattattcttggatggacacactagaaaacagttattttgtgcctcctatgtgccaggcactatgctagctccttttcatgttggtttacttaatcctcataacaattctatgaaatatttactgtcaatcctccccagatgaggactggaggtgtagctgggttgagtgctagccaacaccactctgttctgtctccaaagcccatcacactgccttgataaagactggtgtcacatacctcacaaacaccatgttttttttttttttttttttttgagacagaktctcgctctgtcacccaggctggagtgcagtggcgctatctcagctcactgcaacctctgcctcctgggttcacgccattctcctgcctcagcctcccaagtagctgggattacaggcgtgtgtcaccatgccgggctaatttttgtatttttagtagagatggggttttgccatgttgcccaggctggtctcgaattcctggcctcaagtgatcccagatggcacacatctctccttatgtgcaaagatgacagc

SEQ ID NO: 919973 - DNA, 688 bp, Homo sapiens
gagtgtgtgtgtgcacatgaatgctatagtcaatatgtgtgtgcatgtgtgtgtagatgtgaatggaatgtacgtgtgtgtgtgtatgggagtataaacgtgtatgtgacggtgcatgcatgagtgtgtaagcatatatatataagtgcagtgtgtgcttgtatatgggagtaaatgcttatacatgtgtatgtgtgtgttgtgagtcactgtgcgcaatgtgcgtgtgcatatgtgtgattgtgtatgtgtaagtgggtatatccatgtgagtgtatgcatgtgtctatatgcgtgtgttgtatgtgggtgtgagtgcatagcgggagtagtaaatgggtatgtgtgtgtgcatatgtgagtgtgtaatgagagtaggtgggcgtgtgtgtgtacctgtgcatatgtgtgtgtgcatgtgtgtaatgaaagtaagtgggcgtgtctgagtgtgtgcatgtgagtgtgcatgtgagtgtgtaatgggagtragtgggtgtgtctgagtgtgcctgtgcatatgtgtgtgcatgtgagtgtgttggaataagtgggcgtgtctgggtgtgcctgtgcatatgtgtgtgcatgtgagtgtgtaatgggagtaagtggacgtgtgtgtgtgctgtgcatatgccagtgagtgtgtgcgtgtggctgtgtgcctcccccgggccagtgtccc

SEQ ID NO: 919974 - DNA, 606 bp, Homo sapiens
acaaacagtatgagtttttgggaaaaaaaaaattagttatctttaattaggatgacacagactcaaaactatcttactggcttcattttttgtacaattttcttatagctatggccagaataatacaactgttaattacagacatttaagagacattcacttagcaaaatatcaaatagaatttatatcacaaatttactccaggagaagtacccacagaaacacataatcttaaaaatccaacgtgccatatttctcttctattgctgtaccttacacaaaacactgtttcaaggtgttcctaaactcaccactattctaatataactagcagataatacatgatagaaatgaaggcagaatgtggmatatcaacttggaactattaaagtagtttaaggctagggaaaaaagatgagtcaggttaagagagtaatttcacgccaggagcactggctcatgcccataatctcagcattctgggaggctgaggtgggaggactgcttgaagccaggagttcgaggccagcctgggcaacaaagcaagacttcatccctacaaaaataaacataaaaaaattagccgggtatggtggtacctgtctg

SEQ ID NO: 919975 - DNA, 657 bp, Homo sapiens
tggcgggcacctgtaatcccagctacttgggaggctgaggcaggagaatggcttaaacccaagaggtggaggttgcattgagccaagatcacgccactacactccagcctgggcgacagagcgcgactccctctcaaagaaaaaaaaaaattaaataataataataataaaggctatgagaacatggacttcatctgtgccgtttcttgctatatctgcagcacctacaaataccagcaactggcatgcagaatagacttcgtaagtatttgttagacaartgagtgcactttaccttactgaatcctcctacacatcctataaagtaggtattaggtcctataaagcaggtattaggttctctcttggtttggggaatactgtaggttttgcttttctcatattttcctgtgttttccaaactaatatgtattcctttataatcaaggaaaacaataaaaggaactgtgcctttttttacctcaaaatctgctcctgacaagcagcaattcgcttcatgaatttgtaaaacgtctgatctccacttttaattatggtcttctcatatttttcatcaccatcattaggaaggctaaaaacagaagcagaaaacacttttgaatgtctatatccagaaaattacagcatttgcaagac

SEQ ID NO: 919976 - DNA, 644 bp, Homo sapiens
taaaacaaattctctcctcctattagacctacagactgtttcctcgagtctgggctgagtcaaaccccctgggataagcaaagcatcatctgccagtagttgtagaacttctggccactgccctgccagtccagataaaacagtatcctatgagtcagcaggctagagaggggataaatctccatattcagtgactgctacaagctggcatactcacaccatgtcaatccacctggaatactccatttttgccggtccagaaacctggaacaaatgattaccagcctgtgcaggacttgagggaggttaacaagtggacagttaccrtccatccaactgtccacaatgcttatactttactcagcctgctcccaccagaacatacagtatacactgtccttgacttaaaggatgccttctttgctattcctctggcccccaaaagccaacctatctttgcttttgaatggacagatcctggctcaggagataccacccaattaacttggactcagttacctcaaggctttaaaaattcccccatcctttttggggaagccctccaacaggatcttataccattctgagccagtcaccccaattgtactattcttcagtatgtagatgacttattggctactgaa

SEQ ID NO: 919977 - DNA, 590 bp, Homo sapiens
taagcaagggtgagggaaaggctttgatgtgtgttcttctccttcgtttttttttagatagagtcttgctctgttgcccaggctggagtgcagtggtgcaatctcagctcactgcaacctccatctcccaggttccagcaattctcctgcctcagcctcacgaggaattgggattacaggtgctcaccaccatgcccagctaattttttgtgtatttttagtagagacggggtctcaccatattggacaggctggtcttgaactcctgatgagtgatccacccgccttggcatcccaaagtgctgggattacaggtgtgagccaccgtgaccaacccttctccttccttttttttttctttttttttttttgagacggagtctcgctctattgcccaggctggagtgcagtgrtgcaatctcggctcactgcaacctccgcctcccgggttcacgccattctcctgcctcagcctcccaagtagctgggactacaggagcccgcacaccgcgcccagctaattttttgtatttttagtagagacggggtttcaccgcgttagccaagatggtctcgatctcctgacctcg

SEQ ID NO: 919978 - DNA, 511 bp, Homo sapiens
tgataatatgaaactttttctcagttgttgaaacttagttgttggttttgcgaggaaaagttgattcgtccattggttttgtgtgcatttaaaattttaccaactttaactgctacccttgtgagttaccattcggtggccactatttctagtcaatttctgctgacccacacgggtctaaatttgrcaaggaagatttgattcctctgtcaaaagtagcccataacatttatgctctgcagtttatctttttctaatttatttttttgagatggatctcactctgtcacccaggcagtggcaaaatcataacatactgcaacctccatctcctgggctcaagccatcttcctgcctcagccgcctgagaagattcattaaaacatgtttctttctctcttggttcatgatatggtttggctgtgtccccacccaaatctcaacttgaattctatctcccagaattcccacgtgttgtgggagggacccggggaaagtaattgaatcatgg

SEQ ID NO: 919979 - DNA, 611 bp, Homo sapiens
acacccacagtcatggaggccggggctgctcaggaccacttgctgtgctgcctgccagctctccagagcccgagatttggagatggtaatattctagggcatggggttctgcagcggggactaacacactttgaaatttacctacttagggctgggcgcggtggctcatgcctgcaatcccagcactttgggaggctgaggtgggcggatcacaaggtcaggagttcgagaccagcctggccaatatgatgaaaccccgtatctactaaaaatacacaaattagttgggcatggtggcgggtgcctgtagtcccagctactcaggaggctgaggcgggagaatcgcttgaaccctggaggcggaggttgcagtgagccragattgcgtcactgcactccagcctggatgacagagcgagactctgtctcaaaaaaaaaaattttacctacttagctgagtgatcttaggtaaattacttaacttctctgtgccttatctgtagaataaatataacaatagtgtcaaattcagacagttattataaggtttcagtgaggtcaggcacggtggctcatgcctgtaatcctagcactttgggaggccgtggcag

SEQ ID NO: 919980 - DNA, 677 bp, Homo sapiens
aatcccagtactttgggaggccgaggcaggcagatcaccaggtcaggagatggagaccatcctggctaataaggtgaaaccccatctctactaaaaatacaaaaaaattagctggacatggtgccatgctcctgtaatcccaactactcgggaggctaaggcaggagaatcgcttgaacccggagggcagaggttgcagtgagccragatcatgccactgcactccagtctaggtgacagagcaagatttaaaacaaaacaaacaaacaaaaaattagctgggcatggtggcacgtgcctgtagtcccagctactcaggaggctgaggcaggagagtcgcttctacccaggagtcagaggttgcagtgagctgagatctcaccgctgcactccagcctgggtgacagagtgagactccatctcaaaaaaataaaataaaataaaatccaggcccggtgtggtggcttatgcctgtaaacccagaactttgggaggctgaggtaagagaattgctttagcctaagagttcaagacaagcctgggcaacatagtgagaccccatctcaacaaaaaattttaaaacttagccaggtgtgatggttcacacccatagtcccagctactcgggaggctgaggtggtaggatttcttgagcccgggagttagaggctgcagtg

SEQ ID NO: 919981 - DNA, 750 bp, Homo sapiens
tcttttttcgtagagatggggttttgccatgttgcccagactggtctcaaactcctgagctcaagtgatccacctgcttcagcctcccaaaatactgggattataggcgtgagccaccatgcccagccaaaaactttaaacttagaagaacattgcaaggtttgtataattatatccttttaaaatattcatattttaaaacttattttaaaatttgttttgcaatacttacacactttttctgccacatgggatggaagtgagaacaattcactctttttttttttttttttttttgagacggagtctcgttctgtcacccaggctggagtgcagtggcgtgacctcagctcrctacaagctctgcctcaggttcactccgttctcctgcctcagcctcctgagtagctgggactacaggcacccaccatcacgcccggctaatttttttgtatttttagtagagatggggtttcactgtgttagccaggatggtcttgatctcctgacctcatgatccgcccatctcggcctcccaaagtgctgggaatacaggcatgagccactgcacccggcctaacaattcactcttaagatcaaatggatgtggccctataacgaggtgtgtgggtgtgtgtgtatgtgtgtgacagagagccccaataattcaatacatattaaactcttctatgtaacatgtcctttgtaggtttcatagtgaacaaaccttagctaatagtgttcccttga

SEQ ID NO: 919982 - DNA, 615 bp, Homo sapiens
aatggggaaagtcttttcaacagggtgctaggaaaattggatatttatcgggggagccagcccccaatatttcagtgtaggttcttttctattttccttaagtgttggccagtctgagaaataaagagaaagagtacgaagagaggaattttacagctgggcctccacgggtgacatcacatattggtaggaccgtgatgacgaccctgagccacaaaaccagcaagtttttattagggattttaaaaggggaggggatgtgtgaacagggagtaagtcacaaagatcacatgctccaaagggtgataaagatcacaaggcaaaggcaaaattagaattactgatgagggtctatgtcccgctgtgcacrtattgtcttgataaacatcttaacaggaaacagggttcaagagcagagaaccggtctgaccaaaatttaccaggctggaatttctcaatcctagtaagcctgagggtactgtaggagaccagtgtgtatttcagtctttatcgtcaaccacgtaagacagacactcccagagttgctgtttatagaccaccccccaggaaagcattccttccccaggggtattccttgctgggaaaataattcag

SEQ ID NO: 919983 - DNA, 528 bp, Homo sapiens
aatacagtattgttaactaaaatctccatgctgtacattaaattcctgaatttcttcatcttgtaattgaaagtttataccctttgactaatgtctctccagtctctccccattctcccagtccctggcaaccaaaattctccacttttttttttcttcagatggagtatcactctgtgcccaggctggagtgcagtggcaggatcttggctcactgcagcctccgcctcctggcttcaaaggattcttgtgcctcagcctcctgagtacctgggattacaggcgcccacsaccacgcccggctaatttttgtatttttagaagagatggagctttaccatgttggccaggctggtctcgaactcctgacctcgtgatccacctacctcagcctcccaaagtgctgggattacaggcgtgagccaccgcgcccagccagcattctcctctttgcttctgtgagtcaaggactatgtggctatgttacagcccacatatatgtgagattatacaagatttccttctctt

SEQ ID NO: 919984 - DNA, 601 bp, Homo sapiens
ccgctgcctagacagaaccgatttatcagacgggggatgcagtggagaaagagtaattcgtgcagaacaagctgtgcaggagaccagagttttattattattcaaatcagtctcctcgagcatttggggatcagcggttttaaagatagtttggtgggccagacgcagtggctcatgcctgtaatcccaacactttgggaggccgaggcaggtggatcacctgaggtcagcagttcgagaccagcctggccaacatgatgaaaccccgtctctactaaaaatacaaaaattagccaggcgtggtgatgcacacctgtagtcccagctacttgagaggctgaggcaggagaatcgcttgaacccgggaggyggaggttgcagtgagccgagattgcgccactgcactccagcctgggtgacagagcgagacttcatctcaaaataataataataataatagtttggcaggtagaggtttgggaagtgaggagtgttgattggtgaggttgaagttggaatcatagggggtccaggtgaggttttctgtcttccgttcctgggtgggatcacagaactggaggggtcagattactggtctcga

SEQ ID NO: 919985 - DNA, 639 bp, Homo sapiens
ttcgggaaagggctgttaccaattttgtttcagagccaaaccatgaactgaattccttcccaaagttagttcggcctatgcccaggaaagaacaaggacagcttgaagcttagaagcaagacggagacgcttaggtctgatttctttcagcgtcataatttcctcagttatgattttgcaaaagcggtttcattacctgcacctccccyggcatctgtccttgtagattcgccatcaccatcaacctgcagacctgctctgccctctcacctgcatccttacctgtcctcatttgcatcccttctgccctcctgcagcctcacctcactctcccagaccccgtttctagatgggcctgagccaagaatccatgctttggggtgagctgtgtctggtgactgaacccgagaggaggcagtaggggctggcaggcagggcagtgtttccggctggagccccagggaggggaagacatgagtcagcagttagggagggagtgcgggggctttgtggtcacggcacacaaagtgctttctggtgacagcgctgcttggggagcagcagccttgggtttggagagcaggggcgctgttgctaaaggggactggggccctgagcacctcctctcactgcacctct

SEQ ID NO: 919986 - DNA, 804 bp, Homo sapiens
aatcccgcccaccccccaccaatgtttgtacagctaagaagggttttttttttttctgcttgtttgtttttaagagacagggtctcactctgtcacccacatgcagtggcgtgatcagagctccctgcagcctcaaacacttgggctcaagcgaacctcctgcctcagcccccacagaatagctgggactacgttgcacgccaccatgcctggctaatttttaaaaaatgtttgggcctggcgtagtgactcatgcctataatcccagcactttgggaggctgaggcaggaggatggctggagcccaggatcctacaggagtttgagaccagcctgggcaacatagggagaccccatctttaccaaaaaaaaaaaaacacccaaaactacccaggcatgrtggcacatgccggtagtcccagctactcaggaggctgaggtgggaggatcacttgagcatgggaggtcgaggctgcagtgagccatgatcatgccactgcactccagcctaggcaacagagaaagactgtctaaaaaaaaaaaaaaaaaaaacaagagagagagatgggttatcactggtttttacattattaaagggttagaaaaaaatctaaagaaaaataaaatttcaccacatgtgaaaattgtatgacagtcacatatcagtgccagtaaataaagttttattggcacagagccatgcccattgatgtgcctgtcatctgtggctgtttggcactgcagcgacagattcaagtgtttgtatcaagccaaacacatttgctatctgtccctttacagaaa

SEQ ID NO: 919987 - DNA, 804 bp, Homo sapiens
aatcccgcccaccccccaccaatgtttgtacagctaagaagggttttttttttttctgcttgtttgtttttaagagacagggtctcactctgtcacccacatgcagtggcgtgatcagagctccctgcagcctcaaacacttgggctcaagcgaacctcctgcctcagcccccacagaatagctgggactacgttgcacgccaccatgcctggctaatttttaaaaaatgtttgggcctggcgtagtgactcatgcctataatcccagcactttgggaggctgaggcaggaggatggctggagcccaggatcctacaggagtttgagaccagcctgggcaacatagggagaccccatctttaccaaaaaaaaaaaaacacccaaaactacccaggcatgatggcacatgccggtagtcccagctactcaggaggctgaggtgggaggatcacttgagcatgggaggtcgaggctgcagtgagccatgatcatgccactgcactccagcctaggcaacagagaaagactgtctaaaaaaaaaaaaaaaaaaamcaagagagagagatgggttatcactggtttttacattattaaagggttagaaaaaaatctaaagaaaaataaaatttcaccacatgtgaaaattgtatgacagtcacatatcagtgccagtaaataaagttttattggcacagagccatgcccattgatgtgcctgtcatctgtggctgtttggcactgcagcgacagattcaagtgtttgtatcaagccaaacacatttgctatctgtccctttacagaaa

SEQ ID NO: 919988 - DNA, 661 bp, Homo sapiens
ggcagacgcctgtaatcccagctaatcgggaggctaagacaggagaatcgcttgaacccgggaggcagaggttgcagtgagccgagatcgcaccattgtgctccaacctgggcaacaagagcgaaactccatctcaaaaaataataataaaataaattatagttggaaaaaaggggtttcctaaagacccaagggaaatggcctctttgttcctgaagccacagagaggatttttctgctccccacaactagttttccttgtgaaaattcataattgctaccagcttgttctcctctctgtcactatacatctgtccttgaagccttatttgaacaaagagttctggtatcactcggatgcctagaaactgttgccgttctgtgaaaccgaccaccagaggaaacccatgcttctcattggctgccttactaagatggtracttgttgccctggtgacaagttgcaatgacaggtggctctgccaaatcagaacacagtgatacttgcttcccctcccgggtgaaggatggaaaataaaagtaaaagccttggcggctgtcaggcttctttaccaaagagctggagagcactccttggccccatttatgcaaacacttcccatctacagatgatccagcttcggagtgggagtctaagcag

SEQ ID NO: 919989 - DNA, 610 bp, Homo sapiens
acatatacacaccctccctgatagtctttcaccattaatttcaagtgaaattgcagtctcttggtcttcctcctgccacctaggtacctcctcaatcttctttgctggtttacgctcttctccccaatctcttagctttcctgtgatccggggagcaatcttctcttcacctctcctcccttctcrtcttacactaacagtcttggtgatctcatccattcttgtggcttcaaactccatctatatgctgttcactcccaaatgcatatgtttggcccagacctctatcccctgaacttcagctacatactcagcatctccattggatgtctaatcaatagcttaaatttaatatgcctaaaagctgaactcttgatgccttctctgcacctgcccccaccaaaacctgctgcttctctaccctaccccatctgagttgatagaaaatacatcctttcccttcctctcttcctcttgtgtaccgcatcaggaagtgcttgtgcctctgccttcaaattataaccagaatgtaaccacttcttgccactcccactgctgtctactatcccgtgccccctcccatctgaactacctgaattactgaggtagc

SEQ ID NO: 919990 - DNA, 719 bp, Homo sapiens
gctaccaatcctaaagagagggcctgggcagcacagcacacacaaccagggaaacaatcgcattgcacaattgattgcaattgaaattatctcttcaatttcagtggggatgaaggaatccaagatgttagagatgatggagtccaagaagcagtattcaatcagaggtaaagtcaaagcacatgatgactcttacacaggtctagggtgaggccattaaagcacctaagacacaaaacttaaggaagcattcactctcaaggttgtgcaagagaagggcttggcacttctgataccccaggagtgcgggcctccttaagttttctatcttagaaaccttgatttcctcaccccccaccctcaacttcctgctattataaacaatgagtcatcattgtaatcaaaatggtctgacccacatggaactctggygatttttaatagattatttagtccctggaataaatatgtgaagtcagactgctgaggttctacttgatttgaataagaaaacaccaagtcctaagaataccccaagactaggaagactttgcccaatttccagtcctgaatccttcacagactcagtgaaggattagtgaagaaaaatctgggttccatgaaggaatgaataaacctaaagtaataccacaagtgggtaccatgattcttcctagtcttctccaaagcggcctatagctaatcatcagtataacctg

SEQ ID NO: 919991 - DNA, 719 bp, Homo sapiens
gctaccaatcctaaagagagggcctgggcagcacagcacacacaaccagggaaacaatcgcattgcacaattgattgcaattgaaattatctcttcaatttcagtggggatgaaggaatccaagatgttagagatgatggagtccaagaagcagtattcaatcagaggtaaagtcaaagcacatgatgactcttacacaggtctagggtgaggccattaaagcacctaagacacaaaacttaaggaagcattcactctcaaggttgtgcaagagaagggcttggcacttctgataccccaggagtgcgggcctccttaagttttctatcttagaaaccttgatttcctcaccccccaccctcaacttcctgctattataaacaatgagtcatcattgtaatcaaaatggtctgacccacatggaactctggtgattyttaatagattatttagtccctggaataaatatgtgaagtcagactgctgaggttctacttgatttgaataagaaaacaccaagtcctaagaataccccaagactaggaagactttgcccaatttccagtcctgaatccttcacagactcagtgaaggattagtgaagaaaaatctgggttccatgaaggaatgaataaacctaaagtaataccacaagtgggtaccatgattcttcctagtcttctccaaagcggcctatagctaatcatcagtataacctg

SEQ ID NO: 919992 - DNA, 600 bp, Homo sapiens
aacccagcaggagcaggaaggaactatgaagagaatccagaggctcccatcagatgccttctcacatgaccatactgttaatgatggagggtgtccaggttcttggcatcttgaaaaagaattggacaaaacacacaaagcaaggaaggaatgaagggatttattgaaaatgaaagtacactccatggtgtgggagcaagcctgagcataggggctcaaggccctgttacagagtttttatgagtttaaataccctctacttggggtatgtcctaggtaaatgaagaggatgaagtaaagtcacaaagtcatttatttgctatatgttctatggagaggagatttcctgttttatttatttatttgagatggarttttgctcttgtcgcccaggctggagtgcaatggctccattttggctcactgcaatctctgcttcccaggttcaagggattctcctgcctcagcctcctgagtagctaggaataaaagcaccaaccacacccagctaattttttgtatttttagtagagatggggttttgccacgttggtcaggctggtctcgaacccctgacctcagattatctgcctgcctcag

SEQ ID NO: 919993 - DNA, 600 bp, Homo sapiens
aacccagcaggagcaggaaggaactatgaagagaatccagaggctcccatcagatgccttctcacatgaccatactgttaatgatggagggtgtccaggttcttggcatcttgaaaaagaattggacaaaacacacaaagcaaggaaggaatgaagggatttattgaaaatgaaagtacactccatggtgtgggagcaagcctgagcataggggctcaaggccctgttacagagtttttatgagtttaaataccctctacttggggtatgtcctaggtaaatgaagaggatgaagtaaagtcacaaagtcatttatttgctatatgttctatggagaggagatttcctgttttatttatttatttgagatggagttttgctcttgtcrcccaggctggagtgcaatggctccattttggctcactgcaatctctgcttcccaggttcaagggattctcctgcctcagcctcctgagtagctaggaataaaagcaccaaccacacccagctaattttttgtatttttagtagagatggggttttgccacgttggtcaggctggtctcgaacccctgacctcagattatctgcctgcctcag

SEQ ID NO: 919994 - DNA, 618 bp, Homo sapiens
gttcattaggtctaatagtcttttagtggattccttaggattttgttatttttgaaataatatcatctacaaatagcagtagttttacttcttcccgtgtaatccttttaatttcattttcttaacttagttcccctagctagagcctccagtacaatactgaatagaagtattgagagcagatctttgtcttcctaatctcagtaggaagcattcagtctttcactattgaggawgatgttagctgttgggtttttatagatgctttttatcagagtaaagaaggtctcttctaatcttagtttgctgagtgtttttatcatgaaatggtgttgaattttgtcacatgctttttctgtagctattaacataatcatgtcattttattcttttattctaattgatttggggtgataagccaacctggctttcctgggatgcctcccacttgattgtggtgtctcattcttctcatgtgctgctgtattcagtttggtagtattttgcttaagatttgtgtgtctgtattcacaagagatacttgtttgtagttttcttttcccgtgatgttttgtctagtttcattataatggtaatactggcctcatataacgagtt

SEQ ID NO: 919995 - DNA, 696 bp, Homo sapiens
atctatgtattctttatttttttccaacttttattgtaggtccaggggtacatgtgaaggtttgttacatagataaattcatgtcatgggggtttgttgtacagattatttcatcatccaggtattaagcccagtgctcaataattttttctgctcctctccctccttccaccctccaccctcaagtagaccacagtgactgacgtttccttctttgtgatcatgagttttctgtgtattcgatctgttgtgatatgttttggttgaaatatatgagggaaatctgatctcataaagataaggtgttggaaaagggaaaactactttayagcctttccagatagttctagatattattctttgatacggtaccaaacttacatgtggtagtttcttagccttcattgcagtgtggactgaatctgaaaccacatcaattaagcactgaaatccatcaatctatcttgcacataccagaggctttttgcctttgtaatggcacccactggccatttgaaaaataggtgtccactaagttgtaaagatcacaaaaatgttgacatatttcattatatagtcaaaaataaattgttaatataatgcttcttttactagaaaagtctttaagtactggcaagctgtcaagctcaagctggtggatacaagtgtaataaaatttgtatttttaggtgaaaa

SEQ ID NO: 919996 - DNA, 661 bp, Homo sapiens
attcagcttcttgctaggatatttgtacaatgaaaactatcactttgtcttttaacaacaggtggaatgccttctcccacttataagaggtgtaactctccatttggtgaatgagctgtgtgctcagggtggtcacttaggtaagacagcctattagcctattagtctaaaaaaaaaaattacctgttagataaatttagaatcctgcgtgacctgattggcttagctggcctagagatgttgaggctatgtatattgatttatctacataggccatctatcttagctgccttctgtggctaaaggccatgagccattttggttttcttttctttttttttgttttcttggttttttttttttttttttttttttttttttttttttggagacagaatctcrctctgtcacccaggctggaatgcagtggtgctatcttggctcactgcaacctccaccttccaggctcaagcgattctcgttcctcagcctcctgaatagctggaactacaggtgcccgacaccacgcccagctaatttttgtatttttagtggagatggggttttaccatgttggccagtctggtctcaaacttctggcctcaagcgagccctccaccttggcctcccaaagtgctgggattacagatgtgagccaccg

SEQ ID NO: 919997 - DNA, 661 bp, Homo sapiens
attcagcttcttgctaggatatttgtacaatgaaaactatcactttgtcttttaacaacaggtggaatgccttctcccacttataagaggtgtaactctccatttggtgaatgagctgtgtgctcagggtggtcacttaggtaagacagcctattagcctattagtctaaaaaaaaaaattacctgttagataaatttagaatcctgcgtgacctgattggcttagctggcctagagatgttgaggctatgtatattgatttatctacataggccatctatcttagctgccttctgtggctaaaggccatgagccattttggttttcttttctttttttttgttttcttggttttttttttttttttttttttttttttttttttttggagacagaatctcactctgtcrcccaggctggaatgcagtggtgctatcttggctcactgcaacctccaccttccaggctcaagcgattctcgttcctcagcctcctgaatagctggaactacaggtgcccgacaccacgcccagctaatttttgtatttttagtggagatggggttttaccatgttggccagtctggtctcaaacttctggcctcaagcgagccctccaccttggcctcccaaagtgctgggattacagatgtgagccaccg

SEQ ID NO: 919998 - DNA, 730 bp, Homo sapiens
aatgtctttcaaatttgtgtagttccctactctatgactgttaattttctcgatgtcattgaaagtttcctttgtttgtttatttattcattcgctctttcattcaacaagtgtttatcaagtacctactatgtgccaggcactgttttggactctggggacatatcagtggacaaaatcttaagaaagtgtgcattctagaggggagaaatgattataaacagaccaactaaaaacaaaatccaatctaccaagtaatgataagtgatatgagaaaaayaagccgagttcgtggaaaagagaaagctgggtgggagggctgctgctttgtattgggtggtcagtgaatactgctctgatactattcattgagcaggacctgaaggaagtgaggggtgcattatgcagatatctgggaaaagatccatttaggcagaggaaacaggaatttaaaaggtcctgagtgtgcttgatgtgttcagggaacggctggaccactgtggctggagcagaatgtgcaatgtgttcgaggatggaggaaatgacatcaaataaaacagagctgggaccagacctgggccttggtgtccactttaagggctttgacatttattccaagtgagatgggaagctatggaagaacttttagcagtgaagtgacatgatcagatttaagttttaaaaggatcattttaacttttacattgagccacagactgtagggttaagt

SEQ ID NO: 919999 - DNA, 572 bp, Homo sapiens
gtaccaaaccagcttggttctgttctgcttccactgcctgtcaagactgtgtgctctgggcaaggtacttcaaccactgggtcttggcttcctcatctggaaaatgcaaataaaactgcaactttataaagcttttctgaaatcaaatgcagcaatgtacataaaaggcaaataagctcaccctatgttttacctaattttctttttatcctgctctgtgtatttcttaagccaaaccatcttacttcctttttagaatgcatcgggatagacacaaataaatggaaacaccattacaaagcccctgctcacacttcagaattcagattgcattacctcctccgggaagtcttccttaagtcactctctgctcgagtctcatttagatgatctcctgtgtgcttgcatatcgtctgagcatacctctgtgtygagaggagtggtaagagatggggctggagactcaaggccacatcggaagagcctcgatcctttcccctgaagggagtaaaaggctctccaaagagtttaagcagtgagtgaaaagaccagccgagaatgtgaaaaacctc

SEQ ID NO: 920000 - DNA, 690 bp, Homo sapiens
caggagaatcccttgagcccaggaggccaaggttgtagtgaactgtgatcatgccactgcactacagcctggatgtgactgtgccactgcactccagcctgaatttattattaagtaataataaaataaataaatattccttcttaaatagagccagagtcttacagctctttcagctatacctcctattattccacaaaagtcctattgatatggtggtagaatatgaggaaatgagaagcattttataatyctatgattatatctcagtcttttagaaaacctgtgtccctgggctgtgaccttcacaagggcttctcagctttttaaaaaaattcattacttaggtgagatagcaaggccagagaggactttatttgggtgtttcccttccccaaagaagggaaaaattaccaaatccaagtcctctaggacccactcgggtcagttaggctctggcaaaactcaagtttgttaggttctgataaaatatttttctaagggtagacctttgttaaggagaacagagagctctggatatatttttaaatggttatagtttcccttcccctgccagaagcatgaatagatttttcttcagtcttcacaataagaaccaggcggggatcctataggcaaagctcataaaagtttggggacttccaaaaataccttccagaatttttaatt

SEQ ID NO: 920001 - DNA, 690 bp, Homo sapiens
caggagaatcccttgagcccaggaggccaaggttgtagtgaactgtgatcatgccactgcactacagcctggatgtgactgtgccactgcactccagcctgaatttattattaagtaataataaaataaataaatattccttcttaaatagagccagagtcttacagctctttcagctatacctcctattattccacaaaagtcctattgatatggtggtagaatatgaggaaatgagaagcattttataatcctatgattatatctcagtcttttagaaaacctgtgtccctgggctgtgaccttcacaagggcttctcagctttttaaaaaaattcattacttaggtgagayagcaaggccagagaggactttatttgggtgtttcccttccccaaagaagggaaaaattaccaaatccaagtcctctaggacccactcgggtcagttaggctctggcaaaactcaagtttgttaggttctgataaaatatttttctaagggtagacctttgttaaggagaacagagagctctggatatatttttaaatggttatagtttcccttcccctgccagaagcatgaatagatttttcttcagtcttcacaataagaaccaggcggggatcctataggcaaagctcataaaagtttggggacttccaaaaataccttccagaatttttaatt

SEQ ID NO: 920002 - DNA, 579 bp, Homo sapiens
gtcttccttctgattcaatactcagtgcttttccactaccagccttttcctgaccttccataaaactgcaggagcctgttgttcagggttcctttgatagacaaccccacatctgtgccgacccatgtgatccttgatagagctgtttcatggaggaaaaaaaggatgggaactggaccgtcagggctttttccagtttaacctcaaaggtttgttaatgtccttttgtcttgatgtcttaattgcctactccaacacctggctctctctccagagtagttaagctcctgatggctggggataaatttaatgactactgttttgtataagttgaggttaatctaattaatttacctagagggaaaattctgacctctatctstcagacctcatttaaaacacagaggtcatgaagataaatctggcttctgccttcaaggagcttacagtctggtgaagatgatagctggatagctagacataacaataaaaccacagctgttcccttgtgataatttctgttatgagttatgtacagtggaatatgaaaaatatataaatggtacataaccaattcta

SEQ ID NO: 920003 - DNA, 579 bp, Homo sapiens
gtcttccttctgattcaatactcagtgcttttccactaccagccttttcctgaccttccataaaactgcaggagcctgttgttcagggttcctttgatagacaaccccacatctgtgccgacccatgtgatccttgatagagctgtttcatggaggaaaaaaaggatgggaactggaccgtcagggctttttccagtttaacctcaaaggtttgttaatgtccttttgtcttgatgtcttaattgcctactccaacacctggctctctctccagagtagttaagctcctgatggctggggataaatttaatgactactgttttgtataagttgaggttaatctaattaatttacctagagggaaaattctgacctctatctgtcagacctcatytaaaacacagaggtcatgaagataaatctggcttctgccttcaaggagcttacagtctggtgaagatgatagctggatagctagacataacaataaaaccacagctgttcccttgtgataatttctgttatgagttatgtacagtggaatatgaaaaatatataaatggtacataaccaattcta

SEQ ID NO: 920004 - DNA, 659 bp, Homo sapiens
ccccgatacatgggtacatgtggtgtaccaatatggagatgaatactctgaaggtcatggcatttgttgcccaagtgagaaaaagcctctctctatttcatgtaatgtacattttgtgtaatgtacatgagcaattactgaggcagtcttcccttgcatccaagatcttagagtttttaatgaaaataggggctgkgcacagtggctcacacctgtaatcccagcactttgggaggccgaggcgggcagatcatgaagtcaggagatcgagaccagcctggccaacatggttaaaccctgtctctactaaaaatacaaaaattagctggtcatggtggctcgtgactgtaatcccagctactcaggaggctgaggcaggagaattgcttaaaccaggaagttggaggttgcggtaagccaagatcacgccattgcactctagcctggcgagagggtgagactccacaaaaaaaaaaaaaaaaaaaaaaaaagagagagagaaagagaaagaaagaaaatagggccaggtgtggtggctcacgcctgtaatcccagcactttgggaggccaaggcaggcggatcacctgaggtaaggagtttgagaccagcccggccaatatgacgaaaccctgtctctactaaaaaaaatacaaaaatt

SEQ ID NO: 920005 - DNA, 659 bp, Homo sapiens
ccccgatacatgggtacatgtggtgtaccaatatggagatgaatactctgaaggtcatggcatttgttgcccaagtgagaaaaagcctctctctatttcatgtaatgtacattttgtgtaatgtacatgagcaattactgaggcagtcttcccttgcatccaagatcttagagtttttaatgaaaataggggctgtgcacrgtggctcacacctgtaatcccagcactttgggaggccgaggcgggcagatcatgaagtcaggagatcgagaccagcctggccaacatggttaaaccctgtctctactaaaaatacaaaaattagctggtcatggtggctcgtgactgtaatcccagctactcaggaggctgaggcaggagaattgcttaaaccaggaagttggaggttgcggtaagccaagatcacgccattgcactctagcctggcgagagggtgagactccacaaaaaaaaaaaaaaaaaaaaaaaaagagagagagaaagagaaagaaagaaaatagggccaggtgtggtggctcacgcctgtaatcccagcactttgggaggccaaggcaggcggatcacctgaggtaaggagtttgagaccagcccggccaatatgacgaaaccctgtctctactaaaaaaaatacaaaaatt

SEQ ID NO: 920006 - DNA, 574 bp, Homo sapiens
agcataatactgcccccaaagtctcaaagcataatgactttgagatttgtctacaaatttgcatatattggtagcttttcctttttattcctgagtacttttccatggtatggatgtgtagtgccacagtgggtttatccattaacctgtttagggaaatttgaggataaagctcttatacatagttgtgtattttttgtgtggacattagttttttttccagtaaatatccaaaggttccagggtgcctatgcgattttgcattcctatcaactatgtatgagagttccagttgcttcatatcctctctagcacttggtattgacagtattctctttttttwaaaaaaatttggctcttctcaaagatgtatagtggtatctaattgtgcttttaatttacattttcctgatggctaatcattttgaactttctttcctcctttctctctctctctctctttctttcaggccaggcatggtggcttatgcctgtaatccaaatagtttaggaggccaagtcatgcagatcacttgagtccaggagttggagacaagcctggaaaacatggtga

SEQ ID NO: 920007 - DNA, 574 bp, Homo sapiens
agcataatactgcccccaaagtctcaaagcataatgactttgagatttgtctacaaatttgcatatattggtagcttttcctttttattcctgagtacttttccatggtatggatgtgtagtgccacagtgggtttatccattaacctgtttagggaaatttgaggataaagctcttatacatagttgtgtattttttgtgtggacattagttttttttccagtaaatatccaaaggttccagggtgcctatgcgattttgcattcctatcaactatgtatgagagttccagttgcttcatatcctctctagcacttggtattgacagtattctcttttttttaaaaaaatttggctcttctcaaagatgtrtagtggtatctaattgtgcttttaatttacattttcctgatggctaatcattttgaactttctttcctcctttctctctctctctctctttctttcaggccaggcatggtggcttatgcctgtaatccaaatagtttaggaggccaagtcatgcagatcacttgagtccaggagttggagacaagcctggaaaacatggtga

SEQ ID NO: 920008 - DNA, 613 bp, Homo sapiens
tgtggttgtttgtgttcttattcttgagttttaataatttttttaatatatcctagatacaagttatttgttggatatgtgacagaaaatatttatttggtatgtataaatattttgttctcgtttttagcttatgttttcattctatgaatagtgtttttcwcaaaataaaaattttaattttgataaagcccactttatctttgcttttcttttatggatcatgcttttagtttcatgcctaaaaactctttagatcctgaagattttctcctggttttttctaaaagttttatactttcatgtattacatttaagtctatgatccatcttgagactatagaaggagctcaacaaatgttaatagtttctcccaacccctctgaactattataagacctgaaaagaagtagagctatggattccacttttattggatgctgtgtttgtgatttatacttctgttggaggagtagaaacctcagtagtcagagaagagaatcaggtcaatcagtgaatttcaaccatattaatgagagcccaatagagattgcaataaaatgtttaaaaatctactatacccatggacattttaaaaagggaagattaataa

SEQ ID NO: 920009 - DNA, 730 bp, Homo sapiens
aggtctgttaaagtttgctggaggtccactccagaccctgtttgcctgggtatcagcagtggtggctgcagaacagtggatattggtgaaccgcaaatgctgctgcctgatcgttcctctgcaagttttgtctcagaggagtacccagatgtgtgaggtgtcagaccacccctactggggggtgcctcccaagtaggctactcgrgggtcatggacccacttgaggaggctgtctgcccgttctcagatctcaagctgcgtgctgggagaaccactactctcttcaaaggtgtcagacagggacgtttaagtctgcagatgttactgctgcctttgtttgtctgtgccctgcccccattggtggagcctacagaggcagacaggtctccttgagctgccgtgggctccacccagttggagcttccaggccgctttgtttacctactcaagccttggcaatggcgggcgcccctcccccagcccactgcctccttgcagtttgatctcaaactgctgtgccagcaatgagcgaggctccgtgggcatgggaccctcccagccaggtgcgggatataatctccttgtgtgccgtttgttaagcccattggaaaagcacagtattagggtgggagtgacccgattttccaggtgctgtctgtcacccctttctttgaccaggaaagggagttccctgaccccttgcacttcccaggtgaggcaatgcctcacc

SEQ ID NO: 920010 - DNA, 821 bp, Homo sapiens
ggtccactccagaccctgtttgcctgggtatcagcagtggtggctgcagaacagtggatattggtgaaccgcaaatgctgctgcctgatcgttcctctgcaagttttgtctcagaggagtacccagatgtgtgaggtgtcagaccacccctactggggggtgcctcccaagtaggctactcgagggtcatggacccacttgagraggctgtctgcccgttctcagatctcaagctgcgtgctgggagaaccactactctcttcaaaggtgtcagacagggacgtttaagtctgcagatgttactgctgcctttgtttgtctgtgccctgcccccattggtggagcctacagaggcagacaggtctccttgagctgccgtgggctccacccagttggagcttccaggccgctttgtttacctactcaagccttggcaatggcgggcgcccctcccccagcccactgcctccttgcagtttgatctcaaactgctgtgccagcaatgagcgaggctccgtgggcatgggaccctcccagccaggtgcgggatataatctccttgtgtgccgtttgttaagcccattggaaaagcacagtattagggtgggagtgacccgattttccaggtgctgtctgtcacccctttctttgaccaggaaagggagttccctgaccccttgcacttcccaggtgaggcaatgcctcacccttcttcggctcacgcactgtgcgctgcatccactgtcctgcacccactgtccagcactccccagtgagatgaacctggtacctcagttggaaatgcagaaatcacccgtctt

SEQ ID NO: 920011 - DNA, 821 bp, Homo sapiens
ggtccactccagaccctgtttgcctgggtatcagcagtggtggctgcagaacagtggatattggtgaaccgcaaatgctgctgcctgatcgttcctctgcaagttttgtctcagaggagtacccagatgtgtgaggtgtcagaccacccctactggggggtgcctcccaagtaggctactcgagggtcatggacccacttgaggaggctgtctgcccgttctcagatctcaagctgcrtgctgggagaaccactactctcttcaaaggtgtcagacagggacgtttaagtctgcagatgttactgctgcctttgtttgtctgtgccctgcccccattggtggagcctacagaggcagacaggtctccttgagctgccgtgggctccacccagttggagcttccaggccgctttgtttacctactcaagccttggcaatggcgggcgcccctcccccagcccactgcctccttgcagtttgatctcaaactgctgtgccagcaatgagcgaggctccgtgggcatgggaccctcccagccaggtgcgggatataatctccttgtgtgccgtttgttaagcccattggaaaagcacagtattagggtgggagtgacccgattttccaggtgctgtctgtcacccctttctttgaccaggaaagggagttccctgaccccttgcacttcccaggtgaggcaatgcctcacccttcttcggctcacgcactgtgcgctgcatccactgtcctgcacccactgtccagcactccccagtgagatgaacctggtacctcagttggaaatgcagaaatcacccgtctt

SEQ ID NO: 920012 - DNA, 821 bp, Homo sapiens
ggtccactccagaccctgtttgcctgggtatcagcagtggtggctgcagaacagtggatattggtgaaccgcaaatgctgctgcctgatcgttcctctgcaagttttgtctcagaggagtacccagatgtgtgaggtgtcagaccacccctactggggggtgcctcccaagtaggctactcgagggtcatggacccacttgaggaggctgtctgcccgttctcagatctcaagctgcgtgctgggagaaccactactctcttcaaaggtgtcagacagggacgtttaagtctgcagatgttactgctgcctttgtttgtctgtgccctgcccccattggtggagcctacagaggcagacaggtctccttgagctgccgtgggctccacccagttggagcttccaggccgctttgtttacctactcaagccttgkcaatggcgggcgcccctcccccagcccactgcctccttgcagtttgatctcaaactgctgtgccagcaatgagcgaggctccgtgggcatgggaccctcccagccaggtgcgggatataatctccttgtgtgccgtttgttaagcccattggaaaagcacagtattagggtgggagtgacccgattttccaggtgctgtctgtcacccctttctttgaccaggaaagggagttccctgaccccttgcacttcccaggtgaggcaatgcctcacccttcttcggctcacgcactgtgcgctgcatccactgtcctgcacccactgtccagcactccccagtgagatgaacctggtacctcagttggaaatgcagaaatcacccgtctt

SEQ ID NO: 920013 - DNA, 591 bp, Homo sapiens
aagaagtctcatctttaggatgttcctaaagaagtctcatctttaggatgttcctaaagaagtctcatctttaggatgttcctaaagaagtctcatctttaggatgttcctaaagaagtctcatctttaggatgttcctaaagaagtctcatctttaggatgttcctaaagaagtctcatctttaggatgttcctaaagaagtctcatctttaggatgttcctaaagaagtctcatctttaggatgttcctaaagaagtctcatctttaggatgttcctaaagaagtctcatctttaggatgaggttatcatctgttaatgaccacatcagagcataagaattgactgaacgatttcccctggcttatggcttggaagactccttccctccccaaccctcgtgttttctgctcatacctggactggagacccacraaaattggggtttgcatctgctctcaattcttggagttgttcttgattttgatctctacacttactggtcaatgcatccaatgaattggctttaaatattctttatgtgctgaaaaactcccacctctttattcagagttcacatttttctgctgt

SEQ ID NO: 920014 - DNA, 542 bp, Homo sapiens
gagaggacatcgaggggagcacgctggtggaagagcacaccaacagatgctgccacctggcaggccgtccagcagaggaatgacgcggagtttggtcgtggcagtcataggagagcccgggctgctgagcggctggactccagggggaaaccatctcccttctggctcccccatctgctgatagctacttccactcagtaaaaccttgtactcattctccaagcccaggtgtgattcaattcttccctcacgccaaggcaagaacccgggatacagaaagccctcgtccttgtgrtaaggtggagggtctaattgagctggttaacacaagctgcctatagacggcaaaactgaaagagcccatggtagcacatgcccactggggctttgggagctgtaaacatccacccctagatgctgccgtgggatcgacccccacaacctgcatgctcccctagaggtacgagcagcagggcactgaagaagcgagccacttctccagttgcacaccttgcaagggggacaagggaacctttctcatt

SEQ ID NO: 920015 - DNA, 650 bp, Homo sapiens
cctgggtcagtgtgggacccagcgtgagcccccgctctggagcagtggggtcacacagactccagggagctccctgcaccagtctcagggcctgcaggggttgaggggctcccctggggctgggatcacaggagtgtgtggtgagaatgtggacccctggggatctctcaccctttcccgacacaggggagcctctccaggctcccgaccaagacccatcctgtctgggctgtcgtctccctctccttcattgcgcgggtgccgcccagccctcccctgtcgagttcycgtggtctccgttagatgttctccgtgcgatgactgactcctgttttggttctcctgtgtggaggagtctgacatcctgtgcctccagccagccaccctgagccttcctcctgaaaacaggtttttgtttgtttgtttgtttggtttttgagatggagtctcgctgtgtcacccaggctgaagtgcagtggcacaatcttggctcactgcaacctccgcctcctgggttcaagtgattctcctgcctcagcctcctgagtagctgggactataggcgcatgccaccacacctggctaatttttttgtagtttaggtagagacgggatttcaccatgttagccaggatggtctcgatctcctg

SEQ ID NO: 920016 - DNA, 673 bp, Homo sapiens
acttcccctgatgccctatcactgatgaatgttttattccccacattccttgtaccacagcacctgaaggtgaggcaggtcacctctttgctcttatttccaaaccatttcctcctccctaaaagacatctagttttaaacctcatgaaattaggatatgtcwatcacaatccctccttgtgatatatatctactaatttctgatagacaccagttctctgtcagtccttaaattcttcagcacctgactcactgttactctcttcaatgccattcctatcattctttggtcacttcgatatccacataaataatactccccacaacctcgcctcttagttctctgacccctctctcctggaatagtctcatcctctacgcttctacagtcattcattcccatggtcataacccagaccttgtcagtaccagtcagtaccaaacccttcataacctcaattatcccactctgacttctacctcctatacctcaactgttgccctatgataccccaaactggatagttatttgactccaccagaaatcaaattctggagaagtacaattcactgatcttaccactttttgccactttttcactgttcctcatccccgagtaccctcacttcccagcacaaccacctgttataatcaccccctgcatatgccctt

SEQ ID NO: 920017 - DNA, 673 bp, Homo sapiens
acttcccctgatgccctatcactgatgaatgttttattccccacattccttgtaccacagcacctgaaggtgaggcaggtcacctctttgctcttatttccaaaccatttcctcctccctaaaagacatctagttttaaacctcatgaaattaggatatgtcaatcacaatccctccttgtgatatatatctactaatttctgatagacaccagttctctgtcagtccttaaattcttcagcacctgactcactgttactytcttcaatgccattcctatcattctttggtcacttcgatatccacataaataatactccccacaacctcgcctcttagttctctgacccctctctcctggaatagtctcatcctctacgcttctacagtcattcattcccatggtcataacccagaccttgtcagtaccagtcagtaccaaacccttcataacctcaattatcccactctgacttctacctcctatacctcaactgttgccctatgataccccaaactggatagttatttgactccaccagaaatcaaattctggagaagtacaattcactgatcttaccactttttgccactttttcactgttcctcatccccgagtaccctcacttcccagcacaaccacctgttataatcaccccctgcatatgccctt

SEQ ID NO: 920018 - DNA, 585 bp, Homo sapiens
atgttagccaggctggtcttgaacaaggctgattcacccaccttcacctgccaaagtgccgggattataggtgtgagccaccgtgccaggcctgaatatggtgtcttttctccagtttatgtttttgtatgctttgttgaatatcagttggctgtaagtatttggctttatttctggcttccttattctgtttcattggtctacatgcttatttttataccagtaccatgctgttttgataattatagmcttgtagtatagtttgaattcaggtaatgtgatgcctccagatttgtcctttttgcttagtattgctttggctatgcaggctcttttttggttccatatgaattttaggatttttttttctagttctttgaagaatgatgatggtattttgattctaagtgtgttgaatctgtagattgctttttccagtatggtcattttcactatattgattctaaccattcatgagcatgggatgtgtttccatctgtttgtgtcatctgtgatttcttttagcagtgttttgtagttttccttgtaaagaccttttacctccttaggtaactataattctaa

SEQ ID NO: 920019 - DNA, 571 bp, Homo sapiens
ctcattttgagttgatttttgtatgtattgtgaaatatggatcgatttcattcttctgcatgtggatttccagttttcccatcactacttattgaagagattgccctttccctccttgtgtattcttggcacctttgctgaagatcatttgactgtaaatgcatgaatttatttctgggctctctattctgttgctttggtctatgagtctgtttttatgccaatactatgtagttttgatactattgccttgtagtatgttttgaaatcaggtagggcgatgcctgcagctttgttcttcttgyttaagattgctttggctatttgggatcttttgtggttctatatgaattttggatttcttttctattttcgtggaaaaatcactagaattttgataggaatcacatttaatctgtagattgctttggatagtacaggaatttttctttatttttttaatttttaatttttgtgagtacgtagtaagtgtatgtattttgggggtacatgagatgttttgacacaggcatgcaatgtgtactaaccactctatggaaaatgggatatt

SEQ ID NO: 920020 - DNA, 678 bp, Homo sapiens
aagtctatattctctgtcatggctactgaagtctttgctcagttagcttcatggttagctagtggttggacagagatttccttgaatgtctggaatcggaagtctgccagtctttgccagggagctctgtgtacttattagggacacaccttcaacattcacccaggaaatttacaactgtgctttagctctcacttcctgcttacacagagcctcgaagtcggccagcggtgtgagcttagggctgtctcaggtctttcctaagcatgtggccttccatatccccagaaatatgtcagaatttttcaaaagtccctccgaacatctaatgtcttcatttttccttctaagattttttttttttttttttttgagacggagtctcgctctgtggctcaggctggagtgcagtggcrcgatctcggctcactgccagctccgcctcctgggttcacaccattctcctggcttggactacaggcgcccgccaccacacccggctaattttttgtattttcagtagagacggggtttcaccgtgttagccaggatggtctcgatctcctgacctcaagtgatcctcccgcctcgacctcccaaagtgctgggattacaggcgtgaaccaccgcgcctggcgcttttccttctaagatttttagttaggctattatttcccc

SEQ ID NO: 920021 - DNA, 757 bp, Homo sapiens
gtaattacaggtccggcaccaccatgcccgggtaatttttgtatctttagtagagacagggtttcaccatgttggccaggctggtctcaaactcctgacctcaggagatccgcccacctcggcctcccaaagtgctgggattacaggcatgagccactgcacytggcctgtgatattcttaactccaaactaacaacctcgctctaaccattggagaacactagaaaaatccgaatcaaggaccattcaatacatgcctgatgaatactcttcaaatctgtcaatatcgtgaaagacaagaaacctgtcagcatttgcaggagatgcaggagaagtgatgactgatacgagctgaattttgtctcccaacaacttcatacattgaagtcctaacccccagtacctcaaaatgtacttgtatttggaaatagggtctttgtagagatgactaagttaaaatgaggtcatgagagtggattctaacccaatatgactggtgtcctttttttttttttttttttttgagacagggtcttgctctggcgaccagactagagtacggtggcacaatctcagctcgctgcaacctccacctccagagttcaagcgattttcctacctcagcctcccgagtagctgggattgcaggcatgcaccaccatgcccagctaatttttgcattttttagtacatgttgatctcaatctcctgacctcaagtgatcctgccgcctcggcctcccaaagtactgggatta

SEQ ID NO: 920022 - DNA, 757 bp, Homo sapiens
gtaattacaggtccggcaccaccatgcccgggtaatttttgtatctttagtagagacagggtttcaccatgttggccaggctggtctcaaactcctgacctcaggagatccgcccacctcggcctcccaaagtgctgggattacaggcatgagccactgcacttggcctgtgatattcttaactccaaactaacaacctcgctctaaccattggagaacactagaaaaatccraatcaaggaccattcaatacatgcctgatgaatactcttcaaatctgtcaatatcgtgaaagacaagaaacctgtcagcatttgcaggagatgcaggagaagtgatgactgatacgagctgaattttgtctcccaacaacttcatacattgaagtcctaacccccagtacctcaaaatgtacttgtatttggaaatagggtctttgtagagatgactaagttaaaatgaggtcatgagagtggattctaacccaatatgactggtgtcctttttttttttttttttttttgagacagggtcttgctctggcgaccagactagagtacggtggcacaatctcagctcgctgcaacctccacctccagagttcaagcgattttcctacctcagcctcccgagtagctgggattgcaggcatgcaccaccatgcccagctaatttttgcattttttagtacatgttgatctcaatctcctgacctcaagtgatcctgccgcctcggcctcccaaagtactgggatta

SEQ ID NO: 920023 - DNA, 589 bp, Homo sapiens
tctttttttttttttgtatatatatttattgtactttacgttctagggtacatgtgcacaacatgcaggtttgttacatatgtatacatgtgccgtgttggtgtgctgcacccattaactggtcatttacattaggtatatctcctaatgtcaagcgattctcttgcctcagcctcctgawtagctgggattacaggcacctaccaccacacctggctaatttttgtaattttagtagagacggggtttcaccatgttggccaggctggtctagaactcctgacctcagatgatcggcctgcctcagcctcccaagttgttgagccaccgcgcccggcctattttggagatttttttcatatcaatacttaaaaagcttcttcattttgtttttacaactgcctacattttcacggcatgaacacatcatcatttaaccagttttctattgatggccacttaggttgtttctaatctttaattattacaagcaacactgcagtgaataaccttatacatgaggggtcagcaaactgtttctgtaaagggctaggtagcaaatattttaggcattgcaggccatttggtc

SEQ ID NO: 920024 - DNA, 436 bp, Homo sapiens
atggtatatgtttgatctttgtttaccatgagaagctccctgtagattcagacattagactgtcctgtggcatacataatagtctgagctccctgcttagcccctgagtggggactaagggccagatcagcaggcctgcctrcaccatcactcaatggcaggcataatcaccaggtccaaggtgggattcagggtacagccatcaagcacccagggatgtactggggagtagagtgtacagacctccactgttccaagttctgtgcctaggacaggtggcctaaactcctaatcaaaaagagtgggtgctccagtcatatgcctgcagatataactgggcatgtagtgtagagggtgccagtgcaccaagatgggtggtgagagggaaagggggtgactcaggcttctactccaggtgagcaggtgcactgattgc

SEQ ID NO: 920025 - DNA, 659 bp, Homo sapiens
gttatctgcagaagatggcggggcctcgtttcaaaatcctagaggcctccactgtgatcgacctgtgggcgcctgccaaaggctctgaacagcatccctatctgccactgacacatcaagcaccattggatctgctgggttgtatggcccaagtggcagagcaacttgcacagcagcctggacctgttgcagagccttctcctattctgaaccccactcaaaactggcagcctttcaggtcactcaaaaaatgggccagagtaacacacacaaatgaggaatgtgttgcctccaccacccaaataggcccactaggcattgtgcctctttcttggctgtaggaggggccaaatgcagcaacttatccttcaccttagaaggaatakctcaacaggccccaccccactggactcctagaaattttactgaggtataaggtccctgagttttagttgaatttatttcccatcttctggcatgcaaatgtctcacaaataagtccagtgtgtttgctacttgttgctcactggatccaatcagcataatatcgtcaatgtaatggaccagtgtgatatctcacggaagtgaaaagcgatcaacgtctctccgaataagattatgacacaaacctggagagttgatatatccctgaggtagga

SEQ ID NO: 920026 - DNA, 700 bp, Homo sapiens
acttggttaagcatatgataaaccactttcattctccatgacctatctttcttctgcacaggccaaatgggagagttgaatgggcatgtggtgggaatcaccacccctgagcctttcaagttcttgrtggtggcactaatctctgcagtccctccaggaatatgatactgtttttgaattactatttttctaggtaaagacagctttaatggcttccatttggcctttcccaccataacagccctaactctaccagtcagggagccagtatggggattctgccacctgctaaatatgtctatgctaattatgcattctggcactggggaaatgagcataggatgagtccagggacccactggacccactataagttgaacctgagctaaaactccattaattacctgacctccatcagccactactttaactggaggacctcaatgatgttttgggacccctggaatcaatgtcagctcagagccagtgtccagtagtccccaaaatgtctcatcatttccctttccctagtgcacagttaccctggtgaaggtgggaggtatccttggggaaggatgggagaaagattcactgcataagttgtcagtaatgtagtggggtccttcctcaaggggacccatcctccccttcattcaagtggttctggatctgtaaactggctcaagtctggaaattgatt

SEQ ID NO: 920027 - DNA, 585 bp, Homo sapiens
tgtgaatgacaattgttccttccttgcagagttgatgagacttaaagataatatgtgccaaagacatagcaagaacctgacccatggcaggcatttggaaatgggaattattgctatgattataaggcaggactgatataattaactcctctaacagctraggcaactgaggctgaaatagattaaatcattcaaccagtcactacagccactatgataccagagctacaggttttctttttttttttaatttaattttattattattaaactttaagttttagggtacatgtgcacaatgtgcaggttagttacatatgtatacatgtgccatgctggtgtgctgcacccattaactcatcatttagcattaggtatatctcctaatactatccctccccgcttcccccaccccacaacagtccccagagtgtgatgttccccttcctgtgtccatgtgttctcattgttcaattcccacctatgagtaagaatatgaggtgtttggttttttgttcttgcgatagtttactgagaatgatgatttccaatttcatccatgtccctacaaaggacatgaactca

SEQ ID NO: 920028 - DNA, 585 bp, Homo sapiens
tgtgaatgacaattgttccttccttgcagagttgatgagacttaaagataatatgtgccaaagacatagcaagaacctgacccatggcaggcatttggaaatgggaattattgctatgattataaggcaggactgatataattaactcctctaacagctgrggcaactgaggctgaaatagattaaatcattcaaccagtcactacagccactatgataccagagctacaggttttctttttttttttaatttaattttattattattaaactttaagttttagggtacatgtgcacaatgtgcaggttagttacatatgtatacatgtgccatgctggtgtgctgcacccattaactcatcatttagcattaggtatatctcctaatactatccctccccgcttcccccaccccacaacagtccccagagtgtgatgttccccttcctgtgtccatgtgttctcattgttcaattcccacctatgagtaagaatatgaggtgtttggttttttgttcttgcgatagtttactgagaatgatgatttccaatttcatccatgtccctacaaaggacatgaactca

SEQ ID NO: 920029 - DNA, 573 bp, Homo sapiens
attttctaggccaagactcatgcacatttagattatcctcaaagactagtactgaaaattgcctagccttgtgaaaaagaaatttaaaagtgttcgaatctacagccatggaaaggaatgcagaaaatgtcaaaaaacaacttttttccttctgctctcagaagagagtgtgtttcyctgtttataatgaagagatgagtatgggatggtactactgaatacatttgatttcagcatcttgaaattacagaaaccaactccctcaactattgccaaattctagaggcttcttccaactcttaattgtagtatgtatttagtttttataagactagtaatatgaaaattatgtcaaaattgttattatgtgcattccatgtaaaaggtatgatgtctgtctttttgacttttgtatgctcaatccttaacagagtacctggaatatagtcagtattccatgtatatttaattccccaataaataatgaaagtcatagatgacttatttatttacaacattcaaaatggattatttacatagcactttatgttttaaaatgtgctttttatagat

SEQ ID NO: 920030 - DNA, 685 bp, Homo sapiens
acactgagcgtgagccagagcagggtgagtcatcgccttacccgggaaatgcaagggatcagggaattccctttcaagccaggcaaagctgtgacagatggcacctggaaaattgggtcactcccaccctaatactgcgctttaccaacggtcttagcaaatggcacaccagaagattatatcctgtgcctggctcggaagcttcccgctcacggagcctcgctcattgctagcacagcagtctgagatcgaacggcaaggcggcagcgaggctgggggtggggtgcccaccattgctgaggcttgagtaggtaaacaaagcagtcaggaagctcgaactgggtggagcccaccacagctcaaggaggccggcctgcctgtgtagactccacctctgggggctgggcatagcccaaaaaaaggcagcagaaacctctgcagacttmaatgtccctgcctgacagctttgaagagagtagtggttctgccagcacggagtttgagatctcagaatggacagactgccccctcaagtgggtccctgacccccgagtagcctaactgggaagcagctcccagaaggggcagactgacgcctcacacggccaggtacccctttgagacaaaacctccagaggaatgatcagacagcaacatgtgctgtccagcaatattcgcttttctg

SEQ ID NO: 920031 - DNA, 705 bp, Homo sapiens
tgggacagtcgtgaagagccacatatggcaatgtcatctctcaggaacccaagacgccaaggcccctcactgtaatgtggcaataacgccagctagcatgcagaactgttgtggggtaatgaatggaagctaatgtatgagaaggagctgttacactccaggactctagataccaaattttatsgttatcagtttcacagcaaaaaaaaaaaaaaaaaaaaaagaaagtactcttattctcaaattattcttattagttctggtgtgcacttacatgagaaatggcaaagggatattctgcttgcagtcttttgccctctggcaaaaactttccagacagggtgtcatcgtgtgcagcttccgtgatgcagtttgatcctgataggtaacaagagtgacacgttttatcagaatctttttacatggctcaaggtcacttccaccgacaccagtgctattaatatttcccccattaagccaacccgtcctaagagccaaagagaataccatagttccaggtttcggtttgaaggtgctgatggatgagagtagaagggagtgaatgaggaagcccagaccttcctgcaggagcagggaagcaagacccaggccagcactgcccaccccccaatagccttcccaagggtgaggggcagccatgcggaaactggcactcactaggccaagacagcacaggcctccaac

SEQ ID NO: 920032 - DNA, 730 bp, Homo sapiens
gagtctaggaagaatgcattccaaacccagcccctgggtgggtattcagatgcacattgctgacttgttaacacattactgcttcttgtcaccttgggttttttgtttttgttttgcccttgagattttttattccagaagtgagttctggctcatctgtcattagagkaggtatcgaggcaaccatggatcaaagtattaatattttctgcttgccattacttgttcagatatcaagttcctgagtaccagttaattgtaggattgatagtaaaaggagataattagaattgagtcaaccatttggttttccaaaactgtagaagagtgtgaaaatatttatttaataccattcccagacaaaatcaatggtttctaaattttcacagagcaaggactaaaaaggagtaatcaggatatcaattatttgaatgataaactcttagccagaaggtaacagataacaccctgttacacacagcaagaccccatctctaaaaaaaaaaaaattaattagccaagcatggtggcatgcacctgtagtcccagctacttgagaggctgaggtggtggggggaatcactagagctcaggagttctaggctgtagtgagctatgatcacaccactgcactccagcctgagcaacagagtgagaccctatctcaaaactttaaaaaaaaaaaaatttaagaagaagaagataattactggtatatagaccagagcta

SEQ ID NO: 920033 - DNA, 811 bp, Homo sapiens
tacttaacaatagtccatcatgactcttctcaatcaacatatgctgtctgttaacagattgaatttagtgaaactaaactacacacttgatcaaattttcctacatctattcattataagctagctttattttgaaaaacaggcaacctgaattaaactcttgaaaatgaaccacaaaaactgaaatatgcccattaattaatagcttytgtttttcattgtctttttttggttggttgttttttcttagacagggtcttgctctgtcacccaggctggagtacagaggctccatcagggtccactgcaaccccggcctcctgggttcaagtgattctgctgcctcagcctcttgagtaggtgggattacaggtggccaccaccatgtccagctaatttttttagtttcgtagacaggggtttcaccatgttggccatgctggtctcaaactcctgacctcaagtgattcacccagctcggcctcccaaagtgctgggattacaagtgtgagccaccatgaccagccaactaatagcttttgatagagttatcttatttattttttgactggttaatttttgaacctgagctaaattatataggcaacaacttttctgttcggtattcagacaagtagcagacaacacagtgaatttggtctgttttatattggccacatatcacatccatttccaaagggcagtctgtgcttttagcattcactaatgaaatcacacattacagtctcactgccacataccgcttcctccagataggatgtcacagccccagaaacaacttgtaagcttt

SEQ ID NO: 920034 - DNA, 620 bp, Homo sapiens
ttcctaagggagcatttaaaatagccctagccagagggagaattgcagatcccagtggtccaaacttgactgcctgcaaacctcacaactgagggctacagcactctgagcctccaagtaaacttaaaaggcagtctagaccataaggactgcaattcaggcaagtcctatagctgaattcagcccagggacagtggactgaggtggaacatgatacacagaaacatcatccaaggaagcaaaaagagtrctgttatcacccctcccctaacctcaggctgcacagcttgaggctccaaaagagaccccttcctttgtcttgaggaaagggaagagttgagaggagtttgtctttcatcttggataccaactcagccacagcaggataggacaccagtcagagtcatgaggtccccatttcagctctagctcccagatgacatttctagacacacctgggccagaagggaacctgctgccttgaagaaagagatgtagttctgccggcattcatcacctgctaaatgaagagtccttgggccccaagtaaacagcagtgatatccgggtactacatcaagggctttgggtgagcctctaagacttgctggcttcaggtga

SEQ ID NO: 920035 - DNA, 489 bp, Homo sapiens
gtcttttctccagtttatgtttttgtatgctttgttgaatatcagttggctgtaagtatttggctttatttctggcttccttattctgtttcattggtctacatgcttatttttataccagtaccatgctgttttgataattatagmcttgtagtatagtttgaattcaggtaatgtgatgcctccagatttgtcctttttgcttagtattgctttggctatgcaggctcttttttggttccatatgaattttaggatttttttttctagttctttgaagaatgatgatggtattttgattctaagtgtgttgaatctgtagattgctttttccagtatggtcattttcactatattgattctaaccattcatgagcatgggatgtgtttccatctgtttgtgtcatctgtgatttcttttagcagtgttttgtagttttccttgtaaagaccttttacctccttaggtaactataattctaagtattt

SEQ ID NO: 920036 - DNA, 573 bp, Homo sapiens
ctcattttgagttgatttttgtatgtattgtgaaatatggatcgatttcattcttctgcatgtggatttccagttttcccatcactacttattgaagagattgccctttccctccttgtgtattcttggcacctttgctgaagatcatttgactgtaaatgcatgaatttatttctgggctctctattctgttgctttggtctatgagtctgtttttatgccaatactatgtagttttgatactattgccttgtagtatgttttgaaatcaggtagggcgatgcctgcagctttgttcttcttgyttaagattgctttggctatttgggatcttttgtggttctatatgaattttggatttcttttctattttcgtggaaaaatcactagaattttgataggaatcacatttaatctgtagattgctttggatagtacaggaatttttctttatttttttaatttttaatttttgtgagtacgtagtaagtgtatgtattttgggggtacatgagatgttttgacacaggcatgcaatgtgtactaaccactctatggaaaatgggatattca

SEQ ID NO: 920037 - DNA, 785 bp, Homo sapiens
tttctaattgttatgagtaagtaataatgtatatatttgtggggtacttgtgatgttttgatacagacacaaaatgtgtaatgaccaaattagtgtaatcaaggtaaccatcagctcaagcatttgtcatttatttgtgttaagaatagtccaatttggctgggtgtggtggctcacgcctgtaatccgagcactttgagaggctgaggcaggcgtatcacaaggtcaagagatggagaccatcctggccaacatggtgaaaccgtgtctctactaaaaatacaaatattagttgggtgtagtggcacatgcctgtaatcccagctactcsggaggctgaggcaggagaataacttgaacgcgggaggtggaggttgcagtgagctgagatcacatcactgcactccagcctggtgacagagtgagactctgtctcaaaaaagaatagaaaagaatagtccaattccactgttttagttattttgaaatatacaataaattgttgttaactatagtcatccgattttggttccaaatactgatcttattcattacatacaactgtattttagtgccattagccatccccactttatccctgcctcctcactacccttccaagcctctggcaaccaccattccactctttatcaccatgagattgattttttttagcttccacagatgagtgagaacatgtgatatttgtctttctgtgcccagcttatttcacttaacatgatgtcttccagttccatcaatgttgttgcaaatgacaatatttt

SEQ ID NO: 920038 - DNA, 741 bp, Homo sapiens
ccatccctgccaccatggccactttgttcatgggcccattgggtgatgacaggggtggctgggaaaagaggctgagtggtgtccacagaacaggttaccctatccacttgattattaaaattctcctctggcctagtgcagtggttcatgcctgaaatcccagcactttgggaggccgaggcgggtggatcacctaaggtcaggagttcgagagcagcctgaccaacaaggtgaaacccygtcactactaaaaacacaaaaattaaccgggcgtggtggcaggcgcctgtagtcccagctactcgggaggctgagacaggagaattgcttgaacccaggaggcagaggttgcagtgagctgagattgcaccactgcactccagcctgggcgaccgagcgagactctgtctcaaaaaaaaaaaaattatcctctgctgaggtcacctgttggtgagtactcacacaggatacaaatatcttcacgatttttgcccactcagagaggtccatccgcatacctcttccccaagtttctttgtcatcaattttccaatcaacacttcttccaagtccctgaccagccaaaccattggctacagcccatgaatcagtatataattggacatctggcaatttctccttccatgcaaagtgcacaaccaggtgcactgctcgaagttatgcccactgggaagatatgcctttaccgttgtccttcagggatgtcctacaaaggggctg

SEQ ID NO: 920039 - DNA, 731 bp, Homo sapiens
ggagtctaggaagaatgcattccaaacccagcccctgggtgggtattcagatgcacattgctgacttgttaacacattactgcttcttgtcaccttgggttttttgtttttgttttgcccttgagattttttattccagaagtgagttctggctcatctgtcattagagkaggtatcgaggcaaccatggatcaaagtattaatattttctgcttgccattacttgttcagatatcaagttcctgagtaccagttaattgtaggattgatagtaaaaggagataattagaattgagtcaaccatttggttttccaaaactgtagaagagtgtgaaaatatttatttaataccattcccagacaaaatcaatggtttctaaattttcacagagcaaggactaaaaaggagtaatcaggatatcaattatttgaatgataaactcttagccagaaggtaacagataacaccctgttacacacagcaagaccccatctctaaaaaaaaaaaaattaattagccaagcatggtggcatgcacctgtagtcccagctacttgagaggctgaggtggtggggggaatcactagagctcaggagttctaggctgtagtgagctatgatcacaccactgcactccagcctgagcaacagagtgagaccctatctcaaaactttaaaaaaaaaaaaatttaagaagaagaagataattactggtatatagaccagagcta

SEQ ID NO: 920040 - DNA, 626 bp, Homo sapiens
aggctggcagttttgagtagggtccagaacagaaggctctgcaacaggtccaggctgctgtgcaagctgctctgcaacagatccaatggtgcttgaggtgtcagtggcagatagggatgctgtttggagcctttggcaggccctcatcagtgaatcacagcagaggcctcaagaattttggagcaaggccctgccatcttctgtggataactactttccctttgagagacagctcttggcctgttactggggtttggtggaaactgaacgtttaactatgggtcatcaagtcaccatgtgacctgaactgcctatcatgaaccgggtgctttctgatccatctagccataaagtgaggtgtgcacagcaacrttccatgatcacatggaagtggtatatatgtgactgggctcaagcaggtgctgaaagcacaagtaaattacatgaggaggtggctcaaatgcccatgtaagttacatgaggaagtggctcaaatggaagtgactccacccctgccaccccagcctgcactgatggcctcatggggaattccctatgataagttgacagaggaagagaagactaggccctggttcacagagggttctgcacgatatgcaggcacc

SEQ ID NO: 920041 - DNA, 585 bp, Homo sapiens
gaaaatgctttattcaaatgttatctaatccaaaaggcatcttttttagggttcagatgcctttaatgaatgctaaacacattctttgtaatattgactatacaacttttaaatgctggtaaaggagttgtctctttggggccaaatacatttcttattactgctattcacaaatgtttaaacactttcaattttcctagaaacctggcacattaaatggaaattcaagttccatatgagggtaagactgcagaagttgaattgttacagccaatgatcacttttatacrttaggctccttattctttatattccacgtgctgagcaaatgaagcatttggagaaatgtgtacttttttttgtcacacagcctgatgggaaaaaagagtagaacaaggcatgagtgaaggagatttgctgtccgaggagaggccttctgtaaacaaaaggtatttgtactgcaaaggactcagggctgagacccagttctactgggaaactaggaaggctcatgggccaaggagctattggaggtctgaagttgagaggtcctaaatggtaagtgcaggcactaagaatgtttct

SEQ ID NO: 920042 - DNA, 585 bp, Homo sapiens
gaaaatgctttattcaaatgttatctaatccaaaaggcatcttttttagggttcagatgcctttaatgaatgctaaacacattctttgtaatattgactatacaacttttaaatgctggtaaaggagttgtctctttggggccaaatacatttcttattactgctattcacaaatgtttaaacactttcaattttcctagaaacctggcacattaaatggaaattcaagttccatatgagggtaagactgcagaagttgaattgttacagccaatgatcacttttatacattaggctccttattctttatattccacgtgctgagcaaatgaagcatttggagaaatgtgtacttttttttgtcacacagcctgatgggaaaaaagagtagaacaaggcatgagtgaaggagatttgctgtccsaggagaggccttctgtaaacaaaaggtatttgtactgcaaaggactcagggctgagacccagttctactgggaaactaggaaggctcatgggccaaggagctattggaggtctgaagttgagaggtcctaaatggtaagtgcaggcactaagaatgtttct

SEQ ID NO: 920043 - DNA, 704 bp, Homo sapiens
gatcgccttggaagccccatagaccatcacggacgccaagctttaagtaactctcacagtggagggtaagtccgtccccttcttaatcaatatggaggctactcactccacattaccttcttttcaagggcctgtttyccttgcctccataactgttgtgggttttgacagccaggcttctaaacctcttaaaactccccaactctggtgccaactaagacagtactcttttaagcactcctttttagttatccccacctgcccagttctcttattaggctgagacactttaactaaattatctgcttccctgactattcctaggctacagccgcacctcattgccatcttttcccccagttcaaagcctccttcacatcctccccttgtatctccccaccttaacccacaagtataagacacctctactccctccttagcgaccgatcatgcaccccttaccatcctattaaaacctaatcactcttaccccactcaatgccaatatcccatcctacagcaggctttaaaaggattaaagcctgttatcactcacctgctacagcataggcttctaaaacctataaactctccttacaattcccgcattttacctgtcctaaaactagacaagacttagaggttagttcaggatctgcgccttatcaaccaaattgttttgcctatccaccccgtggtgccaa

SEQ ID NO: 920044 - DNA, 704 bp, Homo sapiens
gatcgccttggaagccccatagaccatcacggacgccaagctttaagtaactctcacagtggagggtaagtccgtccccttcttaatcaatatggaggctactcactccacattaccttcttttcaagggcctgtttcccttgcctccataactgttgtgggttttgacagccaggcttctaaacctcttaaaactccccaactctggtgccaactaagacagtactcttttaagcactcctttttagttatccccacctgcccagttctcttattaggctgagacactttaactaaattatctgcttccctgactattcctaggctacagccrcacctcattgccatcttttcccccagttcaaagcctccttcacatcctccccttgtatctccccaccttaacccacaagtataagacacctctactccctccttagcgaccgatcatgcaccccttaccatcctattaaaacctaatcactcttaccccactcaatgccaatatcccatcctacagcaggctttaaaaggattaaagcctgttatcactcacctgctacagcataggcttctaaaacctataaactctccttacaattcccgcattttacctgtcctaaaactagacaagacttagaggttagttcaggatctgcgccttatcaaccaaattgttttgcctatccaccccgtggtgccaa

SEQ ID NO: 920045 - DNA, 665 bp, Homo sapiens
tcgttaactcagtgctcaatggtgcccaggctggagtgcagtggcgtgatctcggctcgctgcagcctccacctcccagccgcctgccttggccccccaaagtgccgagattgcagcctctgcccggccgccaccccgtctgggaagtgaggagcgtctctgcctggccgcccatcgtctgagatgtgaggagcccctctgcctggctgcccagtctggaaagtgaggagcctctctgcccggccgccatcccacctaggaagtgaggagcgcctcttcccggccgccatcccatctaggaagtgaggagcgtctctgcccrgcggcccatcatctgagatgtggggagcgcctcagccctgccgccccgtctgggatgtgagaagcgcctctgcccggccgcaaccccgtctgggaggagaggagcgtctctgcccggccgccccatctgagaagtgaggagaccctctgcctggcaaccgccccgtctgagaagtgaggagcccctccgcccggcagccgccccgtctgagaagtgaggagcccctccgcctggctgacaccccatctgggaagtgaggagcgtctctgccaggcagccaccccgtccgggagggaggtgggggtcagcccccgccaggccagccgccccgtccgggagggag

SEQ ID NO: 920046 - DNA, 665 bp, Homo sapiens
tcgttaactcagtgctcaatggtgcccaggctggagtgcagtggcgtgatctcggctcgctgcagcctccacctcccagccgcctgccttggccccccaaagtgccgagattgcagcctctgcccggccgccaccccgtctgggaagtgaggagcgtctctgcctggccgcccatcgtctgagatgtgaggagcccctctgcctggctgcccagtctggaaagtgaggagcctctctgcccggccgccatcccacctaggaagtgaggagcgcctcttcccggccgccatcccatctaggaagtgaggagcgtctctgcccggcggcccatcatctgagatgtggggagcgcctcagccctgccgccccgtctgggatgtgagaagcgcctctgcccggccgcaaccccrtctgggaggagaggagcgtctctgcccggccgccccatctgagaagtgaggagaccctctgcctggcaaccgccccgtctgagaagtgaggagcccctccgcccggcagccgccccgtctgagaagtgaggagcccctccgcctggctgacaccccatctgggaagtgaggagcgtctctgccaggcagccaccccgtccgggagggaggtgggggtcagcccccgccaggccagccgccccgtccgggagggag

SEQ ID NO: 920047 - DNA, 665 bp, Homo sapiens
tcgttaactcagtgctcaatggtgcccaggctggagtgcagtggcgtgatctcggctcgctgcagcctccacctcccagccgcctgccttggccccccaaagtgccgagattgcagcctctgcccggccgccaccccgtctgggaagtgaggagcgtctctgcctggccgcccatcgtctgagatgtgaggagcccctctgcctggctgcccagtctggaaagtgaggagcctctctgcccggccgccatcccacctaggaagtgaggagcgcctcttcccggccgccatcccatctaggaagtgaggagcgtctctgcccggcggcccatcatctgagatgtggggagcgcctcagccctgccgccccgtctgggatgtgagaagcgcctctgcccggccgcaaccccgtctgggaggagaggagcgtctctgcycggccgccccatctgagaagtgaggagaccctctgcctggcaaccgccccgtctgagaagtgaggagcccctccgcccggcagccgccccgtctgagaagtgaggagcccctccgcctggctgacaccccatctgggaagtgaggagcgtctctgccaggcagccaccccgtccgggagggaggtgggggtcagcccccgccaggccagccgccccgtccgggagggag

SEQ ID NO: 920048 - DNA, 550 bp, Homo sapiens
gtttttatcaagcacacatggaacattctcgtggacagatcgtatattaggccataaaacaagtcttaaacattttaagaatattaaaataatattaaggatctcttttgatcacaatggtatgaagctagaaatcaataacaggagaaattttgggaaattcacaaatatggaaaaattaacatgttcctgaacaataaataagtcaatgaagagattaaaagtttaaaaatatcttaaaataaataaaaatgaaaacattccagaacttatggaatgcagcataagcagttctaacagaaaagtttayagtaataaatgcttacatcaaaaaagaatttctcaaataatctattgttacatcttaaggaactaaaaactgaagggcaaactaagcttactaaactaaagtcaattgaagtaagagaataataaagatcagagcagaaataaataaaataggtagtagaaaaacaacagaaaaggccaacaaaaccaagagtttgttttttaaaaaagaaacaaaatgaacaaacctttagctaggcta

SEQ ID NO: 920049 - DNA, 571 bp, Homo sapiens
cccctttctttgactcggaaagggaactccctgaccccttgcgcttcccaggtgaggcaatgcctcgccctgcttcggctcgcgcacggtgcgcgcacccactggcctgcgcccactgtctggcactccctagtgagattaacccggtacctcagatggaaatgcagaaatcacccgtcttctgcgtcgctcacgctgggagctgttgaccrgagctgttcctattcggccatcttggctcctccccctctgtctgttttttattcattgggaaatccctttattaacagcagatgccccaccccccggccacaatcgtgactttttaaaatctgttatttaaatgaaagtaatttctttattcttttaggcattcattaggaattgcttgaatgctactacgtgcgagtcactatgacagaaattatcaagaatgtgaagacaaacatggcatagtgcagaagtttagactgccttctcacatgaaaatacaggcagggtcaaatatatgcacatgaacaacacctgaagccgcaaatttaaattataaggccctgaaaaaacctatcat

SEQ ID NO: 920050 - DNA, 571 bp, Homo sapiens
cccctttctttgactcggaaagggaactccctgaccccttgcgcttcccaggtgaggcaatgcctcgccctgcttcggctcgcgcacggtgcgcgcacccactggcctgcgcccactgtctggcactccctagtgagattaacccggtacctcagatggaaatgcagaaatcacccgtcttctgcgtcgctcacgctgggagctgttgaccagagctgttcctattcggccrtcttggctcctccccctctgtctgttttttattcattgggaaatccctttattaacagcagatgccccaccccccggccacaatcgtgactttttaaaatctgttatttaaatgaaagtaatttctttattcttttaggcattcattaggaattgcttgaatgctactacgtgcgagtcactatgacagaaattatcaagaatgtgaagacaaacatggcatagtgcagaagtttagactgccttctcacatgaaaatacaggcagggtcaaatatatgcacatgaacaacacctgaagccgcaaatttaaattataaggccctgaaaaaacctatcat

SEQ ID NO: 920051 - DNA, 571 bp, Homo sapiens
cccctttctttgactcggaaagggaactccctgaccccttgcgcttcccaggtgaggcaatgcctcgccctgcttcggctcgcgcacggtgcgcgcacccactggcctgcgcccactgtctggcactccctagtgagattaacccggtacctcagatggaaatgcagaaatcacccgtcttctgcgtcgctcacgctgggagctgttgaccagagctgttcctattcggccatcttggctcctccccctctgtctgtttyttattcattgggaaatccctttattaacagcagatgccccaccccccggccacaatcgtgactttttaaaatctgttatttaaatgaaagtaatttctttattcttttaggcattcattaggaattgcttgaatgctactacgtgcgagtcactatgacagaaattatcaagaatgtgaagacaaacatggcatagtgcagaagtttagactgccttctcacatgaaaatacaggcagggtcaaatatatgcacatgaacaacacctgaagccgcaaatttaaattataaggccctgaaaaaacctatcat

SEQ ID NO: 920052 - DNA, 660 bp, Homo sapiens
atcggacacgaacagcagggagagcacatgtgtttttacgagaattatgccgagataggtaacagatgaggatgaaatttgggcttgactgaagtaatggggtctgtctgtgaagccttgcggcagtacagcccaggtaatttgctgagcctgatgggtgtcagggtcagtccaagtgaaagggaagagaggctgggatgacgggtgcaaaggaataggaaagaaagcatgtttgagatccagaacagaataatggattgtggagggaggtattgaggataggagagtatatgggtttggcaccatggggtggataggcaaaacaatttggttaataaggcatagatcctgaactaacytgtaaggcttttccagtttttggacaggtaaaatgggggaattgtaaggagagtttataggctttaaaaggccatgctgtagcaggcgagtgataacaggctttaatcctttcaaagcatgctgtgggatgggatgttggcattgagccgggtaagggtgattagcttttaatgagatggtaaggggtgcatgatcggtcaccaaggagggagtagaggtatcttatacttgtgggttaaggtggggggatacaagaggaggatgcaaaggaggctttggattgggaagaagggcggcaat

SEQ ID NO: 920053 - DNA, 660 bp, Homo sapiens
atcggacacgaacagcagggagagcacatgtgtttttacgagaattatgccgagataggtaacagatgaggatgaaatttgggcttgactgaagtaatggggtctgtctgtgaagccttgcggcagtacagcccaggtaatttgctgagcctgatgggtgtcagggtcagtccaagtgaaagggaagagaggctgggatgacgggtgcaaaggaataggaaagaaagcatgtttgagatccagaacagaataatggattgtggagggaggtattgaggataggagagtatatgggtttggcaccatggggtggataggcaaaacaatttggttaataaggcatagatcctgaactaaccwgtaaggcttttccagtttttggacaggtaaaatgggggaattgtaaggagagtttataggctttaaaaggccatgctgtagcaggcgagtgataacaggctttaatcctttcaaagcatgctgtgggatgggatgttggcattgagccgggtaagggtgattagcttttaatgagatggtaaggggtgcatgatcggtcaccaaggagggagtagaggtatcttatacttgtgggttaaggtggggggatacaagaggaggatgcaaaggaggctttggattgggaagaagggcggcaat

SEQ ID NO: 920054 - DNA, 607 bp, Homo sapiens
tcgttgctataactctgtccctgcaaaatttataggttggaacttaaatcccaaggtgatggtattaagaagtcaaggaatgtaggtggcctccagaagctggaaagagaaaaaagggaatggtttcttccttgctataactctgtccctgcaaaatttataggttggaacttaaatcccaaggtgatggtattaagaagtggggactttggaaggtgattaggccttgagtgaggactctgctttcatgaatgagattaatgctgttataaaagaggcttcagagagatgcttatccyttccatctcttctgccacatgaagatactgcatttgtaccttttttcttgtctgccatgtgaggtcgcagcatttatacccttcagaagatacaagatgccatcttggcaacagagagtgagcctgtactatatactgaatctactgatactctgatctcggactttccagcctccagaactgtgaggaataaatttctattacttacaaattactcagtctgtggtattttgttatagtagcaggaacagactaagacacttccctagagccttcaaaaggaatgtagccctgctgacaccttgatt

SEQ ID NO: 920055 - DNA, 795 bp, Homo sapiens
taaagcagggagaagttggaaagagcagacaagtagagtcttccagcctcatctttctcccgtgctggatgcttcctgctcttgaacatcagactccaagttcttcagcttttggactcttggactgatgccagtgatttgccaggggctcttgggcctttggccayagactgaaggctacagtgttagcttctctacttttgaggttttgggacttggactggcttccttgctcttcagcttgcagacagcctactgtgggacttcaccttgtgattgtgtgagtcaacactccttcaataaactctccttcatatatacacctatcctattagttccgtccctctagagaaccctgactaattcagggtgcaaactgccggtggccttaccattcttacatcccagaatggaaagggtggtggctcccttctcacagctccactagggagttctctgctggagattctgtatgggggctccaaccccacatttccccttggcacttccctagtagagtctctctgagaggctccatccctgtgtcaggcttctccctgggcaccaggctttcccatacattctttgaaatctagttggaagctgataagcatcttttactcttgcatttggtgaacctgcaagcttaacactatgtggaagctcccaaggcttatggcttgtgccctgtggtgtagcagtgtgagctgtacgtggggccctttgaactgaggctggagccagagctgtcaggatgcagggagcagtgtcctgaggtctagcagggcagaagtg

SEQ ID NO: 920056 - DNA, 605 bp, Homo sapiens
cagtggaactttttctcccctggccaaggagttcagcctggcctgaaccgggggaaggctataatgattaaaggaacctatttgcacagagcaagaggttctttccccaggacctcccctttttgccccttaagctgtgtttttctttcttttatttttttccttttctaatcgagagggttccttttcccagcacgctgcttctgatagagaaaataatggaggagcgacccctgctggctgataactgcaaattcggcagggcccatttgagacaatctaaacaagatacmtgcagcccctgaaatccgtttttgtcccaaactcaattccaggtttcaggctgagggcctagaaaggaaaacccgatctgcccgatctgagggatcaaaagtcaggcaacaggcacaatgtaaatgggcaggacaaattcctgctgactaaacccccacttcatggagggaggccatgctccaggcataaatgaggcccagggaactcaaaggttttcaacagcaggggaaatagaggcataggtgaggggagataattcctattctctagccccaccctgcttcacgggtgcagaccacagtggcacctgt

SEQ ID NO: 920057 - DNA, 666 bp, Homo sapiens
aattccaggtttcaggctgagggcctagaaaggaaaacccgatctgcccgatctgagggatcaaaagtcaggcaacaggcacaatgtaaatgggcaggacaaattcctgctgactaaacccccacttcatggagggaggccatgctccaggcataaatgaggcccagggaactcaaaggttttcaacagcaggggaaatagaggcataggtgaggggagataattcctattctctagccccaccctgcttcacgggtgcagaccacagtggcacctgtgggtggcatccataaagttgccaggactcagggacaacagatggaagagaaagtcccttgctttctctctccctcacaccctgagttttcattgaaagaaggaagggaaatgagggacacctctatttccctgtctttcagaatgggcaaccagctctcttcaccacccccagcttattctcctctggagtgtatcctgaaccactgagayggctttgaccctcagaatctggaggaaaaacacctcctagcctgtgtatcctgaaccactgagtctgctttgaccctcagaatctggaggaaaaacacctcctagccctcggaacaaaggtttggccaaattatgaaggactggcttggtctcaggaaggaaccattcattgtgata

SEQ ID NO: 920058 - DNA, 605 bp, Homo sapiens
cagccactggatggctgaactccaggaagaccatcttcccattccgtctcctttccagctccccatgcatcccatccccaccactcaataaaacccccacattcaccatcttcaagtctatgtgtgacctggttctttctggatgccagacaagaacctgggtaccaagagggcgttgagctggttaacacttaagccgtctgtagattgcaaagctaaaagagtgcactgtaacacacaccatgctcacttgggctttaggagttgcaggcacccacccttatatactgctgtggggccagagccccaaagcactcacccaggctcatgcacctgcccgtctgcatgctcccccttctgtaaggagtttgagcagcagcggaggctgcggccaaactgacaagccacacccttgtcacataccctgtgagggggggtcagggaactttcccatttcactgtcatcaaaatttatttgaccataatgcaaaagtctatttccgggctcastcttctattccactggtccatgtgtctatctttatggcagtactacactacttggattactgtaactttgtaatatgttttgaaatcagcaattg

SEQ ID NO: 920059 - DNA, 511 bp, Homo sapiens
gaaaaagctctgaaagttagccttgggccccgagcaaaatttagaggcattattaaacctggcaaccatggtgttctatagtagggaccaagaggaacaagccaaaaaggaaaagcaggataagagaaaggccacagccttagtaatggccctcagccaaacaaaccttggtggttcagagaggagaaaaattggagcaggccaatcacccagcagggcctgttatcagtgtggtttacaatgtcactttaaaaaagattgtccagagggcggagccaagatggctgaacaggaacagctccattctacaactsccagcataagcgacagaaaagatgggtgatttctgcattcccaactgaggaactgggttcatctcactggggagtgccggaaagtgggtgcaggacagtgggtgcagtgcaccgtgtgtgagctgaagcagggcaaggcatcacctcccctgggaagcacaaggtgtcagggaatttgctttcctagtcaaagaaag

SEQ ID NO: 920060 - DNA, 621 bp, Homo sapiens
tctttgatgatagattcccatggttatattttgacaaataattcaaaaggagttcaaagagttgagtggtatttctataataaactccttttatccctgtctacttcttatgtgaacaaattttctcagcattcacatctatagaaattgaattgatgctgaaatcctgcctcattatagcaatacagagataaatgcaataattgaaaaaatacatccaattaatgatatgtcttctaataaaaactttacttatgtatttatttatcaaaatttgtaatatgtatatattcttccaatcagtcactgaaactaataattattgtaatgtaacgaacattaaatccagaagaaaattttctttctgatcatagaaacaaattaataaactttcatatacatgtttttgctgtagagatatataatacagtatataatttwaaaatactcttaagcataaaatatcttttaaaatatattaggatatattaaaatatacattaagataaagttctaaaggggaatgagcacattgaattaaaagaggggaaaatgatataaattttgactatagagccagttcatgtattttttaaatgcataatggtagttacctaattg

SEQ ID NO: 920061 - DNA, 642 bp, Homo sapiens
gggcaaggaggttcagtttcttcctctgtaaaatggggataacacccacctcatagtattgctgggaagagtaaaccagggcttggtataggtgaaaagcctctcagaattttctagtccagtctctatagaaataagtttttgaattaatcatgtttcttattatctatattttgtgatgctttggtatcttggggaccttgctggctggggagagactgcccctcccaagattagctaattcctacagatamcaaacaacttgcctttgagcacatgtttcttgtgcaaaccaagaaatccaaagcccatattcccagtcatctaatttatccaactctcacactccaagccaatctttcactgccctaaatcaccccagggccaggtaccagataactggagaccaccaaaattatagctcagaaccagccaaacctaaatactctgcctcgcctgcctttcctgcagaaaccatgataaaggctgtgctcatgctttctgcctcctgactgaccctagtgcttccccaggtggctctgtatggcagattgtgtcccctcctcctggaaactgaaaataataaactcttctttcaatggcattgacccctccgtgtggtcactcagtcacctctataaa

SEQ ID NO: 920062 - DNA, 766 bp, Homo sapiens
tgcagcttggggcccaggaagccccctgcccctgtaggcttgaaagtgcctgctctcaccccctggcctctccctgcttctggcgcctgctccagggtggagcaaagctgtggccaagtccaggcactgttgcaacccggccaggtatgtgcatgctcagagtggtgctgayatgccagccccttgccaccatcgtcccctctggactttgggtatcgacaagcgtaggaggggggccgcaggggctgagggcagcttggcaccagcctgcaggcgcctcttgggacagtcagtttgggtgccgtggatggcatgttaaaggcagacaggttcctaggcagaaaggggtgggtccctggtgaaactttacctcaggccagcgatggcctgaagcctgggggctgggctgccagttctaggtgaagtccgtggcccagagtgagaacttcattgatgactgtttggcaaatttgatggggctttttctaggcccaccatggctgcccatggatgaatcagtatgcagttccctgattctgagcacataaaaatcccaggctcagccagacacacattaatccagatgacctgcttgcagaaaggagctacccactatgggtctcctccgctgagagctggatgcttgttgggacaacctgcctgtggaaaggagctgcccactacaggtctcctcccttctgagttgggcacacattgggacaacctgcctgcagaaaggacctacccactttgagtctcctgagag

SEQ ID NO: 920063 - DNA, 766 bp, Homo sapiens
tgcagcttggggcccaggaagccccctgcccctgtaggcttgaaagtgcctgctctcaccccctggcctctccctgcttctggcgcctgctccagggtggagcaaagctgtggccaagtccaggcactgttgcaacccggccaggtatgtgcatgctcagagtggtgctgatatgccagccccttgccaccatcgtcccctctggactttgggtatcgacaagcgtaggaggggggccgcaggggctgagggcagcttggcaccagcctgcaggcgcctcttgggacagtcagtttgggtgccgtggatggcatgttaaaggcagacaggttcctaggcagaaaggggtgggtccctggtgaaactttacctcaggccagsgatggcctgaagcctgggggctgggctgccagttctaggtgaagtccgtggcccagagtgagaacttcattgatgactgtttggcaaatttgatggggctttttctaggcccaccatggctgcccatggatgaatcagtatgcagttccctgattctgagcacataaaaatcccaggctcagccagacacacattaatccagatgacctgcttgcagaaaggagctacccactatgggtctcctccgctgagagctggatgcttgttgggacaacctgcctgtggaaaggagctgcccactacaggtctcctcccttctgagttgggcacacattgggacaacctgcctgcagaaaggacctacccactttgagtctcctgagag

SEQ ID NO: 920064 - DNA, 719 bp, Homo sapiens
aaatttgatggggctttttctaggcccaccatggctgcccatggatgaatcagtatgcagttccctgattctgagcacataaaaatcccaggctcagccagacacacattaatccagatgacctgcttgcagaaaggagctacccactatgggtctcctccgctgagagctggatgcttgttgggacaacctgcctgtggaaaggagctgcccactacaggtctcctcccttctgagttgggcacacatygggacaacctgcctgcagaaaggacctacccactttgagtctcctgagagccattctgtcgctcagtgaagctcctctctgccttgctcatcctccagttgtctgcatacctcattctttctggatgtgggacaagtgcttgggacctactgaatggtgggactaaaaagagctgtaacacgagcacagtagaaacatgccctccagtcactacgctgcgtgcaacgagaaagagagaagatctgtggcccttctgggattccagagcttggggctacctgagccaggactgtgacatgctgtaacaccctttttgggactctgtggttcctggtatctctgagctttctggtgccatcgttttccccctgtccagatgctactgaagctacgtgttgtatgtctggtccaactgcagccttgcacagagccagcgcctgtgctggtgcctgcctggagctgcctgtcc

SEQ ID NO: 920065 - DNA, 719 bp, Homo sapiens
aaatttgatggggctttttctaggcccaccatggctgcccatggatgaatcagtatgcagttccctgattctgagcacataaaaatcccaggctcagccagacacacattaatccagatgacctgcttgcagaaaggagctacccactatgggtctcctccgctgagagctggatgcttgttgggacaacctgcctgtggaaaggagctgcccactacaggtctcctcccttctgagttgggcacacattgggacaacctgcctgcagaaaggacctacccactttgagtctcctgagagccattctgtcgctcagtgaagctcctctctgccttgctcatcctccagttgtctgcatacctcattctttctggatgtgggacaagtgcttgggacctactgaatggtgggactaaaaagagctgtaacacgagcacagtagaaacatgccctccagtcactacgytgcgtgcaacgagaaagagagaagatctgtggcccttctgggattccagagcttggggctacctgagccaggactgtgacatgctgtaacaccctttttgggactctgtggttcctggtatctctgagctttctggtgccatcgttttccccctgtccagatgctactgaagctacgtgttgtatgtctggtccaactgcagccttgcacagagccagcgcctgtgctggtgcctgcctggagctgcctgtcc

SEQ ID NO: 920066 - DNA, 719 bp, Homo sapiens
aaatttgatggggctttttctaggcccaccatggctgcccatggatgaatcagtatgcagttccctgattctgagcacataaaaatcccaggctcagccagacacacattaatccagatgacctgcttgcagaaaggagctacccactatgggtctcctccgctgagagctggatgcttgttgggacaacctgcctgtggaaaggagctgcccactacaggtctcctcccttctgagttgggcacacattgggacaacctgcctgcagaaaggacctacccactttgagtctcctgagagccattctgtcgctcagtgaagctcctctctgccttgctcatcctccagttgtctgcatacctcattctttctggatgtgggacaagtgcttgggacctactgaatggtgggactaaaaagagctgtaacacgagcacagtagaaacatgccctccagtcactacgctgcgtgcaacgagaaagagagaagatctgtggcccttctgggattccagagcttggggctacctgagccaggactgtgacatgctgtaacaccctytttgggactctgtggttcctggtatctctgagctttctggtgccatcgttttccccctgtccagatgctactgaagctacgtgttgtatgtctggtccaactgcagccttgcacagagccagcgcctgtgctggtgcctgcctggagctgcctgtcc

SEQ ID NO: 920067 - DNA, 608 bp, Homo sapiens
tacaagctagaaaccctggaatgacagtagcatggttcagcacaatacaagtctgaaagcctcagatgcagggaaactaatggtgtaattatcagtctgaggcagaaggcctgagaaccttgggggccattagggtaagtcctggattccaaagggtggagagtctggagttctgatgttcaagggcaggagaagacacatgtcccacctctaggaaatggagaggaggaaatcacctttcctcagtcttttttgttctgtctgggccaccatctgattgggtagtgcctgccgacattgagagaaaatcttcttcacttagttcatggactcatatgtcartcagtctcctctggacacaccctcaaagacacactcagaaataatgctttaccagttctccagatgtttcttaatccagtcaaattgacacctaaaattaaccatcacactgtacttcccctttgctttaatgataaagctctgctttttgtcaggatggtaatgttttcagctaaaaggatatacttatcagcctccctctctcacagctagatacagttatgttactatctgctggctgatgagatgtaagcagagggaattaa

SEQ ID NO: 920068 - DNA, 590 bp, Homo sapiens
cactcttggaactgtacacctattgtaacccttaaggtaaagctaaccaggacagtttctccccagaataagatggcatccttaatgtgaacagttttcccagaatcacagatcaaaacttctctactatcatgaaactcttatctttgaatttttttttcatttcttatgcctctgtgaacaacagaagtgaaagggtggtctattatgtacacttataggctgtacctttatttgtgaaggattttgcggccagccttatacrtgaataacctttaatagataaaagatgaaggccaaatataggtgagaaaggttaatgatacatatgttgcctcataatcagtcaaaactcctattaacctacatcatggattaaagagaatattgccaggaggccttcactcttctagaaggacatcatttgttaggtcctttttccatgatttagaataaaaggcaataatttaaaatgtctccctcataataggctctacagcaatttctactttaaaggctatcattacacaacagactttaaactcttgtgaaagttgtgctaaataatagaattagctaaacagaaaagt

SEQ ID NO: 920069 - DNA, 590 bp, Homo sapiens
cactcttggaactgtacacctattgtaacccttaaggtaaagctaaccaggacagtttctccccagaataagatggcatccttaatgtgaacagttttcccagaatcacagatcaaaacttctctactatcatgaaactcttatctttgaatttttttttcatttcttatgcctctgtgaacaacagaagtgaaagggtggtctattatgtacacttataggctgtacctttatttgtgaaggattttgcggccagccttatacgtkaataacctttaatagataaaagatgaaggccaaatataggtgagaaaggttaatgatacatatgttgcctcataatcagtcaaaactcctattaacctacatcatggattaaagagaatattgccaggaggccttcactcttctagaaggacatcatttgttaggtcctttttccatgatttagaataaaaggcaataatttaaaatgtctccctcataataggctctacagcaatttctactttaaaggctatcattacacaacagactttaaactcttgtgaaagttgtgctaaataatagaattagctaaacagaaaagt

SEQ ID NO: 920070 - DNA, 684 bp, Homo sapiens
ctgacacttgtggcctatggagaaatacatcaaatgtagattataaaacttcaattgtaggggattaatgaaaagaccacttagtcaagcgagtagactcttcatctagctcattctttaatctatttaattttaggtggtttggtttatggggaccctgggtaaggagcatactgcaaactcttgatattatcctcctcatagtcataataatagtctccccagtgcgctgtattctctcaaatgttttaaatgtttgcatgcagcaatctctagaaagtcaaatgctctctcttcaactggaatgacaaaagctgaaagaaatgtgtgaccatgaggacaatgtaacctgtgaatgacatgccaagcccggaaacccaaaatggtgataactgagagtrgtgctaaggccctaagttttggtcacactgttgtctgagtaagaacctggccaaaacggggaatttaaaaaaaaaaaaattgtggaaagccattatttttgactgagctcatttattaggccccaaccgacaaaattaaatggagtcactcatgctacatgtgacataatccaagactttaaggaaacacgtaaatcctagagcagaccagactttgttattctcctgtatacaggccgttccaacataaggaggcaccctctactcaggccttgttccctcc

SEQ ID NO: 920071 - DNA, 684 bp, Homo sapiens
ctgacacttgtggcctatggagaaatacatcaaatgtagattataaaacttcaattgtaggggattaatgaaaagaccacttagtcaagcgagtagactcttcatctagctcattctttaatctatttaattttaggtggtttggtttatggggaccctgggtaaggagcatactgcaaactcttgatattatcctcctcatagtcataataatagtctccccagtgcgctgtattctctcaaatgttttaaatgtttgcatgcagcaatctctagaaagtcaaatgctctctcttcaactggaatgacaaaagctgaaagaaatgtgtgaccatgaggacaatgtaacctgtgaatgacatgccaagcccggaaacccaaaatggtgataactgagagtggtgctaaggccctaagttttggtcacactgttgtctgagtaagaacctggccaaaacrgggaatttaaaaaaaaaaaaattgtggaaagccattatttttgactgagctcatttattaggccccaaccgacaaaattaaatggagtcactcatgctacatgtgacataatccaagactttaaggaaacacgtaaatcctagagcagaccagactttgttattctcctgtatacaggccgttccaacataaggaggcaccctctactcaggccttgttccctcc

SEQ ID NO: 920072 - DNA, 709 bp, Homo sapiens
ccgacaaaattaaatggagtcactcatgctacatgtgacataatccaagactttaaggaaacacgtaaatcctagagcagaccagactttgttattctcctgtatacaggccgttccaacataaggaggcaccctctactcaggccttgttccctccttgcaaaacccattgttctactgttcaccaaagggtttcaagaccatataagtacatttgcaaaatgatagtaacatcaatgactaaagttttggtcaatctcttaaaatagagaaaatgaccaaaaagggggaattgctaatgcaaactaaatatggcctaagaaggactctatacttctatatttgagtccctrtggatgaactgtaacctagcttaatagtcagacaagattgaaaacctaacttaggagtacacacctgtaacaataactgagtgttggccaatcccagtggccatacttcaaccactcatagatggctaagtgttcaaactatgttcaaataaggcaaatgtcaacctgtaaccaatcaagctgtttctgtacctcactgctgatttctgtacatcatttccttttttttttttttttttgtctgcaaatcttcttccaccacatggctgcactggagtctctgtgaatctgctgtgattctgggggctgcccaatttgggaatcattcattgttcaattaaattcctttaaattta

SEQ ID NO: 920073 - DNA, 709 bp, Homo sapiens
ccgacaaaattaaatggagtcactcatgctacatgtgacataatccaagactttaaggaaacacgtaaatcctagagcagaccagactttgttattctcctgtatacaggccgttccaacataaggaggcaccctctactcaggccttgttccctccttgcaaaacccattgttctactgttcaccaaagggtttcaagaccatataagtacatttgcaaaatgatagtaacatcaatgactaaagttttggtcaatctcttaaaatagagaaaatgaccaaaaagggggaattgctaatgcaaactaaatatggcctaagaaggactctatacttctatatttgagtccctatggatgaactgtaacctagcttaatagtcagacaagattgaaaacctaacttaggagtacacacctgtaacaataactgagtgttggccaatcccagtggccatacttcaaccactcatagayggctaagtgttcaaactatgttcaaataaggcaaatgtcaacctgtaaccaatcaagctgtttctgtacctcactgctgatttctgtacatcatttccttttttttttttttttttgtctgcaaatcttcttccaccacatggctgcactggagtctctgtgaatctgctgtgattctgggggctgcccaatttgggaatcattcattgttcaattaaattcctttaaattta

SEQ ID NO: 920074 - DNA, 812 bp, Homo sapiens
gagggtgtaccctgcacagccacctcttacatcagcgtgacctggatgtgagacatgaagacaaaggagatcattttggaactttaagatctgactgtcccactgggtatcagacttgcatggaccttgtaacccctttgttgtggccaatttctccaatttgtaatggctgcatttacccaatacckgtacctccattgtatctggaaagtaactaccttgcttttgattttacaggctcataggtgaaagggacttgccttgtctcagatgagacttgggactgtggacttttgggttaatgctgaagtgaattaagactttgggggactgttgagaaggcatgaggttggtttttcaaatgtgaggacacaagatttggaggggccaggagcagaatgatatggtttggctctgggccctcaaccaaatctcatcttgaattgtactcccataatttccatgcattgtggaagggaccccgtgggaggtaatttgaatcatgggggcggtttcccccatactgttctcgttgtagtgaatcagtctcaagagatctgatggttttatcaggggtttatgcttttgcatcttcttcagtttctcttgccaccaccttgtaaaaattgccttttgcctcctgccatgattctgaggcttcccaagcaatctgaaactgtaagtccaattaaacctctttttcttccaagtctcaggtatgtctttatctgcagcatgaaaactgactaatacaccaagaatctgtttagatatccatatacaaagatttcaaattaaacaacactatacat

SEQ ID NO: 920075 - DNA, 812 bp, Homo sapiens
gagggtgtaccctgcacagccacctcttacatcagcgtgacctggatgtgagacatgaagacaaaggagatcattttggaactttaagatctgactgtcccactgggtatcagacttgcatggaccttgtaacccctttgttgtggccaatttctccaatttgtaatggctgcatttacccaataccggtacctccattgtatctggaaagtaactaccttgcttttgattttacaggctcataggtgaaaggracttgccttgtctcagatgagacttgggactgtggacttttgggttaatgctgaagtgaattaagactttgggggactgttgagaaggcatgaggttggtttttcaaatgtgaggacacaagatttggaggggccaggagcagaatgatatggtttggctctgggccctcaaccaaatctcatcttgaattgtactcccataatttccatgcattgtggaagggaccccgtgggaggtaatttgaatcatgggggcggtttcccccatactgttctcgttgtagtgaatcagtctcaagagatctgatggttttatcaggggtttatgcttttgcatcttcttcagtttctcttgccaccaccttgtaaaaattgccttttgcctcctgccatgattctgaggcttcccaagcaatctgaaactgtaagtccaattaaacctctttttcttccaagtctcaggtatgtctttatctgcagcatgaaaactgactaatacaccaagaatctgtttagatatccatatacaaagatttcaaattaaacaacactatacat

SEQ ID NO: 920076 - DNA, 646 bp, Homo sapiens
aaattttttctgttaagagctaggtagaggccgagacgggcggatcacgaggtcaggagattaagaccatcttgactaaaacggtgaaaccccgtctctactgaaaatacaaaaaaactagccgggcgtggtggccgcgcctggagtcccagctactcgggaggctgaggcaggagaatggcgtgaacccaggaggcggagcttgcagtgagccgagaccgcgccactgcactccagcctgggcaacagagcgagactccgtctcaaaaaaaaaaaaaaaaaaaaaaaaaagaggtagtaggctgggtgcagtggctcacgcctgtaatctcagcatttcaggaggcagaggtgggcaratcacttgatcccaggagttggagaccagcctgggtaacgtggtgaaaccccatctctactaaaaatacaaaaattatccaggcattgtggcttatgcctataatcccagctacttggggggtgagacaggagaattgcttgaactcgggaggttgaagttgcagtgagccgaaatcgcaccactgcctccagcctggatgataaagtgagaccctgtttcaaaaaaaagagaaagagccagataataaatatttcaggctttgcagcccacatagcctctgtcaca

SEQ ID NO: 920077 - DNA, 598 bp, Homo sapiens
ggctgaagaggtggagcaatgatgggatttggcttaactggaggggtaaggaaatagaagggcttctgaattgcttcctcatcaaaactttagggtagtaagcaacctctgaatgtcaggagaaagtgaaggagatattctgaaacttattcaagaagacttttatttcgtctgtggaggtgctgccacatgtggtaatgtcagcggtagcagacatctaagttacactgagttactggtggcatatcaatataggtctgcagcaacttcagttcttgccttctcagaagaaagrattcaactggggtacataaggcagaaggagagactgaggcatgtttcagagcgggagtgaacgtttattaaaaagctttagaacaataaggaaaggaaagaaaagaaaagaaggaaagtacaactgggaagaggaccaaggggttgacttgagaaaccaagtgcacagcttgacctcttgacatggggttttataggttgacatacttccggggtcttgccttacttctctccactcctgaggtcttactgggaagctgctgatcagtttcaggtgttttctatcttttaggagacggctttt

SEQ ID NO: 920078 - DNA, 598 bp, Homo sapiens
ggctgaagaggtggagcaatgatgggatttggcttaactggaggggtaaggaaatagaagggcttctgaattgcttcctcatcaaaactttagggtagtaagcaacctctgaatgtcaggagaaagtgaaggagatattctgaaacttattcaagaagacttttatttcgtctgtggaggtgctgccacatgtggtaatgtcagcggtagcagacatctaagttacactgagttactggtggcatatcaatataggtctgcagcaacttcagttcttgccttctcagaagaaagaattcractggggtacataaggcagaaggagagactgaggcatgtttcagagcgggagtgaacgtttattaaaaagctttagaacaataaggaaaggaaagaaaagaaaagaaggaaagtacaactgggaagaggaccaaggggttgacttgagaaaccaagtgcacagcttgacctcttgacatggggttttataggttgacatacttccggggtcttgccttacttctctccactcctgaggtcttactgggaagctgctgatcagtttcaggtgttttctatcttttaggagacggctttt

SEQ ID NO: 920079 - DNA, 647 bp, Homo sapiens
cacagactgggtagcttaaataatagaaatgtatttcctcacagttgtagagactagaaatccaagatgaagaaatcagcagagttgatttcttctgagggcctctctctttgtcttgtagatggtatcttctccctctttcttcacatgacctttcctctttgtgtgtccgtgttctaatttttttttttatatggacacyattcatgctggattagggcccaccctaatgacctcattttaccttgatcatttctttagcaccgaaatagtcacgtaatagctcctaatatagtcacgttatcaacatatgaattctggggagacaccattcagcccagaaccgatatgttcaattcaagtttgctatgaacctagactaatatcgtggctatgggaataggatgtaatagagtagccaatacaaagaagaatcattaaggttaatcatttagaatgcaaggtagatacatttatttttttaaaccttgtgatgagaaaaaggagctataggacaggacattgttttgaataggaagatgtatttgaaactgttaattttaaggcaggacttgacaatattttatgggtaaatgatattggaggcctacagaaatggatctaggtcaggcctaaacccagtctcc

SEQ ID NO: 920080 - DNA, 658 bp, Homo sapiens
gtattttttgtatagatgggctttcaccatgttgcccaggctggtctccaactcctgagctcagatgaactgccagccttggcctcccaaaatgttgggattacaggcgtgagccactgcacctggcttggggtttataattcttaagatgcatrttttagcaaacacaattagtattttattactgaaccaaaagttttaataccttctaaacaaatactggaagacaactcagcattgatggaatgtgtgtaaacatcagtatttttatatacactacatacatgtatatcagtttatttataaatatcctagaagacttagctattttaggtgtaacaaatagaagttgagtggatgaagtagaaaaaatgaatgattaatagttacctactttatgtattaaataatacatattgttttggtagacaataaaaaatgagtgtttttccctcagattcaattacatttaataaaaagtcagggtacatttctttttttatactcttcagagtttgtgcagttaaaagtaaaaatttatgtatgtaaacaacttttgggagcactaataattttttacattagaagacagaaggctatgttctcatttacttagtttttggacccttggcttggatgtcatactaggtaattttaa

SEQ ID NO: 920081 - DNA, 636 bp, Homo sapiens
gggctaatatccttagcaaactaacacaggaacagaaaaccaaatgccacatgttttcacttataagtgggagctaagtgatgagaacaaaggaacacatagaggggaacaacagacactggggcctgtctgagagtagagggtggaaggagggagaggatcaggaaaaataactaatggatactaggcttaatacctgggtgatgaaataattggtacaacaacagtcccccatgacacatggtyacctatgtaacaaacctgcacatcctatacatgtacccctgaatttaaaatgaaagttacaaaaaaaaaaaaaaaagaaatctgactcattatcattaatacagaaattctttgttcaggtttacttgcttgttcaaccctgtgaatgtaaccaatgtcatgagtggatgccttgctcactatccctatgttccaaaaccccaagccagctcttatagcttcacattgataccctgggcctggccagcatccccttggccttcatggcaatgcccttctcaccctggttggccagcacctcacagtaggccatctccctgtttggcagttccttctccccctgctctgtctctgactaccactcctcttgctttcacactagcacaggca

SEQ ID NO: 920082 - DNA, 592 bp, Homo sapiens
cagtttctatgctttttatatctttttcttgccttctttcactggctaggaacttcactatagtgttgaacagaagtggtgtaaagggatttcccttccctgttttcagtattggggaaagtattcagtatttcatcatttagtatgatgttagctgtagcttttgtcattgttgttaatatccttaacacaatgaatgattctcaaccgagggtgatttcccacctcttccagggacatttggtaatgtcatatgacttttttttttttttttttttttttttttttgagactgagtctckctctatcactcaggctggagtgcagtggcgtgatctcggctcactgcaaactccgcctcccgggttcacgccattctcctgcctcagcctcctgagtagctgggactacaggcgcccgccaccacgcctggctaattttttgtatttttagtagagacagggtttcaccatgttagccaggatggtctcgatctcctgacctcatgatccgcccacctcggcctcccaaagtgctggtattacaggcgtgagccactgcacttggcctgtcatgtgacatttttcattgt

SEQ ID NO: 920083 - DNA, 592 bp, Homo sapiens
cagtttctatgctttttatatctttttcttgccttctttcactggctaggaacttcactatagtgttgaacagaagtggtgtaaagggatttcccttccctgttttcagtattggggaaagtattcagtatttcatcatttagtatgatgttagctgtagcttttgtcattgttgttaatatccttaacacaatgaatgattctcaaccgagggtgatttcccacctcttccagggacatttggtaatgtcatatgacttttttttttttttttttttttttttttttgagactgagtctcgctctatcactcaggctggagtgcagtggcgtgatctcggctcactgcaarctccgcctcccgggttcacgccattctcctgcctcagcctcctgagtagctgggactacaggcgcccgccaccacgcctggctaattttttgtatttttagtagagacagggtttcaccatgttagccaggatggtctcgatctcctgacctcatgatccgcccacctcggcctcccaaagtgctggtattacaggcgtgagccactgcacttggcctgtcatgtgacatttttcattgt

SEQ ID NO: 920084 - DNA, 592 bp, Homo sapiens
cagtttctatgctttttatatctttttcttgccttctttcactggctaggaacttcactatagtgttgaacagaagtggtgtaaagggatttcccttccctgttttcagtattggggaaagtattcagtatttcatcatttagtatgatgttagctgtagcttttgtcattgttgttaatatccttaacacaatgaatgattctcaaccgagggtgatttcccacctcttccagggacatttggtaatgtcatatgacttttttttttttttttttttttttttttttgagactgagtctcgctctatcactcaggctggagtgcagtggcgtgatctcggctcactgcaaactcygcctcccgggttcacgccattctcctgcctcagcctcctgagtagctgggactacaggcgcccgccaccacgcctggctaattttttgtatttttagtagagacagggtttcaccatgttagccaggatggtctcgatctcctgacctcatgatccgcccacctcggcctcccaaagtgctggtattacaggcgtgagccactgcacttggcctgtcatgtgacatttttcattgt

SEQ ID NO: 920085 - DNA, 596 bp, Homo sapiens
tgccgcaacctgcttctgctttgggtgccggcgtctggatgaggggaatgtggtggtggccaaaaatcttggagatgccagcaaccctgaagccccaaagtgggtgttacagcatgctgcagttttggctcagggagccccaaagtctargcccccagaagggttgtagctcttctttccttcctgctgctcacagcacggtgaatggggagcaaggcagtatttcagcctatttgtgctatagctctttcagtcctgctgccccactctggcttgcggcactggggctggcctggccctgccactgcttcccgttgcatggggctgctggacaccagcggagggtggagagttacagtgttacagtagctcctttgtcactgctgtttggcaggtctcgagtttttgtcctgcatccaagaagaatgaggttacgcagacaaccagaggatgagaagggaggagaagagttttactgagccatggaacaagctctcagtggagagctgactcaaggcgggtggtcccccaccagaaggcaggtagtttgccagtgtggctcagaatgggagagtgcatgctgattgggttgtgag

SEQ ID NO: 920086 - DNA, 654 bp, Homo sapiens
ttatggttctaagtttttcctttcacactgctttcactgaatcccataaattttggtatgttgcattttcatcttcatgtgtatctaaaaattttcttttttaatttaatttaatttgtattggttaattttttctagtagtattttttcaacttttattttagattcaggggatacatgtgcagttttgttacatgagcatattgtgtgaagccaaggtttgggagatgattcatcccatcacccaggtagtgggcatactactcaatattttttcaacccgttccctccctccctcactgtcccttctaatagtccacagtttctattgttgtcatctttactgccatgtgtatccagtgattagctcccacttaaaagtgagaacatgcgatattgggtttctgttcctgcatcaattcacttaggataatggcctccagttgtatccatgttgccacaaaggacatgatttcattcttttttctggctgcctagtattccatggtgtacatgtayattttctttatccaatctaccattgatgggtacctagattgattccacgtctttgctattgtgaataatgctgcaatgaatatacaagtgcatgtatctttttggaggatgatttgttttcttttggatatatag

SEQ ID NO: 920087 - DNA, 593 bp, Homo sapiens
gaaacataatttgtttatccacttaactactaaaagatgtttgggttgtttccaatcttttgctattaaaaaggatgctataataaataatcttttccaggactcattcagcatgtacactggtctatctgatggctttactccccaaagaagaactggtgggtcaaaaggtacatgtattttgattaacattgacaatttgccatctgcagaagttgtcctaacctacactcccaccagaattataagtaagaaagctatttcccagaccagtgtctcatgcctgtaatcccagaactttgggargccaaggctggtgaattgattcaacccaggagtttgagaccagcctgggcgtcatcgcgaaatcccatctctacaaaaaatacaaaaattatctgggcgtggtgatgtgtgcctgttgtcctagctactcagaaggctgacgtgggaggatcacctgagcctggggaggtcgaggctacagtgagccgtgagtgatggcaccattgcactctaggcttggtgagagagtgagactttgtctcaaaaaacaaaacaaaacaaagaaagcaagctattttcccagaaag

SEQ ID NO: 920088 - DNA, 593 bp, Homo sapiens
gaaacataatttgtttatccacttaactactaaaagatgtttgggttgtttccaatcttttgctattaaaaaggatgctataataaataatcttttccaggactcattcagcatgtacactggtctatctgatggctttactccccaaagaagaactggtgggtcaaaaggtacatgtattttgattaacattgacaatttgccatctgcagaagttgtcctaacctacactcccaccagaattataagtaagaaagctatttcccagaccagtgtctcatgcctgtaatcccagaactttgggaggccaaggctggtgaattgattcaacccaggagtttgagaccagcctgggcgtcatcgcgaaatcccatctctacaaaaaatacaaaaattatctgggcgtggtgatgtgtgcctgttgtcctagctactcagaaggctgacktgggaggatcacctgagcctggggaggtcgaggctacagtgagccgtgagtgatggcaccattgcactctaggcttggtgagagagtgagactttgtctcaaaaaacaaaacaaaacaaagaaagcaagctattttcccagaaag

SEQ ID NO: 920089 - DNA, 639 bp, Homo sapiens
caaatacaacagtaacagcagccacaacttattaggaacttgtggtgtttttactttctgcttcacactgctttaagtaatttacatgcacacatcttatttagttttaccacattcctgggaggtaagtaatatatcttattgatggcaaaataaagcttagaagaaaacagcatgcccaagaaaataaagccaataagtggtggcccaacattcaaacagaaatttaatagacttcagtgcttccagtagtgtgcttcagtgctcttaaccacgacatatgcttgtcccccatattagtcatctttgtcatcataaagctgggtaacaactcattacgaaacttagtggcttattctcacatttgtaggtctagagggagaatgtgggtctgttggtcttgactccaggctacaggttcacrtaggtcagctccacagaggtttgttctgggacccagagtaaacaggcagtagctaccctgggtatattcttctcaagatagatgaccaaagcacaagactttgaacctgcagaagcatattttaagcctctgctcatgatacatccactaatagctcattggccaatgaacagtcacatggctgagcccagagtcaagaggtggagggcaggctc

SEQ ID NO: 920090 - DNA, 500 bp, Homo sapiens
cttggttttctcttggttgtaggggaggccacatgcagcaacttatccttcactagaaagaatacctcagcaggccccacaccactggacccctagatattttactgaggtagaaggcccctgaattttagtcagatttatttcccatcctctggcacacaaatgtctcagcaataagtccagtgtgtttgctacttcttgctcactggatccaatcagcataacgtcatcaatgtaatggaccagtgtgacatcttatggaaacgaaaagtratcaagttctctctgaataagattatgacacaaagctggagagttgataaacacctgagataggacagtaaatgtgtactgctggccttgccagtgggaggcaaaatgcttctggtgggccttacagacaggaatggagaaaaagtcatttgccaagttaatggctgcataccagctaccaggagatgtgttaattagctcaagcaatgaaaccatatcaggtacag

SEQ ID NO: 920091 - DNA, 823 bp, Homo sapiens
aactagaaaattagtcttgaatgcttacttaaggagtatattattgaatacgtcttgagaggctggcttggaatagagttgattaataaggcccagtagctcatagcaaagaatttattctttatgctgagaataaaggtgagcataattagattaaaatttttttttaatgtttatgggtatacagttggtgtatatacttataggatatatgagatattttgacacaggcatataatacatgataattacctcaggataaatgtgatatccatcacatcacaaacttatttctttatgctggaagcatatcaattatattcttttagattttttaacatgtaaaaaattatkattaactgtaatcaccctgttacagtatcaaatattaaatgttattccttctatttaattacatttttgtacccattaactatctcacttttccctatcccccactcactacccttctcagactctggtaaccatcattctactctctatctccatgaaatcaattgctataatttttagctcacacaaataaatgagaacatgtaaaatttatctttatgtgcttggcttatttcgctcaacatgatgtcctccaattccattcgtgttgttgcaaatgattaaatctcattcttttttatggctaaatagtactccactgggtatatatacattttctttatccatttgtctgtcgatggacacttaacgttgcttccaaattttggctattgtgaatagtgctacaataaacaagggagtacagatatcttttcaatatactgatttcctttcttaggggtgtgca

SEQ ID NO: 920092 - DNA, 823 bp, Homo sapiens
aactagaaaattagtcttgaatgcttacttaaggagtatattattgaatacgtcttgagaggctggcttggaatagagttgattaataaggcccagtagctcatagcaaagaatttattctttatgctgagaataaaggtgagcataattagattaaaatttttttttaatgtttatgggtatacagttggtgtatatacttataggatatatgagatattttgacacaggcatataatacatgataattacctcaggataaatgtgatatccatcacatcacaaacttatttctttatgctggaagcatatcaattatattcttttagattttttaacatgtaaaaaattattattaactgtaatcaccctgttacagtatcaaatattaaatkttattccttctatttaattacatttttgtacccattaactatctcacttttccctatcccccactcactacccttctcagactctggtaaccatcattctactctctatctccatgaaatcaattgctataatttttagctcacacaaataaatgagaacatgtaaaatttatctttatgtgcttggcttatttcgctcaacatgatgtcctccaattccattcgtgttgttgcaaatgattaaatctcattcttttttatggctaaatagtactccactgggtatatatacattttctttatccatttgtctgtcgatggacacttaacgttgcttccaaattttggctattgtgaatagtgctacaataaacaagggagtacagatatcttttcaatatactgatttcctttcttaggggtgtgca

SEQ ID NO: 920093 - DNA, 823 bp, Homo sapiens
aactagaaaattagtcttgaatgcttacttaaggagtatattattgaatacgtcttgagaggctggcttggaatagagttgattaataaggcccagtagctcatagcaaagaatttattctttatgctgagaataaaggtgagcataattagattaaaatttttttttaatgtttatgggtatacagttggtgtatatacttataggatatatgagatattttgacacaggcatataatacatgataattacctcaggataaatgtgatatccatcacatcacaaacttatttctttatgctggaagcatatcaattatattcttttagattttttaacatgtaaaaaattattattaactgtaatcaccctgttacagtatcaaatattaaatgttattccttctatttaattacatttttgtacccattaactatctcacttttccctatcccccactcactacccttctcagactctggtaaccatcattctactctctatctccatgaaatcaattgctataatttttagctcacacaaataaatgagaacatgtaaaatttatctttatgtgcytggcttatttcgctcaacatgatgtcctccaattccattcgtgttgttgcaaatgattaaatctcattcttttttatggctaaatagtactccactgggtatatatacattttctttatccatttgtctgtcgatggacacttaacgttgcttccaaattttggctattgtgaatagtgctacaataaacaagggagtacagatatcttttcaatatactgatttcctttcttaggggtgtgca

SEQ ID NO: 920094 - DNA, 823 bp, Homo sapiens
aactagaaaattagtcttgaatgcttacttaaggagtatattattgaatacgtcttgagaggctggcttggaatagagttgattaataaggcccagtagctcatagcaaagaatttattctttatgctgagaataaaggtgagcataattagattaaaatttttttttaatgtttatgggtatacagttggtgtatatacttataggatatatgagatattttgacacaggcatataatacatgataattacctcaggataaatgtgatatccatcacatcacaaacttatttctttatgctggaagcatatcaattatattcttttagattttttaacatgtaaaaaattattattaactgtaatcaccctgttacagtatcaaatattaaatgttattccttctatttaattacatttttgtacccattaactatctcacttttccctatcccccactcactacccttctcagactctggtaaccatcattctactctctatctccatgaaatcaattgctataatttttagctcacacaaataaatgagaacatgtaaaatttatctttatgtgcttggcttatttcrctcaacatgatgtcctccaattccattcgtgttgttgcaaatgattaaatctcattcttttttatggctaaatagtactccactgggtatatatacattttctttatccatttgtctgtcgatggacacttaacgttgcttccaaattttggctattgtgaatagtgctacaataaacaagggagtacagatatcttttcaatatactgatttcctttcttaggggtgtgca

SEQ ID NO: 920095 - DNA, 617 bp, Homo sapiens
ttattgacatatcattgctcttagtagtgtctactgactctttgaattttgatggtatcaattgtaatgtctcccttttgatttatcgttttgtttatttggatcttctcttatttttagcccattagtctgatgaaataattgtgggttttgtttctctccaagaaggcaaatttttgttttgttgactttttgtatttttttgtttcagttccacttatttctgttctcatctttattatttcttttcttctactaattttgggtctgctttgctctcgtttttctgattctttcagatacatcattaggttgtttattttacattttcctacttttttgatgtaggtgctgattgctatacacgttcctcttagcatggcttttgccatatctcataagttttggtatgttatatttccatttttgttttcatttatttcaagaartgtttaaattgatttgaaaagtgttattggcttctagttttattccaatgtggtcagaaaggatacttaatatgatttcaattttcttgaaatttttaagccttttattgtggctcaacgtttggtctatccctgagaatgattcctgtgctgaggagagtaatgtgt

SEQ ID NO: 920096 - DNA, 769 bp, Homo sapiens
attcataaaacaaaaacaaaatgttgtacaaaagaattattcaggaaaacacaaaagaacccataggcattaaaacatgtcaccagaaaagaaaaactcaataaaaaggctgaaagataaaactgagaaaattccctagaaagtagaacagaaggagaaagaggaaaaaaaaaagcaggaaggaaacaaagaaaatcagacgactggttcagaatatctatcatgtaagtaacaaaaasttcagaaagtaagaaaagaaaaatacgaagaggaagaaataaaatacaatggagtcatctagcattcaagaacatgagtttccagcctgaaatgtccaccaagtgtccagaacagtgagatgaaaaggcactcccatcatgaaactgaaaacaggaacacagagatgatcacacaagttgccagaaaagggaaggaggggtaatacattcaagaatcaagaattagaatggctccagggtccccagagcaattttggaagtcttaagacaaagaaaaaaaaagtctccaaaattttgagggggaaacctagacttttataccagccaaactactaatcaatttgaaactagaatgaagacattttcgcacatgcaatatctcaaaacaaaaaatttacctcctatgtatttttgcaaaatgctactgccattcatggctgccatcagaaaaagaatgtaaaacaagaaaagatatgacatgatgcgcagaaaacagacatcccacagaaaggataggcagtgaaagaaaa

SEQ ID NO: 920097 - DNA, 552 bp, Homo sapiens
gattttttaaaactgcctttttttctaagaaattataaattactttataatagtagagcttaatttttttttcaatgactagtaatgggaagggcaaacaagaatcaaaagattttctaccctcaaatcaaactgctcaccaaggaataactagtgcagtgaaaggccataaacatcataaagaaaagacataaactgttgtgaacttgatgatttgcacagatgaaactttaaaaactaactcttttaaggcacttaagaaacataccactaaatcttgatcttgaagcaagttacagattgcttcataaagcatgggtcttaagtcagacttgaatttcacagaaatccactgaccgatgagccaaatcaccctgcgtcgcaatggcttawacctaaacaggaaaaaatcatgaaattaaaatgttaaatattttaagaggtctatttcttttagtataatttatcatttaaatctaaaatgtagtaagaatgcaatctgcatttttaatataaaagcttaaaagcaggtgtgctggctcatgcttataa

SEQ ID NO: 920098 - DNA, 588 bp, Homo sapiens
agatggggcggcctggcagaggggctcctcacatcccagacgatgggcggccaggcagagacactcctcacttcctagacagggtggcagccgggcagaggctgtaatcttagcactttgggaggccaagcaggtggctgggaggtggaggttgtagtgagccgagatcacgccactgcactccagcctgggcaacattgagcattgagtgagtgagactccatctgcaatcccagcacttcgggaggccgaggtgggcagatcactcgaggtcaggagctggagaccagcccggccaacacggtgaaaccccgtctccaccaaaaatacaaaaaccagtcaagcgtggcggcgcgtgcctgtgatcccaggcactcggcaggctgaggcaggagaatcacgggagcccgaggcagggaggttgcggcgagccgagatcaaggcagtacrgtccaacctcggcaacagagggaaaccgtggaaagagagagaagagagaatagagggacaattttttattttttattgtagaaatctttcacctccttggtttaatttattcctatgtattttatttttcatagctgt

SEQ ID NO: 920099 - DNA, 707 bp, Homo sapiens
agaacctgtcaggctgtaatagcagtataaaggaaaataaaaaatctcaggagattcaacctccttatgccaaagggaaagtaaagcctggaggctgagtcatgcaacgccctcttccaaatgaatagctgttactagcactatgcatctgccagattcctgcagaaaggtaaaaaccccaggcayctgggaatgacagccctcacagatcattcataagtaaattcttttctggcctcccataaacaaggaaacgccaattgtaactttcgatttgccatctaagtttagctcctaaaactaaagtctgttcaattctacactgataatgtcaattgcaagcctatcttttcagatgtggaacaaagacaagaagagatcaatcattcctccactcacccagattggtctgcataatcgattctttgcttactccctttttttaattcagacattcaccttatcatatataaagtgtagatttactgggcactagctaaagtctcacaagaatgtagccatttgccttactgcctacctgtccctcttcctagatgctttcccctcctgtataaatgtagaaatactaaacttcccgaaaacatctttggaaagaacagccacagatgtgtctgtagcttgtgcttttctcaggcacaccataaagctggcttaataaacctcgattgattgagatccttgccttg

SEQ ID NO: 920100 - DNA, 717 bp, Homo sapiens
tgggacagtcgtgaagagccacatatggcaatgtcatctctcaggaacccaagacgccaaggcccctcactgtaatgtggcaataacgccagctagcatgcagaactgttgtggggtaatgaatggaagctaatgtatgagaaggagctgttacactccaggactctagataccaaattttatsgttatcagtttcacagcaaaaaaaaaaaaaaaaaaaaaagaaagtactcttattctcaaattattcttattagttctggtgtgcacttacatgagaaatggcaaagggatattctgcttgcagtcttttgccctctggcaaaaactttccagacagggtgtcatcgtgtgcagcttccgtgatgcagtttgatcctgataggtaacaagagtgacacgttttatcagaatctttttacatggctcaaggtcacttccaccgacaccagtgctattaatatttcccccattaagccaacccgtcctaagagccaaagagaataccatagttccaggtttcggtttgaaggtgctgatggatgagagtagaagggagtgaatgaggaagcccagaccttcctgcaggagcagggaagcaagacccaggccagcactgcccaccccccaatagccttcccaagggtgaggggcagccatgcggaaactggcactcactaggccaagacagcacaggcctccaaccttcagacaaaa

SEQ ID NO: 920101 - DNA, 735 bp, Homo sapiens
ttctgacttttcactactatcccccacaggggcggggctccaactccaggtaaccagaccaggcaacctggacttccaattagcaggggagtccccaagccagcctggccaatctcggccggctagccaagacgaccagacgtgacgtcagacatgattaagttggcgcgtcacctagacgtcagcctcttacctctcggacgtcccgtcccaggagcaaaactctagtgactttgggcccgcccccgtgagagtggagggcggccgatgagggcggttctgaagggaacaagaccaatgagacgakcccggggcggggcgcggggccggagggtggggcgggtggcggcggtggcagtccgaggtctggctccgcgcagtatatgacagtacgtcagcagcgggatggccctagcagtggcggcggctgcagaagcccaagcagccgcggccgcagtggaggctagagccggagcggcggcggcggcggcaccccggggagtttaagatggcggcgggggggacagggggcctgcgggaggagcagcgctatgggctgtcgtgcggacggctggggcaggacaacatcaccgtactgcatgtgaagctcaccgagacggcgatccgggcgctcgagacttaccagagccacaaggtgagcgggccggccggcaggctgggctcagagaggcagagcgcacccctcacggcctggccgcgcccgggtgcggggcc

SEQ ID NO: 920102 - DNA, 596 bp, Homo sapiens
gaggaagggtggcctggcatggggcattggagcccatattaggtaaggaggcatccgtgtgatggggttggtgacctggcatggagcatcagagcccagacaaggtgaggagggcatccatgtgtgtgcagcctggtataaggtgttcacaaagggcaagtgagataaagtacacaaagaggaaggtcttgtgcagggctttgagcccaggtgggagaaggggcagaaagcaaggaaatgttcaaaggatgataggaatatgtcaaaggctagcactttggaagggcgaggtgggggaatagcttgtgtccaggagtttgagaccagcctgggaaacgtggtgaaactctgtctctacaaaaaatacaaaacaaattagccaggtgtagtggtgcatacctgtggtcccagctatttgggaggctgaggtaggatgatcacctragcccaggaggtaggggttgcagtgagctaagatcatgccactgtactccagcctgggcaacagagcgtgagaccctgtctcaaaaaaaaaaataataaaataaccgcttcaccaaaacatattaattataaaggggaaaaaaatagtaaca

SEQ ID NO: 920103 - DNA, 583 bp, Homo sapiens
gctagcatgcgtactccttcccattatttgggtgtctacacaaatatccttcctcagagaggagttcctggtctcctcatctaaaatagcagctccccacacacctcttagacatttatttgctccatagcacttataactgaactgtatttaggtatttataggccatcccagaccctccatgtacaatccaagaggtcagagacattktcttacttaccatagagtgaataagaaccacacaaaacacagagaagatactggatagagtattgataaaaggaagaaacgcattatctctttcttttcttttcattttagtttttatgttgttaggtatattagtattatcccccagtaattgtttgtgacaataaaactttattttaacttaaccttagtataactttataaagtaggttaatcatagtatctttttacttatttgtatgtttaaagtggcattgtcctatatcacaaaatgtatctttaatggcctaaaaaatacgaagatattggaatcatattctcatcaatcatagcccaatatgaaagacatacttgttgaattctatgctttttc

SEQ ID NO: 920104 - DNA, 614 bp, Homo sapiens
ccgcattcacccgtgcaagcttctgtgtctgcagctcaattttacaggctgctgtttgttagaaaagaaatgattcaggggctgcttttcattaaaaggaaaccttactgaggacttccttaccctcactgtctgcctaaataatttcttctttactcctatatcaccggcatcagaggccagcagaagtctcagtgatcgggcaggacaaaggacatttctgcagagaatactgaaggtccaggagacagcacagtgggacatatgtgggcccctgccccatcattaggaggaagtgtargcttttctgaggacctggatgccataccatcttgagacagagaatgaggaaccaacccttgacaagagagagatggccctggtagagaatttgaaccttgaattggattgaatatttatccaaaagaaattgaaccagcactagagagactgttttgaactagaagtaaccaagttaccttaactggaagttaggatttttccacccctgacatcagtgggacaagggcacatgagcaagatatttacggacaaagaagaacgttcatgttttgtacacctgctttgtagtatgttgcagataccgttggttc

SEQ ID NO: 920105 - DNA, 657 bp, Homo sapiens
acgtgtagcaatatggcagcctttaggcaagtttagatgaaatatttcagctatgtgtaggatttaagcttccaggagtttatattctgacatttccctctttctccctcagggaaagaaattctattaaaatccaaattgaaaaatggagaaaaaaatgagatctcaatttgcagcaggaaatttttggcatgactaggcttagggagacaaaagacaagtttgaagagctaaatctgaattaatctctacatctctaatcaaacaggtttatgctttccttcatccagttaaacaaacaaactaaaattctatgggcatacctacacacataattgttcttttgttataatattttctctgttataattcaagataaaaataacatactaggaaaggttttggctatttgctcgataaactaagatatgtcagaagtgattttcaacatcaggctattaataatatttgatgggaataaaggttgttatggtgatctctgaattccyttttgtcagtgataaagtctacaccaggatatcagcctgtttaaatgcttgaagaaatgttcgtgtagttctgtctgcatgcaatgggctcctgtgtatgaaatttctgggtacatgcccaataggatcccatcagattctttttttc

SEQ ID NO: 920106 - DNA, 615 bp, Homo sapiens
tggtattggccaagcaagggattggggggcaggcaggttaaacattgtggtaaaaaatatacataccaaaatttaccatttaactatttttacatgtataatttaacggcattaagtacaaccatcagcactatccatctccagaacattttcatcatcccaaactgaaactttgtacccattaaacaggaactccccattccccactccccccagcccctgtaaaccactgttacactttctatgaaagaatgcatttgactattctgggtacttcacataaatggaatcatactgtgtccagaattggttccttcyagtgggttcttggtctcactgacttcaagaatgaagctgcagaccttcgcggtgagtgttacagctcttaaagatggtgtgtccggagtttattccttcagatatgtccagagtttcttccttccagtgggctcgtggtctcgctgacttcaagaatgaagctgcggaccttcgtggcgagtgttacagctcttaaaggtcgtgcggacccaaagagtgagcagcagcaagatttattgtgaagagtgaaagaacaaagcttccacagtgtggaaagggacccaagcaggttgctgc

SEQ ID NO: 920107 - DNA, 615 bp, Homo sapiens
tggtattggccaagcaagggattggggggcaggcaggttaaacattgtggtaaaaaatatacataccaaaatttaccatttaactatttttacatgtataatttaacggcattaagtacaaccatcagcactatccatctccagaacattttcatcatcccaaactgaaactttgtacccattaaacaggaactccccattccccactccccccagcccctgtaaaccactgttacactttctatgaaagaatgcatttgactattctgggtacttcacataaatggaatcatactgtgtccagaattggttccttccrgtgggttcttggtctcactgacttcaagaatgaagctgcagaccttcgcggtgagtgttacagctcttaaagatggtgtgtccggagtttattccttcagatatgtccagagtttcttccttccagtgggctcgtggtctcgctgacttcaagaatgaagctgcggaccttcgtggcgagtgttacagctcttaaaggtcgtgcggacccaaagagtgagcagcagcaagatttattgtgaagagtgaaagaacaaagcttccacagtgtggaaagggacccaagcaggttgctgc

SEQ ID NO: 920108 - DNA, 688 bp, Homo sapiens
cccctgtaaaccactgttacactttctatgaaagaatgcatttgactattctgggtacttcacataaatggaatcatactgtgtccagaattggttccttccagtgggttcttggtctcactgacttcaagaatgaagctgcagaccttcgcggtgagtgttacagytcttaaagatggtgtgtccggagtttattccttcagatatgtccagagtttcttccttccagtgggctcgtggtctcgctgacttcaagaatgaagctgcggaccttcgtggcgagtgttacagctcttaaaggtcgtgcggacccaaagagtgagcagcagcaagatttattgtgaagagtgaaagaacaaagcttccacagtgtggaaagggacccaagcaggttgctgctgctggctcaggtggccagcttttattcccttatttgggcctgccgatgtcctgctgattggtccattttacagagtgctgatttgtccattttacagagtgctgattggttcatttttacagagtgctgattggtgcgtttacagtcctttagctagacccagagtgctgattgatgcatttttacagagtgcggattggcgcatttacaatcctttagctagacacagagcgctgattggtgcgtttacaatcctctagctagacagaaaagttctccaagtcccca

SEQ ID NO: 920109 - DNA, 688 bp, Homo sapiens
cccctgtaaaccactgttacactttctatgaaagaatgcatttgactattctgggtacttcacataaatggaatcatactgtgtccagaattggttccttccagtgggttcttggtctcactgacttcaagaatgaagctgcagaccttcgcggtgagtgttacagctyttaaagatggtgtgtccggagtttattccttcagatatgtccagagtttcttccttccagtgggctcgtggtctcgctgacttcaagaatgaagctgcggaccttcgtggcgagtgttacagctcttaaaggtcgtgcggacccaaagagtgagcagcagcaagatttattgtgaagagtgaaagaacaaagcttccacagtgtggaaagggacccaagcaggttgctgctgctggctcaggtggccagcttttattcccttatttgggcctgccgatgtcctgctgattggtccattttacagagtgctgatttgtccattttacagagtgctgattggttcatttttacagagtgctgattggtgcgtttacagtcctttagctagacccagagtgctgattgatgcatttttacagagtgcggattggcgcatttacaatcctttagctagacacagagcgctgattggtgcgtttacaatcctctagctagacagaaaagttctccaagtcccca

SEQ ID NO: 920110 - DNA, 688 bp, Homo sapiens
cccctgtaaaccactgttacactttctatgaaagaatgcatttgactattctgggtacttcacataaatggaatcatactgtgtccagaattggttccttccagtgggttcttggtctcactgacttcaagaatgaagctgcagaccttcgcggtgagtgttacagctcttaaagatggtgtgtccggagtttattccttcagatatgtccagagtttcttccttccagtgggctcgtggtctcgctgacttcaagaatgaagctgcggaccttcgtggcgagtgttacagctcttaaaggtcgtgcggacccaaagagtgagcagcagcaagatttattgtgaagagtgaaagaacaaagcttccacagtgtggaaagggacccaagcaggttgctgctgctggctcaggtggccagcttttattccyttatttgggcctgccgatgtcctgctgattggtccattttacagagtgctgatttgtccattttacagagtgctgattggttcatttttacagagtgctgattggtgcgtttacagtcctttagctagacccagagtgctgattgatgcatttttacagagtgcggattggcgcatttacaatcctttagctagacacagagcgctgattggtgcgtttacaatcctctagctagacagaaaagttctccaagtcccca

SEQ ID NO: 920111 - DNA, 724 bp, Homo sapiens
actccccattccccactccccccagcccctgtaaaccactgttacactttctatgaaagaatgcatttgactattctgggtacttcacataaatggaatcatactgtgtccagaattggttccttccagtgggttcttggtctcactgacttcaagaatgaagctgcagaccttcgcggtgagtgttacagctcttaaagatggtgtgtccggagtttattccttcagatatgtccagagtttcttccttccagtgggctcgtggtctcgctgacttcaagaatgaagctgcggaccttcgtggcgagtgttacagctcttaaaggtcgtgcggacccaaagagtgagcagcagcaagatttattgtgaagagtgaaagaacaaagcttccacagtgtggaaagggacccaagcaggttgctgctgctggctcaggtggccagcttttattcccttatttggscctgccgatgtcctgctgattggtccattttacagagtgctgatttgtccattttacagagtgctgattggttcatttttacagagtgctgattggtgcgtttacagtcctttagctagacccagagtgctgattgatgcatttttacagagtgcggattggcgcatttacaatcctttagctagacacagagcgctgattggtgcgtttacaatcctctagctagacagaaaagttctccaagtccccactcagcccagg

SEQ ID NO: 920112 - DNA, 803 bp, Homo sapiens
cagcagacactctacaagccagaagagagtgggggccattattcaacattcttaaagaaagaattttcaacccagaatttcatatccagtcaaactaagcttcataagtgaagaagaaataaaatactttacagagaagcaaaggctgagarattttgtcaccactaggccagccttacaagaggccctgaaggaagcactaaacatggaaaggaacaaccggtaccagctactgcaaaaacatgcgaaattgtaaagaccatcaaggctaggaagaaacagcatcaactaacaggcaaaataaccagctatcatcataatgacaagatcaaatgcacatgtaacaatattaaccttaaatgtaaaggggctaaatgctccaattaaaagacacagactggcaaactggataaagagacaagactcaccagtgtgctatattcaggaaacccatctcacgtacagagacacatataggctcaaaataaagggatggaggaagatctaccaagcaaatggaaaacataaaaaggcaagggttgcaatcctagtctctgataaaacagactttaaaccaacaaagatcaaaagagacaaagaaggccattacataatggtaaagggatcaattcaacaagaagagctaactatcctaaatatatgtgcacccaatacaggagcacccagattcacaaaacaagtccttagagacctacaaagagacttagactcccacacattaataatgggagactttaacaccgcatagtcaatattagacagatcaatgagacagaaagtta

SEQ ID NO: 920113 - DNA, 717 bp, Homo sapiens
atctgagtggaagtgtggcctgatcacccacggcgtgcctgtattggcacttttgttctggttttgacttggcttgacttggtaagactagtctttggaacttgccccactccatctgagtggaagtgtggcctgatcacccacagcgtgcctgcattggcacttttgttctggttttgacttggcttgacttggtaagactagtctttggaacttgccccactccatctgagtggaagtgtggcctgatcacccacagcgtgcctgcattggcacttttgttctggttttgacttgacttgaattgctggatactttggttttgattttgacttggcttgaattttttggtactcggattttgaatttcgtgattttggtttggtataaacggtaaaagtgtgtgtgcagcctctttacccgttctttttcttgtggtgagtgtgtgtggtgtgagcgtggtattttgtctcggaaaaaaaacatgggtcaggcacaaataagcccaccccactaggaactatgttaaaagaaaattttcaagaaagaatttaagggagattacggtgttactgtsacaccaggaaaacttagaactttgtgtgaaatagactggccagcattagaggtgggttggccatcagaaggaagcctggacaggtcctttgtttcaaaggtatgacacaaggtaacctgtaagccaaggcacccagacca

SEQ ID NO: 920114 - DNA, 608 bp, Homo sapiens
ggaaagcccctctgagtccggagggatgaggacagagggattctcgccctctaagctactctgcgggctggctgattcttcctggtagggggcggtcctgtgcagtctagattatttagcagctctctggcagcccaccgcccccccagcctcccagtggtgacagccaaatctctctccaggcacgggccaggtgtcccctggggaaaaatcgaccccagatgagaactgtactttcccaaacagagcttccaggtggcgtctggggtagatatttaggatcctgctgttctatggactctgttctctcagcctggaatcctcttcccgcatagcacaatcccccaccagccctgcaatcttccagaactaaacccacacatcacctccctcaggaagtgtcctgtgggccccccatcttatgattttggcccccacggatgctgtggtaggtaaaataaagcccctttggccagatatggtggcttacacctgtaatcccaacattttgggacgccgaggagggaggatcrcttgagcctaggagttagagaccagcctggacaacatagcaagacacagtctctacaaaaaaaaataaaaaaatt

SEQ ID NO: 920115 - DNA, 633 bp, Homo sapiens
aaaataatattgaaaaagagcagagaagaagttctcacaattgctgatttcaaaacatattacaaagttacagtaatccaagtagtgtagtactgccataaagatagacacatggaccagtggaatagaagastgagcccggaaatagacttttgcattatggtcaaataaattttgatgacagtgaaatgggaaagttccctgaccccccctcacagggtatgtgacaagggtgtggcttgtcagtttggccgcagcctccgctgctgctcaaactccttacagaagggggagcatgcagacgggcaggtgcatgagcctgggtgagtgctttggggctctggccccacagcagtatataagggtgggtgcctgcaactcctaaagcccaagtgagcatggtgtgtgttacagtgcactcttttagctttgcaatctacagacggcttaagtgttaaccagctcaacgccctcttggtacccaggttcttgtctggcatccagaaagaaccaggtcacacatagacttgaagatggtgaatgtgggggttttattgagtggtggggatgggatgcatggggagctggaaaggagacggaatgggaagatggtcttcctggagttcagccatc

SEQ ID NO: 920116 - DNA, 695 bp, Homo sapiens
gttccttcctgagaccaagccagtccttcataatttggccaaacctttgttccgagggctaggaggtgtttttcctccagattctgagggtcaaagcagactcagtggttcaggatacacaggctaggaggtgtttttcctccagattctgagggtcaaagccrtctcagtggttcaggatacactccagaggagaataagctgggggtggtgaagagagctggttgcccattctgaaagacagggaaatagaggtgtccctcatttcccttccttctttcaatgaaaactcagggtgtgagggagagagaaagcaagggactttctcttccatctgttgtccctgagtcctggcaactttatggatgccacccacaggtgccactgtggtctgcacccgtgaagcagggtggggctagagaataggaattatctcccctcacctatgcctctatttcccctgctgttgaaaacctttgagttccctgggcctcatttatgcctggagcatggcctccctccatgaagtgggggtttagtcagcaggaatttgtcctgcccatttacattgtgcctgttgcctgacttttgatccctcagatcgggcagatcgggttttcctttctaggccctcagcctgaaacctggaattgagtttgggacaaaaacggatttcaggggctgcaggtatcttg

SEQ ID NO: 920117 - DNA, 609 bp, Homo sapiens
acccacaggtgccactgtggtctgcacccgtgaagcagggtggggctagagaataggaattatctcccctcacctatgcctctatttcccctgctgttgaaaacctttgagttccctgggcctcatttatgcctggagcatggcctccctccatgaagtgggggtttagtcagcaggaatttgtcctgcccatttacattgtgcctgttgcctgacttttgatccctcagatcgggcagatcgggttttcctttctaggccctcagcctgaaacctggaattgagtttgggacaaaaacggatttcaggggctgcakgtatcttgtttagattgtctcaaatgggccctgccgaatttgcagttatcagccagcaggggtcgctcctccattattttctctatcagaagcagcgtgctgggaaaaggaaccctctcgattagaaaaggaaaaaaataaaagaaagaaaaacacagcttaaggggcaaaaaggggaggtcctggggaaagaacctcttgctctgtgcaaataggttcctttaatcattatagccttcccccggttcaggccaggctgaactccttggccaggggagaaaaagttccactg

SEQ ID NO: 920118 - DNA, 637 bp, Homo sapiens
gtggggggctggtggagggatagcattaggagaaatacctaatgtaaatgatgagttgatgggtgcagcaaaccaacatggcacatgtatacctatgtaacaaatctgcatattgtgcacatgtaccctagaatttaaagtataatttaaaaattttttttttctgtgggaccatactatttgtttgatttttctcttcccattagaattcaagccatgtaacaatctttgacttaaaggtgaaaattgcattgggatattttttctatcttgatatataggaaggrtacacaattgtcagtatagcctctgaactaacatcttttcttcacaaaattagttttctagaaacaagaaatattctatgtgaaatcatgtatagtagggttaaatatttattttcgatacttatctattcaaataaaaaggtttctttacatcctataatttatatgatcttttcaatgccttgacattgtaggatggaacagagtccccatgtcctcccatccacaccttactatgttcatttgcaatacagtaaactcttcaaatacagcaatttaagtccttttattccagttaacttggaaacttaattctttttgggatgacttaatttctcaaatgttttttc

SEQ ID NO: 920119 - DNA, 784 bp, Homo sapiens
atttctccatcctctgctggagtctggctgagtccggggatttttatgggcctcaaaggagaggaagtgcatgctgactggtccatggtaggccatgggcaggcccaggaaaaagtaccacaagttccccctgtggtccaggggcctggtggcctggcccccagacttcaggccctccctggtttgaaggtgggacttcaccagggtccacccccttctgcccaggagcctgcctgcctcctgctgctgttcatggcgcccaggctattcatgccaaggggcacctgcaggccagtgctgggcctgttctcagcacttccttggcctctttcccatgcttgtcagtacccaaagtctggagggggccgaggtggcagagggctggtgtgtcagtgctgcttcaagagtgtgcacacccaacggggctgtgacagcacccatggtcagcctcaactccaccccatgatcagagggtgtgccaacaacaggaagaggccaggaagcaggagcagacacctgcaygggaaaagggggccttcttgggcccgccaaaagtgcagagatgcctgggtccgcagccgcaacctgggtggctgcagccactcctgggagggtggggctcctgcctgcttctggctcctgctagctccctatagtgcagcaccaccccgggcccagctctgccttagggcccctctctgcccgcccctctgtacccgaccatgctgctccccagccagtgggcagcaggctgtggcacgggtgggtgctcctaggggtgggc

SEQ ID NO: 920120 - DNA, 647 bp, Homo sapiens
ggttctattctccccatcactttcgggtacaccaatcaaacgtagatttggtcttttcacatagtgccatatttcttggaggctttgtttgtttctttttactcctttttctctaaacttctcttcttgctttatttcattaatttgatcttcaatcactgataccctttcttccacttgatgaaatcagctattgaagcttgtgcatgcatcacgtagttctcrtgccatggttttcagctccatcagttcatttaaggtcttctttacactgtttattctagttagccattcgtctaatcttttttcaaggtttttagcttccttgcgatgggttcaaacatcctcctttagctcggagaagtttgttattaccaaacttctgaagcctactcctgtcagctcgtcaaagtcattctccatccagctttgttcctttgctggcaaggagctgcgatcctttggaagagaagaggtgctctgatttttagaatgttcagcttttctgctctggtttctccccatctttgtggttttatctacctttggtctttgatgatggtgacctacagatggggttttggtgtggatgtcctttttgttgatgctgatgctattcctttccgtttgttagttttccttctaac

SEQ ID NO: 920121 - DNA, 579 bp, Homo sapiens
gagcaacccttgacccagaatgatctttccctatttgtgaattctgccctttttgcagagcttgcctagccagcctaattcatcaaagcaaccctggctatccttagaattatggatgtcacaaatagctcaactttgaatgtgaaacaagaaaggatcagtagcaacagaaaggaaggagaagaaggggtcactgcaaggagagctgtacagtaggaggctgcctgctctactgcaccatgtagggctggcaccacctgtgtcctcctcatgtatacagatactgtgggtacacctacatgcacacacacactcaaatagcttacatagtcctgtagaatccagttgagattctatagtactatagattcacttctaggcagagacgtatggcctcttttcagcactctctggttccgttcagaagcaatsccacccccttgctaatgcttactgatgcccatcatgatctagctccacccatcaaaagatggtctaagaagaccattgatataatagaagaatgaatatattaatacatatgtttctatgcatcttcatgagttatgctagctccta

SEQ ID NO: 920122 - DNA, 567 bp, Homo sapiens
gggtgccatgtcctgaggctggacaggtgttggggggaccctgggcccagcccacaaaaccatttttcctccaaggcctctgagcctgtgacaggagggcctgctgccaagatctctgacatgccctggagacattgtccccattgtcttggtcattaataatgcagctcctcattgctcattcaaatttctgcaccccagcaggcttgaatttttccccakaaaatgggtttttcttttctatcacatcatcaggctacaaattttccaaacttgtttgctgtgcttctgttttaaacataagttccaatttcaaaccatctctttgtgaatgcataatactgaatgatttcagaataatccaggtcatgtcttgaatgctttgctgcttagaaatttcttccaccagataccctaaatcatctctctcaagttcaaagttccacagatctctagggcaggggcaaaatgccaccagtctctttgctaaagcatagcatgagttacctttataccagttcccaacaagtttctcatcttcatctgagaccacctcagcctggactt

SEQ ID NO: 920123 - DNA, 727 bp, Homo sapiens
agatttaaatcctggttaatactctgaagatcttgttgtctccatttcctaataggaaagcatccagtttagaaataatatataaaaatacctgagtcattttaatagcactatgtaaaagtctaataattataccactagtgagatctgaccagtgcctaatttggaacttgaaatgggagcatttcacctgtgttttacgttaactttaatattggattcggtaatctgtaaagttgaacaggatgtgggtgatagcatcatgtgtttcctcgacaccgtctttgttcttcatgtttatgtgttataaaatttaaattcagtacaaccataacaaggtagaattctgcagatgggcttgtggaggttcagtgaatctggtgtccctgtggcctaaagtcttttatttatttatttattttttgagacagggtctgtctggctctgtcacccaggctggagtgtagtggcacaatctcggctcactgcaacctccacctcctgggctcaattgatcctcccacctcggcctcctgagtagctgggactacaggagtacactaccacacccsgctaagttttgtatttttttttgtagagacagagtttcgccatgttgcccaggctgttctcaaactcctgggctcaagtgatccactcgccttggcctcccaaagtactgagattacaggcatgagccacccctcccagccccaaagtcttaatt

SEQ ID NO: 920124 - DNA, 685 bp, Homo sapiens
ctgtctcctgctcgtctctgggcaatggaatgtctcggtgtaaagccaattgtatattccatctactgagataggggaaaaccaccttagggctggaggtgggacatgctggcagcaatactgctccttaaggcattgagatgtttatgtatatgcacatcaaaagcacagcacttttttctttaccttgtttatgatgcagagacatttgttcacgtctttaccttctgaccttctctccactattatcctattatcctgccacacccgataatgatcaataaatactaagggaactcagaggacggtgccggcgtggatcctccttatgctgaacgccagtcccctgggcccctttttctttctctatactttgtctctgtgtctctttcttttccaagtctctcgttccacctaacgagaaacacmcacaggtgtggaggggcaacccaccccttcaatagaatgagatagggggtcagcacaagatacaggtcataaagaccttgctgctaaaacaggttgcagtaaagaagctgaccaaaactagacggctacaagaatgacctctggtcgtcctcattgctatactcccactagtgctatgacagtttacaaataccatagcaacatcaggaagttaccctatatggtctaaagaagggaggcatgaagaatccactct

SEQ ID NO: 920125 - DNA, 685 bp, Homo sapiens
ctgtctcctgctcgtctctgggcaatggaatgtctcggtgtaaagccaattgtatattccatctactgagataggggaaaaccaccttagggctggaggtgggacatgctggcagcaatactgctccttaaggcattgagatgtttatgtatatgcacatcaaaagcacagcacttttttctttaccttgtttatgatgcagagacatttgttcacgtctttaccttctgaccttctctccactattatcctattatcctgccacacccgataatgatcaataaatactaagggaactcagaggacggtgccggcgtggatcctccttatgctgaacgccagtcccctgggcccctttttctttctctatactttgtctctgtgtctctttcttttccaagtctctcgttccacctaacgagaaacacccacaggtgtggaggggcaacccaccccttcaatagaatgagatagggggtcagmacaagatacaggtcataaagaccttgctgctaaaacaggttgcagtaaagaagctgaccaaaactagacggctacaagaatgacctctggtcgtcctcattgctatactcccactagtgctatgacagtttacaaataccatagcaacatcaggaagttaccctatatggtctaaagaagggaggcatgaagaatccactct

SEQ ID NO: 920126 - DNA, 685 bp, Homo sapiens
ctgtctcctgctcgtctctgggcaatggaatgtctcggtgtaaagccaattgtatattccatctactgagataggggaaaaccaccttagggctggaggtgggacatgctggcagcaatactgctccttaaggcattgagatgtttatgtatatgcacatcaaaagcacagcacttttttctttaccttgtttatgatgcagagacatttgttcacgtctttaccttctgaccttctctccactattatcctattatcctgccacacccgataatgatcaataaatactaagggaactcagaggacggtgccggcgtggatcctccttatgctgaacgccagtcccctgggcccctttttctttctctatactttgtctctgtgtctctttcttttccaagtctctcgttccacctaacgagaaacacccacaggtgtggaggggcaacccaccccttcaatagaatgagatagggggtcagcacaagatacaggtcmtaaagaccttgctgctaaaacaggttgcagtaaagaagctgaccaaaactagacggctacaagaatgacctctggtcgtcctcattgctatactcccactagtgctatgacagtttacaaataccatagcaacatcaggaagttaccctatatggtctaaagaagggaggcatgaagaatccactct

SEQ ID NO: 920127 - DNA, 680 bp, Homo sapiens
tttttttatttttaatttttgtagaggcagtctcactatgttgcccaggctcgtctcgaactcctggcctcaagtgatcctctagcctcagcctcccaaagttctggacaacccgtgcacaccaccatgccctactcagacactgcacttctaactactaccttttaattcacaagtcagagacccagaaagaaagaggcagacacccttaaatacagagaagagcagagaaacacagacactaagatatgggaggcagggggaatcgagagagagaatggaaagaaacagagaaatgaccagagaaagacagatgagcaatgacagtgggagttccgaggactgaggctccctccctcaatccccagcccctcttttcttttttttcttttttcttttcttttttttttttttggacagartcttgctctgttgcccaggctggagtgcagtggcatgatctcagctcactgcaacctccacctccagggctcaagtgattctcatgcctcagcctctcgagtagctgggattacaggcacgtaccactatgcccagctaatttttgtatttttagtagagatggggtttcaccatgttggccaggctcgtctcgaactactggcctcaagtgatctgcccacctcagcctcccaaagtgctgggattacaggcatgaa

SEQ ID NO: 920128 - DNA, 726 bp, Homo sapiens
aaccctacagtctgtggctcaatgtaaaagttaaaatgatccttttaaaacttaaatctgatcatgtcacttcactgctaaaagttcttccatagcttcccatctcacttggaataaatgtcaaagcccttaaagtggacaccaaggcccaggtctggtcccagctctgttttatttgatgtcatttcctccatcctcgaacacattgcacattctgctccagccacagtggtccagccgttccctgaacacatcaagcacactcaggaccttttaaattcctgtttcctctgcctaaatggatcttttcccagatatctgcataatgcacccctcacttccttcaggtcctgctcaatgaatagtatcagagcagtattcactgaccacccaatacaaagcagcagccctcccacccagctttctcttttccacgaactcggcttrtttttctcatatcacttatcattacttggtagattggattttgtttttagttggtctgtttataatcatttctcccctctagaatgcacactttcttaagattttgtccactgatatgtccccagagtccaaaacagtgcctggcacatagtaggtacttgataaacacttgttgaatgaaagagcgaatgaataaataaacaaacaaaggaaactttcaatgacatcgagaaaattaacagtcatagagtagggaactacacaaatttgaaagacatt

SEQ ID NO: 920129 - DNA, 603 bp, Homo sapiens
ggtcactggttttggagaggcccaaggagggtacaagaggcgaagactctcctgagccctcctgcctcagttggcagtgtttggagatagggacatccccagagcttcagtggccctgggttaacacctcctgcctgggggctcccagagggtcccaggcaagggtaaagcatgttcagcccccagagrgctggcccaggctaagctggtgcgtttctgtggtcaggaagtccagttccaggcggagggtggagggtaggctgcaaagtgactccctaacatagtgcttacaaccccaggagatgcggctgtgaggcaggaaaatagagggaattggaggttaaataaagggcaaactgagtaaaagcagaagcaaggtgaagggacaggtaagcaaaaagcaaaatatgggcaggtgcagtggctcatgccataatcccagcatattgggaggcgggggcaggcagatcacccgaggtcaggagttcaagaccagcctggccaacatggtgaaacctcatctctactaaaaatacaaaaattagccaggcatagtagcacacgcctgtagtcccagctactcaggaggctgaggcaggaaaa

SEQ ID NO: 920130 - DNA, 612 bp, Homo sapiens
atctcctgaatttatttatgaattttatttatttattttgagacagagtcttgccccgtcgcctaggctggagtgcagtggtgtgatctcagctcactgcaacctctgcctcccagcttcaagcaattctcctgcctcagcctcccaagtagctgggattgcaggcgcccaccaccacttcyagataatttttgaatttttagtagagacagggtttcgccatattggccaggctggtctccaactcctgacctcaggtgatccacctgcctctgcctcccaaagtgctgggattccaggtgtgagccactgaacccggcctatttatttatgtattttgagacagagtcttgctctgttgcccaggctggagtgcagtggtgcagtcttggctcactgcaacctacgccgcccgggttcaagctattctcctgcctcagcttcccgattagctgggactacaggtacctgccaccatgcttggctaatttttgtatctttagtagagacggggtttcaccatgttggccaggttggtttcgaactcctggcctcaagtgatccaccctcctcggcctcccagaatgctgggattacaagtatgagccatcg

SEQ ID NO: 920131 - DNA, 615 bp, Homo sapiens
cacaggccaggttgcttcaacagaagaagggtatcaactcacagttctggaggctggaagcccgagaccaaggtgtcagcagggttggtttctcttgaaggcactgggaagggatctgtcacaggcctctctcacagcttctggtggaggctggtggtctctggcactgcttgstttagagaagcatcaccccagtgtctgcctccatcttcacacagacttctccctgtgagagtgcctgtatccacatttcccgcctttctaaattgaatttatgttttcaaaaaaaatactttttttttttttgagatggagtcttgctctgtcactcaggctggagtgcagtggcgcgatctcggctcactgcaagctccgcctcctgggttcacgccattctcctgcctcagcctcccgagtagctgggactacaggcgcctgccaccatgcctggctaattttttgtatttttagtagagatggggtttcaccatgttagccaggatggtctcgatctcctgacctcgtgatccacccgcctcggcctcccaaagtgctgggattataggcatgagccactgcgcccagccaaaaaaaaatacttttttttttttttta

SEQ ID NO: 920132 - DNA, 823 bp, Homo sapiens
acctcttcacttccagttatttccaatggaaagatcattaagtatttcatcccaaatccaggtatggatacatgcaagttacaatattatataaggcttaagaataacaatgttatctttgaattatgtaatttttataactagtttttaccatggataatttcatgaattctgaacactagagcctagtctaaaaatcataggatattgtgaaaaagatgcatattatatttatctataatcattagaaagttaaaggcattttctttcattagcagtgttaacagtagtttttttyccccatcggtaatattaaaagtttctattctaagtcttctatccaccactaatttaagacaactctgctggcttgcgttatttcatactagtttatttaggagttccattttcactcctcaatagattttatgtatttctcatatgcttcttcactcataagttcatctagttctgaagggttactcagtgtcatcttgatcagccaaccatcttcacaacaagatttgtttacgagtcctggattttctgcaagagcttcattaatttcagttacttctcctgataaaggagaatagagttcactagcagctttcacactttccaaagcaccaaactcatcttgtttgttcaattttgtcccaacttcaggcagactacagtaaacaacatctcccaacgcttcctgtgcaaaattgctgattcccactgttccaatgccattttctgttgttacccattcgtgtttctctgtgaatttacgcaccgagagcagagcgggtccagtgcgcagcgtacggacggc

SEQ ID NO: 920133 - DNA, 724 bp, Homo sapiens
gtgacctcatttggaaataaggcctttttaattaaaaaaaaatttttatttaaaaaacagagatagagtcttgccatcttgcccaggctagtctcaaactgttgggctgaagcagttctcctgctttgacctcctaaagtgctgggattacagacatgagccactccacctacccagaaataaggtctttatagatgtaactgaaataaagatagagatgtgaatgtgatcgtactggtttagggtgggccctacatccaataagaatgtccttagcagagacagaacagagacaccgagagaggaaggtgatgccaagacagaagtaaagattggagtggtgccatctaccagccaaggaatgccaaggctgtggctacaccagaagctggaacagagcctgcaagcatttctcctgcagaacccccagaagggactcagcctgcagacactcagatttcaaacctctggcttcctgaactgtgaaagaatraattgctgttgggccaggtacagtggctcatgcctgtaatcccagcactttgggaggctgaggcaggtggatcacttcaacccaggagttcgagaccagcctgggcaacaaggcgagaccccgtctctacaaaaaataccaaaaaatgagccgggtgtggtggggcatgcctgtagtcccagctacttgggaggctgggatggaagcatcatttgagcctgggaggtggag

SEQ ID NO: 920134 - DNA, 596 bp, Homo sapiens
ccagtgaatctttctcccatctttccccaagtagatctctggccttttatgggggtaacagtgcactgggaaaagggaaatgattggatatttgggggactactaaacactggctctgagctgacatgattcctggggacccaaaacatcactgtggtcctccagttaaaataggggcttatrgaggtcaggtacttaatagagatttagcacaggtccaacttagagttggtccagtgagtcccaagactcattttgtggtcatttccccagtgcccgaatgcataattggcatagacatacttagcagatggcagaattcccaaattggcttgctgactagtagggtgagggctattatggtgggaaaagccaaatggaagccattagatctgcctctacctatgaaaatagtaaatcaaaaccaatattgtatccatggagggagtgcagagattagtgccaccatcacggacttaaaggatgcagaggcggtgattcctaccacatcctcattcaactctttcgtttggcctgtacagaagacagatggattttggagaatgacagtggattattgtaagcttaaccaagtg

SEQ ID NO: 920135 - DNA, 596 bp, Homo sapiens
ccagtgaatctttctcccatctttccccaagtagatctctggccttttatgggggtaacagtgcactgggaaaagggaaatgattggatatttgggggactactaaacactggctctgagctgacatgattcctggggacccaaaacatcactgtggtcctccagttaaaataggggcttatagaggtcaggtacttaatagagatttagcacaggtccaacttagagttggtccagtgagtcccaagactcattttgtggtcatttccccagtgcccgaatgcataattggcatagacatacttagcagatggcagaattcccaaattggcttgctgactagtagggtgagggctattatggtgggaaaagccaaatggaagccattagatctgcctctacctakgaaaatagtaaatcaaaaccaatattgtatccatggagggagtgcagagattagtgccaccatcacggacttaaaggatgcagaggcggtgattcctaccacatcctcattcaactctttcgtttggcctgtacagaagacagatggattttggagaatgacagtggattattgtaagcttaaccaagtg

SEQ ID NO: 920136 - DNA, 594 bp, Homo sapiens
aaaggtggctggagctaaaggcatagtcaaggttaatgctcctttttctttatctgacctctcccaaatcagttagcgtttaggctctttatcatcaaatataaaaacacagcgcagttcatggcctgtttggcaacaacccttagacactttacagccctagaccctgaagtgtcagaaggccatcttattctcaatatgcattttattacccaatctgctcccaacattaaataaaactccaaaaattatattctggccctcaaaccccacaacaggacttaattaacctcaccttcaaggtgtacaataatagakaagagttgcaattactttcctctgctgtgagagaaaccccagccacatctccagcacacaagaacttcaaaacgcctaagccacagcagtcaggtgttccttcaggacctcctcccccaggatcttacttcaagtgctggaaatctggccactgggccaaggaatgcccacagcccaggattcctcctaagccatgtcccatctgtgtgggaccccactggaaattggactgtccaattggcccaaggctctgactgactctttcccatatcttct

SEQ ID NO: 920137 - DNA, 658 bp, Homo sapiens
atggtggtgcatacacacacacacacacacacacacacacacacacacacacacacacacgttctcttctcttctctctttctttttcttttttgagacagggtctccctctgtcacccaggctgtggtgcagtggcatgatcttggctcaccacagcctyagcctcccaggctcaagcaatcctcacacctcagcttcccaagtagctgggaccacaggtgcacactagcatacctggctaatttgtaaaattttttgtagagatggggtctcactgtgttgcccaggctacatatatatcttctatactctgtacgtattgtatgcgtctctgtcttagaaacttacatgtacattagtttcccattgtcgctgtaacaaataccacagatgcaggatcttaaaacagaaaactattctcgtatagttccagaggccctaagtccaaaatgagggtgttagcagggccactggggttgtcagagctgtgctccctcaggaggctctagggaagagcctagagccttcttcgcctggtccagcccccggagctctaggtggtccttggctcgtagccacgtgacattaagctttgcctccttcttcacatggccttctgttcttctgtgacttctcctttgctgttaagaggacatt

SEQ ID NO: 920138 - DNA, 816 bp, Homo sapiens
ctgggttcaaatcctggctcttgggtgaccttgggcaagtacccaaccctttttggcctcagtctcctcatttgtgtaatgggcatgaggataatggcatctgccttatagtgttgctgtgagaatgaaatgataagatgaagcactttgccgggcgtggtggctcacgcctctaatcccagcactttgggaggctgasgcgggcagatcacgaggtcaagagattgagactatcctggctaacacagtgaaaccccgtctctactaaaaatacaaaaacaaaaaattagctgggcgtggttgtggcgcctgtagtgccagctactcaggaggctgaggctggagaatggcgtgaacccgggaggcagaggttgcagtgagctgaaatcacgccactgcacaccagcctgggtgactgagcgagactccgtctcaaaaaaaaaaaaaaaagacgaagtacttagtaagcattcagcaaccttggctggggtgacgaagatgatgaagtcagaggtggccgtagccaagggctcatgggacagaatctgacccatcaaatgcccagactcccaaacaccagggctcatagccacgtggcccaggcagaggttggactcgtagttggggcaggtccagtcggtggccagcgaggaagggggttcgcggggaggagcagaggccagagggagccgggccggggaggagggctttctatggtcgtttacacatggcatctcggtgtccagtgtggggcaggcatataggaggagctgaggctgcttgggcagcatttatttaccaatcggtaggtcagct

SEQ ID NO: 920139 - DNA, 816 bp, Homo sapiens
ctgggttcaaatcctggctcttgggtgaccttgggcaagtacccaaccctttttggcctcagtctcctcatttgtgtaatgggcatgaggataatggcatctgccttatagtgttgctgtgagaatgaaatgataagatgaagcactttgccgggcgtggtggctcacgcctctaatcccagcactttgggaggctgacgcgggcagatcacgaggtcaagagattgagactatcctggctaacacagtgaaaccccgtctctactaaaaatacaaaaacaaaaaattagctgggcgtggttgtggcgcctgtagtsccagctactcaggaggctgaggctggagaatggcgtgaacccgggaggcagaggttgcagtgagctgaaatcacgccactgcacaccagcctgggtgactgagcgagactccgtctcaaaaaaaaaaaaaaaagacgaagtacttagtaagcattcagcaaccttggctggggtgacgaagatgatgaagtcagaggtggccgtagccaagggctcatgggacagaatctgacccatcaaatgcccagactcccaaacaccagggctcatagccacgtggcccaggcagaggttggactcgtagttggggcaggtccagtcggtggccagcgaggaagggggttcgcggggaggagcagaggccagagggagccgggccggggaggagggctttctatggtcgtttacacatggcatctcggtgtccagtgtggggcaggcatataggaggagctgaggctgcttgggcagcatttatttaccaatcggtaggtcagct

SEQ ID NO: 920140 - DNA, 816 bp, Homo sapiens
ctgggttcaaatcctggctcttgggtgaccttgggcaagtacccaaccctttttggcctcagtctcctcatttgtgtaatgggcatgaggataatggcatctgccttatagtgttgctgtgagaatgaaatgataagatgaagcactttgccgggcgtggtggctcacgcctctaatcccagcactttgggaggctgacgcgggcagatcacgaggtcaagagattgagactatcctggctaacacagtgaaaccccgtctctactaaaaatacaaaaacaaaaaattagctgggcgtggttgtggcgcctgtagtgccagctactcaggaggctgaggctggagaatggcgtgaacccgggaggcagaggttgcagtgagctgaaatcrcgccactgcacaccagcctgggtgactgagcgagactccgtctcaaaaaaaaaaaaaaaagacgaagtacttagtaagcattcagcaaccttggctggggtgacgaagatgatgaagtcagaggtggccgtagccaagggctcatgggacagaatctgacccatcaaatgcccagactcccaaacaccagggctcatagccacgtggcccaggcagaggttggactcgtagttggggcaggtccagtcggtggccagcgaggaagggggttcgcggggaggagcagaggccagagggagccgggccggggaggagggctttctatggtcgtttacacatggcatctcggtgtccagtgtggggcaggcatataggaggagctgaggctgcttgggcagcatttatttaccaatcggtaggtcagct

SEQ ID NO: 920141 - DNA, 589 bp, Homo sapiens
taacgccaggcactggagttacggccatgagcaaaactcatggtaatcccctgtcctccttccatggacacctccttgggaaacaaagaaaccagtcactaataaaggtaatggtgaaaaggaccatgtagagtatgataaaaaataataatgtcatttgcacaatgaaagaggtttaaaagaaaataaatgggtcccaggggctcctttagatagtgtgatcagaaagggtcacaygagggaggtaacattgaaggtgagacctgaaggatcacagggaggtaggtggccaggcccggtgctcctggcagagggaagagcaagttcaaaggtgggagagagcttggcatggttgaggaacaggaaggaggctgatggggccaaactgaagggaaaactagtaggaggtgagactgtagtaggtaaaagtcaccaggttgtgtaggcctggaagcccgatagaggagttgttatttttattctgaatgtgacaggcagctctgatgggcccttaaacacgagaatgccatatttgatttgcttcccagagaacggaacaaaatggggaaaagtagaagtctgttgagct

SEQ ID NO: 920142 - DNA, 535 bp, Homo sapiens
aaactcaagtcacaaaacatgtttctccttgaaaagtaagaaatgatgtaatgcatacctcaattgaataactggctttgtttctcacttctgtagtatgcttccctctgcagagatctcccccmaccccactaaatgcttaaaaggtaacttaactctttgttcagggctcagtcctttggatgttaatccgacggctggtgcacctaaataattaatgaatatcctcctgaaccccaatggtctctctgattccttaaaaatcccactacatttcttgggggtggggggcttgcctggggttggagatgacagatttactgtctcctttgcctgtgagactagagctctggggctaggagagacccagcatccaaggcacaccacaggggagcttcaactggatagaaaccagctctccccatattctgacaccctgcctggcagtgcaatggaactgggaatggggctgcaggatgataccagcacttcaggaactgcagtaaagagcaagtgcccaaggcagcaaagccca

SEQ ID NO: 920143 - DNA, 458 bp, Homo sapiens
gcaaggtcactagacagacaaactcaagtcacaaaacatgtttctccttgaaaagtaagaaatgatgtaatgcatacctcaattgaataactggctttgtttctcacttctgtagtatgcttccctctgcagagatctccccccaccccactaaatgcttaaaaggtaacttaactctttgttcagggctcagtcctttggatgttaatccgacggctggtgcacctaaatamttaatgaatatcctcctgaaccccaatggtctctctgattccttaaaaatcccactacatttcttgggggtggggggcttgcctggggttggagatgacagatttactgtctcctttgcctgtgagactagagctctggggctaggagagacccagcatccaaggcacaccacaggggagcttcaactggatagaaaccagctctccccatattctgacaccctg

SEQ ID NO: 920144 - DNA, 458 bp, Homo sapiens
gcaaggtcactagacagacaaactcaagtcacaaaacatgtttctccttgaaaagtaagaaatgatgtaatgcatacctcaattgaataactggctttgtttctcacttctgtagtatgcttccctctgcagagatctccccccaccccactaaatgcttaaaaggtaacttaactctttgttcagggctcagtcctttggatgttaatccgacggctggtgcacctaaataattaatgaatatcctcctgaaccccaatggtctctctgattccttaaaaatcccactacatttcttgggggtggggggcttgcctgkggttggagatgacagatttactgtctcctttgcctgtgagactagagctctggggctaggagagacccagcatccaaggcacaccacaggggagcttcaactggatagaaaccagctctccccatattctgacaccctg

SEQ ID NO: 920145 - DNA, 535 bp, Homo sapiens
aaactcaagtcacaaaacatgtttctccttgaaaagtaagaaatgatgtaatgcatacctcaattgaataactggctttgtttctcacttctgtagtatgcttccctctgcagagatctccccccaccccactaaatgcttaaaaggtaacttaactctttgttcagggctcagtcctttggatgttaatccgacggctggtgcacctaaataattaatgaatatcctcctgaaccccaatggtctctctgattccttaaaaatcccactacatttcttgggggtggggggcttgcctgggrttggagatgacagatttactgtctcctttgcctgtgagactagagctctggggctaggagagacccagcatccaaggcacaccacaggggagcttcaactggatagaaaccagctctccccatattctgacaccctgcctggcagtgcaatggaactgggaatggggctgcaggatgataccagcacttcaggaactgcagtaaagagcaagtgcccaaggcagcaaagccca

SEQ ID NO: 920146 - DNA, 570 bp, Homo sapiens
gagcttcaactggatagaaaccagctctccccatattctgacaccctgcctggcagtgcaatggaactgggaatggggctgcaggatgataccagcacttcaggaactgcagtaaagagcaagtgcccaaggcagcaaagcccatcccatgaggatgaaggggagcttgatcacctcccggagaatgaacactaatccaacccagagtggctgggggcatcaggagtggcttgccaatttggatgcacctcaagtccmcactaacactggaactggaaaaaaatgaggaaatgggccaatagagcagcaagtgcagcaaggtagagcttgctggcagggtggcaagagtggcttgccaccccaactgggagtgttgagggtgcacgtgaacatacccaggacatgagagaggctcacccaggacatgagacaggctagtttcatccagtgaggaatcttggggcaggggaggtgtgtgaaagtgtgtgaaagagatggtctcaggagaggccagtgcggggagtgacatggggaggcagagatcccttagcatgggctgtgtgctctgac

SEQ ID NO: 920147 - DNA, 570 bp, Homo sapiens
gagcttcaactggatagaaaccagctctccccatattctgacaccctgcctggcagtgcaatggaactgggaatggggctgcaggatgataccagcacttcaggaactgcagtaaagagcaagtgcccaaggcagcaaagcccatcccatgaggatgaaggggagcttgatcacctcccggagaatgaacactaatccaacccagagtggctgggggcatcaggagtggcttgccaatttggatgcacctcaagtccccactaacactggaactggaaaaaaatgaggaaatgggccaatagagcagcaagtgcagcaaggtagagcttgctggcagggtggcaagagtggcttgccaccccaactgggagtgktgagggtgcacgtgaacatacccaggacatgagagaggctcacccaggacatgagacaggctagtttcatccagtgaggaatcttggggcaggggaggtgtgtgaaagtgtgtgaaagagatggtctcaggagaggccagtgcggggagtgacatggggaggcagagatcccttagcatgggctgtgtgctctgac

SEQ ID NO: 920148 - DNA, 570 bp, Homo sapiens
gagcttcaactggatagaaaccagctctccccatattctgacaccctgcctggcagtgcaatggaactgggaatggggctgcaggatgataccagcacttcaggaactgcagtaaagagcaagtgcccaaggcagcaaagcccatcccatgaggatgaaggggagcttgatcacctcccggagaatgaacactaatccaacccagagtggctgggggcatcaggagtggcttgccaatttggatgcacctcaagtccccactaacactggaactggaaaaaaatgaggaaatgggccaatagagcagcaagtgcagcaaggtagagcttgctggcagggtggcaagagtggcttgccaccccaactgggagtgttgagggtgcacgtgaacatacccaggacatgagagaggctcacccaggacatgagacaggctagtttcatccartgaggaatcttggggcaggggaggtgtgtgaaagtgtgtgaaagagatggtctcaggagaggccagtgcggggagtgacatggggaggcagagatcccttagcatgggctgtgtgctctgac

SEQ ID NO: 920149 - DNA, 626 bp, Homo sapiens
ttactttgtgcctgacccatgctttcttgagacaagacaccatgctcacaccacatgcataccacaaaacaaagaacgggttaaaagggcacacacatacttttacagtttacaccaaaccagaatcaaaaccaaaatcagagtatcaagaaatccaagccaggtcaaaaccaaaaccaaagtatcgagcaatccaaatcaagtcaaaaacaaaaaccaaagtgctggtacaggcacattgtgggtgatcaggccacacttccactcaaatggagtaggcaagttacaaagaccagtcttaccaagtttcagatgtctggactccaagtgccatttccttcccagtgttcagccactgcattgatcctccgtgggggcctgccttgcaccrctctgacaaggcattccaccgaggcaaatgcctacccaggagcactctcaggatccacgtcactcaagctggccggagttccccatagggatgctccacagggcaggcctaagccacctaaggggctgcctcaacggtccatccattaatcacctcgcttcccagtcagggaaccaagaaatgtagcaggacaagccacagacaaaacccctcagacaccaagttaaagaaggaa

SEQ ID NO: 920150 - DNA, 655 bp, Homo sapiens
gcagtggttcacgctataatcctggcactttgggaggctgaggcgggcagatcacttgaggtcaggagttcgagaccagcctggccaacatggtgaaaccccgtctctaataaaaatacaaaaattatgctgggcacagtggttcactcctgtaatcccagcactttgggaggccaaggcaggtggatcacttgaggtcaggagtttgagaccagcctgtccaacatggtgaaaccatctcaactaaaaatacaaaaattggctgggcgtggtggcrcatgcctgtagtcccagctactcgggaggctgaggcaggagaatcacttgaacctgggaggcgaagattgcagtgagctgagattgtgccacggcactccagcctgggtgacagagtgagactccatctcaaaaaaaaaaaaaaaattagccaggcatgtggtacatgcctgtagtcccagctactcaggaggctgaggcaggagaatggcttgaacccaggaggcggaggttgcagtgagctgagatcgcaccactgcactccagggtgggccacagagcaagactccgtctcaaaaacaaaacaaaacaaaacaaaacaaaaacccagtgtcaattacattgccactgcttacaagccccctctcccttctcattt

SEQ ID NO: 920151 - DNA, 835 bp, Homo sapiens
ggttccatggtccacttctcagggttccgtggtctacttcccagggttccgtggtccatctccccgggttccatggtctatttaccagggatccgtggtccacctctcagggttccgtggcccacctcccgggttccgtggccacctcccagggttccgtgttccgcctcccagcgttctgtggtccacctcccagggatccatggttcactttccagggttctgtggcccatctccctgggttctgtggcccatctcccagggttccatggttcatctctcagagttccatgggttcatctcctagggtcatctcctagggtccatctccaagggttctttggtccatctctcagggttccatggttcatctcttaggattctgcagttcatctcccagggttctgtggcccatcccccagggttctgcagtccatctcccagggttccatggtccatttcccagggttccatgttccatctcccagggttccatgttccatctcccagggttccatgggttcatctcctaagggtcatctcctaggatccatctcccagggttccatgggttcatcttctagggtcatctcctagggtccatctcctagagttctttggtcyatctctcagggttccatggttcatctcctaggattctgcagttcacccccagggttgcatggttcatctcctaggatccatctcccagggttccatggtccctgtctcagcattctgtggtccatctcccagggctctgatctccattccaggactctatgccccaggtcctgacctcctccctcctggtcatggttattgtggcctctta

SEQ ID NO: 920152 - DNA, 769 bp, Homo sapiens
ctagaggatttgcaacttcactccaagtcctgtctgatcctttccaaaaaaggctgtccctatccgcactcctaacaccgtgctccggttcaagttgtccattttctcatatcctcaccaacatatggctttatctgtctttctaatttttcttctttttttttgagacagagtttcactcctgttgcccaggctggagtgcagtggtgtgatcttggctcaccgcaacctccacctcccgggttcaagcgattctcctgcctcagcctcccgagtagctgagattacaggcatgcgccccaccacgcctgactaattttgtagttttagcagagacggggtttctccatgttggtcaggctcgtctccaactcctgacctcagttgatctgcccgccttggcctcccaaagtgctggaattaacaggcgtgagccaccgcgcctggcctcttctttctttctttttttatttgttgagacagagtcttgctctgtttctcaggctggagtgcggtggcgcgatcttggctcactgcaacctccgcctcccaggttcaagcgattcttgtgcctcagcatctctagtagctgggattacrggcacccgccaccacacctggctgatttttgtatttttagtagagacggggtttcaccatgttggccaggctggtctcaaactctcatccttaggtgatccacccgccttggcctcccaaagtgctgggattgcaggtgtgagctaccacgcccggccctgtctttcta

SEQ ID NO: 920153 - DNA, 545 bp, Homo sapiens
tccaagccgggagggttggcacacacctgtaatcccagctacttgggaggctgagacaggagaatcgcttgaatacaggaggtggaggttgcagtgagctgagattgcaccactgcactccagcctgggtggcagagagagactctgtctcaaaaataaacaaacaaacaaacaaataaataaaagtaaacgccgggtgcagtatctcacgcctgtaatcccagcactttgagaggccaaggtgggcagatcacttgaggtcaagaatttgagaccagcctgaccaacatggtgaaaccccgtctctactaaaaacacaaaaattagctggscatagtggtggtgcctgtaatcctagctactccagagctgagaatcgcttaagcccaggagacagaggtggcagtgaaccaagattgtgccactgcactccagcctgggcaacagagcgagactctgtctcaaaaaacaagcagccaggcgtggtggctcacgcctataaccccagcactttgggaggctgaggcgggcggatcacctgaggt

SEQ ID NO: 920154 - DNA, 729 bp, Homo sapiens
gagtttgaagctgcagtgagctatgattgcgtcactgcactccagcctgggtgacagagcaaaactctgtctctaagaaaaagaaagggccaggcatggtggctcatgcatttaatcccagcattttgggaggccgaggtgggcagatcacttgaagtcaggagttcaagaccagcctggtcaacatggtgaaacctcatctctactaartatacaaaaattagctgggtgtggtggcacatgcctatagtcccagctacttgagaggctgcagcaggagaaatcgcttgaacctaggaggcagtggttgcagtgagccaagattgtgccactgcactccagcctgggtgacagagtgagactctgtctcaaaaaataatattaattttaaaaattaaagataaaaataataaaaatttttttaaaaagaaagaaattgatcagtagctgcagcccagaagccctgagtctgagaagagatgtgtgatgtcccttgtgggctcactgggatagcatgccatgagaaattcaagatgtttgctgtgggcttggggatggcgacatccacagatgtactgcctgtttgcagacttcaaaataagctcacacatcaccaccttgtgttatttgctacccagcaccctgcatggggctgtgtgggaaagaacatggagagattgattggtaatgtctgtcaagggcaggacaggggatgtgtaggcgagtgtg

SEQ ID NO: 920155 - DNA, 555 bp, Homo sapiens
tccccttcatcctcatgggatgggctttgctgccttgggcacttgctctttactgcagttcctgaagtgctggtatcatcctgcagccccattcccagttccattgcactgccaggcagggtgtcagaatatggggagagctggtttctatccagttgaagctcccctgtggtgtgccttggatgctgggtctctcctagccccagagctctagtctcacaggcaaaggagacagtaaatctgtcatctccaaycccaggcaagccccccacccccaagaaatgtagtgggatttttaaggaatcagagagaccattggggttcaggaggatattcattaattatttaggtgcaccagccgtcggattaacatccaaaggactgagccctgaacaaagagttaagttaccttttaagcatttagtggggtggggggagatctctgcagagggaagcatactacagaagtgagaaacaaagccagttattcaattgaggtatgcattacatcatttcttacttttcaaggagaaacatgttttgtgacttgagttt

SEQ ID NO: 920156 - DNA, 593 bp, Homo sapiens
agatcgagaccatcctggctaacagagtgaaaccccatctctactaaaaaaaaatattaaaaaaattagccaggcatggtggcgggcgcctgtagtcccagctactcgtgaggctgaggcaggagaatggcgtgaacccgggaagcggttcacggagcttgcartgagctgagatcgcgccactgcactccagcctgggcgacagagcgagactccatctcaaaaaaaaaaaaaattactcaggaaggggagcaggttaagtcatttattttatatatgatactacatttaaaaaatttttaaaaacctatacattcccctaaaatgaacttttttttccctgactataccctaactctgaatctttgctgactttaattggaacagacttctcatcaaaattaagcaaatcctattctcacacccaggagagaagtaactgcaaaacaagatttccaacctgggttcccagatcaagcttgctagctcactgcatttgtggtctactgcacactccactcctggtagagaaagaattccaaagaaccaagtttctatttttctcctgtctctcaaaggctttcaagataaaa

SEQ ID NO: 920157 - DNA, 593 bp, Homo sapiens
agatcgagaccatcctggctaacagagtgaaaccccatctctactaaaaaaaaatattaaaaaaattagccaggcatggtggcgggcgcctgtagtcccagctactcgtgaggctgaggcaggagaatggcgtgaacccgggaagcggttcacggagcttgcagtgagctgagatcgcgccactgcactccagcctgggcgacagagcgagactccatctcaaaaaaaaaaaaaattactcaggaaggggagcaggktaagtcatttattttatatatgatactacatttaaaaaatttttaaaaacctatacattcccctaaaatgaacttttttttccctgactataccctaactctgaatctttgctgactttaattggaacagacttctcatcaaaattaagcaaatcctattctcacacccaggagagaagtaactgcaaaacaagatttccaacctgggttcccagatcaagcttgctagctcactgcatttgtggtctactgcacactccactcctggtagagaaagaattccaaagaaccaagtttctatttttctcctgtctctcaaaggctttcaagataaaa

SEQ ID NO: 920158 - DNA, 629 bp, Homo sapiens
tcctgacctcaagtgatcctcctgccttgcctcccaaagtgctgagattgcaggtgtgagccactgtgcctggcctaatttttgtattttggtagagatgggatttttccatgttggccaggttggtcttgaactcctggcctcaagtgatccacccacctcggcctcccaaagtgctgggattataggcatgagccactgcatctggcttcttatattggtttcatgttgatgctgtagcaaattactacaaatttagtgacttgaaacaacacaaatgaataggtgtgtagaagtctgaagtgggtctcaccgggctgaaaccgacaggtgggtagggctgcattccttctgggggctttaaggagaatacatttatttktcttggtcagttgtagaggtgatgcatctccagcccagaaatagggctttatagacagggagtcacactctctgtctctctctcttttttttttttttttttttttttttgagacagagtcttgctctgtcacccagcctggagcgcaatggtgcgatctcagctcactgcaacctcctccacctcccaggttcaagcgaatcctcctacctcagcctcctaagtatctgggattacaggtgcccac

SEQ ID NO: 920159 - DNA, 778 bp, Homo sapiens
tcgaactcctgacctcaagtgatcctcctgccttgcctcccaaagtgctgagattgcaggtgtgagccactgtgcctggcctaatttttgtattttggtagagatgggatttttccatgttggccaggttggtcttgaactcctggcctcaagtgatccacccacctcggcctcccaaagtgctgggattataggcatgagccactgcatctggcttcttatattggtttcatgttgatgctgtagcaaattactacaaatttagtgacttgaaacaacacaaatgaataggtgtgtagaagtctgaagtgggtctcaccgggctgaaaccgacaggtgggtagggctgcattccttctgggggctttaaggagaatacatttatttgtcttggtcagttgtagaggtgatgcatctccagcccagaaatagggctttatagacagggagtcacactctctgtctctctctcttttttttttttttttttttttttttgagacagagtcttgctctgtcacccagcctggagygcaatggtgcgatctcagctcactgcaacctcctccacctcccaggttcaagcgaatcctcctacctcagcctcctaagtatctgggattacaggtgcccacccctactcctggctaatttttgtatttttagtagggacaggttttcaccatgtttgtcaggctggtctcgaactcttgacctcaagtgatcggcccgctttggcctcccaaagtgctgggattacaggcatgagccactgtgc

SEQ ID NO: 920160 - DNA, 764 bp, Homo sapiens
aaacaccagactctaaatattatttacccagcatcaagcagatgtttgtttccaaagctacaatctcctctaattggctgatgctgtgctgcatagactccaatgcaagcttatgttctataatgaatgacaaatgcctagaagaatcctctgtgaattggcagcctcctcctctagcatgcaaattatgccgaaatcccatcagcagaygcagataagctcatctgcatgattggcaaactagtggataaacacaccccaggattcattgtccaaattcaatttggtggtttcatctccattttcagtgatcatttatttgttaatttattcattagccaacatgatgaagcagctattcggaaacaggcactgtcttaggctttaggaatacaaaggtaaataaagatatggtctcttccttcaagaagtccacaatgaaggaagtgagacgaggccgggaaagaaaacgaactaggaacaagtacaaaaatagagatatgggcaaatgtcagtggtgatacagaggaggggtgatcaactctacctacaggggttggagatggtgccacagattttcatggtgtagcttagaggaagatgttagctagacagacaaactgtagaaaggggggtttccatcaagagtgttctcttgctgttgcaagaacacttgacgacgtgcgtcctgttctgggaaccacaggagttttatctggctaaagcagaaggtgccagtgtctgttctattttggctcctttaa

SEQ ID NO: 920161 - DNA, 607 bp, Homo sapiens
cggagtagttgggattacaggtgcccaccacaatgcctggctaattttttgtatttttagtagaaaaatacaccaccatattggccaggctggtctcgaactcctgacctcaggtgatccaaccacctcagcctcccaaagtactgggattagaggcgtgagccactgcacccggcttgaataagcattaagttagaatgtgatgcacatcactggcaatctggtaaaagattgcaaaggcaaaaagaaatatccttcrttacagccaagcaggtgtaaaccattatcctgttttcaagataaaatttcaaattccatattgttacaggagctgcaggttcatatgcccactgtgcagtcacagctctgtgactctgagacggtggggatgcagcagagagagtttaatgattgcagggtgccgagcgaggtgatgggaggagaccctcaaatctctctccagggagttctgggctgggcttttaaggggtttgtggggagtgatgggctggaatattggggtcattgattggttgggaagggggatgaaattgtcagggtgtagaagctgcattttgcggggagtcagctccttgtggggtccttc

SEQ ID NO: 920162 - DNA, 461 bp, Homo sapiens
ttgtttcttgagatagagtcttgctttgttgcccaggctggagtgcagtggcgtgatctcatgtcacttcaacctctacctcccaggttcaagcaattcttgtgcctcagcctcccaagtagctgggattacaggcatgmgccaccatgcctggctaatttttgtatttttagtcaagacaggattttgccattttggccaggctgctctcaaactcctggcctcaagtgatccgcccgcctcggcctcctgaagcactgggattacagatattagccaccatgcccagccagccgttcatattctataggttttattatttttatttttttgagatggagtctcactcagtcacccaggctggagtgcagtggcatgatctcagctcactgcaatctctgcctcccaggttcaagtgattctcctgcctcagcctcccaggtagctgggatcacaggcat

SEQ ID NO: 920163 - DNA, 621 bp, Homo sapiens
tcttttgtttcttgagatagagtcttgctttgttgcccaggctggagtgcagtggcgtgatctcatgtcacttcaacctctacctcccaggttcaagcaattcttgtgcctcagcctcccaagtagctgggattacaggcatgcgccaccatgcctggctaatttttgtatttttagtcaagacaggattttgccattttggccaggctgctctcaaactcctggcctcaagtgatccgcccgcctcggcctcctgaagcactgggattacagatattagccaccatgcccagccagccgttcatattctataggttttattatttttatttttttgagatggagtctcactcagtcacccaggctggagtgcagtggcatgatctcagctcactgcaatctctgcctcccaggttcaagtgattctccygcctcagcctcccaggtagctgggatcacaggcatgtgccaacatgcccagctaatttttgtattttcagtagagatggggtttcaccatgttggccagactggtcttgaactcctggcctcaagcaatccacccacctcagcctcccaaagtgatgggattacaggcatgagccactgtgcctggccata

SEQ ID NO: 920164 - DNA, 509 bp, Homo sapiens
gagatcagctgaaatagcctcctgcttgctacgggctgttagtgacttatgcgccagactccaccaaacccatctgcagtcagccatccaggacaatcaggaagaggcccgagaacagaagagcatttgggaaacttcctcaacccctctgtcaccaggaccaaatcatgtgaaatgtataatggtctgtcacgcaaaatgctttctgagcatcggaattttaatatggkcttacggatatcatctaaatataagaacagtcttcagttcaggtcaagcacccataaccagcttgtaatgctgctctccagcagaccaatgggacagaccccttgtccaacactagaagtggggaggatgtaggccactctcttctatgtatccaggctggaaaagtcacttcacggctagtctctcacctccaaccccaacgacataatgaacactgagttctacctctaaaagccttggtgagatagatagatgatgaactggtgtattatttctat

SEQ ID NO: 920165 - DNA, 671 bp, Homo sapiens
ctgggttctgtgactattttatttttttactcgaagaggaaaaaaacatcccaatagccccctgaacaaaatctcgcctcccccacccctatacatcaaggctaaacttccctcccttccatcaaactacagcaaagctttctttccttctgtgtgtttcacgtgcatccaaatgcgaacaccaaccaggagatcctcaccgctccgtgagaaggagctgctaaatgttccctcctctmcaacgcctgtttgcctgttcggccattcctttctaggctcagaaaaacctctccccactcgggcagccacagggaaatgtaataagccctttttcccacactaaaaatctacagtgttcacaaagaaaactgcagcctgccctaaacagacacactttcaccagaccctgcacaaagaaaccttttctccttgctccaagaagagcacccgcgtccttccacaaacagaaagggaagcgtggcctcgacacagagtcaccccaagcccttcacacaaattggatttctcttctggttgagacgctggggaggggtttggtggggagcagaagcaagcatcgttctagtcagtgtggtgggggtggctgaggagaggcctggaggaggggagaatgaaggtctgggttaggggcgatggtggggcaggtggga

SEQ ID NO: 920166 - DNA, 631 bp, Homo sapiens
gtcttgctctgtcgcccaggctggagtgcagtggcccgatctcagctcactgcaacctccacccaccgggttcaagtagttctctgcctcagcctcctgagtacctgggattgcaggcacctgccactacacctggctaatttttgtatttttagtagagacggggtttcaccatcttggccaggctggtcttcaactcctgacctcgtgatctacccgcttcggcctcccaaagtgctgggatcataggcgtgagccaccgcgcccagccagttttgttttttttttaagacaaaatacccataacataaaattcrctattttagccattttaaagtgtgcaaagcagtggtttttagtatattcaaaatgttatgctatcatcaccactacctcacttcacaccgttttcatcagcccaacaagaaacttgtgctgataagcagtctttcccctctccccatccccgaccccacacagcccctggcaactacagatcaactttttttctgtcgctagggatttgcctgttttgtacatgtcatataaatggaatcatacagcacatggccgtttgtgactgccttctttttgctcagcacagtgttttcaaggttcatccatgttgtag

SEQ ID NO: 920167 - DNA, 687 bp, Homo sapiens
gattgggtccacactcacatctgcttcccttcctgcaggtaccaatacgctggttccttctgggttgctctagagttattccaggcatgttaggcagacatagtcctttttttttttttttttttttttaacttttatttaggttcaggggtacatgtacatgtttgttatataggtaaattatgtgtcatggggtttggtgtgcagattatttcatcacccaggtaataagcataataccccatgggtttttttatttgagaaggagtttcgctcttgtcgcccagactggagtgcagtggcacaatcttggctcactgcaacctccgtctcccaggttcaagcgattctcctgcctcagcctcccaagtagctgacgttatacccgccaccatgcacccgccaccacctggctaatkttttgtatttttagttgagacggggtttcaccatgttggccagcctggtattgaactcctgaccttaggtgatccgcccacctccgcctcccaaagtgctgggattacagatgtgagccactgtgcccagtccctgatgggtgttttttggagcctcaccctccaccctccagtaggccccagtgcctgttgttcccttctgtccatgtttactcaatgtttagctcccacttaaagtgagaacgtggtatttggttttctgatcctg

SEQ ID NO: 920168 - DNA, 662 bp, Homo sapiens
ctgtgatggggtcaggaggggaagtggtaagatcactctgagccccttaagtagggtgaccatataactttatattcctaatggagacacattggagagagcaagagggtgttattaagaattactctgagaaacctctaggatatatagccaagcacctgtctagccaagggagcctttcaagcaagggagtgacacaatcaaatttgcttatttaattawttatttatttatttatttatttatatatttatttatttgagacggattttcacccttgttgcccctgctggagtgcagtggcgcaatctcggctcactgcaacctctgcctcctgggttcaagctattctcctgcctcagccccccaagtagctgggattacaggcacgcaccaccatgcccggctcatgttttgtatttttagtagaaacggggtttcaccatgttggccaggctggtctcgaacccctgacctcaggtgatccgcccacctcggcctccaaaagttttgggattacaggcatgagctaccttgcaggcccaaatttacattttttaagccctccagcaaatgggtggggaatgcattgacagggaattaatccagtcaagctgctctcagaactaacagtgatttaatttgggtgatagagtggcaac

SEQ ID NO: 920169 - DNA, 709 bp, Homo sapiens
ctctgctgaagccccaccttcaagccagggataacctgaagcatgggggcccaactgtcgattctgggtggagcctgtggcctggagtgagaacttatggtgcttttttgggcccacccatggctgcccgtggatcagtcagcatgcacttcttctgaagctcataaaaaccctggacgcagccagactcaggcagacaatgggacgacctgcctgcagatagggactaccctctctgggtctcccctctgctgaggactgcacactcctcaggacaacctgcctttggaaagtagctacccactttgggtgtccttggagctgtactgttgctcaataaracacctctttgccttggtcatcctccagttgtccatgtacctcattcttactaatgtgggaaaagaacttggggcccaccgaatggtgggactgaaagaggtataacacaaacagagctgaaacatgtacacccccgtcccccaactcaccacactgtgggcaacaagaagtagagaagagctggggctccctgagccagggctgtgccaccctctttggggctctgtggtttctggcatctccaagcttctgggcaccattgtgttcccctcatccagacatgggtgcccacagcagaaggcattttggtgcatctgttccagccacaggcttgcacagagctggcacctgtgctggtgcctgtagc

SEQ ID NO: 920170 - DNA, 569 bp, Homo sapiens
gtctatcaatttattgttccagtgtcttctgctccaggtaaacagatcttgactgcagctctctggttttacccaccaattcatattttcaagtggcagtttgctttgtgaactcaatttgtctaagaaaaattgttgatttctttctttggctatttctagttgttagaatgaaggtgacaatttccaagctttttatatttcagagctaaaatcaaaagtccattgtattagtccatttttatactkctataaagaacttcccaaaactcggtaatttataaaggaaagaggtttaattgacacatggtttagcatggctgaggaggcctcaggaagcttacaatcatggcagaaagcaaaggggaagcgaggtggccggaaggagaggttctgagtgaagggggaagagccccttataaaaccatcagatctggtgagaactcacaatcatgagaacagcaataggggaaaatgctcccatgattcacttacctccacctggtccctcacttgacacgtggggcttgtggggattatggggattatggagattacaatttaagatg

SEQ ID NO: 920171 - DNA, 569 bp, Homo sapiens
gtctatcaatttattgttccagtgtcttctgctccaggtaaacagatcttgactgcagctctctggttttacccaccaattcatattttcaagtggcagtttgctttgtgaactcaatttgtctaagaaaaattgttgatttctttctttggctatttctagttgttagaatgaaggtgacaatttccaagctttttatatttcagagctaaaatcaaaagtccattgtattagtccatttttatactgytataaagaacttcccaaaactcggtaatttataaaggaaagaggtttaattgacacatggtttagcatggctgaggaggcctcaggaagcttacaatcatggcagaaagcaaaggggaagcgaggtggccggaaggagaggttctgagtgaagggggaagagccccttataaaaccatcagatctggtgagaactcacaatcatgagaacagcaataggggaaaatgctcccatgattcacttacctccacctggtccctcacttgacacgtggggcttgtggggattatggggattatggagattacaatttaagatg

SEQ ID NO: 920172 - DNA, 630 bp, Homo sapiens
gctttcaccagactccaagtctgctggagccttgatcttgcactctccaggctccagaactgtgagcaacacattcttgctatttacaaattacctagttgaagatattttgttatagcagcaagaatggactaagacakgtattgatttgattcaccaattatagcaaatgcaccacaccaatataaaatattaataattgggaaaattatgagcagaatgagaaggagtatgtggaaactctcctttttctgttcaattttgctgtaaaattacatatgtttaagaaacaaagtctattaaaaatgtagttcctttcttatgcaaaccatatttcaatcaatagtcacactgtattggacactgcagatgtagaacattctaatcatctcagaaagttcatttgaaagacactattagaccattagcatttaatgtgtttatcaatatggttggcttcagtctaccactttgctatttgtttctgttttcccttcgttctttttttctctttctgtgcattttttctttacctaatggggcatatttgtaattcattttattttcattgttaattagctattattttgtgttaagtggcttctctacagttaacaatataaatctaac

SEQ ID NO: 920173 - DNA, 628 bp, Homo sapiens
gatgcctcattttggaacagtctgcatacttaattactagaaatagcagaaaaagggcattgattagggttcacatgagattgtctagtgagtatggttaggaagtaagaccatttgtttgtaaaccagaatttctagattctagtatttctacttctattaatatattatatgatttaktaaggtatttaagtttctatatttttatttgcccaatgagaagtaagattagcgattcttcattgcctaaattttggtcagccaagaacatgtgtacccataattggtccttttcttagcccccttgcagagacacagcctgctggccagcttattgtactctcttttcatttcccttactcctttaatcagaaatagagacgtgacaatgttgagtctcctgtggactaaagtggactgggaaacactgggctacaccataaaaggcctgtctggcaaatgctaataatccatattacatattcagtccttgtaacgtaaaaacagaaatctacagaacaaaataattgtacatataacccagtgcccagatgagtatttaaaagccttttttaaagcactttaaggaatctccacactgttttctccatagaagttgtactagttt

SEQ ID NO: 920174 - DNA, 626 bp, Homo sapiens
actacagtatttaagaacaaatgtgagtaatgaaccataaagtgaaatatgtaaggcagggaaatatttctggcaatacatatgctctacataaattttacttacgtataaggatactgaagtgtaggctgaggctacctagagacattgattagaaaataagcaataccactttgtttatacattagtgcttgtgtagcactttctgaagagttgcagagttgtgttgtgtcatgaaatagtaactatgtaacttatctcctttcttcctttctattttttttctccttctctctctcactctccttctctctccttctttgcactggctaccagggagcacagagcgtgatatactgagcaaatggctcagctctgccttggartgaacttaacactttcttattaatgatacctgtttttctatttttttctatatccttgcataccatttacagtgttatacaactgattttattatgaacaatttcaagtaccttttagagaagcagattgctaattcaaagcaaacatgaaacagatactagcatttgtaattaattttgaataaatttcaaagaatacagcaggatggtgatctgattcttttcctttggcttttttta

SEQ ID NO: 920175 - DNA, 591 bp, Homo sapiens
gatcatctgaggtcagtagtttgagaccagcctggccagcatggtgaaaccctgtctctactaaaaatacaaaattagccaggcacggtggtgtgcacatgtaattccagctaccggggaggctgaggcaggagaattgcttgaacccaggaggtggaggttgcagtgggtcaaaattgcaccactgcactctagcctgggcaacagagtgagacttcgtctttaaaaaaaagaaaaaaaaagaaaaagacagttttgggcagggattcgaccatccctattcttcccaccttttaggcagtttcaccctttctcctcctagtcttgggggagtgtaatccttrgcaaaggccactcacaataacatcagctaccaagggtcggattctcccttcttcttccccagtatagccaaacagtgggcatgcgacctaagcttatccaatcagaccctcctggaacagtcagtcttgagcacgtaggtgaatggctagaggtcaccatctcaagggcagcatcagccaggccaggctgctcctgttctggctgagggactgcctgcggtgcagtccccacatcctggcttccagg

SEQ ID NO: 920176 - DNA, 741 bp, Homo sapiens
ctagagatgcttggaggacaccaatgtaactgggtgaccagggttatcaccaccagaagtgagacaggacagccatacacctcctgatgtggtgcactgctgagagtccagcctaatttctgtggtcttactgccaaaaatgtatgacctggttatgatgatggatgcacaactctgtacaaacagatttcagcacttaacaaggatgagtggcatggtatgcaaattgtatctcaatacagtgatggttataaaagtctctaacccaagtctgatcataagacaacagcctaggccaggtgtggtggctcatgcctgtaatcccagtactttgggaggccaaggtgggtggatcacctgaggtcaggagtccaagaccagcctggctaacacggtgaaatcctgtctctactaaaaaaacagaaattagctgggcatggtggtgggtgcctgtaatcccagctacttgggaggctgaggcaggagaattgcttgaacccaggaggcggaggttgcagtgagcggaaattgcaccactgcactccagcctgggtgacagagagagactccatttcaaaaaaaaaaaaaaaraaagaaagaaaagaaaacatcctaggcaacacagggagatcccatctctacagaaaaatacaacaatcagccagatgtgatggtgcatgtcagtagtcccagctacttgggaggctatggcagaaggactgcttgaatccacgaggtcaa

SEQ ID NO: 920177 - DNA, 619 bp, Homo sapiens
ccagtgagtctggctgtcatttatttattttttttcttttcttttcttttttttttttttttttttttttttgagacggagtctcgctctgtcgcccaggctggagtgcagtggcacgatctccgctcactgcaarctccgcctcccaggttcacgccattgtcctgcctcagcctcccgagtagctgggactacagacgcccgccaccacgcccggctaatttgttttttgtatttttagtagagacggggtttcaccgtgttacccaggatggtatcgatctcccgacctcgtgatccacccgcctcggcctcccaaagtgctgggatgacaggcgtgagccaccgctcccggccctatttttttcttttttgagacagagtctcgctttgtcgtacaggctggagtgcaggggtgcaattggggttcactgcagcctcgaactcccaggctcaagcgatcctcctgcctcagccacccaagtagctggaaccacaggtccgcaccaccacgccccgctattttttgtgttttttgtagggacggggttgcaccatgttgctcaggctggtctcgaactcccgtgctcaagcgatccgccatcctgggcctcccaaa

SEQ ID NO: 920178 - DNA, 628 bp, Homo sapiens
cccactcacgcacggctgatgcacttgtggctaaatgcggtgcagtcagggccccgggccagattcagggcaggaaatagaataccacctccattgccagggaaacaatggtctacggacatgatttaaactggagccaacgagaacgctcagagggccgaccagcagaggaagggagaccagagggcagcttgcacagatcttgtcttgggttataactgttgacaagmcacttaactgcctccaggtttaagtttgtctgtgtataagatggaggtaacaatatttatacatctcactggagacttatgaaaacaagattttggacagatcccttgggacccatggatggaaagtggtatgtaagtgcagtgataaacctactgtgtgtgtgtgggggggtgttttcagcagtgtattagggacttgtagacccaccagaaaacacttttggagtctgatcaaaaacgacaagaaaaatgagcagctcttggttgcaagtgcatgggtttgctttggttttgtacaggtctgggagaattgcatgtgtaactcagacttcagaattgttttccacctgtcgctgtgatgagtcatacaggtgctcagatcatctgagaatgctgta

SEQ ID NO: 920179 - DNA, 657 bp, Homo sapiens
ctggcaatttccttctccctgtggagttttaccccctgctcctctggccgccctcctgatggattcctgtggtgccaggaaggaatggcctgcttggggacccagtgagctcccagggcctttctgctgcttcctctactcgtgtaattccctcagctctctaaattgactcagctccaggtaaagtcggaaacttctcctgcaaacagaccttcagcttctccagtgagggtgtatgttcgggagagragggtctccctttcccacttccgcagttggggcactcacagccatgttcttgccattgcacgctcacgtgggtgtctcccaggtcctgcgggagcagtccgcttccttcagagggtccgtgggtctattcaggattgctggtttgttcttgcagttgatctggagctaaaattcacaatgcaagcctccgcacactgctctgtctggagctgcaatctagtcctgcctcccatccgccatgatgatccacagtctgtttcttggcaatattcttaatttaatttgttgaggttgtaattcctcctcttcaattcttttatctagtgagtcaccaaattctgcttattattcctttgaagtcctacctattcatcattctaccagcagaatggcttcagtatttagggc

SEQ ID NO: 920180 - DNA, 599 bp, Homo sapiens
ctctaggaaaggcctcaaattccttacctcagcttcctgggattacaggcgcacgccaccatgcctggctaatttttttatttttagtagagacaggggtttctccatgttggccaggctggtctcaaactcatgacctcaagggatctgcccacctcagtctcccagagtgctaggattacaggcgtgagccactgtgcccagcctcaaattccttacatctatcagtttgtccgggcatcatttcctgatcacccactggtgctggccatttgctggggtgtgcagtgaggtggctggataagtctccagctatcacatgtgctggcataagcacatgggggtggagggtgggctctgtagaggcccccaagatccaggagccagtgctgaccaaacatctrgacaacatgtgtgatttcacatttaacctcaaattcagacttgctgtctcttgcttaaccttgtctgctgatctccgagggctatcagacctgtttctgcaaaaacacagtgaagtcacagcacaccctgccccggagctctctaagcttcctgtttttatgcagaaagcctgccctcctgtgaagctgaccatg

SEQ ID NO: 920181 - DNA, 612 bp, Homo sapiens
tcagacacagcacactaaaggtagagacagatatccatccacaaggaatggataaatatcttgtggcacatccattactggaacattactcagcaacaaaaaagaataaactggccgggcgcggtggctcacacctgtaatcctagccctttgggaggcgaaagcgggcggatcacgaggtcaggagattgagaccatcctggctaacacggtgaaaccccatctctactaaaaacacaaaaaattagccgggcatggtggcaggcgcctgtaatcccagctatttgggaggctgaggcaggagaatcgcttgaacctaggaggtggaggttgcagtgagccaagatcatgccactgcactacagcttgggtgacagaatgagactccatctaaaaaaaaaaaaaaaaaaaaaaagaataaaaccaatatgctcgaggaataaagccagacctggcctggctcagtggcccaygcctgtaatcctggcactttgggaggccaaggcgggtggatcacctgaggtcaggagttcgaaaccagtctggccaacatggtgaaaccctgtctctactaaaagtacaaaaattagctgggaatagtggtgggcacct

SEQ ID NO: 920182 - DNA, 714 bp, Homo sapiens
taacagctgcactgccaactgaaagactctcagtggccaaagctggaacaatttgagcaacaaaacaaagtagtattggattataacccaaggtataaagtaaatatacatgagtccatactgacataagtaaataaatgggggagaacaggcaactctccagaacagaattccagaagattatgtagatactccaccaccttggaggaacagggtaacttcccagtcctyacgtgtaggctgcacacagtgacttccttccaaagagttatgaaaagggagaaaaagagtaacttcaaagcagagaaacctagccacgtgcaatagctcacatctgtaataccagcactttggtaggctaaggcagacagattgcttgagcccaggagttcaagaccagcctgagcaacatggcgaaaacccgttctctacaaatatacaaatacaaaaaattattcgagcatggtgacgtggcctgtagtcccagctactcgggagggtgagatgagaggatcacccaggcccaggaggttgaagctgcagtaagccaaaatgacactactgcactccagcctggaagacatagtggaccctgtctccaaaaaaaaaaaaggtacagaaacctaacatgtatctcagccaggtgatcaacgtcaacattaacagtgataaattatgttgtagtatgcagccttgatgaaaatgtactttacc

SEQ ID NO: 920183 - DNA, 714 bp, Homo sapiens
taacagctgcactgccaactgaaagactctcagtggccaaagctggaacaatttgagcaacaaaacaaagtagtattggattataacccaaggtataaagtaaatatacatgagtccatactgacataagtaaataaatgggggagaacaggcaactctccagaacagaattccagaagattatgtagatactccaccaccttggaggaacagggtaacttcccagtccttacgtgtaggctgcacacagtgacttccttccaaagagttatgaaaagggagaaaaagagtaacttcaaagcagagaaacctagccacgtgcaatagctcacatctgtaataccagcactttggtaggctaaggcagacagattgcttgagsccaggagttcaagaccagcctgagcaacatggcgaaaacccgttctctacaaatatacaaatacaaaaaattattcgagcatggtgacgtggcctgtagtcccagctactcgggagggtgagatgagaggatcacccaggcccaggaggttgaagctgcagtaagccaaaatgacactactgcactccagcctggaagacatagtggaccctgtctccaaaaaaaaaaaaggtacagaaacctaacatgtatctcagccaggtgatcaacgtcaacattaacagtgataaattatgttgtagtatgcagccttgatgaaaatgtactttacc

SEQ ID NO: 920184 - DNA, 806 bp, Homo sapiens
tggagcccagagcgcttggtaaaggagcgtgtgtagcacagcacagccagggatggccatccctggctgacttgctcccattggagactttagccccagggatactgtcagacctgaactctacagggtagtcttctccatcagatgggactggtctgacctgagcaccccttgrtctgctggtctctcccagaaatccagcctgaccgtgcctgcttgcagggcagcctcaggtgccctggggcctgtatcatagctttagcgctggcaaaccatgcctgacctgtagagagctccagtgggagggcccccacagccacacaccagcctgacactccctccccacatggcagcttccccctggaccacggcaacccctcacattgctttactggtgcatgtgtgtgaacggttttgcttttcttgccctgccaatgtagatgtatatatgttctttgccctgccactgctacactgcgagtgcagtccacccgccccttccccctaccaactgccattgcaattgaagccttagtgggcacagagacagccaggcctgtcctcaccagcaccctgctctggatccaacactgtcacgggagtcaaactaggcatgaagaacagcagaacctcccccactctgagcaaccattcctgcctatggagaacacacaaaggcctgtgcctgctagcacctgtgcaaacatcaccaccagcatgaccacaagcatagtcaccagcagggacctcttgacacccccagccatgttgcctctgccactgtggtgaacgcctgcacaggggca

SEQ ID NO: 920185 - DNA, 619 bp, Homo sapiens
cctcctgtcttacccagatactcctttctattgattccaggtctttagctaataactctttcaaccaattgtgaatcagaaaatattttgccaggcacggtggctcatgcctgtaatcccagcactttgggaagccaaggtgggtggatcacctgagatcaggagttcaaaaccagcctgaccaacatggtgaaacccccgtctctactaaaaacacaaaattagctgggcatggtggtgcatgcctgtagtcccagctactcaggaagctaaggcaggagaatcacttgaacccaggaggcggaggttgcaatgaactgagatcatgccactgcactccagcctgagtaacaaaagcatctcaaaaaaaaaaatatatatatatgtatatatatgtgtatatatatgtatatrtgtatatatatgtgtatatatgtgtatatatatgtgtgtatacatatatatatatatataaaaagaaaaaagaaatctttgaacccacttgtgaccaggaagcccatccctgccttggagttgtcccgcctttcttggcagaaccaacaaatacctttcatgtactgactgatgtctgcctgtaacttctgtccttgtacaaggt

SEQ ID NO: 920186 - DNA, 622 bp, Homo sapiens
aaaaaattgataataaaagaaaccagaaggctgggcgtggtggctcacacctgtaatcccagcactttgggaggccgaggagggcagatcacggggtcaggagattgagacctgcctggccaacatggtggaacttcgtctctactaaagatacaaaaaattagccgggcatggtggcacgctcctgtaatcccagctactcgggaggctgaggcaggagaatcactttaatctgggaggtggaggctgcagtgacctgagatcgcgccattgcactccagcctgggtgacagggagatactccatctcatagataaataaataaataactacaaggggagcaaaacacactggatccttttggagggtggggggtgggaggarggagaggatcaagagaaacaaccaatgggtaccaggcttaatacctgggtgataaaataatctatactacaaaccctcatgacacaagtttaccagtgtaacaaatctgcacttgtatcctgaatttaaaagttaaaaaaaaaaaaaaaaaaaaaaaagaaactacaatgtctgagagaagaataggatttttacaaatccgtagcccatagagtatttcaataaggacagataccaa

SEQ ID NO: 920187 - DNA, 622 bp, Homo sapiens
aaaaaattgataataaaagaaaccagaaggctgggcgtggtggctcacacctgtaatcccagcactttgggaggccgaggagggcagatcacggggtcaggagattgagacctgcctggccaacatggtggaacttcgtctctactaaagatacaaaaaattagccgggcatggtggcacgctcctgtaatcccagctactcgggaggctgaggcaggagaatcactttaatctgggaggtggaggctgcagtgacctgagatcgcgccattgcactccagcctgggtgacagggagatactccatctcatagataaataaataaataactacaaggggagcaaaacacactggatccttttggagggtggggggtgggaggagggagaggatcaagagaaacaaccaatgggtaccaggcttaatacctgggtgataaaataatctatactacaaaccctcatgacacaagtttaccastgtaacaaatctgcacttgtatcctgaatttaaaagttaaaaaaaaaaaaaaaaaaaaaaaagaaactacaatgtctgagagaagaataggatttttacaaatccgtagcccatagagtatttcaataaggacagataccaa

SEQ ID NO: 920188 - DNA, 444 bp, Homo sapiens
ggttgcagtccgtaagaggaagaaccacctctatctctggatgaagaatattttaaattacctgggtcagctgatgcactatcagttctataaaaagagaaaagtttaagattagaactttaaataacataaataaatctttctttaaacaagcctctcttctcccaaattttacatttaaccattactattgtatttartgtaatatgtactatatattatatgtaagcactcagccgtctaataagaagtctttcactgggaagagattctcaatggatgaaatgccaacttttcagtctcttctactgttctaaagacccattcagaaatacgaataactactgggattagggtgactttgctggttttagcattgaaagcctcctgtcccaggcaaaacaggacaattggttactctggtccagtgttctcctcacatga

SEQ ID NO: 920189 - DNA, 598 bp, Homo sapiens
gtaagatggggttttgccaagttgcccaggctggtcagctcctgagctcaagtgatctgcctgcctcggcctccaagtagctggggctataggcttgagccactgtgcctggctaatttttaaatttttgtagagacagggtcttgctcttttgcccaggctggtctcaaattcctgggytataagtgatccacctgccttggcctcccatagtgctggtattacaggcatgagccacggtgtccaacgttttttagacttttattcctaaaagataaccaggaaatattaccacatgtactgggtgatgaagtccttcagttcactcagagctctgggcgctagggtcagagtgacaaatgagagagacgtggtgtctgctcttacagaccccgtgatttatagcagcagggacagataatttgtcaccgtcgcatataatcagtgtcatgagaggggatcagaggggactctgggaaggtatagccaggggtcctactggtctaggtgctaaggacagcttctgagggtgatgctgaaggttcgccctggagaatgaaggggagcaggtgggacaggctggtgggacagggcctgg

SEQ ID NO: 920190 - DNA, 598 bp, Homo sapiens
gtaagatggggttttgccaagttgcccaggctggtcagctcctgagctcaagtgatctgcctgcctcggcctccaagtagctggggctataggcttgagccactgtgcctggctaatttttaaatttttgtagagacagggtcttgctcttttgcccaggctggtctcaaattcctgggttataagtgatccacctgccttggcctcccatagtgctggtattacaggcatgagccacggtgtccaacgttttttagacttttattcctaaaagataaccaggaaatattaccacakgtactgggtgatgaagtccttcagttcactcagagctctgggcgctagggtcagagtgacaaatgagagagacgtggtgtctgctcttacagaccccgtgatttatagcagcagggacagataatttgtcaccgtcgcatataatcagtgtcatgagaggggatcagaggggactctgggaaggtatagccaggggtcctactggtctaggtgctaaggacagcttctgagggtgatgctgaaggttcgccctggagaatgaaggggagcaggtgggacaggctggtgggacagggcctgg

SEQ ID NO: 920191 - DNA, 598 bp, Homo sapiens
tcctaataaacctggaagcgctatgggagagtggggcttatttcatccctacagctttgaccataaatgacggctgccccccgaagcggccatttcagaggcctcccctcagggatgcatcctctttctcagggatgttccttgctgagaaaaagaattcagtgatatttctcccatttgcttttgaaagaagagaaatatggctctgttccgcctggctcaccggcagtcagaatttaaggttgtctgtcttattccctgaacattgctgttatcctgttcttttttcaaggtgcccagatttcatattgttcaaacacacatgctctacaaacaatttgtgcagttaacacaatcatcaccrggtcctgaggtgacatgcatcctcctcggtttacgagatgacgggattaagagattaaagtaaagacaggcataggaaatcacaagggtattgattggggaagtgatatgtgtccatgaaatcttcacaatttatgttcagagattgcagtaaagacaggcataagaaattatgaaagtattaatttgggaaactaataaatgtccatgaaatcttcacaatttatgttcttct

SEQ ID NO: 920192 - DNA, 704 bp, Homo sapiens
ggacacaggcttgacttatgtcccaggaggggagtagaagtgaggggctgttgagtggatttgtaagaggccatttggaatcttaaaaatatttttcccggccgggtgtggtggctcacgcctgtaatcccagcactttgggaggctgaggtgagtrgatcacctgaggtcaggagtttgagaccagcctgaccaatatggtgaaacctgtctctacaaaaaatacaacaattagcaaaatacaacaattagccaggtgtggtggcgcgcgcctctagtcccagctacttgggaggctgagacaggagaattgcttgaacccaggaggcggagattgcagtgagccgagatcacaccattatactccagcctgggtgacagagcaagactccacctcaaaaaaaaaatttccctctgggggtggtcagaatttgtgcctgtgttgtgtgagtttgtgagattgtagcttggcccaggtaggcagccctgtggctggaggctgtggcaagctgtcagaagttgcccaggccagggcctcaagtgtgcaggacaagctcgggcacctggctgcctgcaggtgaggccctgaggcctgggagaggctgggctccccaggtttgccccaggacagtctccccaggacacagggctgagagcggacatgggaagtaccccggccagacacacagaaagctgctggtttt

SEQ ID NO: 920193 - DNA, 695 bp, Homo sapiens
taggactgaaaaagaccactggatttagccacatggaatccatcagggatctttgatgagagcagacacaaagacctgattggagtgggtacaagagcgaatggaagaagaggaattagagatgagtattccacacctctactgaggaatcttactattgagtgatgcaagaaatggagtggtaggtaggkagagggggatatagcacacacacacacacacacgtatacacacacacatataatttgagatgagaaaaatacatgttactatgctaatgggaaagatccagtagacgaaaaaaaaaataatgcaggaaagagaacaactgtaggaattatgccctagtttaaggatgggatctaatacactagaggacgacttgatcttaggtaagagaacaaagtgtcaaccatagcaacagaaagaatgcaagaataagatgcacagagaagaggaattatcttctgattccttttttaaaaaaattatttttttgagaccacgttatgagactcatttttttttgcatttttggtagaaacagagttttgccatgttgcccagactggtctcgaactcctgggctcaagaaattcgcccacccagcctcccaaagtgttgagattaaaagtgtgagtcactgcacctggcctcttctgattccttttcttgttctcagttaactaggaaat

SEQ ID NO: 920194 - DNA, 758 bp, Homo sapiens
cctttgaattctttcctgggagaagccaagcacctgtatgagctcatctgcctgcatcaataggactgaaaaagaccactggatttagccacatggaatccatcagggatctttgatgagagcagacacaaagacctgattggagtgggtacaagagcgaatggaagaagaggaattagagatgagtattccacacctctactgaggaatcttactattgagtgatgcaagaaatggagtggtaggtagggagagggggatatagcacacacacacacacacacgtatacacacacacatataatttgagatgagaaaaatacatgttactatgctaatgggaaagatccagtagacgaaaaaaaaaataatgcaggaaagagaamaactgtaggaattatgccctagtttaaggatgggatctaatacactagaggacgacttgatcttaggtaagagaacaaagtgtcaaccatagcaacagaaagaatgcaagaataagatgcacagagaagaggaattatcttctgattccttttttaaaaaaattatttttttgagaccacgttatgagactcatttttttttgcatttttggtagaaacagagttttgccatgttgcccagactggtctcgaactcctgggctcaagaaattcgcccacccagcctcccaaagtgttgagattaaaagtgtgagtcactgcacctggcctcttctgattccttttcttgttctcagttaactaggaaataag

SEQ ID NO: 920195 - DNA, 758 bp, Homo sapiens
cctttgaattctttcctgggagaagccaagcacctgtatgagctcatctgcctgcatcaataggactgaaaaagaccactggatttagccacatggaatccatcagggatctttgatgagagcagacacaaagacctgattggagtgggtacaagagcgaatggaagaagaggaattagagatgagtattccacacctctactgaggaatcttactattgagtgatgcaagaaatggagtggtaggtagggagagggggatatagcacacacacacacacacacgtatacacacacacatataatttgagatgagaaaaatacatgttactatgctaatgggaaagatccagtagacgaaaaaaaaaataatgcaggaaagagaacaactgtaggaattatgccctagtttaaggatgggatctaatacactagaggacracttgatcttaggtaagagaacaaagtgtcaaccatagcaacagaaagaatgcaagaataagatgcacagagaagaggaattatcttctgattccttttttaaaaaaattatttttttgagaccacgttatgagactcatttttttttgcatttttggtagaaacagagttttgccatgttgcccagactggtctcgaactcctgggctcaagaaattcgcccacccagcctcccaaagtgttgagattaaaagtgtgagtcactgcacctggcctcttctgattccttttcttgttctcagttaactaggaaataag

SEQ ID NO: 920196 - DNA, 677 bp, Homo sapiens
actgcctccagtactcgggcttcccgcagcagccgctccagggcccatgcctcctggcagcgcaggggcccaaatgtgcccagtttctggagaacatgggtggccaagtagctcaggcctcagggtagggctcgggaggatcgtgctcagggacaagtcccagcatgcactgggggaggttggggttgcagagttgggagatactccattcagcaagggccagatgccaagggccctggggcactggggtgtggcactcagaggaggtatagaggaccaggatggaarggcaggactccctggggttaggggttacaaaggaagggtgggggaacaccatcagcctcaccagcaggaggcgactgcagtggtacaggtgccggaccaaggcagcatccagagctggacaccccgtgctgagggggcgggcactgggtgagtctatgctgtcctcagccccagcctccgggctgcttggaggcctgagggaaaaatggggtccaccaccccacaggcacacatcaccacctggtcaccagcgtttatttttattaagcttcccccatgccagaaaggaagaagatgatgcaccgacagcagacagtggggtaagttcatggaggatttccagaaggaggaaggggctgggaccagcaggtggtagtagggatctctgg

SEQ ID NO: 920197 - DNA, 564 bp, Homo sapiens
tgttttaagagttagtatttgcaaaataacagatgtttctcaggatgtagagacaatagaactcttatacactgttggcaggaacgcaaattggtacaacttctatggaaaacagtatggagatttatcaaagaactaaaagtagaacaaccatttgatccagcaggcacactaccagatatctattcaacaacaaaaaattgttatataaaaagatagctgcactcatatgtttatcacaacactattcataatagcaaagatrtagaatcaacctaagtgttcatcagtggatgattggataaagaaaatgtggacacactaaatagaaacaaacacaaaaaaggaatacatacacaaacagacacacacaatggaataatatttagtcatcaaaaaggataaaagtatttcttttgcaacatggttaggactggaggccattatcttaagtgaagtgggtcagacatagaaagacaaatatcacatgttctcactcataagtgggagctaaataatgtatacatgtggatgtagagtatggaatgacagacaatggagatt

SEQ ID NO: 920198 - DNA, 564 bp, Homo sapiens
tgttttaagagttagtatttgcaaaataacagatgtttctcaggatgtagagacaatagaactcttatacactgttggcaggaacgcaaattggtacaacttctatggaaaacagtatggagatttatcaaagaactaaaagtagaacaaccatttgatccagcaggcacactaccagatatctattcaacaacaaaaaattgttatataaaaagatagctgcactcatatgtttatcacaacactattcataatagcaaagatatagaatcaacctaagtgttcatcagtggatgattggataaagaaaatgtggacacactaaatwgaaacaaacacaaaaaaggaatacatacacaaacagacacacacaatggaataatatttagtcatcaaaaaggataaaagtatttcttttgcaacatggttaggactggaggccattatcttaagtgaagtgggtcagacatagaaagacaaatatcacatgttctcactcataagtgggagctaaataatgtatacatgtggatgtagagtatggaatgacagacaatggagatt

SEQ ID NO: 920199 - DNA, 595 bp, Homo sapiens
ctgtaaagatggacaatttgacgtccacttttccaatttgaatgcttactatttctttttcttgactgattgctttggctacaacttccagtagtgaaagcgggtatccttgtcttcttggcattcttagaggaaaggcttttggcttttccctattcagtatgatgttaactataggttcgtcacacatggcctttaatatgttgatgtatattccttctgtgcctagcttattaggagtttttaatcataaagtgatgttgaagtttatcaaatgctttttctatatctgctgagatgatcatatggtttttgactttcattctgttgatgtgatatatcccacttattgatttgtgtatttgaaccaccctgaacccctggaataaatttcacttgatcatggtgtattatctttttgaygtgctgttagattccgtttgctagtattttgctgaggatttttgtgtctgtagtcatcagggatattggcctgtagttttattgtgtccttgtctggttttggtagcagggtaatgctagcctcatgaaatgaattaatgagaatttcctcctcttcaatttcttggaatcg

SEQ ID NO: 920200 - DNA, 538 bp, Homo sapiens
tgttaaccttcagccaagacaaaacctcagttcagctacttacctagggatgggtctcaggctgaagactgctctctaccatccttgaagcaggaaaaaaactcgaacttgtcttccctgctgggagcaagctcaaactccataaaagagttgtcagccttccatcatcacggacccaggaaatcttgccttccttcttggaagcaaataaaactccaaaagaaggrgagggggagttgtacatcaaataaactttagatcacgaccaagttttgagagatcagggactctctggagggggtgctcccagacctcagcaaattgtcctgttggtttgagccataaggttagctcatgctgctaccaagcaccaatagatctgtcaaaggtcaggggcacctcaactcagaatccctccatggttaccaaaatgtgaaccccccaaatctgagacaggtctcagttaatttagaaagtttattgttccaaggttgaagatgcacacccgtgacacagcctcaggatgtcctgacgacat

SEQ ID NO: 920201 - DNA, 733 bp, Homo sapiens
gctgcctggagaaaaaggaacattaaaaaaaaaaaaaaagattaaaattagccgggtatggtggtgcacgcctgtagtcccagctacccaggaggctgagacaggagatcacttgagcccagaagcaggaagctgaagtgagccatgatcacaccagcgcacttcagcctgggtgacagagcaagaccctgtmtcaaaaaaaaaaaaaaaaaaaaaagaaaaagaaaagatagatttaacaaatggtgcttagacaactggataagcacatgcaaaagaatgcatttggactcctacctcaaaccatatacaaatattaactcaaaatggaccatagacctaaatgtaagagctgaaactggctgggtgcggtggctcatgcctgtaatcccagcactttgggagaccaaggcaggcagatcacttgaggccaggagttcaacaccagcctggccaacatggtgaaacccctgtctctactaaaaacacaaaaattagctgggcttggtagcatgcacctatagtcccagctactcaggaggctgaggcaggagaattgcttgaacccaggaggtggaggttgcagtgagccaagattgcacaactgcactccagcctgggcaacagagcaagcctctgcctccaaaataaataaataaataaaaataagtcaatcaaatttaaaactggacaaaggatttaaatagacatttctccaaagaagatacacaag

SEQ ID NO: 920202 - DNA, 733 bp, Homo sapiens
gctgcctggagaaaaaggaacattaaaaaaaaaaaaaaagattaaaattagccgggtatggtggtgcacgcctgtagtcccagctacccaggaggctgagacaggagatcacttgagcccagaagcaggaagctgaagtgagccatgatcacaccagcgcacttcagcctgggtgacagagcaagaccctgtatcaaaaaaaaaaaaaaaaaaaaaagraaaagaaaagatagatttaacaaatggtgcttagacaactggataagcacatgcaaaagaatgcatttggactcctacctcaaaccatatacaaatattaactcaaaatggaccatagacctaaatgtaagagctgaaactggctgggtgcggtggctcatgcctgtaatcccagcactttgggagaccaaggcaggcagatcacttgaggccaggagttcaacaccagcctggccaacatggtgaaacccctgtctctactaaaaacacaaaaattagctgggcttggtagcatgcacctatagtcccagctactcaggaggctgaggcaggagaattgcttgaacccaggaggtggaggttgcagtgagccaagattgcacaactgcactccagcctgggcaacagagcaagcctctgcctccaaaataaataaataaataaaaataagtcaatcaaatttaaaactggacaaaggatttaaatagacatttctccaaagaagatacacaag

SEQ ID NO: 920203 - DNA, 540 bp, Homo sapiens
ctcctgaggctggtggggacttggagaatctttatgtctagctaagggattgtaaacacaccaatcagcaccctgtgtctagctcagagtttgtgaatgcaccaatgggcactctgtatgtagctaatctagtggggaggtggagaacttttgtgtctagctcagggattgtaaacgcaccaatcagcatcctgtcaaaacggaccaatcggctctctgtaaaatggaccaatcagcaggatgtgggtggggccagataagagattaaaagcaggctgcctgaaccagcagcaacaaccctctccaatccccttccacattgtggaaggtttgttctttgcaataaatcttgctgctrctcattctttgagtccaccctgcctttgtgagctgcaacactctctgctaaggtctgcagcttcactcctgaagccagcaaagaccgtgaacccaccagaaggaagaaactctgaacacatccaaacatcagaaggaacaaactccagacacgctgcctttaaaaactgtaacactcactgc

SEQ ID NO: 920204 - DNA, 643 bp, Homo sapiens
cggcagtgtaaacaagagcagggcatgtatgagtagttgagaatggagaacaggagtatgactagacagaaaatagtagggatgacaagttttttgggggcacagtctaagttggtccggtgtctggaatgagactggggcctaataaaaaggagctcaaatgggctgtaccttgtagcatgccgaggacaggtctgacttctaagaagggaaagtggtaaaagtattgtccagtctttttaagttggtggctgagcttggtgaggtstgtttttaaaagacctttagtccgttctacttttcttgaagacagaggaccgtaagggatataaaggtttcactgaatactaagagcctgaaaaactgcttggctgatttgactaataaaggctggtctgctatcagactgtatcgaggtgggaaggctaaactgaggaattatgtctgacagaagggaagaaatgactgcggtggccttctcagaccctgtaggaaaggcctttacttattcagtgaaactgtctatttagactaagaggtattttagtttcctgacttggggcatgttgaataaagctaatttgccagtcctgggtggggcaatccttgagcttgatgtgtagggaagggagggggcctgaat

SEQ ID NO: 920205 - DNA, 631 bp, Homo sapiens
agagacagtcggccggcagaattttttctcttaaggggtggtcaatctggtcttttaaagccttttactgattggatgaggcccactgatagcgtttgggtctatgtctctgcccaaatcctatgtcaaattgcaataatcattattggaggtctggggcctggtgggaggtgatttgatcacagggatggatttctcctttggtgctgttctgctgatagtgagttatcacacaatctgtttgtttaaaagtacatggcacctccccattctctctctttctcctgctccagccatgtaacacatgtctgctcccccttygtcttctgccatgactgtaagtttcctgaggcttccttagtcatgcttcctgtacacctgtggaactgtgagccaattaaacctttctctataaattactcagtctcaggtagttctttatagcaatgagagaatggactaatacatccatccacattataaagggtaatctgttttactcaatgtccacagatttaaatgttaatctcatgcaaaacacacctttacagaaatatccagaataatgattgatcaaatatctgaacaccgtgatctaatcccattacacataaaattgatcatcacaaac

SEQ ID NO: 920206 - DNA, 648 bp, Homo sapiens
accagctggatttttttcagaaatcgacaagctgctattaagattcatatgaattaaagaaacaagaatagtaaaaatgatctttaaaaaacaaatttggaagactcacactttccaatttttaaacttaccacaaagctacaataatcaaaacagcttagtacttttgttgaaataaggaaagatatgtagttccatgaaacaaaattgagaccagaagtaaayacatccatatctagtgtatttttttatttttttaattgagacggaatctccctctgtcacccaggctggagtgcagtggcccaatctcggctcactgcaacctctgtctcccgggttcaagcaattctcctgcttcagcctcctgagtagctggtgttacaggcgcccaccaccacacccagctaatttttgtatttttagtagagacggggtttcggggtttcgctatgttggccaggctggtctcggactcctgacctcaggtgatccattcacctcagctttccaaagtgctgggattacaggcatgagccaccgcgcccagcctgtattttttaaaagactctcaaattcatacaataggaaagactgaccctttggagaaacagtgctggcacaattgaatattcacatgcgaaagaa

SEQ ID NO: 920207 - DNA, 704 bp, Homo sapiens
caagggtcgatctcagaccatctttacaccagcatgctgtactgaatgaatgactgaattaatgcaaccagcaacaccaaaatgatgcaagatctagagagaagagagccctactgagccagttcctgcagcgtgagagaaggtccyggatggccagttaaagggtctggctacagatggcagagatggcagtcgaggatgggcacctgctgtgtgaagcaggctcccagggccctgcagtcctccttcgcttgggttcccatggccaaaggccagcctctgccttcctatatctcacgatactgcaattgcatgttcatgcgcctgcctctcccacttcagacgcagggccagggttccactcagccctttcagccaggactgtttgcctcgcctagaaacaacccatttttctttctttctttcttttgagatggagtttcgctcttgtcacccaggctggagtgcaatggcgcaatctcagctcactgtaaccgccacctccaggggctcaagcgattctcctgcctcagcctcccaagtagttgggattataggcacccaccaccatgcccagctaatttttgtatttttaatagagacggggtttcaccgtgttggccagactggtctccaactcctgacctcaggcgatctgcctgccgcggcctcccaaagtgtgggattacaggtgtgagacatca

SEQ ID NO: 920208 - DNA, 724 bp, Homo sapiens
ttccactcagccctttcagccaggactgtttgcctcgcctagaaacaacccatttttctttctttctttcttttgagatggagtttcgctcttgtcacccaggctggagtgcaatggcgcaatctcagctcactgtaaccgccacctccaggggctcaagcgattctcctgcctcagcctcccaagtagttgggattataggcacccaccaccatgcccagctaatttttgtatttttaatagagacggggtttcaccgtgttggccagactggtctccaactcctgacctcaggcgatctgcctgccgcggcctcccaaagtgtgggattacaggygtgagacatcacgctaggccccatttttcttttgcccaggctggagtgcagtggtacgatctcggctcactgcaacccctgcctcccgagtagctgggattacaggcatgcaccaccacgcccagctaattttattttatttttatttttgtatttttagtagagacagggtttcaccgtgttggtcaggctggtctcgaactcctggccccgtgatctgcccaccttggcctcccaaagtgttgggattacaggcatgagccactgtgcctggcccccatttttcttaaataaaggagagaacaggattcaagactttaggagccctggtgagaacacagccagatccactccagaggcagccgagcaagaagccacttcctgtca

SEQ ID NO: 920209 - DNA, 724 bp, Homo sapiens
ttccactcagccctttcagccaggactgtttgcctcgcctagaaacaacccatttttctttctttctttcttttgagatggagtttcgctcttgtcacccaggctggagtgcaatggcgcaatctcagctcactgtaaccgccacctccaggggctcaagcgattctcctgcctcagcctcccaagtagttgggattataggcacccaccaccatgcccagctaatttttgtatttttaatagagacggggtttcaccgtgttggccagactggtctccaactcctgacctcaggcgatctgcctgccgcggcctcccaaagtgtgggattacaggtgtgagacatcacgctaggccccatttttcttttgcccaggctrgagtgcagtggtacgatctcggctcactgcaacccctgcctcccgagtagctgggattacaggcatgcaccaccacgcccagctaattttattttatttttatttttgtatttttagtagagacagggtttcaccgtgttggtcaggctggtctcgaactcctggccccgtgatctgcccaccttggcctcccaaagtgttgggattacaggcatgagccactgtgcctggcccccatttttcttaaataaaggagagaacaggattcaagactttaggagccctggtgagaacacagccagatccactccagaggcagccgagcaagaagccacttcctgtca

SEQ ID NO: 920210 - DNA, 578 bp, Homo sapiens
tcacttttttttttttttttttttttttgagacggagactcgctctgtcgcccaggctggagtgcagcagcgcgatctcggctcactgccagctccgtctcccgggttcacgccattctcctgcctcagcctcccgagtagctgggactacaggcgccggcaaccacgcctggctaatttttttgtatttttaatagagacggggtttcaccgtgttagccaggatggtctccatctcctgacctcgtaatctgcccgcctcagcctcccaaagtgctgggattacaggcgtgagccaccgtgcccggccacattcacttctactacagatgacctacagttctcttccatgcagagaactttgagcttacctcactcccagtsagtgacagatggaaagaagaggtctgtctcccaacaactatatacaaatcctagggaaggattctgattggccctgctgggactacatgtccattctttgggccaatcactgtagccaaggaataggcgcctatgattggctggacctggccatgtgcccatgggggtgtgttatgaggggttctcagatggac

SEQ ID NO: 920211 - DNA, 751 bp, Homo sapiens
gggcatgtaattcaatcatgggggcaatttctcctatgctattcatgggatagtgagtaagttctcatgagatctggtggttttataaagggcttcccccttcatttgattcttcttcttctctctcctgtcaccttgtggaaaaggatgtgtttgcttccccttctgccatgattgtaagtttcctgaggcctccctagtcctgtggaactgagtcgattaaacctctttcctttataaattacctcatctcaagtatgtccttattagsaacctgagaacagactaatacagtaatttataaagaaaagaggtttaatttgctcacagtactgcaggctgtagaggtgcatggctagggaggcctcaggaaactttcaattatggtggaaggcaaattgggaagcaggcatgtcttcacatggttgagcaggagagagagaaagtgaaggtgaaggtgctacatacgtttaatcaaccagatgtcatgcgaacttaatatcacaagaatagcaagggggcaatctgcctccatgaaccaatgacctgccaccaggcccctcttctgcaaatctacatgagatttgggtggagacacaaagccaacccatatcactaggtgccatgctaagtgccctacatcaaataactcatataatataaaacaaaacaaaaaaatccccaataggctctaataatccaattttacaaatgaggtgatagaagttcatagagattaagtgacttttcc

SEQ ID NO: 920212 - DNA, 751 bp, Homo sapiens
gggcatgtaattcaatcatgggggcaatttctcctatgctattcatgggatagtgagtaagttctcatgagatctggtggttttataaagggcttcccccttcatttgattcttcttcttctctctcctgtcaccttgtggaaaaggatgtgtttgcttccccttctgccatgattgtaagtttcctgaggcctccctagtcctgtggaactgagtcgattaaacctctttcctttataaattacctcatctcaagtatgtccttattaggaacctgagaacagactaatayagtaatttataaagaaaagaggtttaatttgctcacagtactgcaggctgtagaggtgcatggctagggaggcctcaggaaactttcaattatggtggaaggcaaattgggaagcaggcatgtcttcacatggttgagcaggagagagagaaagtgaaggtgaaggtgctacatacgtttaatcaaccagatgtcatgcgaacttaatatcacaagaatagcaagggggcaatctgcctccatgaaccaatgacctgccaccaggcccctcttctgcaaatctacatgagatttgggtggagacacaaagccaacccatatcactaggtgccatgctaagtgccctacatcaaataactcatataatataaaacaaaacaaaaaaatccccaataggctctaataatccaattttacaaatgaggtgatagaagttcatagagattaagtgacttttcc

SEQ ID NO: 920213 - DNA, 751 bp, Homo sapiens
gggcatgtaattcaatcatgggggcaatttctcctatgctattcatgggatagtgagtaagttctcatgagatctggtggttttataaagggcttcccccttcatttgattcttcttcttctctctcctgtcaccttgtggaaaaggatgtgtttgcttccccttctgccatgattgtaagtttcctgaggcctccctagtcctgtggaactgagtcgattaaacctctttcctttataaattacctcatctcaagtatgtccttattaggaacctgagaacagactaatacagtaatttataaagaaaagaggtttaatttgctcacagtactgcaggctgtagaggtgcatggctagggaggcctcakgaaactttcaattatggtggaaggcaaattgggaagcaggcatgtcttcacatggttgagcaggagagagagaaagtgaaggtgaaggtgctacatacgtttaatcaaccagatgtcatgcgaacttaatatcacaagaatagcaagggggcaatctgcctccatgaaccaatgacctgccaccaggcccctcttctgcaaatctacatgagatttgggtggagacacaaagccaacccatatcactaggtgccatgctaagtgccctacatcaaataactcatataatataaaacaaaacaaaaaaatccccaataggctctaataatccaattttacaaatgaggtgatagaagttcatagagattaagtgacttttcc

SEQ ID NO: 920214 - DNA, 751 bp, Homo sapiens
gggcatgtaattcaatcatgggggcaatttctcctatgctattcatgggatagtgagtaagttctcatgagatctggtggttttataaagggcttcccccttcatttgattcttcttcttctctctcctgtcaccttgtggaaaaggatgtgtttgcttccccttctgccatgattgtaagtttcctgaggcctccctagtcctgtggaactgagtcgattaaacctctttcctttataaattacctcatctcaagtatgtccttattaggaacctgagaacagactaatacagtaatttataaagaaaagaggtttaatttgctcacagtactgcaggctgtagaggtgcatggctagggaggcctcaggaaactttcaattatggtggaaggcaaattgggaagcaggcatgtcttcacatggttgagcaggagagagagaaagtgaaggtgaaggtgctacatacgtttaatcaaccagatgtcatgcgaacttaatatcacaagaatagcaagggggcaatctgcctccatgaaccaatgacctgccaccaggcccctcttctgcaaatctacatgagatwtgggtggagacacaaagccaacccatatcactaggtgccatgctaagtgccctacatcaaataactcatataatataaaacaaaacaaaaaaatccccaataggctctaataatccaattttacaaatgaggtgatagaagttcatagagattaagtgacttttcc

SEQ ID NO: 920215 - DNA, 670 bp, Homo sapiens
aattatcacatattaaatgcacccatgtaatgaccactcagatcaagaaataaaccgttactagctttccagtagccctgacttttgtttcccccagttcactacaattttgacttctacttcattcatcaattttgcttgtttttggacttaatataaatggacccatacagtgtatattctttcatgtcaagctttttaaaaaggtaacatcattttttgaaacttatttatataatttattatagcagtaattcattcctttttattkctgtatggaattctatttgatgatacaccacaatttactcattcattctattgatggacatttgggttgtttaaagggctttttttctaccagaatatgcgactatgaacatttttgtttcttgctaaacaatcccatcaaaaagtgagctaatgacctgaatagacaactcttaaaagaagatatacaaatgaacaacaaacatatgaaaaaatgctcaacatcactaatgatcagggacgtgcaggttaaaaaccacaatgtgataccaccttattcccacaagaatggccatcatcaaaaaatcaaaaaataatagatggtgtggatgcagtgaaaagggaacacttctacactgctggtaggagtgtaagctagtacaaccactatggaaaacag

SEQ ID NO: 920216 - DNA, 670 bp, Homo sapiens
aattatcacatattaaatgcacccatgtaatgaccactcagatcaagaaataaaccgttactagctttccagtagccctgacttttgtttcccccagttcactacaattttgacttctacttcattcatcaattttgcttgtttttggacttaatataaatggacccatacagtgtatattctttcatgtcaagctttttaaaaaggtaacatcattttttgaaacttatttatataatttattatagcagtaattcattcctttttattgctgtatggaattctatttgatgatacaccacaatttactcattcattctattgatggacatttgggttgtttaaagggctttttttctaccagaatatgcsactatgaacatttttgtttcttgctaaacaatcccatcaaaaagtgagctaatgacctgaatagacaactcttaaaagaagatatacaaatgaacaacaaacatatgaaaaaatgctcaacatcactaatgatcagggacgtgcaggttaaaaaccacaatgtgataccaccttattcccacaagaatggccatcatcaaaaaatcaaaaaataatagatggtgtggatgcagtgaaaagggaacacttctacactgctggtaggagtgtaagctagtacaaccactatggaaaacag

SEQ ID NO: 920217 - DNA, 547 bp, Homo sapiens
cagcttttgccctagagctttcagaaggaacacagccctgccaacatcttgattttggacttctgacctccagaactgtaagaggatacatttgtgttgttttaggctatccttaccgttatcgtggtaattttttacgccagcaaaagagaactaatacaactcctgtacctgaaaagcctagggcagcaatggcttcaggcttggctgggtctaggagctctaatggggtggccttgatgctgtccctcctcatgccttaactgctttcttttgcaatggccgtattcactgatgggctttcgctgggttgtggccaagctgaaaacagtagcctcaggcttttgcctcaccactggagcaatcccagtagcgcaaaytgcacccctttcctagtaatgtctgcaaatgtcccagggctgacctgcatgggccgagcttgtgccctgaatgatcaccatgattctgattggccaggtctcatcattgtgtctcaaggtaagcgggggatcagccctacctgaacctcagtgactcttaaggtaga

SEQ ID NO: 920218 - DNA, 790 bp, Homo sapiens
atattcaaggcaggaattttgctctattcatttttaatttccacattcaagacagtccctggaacatagcaagggcttcaaaaatgttgcctgaataactaattgagtacagttcaatgttcttcattttaaattataatcaagaagccaagggaatgtgaatcagaaaccagtaagtatatttccacattcccagaactgaactagaattgttattaaacctgaacttcaactaaattgaaacmaagcttcttgatattttcattgtgaattggttgcttactggcttgagccagagataaactgcagtactgctgaactcaaagtagtactaatctgagaaatgaactggtttgattctttagttaggtacttggacatcctatgaatatgaaactactattttgttgacagtgaatagattaactcataggtgagatcttttcctgtttcttcaagtgagaaacagaaaaaggatctctttttttttttttttttttttttttttttgagacggagtctcgctctgtcgcccaggctggactgcggactgcagtggcggaatctcggctcactgcaagctccacttcccgggttcacgccattctcctgcctcagcctcccgagtagctgggactacaggcgcccgccaccgcgcccggctaattttttgtatttttagtagagacggggtttcaccttgttagccaggatggtctcgatctcctgacctcatgatccacccgcctcggcctcccaaagtgctgggattacaggcgtgagccaccgc

SEQ ID NO: 920219 - DNA, 625 bp, Homo sapiens
ttcctgggatggagggaacccagatttgtagcatttgctgatttctgtaaatactccatggtccatttcaagctgccaagatgaggtcaccaagcagagtggggaaatgtacacagtgggtcctcaaactcgagagacctggmtagagcaccccactgggtagggatctgttaagagggtttaggaggcaggttctggttgtgacttggggagactggttcttgttgtatcttagggaggcaggtttgggttgtgacttgttggtactactaagagtttggaacaatggccaggtgcagtggctcatgcctgtaatcccagcactttgggaggccgaggcaggtgaatcatgaggtcaggagatcgagaccatcctggctaacacagtgaaaccccgtctctactaaaaatacaaaaaattagccaggtgtggtggcgggcacctgtagtcccagctactcgggaggctgaggcaggagaatggagtgaacctgggaggcggagcttgcagtgagccaagatcgcgccactgcactccatcctgggcgacggagcgagactctgtctcaaaaaaaaaaaaaagtttggaacaaaacccagcgtgacaactgtctttcatgtcccc

SEQ ID NO: 920220 - DNA, 633 bp, Homo sapiens
acagcatctgaaagcctgcgtcctcgctcctggtccctggctcatccatttgtcctttatttatttatttgcttatttactgagacatgatcttgctctgttgcccaggctggagtgcagtggcacaatcagctcactgcagcctcgacctcccaggtcagtcaatcctcctgcctcagcctcccaagtagctgggaccacagacatgcaccaccacgcctggttaatttttgtattttttgtactaatgagagactcactatgttgcccaggctggtctcaaactcctgggctcaagccatcctcctgcctcagcctcccaaattgttgggatgacaggtgtgagccactgcaaccagcctcaccatttattttatacatgccttagattattcattccttcactcgctcattcattcatccatgtctcctttcygttgtccttaggttctctccctgttttctcttgtcttgtttcccttctcatttttccctcgccccaccttctctcctctccctctctgtccctccatctgtgtgtgttgctccttctctctccatcctttctgggtggctccatccctttctccctcatctccccaactctctctatctctctgcctcctttccccc

SEQ ID NO: 920221 - DNA, 696 bp, Homo sapiens
gggggcttcacattgaactcagtgttgccctgtcacagcagagagcaaagccgtggtggcttcagccagcgcccatgcacagagggagcatttggaccaaccctagccagaggggaattgcccatcccagtggtcggaacttgagtctcagcaagccctgccaccgtggactaaagtgctctgaggtactaggtaaacttgaaaagctgtctaggacacaaggactgtaattcctatgcaactcctggtactgggctgggcttagagccagaggacctgtggggcacatgacctagagggacaccaggcttcaaggctaaggaagtgcttgaaccacccctcctccaactccaggcagcacagttggcagcaatgaaagtgactccttccttctgctcagggagaggagagttaagaaaagaggcctttttacgttgcatcttggagtccagctcagccacagttggagagggcactgggcagagtcatgaggcccccatttcaggccctagctcrtgggtgacatttctaggtataccctgggctagaagggaacccactgccttgaagagaaggacctagtcctggcaggattcatcacctgctcactaaagagctctcagatcctgaataaccaacagtgatccccaggtaatatgctgtgggccttgggccctgagaggtgctggtgtcagg

SEQ ID NO: 920222 - DNA, 721 bp, Homo sapiens
catctatgtctttatttatttttttgagatggaggctagagtgcagtggcacgatcttggcacactgcaacctccgcctcttgggttcaagcaattcttctgcctcagcctcccgagtagctgggattacaggcctgcgccaccatgcccggctaatttttgtatttttagtagagacggggtttcaccatgttggtcaggctgagtcttgaactcctgacctcaagtgatccgcctgcctaggcctcccaaattgctgggattacaggatgagccaccacgcctggcctatattgtttttatctggaagtttttacctggactaaaagtgccagcagggctgtgttccttttgagaggctctaaggaagagtccactatcttgtcttttctggcttctggaagctgcctgcattccttggctcatgacccctttccatcttcaaagccagcaatgccagtcggattcttctcatgaggccatctctctggttttkactcttctgtctccctctttcccatgtaaggacccatgtgattatagtaggcccgcccaggtaatccaggataatctccctattttatttgttttatttatttttttgagacagggtctcactctgtcgcccaggctagggtgcagtggtaccatcatggctcattgcagcctcaacttcccaggctgagatgattctcccacctcagtctctcgagtagctggg

SEQ ID NO: 920223 - DNA, 600 bp, Homo sapiens
aggagtccccatggaggagctgatgcttccattgggcctcacaggtaaacggctgcagttgggtatatggggttgtggccggagcatatgaaaaattcaaagaccagaaagagggtgccttgtggggtcagtgggagagaaggctgggcagggcggctgcaggcagatggtgaagagctctgaatgcatgctgaggaatgacccacaatgacaaggtaccccattgactgtgcccttgagaggcagtgtggtgcagtggttcaagacttggactctgcagccagcctgccccagtcaaatctatagcatgrggacagtagcgggatgtacaggaagaataagcaggagtgactgcacagcccctacccggtgccagggtagatcccttcacctctgcctacctgtctaccagggaccgcatggcttttatgtccaggagagcatggggttctgtcttcaggctgtgactctggagatgccttgagtctcccgagtccccggttctcttccctctgaaggcacgtgctgcagaggctgtgaggatgccaagcccacctgcatgagtggtgcccgggtgcagggaggtgctggacacacgca

SEQ ID NO: 920224 - DNA, 600 bp, Homo sapiens
aggagtccccatggaggagctgatgcttccattgggcctcacaggtaaacggctgcagttgggtatatggggttgtggccggagcatatgaaaaattcaaagaccagaaagagggtgccttgtggggtcagtgggagagaaggctgggcagggcggctgcaggcagatggtgaagagctctgaatgcatgctgaggaatgacccacaatgacaaggtaccccattgactgtgcccttgagaggcagtgtggtgcagtggttcaagacttggactctgcagccagcctgccccagtcaaatctatagcatgaggacagtagcgggatgtacaggaagaataagcaggagtgactgcacagcccctacccrgtgccagggtagatcccttcacctctgcctacctgtctaccagggaccgcatggcttttatgtccaggagagcatggggttctgtcttcaggctgtgactctggagatgccttgagtctcccgagtccccggttctcttccctctgaaggcacgtgctgcagaggctgtgaggatgccaagcccacctgcatgagtggtgcccgggtgcagggaggtgctggacacacgca

SEQ ID NO: 920225 - DNA, 772 bp, Homo sapiens
ggcccctctgagtcccccgaccaacccccatattgccaccctgagaattggctggcagagggttgattagcacatgggatttgaatcctggctccctgtgacctgggcacattgttaacccttccaggcttccggttctttgcctgtcaggtggggagaatgccccccacctccctggggagttttgaggagctgatggctactgtagtcctattggcctgtactgtgggccctttctgtgtgcctggcactacatgggcaccacgtgtatttcatcccatttgatccttatcacagggctgtgaagttgtccccattttattgacaagcaaactgaggaycaagaaggtgtgtaaaggctgggtgctgtggctcacgcctgtaatcctagcactttgggaggccaaggcgggcagatcacttgaggttaggagttcaagaccagcctggccaacatggtgaaactctgtgtctgctaaaaatacaaaaattagttgggctggtggtgcgcacctgtaatcccagctactcgggaggctgaggtataagaattgcttgaacccgggaggtggaggttgcagtgagccaagatcgcaccactgcactccagcctgggcaacagagagaggccctgtctcaaaaaaaaaaaaaaaaaaacaaaaaaaacaaaaaagcccaaaaaaacagaatgtgtgtaaggcctgaaaagcacttggcccagtggctggcactcgggatattgttacgccccagggtagtggctctgcagtgt

SEQ ID NO: 920226 - DNA, 743 bp, Homo sapiens
ttaaaacacaacccaaagcacactgcttacttcttatgcccttggaagcttaccattggacttggatacaattgaaattctttttgttttttgagacagagtctcgctctgtcacccaggctggagtgcagtggcgtgatcttggctcactgccacctctgcctcctgggttcaagcgattctcctgcctcagcctcctgagtagctgggattataggtgtgcrctagcacgcctggctaatttcgtatttttagtagagacggggtttcaccatgttggccaggctggtctcaaacccctggcctcaagtgatctgcctgacttggcctcccaaagtgctgggattacaggcgtaagtcaccacgtccggccaaatccaaattctttaccgcaacttacaagcccctgcctgatataaccctaagttctctacactctaatttgatatcactcttctccccactgtactccaaccacaccacgccaccttccttcgcttgttcacaacgacagtcatttccctggggcctgtccctcagtgtgggatgctcttttcaccactctgcaccgatggctccacggttcctttaaaccttcagacctcagctccttggaggccttctcaacacacctcaattcctcttctaagattctccctctctgttctccctgcccccacatcgtttctgtttgcttgcgaatatttatcacaatttgaaattacttaattttcccccctact

SEQ ID NO: 920227 - DNA, 650 bp, Homo sapiens
acatacttgaaaaatatacagaaggtattgtcgaaaaggagaaacttgaagttcacattcatctctataatcaataacctagtgaatcagcactagaggaagttaatgactttctgggatgagataagatgtttactaccctggctgacaatttagacgtgttatttcctcactgataatacacatttcctgaatgccttcaacagaaacagtgactcttgcatttacttctgcaactctttgcaaaacagtaaacatatcttcaacatgagcataaagaacaaaaagactgggtgtggtggctcacgcctgtaatcccaacactttgggaggccaaggcagaaggatcacttgaggccaggagttcaagactagcctggccaacatggtgaaaccccatctctactaaaaagtacaaaaattagccgggtttggtggcacgcatctataatccccgctactcgggaggctgaggcaggagaatcgcttgaacccgggaggcggaggttgyggtgagctgagatcgtgccactgcactctagcctgggcgacagagtgaaactccatcaaaaaaaacaaaaacaaaaacaaaccactgaatggtgtattttaaatgggcaaattgcatggtagatgggctatatctcagt

SEQ ID NO: 920228 - DNA, 630 bp, Homo sapiens
tttagctcactttttgaagggattatttgttttttttttttcttgctgatttgtttgagctccttgtagattccggatgctagtcctttgttggatgcatagcttgcaaatactttctcccaccctgtgggttgtctgtttactcttcttattatttcttttgctttgcagaagctttttagtttaattaggacccatttatttgtttttgtttttgtcacatttgcgtttagggtcttagtcctgaatttctgcctaagccaatgccagaagaagagtttttccaatgttatcttctaggatttttatggtttcatgtcttagatttaagtctttgatccattgggagttaatgttttttataaggtaagaaatggggacccagtttcattcttctacatgtggcttgccagttttcccagcaccattattgcatagggtgtcctttctccaatttatgtctttatatgctttgtcaaatatcagttggctgyaattatttggctttatttttgggtactctgttctgttctattggtctatgtgcccatttttataccagtaccatgctgttttggtaactataaccttgtagtataatttgaagtattgtaatgtgatgcctctaga

SEQ ID NO: 920229 - DNA, 795 bp, Homo sapiens
caccctgtgggttgtctgtttactcttcttattatttcttttgctttgcagaagctttttagtttaattaggacccatttatttgtttttgtttttgtcacatttgcgtttagggtcttagtcctgaatttctgcctaagccaatgccagaagaagagtttttccaatgttatcttctaggatttttatggtttcatgtcttagatttaagtctttgatccattgggagttaatgttttttataaggtaagaaatggggacccagtttcattcttctacatgtggcttgccagttttcccagcaccattattgcatagggtgtcctttctccaatttatgtctttatatgctttgtcaaatatcagttggctgtaattatttggctttatttttgggtwctctgttctgttctattggtctatgtgcccatttttataccagtaccatgctgttttggtaactataaccttgtagtataatttgaagtattgtaatgtgatgcctctagatttgttctttttgcttagtattgctttagctttgtgagctcttttttggttccatgtgaattttagaattgtttgttgtagttctgtgaagaatgatgttggtattttgatgggaatcgctttgggtagtatggtcattttcacaatgttgattcttcccattcgtgagcataggatgtgtatccatttgtttgtgtcatctattatttatttcagcagtgctttttagttttccgcgtagaggtctttcccctacttggttaagtatattcatatgtattttat

SEQ ID NO: 920230 - DNA, 501 bp, Homo sapiens
acttagagtatagaaataatacaccagttcatcatctatctatctcaccaaggcttttagaggtagaactcagtgttcattatgtcgttggggttggaggtgagagactagccgtgaagtgacttttccagcctggatacatagaagagagtggcctacatcctccccacttctagtgttggacaaggggtctgtcccattggtctgctggagagcagcattacaagctggttatgggtgcttgacctgaactgaagactgttcttatatttagatgatatccgtaagmccatattaaaattccgatgctcagaaagcattttgcgtgacagaccattatacatttcacatgatttggtcctggtgacagaggggttgaggaagtttcccaaatgctcttctgttctcgggcctcttcctgattgtcctggatggctgactgcagatgggtttggtggagtctggcgcataagtcactaacagcccgtagcaagcaggagg

SEQ ID NO: 920231 - DNA, 652 bp, Homo sapiens
acagggttttgccatgttggccaggctggtttcgaactcctggactcaggtgatccgtctgccttggcctcccgaagtgctgggattaccgaggtgaaccgctgcacccaaccattctctaagagtcctgagtgacatttatacagttaaattacctttgaaattatggacttttcactaacttattcaagaacttaacaagcygtcaaagataaagaaatggaatactttattataaaacttataaaataattaaatattacacatatattttgacttttctctataatccatggttttattcaacattttatctcaaaatattacttagagaagcaagtgagaacacataataggctattaattaataaattaattttccataaaataataaaatgataattatataaagaaataacttgctgtttttcagaaggcaacggggttgtagtagagaaaatttttttttttcctgttgataaaatggccacttctctaggccaagccaagcagattgagagaagttcctaagcattatttctctgggattcaagaactcatgactttaattagaatgggaacgaagtatgctgctaaatttaacaaaccactgtctagttgattatgctgagctggctaatccagcttgaat

SEQ ID NO: 920232 - DNA, 608 bp, Homo sapiens
ccatgattctgtactcatcacctttaaaaaaagagaaaacttaattttaagaaatctaaattaagcattcatgttagaaaaacagtacgtcagctcaaaggagatggttgtgttaatgtaacaaaaggtttacctcattccttgtgctcactgaggtaaccctcattcaagttgatacccttaagtgagctgtgctaaaaaatgattgtatccaaggagcttagtaggggcmaaggaaactgcaacacaaaaggaatcctacgagattaattttattatttaatatttataagattgtacctaaaatgctaactcaagaataaagaaatgtcaccggttaacataagtttaaatatttacaaatattgaaatagtgggaactgtcaagtgaaaacacaagagacaagggcgatgttatgcctgatcctatcagcatcaccagctaattctgacaactatgatcaaagaacaaagaaaaaccagaattataatgaagtgattttacatggttttggttagtgtgttttctgttggaaataaaagaagacaaactagaattagcttaaataatgacttttatgatatcacaaagcaggaagtccagagct

SEQ ID NO: 920233 - DNA, 594 bp, Homo sapiens
caaagttgcactgatctctgtaagatatatttgatctggatggtatctcttgctaatatctctttcatcagcattgtctggatggggagagcaggggtgaccctacataactgcaaaattgcggcaggaactaacaagaccattgaggtcatgaagatgacaatctgccaaatattagcagactgcatgttactgtgacatccctccctcctctcccgatcatggcaggttctcacctccaccactcttctctgacctctgctctgatccctgtccctgatggatagttcatcatgtataacacctgtatcaaacaaacgctctccctgaaccgaatccttcctgctttcacctcagagcttcatttaacctcactaggatggccacaagtcaaayatagagaatgacgcaggaacaggtctgcagttcaaaccctagagcgcattctgtagtccataggaacagaaaacgagctatgttaggagggtgtggcacaaagccacacttggctatctgagctcctatcaggcattcagtcaagaagttagcagataatgacgggaacaggacattatctgcaggaaaataaagcaa

SEQ ID NO: 920234 - DNA, 594 bp, Homo sapiens
caaagttgcactgatctctgtaagatatatttgatctggatggtatctcttgctaatatctctttcatcagcattgtctggatggggagagcaggggtgaccctacataactgcaaaattgcggcaggaactaacaagaccattgaggtcatgaagatgacaatctgccaaatattagcagactgcatgttactgtgacatccctccctcctctcccgatcatggcaggttctcacctccaccactcttctctgacctctgctctgatccctgtccctgatggatagttcatcatgtataacacctgtatcaaacaaacgctctccctgaaccgaatccttcctgctttcacctcagagcttcatttaacctcactaggatggccacaagtcaaacatagagaatgacgcaggaacaggtctgcagttcaaaccctagagcgsattctgtagtccataggaacagaaaacgagctatgttaggagggtgtggcacaaagccacacttggctatctgagctcctatcaggcattcagtcaagaagttagcagataatgacgggaacaggacattatctgcaggaaaataaagcaa

SEQ ID NO: 920235 - DNA, 616 bp, Homo sapiens
aactgattacaaagccagtgctctgtctcttatgtcatgctgttcctgaccaagccaagggtcgggctacttattctcgcagcccaataacgagatgcagatgaactgggagagaatcaagtttttatttctgtaaccagttacagggagaaggccttgaaattatccccagaccaactcaaaactacaaagttttccagagcttgtataccttctaagctatatgtctacatgtaagtgtgcatttgtgcattcatctaaagacataagtgattaacttstttacatctataactaaggtctgagtcttgaagctcttcctctggaacctgagtaaatttacttaacctaaatgggtccaggtgctggggtcaatacctttgtcttgtctcctgctaaatcatggaggtttggggagtttctttagtacccaataaggcttgtttgtggaggccttgggagtttctttggaccccccaataaaacttatttactcctaaacgggtcccgttaagaattccttcattatcctgtcatgatttaaggcccaggaaaggccgaggcaaagctcttgatgggcttttgtgacattccagcctttgcagaagggcactga

SEQ ID NO: 920236 - DNA, 616 bp, Homo sapiens
aactgattacaaagccagtgctctgtctcttatgtcatgctgttcctgaccaagccaagggtcgggctacttattctcgcagcccaataacgagatgcagatgaactgggagagaatcaagtttttatttctgtaaccagttacagggagaaggccttgaaattatccccagaccaactcaaaactacaaagttttccagagcttgtataccttctaagctatatgtctacatgtaagtgtgcatttgtgcattcatctaaagacataagtgattaacttctttwcatctataactaaggtctgagtcttgaagctcttcctctggaacctgagtaaatttacttaacctaaatgggtccaggtgctggggtcaatacctttgtcttgtctcctgctaaatcatggaggtttggggagtttctttagtacccaataaggcttgtttgtggaggccttgggagtttctttggaccccccaataaaacttatttactcctaaacgggtcccgttaagaattccttcattatcctgtcatgatttaaggcccaggaaaggccgaggcaaagctcttgatgggcttttgtgacattccagcctttgcagaagggcactga

SEQ ID NO: 920237 - DNA, 616 bp, Homo sapiens
aactgattacaaagccagtgctctgtctcttatgtcatgctgttcctgaccaagccaagggtcgggctacttattctcgcagcccaataacgagatgcagatgaactgggagagaatcaagtttttatttctgtaaccagttacagggagaaggccttgaaattatccccagaccaactcaaaactacaaagttttccagagcttgtataccttctaagctatatgtctacatgtaagtgtgcatttgtgcattcatctaaagacataagtgattaacttctttacatctataactaaggtctgagtcttgaagctcttcctctggaacctgagtaaatttacttaacctaaatgggtccaggtgctggggtcaatacctttgtcttgtctcctgctaaatcatggaggtttggggagtttctttagtacccaataaggcttgtttgtggaggcctkgggagtttctttggaccccccaataaaacttatttactcctaaacgggtcccgttaagaattccttcattatcctgtcatgatttaaggcccaggaaaggccgaggcaaagctcttgatgggcttttgtgacattccagcctttgcagaagggcactga

SEQ ID NO: 920238 - DNA, 752 bp, Homo sapiens
aaattcgtgtctatctggaacctcagaatgtgacctcatttggaaataaggcctttttaattaaaaaaaaatttttatttaaaaaacagagatagagtcttgccatcttgcccaggctagtctcaaactgttgggctgaagcagttctcctgctttgacctcctaaagtgctgggattacagacatgagccactccacctacccagaaataaggtctttatagatgtaactgaaataaagatagagatgtgaatgtgatcgtactggtttagggtgggccctacatccaataagaatgtccttagcagagacagaacagagacaccgagagaggaaggtgatgccaagacagaagtaaagattggagtggtgccatctaccagccaaggaatgccaaggctgtggctacaccagaagctggaacagagcctgcaagcatttctcctgcagaacccccagaagggactcagcctgcagacactcagatttcaaacctctggcttcctgaactgtgaaagaatraattgctgttgggccaggtacagtggctcatgcctgtaatcccagcactttgggaggctgaggcaggtggatcacttcaacccaggagttcgagaccagcctgggcaacaaggcgagaccccgtctctacaaaaaataccaaaaaatgagccgggtgtggtggggcatgcctgtagtcccagctacttgggaggctgggatggaagcatcatttgagcctgggaggtgga

SEQ ID NO: 920239 - DNA, 358 bp, Homo sapiens
atagttttctccttccttatctccctcttctgccttctcctacctgcttcctgaatctcccaccatcctcaaaagcacgcctacactcaagtctttgtctcaggctcagcctggaggagcccaagttagaatggaaccccagctctctttctttccccccccgcctctctctctgtctctctcccctttctytttttctctctctctctttctttctttcagtggagtcttgcttcatcgcccaggctggagtgcaatggcacaatcttgtctcactgcaacctctgcctcctgggttccagcgattctcctgccttagcctcccaagtagttgggactacaggcgcacatgccacca

SEQ ID NO: 920240 - DNA, 604 bp, Homo sapiens
tcagcctcccgagtatagtagctgggattacaggcacatgcaccacacccggctattttttgtatttttagtagagatggggttttgtcatgttggccaggctggtctcaaactcctggcctcaagtgatccgcccgccttggcttaccaaagtgctgggattacaggtgggagccacggcgcccaacctacactgattaactttttgagttttacttccatgaaaaaataaggtagaaaaaaaaaaggacctgctagaagaaaccgatttgaggactccacgccccacaccccacaccccaggtcagggcaagaaaagtgagctccagccccccaatgtcattgctttgtcagtccatcgctcatcccccsaccccgctgtggtgggctgggtgggggctcagggtcctctgcggcaggtcaaagtcagacgatccaggaagatgttggtgttggcttcataaaagctgatccaggcagaaccattcaaagctgtcacttgccaggaatgtcattaacaaataaccaactgtaagtctagaaaagctggacgtcaggccatccccctctgctgatgcgtctcccaggaggtgagcttgcaatt

SEQ ID NO: 920241 - DNA, 646 bp, Homo sapiens
atgaccctgcacgtcatggataaagagctcacgtcccacagaggctccaggtgctcccaaaccaaagcaagggttgggctgattacttctcgtggcccaataacgagatgcagataaactggaagagaagggaatttttatttctgtcactggtcacagggagaaggcctggaaattatcgccataccaactcaaaattacagtttccagagcttatataccttcgaagctatatgtctttgtgtatgtgcattcatctaaagacataagtgatgaacttcttttcattataactaagatctgagtcctgaagctcttcctctggagcctcagtaagtttacttaatctaaatgggtccaggtgctggggtgattacccttatctttcctgctagatcatggaggtttgggtagttcatttagtccccaggaagccttgtktgtggaggcctggggagcttcttcagacccgcagtaaaacttgcttgaatctaaatgggtcccgttaagaattccttcatgatcctgtcatgcttcaaggcccaggaaaggcccaggcattccagcctttgcagaagggcactggctctctcggcttttaatatttcactgaaccacttggtcagtgctgaaaccgttgttatgg

SEQ ID NO: 920242 - DNA, 581 bp, Homo sapiens
gttctcgaagcctcggtcataagcatagatggttcccgggttagttgaagacttgagatgagtggatgcgcacaaattgaggggtgcttctctacctctcctctttctcaggttctccaccacactttggagatcctggttgccccaagaccccttttcctgattgctgagtcctgtagccagaaagatggccatattttctctaggggtttagctatccagagctgccccmgtgaggctgccttcagagaaagctaccaagaaacaggaaacttagtccatatgggttgcttgctcaattaactttccatttctttccagaatctacctgcttttcttcagtttccagagtgctcaggtagttgtagtttgtccagagtttacggctgacacttggagcaactgaggagccatttgttaagagttacttctgccatactggaagcagacgcctcactacagctctctttttctttcctcctctcctttctcctcaattgattgccctcttttcctctatagctctcttcctctctcctttcctgtcattccccttctacttccctgtctctgaagttcac

SEQ ID NO: 920243 - DNA, 581 bp, Homo sapiens
gttctcgaagcctcggtcataagcatagatggttcccgggttagttgaagacttgagatgagtggatgcgcacaaattgaggggtgcttctctacctctcctctttctcaggttctccaccacactttggagatcctggttgccccaagaccccttttcctgattgctgagtcctgtagccagaaagatggccatattttctctaggggtttagctatccagagctgccccagtgaggctgccttcagagaaagctaccaagaaacaggaaacttagtccatatgggttgcttgctcaattaactttccatttctttccagaatctacctgcttttcttcagtttccagagtgctcaggtagttgtagtttgtccagagtttacggctgacacttgsagcaactgaggagccatttgttaagagttacttctgccatactggaagcagacgcctcactacagctctctttttctttcctcctctcctttctcctcaattgattgccctcttttcctctatagctctcttcctctctcctttcctgtcattccccttctacttccctgtctctgaagttcac

SEQ ID NO: 920244 - DNA, 586 bp, Homo sapiens
aacagcccggggagaggaggttgcagtgagccaagattgtgcctccgcactccagcctgggtgacagagtgagaccctgtctcaaaaaaaagaaagaaagaaagaaattaagaaacaacctaaatgcttaccaactgataaatggatcagcaaactgtggtatatttgtgcaatgaatgttattcagcagtacaaagtaaagaagtcgcaatttgtgcaacaacatagatgaaacttcaaacagaattagtgaaaggagggtcacaaaaaccccatatattacataattccatttatatgaaatgtccrgaataagcaaatccacaaagacagaaggtagatttgtggttgcctgggactggggggtgcagaatgaggagtaattctaatgagtacaggggtttttttggagtgataaaatgttctaaaattaggcagtagcgatggttacacaactctcaatatactatactaaaatcattatatatatatgcccggctggtcttgaactcctgggctcaagcaatattcccagcttggcctcccaaagtgctgggattacagatatgggccaccatgcccagct

SEQ ID NO: 920245 - DNA, 586 bp, Homo sapiens
aacagcccggggagaggaggttgcagtgagccaagattgtgcctccgcactccagcctgggtgacagagtgagaccctgtctcaaaaaaaagaaagaaagaaagaaattaagaaacaacctaaatgcttaccaactgataaatggatcagcaaactgtggtatatttgtgcaatgaatgttattcagcagtacaaagtaaagaagtcgcaatttgtgcaacaacatagatgaaacttcaaacagaattagtgaaaggagggtcacaaaaaccccatatattacataattccatttatatgaaatgtccggaataagcaaatccacaargacagaaggtagatttgtggttgcctgggactggggggtgcagaatgaggagtaattctaatgagtacaggggtttttttggagtgataaaatgttctaaaattaggcagtagcgatggttacacaactctcaatatactatactaaaatcattatatatatatgcccggctggtcttgaactcctgggctcaagcaatattcccagcttggcctcccaaagtgctgggattacagatatgggccaccatgcccagct

SEQ ID NO: 920246 - DNA, 652 bp, Homo sapiens
acacgattggcagggagagcacgtgtgtttttatgagaattatgccgagataggtaacagttgaggaagacatttgggctcgattgaagtaatgggggctgtccgtgaagctttgcggcagtacagcctaggtaatttgctgagcttgatgggtgtcagggtcagtccaagtgaaagcgaagagaggctgggatgaagggtgcaaaggaatagtaaagaaagcatgtttgagatcyagaacagaataatgggttgtagaggcaggtattgaggataggagagtatatgggtttggccccacggggtggagaggcaaaacaatttggttgataaggcgcagatcctgaactaatctgtaagacttgtccggtttttggacaggtaaaatgggggaattgtatggagcgtttataggttttagaaggccatgctgtagcaggcgagtgagaacaggctttaatcctttcaaagcatgctgtgggatgggatattggcattgagcggggtaaaggtgattaggttttaatgagatggtaaggggtgcatgattggtcaccaaggagggagtagaggtatcttatacttgtgggttaaggtggggggatacaagaggacacaaaggaggctttgggctggggagaagggcagcagt

SEQ ID NO: 920247 - DNA, 669 bp, Homo sapiens
taaacccctgaccaatgcttcgcaaaacagatttgtgagggcagcacctgcatctttgaagagccccgtaatcactcttctctgtctgtcagatctaatcatgggaactacagtcactcaactgcaaaatttaaatacaatgggaataattggaccctgaggtgacaggggccaagtggccacagtcaatcttcaaaggcaaggtgggcatagctaccataatagacagcagagrcaaagcagcaatcagaatagtctgacttgtgtagagctctgacattagaaaattaatcatggtgttcctagaagtgaaattgataggaagcctacagcattcctacttaatttatataagcagaaaccttccaggttgagtggacaaaatactaactcgaattataaaaacagagaatcatggcccctcaatcaatttccagactttagccaattcacagacccagaaactcttgaatgaaggggaggccatgttcccttgaggaaggaccccactacaccactgacaatttatgctgttaatatttctcccacccttacccaaggagacctccagccttttgcctggttaactgtgcattggggaaagggaaatgatcagacatttcagagactactgaacactgcctctgagctgatattcatttcagggta

SEQ ID NO: 920248 - DNA, 703 bp, Homo sapiens
cttgagatgaagaccaaatccttaacaaggtgtcctagtataaattactggaggatccgcattctgcctacctttccatcccttccttctctgcatgccagtcctcctggctctctttcagcttctgcaacacaccatgttccctccagtctccaggcctttacgcaagctgttccctctgcctggtacactctcaccaccctcctccaacgtattyatgcctgctcacccctcagctctcagctccactgtcactctctcggagtcctagacaaggacatggctcttgctcacggtcctgcttcttgtcttcccagcacctatatcagcctgaatcatgcatccattaaggtgattcagtatgtttttgtttttgtcattgttcataaggatagagatgttgcctgatttgggtcccttcctaggctgaaaactcgcacagtgctgagcacagagtagatcctcagttcatgccacgtattatcaggtgcatgtctttattttactggagagaaaactgggactcagaaaggtttggttacttgcctaagcttgtccagcagagctgggacacaaatcccctgactacctgaggcagagccttgcttgactttcaaatatgtcaactgaggaggggtctcagagaggagaaaggagtttctggggagcatttcagctccgggagagacaaataggttgtgct

SEQ ID NO: 920249 - DNA, 566 bp, Homo sapiens
gcagctcctgctcggacagacggagcagcttgtggagactcacactgtgaacttttgctcaaggaactaccacggcaacataccaggaaagctgagagaatccacagatgctctgaaggaactgtgtagcttccacagtttccctgagatgctaaaaaaactgtaaggtctgattgctttctcagtggggaggctggtrgtctggaacaagttctcagccctggccaccagctgcctggaaatagacttggtactgttggggggcacagtgggagtgatactggcctttaggactgtgtgttgcatgggagcatggtgaggcctgtgactgccagctttcccccacttccctggccacctttatgaatcagcagaggcagccataatcctcctggaaacataactccattggctggggaatcacacccctatcccccgcagcagccgcagcaagccccgcccaaggagagtctgagctcagacacacctagctctgggcctaccctttctctacccaccctgggtgcgcaagacaaaagatataatttcttgggagttctatggcc

SEQ ID NO: 920250 - DNA, 566 bp, Homo sapiens
gcagctcctgctcggacagacggagcagcttgtggagactcacactgtgaacttttgctcaaggaactaccacggcaacataccaggaaagctgagagaatccacagatgctctgaaggaactgtgtagcttccacagtttccctgagatgctaaaaaaactgtaaggtctgattgctttctcagtggggaggctggtggtctggaacaagttctcagccctggccaccagctgcctggaaatagacttggtactgttggggggcacagtgggagtgatactggcctttaggactgtgtgttgcatgggagcatggtgaggcctgtgactgccagctttcccccacttccctggccacctttatraatcagcagaggcagccataatcctcctggaaacataactccattggctggggaatcacacccctatcccccgcagcagccgcagcaagccccgcccaaggagagtctgagctcagacacacctagctctgggcctaccctttctctacccaccctgggtgcgcaagacaaaagatataatttcttgggagttctatggcc

SEQ ID NO: 920251 - DNA, 602 bp, Homo sapiens
tgatcatgccaccccagtccagctcgggcgacagagcgagatcctgtcaccaaaaagaaagaaagaaagagagagagagatgtacacaaatcagtagctctgctacacaccaatagcgaccaagataagaatcaaatcaagaactcaacgccttttacartaactgcaaaaataaaataaaatacttaggaatatacctaaccaaggaggtaaaagacctctacaaggaaaacgacaaaacactgctgaaagaaattataggcgacacaaacaatggaaacgcatcccatgctcatggatgggtagaatcaatattgtgaaaatgaccatactgccaaaagcaatctacaaattcagtgcaattcccatcaaaatactaacatcatttttcatagaattagtaaaaataatcctaaaattcatatgaaatcaaaaaagagcccaaatagctaaagcaattctaagaacaaagagcaaatctggagacatcacattacatgactctaaattatactacaagcctgtagtgaccaaaacagcacactactggtagaaaaatagacacataggctgggtgcagtggctcgcacctgtaatgccaa

SEQ ID NO: 920252 - DNA, 602 bp, Homo sapiens
tgatcatgccaccccagtccagctcgggcgacagagcgagatcctgtcaccaaaaagaaagaaagaaagagagagagagatgtacacaaatcagtagctctgctacacaccaatagcgaccaagataagaatcaaatcaagaactcaacgccttttacagtaactgcaaaaataaaataaaatacttaggaatatacctaaccaaggaggtaaaagacctctacaaggaaaacgacaaaacactgctgaaagaaattataggcgacacaaacaatggaaacgcatcccatgctcatggatgggtagaatcaatattgtgaaaatgaccatactgccaaaagcaatctacaaattcagtgcaattcccatcaaaatactaacatcatttttcatagaattagtaaaaataatcstaaaattcatatgaaatcaaaaaagagcccaaatagctaaagcaattctaagaacaaagagcaaatctggagacatcacattacatgactctaaattatactacaagcctgtagtgaccaaaacagcacactactggtagaaaaatagacacataggctgggtgcagtggctcgcacctgtaatgccaa

SEQ ID NO: 920253 - DNA, 565 bp, Homo sapiens
cccagctagttttagtattttttcgtaaagataggattttgccatgttggccaggctagtcttgaacttctgagctcaagcaatccaccaaccttggcctttgaaagtgctgggattacagatgtgaactacaatgcctggctgcttatgtatttttattttttatttcttaaaatatttatttgagatggagtcttgctctgttgctcagactggagtgcacggtggcacgatcttggctcactgcaacctctgcytcccaggttcaagagattctgctgcctcagcctcccgagcagctgggattctaggtgcctgccaacatgcctggctcacttttgtatttttagtggagatgggtttcaccatcttggccaggctggtgtcgaactcctgaccttaggcaatccacccaccttggcctctgaaagtgctgggattacaggcgtgagccaccacatccggccttctttttttttttttttttttgaaacaggggtcttgctctgtcacccaggctggagagcagtggcacgatcatggctcactgaggggattcagacaa

SEQ ID NO: 920254 - DNA, 616 bp, Homo sapiens
aggcaggagaatcgcttgaacctgggaagcggaggttgcagtgagccgagatcaagccactgagactccgtctcaaaaaaaaaactcctattacacaaatgaaattcacccagtagcagtgaatggactctgcccaacacactcctcatgcctggtgtttggaggattctgtaactctcgcttaaacttgtaaaggctattgaacagtctgactcctttccagatcaataaggaaagaaaaagatctggttttcaacaattcatctggaaaaaaaagattcatggtccaggtgtaatgctttttactrttatttttaaaattgtttcaaggctacaaagtataatgttttcacatgcatcattccatttgatcttcatagctatataagatgggcagaaattattatttccatttcacagaagaagaaacagatattcagaaagattcatgacttgtccaaagttattcagaaagtggatggggacccttcatgtagtactacttcttctgactcccaaaaccatgtggattcctgggcttcccaatgcgtgcctgctatgggatggatgctcatggcatggaatctgaggcaaagagccaaagcttttctcattg

SEQ ID NO: 920255 - DNA, 625 bp, Homo sapiens
gcagtggcaagaaaattcactaacagaaatctgagggccggtgcttttgagaggttcatctctctcaaggtccattgtgttcacatagcttttctgaggttcctccatctcttagcaaattctgggttccagagacataaaaaatttcagacgtagaaaactgctgcaaaacatcattaatctagaaaaaaaaaacagagacaaaaataaggcaaatagtagttgtttgaagagcagttaatataaaagtattgacattctattgaagcgctaattttttttttttttttttgagacacagtcttgctctctggcccaggatggagtgcagtggcgtgatctcrgctcactgcaacctccacctcccaggttcaagcaattctcctgcctcagcctccccagtagctgggactacaggtgcaacccaccatacccagctaatttttcatatttttttagcagagacggggtttcaccgtgttagccaagatggtctcgatctcctgacctcgtgatctgcctgccttggcctcccaaagtgctgagattacaggcatgagccactgtgcccagcctgatttttttttttttttggtgggggtgggggaggctttctgataaagac

SEQ ID NO: 920256 - DNA, 599 bp, Homo sapiens
actggggaggcctcccaatctggcagaaggcgaaaggcatgtcttatatggcggcagacaagagagtgaatgagagccaagagaaagaggaaacctctcataaaaccatcagatctcatgagactcactaccacaagaacaggagaggggaacaacctctgtgattcaattatctcacactgggtccctcccacaacatgtgggaattatgggagctacaattcaagatgagatttaggtggggacacagctaaaccacagaagaggtcaaatgcacctccctgcacaggcctggaagcactaattcatttacttattcagtcattcattcacgtttcttcattcattcaacaaacatttattgagcaacggtgtgccaggcactgatctgagctctgggcatcagtgtgacaaggaccctgcccctgcccctgcccctgccctcacagagctccctatctcrtggggatctaggtggtcaacggttctcagacaaagtggccagtggcacagcaggaagactacggtccctgggaacaggaaggggaggcagctacccgtcctagggcttgtgatactaagctgaggccaaaggcagg

SEQ ID NO: 920257 - DNA, 560 bp, Homo sapiens
tgtactcggtccaaccatttcatctttctctacttaatgaattcttccctctctgcatagctacacaggaagcaagcataaagacagagctgtgggtaaaagagaacttgagggcccaaggggtaagctatcttaagagaggawgaaaaggaagagctgagaaacgcaaagcctgaagtccaaaaacatcaccatcctccaaaccacctgaagctcatgcagcctgccaagatgccgtgatctattattaatataaaaataatacgctttccctgcattacatatataaatatgcttagctggattaaacctttaaaagtccccagaggccaggcacagtggcttgcacctgtaatcccagcactttgggaggcccaagtgggaagatcacttgagaccaggagttacagaccagcctaggcagcacagtgagaccctgtctcttcaaaaatatgggcattgtggtacatgcctacagttccagatacttaggaggctgaggcaggaggattgcttgacctggaaattcaaggctgaaatgagccatgattgtgccactg

SEQ ID NO: 920258 - DNA, 782 bp, Homo sapiens
gtcactgacttattagttcaggctgtatatcatctctcatagggattgccatcatagtccttaactggtctcctggtctctcgattctaaattctctggatttttaatttgccatcagaatttttaaattatctctcttagaggttctcttagctctagtgtcatacagaatacctttggctttgactaaatcttagtctctcccgtctcctggttcccatcgctttcctcttacaaatactttaccgagataagagctttttttttttttttttttttttttttttgagacggagtctcgctgtcgcccaggctggagtgcagtggagcaatctcggctcactgcaggctccgccccctggggttcacgccattctcctgcctcagcctcccgagtagctgggactacaggcgcccgccacctcgcccggctacttttttgtatttttagtagagacggggtttcaccgtgttagccaggatggtctcgatctsctgacctcgtgatccgcccgcctcagcctcccaaagtgctgggattacaggcgtgagccaccgcgcccggccgagataagagctttttaagaccagactccacttgtagattccaagggcaattagataagcaataagggacaggaacatgctggcaaattttaattattttttatagctcactattaaatcatattaatatgggcccagacactaatttccatctgaggtttatttttgagcaccttctccatgtaagtctctaggacgagttctggagggaaata

SEQ ID NO: 920259 - DNA, 450 bp, Homo sapiens
caatgctaaaaatggcttttatatttttaaatggttgagaaaaatcaaaagaaaaacgatatttcacgacatgtgaaaattatatgaaattcaaatttcagcagccagaaataaacttttataggaacacagccacactcattcctttacatattgtctatagctgcttttgtgctgcaatggtrgagtggagtggttgcaagagagatggtctggaccacaaagccaaaaatatttactgtctggttctctatagaaaaagtttgctgacacagatggaaagtattattttggtttcggtttccccagggacaaattttgagacaagaattgtattcaaaacaagcgctttatttgggagttgagctcattgaacaccagtggagagtgagggtgtaatttggggaaggaaagttagcttaaagggtatgtagtccaggtgcctcactg

SEQ ID NO: 920260 - DNA, 682 bp, Homo sapiens
gaaactgccatttcacacactttgccggtatttttgttgtttcaggtgtgagggtaaatctggcccccgttcctccatcttggctggaagtggaagtcccggtggatatttttgagcccctgatgtatgccaggcactgctgtaagcactgagtattcaaagatgaacaaaatgatgtggccccagtctcctaaaatttactatcaagagaagaagacaacaggtaaataaatacacaaaattattatagatggtcatgaatgctaagaagtaaccatggaccaacatgagaataatggggacaggagttgctgcacactaacaggtgaggtaaagtctgaagaagcagccagtcatatgaggaggaggaggacaagcmtcctagtcatggagaacaactgtgcaaaggacgtggaaagcttggcatgctctaggcacagatggaaggtcagtgtgcctgggagatgtaggatgacatggcgttggagaggagggtaagatccaggtcatgggagcctatgaggccatcctagagtctgggctgacttctaagcacaatggaaagtcacggaaagttttaaggaggagcactccatgatctaatttaattataggaaggttgcccaggcataatggctcatgcctctaatccccgttctttgggaagctgagatgggaggac

SEQ ID NO: 920261 - DNA, 628 bp, Homo sapiens
acatcgatgatgccaaccactgactcaaagccctagatgtcctagtacctcaagccaaagctgttccaagatgaggtccaggggccaggataggaacctatttcaggtctctccatgagtgtcgggcctcctggtcacctcggcccctacaattctattaggagcagagcaatagagaatcgagctaaatcctccctcccaatcatcagtgatgggatatggcagcaaataggtctctttgaaagatgtcaaatggggaacaaatcttttatgaactagaaacagaagaataattttaaaacatggcatatatacaaaaccaacagccaactgcattcttagcagtaaaataccatargaatttccaggaaattcaggaatgagacaaggatgcctattctacgtaattatgctctagaagttctgggcaattcaataaggttataaaaacaaaggaactacaagtatcaggagaaaataaaattttccttatttccaggtgttaatgctatccaggcaaccaaagagaaatcagctaaaaaccaaaaaagaaataagtaaattcaaccactagctgcaatctgtatgagtttgctttttcataggtaaaacagagacagtgacatca

SEQ ID NO: 920262 - DNA, 565 bp, Homo sapiens
agagctccagcaatcactcagcctaccaaaaactttcactttgaaccttgttgacatctagaatttagaccatcctgggcctactgccttaacagaatacctatttatttatttatttatttttagagacagagtctcactctrtcattcaggctgcagtgcagtggcatgatcattgctcactgcaacctgaaactcctgagcttaagtgatccaaccctcctgcctcagcctcccgagtagctgggactacaggcatacatcatgaaacctggctttttttctttctttctttttttttttttagagacagttgcttgctatgttgcctaggctggtctcgaattcctggcctcaagcaatacccccaccttggcctcccaaagtattgagattacaggtgtgtaccacccagactagccaatggcaatacttccacactgcttcctgccagagagtcgtcaaggaaaacatagcaaactgaatcgattgcattctagttatgagttgtagtggactgaatagtgtctccctccaaaattctacacggaacttcagaatgtga

SEQ ID NO: 920263 - DNA, 680 bp, Homo sapiens
tcccatttctactaaaaatacaaaaaaaaaaaaaaaattagccaggcgtggtggtgggtgcctgtaatcccagctactcaggagactgaggcaggaaaatcacttgaacccaggaggcagaggttgcagtgagccaagatcatgccattgcactccagcctgggcaacaagggcaaaacttcatcacacacacacacacaaaaatactcatttaccagaataaccattaagttctcctctgtagcataatagtacccctgaacatcccttgaagagaatcaataagtaagtgaacaacctacaaagcaaataaattaggagtctgtytatgttaatgctatctttcttctcccctggcaaatacaacttctgtagtggatttctatgagcattggtagatcattcagtgcctaagggagaaggaaatccgacatttttagctcaagtgctggtaggcactgccaaatccacatcaatcagaaaggaaaaatattctggaaatttgaacagaggtataaatgaaaataagaacgtacttctttcctgcccaagtgtcctgcctgttacgcaatcttccaagtgagaatgattctttatattcggtctacgaacatgtgaccatttcatcattttgaaaaagaaattaataaaatattaaaagctttagagcacagggcggg

SEQ ID NO: 920264 - DNA, 668 bp, Homo sapiens
gaacagccttctcccattctttatacacgctgcagagccccttttgattctgtcccagatcctcacctctcaatgttctggtggtttttcctttcttctccttcagtgtctctcctgctattctgagaatcccagccctgtgttggtgctcctgttttacatgtcttagcacctcagttaagtttgcagggctgagtggctttgagacttgttcactctggcttcgtcccaacatcagaaatccggagaagccactcacagttcacatatccctctcaccactggtgctttgcctgggtgattgctgtaactttccacaagctaagtcactacctaccagcccaccaagtagtcttaatgcggccttcaaattctccagccccccayacccggacttccctgccttcttccctctctgttccccaccctcttcaatctggccttcacatggttttgccacatggttagtttgtgttagtgaactcagatgccaccgtggagcactgtctgctcttatgcagaaaacgatgaagttcattctgcagaacaaaatatacccacagagtggctcacacctgtaatcctagcgctttgggaggccaaggcagggggatcacttgagcccaagagtttgagaccagcctgggcaacacagtggaacaccatct

SEQ ID NO: 920265 - DNA, 605 bp, Homo sapiens
agaatacaagaaggcaaccacagtgggccagtactactactgggctagatgtggtggctcacacctgtaaccacaacattttgggaggctaaggtaggaaggctgcttgaggccagcctgggcaacatagtgagacctcatctctacaaaaaaaaaaaaaaaaaaaaaattagccagtcatggtggtacatgcctgtagtctcagctactcaggaggctgagatggaaggacaggttgagccttggaagtggaggctgcggggaactatgaatatgccacagcactccagcctgtgctacagagagagactccgtcttaaaaaacaaaacaaaataacaacaacaacaaacaaagatagatgcatagagtttttcactgttgcactatttatattagccaaaaaccrggaaacaacctgaatattcatcaagtggggacaggttgagtaatcatgtgacatacataaattgcagcactgcacacttgagaaaagaagtgagaaatgtctctatttcctagtgtggtttgctctccagagtatactgttaagtgaaaaaagcactgtggcctcaaatttatctgtagattctatacaatccccatc

SEQ ID NO: 920266 - DNA, 713 bp, Homo sapiens
agggatataaaggtttcactgaataccaagagcctgaaaaaatgcttggctgatttgactaataaaggccggtctgctattggactgtatagaggtgggaaggccaaaccgagaaattatgtctgacagaaggaaagaaatgacaaggctaaactgaagaattatgtctgacagaagggaagaaatgactatggtggccttcttagaccctgtgggaaaggcctctacttatccagtraaagtgtctacctagaccaagaggtattttagtttgctgactcggggcatgttgagtaaagctaatttgccagtcttgggcaggggcaaatcctggagcttgatgtgtagggaagggtgggggcctgaataatctctgagaagtagtagaatagcagatggaatactgagaagttatttccttgaggatagatttctatgatggaaaggaaatgagaggttctaagaggcgggctagtggctagtactatagcatagcctgcctttgctggcgtggggcgattaggcctggtggaactgccctcaataaaccaagcgtgatgagggcgaggaacaggaaagaaggaaacatggggaaatggggtgaatgtcagatggatcagagagttatagtcataggggtcaggtgtggtatccagaataatgtgggaggctggattgaagtccgggccaggaacaatggtaattgtgggaga

SEQ ID NO: 920267 - DNA, 713 bp, Homo sapiens
agggatataaaggtttcactgaataccaagagcctgaaaaaatgcttggctgatttgactaataaaggccggtctgctattggactgtatagaggtgggaaggccaaaccgagaaattatgtctgacagaaggaaagaaatgacaaggctaaactgaagaattatgtctgacagaagggaagaaatgactatggtggccttcttagaccctgtgggaaaggcctctacttatccagtgaaagtgtctacctagaccaagaggtattttagtttgctgactcggggcatgttgagtaaagctaatttgccagtcttgggcaggggcaaatcctggagcttgatgtgtagggaagggtgggggcctgaataatctctgagaagtagtagaatagcagatggaatactgagaagttatttccttgaggatagatttctatgatggaaaggaaatgagaggttctaagaggcgggctagtggctagtactatagcatagcctgcctttgctggcgtggggcgattaggcctggtggaactgccctcaataaaccaagcgtgatgagggygaggaacaggaaagaaggaaacatggggaaatggggtgaatgtcagatggatcagagagttatagtcataggggtcaggtgtggtatccagaataatgtgggaggctggattgaagtccgggccaggaacaatggtaattgtgggaga

SEQ ID NO: 920268 - DNA, 541 bp, Homo sapiens
tctcccctcaccccacccaccgatcgccctcacacctcccttggaagcctcatcatccacccccttctcagctccagccccagaaatgtccatgcttctccaacaaggctctaggcccaccgtttagggtctttgatagaaacttcagttctccttctcagtagccttggccccaggtaccygcaaggctgattctgtctctatcttaaaatatgtgtcatcatctcaggggaacttccatgaccagcccacctgaaatcaccaccaactgccccccagcactctcagtgccatcgacactcctgtcttctttatcccaacgcactgtcactgtccatatccataatatttcatttattacttggttgtattttgtattgttatctcctcccttgagaatctaacctccacaaggaaagagatcctaatttgttgattgatgtgtcccaagtgagtagaactgacatgcagtaggcactcagaagttttctgtttgttttgagatggagtttcactcttatagcgcgggctggagtgcagt

SEQ ID NO: 920269 - DNA, 637 bp, Homo sapiens
tagtttcttatatactttttttttttttttttgagagagagtttcactcttgttgcccaagctggagtgtaatggcacaatctcagcttccacaacctctgcctcccgggttcaagcgattctcctgcctcagcctcccaagtagctgggattacaggtgtgcaccaccacgcccagctaattttttgtatttttagtagaaagggggtttctccatgttagccatggtstcgaactcctgacctcaggtgatccacccacgtcagcctcccaaattgctgggattacaggtgtgagccacgcgcccagtctcttatacagtaatatttaaaatgtttatttggcctgaagctgccagtagcattgttaggctgtcttaagaaaaacacatttgtttcataatttatcaaacgaaactggtctttgagctcatcttaaaataaccctagaaatgaatgtctctgcaacaagccatgaagttctacctcattcttcttcttttttaaatatataccatgaaaatgtaaaaggtacaagtcaagggtccacagcctgaggagtgtttgcctatagagacccccatgaaaccaccacctaggtgaagatatgcaccctggccagcagccaggaagtctac

SEQ ID NO: 920270 - DNA, 616 bp, Homo sapiens
agcttcattcagtgacagaagagctctcaggagacccctagtaggtagctcctttctgcaagcaggttgtccaggcaagtgtccagctcttagcagagaggagacctgtagtagttgctccttcctgcaggtggatcatcccagcaagtgtccagctctcagcagaaaggagtgggtagctcctttctgtaggcatgtcatcccacagagggtatgagtctggctgtctggggttattttgtgctctgaatggtggaagtgtgtgctgattggtccatgggaggccacggatgggcctggaaaaagcacctcgagttctcactctgggccatggacttcaaccagaactggcagccttatccccccaggcccgcctccyatgctcgtcattacccaaagtctggagagggctgaggcagcagggggcttgtgaatcagtgccgtcatgagcacacccagtcagttgtgacaggtcccaggcttggccacaactttgctccaccccagagtgggtgccaggagctgggagaggccagggagcaggagcaggtactttcaagcatgtgggggcagggagcttcttaagaccctgagaacacagggaagcatgggtcca

SEQ ID NO: 920271 - DNA, 731 bp, Homo sapiens
aaggacgtgatttcattctttattatggctgcatagtagtccatggtgtatatgtaccacattttctttattcaatcaaccattggtcggcaactgggttgattccatgtctttgctattgcgaatagtgctgcagtaaacatatgagtgcaggtgtcgttttagtagaatgatttcttttcctttgggtatatacccagtaatgagattgcttggttaaatactaattctgtttttagttctttgagaaatctaataactgctttctgtaaggactaaagttatttgcattccctccacagtatataaacattcccttctcttcataatcttgtcaatatgtaatttttggactatttwatttaatttaatttaattaattttttaagagacggagtctcactctgttgccaggctggagtgcagtggtgcgatctcggctcactgcaacctccgcctcctgggttcaagcaattctcctgcctcagcctcccgagtagctgggactacaggcacaccccaccacgcccagctaatttttgtatttttagtaaagacggggtttcaccatgttagccaggatggtcttgatctcttgatctcatgatccacctgccttagcctcccaaattgctgggattacaggcatgagttaccacgcccagccttttttgactttttaataatagccattctgactggtgtgaggaggtatctcattgtgattttga

SEQ ID NO: 920272 - DNA, 731 bp, Homo sapiens
aaggacgtgatttcattctttattatggctgcatagtagtccatggtgtatatgtaccacattttctttattcaatcaaccattggtcggcaactgggttgattccatgtctttgctattgcgaatagtgctgcagtaaacatatgagtgcaggtgtcgttttagtagaatgatttcttttcctttgggtatatacccagtaatgagattgcttggttaaatactaattctgtttttagttctttgagaaatctaataactgctttctgtaaggactaaagttatttgcattccctccacagtatataaacattcccttctcttcataatcttgtcaatatgtaatttttggactatttaatttaatttaatttaattwattttttaagagacggagtctcactctgttgccaggctggagtgcagtggtgcgatctcggctcactgcaacctccgcctcctgggttcaagcaattctcctgcctcagcctcccgagtagctgggactacaggcacaccccaccacgcccagctaatttttgtatttttagtaaagacggggtttcaccatgttagccaggatggtcttgatctcttgatctcatgatccacctgccttagcctcccaaattgctgggattacaggcatgagttaccacgcccagccttttttgactttttaataatagccattctgactggtgtgaggaggtatctcattgtgattttga

SEQ ID NO: 920273 - DNA, 625 bp, Homo sapiens
ttatgttattttaggaaagtttgatccttttaaatttgttagatgggaacagagctgtcttattctaggacagggttgttcaacttcagcattattgacatttggggttggataattttttagcatagatcattgtcctgtgcgaataggatgtttggcatgattcgtagatctacctgcctaatgccaatagcaccctccacctttagttggacaagcaaacatttttctacacatttctaaatgttccatggggttcaaaatcacctctggttgagaatcactggttgagaactaattactacatactcctgaggcaagaccattctgaatatgctacctggtctccctggattacaggtttttttcttctggctggtgggaatgttctcaaatgtgtgaagtgttagccactcctctcccggtcctttgagatggttctttcctcagctttttcaggttgtttctttacatccatgtgccaatcartattatgccaaatgcttgtgggggccatgtctcctctccagcattttttcttgtaaattctagctgcttggtctcctcttattctcagttctgtctcttcaagtcatagtatctgataggtaccctttctttgtac

SEQ ID NO: 920274 - DNA, 574 bp, Homo sapiens
tgacagaaccctgtaactcagttctttcccagctagaactccattctagctcagttgcagtcatgggccagtattgcctgcccaggtatttaaccagtgacacagcaggaagccgtcccgaaacccagaggaagtgatacccatctgagcatctgtatatttggtaacagtctttctgttggcagacactgaataagaygctggtccaggtgcaacccctactgaccaaggctgtggaggcagttaagtgcaccaagagactagatagaatccatgcccattcaagcacttggtaatagatctgccaactacaggctccactgcaaacccggcagcagttaggtgacctggcttcaaccccattcatctgtgatcctgaaggtagtcatgtctttgcaaggactccaaaagagaaagtctttatatgctaaaaccagcttataaaaactgaaagaggtgtttgctcctttagttgcacaggcaataatgtgaggctttatggacaataaaacaaccaaatgaaactagaaaggctccagtaatcaatcctatagaaatagagatctacaaattg

SEQ ID NO: 920275 - DNA, 574 bp, Homo sapiens
tgacagaaccctgtaactcagttctttcccagctagaactccattctagctcagttgcagtcatgggccagtattgcctgcccaggtatttaaccagtgacacagcaggaagccgtcccgaaacccagaggaagtgatacccatctgagcatctgtatatttggtaacagtctttctgttggcagacactgaataagacgctggtccaggtgcarcccctactgaccaaggctgtggaggcagttaagtgcaccaagagactagatagaatccatgcccattcaagcacttggtaatagatctgccaactacaggctccactgcaaacccggcagcagttaggtgacctggcttcaaccccattcatctgtgatcctgaaggtagtcatgtctttgcaaggactccaaaagagaaagtctttatatgctaaaaccagcttataaaaactgaaagaggtgtttgctcctttagttgcacaggcaataatgtgaggctttatggacaataaaacaaccaaatgaaactagaaaggctccagtaatcaatcctatagaaatagagatctacaaattg

SEQ ID NO: 920276 - DNA, 574 bp, Homo sapiens
tgacagaaccctgtaactcagttctttcccagctagaactccattctagctcagttgcagtcatgggccagtattgcctgcccaggtatttaaccagtgacacagcaggaagccgtcccgaaacccagaggaagtgatacccatctgagcatctgtatatttggtaacagtctttctgttggcagacactgaataagacgctggtccaggtgcaacccctactgaccaaggctgtggaggcagttaagygcaccaagagactagatagaatccatgcccattcaagcacttggtaatagatctgccaactacaggctccactgcaaacccggcagcagttaggtgacctggcttcaaccccattcatctgtgatcctgaaggtagtcatgtctttgcaaggactccaaaagagaaagtctttatatgctaaaaccagcttataaaaactgaaagaggtgtttgctcctttagttgcacaggcaataatgtgaggctttatggacaataaaacaaccaaatgaaactagaaaggctccagtaatcaatcctatagaaatagagatctacaaattg

SEQ ID NO: 920277 - DNA, 596 bp, Homo sapiens
tcaattgattgagtttgtatatattctggtgattaatctatatgtggggccacaaaacaatcctcacataaattcaagaaacattgaaatcgtatgaagtattttttctgatgacaatggaataaaactagaaataaatcaaaagaggaactttggatactgtacaactacctggaaattaaacaacatgctcctcaatgacaagtgggtcaaaaaagaaattaagaagaaaattgaaatatttcctgaaacaaataaaaatggaaacaaaacataccrgaacctataagatacagcaaaagtagtactaagagggaggtttaaagcaataaatatctatattaaaaaaatagattccatataactaactaaatgatgcacctcaaggaactaaaaaagcaagaataaaccaagccccaaattggtagaaagacagacataataaaggtcagagcagaaatatatgaaattaatactagaaaaataaaatattaacaaaactgacaaacctttgactagactatctaacaaaaacacataaaaaagagatgaaaaaggaaatattacgactcatagcataggaacacaaaggatca

SEQ ID NO: 920278 - DNA, 572 bp, Homo sapiens
aaataaattttctaaaaatagtaagtggccatacaagagggctttagcataccacataggattaaaacaaaactagtcaacatatgatgtaaaattaatcactattagcacactagggcagccacaataggaagaaatcatcggcacctcttttctaacaagttcaggtgactgaaatcttacagtgcatgacagctcctgattcctgcccatgcccaacctggaaagatctggatcttcratctaatctctgccatggtactgacagtgcaggtaaatatcgtatagtcattcaaaagagggaagacggagagggcctgactacaaaaaaaaaaacaaaaacaaaaaaacaaaaaccgcctaccttttttcctcctacaattgcacttagtctcaatgttgctaaattacatggtccattataactaatttcagttaatacacacagcagatacttcaagataaccgtaaagcccttcttcccttctctgtttctagacttactgaaagcctactatgtgtccaacactgtggcagagatggagtctgactgtggtgtatcaatataaagt

SEQ ID NO: 920279 - DNA, 655 bp, Homo sapiens
ggtggtaagtgagacctttactcccagtgtctcatattttcaaaaaataggaaggcactttcatctaatttctagttaagtgaataatatgaatgaacactttggtctctctttccaccggattgcattaggtcgttgcccactgtcataaaaatgtattaaaaattatattttaccactgggtttgtataaagataaacacaatctgggttgacttttattctgattttaaaagaaattaacatttttcatggacccttcagattactgtgagccctagaccctttgcccactagaaaatyagccctgtcttcctatctacctctcatctgattaacgaaaaaatgacgcctaacagtcactggctatgttttttactgatgggatgtgtggccctattggttctcctttttggacctgcctgggccactagaggagaatcctatcctctaccacctgttcccatgcttaaaaggccctggggcagggtcttcccttgcaaagcctttttctccaacttttctgatgagactaggtgggtaaatttcattagagtttaaagatgagctctctttgactctagatctaagctatttcccaatccaactgtgatctcactaagcttgtgatggaggctttatctagcaccttgtac

SEQ ID NO: 920280 - DNA, 788 bp, Homo sapiens; identical to SEQ ID NO: 919533

SEQ ID NO: 920281 - DNA, 697 bp, Homo sapiens; identical to SEQ ID NO: 919534

SEQ ID NO: 920282 - DNA, 512 bp, Homo sapiens
aattggggcattagcccatttacctttaaggttaatattgttatatgtgaatttgatcctgtcattatgatggtagctggttattttgcgcattagttgatgcagtttcttcatcgtgttgaaggtctttacattttgatttgttttgccgtggctggtaccagtttttcccttccatatttagtgyttctttcaggagttttgtaaggcaggcctggtagtgacaaaatccctcagcatctgcttttctggaaatgattttatttctccttcacttatgaagcttagtttggctggatatgaaattctgggttgaaaattcttttctttaagaatactgaatgttggcccccactctcttctgatttgtagggtttctgcagagaggtaaactgacctttctatctggctgcccttaacattttttccttcatttcaaccttagtgaatctgacgattatgtgtcttgtggttgcccttctcgaggagtatctttgtggtgttctctgtag

SEQ ID NO: 920283 - DNA, 730 bp, Homo sapiens
tctatcttggagaaagttccatgtgctgttgaatagaatgtgtattttgtggttgttggatgaaatgttttgtatatatctgttaagtccatttgttccaaggtatagtttaaatccattgtttctttgttgactttctgtcttgatcacctgtctagtggtgtcagtggagtattgaagtccccccactacaattgtgctgctgtctatatcatttcttaggtctattagtaattgatttataaatttggaagctccagtgttaggtgcatatatgtttaggactgtgatattttcctgttggacaaggccttttaccattatataatgtccctctttawctcttttaactgctgttgttttaaaatttgtattgtctgacgtaagaatagctacccctgcttgcttttggtgtccatttgcatgaaattcccttttccacccctttactttaattttatatgagtccttatgtgttaggtgagtctcctgaaggcagcagatagttggttggtgagttcttatgcattttgtggtactttatctttcagtggagcatttaggccatttacattcaatgttaatattgaaatcttaggtgccattgtattcattgtgctctttgttgcctgtgtactttgttttttttgtttttcatttttactttttaacatgtatttttgttttataggtcctgtgtgatttatgctttaaagaggttctgttttga

SEQ ID NO: 920284 - DNA, 730 bp, Homo sapiens
tctatcttggagaaagttccatgtgctgttgaatagaatgtgtattttgtggttgttggatgaaatgttttgtatatatctgttaagtccatttgttccaaggtatagtttaaatccattgtttctttgttgactttctgtcttgatcacctgtctagtggtgtcagtggagtattgaagtccccccactacaattgtgctgctgtctatatcatttcttaggtctattagtaattgatttataaatttggaagctccagtgttaggtgcatatatgtttaggactgtgatattttcctgttggacaaggccttttaccattatataatgtccctctttatctcttttaactgctgttgttttaaaatttgtattgtctgaygtaagaatagctacccctgcttgcttttggtgtccatttgcatgaaattcccttttccacccctttactttaattttatatgagtccttatgtgttaggtgagtctcctgaaggcagcagatagttggttggtgagttcttatgcattttgtggtactttatctttcagtggagcatttaggccatttacattcaatgttaatattgaaatcttaggtgccattgtattcattgtgctctttgttgcctgtgtactttgttttttttgtttttcatttttactttttaacatgtatttttgttttataggtcctgtgtgatttatgctttaaagaggttctgttttga

SEQ ID NO: 920285 - DNA, 610 bp, Homo sapiens
aacatgtaacttatttatttttcataagatccatggggggaggaggaacactttttataccactgtattcccagcacataaaacagtaattgtcacataggaagcactcagttacaaggtgaccaaagaatctataaatgattgaaacaagatgagaatagaamcaatatcatcagaaggaggagcagcaaaattttttaacaatgtaaaagataaatatttattctcagagccaataaaaaggtgaaaggaaactggtacaagttagaaataaaacactagaggaaaaactgcaaagaaaagaagagttcattttgaaatatagatgtttaagaattgaaaagcttttaacatcagaaaggagtagtaaaatattctacatttcagctcaatgtctaggagtgtttccaaggtgtttatgactaagcactctgcctctttgaataatacattgcagttgtggcatgttacggttgaaaaatgtttccatgtgcattatttcatttgaccctgcaaatgaccttattggattaatcagacaagcctcccatcctcattacatgcttatgaaaacagaggtttctgcaagttgagaacctaggccaagagg

SEQ ID NO: 920286 - DNA, 572 bp, Homo sapiens
gcagtggcgggcgcctgtaatcccagctactcgggaggcggaggcaggagaatcacttgagcccagcaggctgaggctgcagtaagccgagatccactgcactctagcctgggcgacagagcaagactccatctcaaaaaaaaaaaaaaaaaaaaaaaaaaaagatggaacaaagattatacaatgcagaaagtgttgtgccagggaaactggacattcatgagtaraataataaaactgaccatttttttatattgtacctcaaaattaacatgaaagtgttaaatgtaaactataaaaccttaaagctcctggaaggtaacataaaaaaagactttcttaatattggcaataattttgatgttacaccaaatgcacattaaaaatagaaaatataaacatgttggactgcatcaaataaaagtttctgccattataaagctccgcaaaattttaaaaactctagaagatgagaaaatacttgcaaattatgtacctaaaaggttaatattcaaatgtatgagcttattcagtttgaaacaaataacgataataacagcctacttaaaaaa

SEQ ID NO: 920287 - DNA, 604 bp, Homo sapiens
aagctatcaagttcagataaggtgcatcatataacataaagtggtgtaccttatgtcatatgctccaggtagccctgcctcatagatcctgggttctattaactatgggtaatcccttagccagagacatcttgctagggacagagatatagtctcttattcatagtaagtaacattagtctatttccatttgacaaagagattagactaagtctttgctttcctctaggagcacaaattattgtacaaaacgagaaacaaaatttgagagattaaaatatgtgaaatatgttaatagttctaagaaggcttttatctagaacacggtaataaatgtcracgtgctatagtaggaagagttgaagataaatggttagatatcgctttttatccatatgactttgtgcattagttttttgagcctcagttttactaatattccaaaggattagggaaataagcctaaccagagtgactctgatttttttttttttttttttgagatggagcttcgctctttcactcaggctggagtgcagtggcacaatcttggctcactgcaacctctgccctccagcttcaagcgattcttctgtctcagcct

SEQ ID NO: 920288 - DNA, 676 bp, Homo sapiens
aaattcttattaatgacacaccccgctctgttattctctcagtggagacactcaagggagcagcctggggctaagacatcttcatcttcctctccagacagcttgcagctctgcagagggaactctagcttcatggcactcatgaacatgcagatcaatccaagagtcaggggaaatgacaccccaagttataagcctcttgttttaccgtggattcatgagctggagttttcccccaagctccgaaataaacatggtggagatccacaggcacmaatatttgggagggaggggcttaatgtggaagtccttgggcaacctaatacccaggggcattctgggaaatcagtgggaagcaggaaaacctccctggggttttccatcagctaatgttacctgcactcaccccaggactgctctcctgctgccatcatacccggctcaacccttcccacctgcccggatgattcctggttaacctcaacccaacacaaccgtatctacaccactcatttgctgcctcctctctaaaagctgtagcctctctatgcctccatttcctcaactctgaaatggagataacagcagtgcttgcttttggacagttgtgaggattaaatgatctgagctagtccatgtgaagcttctggatcagtgactgatacagagcgagtgc

SEQ ID NO: 920289 - DNA, 689 bp, Homo sapiens
cagtaaatttgtctattgcttgaagcttctgtttctgttaaagagatgttaaatgcctcccaggtgactgggctgcaaggtttccagtctcccaggggctgtgtggggtgtgtgtgtgtgtgtgtgtctgtgtgtctgtggtgggggagctatgtgaagtaagacctatccaktttgacaccctgagttgcctgggttctgtcctcccaagtgttctaaattgcaggagaaattgccctgacagaacctcctactgacagacagtgtcttttgttacagacggaggtgttgatccttctctaatcaacagcttaattaggtctgccaagatgaaagagccatttttactttgggaactaatatttatagacaaccttcttcccagcccctgcactggaggtgttaacaacttgagggctaaatcaaataaaaattataaaactcattacttcactctacaaaaaccactggcaaactcagaactctgcagactgtaagctgccccatcaagcagcttcattcactgccatagagcccagcacagattctggcacatggtgggcactcaggaagcatttgttgaatcttgaaagagtggagagtcagtttggtggcttccttctctagcagaaaacactatggcattgtggttaagagcttggcttgagaattagacagtcctggaatta

SEQ ID NO: 920290 - DNA, 609 bp, Homo sapiens
aagcagcccactgcatgggggcatctgtggggttcagggaaggccccgctcctcaaaagccccttcctcgaacaatctgcctttggactcaccatccctagaactctgccgttagcataacatccttttgaaggatccttttgagtttacggagcccctttgcccctcccagaaagagctcaggggtgaaggacagatgtgtacagaagagaaaggatctcagcaaatgaaggtagagagcaaagagmcttcccaatctggactcagccttccctaagggtgatattcagaccaggagcctgcagtctttagaaagtttggatttatccaagctggaaaggctttcccaaaaggggtgtagagggatgaggatgcagatttattgggtttctattatgtgccagatgatttccacatattatctcatttaatcctcacagtgtcaggaagagcaagtatcattttccgcatttacaagtgaggaaactgaggtaaatgtgcccaaagtcacacagctagtatgttgcagaacccataagctttcctaccatataataaattgagggagttttgctttattttgttttaggacagaacacagattgagcc

SEQ ID NO: 920291 - DNA, 621 bp, Homo sapiens
atgccaaatgttggggagcatgtggagcaacaagaactcttatacattgtagatataaaatgaaaacaaaacaaaatagaacacattttggaaactagtttagcagcctcttataaagttaacgacaccctatgccctagcaatccacttttaagtacttaagaaawacaaaagtatatccccagaaatagacttgtgcaaacaaaatgcacctaatatccatattggaaaggaagaaataagactatttgtttgcagatgatatgatattatagacagagtatactaaaaacctcactaaaaaactattagaactaataaacaagtttagcaaggttgtgagctaaaagatcaagatgcaaaaatcaaccgtatttttatgtactggcaatgaacaatctgaaaatgaaatgaatatattccgtttacaatactataaaatggaataaaatgcttacgaataaatttaacaaaagaagtttaagacttatactttaaatactaccacacattgttgaaaggaattttaagagatccaaataaatagacatccatggtaaaaaaagtgaaagacttaaattttataaaatggcaatattcttctgcagattcaatggaacc

SEQ ID NO: 920292 - DNA, 621 bp, Homo sapiens
atgccaaatgttggggagcatgtggagcaacaagaactcttatacattgtagatataaaatgaaaacaaaacaaaatagaacacattttggaaactagtttagcagcctcttataaagttaacgacaccctatgccctagcaatccacttttaagtacttaagaaaaacaaaagtatatcyccagaaatagacttgtgcaaacaaaatgcacctaatatccatattggaaaggaagaaataagactatttgtttgcagatgatatgatattatagacagagtatactaaaaacctcactaaaaaactattagaactaataaacaagtttagcaaggttgtgagctaaaagatcaagatgcaaaaatcaaccgtatttttatgtactggcaatgaacaatctgaaaatgaaatgaatatattccgtttacaatactataaaatggaataaaatgcttacgaataaatttaacaaaagaagtttaagacttatactttaaatactaccacacattgttgaaaggaattttaagagatccaaataaatagacatccatggtaaaaaaagtgaaagacttaaattttataaaatggcaatattcttctgcagattcaatggaacc

SEQ ID NO: 920293 - DNA, 621 bp, Homo sapiens
atgccaaatgttggggagcatgtggagcaacaagaactcttatacattgtagatataaaatgaaaacaaaacaaaatagaacacattttggaaactagtttagcagcctcttataaagttaacgacaccctatgccctagcaatccacttttaagtacttaagaaaaacaaaagtatatccccagaaatagacttgtgcaaacaaaatgcacctaatatccatattggaaaggaagaaataagactatttgtttgcagatgatatgatattatagacagagtatactaraaacctcactaaaaaactattagaactaataaacaagtttagcaaggttgtgagctaaaagatcaagatgcaaaaatcaaccgtatttttatgtactggcaatgaacaatctgaaaatgaaatgaatatattccgtttacaatactataaaatggaataaaatgcttacgaataaatttaacaaaagaagtttaagacttatactttaaatactaccacacattgttgaaaggaattttaagagatccaaataaatagacatccatggtaaaaaaagtgaaagacttaaattttataaaatggcaatattcttctgcagattcaatggaacc

SEQ ID NO: 920294 - DNA, 795 bp, Homo sapiens
ctatatgaggactacactactgtgtctacctagaaccaaggccaatgacccccaccaaactgatatgacatgacccattcatacaaataaatctttccctatgaaacctactccataaaattggaagaggcaacttttctactagatccatagaaatcagcataaggacacatcaacgatgaaaatgcaaggaaacatgtaacctccaaagaaaacaataattctataggaacagatcccaattataaggaaatatacatgaaacgccagaaaaagaattcaaaataatcttaaggaaactcggtgagatacaagaaaataaacatagataacaaaatcagaaaaacaattcattatttgcatgagaagtttaacaaagaggtagttaacacaaagaaccaaacagaaatcctggagctgaagatttcagtgaatgaaaaaatacaactgagagctttaacaacaaaccagaccmagcagaatttctgaactcgaagacaggtcttttgaaataacacagacaaaataaataataataaagaacaaaaaagaatgaagaagatttataggacaccattaagcaaacaaatattcatattatgggcattccaggagataaaaagggaaaagttgagtaaaatgtatttaatgaaataatagcagaaaacctcccaagtcttgggagaatgatggacatctaggcccaggaagctcaaagaacctcaaacagattcaacccaaacagatcctctccaagacacattataataaaattgacaaaatttaaaaaagaag

SEQ ID NO: 920295 - DNA, 598 bp, Homo sapiens
atagggcattcaccacattgccagacactctgctagttttgttttgttttgtttccaaatacatcttcctcattctgttcttcctggtagtcccctgaggtaggatttaacagatgagaagaatgaggctcagaggaaataaggacttgctgaggtcaggcrtggtggctcatacctgtggtcccagcactttgggaagctgaggcgggcagatcacctgagctcaggagttcgagaccagcctggccaacatggagaaaccccatctctactaaaaatacaaaaattaaccaggcatggtggtgcacacctgtaatcccaactactcaggaggctgaggcaggagaattgcttgaacctaggaggcggaggttgcagtgagctgagatcgcgccactacactccagcctgggtaacagagtgagactctgtctcaaaataaaataaaaaagaacttgctcctgaggctcttagctactaagtagcagagctgagagtggaacccaagtctctcaaagggctctgcttccttctctctgctctgctgcctctcacctctcccaggcaggcctcacttcctcctctgagccccgatagc

SEQ ID NO: 920296 - DNA, 627 bp, Homo sapiens
attacaggcgcttgccaccatgcccagctagtttttgtatttttagtagagacggggtttcaccttattggccaggctggtctcgaacttcctgacctcaggtgatccacccgccttggccttcccaagtgctgggattacaggcgtgagccaccgcgcccagcctatgctaagtatcttatatttgtatctcacttaaacctcatgactgcttaatgaggtagagattacttgtaaaacaagtgccaacatacatatttgcatcctgattatcaaacttgttttaaatttaatgtgtattwtgaaaatttccaaacataaatgaaaataaaatcataaactaaatcctcatatagccatttctcagattcagaaataattaggattttgccacatttgctttatctgttttttctgggtcgggggcagcgggggagctgagtgttttaaagcaaacctcaggccttctttcatttcatccctacagatttcagtgtgcacttcagaaacgtgtggacttcttcttctgtgatttgctgccattgtcagacctaatagaattactaataattccttgacatgatcagatttccctgattaactcaaagacatctttttgcagcttgt

SEQ ID NO: 920297 - DNA, 528 bp, Homo sapiens
aggctgaatcacttaagtctaggaggttgaggccgcagtgagctgtgatcatgccactgcactccagcctgggtgagaggaagaccctgtcttaaaaaaaaaaagaaaagaaagagaataatagaaaatatcactgcatcacatgcagtaaaggtaaatattttgttaaacttttgttccagtttktgtgtgtgtgtgtgtgtgctgggacgtaatgtaaaaggtatcatttttccaaaaagtttgaaaaacaatttttaatggctgttctttattctgagattctgtctttcattttttgaattttttaaagtttttaaagtccttacctatcagaataaaacagcaacaaccctatgtcatttgccactctccacctttttctttttccctactgttccttttaatccaaaagtttggaaatctttgctatagtggattaaaacatgattcgccttgtttttttttgttttttttttttttgacagagtctcactctgtcacccaggctggagtgcagtggcgcaa

SEQ ID NO: 920298 - DNA, 528 bp, Homo sapiens
aggctgaatcacttaagtctaggaggttgaggccgcagtgagctgtgatcatgccactgcactccagcctgggtgagaggaagaccctgtcttaaaaaaaaaaagaaaagaaagagaataatagaaaatatcactgcatcacatgcagtaaaggtaaatattttgttaaacttttgttccagtttgtgtgtgtgtgtgtgtgtgctgggacgtaatgtaaaaggtatcatttttccaaaaagtttgaaaaacaatttttaatggctgttctttattctgagattctgtctttcattttttgaattttttaaagtttttaaagtccttacctatcagaataaaacagcmacaaccctatgtcatttgccactctccacctttttctttttccctactgttccttttaatccaaaagtttggaaatctttgctatagtggattaaaacatgattcgccttgtttttttttgttttttttttttttgacagagtctcactctgtcacccaggctggagtgcagtggcgcaa

SEQ ID NO: 920299 - DNA, 646 bp, Homo sapiens
ctccttctttaggaatcaaatgagatatcaaccgtccttttatttttagagagggcattttctttcatatcccccctgagaagctctttattctgacatatattcatgcattcatttattcactcaaccaacaataattaaaatagactaaaagcctaagagaagtacagtgtggtgtataatacgtaagctccagggccaagcaggcaggacttctctcaccagccaygcaacctctctaagatcccattttctccactgtaaaatgaggcttatcaaagacctacctcacaggttcatcaggaggatttcataccataatagtacaccgagttgggggaggaaccaagttggccgaataggaacagctctggtctacagctcccagcctgagcgacgcagaagacgggtgatttctgcatttccatctgaggtaccgggttcatctcactagggagtgccagacagtgggcgcaggtcagtgggtgcgcgcaccatgcgcaaaccgaagcaaggcgaggcattgcctcactcgggaagcgcaaggggtcagggagttccctttcctaatcaaagaaaggggtgacagacggcacctggaaaatcgggaaaatcgggtcactcccacccgaatactgcgcctttc

SEQ ID NO: 920300 - DNA, 646 bp, Homo sapiens
ctccttctttaggaatcaaatgagatatcaaccgtccttttatttttagagagggcattttctttcatatcccccctgagaagctctttattctgacatatattcatgcattcatttattcactcaaccaacaataattaaaatagactaaaagcctaagagaagtacagtgtggtgtataatacgtaagctccagggccaagcaggcaggacttctctcaccagccacgcaacctctctaagatcccattttctccactgtaaaatgaggcttatcaaagacctacctcacaggttcatyaggaggatttcataccataatagtacaccgagttgggggaggaaccaagttggccgaataggaacagctctggtctacagctcccagcctgagcgacgcagaagacgggtgatttctgcatttccatctgaggtaccgggttcatctcactagggagtgccagacagtgggcgcaggtcagtgggtgcgcgcaccatgcgcaaaccgaagcaaggcgaggcattgcctcactcgggaagcgcaaggggtcagggagttccctttcctaatcaaagaaaggggtgacagacggcacctggaaaatcgggaaaatcgggtcactcccacccgaatactgcgcctttc

SEQ ID NO: 920301 - DNA, 646 bp, Homo sapiens
ctccttctttaggaatcaaatgagatatcaaccgtccttttatttttagagagggcattttctttcatatcccccctgagaagctctttattctgacatatattcatgcattcatttattcactcaaccaacaataattaaaatagactaaaagcctaagagaagtacagtgtggtgtataatacgtaagctccagggccaagcaggcaggacttctctcaccagccacgcaacctctctaagatcccattttctccactgtaaaatgaggcttatcaaagacctacctcacaggttcatcaggaggatttcataccataatagtacaccgagttgggggaggaaccaagttggcygaataggaacagctctggtctacagctcccagcctgagcgacgcagaagacgggtgatttctgcatttccatctgaggtaccgggttcatctcactagggagtgccagacagtgggcgcaggtcagtgggtgcgcgcaccatgcgcaaaccgaagcaaggcgaggcattgcctcactcgggaagcgcaaggggtcagggagttccctttcctaatcaaagaaaggggtgacagacggcacctggaaaatcgggaaaatcgggtcactcccacccgaatactgcgcctttc

SEQ ID NO: 920302 - DNA, 646 bp, Homo sapiens
ctccttctttaggaatcaaatgagatatcaaccgtccttttatttttagagagggcattttctttcatatcccccctgagaagctctttattctgacatatattcatgcattcatttattcactcaaccaacaataattaaaatagactaaaagcctaagagaagtacagtgtggtgtataatacgtaagctccagggccaagcaggcaggacttctctcaccagccacgcaacctctctaagatcccattttctccactgtaaaatgaggcttatcaaagacctacctcacaggttcatcaggaggatttcataccataatagtacaccgagttgggggaggaaccaagttggccgaataggaacagctctggtctacagctcccagcctgagcgacgcagaagacgggtgatttctgcatttccatctgaggtaccgggttcatctcactagggagtgccagacagtgggcgcaggtcagtgggtgcgcgcaccatgcgcaaamcgaagcaaggcgaggcattgcctcactcgggaagcgcaaggggtcagggagttccctttcctaatcaaagaaaggggtgacagacggcacctggaaaatcgggaaaatcgggtcactcccacccgaatactgcgcctttc

SEQ ID NO: 920303 - DNA, 664 bp, Homo sapiens
gtaaggaaataagagggtttttctttatttttttctttccaacttttaggttcgggggtacatgtgcaggtttgttacatgggtatattgcatgccattggggtttggtgtgcagattctttcatcacccatgtagtgagcatagtacttgatagatagtttttcgatcctcaccctcctcccacccttcaccctcaactaggccccagtatctatttttacccttctttgtgtccatgtgtactcaatgtttcgctcccacttataagaacatgtggtattttggttcctattttaattcacttaggataatggcctctatttgcattcatgttgttgcaaaggacgtgattttgttcttttaaatggctgcrtggtactccatggtgtatatgtaccacattttctttatccagtcaactgctgatgatgggcatctagattgatttcatgtctttgctattgtgagtagtgctgcgataaacatacacgtgcatgtgtctttatggtagaatgatttatattcctttgaatacatacccagtaatgggattgctgggtcaagtagtagttctaagttttttgagaaatctccaagctgctttccacagtgactgacctcatttacatttcaaccaccagcatataagcatttccttttccc

SEQ ID NO: 920304 - DNA, 643 bp, Homo sapiens
atgggagaggattgacagagctctctctcaggtcttgaaatctgtcaatgtgggcttgcaaactgggatgcccttgacttctttgtataggcagtgatttgtttgagacatcgttgtgcctgcccagttatgttttgtgatggcatttgtctgacactctatatgaagtaagggacataactgtaatacatatgcagctytttgacagccagaagcccaggaaggactataaattttgcttttgatgtttatttgaaacacaaatactttggaggcagtctattttgttccctaaaaattaatgtaaaccttgttttctatggatcatggtctaagaataatagaaagaaagtaagtgggtgaaagaacatgtcttgggagactgctgtgtggaaaaagaaaaaagaggtcgcagagcccagtatgtactagaattcaaatgctttttcagtggaaactgacaagttatatttttgccttaaatttaacctttccactaaacctgcactcttgaatgcttaatgcattaaaaatgttatcttagtgcatattttttcattcttcattttaacatgcaaaaccagaagtattctgcagagaggattcaggttttcaggacattggctcagttggggatttggga

SEQ ID NO: 920305 - DNA, 607 bp, Homo sapiens
tgcaacagtttgagaggcacagacttcatgtttatatcctcttgattaaagtataaaaataagagatataaactaggtcaaaaatgggagagggagggtatcttcaaaattcaatctttcaaaaataacttcaattatctctaataatcctagagtaagaaggccgatataagaatatytgcatacacaagggtaccaagtaaatattgttcttactcttttacctccctgtatacagcatagtaccacgtgctcagaaattacttggcaattcttatattgtattaatcaaacatcaatacaatatttttggtaagcaatttcaagaagctagataaagttaaagaaaatatcctccctaaagttcttccaatacagctttttttttttttttttttttttgagacggagttttgctcttgttgctgaggctagagtgcaatggcatgatctcggctcactgcaacctccgcctcccaggctcaagcaattctcctgcctcatcctccatgtagctgggattacaggcatcacacccatctaatttttgtatttttagtagacatggcgtttcaccatgttggccaggctggtctcaaactcctga

SEQ ID NO: 920306 - DNA, 554 bp, Homo sapiens
gtccaggaccttttcttgttggcagggtttccattactgattcaattttgcaattcattgttcatctgttcagggtttcaatttcttcctggtttcatcttgggaggttgtgtgtttccaggaaattatccgtttcttctagrtatcctattttgtgtgcatagaggcattcatagtagactctaagggtttttttgtgtgtgtgtttctgtgaggttggtgataatgtcatctttgtcatttctgactgtgtttatttgaatcttctcttattttttctatattagtccagctagtggtctatcttgtttattctttcaaagaacaaacttttattttcattgatttttagtatgattttttacatcttaatttcattcagttcagctctgaattttggttatttcttttcttctgctacttttgtggttattttgtgctggtttctatatttactctaggtataatgttaggttgttaatttgaggtctttctagctttttgatgtgggtgttctgtgctacaatctttccttttaacactcctttatctgt

SEQ ID NO: 920307 - DNA, 767 bp, Homo sapiens
tcctccagacagaagcttcttcaaacgatgggctttctgagctaagagcaaagaaaataaactctccacgggtatattattaaagtttattttattgagttactttcaaagcaatccatgactattatataaagtcagaaagtattaaaaatcaccaagttctctgctaagctaccttatcccatgcaatcaaaataagtacttttcttcatttggatgcattttttatttctgtttttaatatttccacaatggtgattaaacctggtgctcattcctctggtttgatccacctttatgctcttgtcatttaaagttaatgtaagtagtgttccatttatttaaaaggataaaatattttaatagttgatcattgcattttgaactgagtaccagtgaagtattctagcttttaggtaatttcaattgtttgctagtcaatgatgttatacgttgttgtcattaaaccattcctggtcatttctgtggattttgtgaggtcagagaaaatgtctgtgcttttcaatggaaagccttgggtacattattcctgacttcccaaygcacaaaatagagaaacacaaatttcctgctcatgttagttagagcataagagattcaggtacgaggaacaatttataccccaaactacatacagtgtcttcaggcatgtattagaagtgtacttctcaaactctctgatacccttagttctgaagaagctcaaagttggctaatacttttatatttatctttttatttttttt

SEQ ID NO: 920308 - DNA, 646 bp, Homo sapiens
atatagaaataaaaatctgtatattacagcatatcacaaaatcctgtatctatttaggttaaagactcaaatcttaaactacttgtgaaattacttatgaatattacatgtttaagatatttaaaagtatatacagagaactaatgacgttgggcaacaaatggcttattaatcaaatgccagaatgcatgaagaagaaaagaaaagaaaaataaattagactgtattaaaatgaaaaatcctaggcatcctaaataaaggttaaatgcaagccagaaaattgggtaaaatatttacaaaatatataattgaaaagtataatatccattatataaagaggatttctacaaattmatgatataaaataaataatatagtagaaaaaatgattaagaactactacacaatattcacaacagatgataaatagtgaattattgtgaaaagacaattgaaaagagcaaggtacaattcaacagcaataagactttatgcccttttctataaaaacacaaaactatgccaagggctttaggaaccgtgaatttatatacggcgaaggggagtttaaatctgccactttgaagagttttttggaaatatatagtaaagttgaaaatatatacatatgtgtatatatatatac

SEQ ID NO: 920309 - DNA, 526 bp, Homo sapiens
ctcaaagcactgggattacaggcatgagccgccaagcccggcctctcactacatttaagtgacgccatggctcatgcctgtaatcctagcactttgggaggccaaggcaggtggatcacctgatgtcaggagttcgaaacgagcctggccaacatggggaaaccccgtctgtagtaaaaatacaaaaattagtcaggtgtggtggtacaagcctgtaggcccagctacttggaagactgaggcaggagaatcacttyaagcgggaggcagaggttgcagtgagccaatctcaaaaaagaaagaaaaaaaaaaagaaaaacatatgatgctggggcatctcggcctcaatacctgcatgagcacagtcatgtccaggccagggctgctggtcgaggtccggccccatctcttccagcagaaagggagtaagcttgcagggaggctgggggacaagatcccaggatctcagcctccgctcatggatcagctctgagaccccgagtgagctgggggtgctctgtgtgca

SEQ ID NO: 920310 - DNA, 690 bp, Homo sapiens
gtgtctccactgtttcagttcttgcgttcgttcattcttgtgctttttcgttttaccaaataaaatagctccttgatgtcatatgaatccacgctatgcttaatgagtattggttagtaaaatgcctataactagtaatcttcatctatgcaattaaatattaattcataaaacacttcaaatgtaaacaataattagtaaatgaaaagtacataatacctcaattagaaaaaaatcactccattaaaaagacattatttgtgtgataaaagagattgccatttttgtatttttctacaaggttaaagaaaactaagtcaacttatacaagtgaattttaaaagactttagggcaggcgtggtggctcacgcctgtaatcccagcactttaagaggccgaggagggcagatcacctgaggtcaggagttcgaaaccagcctgaccaacatggtgaaatctcatttctactaaaaatacraaaaaattagcccagtgtggtggcatgtgcctataatctcagctacttaggaggctgagacaggagaatagtttgaacctgggaggcggaggttgcaatgaaccaggatcgcaccattgcactccagcttgggcaacaagagtgaaaccccatctcaaaaataaataaataaataaataaaataaataaaagcctttaacccagaatgctg

SEQ ID NO: 920311 - DNA, 618 bp, Homo sapiens
tgtgctcccaggctttttctcaccctaatagctctcatccatatcatgtgggtcccattaatacagatacctccgaatgcaccactcttccattatatccagtcaattgctggttaccttgggcctaccaactgggggagggcaggggctgctggccacctcctcatctacagtaagagtcaatgagcagttaartggatactgaaaaccatttatcctgctggagtgagaaataaatggtttctttcaatagcgtagtaaaatgcatcttttccaaactatttatatgactcaaggcccatctcaatttcagatgtggttagcctcaattcctgattctcaccaaggtgtgtaatgtcatccacggcccagtgcagaggaacacaggtgctgccgtcagactgccagggtccgatcccgcctcctcactcaccccgggagatccctttaagccaggagtcaacagtgaggatggaaacatgagtgctttttaaagtcctgaaagttcagaggcagactgtcaatttctcctccacccctgggcacacaccaggagaactctgtctccaggtgggaggaagtgcctgtgagagagttgtgtccctcagattctgttca

SEQ ID NO: 920312 - DNA, 722 bp, Homo sapiens
ctagtaatttgaaaagatcgcatttgacaggccagtatgaacataccttgaatgcagccacacaggttccccataagaaaaatcaaaatcagggaaaatgaaaccacaatggttcaatctgctctgacctttgaaaaactcagcacagatagtggcacttaggaccaagggcaggagatccctaatcccatcaccatggtgatagggcataaacattccagggtgaaggcacaatccacactgtgagktccaactgctgccatgcagacaggtgggcttttacaagtacaggaaggtcatcaaaggctcagtgttttgtttcaaaaactgaatcccaagcctacacattattatgctggcttcttaaaataagttatgagatgggaaatagggcacccacaaatatatatatacataaaattatatataatatagtatatatatatatatatatatatataatttgggaatttgggaataaactgaatcccaattcacactgggactacaccagctgccaccatgcctggctaattttttgtatttgtagtagagacagggtttcactgtattggccaggatggtcttgatctcctcaccttgtgatcctcttgccttggcctcccaaagtgctgggataacaggcctgagtcaagatacatattttttaaatgaagaaaaatttcaaagatactctgcttggtacaataatcaaatatata

SEQ ID NO: 920313 - DNA, 600 bp, Homo sapiens
ttttgttttaagatgtgttattatcaaagaatcaaaaaattaaaaaaattaaaagtttataaagttatgataagctaagatgaacttgttaaagaaagaaaaaatttaaatacatttagtgtagcctaagtgtacagtgcatataaagtctatagttatgtacagtaatatcctaggccttcgcattcactcaccaagtactcactgactcatcagagcaactgccagtcctgcaacctctgttcatgctaaatgtcctttactggtgtaccactctctttaaattttgtaatatatatatatttttttctttgttttttttgagaaggagttttattttgttgcccaggctggagttcratgatacgatcttggctcactgcaacctctgcctccggggttcaagtgattctcctgcctcagcctcacgagtagcagggattacagccccacgccagcacgcccagctaattttgtatttttagtacagacggagtttctccatgttggtcaggctggtctcgaacttctaacctcaggtgatccgcccccctcggtctcccaatgtactgtgtttttactgtatcttttccatgttta

SEQ ID NO: 920314 - DNA, 577 bp, Homo sapiens
cacagagaacctctactagggcagtatggaggggaaatgtggggttggagctcccacacagagtccccgctggggcattgcctagtggagctatgagaagagggctaccattctctagactccagaaaggtagatccatccacagattgcaccgtgcacctgaaaaagccacaggcactcaatggcagcccatgagagcagccgcaggtgctgaatcctgcaaagccacctgagtggggctgaccaagaccttggtagcccacccctcacaccagtgtaccctggatgtgggacattaggtcaaaggagatttttttggagctttaaaatttaatgacttccctgctgtgtttcagacatgcayggggcctatagaccctttgttctggccaatttctcccttttgaaatggaagtatttacctaatgtctatacccccattgtatcttggaagtaactaacttattttatattttacaggctcataggtggaagggacttaacttgtctcagatgagactttggacatttgagttaatactagaatgagttaagacttttgggcactgctgggaag

SEQ ID NO: 920315 - DNA, 591 bp, Homo sapiens
ctcacagagaacctctactagggcagtatggaggggaaatgtggggttggagctcccacacagagtccccgctggggcattgcctagtggagctatgagaagagggctaccattctctagactccagaaaggtagatccatccacagattgcaccgtgcacctgaaaaagccacaggcactcaatggcagcccatgagagcagccgcaggtgctgaatcctgcaaagccacctgagtggggctgaccaagaccttggtagcccacccctcacaccagtgtaccctggatgtgggacattaggtcaaaggagatttttttggagctttaaaatttaatgacttccctgctgtgtttcagacatgcacggggcctatagaccctttgttctggccaatttctcccttttgaaatggaagtatttacctaatgtctataccccyattgtatcttggaagtaactaacttattttatattttacaggctcataggtggaagggacttaacttgtctcagatgagactttggacatttgagttaatactagaatgagttaagacttttgggcactgctgggaaggcatggttatat

SEQ ID NO: 920316 - DNA, 772 bp, Homo sapiens
aaattttagaggcctctgctgtgattcacctatgggggcctgccagaggctctgatcagcatccctatctgccgctgtcacctcaagcactattgaatttgctgggtcatatggcccaagtggcagagcagcttgcacagcatccttgatctgttgcagagccttctcctgttctggagcccactcaaaactggcagccttttgggtaactcgatgaataggccacagtaacacacccatatgaggaatgtcttgcctgcaaaatccaaataggcccactaggcattgtgcctctttcttggttgtaggtggggtcaaattcagcaacttatccttcaccttagaaggaatgtcttgaaagatcccacacaactggacccctagaaagtttactgaggcagaagttccctaaattttagtcagatttattttccatcttctggcatgcaaatatmtcaccaataagccctgtgtgtttgctacttcttgctcactggatttcatcagtataagacatgaatgtaatgaacgagtgtgacatcttgtagaagtaaaaagcgatcaaggtgtctccgaaaaagattatgacacaaagctggagagttgatatacccctgaggtaggacagtaaaggtatattgctggccttgccagttgaaagcaaattgcttctagtgggccttatggacaggaatggagaaaaaggcatttgccaactcaatggctgcataccagataccaggagatgtgttaattttctcaagcaataaaa

SEQ ID NO: 920317 - DNA, 772 bp, Homo sapiens
aaattttagaggcctctgctgtgattcacctatgggggcctgccagaggctctgatcagcatccctatctgccgctgtcacctcaagcactattgaatttgctgggtcatatggcccaagtggcagagcagcttgcacagcatccttgatctgttgcagagccttctcctgttctggagcccactcaaaactggcagccttttgggtaactcgatgaataggccacagtaacacacccatatgaggaatgtcttgcctgcaaaatccaaataggcccactaggcattgtgcctctttcttggttgtaggtggggtcaaattcagcaacttatccttcaccttagaaggaatgtcttgaaagatcccacacaactggacccctagaaagtttactgaggcagaagttccctaaattttagtcagatttattttccatcttctggcatgcaaatatatcaccaataagccctgtgtgtttgctacttcttgctcactggatttcatcagtwtaagacatgaatgtaatgaacgagtgtgacatcttgtagaagtaaaaagcgatcaaggtgtctccgaaaaagattatgacacaaagctggagagttgatatacccctgaggtaggacagtaaaggtatattgctggccttgccagttgaaagcaaattgcttctagtgggccttatggacaggaatggagaaaaaggcatttgccaactcaatggctgcataccagataccaggagatgtgttaattttctcaagcaataaaa

SEQ ID NO: 920318 - DNA, 772 bp, Homo sapiens
aaattttagaggcctctgctgtgattcacctatgggggcctgccagaggctctgatcagcatccctatctgccgctgtcacctcaagcactattgaatttgctgggtcatatggcccaagtggcagagcagcttgcacagcatccttgatctgttgcagagccttctcctgttctggagcccactcaaaactggcagccttttgggtaactcgatgaataggccacagtaacacacccatatgaggaatgtcttgcctgcaaaatccaaataggcccactaggcattgtgcctctttcttggttgtaggtggggtcaaattcagcaacttatccttcaccttagaaggaatgtcttgaaagatcccacacaactggacccctagaaagtttactgaggcagaagttccctaaattttagtcagatttattttccatcttctggcatgcaaatatatcaccaataagccctgtgtgtttgctacttcttgctcactggatttcatcagtataagacatgaatgtaatgaacsagtgtgacatcttgtagaagtaaaaagcgatcaaggtgtctccgaaaaagattatgacacaaagctggagagttgatatacccctgaggtaggacagtaaaggtatattgctggccttgccagttgaaagcaaattgcttctagtgggccttatggacaggaatggagaaaaaggcatttgccaactcaatggctgcataccagataccaggagatgtgttaattttctcaagcaataaaa

SEQ ID NO: 920319 - DNA, 574 bp, Homo sapiens
tggtatctcattgtggttttgatttgcatttccctaatgatcagtgatgttgagctttatttcatatgtttgttggtcgcatgaatgtcttcttttgagaagtggttcatttcctttgcccactttttaatgggtttgtttttttcttgtaaatttaagttccttatagattttgggtattagacctttgtcagatggatagatcgaaaaaattttctcccactctgtaggttgtctctttgctctgaggatagcttcttttgctgtgcagaagctctttagttgagctacatctcatttgtcaactttcacttttgttacaattgcttttggygtttttgtcatgaaatctttgcccatgcctatgtcctgaatgatattgcttagattttcttctaggatttttatagttttgggttttacatttaagtctttaatccatcttgagttaattttttatgtggtgtaaggaaggggtccagtttcaattttctgcatatatggctagccagttcttccagcatcatttattaaatagggaatcctttccccattgttttttgtcaagtttgtt

SEQ ID NO: 920320 - DNA, 561 bp, Homo sapiens
gttcgaacccatcgcaaagcagctaaaaaccttgaaaaaagttagatgaatggctagctagaataaccaatgcagagaagtccttaaatgacctgatggagctgaaaaccatggcacgagaactacgtgatgaatgcacaagcttcagtagcygattcgatcaagtggaagaatgggtatcagtgattgaagatcaaaggaatgaaatgaagcgagaagagaagtttagagaaaaaagagtaaaaataaactaacaaagcctccaagaaatatggaactatgtgaaaagaccaaatctacgtctgattggagtacctgaaagtgacggggaaaatggaaccaagttggaaaacactcttcaggatattatccaggagaacttccccaacctagcaaggcaggccaacattcaaattcatggaatacagagaatgccataaagatactcctcgaggagagcaactccaagacacataactgtcagattcaccaaagttgaaacaaaggaaaaaatattaagggcagtcagagagaatggtcgggttacccacaaagggaagc

SEQ ID NO: 920321 - DNA, 592 bp, Homo sapiens
gtgagcagagattgcgccactgaactccaacctgggcgacagcgagattccgtctcaaaaacaaacaaaagagaaatgagattgtttgtattaataacaaggataaatgcttgaggggatggatactccattctccatgatgtgattattacacaytgcatgcctggatcaaaacatttcctgtgccccataaatatatatatctactatgtgtccataagaattaaagattaaaaatttaaattaaaaattgtttaaagagaaaaataacaaaaaagaaaagagaaatgtccccaggtgactaggccaagattttccacctggaacattttcaagcaagtatacaggtgccattgtgtactgacctgttccaaagtggcccagttgaggcctctttgccctagactggccaccttgtatgacagcagtgatctgtcagcctctcatagcctggaaacaccctggagtcaggactgcactctgcagttaggggacagtggacagggctgcctcacctacccttcaggttcacctgcagtgcacacaattgtaacacgtaggtccatccctgggcgctcaattggcttaacct

SEQ ID NO: 920322 - DNA, 601 bp, Homo sapiens
cttatttatttttcataagatccatggggggaggaggaacactttttataccactgtattcccagcacataaaacagtaattgtcacataggaagcactcagttacaaggtgaccaaagaatctataaatgattgaaacaagatgagaatagaamcaatatcatcagaaggaggagcagcaaaattttttaacaatgtaaaagataaatatttattctcagagccaataaaaaggtgaaaggaaactggtacaagttagaaataaaacactagaggaaaaactgcaaagaaaagaagagttcattttgaaatatagatgtttaagaattgaaaagcttttaacatcagaaaggagtagtaaaatattctacatttcagctcaatgtctaggagtgtttccaaggtgtttatgactaagcactctgcctctttgaataatacattgcagttgtggcatgttacggttgaaaaatgtttccatgtgcattatttcatttgaccctgcaaatgaccttattggattaatcagacaagcctcccatcctcattacatgcttatgaaaacagaggtttctgcaagttgagaacctaggccaagagg

SEQ ID NO: 920323 - DNA, 468 bp, Homo sapiens
aagctttcttcattcattctccaagacaccactctcaacccactcactgacgtgcatcctcatctttgctcaaatgacatcaaggtgccatttccctgacatctcgagcactccgggacagtatttggatttcttctctatgcatrctcactttaaaaataatcttgtttagcccataggctttaaatatgttaaagtctccccaatttaattcttcatgcccaaactctctcctgaacaccagatgcatatatcataatgtccacctaacatctctatttggaagttgaatggacatctcaaagttaatgcatctgaaacgatctctttgttttttaccactgcccacacacctaaaactcctcctgcagtccttttggtcttagagtctagccatgcagatactcagccaaaaacttggagtcatctttgatgcttctgtctatgtcacacatcacatcggtaaat

SEQ ID NO: 920324 - DNA, 749 bp, Homo sapiens
cccctgtaccatgccacaccacacagcagtgccatgcctcccagacccggtcagtagggcagtttcctgagtctgtggaagggagaaaatgctagaaagtatttgaggagtaggttgcaggagctttttaaccaggatgaggaatttgggatgtatgtggaggcggcaaggtggcatagcttcccatcatctgaagcattccttttgttgcctgtccctgcctggcagggtggagctggctattctagactccttgggggcctggtgggtagctgcmggctctgtccatagaagcccttcccattcagtatcttccctcctggtccactcatttggtgccttctgtgattcagttcacagtcacaccacctcccactcctaggaaagcgggaaagtcaatccaaatctgagatggggacctttaagcccatggcaggagtttgtgcctgcattgtagggcgcatggttgggctcaggtcggggtgcaggcaatattttggctccctagagaacatgtaaggccttttaccaaatagtactgtctctgtctcccttttgcatttaggctcgaagaaatcgagaaatagcaattttgcaccgcaagattgatgaagtccctagccgtgccgagctaatacagtatcagaagagatttattgaactctaccgccagagtaggtgcattgaccacagacaagctcttgaggctgggaagggacaggcgaggggtctgttccactttagcatgg

SEQ ID NO: 920325 - DNA, 611 bp, Homo sapiens
gcataaataatgaggagccaaatgctaatcaccaagaaaatggggaaaatgactgcagggcatgtcagagacctttgtggcagtccctcctatcacaggcctggaggcctagaaggaaaaagtggttttgtaggccgtgtccagcccctaccagcctgctgtgtgcaatctcaggacttggtgccctgtgtcccagccataactgaaaggggccagcagacagctcrggccatggcttcagagggtgcaagccccaagccttggcagcttccacatggcactgagcctgcaggtgcacagaagtcaacaattgaggtttaggaacccctgcctagatatcagagggtatatggaaatgcctggatgcccatgcagaagtttgctgcaaggggtgtagatctcatggggagcctctgctagggcagtgcagaaggcgaatgtagggtgagagccctcacacagaattccccctggaggactgcctagtggagctctgagaagagggccactgtcctccagaccccagaatggtagatccactgatggcttgcaccatgcacctggaaaagtcacaggcactcaatgccagcctgtgaaggcagccaagaggg

SEQ ID NO: 920326 - DNA, 707 bp, Homo sapiens
aatggcccagctgctggaaaaaatagtttagtggtgtctcagtaacttttttttttttttctggagacagagtttcactcttgttgcccaggctggagtgcagtggcgcgatctcggctcaccgcaacctctacctcctgggttcaagggattctcctgcttcagcctcccgagtagctgggattacaggcatgcgccaccacgcccagctaattttgtatttttactggagacgcggggcttctccatgttggtcaggctggtctcgaattcccarcctcaggtgatctgcctgcctcagcctcccaaagtgctgggattacaggcgtgagcgactgagcctggctgtgtctcagtaatttaaacatagaattaccatatgaccttgaagttccctgccaaaagaataaaaaacaggtgttcaaacaaaaacttttagatgaatattcatagcaacattattcacaattcacagccaaaaggtgaggcaacccaaatgtccattaactgatgactggttaaacaaaatatggtatatttacgtgataaaatattagattcagccataaaaaggaatgaagtacaagctacatatgtgatacatgttacaatgtgaatgaatcgtgaaaacattacactaagtgaaagaagctggacaaaaagatgtacattgtgtgattccatttatacaaaatatctcaaacagg

SEQ ID NO: 920327 - DNA, 571 bp, Homo sapiens
aaccactgctctcttcaaagctgtcagatggggacattgaagtctgcagaggttactgctgtctttttgtttgtctgtgccctgcccccagaggtggagcctacagaggcaggcaggcctccttgagctgtggtgggctccacccagttcgagcttcccggctgctttgtttacctaagcaagcctgggcaatggcgggcacccctcctccagcctcgctgctgccttgcagtttratctcagactgctgtgctagcaatcagcgagactccgtgggcgtacgaccctctgagccaggtgcgggatataatctcgtgttgcgccgctttttaagcccgtcggaaaagcgcagtatttgggtgggagtgacccgattttccaggtgccctccgtcacccctttctttgactcagaaagagaactccctgaccccttgcacttcccgagtgaggcaatgcctcaccctgcttcggctcgcgcacggtgcgcgcacccactgacctgcgcccactgtctggcactccctagtgagatgaacctggtacctcagatggaaatgcagaaatcaccc

SEQ ID NO: 920328 - DNA, 571 bp, Homo sapiens
aaccactgctctcttcaaagctgtcagatggggacattgaagtctgcagaggttactgctgtctttttgtttgtctgtgccctgcccccagaggtggagcctacagaggcaggcaggcctccttgagctgtggtgggctccacccagttcgagcttcccggctgctttgtttacctaagcaagcctgggcaatggcgggcacccctcctccagcctcgctgctgccttgcagtttgatctcagactgctgtgctagcaatcagcgagactccgtgggcgtacgaccctctgagccaggtgcgggatataatctcgtgktgcgccgctttttaagcccgtcggaaaagcgcagtatttgggtgggagtgacccgattttccaggtgccctccgtcacccctttctttgactcagaaagagaactccctgaccccttgcacttcccgagtgaggcaatgcctcaccctgcttcggctcgcgcacggtgcgcgcacccactgacctgcgcccactgtctggcactccctagtgagatgaacctggtacctcagatggaaatgcagaaatcaccc

SEQ ID NO: 920329 - DNA, 781 bp, Homo sapiens
cagccaggctgtgtccttccctttagggtggtgagtttccttaggtgctgggcaggtgcagagatgctgtttgggagccagggcctagagttggaaaccttagaaatctacctagtagtttattttatgctgtgcctgagctgcactgaaaccaccaaagtccttcctgttcttcctacccctttcccaaggcagaagagtctctccttatgtccaccaccacaacagagccacggagggtactgccagcctaccacttatgttcatttaaggcccaaggaatcttcagtcagcttgtggtgaatgctgccaggcttgggacttagcctttagggaagtgggcttctctctggcccagggtaggtccagagatgctgtccaagagccaagacctggaatcagggaccctagagcctgcttggtgctctaccccactgtgaccaagctggtacttaagcacaagacaaagtcccctttgctcctccctctgcttttctcagaagatggggtgtctcctcatagccactattgctgwaaatgttctgggccacacctgaagccagcatgtctcagtctcacccaaggcccatgtcgtgcactacctgggtaccactgttgattattcagggctctttagtcagcagatgatgaatactgctgggactgggtccttcccttcaagacagcaggttcccttctggcccagggtgtgtcatgaaggagctagagcttggaatgggttacttaggactctgcctggtgccctatcttaccatggctg

SEQ ID NO: 920330 - DNA, 623 bp, Homo sapiens
ctcagaagggtcaccaggcttcacttccacagtctgagagcatgtcactgtctgcagataggagagcccaccaggagcgttacagcctctttagctcccatttgcagcttgagaagccagctaggaaagtgtttcagtgatgtaccagtcaggaagctgttttggctcctttccagcctgccattcagcagaccctgagtttttgtcctgcgtccaggaagaataagttacacggacattgaagggtgagcaggtcagagaagagctttattgggcaactgaacagctctcagtggagaggagacccaaaacaggtagctcctatttacaggcaggtagtcccaaggagtgtcygagtctggctcagtctggggggttttatgggctcagaatggagtcagtgtgtgctgattgatccacgggcaggaggaactgcatgctgattggtccttggatgggcctagaaaaagcatcacttgactggctgaaaggcgtcaaagaagttctcactctgggtcatgacttcacccaaactggcagtctcccacccaggcttcaggccatccctggtttgaaggtggggtttcaccagggacctgccccttcctgcctaggaacctgtc

SEQ ID NO: 920331 - DNA, 603 bp, Homo sapiens
caaggccagtatggctggaacataggaaacacatatggtatgacttgatgttagaaaggcagaaaggaaccacagcatgctagagttttgtgggtcatggtaaagaatctgtgtaaagacactagatggttttgaaaaggagagtgatgtagtctgaattacattaaaaatgttartctttttgtttcaatggataaatggataaaaagtgtggtacacatacacagtggaatactattcagtcattaaaaggaatgaaaccctgtcatttgcagcaacatggatggaactggagttcattttgttaagtgataagccaggcccacaaaggctaatatcacatactctcactcatatgtgagctaaaaaagttgatcttatagaagtagagagtggaatgatgcttaccagaggctgagggggtgtgggaggaaatgaagagaggtttgttaatgggcgctaaaatgtaattggactgaaggaactagttctattgttcagcagcactgtagggtgactatagttaacagtaatttgttgtgtatttcaaagtagccagaagggaatatttggaatgctcccaacacaaagaaatgataaagg

SEQ ID NO: 920332 - DNA, 603 bp, Homo sapiens
caaggccagtatggctggaacataggaaacacatatggtatgacttgatgttagaaaggcagaaaggaaccacagcatgctagagttttgtgggtcatggtaaagaatctgtgtaaagacactagatggttttgaaaaggagagtgatgtagtctgaattacattaaaaatgttaatctttttgtttcaatggataaatggataaaamgtgtggtacacatacacagtggaatactattcagtcattaaaaggaatgaaaccctgtcatttgcagcaacatggatggaactggagttcattttgttaagtgataagccaggcccacaaaggctaatatcacatactctcactcatatgtgagctaaaaaagttgatcttatagaagtagagagtggaatgatgcttaccagaggctgagggggtgtgggaggaaatgaagagaggtttgttaatgggcgctaaaatgtaattggactgaaggaactagttctattgttcagcagcactgtagggtgactatagttaacagtaatttgttgtgtatttcaaagtagccagaagggaatatttggaatgctcccaacacaaagaaatgataaagg

SEQ ID NO: 920333 - DNA, 665 bp, Homo sapiens
atgaaaccctgtcatttgcagcaacatggatggaactggagttcattttgttaagtgataagccaggcccacaaaggctaatatcacatactctcactcatatgtgagctaaaaaagttgatcttatagaagtagagagtggaatgatgsttaccagaggctgagggggtgtgggaggaaatgaagagaggtttgttaatgggcgctaaaatgtaattggactgaaggaactagttctattgttcagcagcactgtagggtgactatagttaacagtaatttgttgtgtatttcaaagtagccagaagggaatatttggaatgctcccaacacaaagaaatgataaaggtttgaggtgatgagtatcctaattacccatatttggtcattacaattattatgtatcaataaaaaacataaatctctttggctattgtgtggaaaggatcacaggaggtaagggtaagggtagtgagaccagttagggaggtgttgtgtggttgttcaggggaacgtaagagctggcttgttctagggtggaatcagtggagaaggaaagtggttgaagttgggacatattttgaaagtgaagataacaggactccctgttggattaaatggggtggtggtgagggaaagagaagtctccttgacttctggtgcga

SEQ ID NO: 920334 - DNA, 595 bp, Homo sapiens
ccctctcctggctgccttctccctttgcctggacttatgttctcctgacaaggtgcctgtgtccacagacttgggcttcctgtagccttttggggaggctacgtggcggtggaaaggattgactgacttaaaaatgttctgggtggccagacacggcggctcacgcctgtaatcccagcactttgggaggccgaggtggcagatcacgaggtcaggagatcgagaccatcctggctaacatggtgaaaccctgtctttattaaaaatacaaaaattagctgggcgtggtggcaggtgcctgtagtcccagytacttgggaggctgaggcaggagaatggcgtgaacccgggaggtggagcttgcagtgagccgagatcgcgccactgcactccagcctgggtgacaaaatgagaccccgtctcaaaaaaaagaaaaaaaaaatgctctgggccaggccaggtgtggtggctcacacctgtgatctcagcacttagggaggccgaggcaggtggattgcttgagcataggagtttgagaccagcctgggcaacataggagactctgtgtctacagaaagacaaaaaaagatgtttt

SEQ ID NO: 920335 - DNA, 595 bp, Homo sapiens
ccctctcctggctgccttctccctttgcctggacttatgttctcctgacaaggtgcctgtgtccacagacttgggcttcctgtagccttttggggaggctacgtggcggtggaaaggattgactgacttaaaaatgttctgggtggccagacacggcggctcacgcctgtaatcccagcactttgggaggccgaggtggcagatcacgaggtcaggagatcgagaccatcctggctaacatggtgaaaccctgtctttattaaaaatacaaaaattagctgggcgtggtggcaggtgcctgtagtcccagttacttgggaggctgaggcaggagaatggcgtgaacccgggaggtggagcttgcagtgagccgagatcgcgccactgcactccagcctgggtgacaaaatgagaccccgtctcaaaaaaaagaaaaaaaaaatgctctgggccaggccargtgtggtggctcacacctgtgatctcagcacttagggaggccgaggcaggtggattgcttgagcataggagtttgagaccagcctgggcaacataggagactctgtgtctacagaaagacaaaaaaagatgtttt

SEQ ID NO: 920336 - DNA, 434 bp, Homo sapiens
aatagatatttattttacatgtgggttataatccaatactgctttatttatttttctgttagaattgttccatttttgaccattgggaactctctcagtcttctcctgtgtcgatttcatatgccccccacattttttaaagcacttccttactttctggcattrcaagatgcaccaggctcatcttgcatatttcccactccagtaccagcatcagccaattctccaagaagccttagtttctttccttggaaaatggtattagaaatcagtatctgggaattaggtgttcatttcactactgaggagtcaatcgttttaggcctcttccacagaaagagaagagaaatatgtatgtatatatgaatgtatatatacacacatgtatctatacataatttatctatagttacttatatctatattaaggtaaa

SEQ ID NO: 920337 - DNA, 598 bp, Homo sapiens
ccatattacccaaggcaatcttcagattcagtggaatccatatcaaaataccaatgacattcttcaaataaatagaaaaaaaaccctaaaatatatgtgaaaccacaaaagacccagaatacccaaagctctcctaagcaaaaagaacaaaactggaagaatcacattacctgacttcaaattatactacagaactatagtaacaaaaacagcatgatactrgcataaaaacagacacacagaccaatggaatagaatagagaacccaggaacaaactacagtgaactcattttcgacaaaagtgccaagaacgtacagcagaggacaaacagtctattcaataagtggtgttggaaaaactagatatctatatgtagaaaggtgaaatttgacccctatcttttacaatatatgaaagccaagtcaaaatgaattaaagactgaaatctaagactacacactatgaaactactacaagagaacattggggaaattctccaggacattggattggcaaagatttcttgagtaatatcccacgagcacagacaaccaaagcaaaaatggacaaatagggttacatgaagttaaaaagct

SEQ ID NO: 920338 - DNA, 598 bp, Homo sapiens
ccatattacccaaggcaatcttcagattcagtggaatccatatcaaaataccaatgacattcttcaaataaatagaaaaaaaaccctaaaatatatgtgaaaccacaaaagacccagaatacccaaagctctcctaagcaaaaagaacaaaactggaagaatcacattacctgacttcaaattatactacagaactatagtaacaaaaacagcatgatactggcataaaaacagacacacagaccaatggaatagaatagagaacccaggaacaaactacagtgaactcattttygacaaaagtgccaagaacgtacagcagaggacaaacagtctattcaataagtggtgttggaaaaactagatatctatatgtagaaaggtgaaatttgacccctatcttttacaatatatgaaagccaagtcaaaatgaattaaagactgaaatctaagactacacactatgaaactactacaagagaacattggggaaattctccaggacattggattggcaaagatttcttgagtaatatcccacgagcacagacaaccaaagcaaaaatggacaaatagggttacatgaagttaaaaagct

SEQ ID NO: 920339 - DNA, 598 bp, Homo sapiens
ccatattacccaaggcaatcttcagattcagtggaatccatatcaaaataccaatgacattcttcaaataaatagaaaaaaaaccctaaaatatatgtgaaaccacaaaagacccagaatacccaaagctctcctaagcaaaaagaacaaaactggaagaatcacattacctgacttcaaattatactacagaactatagtaacaaaaacagcatgatactggcataaaaacagacacacagaccaatggaatagaatagagaacccaggaacaaactacagtgaactcattttcgacaaaagtgccaagaacgtacagcagaggacaaacagtctattcaataagtrgtgttggaaaaactagatatctatatgtagaaaggtgaaatttgacccctatcttttacaatatatgaaagccaagtcaaaatgaattaaagactgaaatctaagactacacactatgaaactactacaagagaacattggggaaattctccaggacattggattggcaaagatttcttgagtaatatcccacgagcacagacaaccaaagcaaaaatggacaaatagggttacatgaagttaaaaagct

SEQ ID NO: 920340 - DNA, 551 bp, Homo sapiens
ggggaaaaactgaaagtctttcctacaacctctggaacacaataaggatacccactttcaccactgttattcagcatagtcctggagtcttaattagataaatcagataagagaaagaaataaagggtatcaacacaagaaaggaaaaagccaaattatacttgtttgcagatgatatgatcttatatttggaaaaaaaattctaaaatttggccaggtgtagtggctcatgccagtaatcccagcactttgggaggccaaggtgggtgaatcacctgagctcaggagtttgagacagcctggctaacatggtgaaacccygtttctactaaaaatagaaaaaattagctgggcatggtggtgtgtgcctgtaacgcctgtaattccagctactcgagaggctgaggcaggagaatctcttgaacccgggagggggaggttgcagtgagcagagataatgccattgcactctagcttgggcaacaacagcaaaaatccatcaaaaaaagaagaagattctaaaatttatatggaaccacaaaagacccaga

SEQ ID NO: 920341 - DNA, 611 bp, Homo sapiens
ctttcccgctttctcctgtgggcatttagtgctataaatttctccctaaacactgctttagccatgtcccagaaattctggtatgttgtgtctttgttctcattggtttcaaagaacttatttatttctgccttaatttcgacatttacccagtagtcattcaggagcagtttgtcagtttccatgtagttgtgcagttttgaatgagtttcttaatccagagttctaatttgattgcactgtggtctgaaagactgttcgttatgatttccattcttttgcatttgctgaagagcgttttacttccaacaatgtggtcaattttagaataagtgtgatgtggtgctgagaagaatgtatattctgttgatttgggatggagagttytgcagatgtctattaggtctgcttagtccagagctgagttcaagttctgaatatccttgttaattttctgtctcattgatcagtctaatattgactgatcccacagatgaactaaaatgactattccaaatcttaacacacagtattcaaatatgtattgagcgcttgttattaatatgtatttcacacagttccaagcgtgggaatataggagtgtgaactgg

SEQ ID NO: 920342 - DNA, 802 bp, Homo sapiens
tcagctgttggaagtcatgtgcaggaaagccaccctgagttgaagaggactcactgagtggtgcgctgcctgcccccggccatctctccaaggcaaaatgaacagacacggtacttatagtcctgcgcactgggaggatttcctttcactactgcctttcagagctgtctcaaagtggggtggaagtgctgccgcccactcctaggtggtgtctagatatcaggcagaactgccagtccgacaagcctgtttcttccccatcagtcaagtgatcatagaggactccccatgaggccatacacatgggttgagagagagaaaatgcagtgtagaaaggggagggggccggggcttctgagggccagtggagccrgggcgagggcataggcacctgctggagctcggtccatatataccacttccgcttaatgatggagcactgcttcgtattctcaactttatggcttggtgggttagaaagcacccaacacatgacatgcagctcaaggcacatggtgatgggtggcccatgagtaactttgtctctactaaggcccggcagaaatctaaaagctgtttctctaaaggagagtagttatcagcagagaaccacagattttcccccaaatcctttgagtcttcactatgatttaccctagagagatctgccaaacactccacgcagaatccctatttgccactgacccttcaagtagcgtcagttcttatgggttctatgtcccaaatgagaagcctgcacatcagcctggacctattgcagaactctctctcttgtggatcc

SEQ ID NO: 920343 - DNA, 718 bp, Homo sapiens
attattattcttgcctatagcaattatcaggcgttggccaaatcatgattttctttttctgtcattcttttttcatttactaatagaattctactgtgatgaagagctgtgtcttcttcatgtatttctatattcattaattgtttaaatcagtaaaaatttatggatatttactttgttctatgacttgtaatcaggtactgtcattatttatcttattgctcaaattgtcccaaatttggccactggtagctccttcaggttggttcctaggttgtttyaacatgtccccatccattgttgaaaacttccttacattctggtaccacaagacatttcagactcatcttgtacttcccctccctttgccttggaattaaccatttctctaaggagatctggttttttttttattggagagtgatattttgaaacctagatttgtattctagttgaacacattgctgctggtgtaatgttgctgtagtccctcttagctgacagagctaggagatatgtatgtgcatgcttatgtatattacatgtgtatatgtgtgtacaccatacacatgtatagacagaaacatatacatctatatgtatctatttctgtatgtatttctacatagatctgtatctatttatttctgtatctgtttatttctaaccatgtgtatatatgagtaaaacatgagttcaactccaaatccatgtcaac

SEQ ID NO: 920344 - DNA, 798 bp, Homo sapiens
ctttgtgaccttggattaggtagtggtttcttagattttatgccaaaaataaaagcaacaaaataaaaaaaataaattggacatcttcaaaattaaaaactttggtacttcaaaggacacaaagtaaaaagaaaatccacagaatgagagaaaatgtttgcaaatcgtagatccaataagggacttgtatctagaatatataaagaatgattacagctcaataataagacaaataacccagtagaaaaatgggcaaaagatctcaatattaatttctccaaagaaaatatataaatggcaactaagcacatgaaaaaatgctcaacatcatagccatcaaggaaatacaagtcaaaaaccacaatgagatactactttgcacccactaggatgactatagtgaaaaaaragagataataacaagtattggtgagcatgtggagaagctgtcgtcatgaattgatcgtgggaatgtaaaatgatgcagccactttggaaaacagtctggcagttcctcaaatggctaaacagagttcccatgcgatccagccatttcactcctacatatatttcctttcccaacagaaaggaaaacatgtccacacaaaaacatacatgagagtttacagtggcattattcataatagctccaaagtggaagcagctcaaatgtccatgaattggtgcatgaataaataaaacatggtctatccatacaatggattattatttagccataaaaaggaatgaagaactgatacatgctgtaatatggatgaaccttggaaacattatgct

SEQ ID NO: 920345 - DNA, 630 bp, Homo sapiens
tggctttcctaaaaggcatatctgatagtgcctctgctctactttttgatgggcttcccttcacactcaggataaagtccagaaaccttaacttgatccacaaggtcttatgtgaaccagtctgtctacctctttgttcttatttcttccctgttctccctcactctctgcctcagtcacactgtcttccccaacaagcctccaaaacacatattctcatctgtccaaatgaccttctctattgatggtatagaaggctcttccgaccctctccttccctggataacttcctcctatttttcacgtctctgctgaagaaatgtgtttacraaaaagcctcccttgatgccataaaccaaggtagatcctgaatggtttttaaacatgtctgaaaaatgtccatgtaggagtctatttcccctacccttagacctaagagggactttgtgactgtccccatgagtagaatacagcaaaagtgacattgcatgccctctgaggctgggttaggaaaccatatcacttccactggtttctcttgggacactcacccttgaaacccagtctctatgctgtgaggaagcccagaacacatggagaggcccatgtggaggtaacttaggcctccca

SEQ ID NO: 920346 - DNA, 738 bp, Homo sapiens
cttgagttctggccaacaagatgtgaacaaaagtgatgtatgctcctttccagactgggccataaaaccctggcatggtcttccagttcaagagccagcaaacgttttctgtaataatagtaagtatttttggctttttgggccatgaagtctctgtcccaactactcaactctgccacagtagcacaaatgaagccatagacaatatgtaaatggatragcatggctatattccaatacaactttatttacaccaataaagagatggtgaactggatttggcccacaggttgtaatttgctgagccctttactagttactctctccacgtttcacggaaaccctggaagccaagtgttgcagatgctgagaatgccaagatagggggcctgggtcactgaaagtctatagggagcagggtccccctgcccccacccccaccagagtacaccatgacacgagcttccattgtgttaggttattagatactgtggatgtttgttacagcagcaaacctatcctgactcatagatcaatgatccagaaaccaaatgctcatgtctgtagctgggaagaacaaaatataagaatttagattgagactgctagaaggatcatagtaattacagtaaaaaaaaagttcacatattcagtattttgtgctttttaaatcctcaggagcacaatctcatttgtagcctcataacaaccccacaagtcaggctcagcagatgtcat

SEQ ID NO: 920347 - DNA, 601 bp, Homo sapiens
gacgaaagctgtagcttctcagtttgttttttggctttatgtttcttaattttcacccttgcatgcttgttgattcttttgctactctctttaatggctgttgtaaaattatgtttctgaaaagatacctgtctcatagatggctcacattctccgcttatctctcttgtcactcactgcgcaattgtctcagtgatagctctacgatcctggagctaaggatggttttacaagtagcatttccactgctaccagagcaactctcatgtcactggtgtgatccgcccccattgccccattctttgcttctctttttcctcatcaccatggaaaccgattgtgacatcacagatgctgcattatgtgattattttgtaggataaacttcactgtgcargaatttatgcaacaatacacccttcagtaattggcaagagtcatgttgcatggagaaattatgacaagaaaggaaaaggcaaattgatttttcctgaagatacattcaatttaaagccttcctttggtgtaaaagcctatatttcactctttgttcagacctcactaactctctcttcctcttcataaccttttacattttgtt

SEQ ID NO: 920348 - DNA, 758 bp, Homo sapiens
accctataacaagtggaactatgaagacaatatataataacatgaaaagtgctaacagaaatctgtaaataaaaaattgattttacctatagaaaatgtacgtggaggtgggtgcggtggctcacgcctgtaattccaactctttgggaggccgaggcaggcagatcacgaggtcaggagatcgagaccatcctggcgaacactgtgaaaccccgtctctactaaaaatacaaaaaatcagccgggcgtggtggcaggtgcctgtagtcccagctaatcaggaggctgaggcaggagaatggcgtgaccccggcaggtggagcttgcagtgagctgagatcgcgccactgcactccagcctgggtgacagagcgagactccatctcaaaaaaaaaaaaaatgtatgtggatagggacaaaagatgasagtaaaagcatgtgatgcatctggctagtgcaatatgaatgttttaacatttctaatattctttgctcttataatgttttcaataaaatggagagatattgtaaaaatatttcaaaggctagtcttccttttcttctaacaaattctcttcatcaggtcaattttctcaaaatcttctcaattccagctttctccatgttggaaactgaaaggacagggctgggtggagagtgcgcgtatgtggggggtgaggacatgataggggaggttagagctggcgaagatgatggtataaagggttcctcttccagatctctgccagattgctcag

SEQ ID NO: 920349 - DNA, 758 bp, Homo sapiens
accctataacaagtggaactatgaagacaatatataataacatgaaaagtgctaacagaaatctgtaaataaaaaattgattttacctatagaaaatgtacgtggaggtgggtgcggtggctcacgcctgtaattccaactctttgggaggccgaggcaggcagatcacgaggtcaggagatcgagaccatcctggcgaacactgtgaaaccccgtctctactaaaaatacaaaaaatcagccgggcgtggtggcaggtgcctgtagtcccagctaatcaggaggctgaggcaggagaatggcgtgaccccggcaggtggagcttgcagtgagctgagatcgcgccactgcactccagcctgggtgacagagcgagactccatctcaaaaaaaaaaaaaatgtatgtggatagggacaaaagatgagagtaaaagcatgtgatgcatctggctagtgcaatatgaatgttttaacatttctaatattctttgctcttataatgttttcaataawatggagagatattgtaaaaatatttcaaaggctagtcttccttttcttctaacaaattctcttcatcaggtcaattttctcaaaatcttctcaattccagctttctccatgttggaaactgaaaggacagggctgggtggagagtgcgcgtatgtggggggtgaggacatgataggggaggttagagctggcgaagatgatggtataaagggttcctcttccagatctctgccagattgctcag

SEQ ID NO: 920350 - DNA, 780 bp, Homo sapiens
tgagtctgatggggacttggagaatctttatgtctagctaagggattgtaatacaccaatcagcactctgtatctagctcaaggtttgtaaacacaccaatcagcaccctgtgtctagctcagggtttgtgaatgcaccaatcgacactctgtatctagttaatctggtggggacttgaagaacatttgtgttgacaccctgtatctagctaatctagtggggatgtggagaacttttgtgcctagctcagggattgtaaatgcaccaatcagcaccctgtcaaaacggaccaatcggctgtctgtaaaatggaccaatcagcaggatgtgggtggggccagataatagaataaaagcaggctacctgagccagcagtggcaactggctctggtcccggtgtggaagygttcttctttcactctttgcaataaatcttgctgctgctcattctttaggtccacactgcctttatgagctgtaacactcaccgcgaaggtctgcagcttcactcctgagccagtgagaccacttaacccaccagaaggaagaaactccagacacatccgaacatcagaaggaacaaactctggacacgccgcctttaagaactgttaacactcactgtgagggtccgtggcttcattcttgaagtcagtgagaccaagaacccaccaattctggacacactagtccctgctcgaaagccacctaaccagtgaggacccccatgacagccctggataaatagtatccctcctgccttcctgacacttcctaa

SEQ ID NO: 920351 - DNA, 583 bp, Homo sapiens
taacttttccctttggcatgctgagtttggggtcccaagattttatttttctttcacagtctgcacattgacttttttagacataatgccattctatactttatagactacagtgtagtataaaaatagcccgggtgcggtggctcacctgtaatcccagcactttgggaggccaaggtgggtggatcacctgagaccrgaagtttgagaccagcacggccaatatcgtgaaacctcatctctactaaaaatacaaaaaaatagctgggcgtggtggtgggtgcctataatcccagctacttgggagactgaggcgggagaattgcttgaacccgagaggcagaggttgcagtgagccaagatcatgccactgcactccagcctgggtgtgacagagcgagactccatttcaaaacaaataaaaataaataaatacataaaaataactttgatatgcactgggaaaccaaaaaatatttgtgacttacttaattatgatattcactttactgagatagtctagaatggaacccacaacatctttgaagcatgcctatatttggtcttccttctgggttgctga

SEQ ID NO: 920352 - DNA, 600 bp, Homo sapiens
ttttattagccttttgagtaaactacaataaaagacagggtggggagagagagaagacagattcacttgacctcatgctgtctttattgggtctttattagaaagctgattctctcctctcttagtgagtatgagattttgcatttttaaaatattygagtaatcattctggctaaatgaatgactgatagtgacctgaagttctgttttgtgatatccagtgtttcaaacctttgatatttgacaagtcttccaagatcaaattctaaattaaaaaaaaggtaaaatttaggtcccctaaagtgcaaaaaagacatattcagcttatttaatatattaaaatcatataggaaacactgtctgatataaaatggtgtttaactttctctggattatgttcatataaatattagtatgtgttacaaaattatatgtttcctgtaattgtgatatgtctctatatatgttgctagtagtaattataattattgtgtaaaattgatggtataccacagaaataaccaagattcctagtgaattttggctttaactatggctgtcctgagaattttgtcacccacagacaactgttgtcttgtt

SEQ ID NO: 920353 - DNA, 828 bp, Homo sapiens
tagtccactaatttcatggcacatggatggcctctagaaaaatgaaagtatgtttgaaagagaacatttctagctgaaatggccaagatgacttaagggaagaggtgaattgctcagaaccttgagtggtggttcgtttgtgttcatggatggaggtgggggacagggagagcttaaagaaatctgcaatgcgagaaaggggccaagacagacaaatagaaacagctcccatctgcagctcccagcgagatgaacacagaaggtgggtgatttctgtatctccaactaaggtaccaagttcatctcattgggactgattaggcaggtggcgtgacccatggagggtgagcagaagcagggtggggtgtcactttacccaggagctgcatgaggtggggggacctccctcccccagccaagggaaacagtgagggtctgtgctacctgccagagataccgcgcttctcccatggatttgtgcaatctgcggatcaggagattgcattgtgagtctataccactagggccctgggtctcaagcacaaaactgggataaccaactaaccaacgacagccactcccgccagtggctgttcmggctggcactgagctgcaggagtttatacatactccagtggtacctggaactccagtgaggcaggagaacctcacaggagtggaaaggctaaagccagggagccaagcagtcttgatcagttggtcccactcccatggagccctgaaagctaagacccactggcttaagacccctactaccagcacagcagtctggagtctgcatgggaggactgagtttccaggggaggt

SEQ ID NO: 920354 - DNA, 582 bp, Homo sapiens
aactgttctccatactggttgtactaacttacattcctatcaacagtgtacaagggttcccttttcttgacatcctcgccagcatttgttattgcctgtcttttgtatataagcaattttaactggggtgagatgctatctcattgtcgagttaacgggtgcagcacaccaacatggcacatgtatacatatgatttgcattctctaatgatcaatgatgttgagcactttttcatatgcctgttggacatttgtatgtcttcttttgcaaaatgtctattcaaatcttttgcctattttttaaatagaattattagatgttttttcctgtagagttgtttgagctcctyatatattctggttattaatcccttgtcagatgggtagtttgcaaatattttctcccattctgtgggttgtctctttattttgttgattgtatcctttgctgtgcagacactttttttaacttgatgtgatcccatttgtccatttttgctttggttgcctatgcttttgggctattgctcaaaaaatcttttcccagaccaatgtctttgagaatttccccaatgttttctt

SEQ ID NO: 920355 - DNA, 604 bp, Homo sapiens
tcagattggctactgtggtatcaaagtgcttgtgttcaaggaactcttattttacttaataatggccccaaagcacaagagtagtgatgctagcaattcaaatatgggaatgagaagctgtaaagtgctttaagtgaaaaggtaaaggctgggcatggtggctcatgcctgtaatcccagcactttgggaggccgaggtgggcagatcacctgrggtcaggagttcgagactagcctggtcaacaaggcaaaacccagtctctactaaaaagacaaaaattagctgggcatggtggcaggtgcctgtaatcccagttacttgggaggatgaggcaggagaatcacttgaacccgggagatggatgttgcagtgagccaagctggcaccactgcactccagcctgggcgacagcaaaaatccgtcaaaaaaaaaaaaaaaaaaaaaaaagaaaagaaaagaaaaggtgaaagtaattgactcaataaggaaagagaaaaaatcagttgctgaggctgctaagatctacagtaagaacaaatctatccatgacattgtgaacgaggaaaaagaaatttcttctagttttgctgctgcacttcaaac

SEQ ID NO: 920356 - DNA, 604 bp, Homo sapiens
tcagattggctactgtggtatcaaagtgcttgtgttcaaggaactcttattttacttaataatggccccaaagcacaagagtagtgatgctagcaattcaaatatgggaatgagaagctgtaaagtgctttaagtgaaaaggtaaaggctgggcatggtggctcatgcctgtaatcccagcactttgggaggccgaggtgggcagatcacctgaggtcaggagttcgagactagcctggtcaacaaggcaaaacccagtctctactaaaaagacaaaaattagctgggcatggtggcaggtgcctgtaatcccagytacttgggaggatgaggcaggagaatcacttgaacccgggagatggatgttgcagtgagccaagctggcaccactgcactccagcctgggcgacagcaaaaatccgtcaaaaaaaaaaaaaaaaaaaaaaaagaaaagaaaagaaaaggtgaaagtaattgactcaataaggaaagagaaaaaatcagttgctgaggctgctaagatctacagtaagaacaaatctatccatgacattgtgaacgaggaaaaagaaatttcttctagttttgctgctgcacttcaaac

SEQ ID NO: 920357 - DNA, 600 bp, Homo sapiens
gtgggaaatcaggggtctcacacccttcagaactgagagcctcgaacagagatttacccatgtatttattgacagcaagccagtgataagcattgtttctatagattatagattaactaaaagtattccttatgggaaacaaagggttgggccraaataaagggatggctctggctagttatctgcagcaggagcaagcccttaagtcacagattactcatgctgttgttagtggtttaagaacacctttaagggtgttgcaccctgggtgggccaggtgttccttgccctcgttctggtaaacccagcgtgggcatcatggccatcacaaacatgtcacagtgctgcacagattttgtttacggccagttttggggccagtttatggccagatttgggggtctattcccaacgtgtatagacattcttatgtgataggagtagtccaagggataaagggagggaggtgaaagtacactgtggtggctctcacactattctgaggtggtataatattattcaatctttgattatgatacattaaagacggacgagaatcctagagcagtctctttctctatccctctctttctctctctc

SEQ ID NO: 920358 - DNA, 648 bp, Homo sapiens
ctttttctagtttcttgagctaagaacttagattataagtattttgtgctgttcattgccttccctgcactgcttagacacatcccacatttttcatattttttattttattccattcagttttatgtgctttttatttcttttgggattttctctttgactgatggattatttaaaagtacatttcttgatttccaagtacttgaagactttcctaytgtacttatgtaattttctaatttgatttcaatatagttagataacatactctgtatgatttttgcttatttaacactttaaaatttaaacagttcaccaaaatatttgttaatattctataggccaaatcttttacaatggtgtgccagtaaacccacctgacatttgctctgagggagacattatttttattatattggccaatatactacttaccctctggggaagacattacctcaaactttaaaagctgtttgctctgcaaacattcttgataaggtagtctatagcaaaacctgtaactgtcggctcacaaaatgtacagaaactgagagacccatagaaaattgtctcccaacacaaccatttgctaaaatcttattccaaattctattttgaatttagataaaattccaacaaaataaaatt

SEQ ID NO: 920359 - DNA, 648 bp, Homo sapiens
ctttttctagtttcttgagctaagaacttagattataagtattttgtgctgttcattgccttccctgcactgcttagacacatcccacatttttcatattttttattttattccattcagttttatgtgctttttatttcttttgggattttctctttgactgatggattatttaaaagtacatttcttgatttccaagtacttgaagactttcctactgtacttatgtaattttctaatttgatttcaatatagttagataacatactctgtatgatttttgcttatttaacactttaaaatttaaacagttcaccaaaatatttgttaatattctataggccaaatyttttacaatggtgtgccagtaaacccacctgacatttgctctgagggagacattatttttattatattggccaatatactacttaccctctggggaagacattacctcaaactttaaaagctgtttgctctgcaaacattcttgataaggtagtctatagcaaaacctgtaactgtcggctcacaaaatgtacagaaactgagagacccatagaaaattgtctcccaacacaaccatttgctaaaatcttattccaaattctattttgaatttagataaaattccaacaaaataaaatt

SEQ ID NO: 920360 - DNA, 556 bp, Homo sapiens
aaagaccccacccacaggcatggaaacccatggctccagtgggaagaggcattctgttttcatgcccaaaagttggcttttggcatgccacaccgtcctatcctgtacccatataaacctcaaaccccaggctccacagaagatgagaagaacagaagaacggcagaacggcacagcagagagaagagaaggarcatctgaatgccaagaggaattcagcttggggtggttggagaagagatctgccactggacagccaagcttcaggggaagatcatcttcccaccccatccccatccatcccactgagagccacctccaccactcagtaaaatccccgcattcaccatcctcaagtctgtgtgacctgattcttcctggacactggacaaggacctaggtaccgagggcactgagcttgttaacacttaagccgtctgtggacagcaaatctaaaagaatgcactgtaacacatgcccacttgggctttgggagttttaggtacccacctctagatgctagcatgagtctggagcccccaaggcgctcacccca

SEQ ID NO: 920361 - DNA, 763 bp, Homo sapiens
atgcagaagtcatcagagtctagaaatttaatgtcatgggatgagtagaatttacctgggcagtgggtgtgtgtaaagaagacgagagctcctgagggctactcccacatttatagataagaaagatgaagaaaaaccaggaaaggagtttgagaaggagtagccattgagataagagaagaataagggtagtattccagaggccaaggaagaaagggctaagagagtaaatgatcaactgtatcaaatgctcctgagtcaagcaaggtgaagactgagatttcaccactggatatgacaactcagagaaaactggtgatgctgtgaagagctgttctggggacggggggcgggggcgggcagtgataagacggctgattagatgtagccaggaagtgcctctcccactgagagaaaacaaaatatgcagtaaatcatcacactttgaacagatcttttgagaaaaaacactgaaagttgataagagaggtgatgcagacaccaagattgaagagggaggaagctgggaagcccacatggagtcactgagcaccasgaccagctcctggtactgaaaaggttctcaggaaggggtgaatgaaggaactctgtggcactacactcccgccacaaacttctgggatcccagctagaaaagatcccatgatccctatagacatttagatgggcaggaggagctgcctgtagagtagacagaggtaaagctagaacctgcatggcgcccagaaggttacactcatgt

SEQ ID NO: 920362 - DNA, 777 bp, Homo sapiens
cttctgtgtttgctgaagtgatttcactttgtacctacacttatacaacgtatctgattaggtcaggaatcaatctgtatttatcactagagaaaaccttgtcattgatgctccccatgatgaccagaaagccagcataatgcacatctttggattcagaatgctgctgacccttccaaaaagttgggccctacaaaattgcatgaagaacctaccttccataaagttagctcaaaacacaaattcctgtgtgtgtgtaaagttataaaatctaaccagagtattaactctctcaggaaggtcccataatggaatgccaaagccattaaggatatgggacagcactgtgtcattatcaaagtacctgcaaatggctagtttaactggagcctgtaagatgcagacagaaaaaagctaaagctctgatgggtcagcccaagcatcaggggcatctgatttgaaagatctcagtcctaccacagcgtacttagacaatctaattccaacgaaggctttctagacttcactgatggctgaggctaattctagtttttaaaatttctcaatcagaacastttagaaaacacaaatctcttcagtttgggttatgtaccttccttcacatattttcttttgactatatttgacaatagctctccaataagctaggtcggttcccaatttcaaatattccaccctgattgccaggcaccatactgtagcatccaacaatccacatcacccaaatggtggtgtatacccaaaaggggtatgtaa

SEQ ID NO: 920363 - DNA, 846 bp, Homo sapiens
ttagaaggaaaaaaagcaggggttgcggtcctagtctctgataaaacagactttacaccaacaaagattaaaagagataaagaaggccataacataatggtaaggggattcaacaagaagagctaattatcctaaatatagatgcacctaatacaggagcacccagattcataaagcaagtccttagggacctacaaagagacttagattcccacacaataaaaatgggagactttaacaccccactgtcaatattagacagatcaacgagacagaaggataacaaggatatccaggacttgaactcagctctgcaccaagtggacttaatagacacctatagaaatctccacccaaaatcaacagaacatacatctttcttagcaccacatcatacttattctaaaattgaccacataattggaagtaaagcactcctcagcaaatgtaaaagaacagaaatcacaacaaactgtctctcagaccacagtgcaatgaaattaaaactcaggattaagaaactcactcaaaaccacacaactacatggmaactgaaaaacctgatcctgaatgactactgggtaaataacaaaatgaaggcagaaataaagatgttctttgaaaccaatgagaacaaagacacaacataacagaatctctgggacacatttaaagcagtatatacagggaaatttatagcactaaatgcccacaggagaaagcaggaaagatctaaaatcgacaccctaacatcacaattacaagaacgagagaagcaagagcaaacaaattcaaaagctagcagaaggcaagaaataactaagatcagagtagaactgaaggaga

SEQ ID NO: 920364 - DNA, 625 bp, Homo sapiens
ttcaggtggtgcctgcatatcgtgcagaaccatctgtgaagcatgtcctagttttctctttctctgtcaactgatcttagggaacttcccataaggccactggtgcaggcttggggagagaaggcagggtggccggagtacagaccatgggcatttgagccacttcctcatgtaacttccttgtgccttcaggacctgttcaagcctgatcacatatataccacttctatttaatgatggaatgctgctgcacacaacccactttatgrctagatgggtcagaaagcacccagttcatgataggcagtacaggtggcatggtgccttgatgacccgtaggcaaacattcagtttccaccaaagcccagtaacaggtctagagctgtctctcaaaaggagaatagttatctgcagaagatggcatggccttgctctaaaatcctagaggactctgctctgatccacctatgggggcctgccaaaggctccagtaagcctccctatctgccactgacacctcaagcaccatgggatctgctggatgatatggcccaagtggcagagcagcttgcacagcagcctagatctgttgcggagccttctccgcctggattccactccaaac

SEQ ID NO: 920365 - DNA, 664 bp, Homo sapiens
catagcgccactgccgtccggcctaggtaagagatccagactctgtctccacaaaaaaaaaaaaaaaaaaaaaaaaaaaaaaaaaaaatcagaaaacgatatgcaacaactgtagaagaaaattgaaatataaaatacaaataagcctttatttacccttgaccaaagttttcatttctataatttactcaagtgttatacmtatgtgagaaaatgaagagctaggaaaaatagtttgaaaaacatgatgattggatacatggactcttgagagtctatgaagggaggtttatgtacctaacctcctgcacgactgctgttcaaattcttcagtgctccttatagaaggatcttaattgtgtctaattaacagtgatgaccattatacatggaaattttggggggggggggcgctgcattcatttgccatgctcaatagcatttattcaagccaaccacaaaaaccctgagacagaaaacaaaaatgaatcctacttgcattttgatgattatactctggatgagaagaaacgaggacattggaatctcccagtcctgctgtgggttggctcttaatgcttgcctctcagtttaagagtaaattttgtttttttgttagtttttttttctagagaaaacatctttcaatcagccatttctagga

SEQ ID NO: 920366 - DNA, 664 bp, Homo sapiens
catagcgccactgccgtccggcctaggtaagagatccagactctgtctccacaaaaaaaaaaaaaaaaaaaaaaaaaaaaaaaaaaaatcagaaaacgatatgcaacaactgtagaagaaaattgaaatataaaatacaaataagcctttatttacccttgaccaaagttttcatttctataatttactcaagtgttatacctatgtgagaaaatkaagagctaggaaaaatagtttgaaaaacatgatgattggatacatggactcttgagagtctatgaagggaggtttatgtacctaacctcctgcacgactgctgttcaaattcttcagtgctccttatagaaggatcttaattgtgtctaattaacagtgatgaccattatacatggaaattttggggggggggggcgctgcattcatttgccatgctcaatagcatttattcaagccaaccacaaaaaccctgagacagaaaacaaaaatgaatcctacttgcattttgatgattatactctggatgagaagaaacgaggacattggaatctcccagtcctgctgtgggttggctcttaatgcttgcctctcagtttaagagtaaattttgtttttttgttagtttttttttctagagaaaacatctttcaatcagccatttctagga

SEQ ID NO: 920367 - DNA, 656 bp, Homo sapiens
ttatcttactctccctcctcgggccttcctagccccagagacacaacaatattgaaattcggacagttaaaaatcctacagtggctcctatgtgttcaattgaaagaaaggactgcacatctctcattttaaatcaaaagctagaaatgattaactaagtgagaaagacatgtcaaaaaaactaggcctgctgcacccaacagccaagctgtgagtgcaaataaaatgttcttcaaggaaaataaaagggcttttttttttttttttttttttttttttaaatgagacagtatctcgctctgtcacgcaggctggastgcaatggtgcaatcttggctcactgcaacctctgcctcccaggttcaagcaattctcctgcctctgcctcctgagtagctgggattacaggcacgtgccagcacacctggctaattttctgttattttagtagagacagagtttcactgtgttagccaggatggtcttgaactcctgacctcctgatccacccgcctccacctcccaaagtgctaggattacaggcatgagccaccgcgcccagccagtgctactcttataagtgcatgaatgagaagaaaatgaaacagccttattggtgagatggagaaagttttcaagttatctgcataaaacac

SEQ ID NO: 920368 - DNA, 625 bp, Homo sapiens
tggctaattttctgttattttagtagagacagagtttcactgtgttagccaggatggtcttgaactcctgacctcctgatccacccgcctccacctcccaaagtgctaggattacaggcatgagccaccgcgcccagccagtgctactcttataagtgcatgaatgakaagaaaatgaaacagccttattggtgagatggagaaagttttcaagttatctgcataaaacaccaaaccagctacaacattcccttaaaccaaggcctacttcagagcaagctcctcattttcttcaactctatgaaggctgagagaggtaaggaagttgcagaagaaaactccgaagccagcagagactggttcataagatttaagaaaagaagccatctccataatataaaagttccaggtgaagcagcaaatgtcaatgtagaagctgcagcacgttctccagaacatctaagatcattgatgaagacggctacaataaacaacagattttccatgtagacaaaacagccttatgtaggaagaagatgccatctaggactttcataggaggaaagagggtaagtcaatgcttggcttaaaaacttcaaaggacagcctgactcctctattagga

SEQ ID NO: 920369 - DNA, 625 bp, Homo sapiens
tggctaattttctgttattttagtagagacagagtttcactgtgttagccaggatggtcttgaactcctgacctcctgatccacccgcctccacctcccaaagtgctaggattacaggcatgagccaccgcgcccagccagtgctactcttataagtgcatgaatgagaagaaaatgaaacagccttattggtgagatggagaaagttttcaagttatctgcataaaacaccaaaccagctacaacattcccttaaaccaaggcctacttcagagcaagctcctcattttcttcaactctatgaaggctgagagaggtaaggaagttgcagaagaaaactccgaagccagcagagactggttcataagatttaagaaaagaagccatctccataatataaaagttccaggtgaagcascaaatgtcaatgtagaagctgcagcacgttctccagaacatctaagatcattgatgaagacggctacaataaacaacagattttccatgtagacaaaacagccttatgtaggaagaagatgccatctaggactttcataggaggaaagagggtaagtcaatgcttggcttaaaaacttcaaaggacagcctgactcctctattagga

SEQ ID NO: 920370 - DNA, 615 bp, Homo sapiens
atattatggataattaattatgccaacattccccaaatatggaatatgtagagctatagtttagttaataccatttgttaaaaacaaaaataaatgattttgttgagatgctaaaaaacatgaaggatgattttgatatttttgtgtaagastgagagagaaagccagagtatgtattgtgctttttccatttattgagaggatttttttccctgatatgttttggaaagcattggtacaaatggatattggtaatgtgaacttaattttaactgaatatatttttgaaagttaaaaaagcaaaagaatgattgggaatcactacaattccaaatacggtgatatctttagacacttcagattaattttgcagtgtctttggtctgtagtcattctcttatgtattcatttaattacagattttaaccttttgacttaggacagcaaaacggatttcttttggaactaagtactatgatttgtgtctaaaaaaaaacttctaaaagttatatttttctatttgtttttgtgtttgtcacaagatatgtttctcatgggtatagaagtttccagtgtgacagaacactttcaaatctctcattcttgaatatatgg

SEQ ID NO: 920371 - DNA, 615 bp, Homo sapiens
atattatggataattaattatgccaacattccccaaatatggaatatgtagagctatagtttagttaataccatttgttaaaaacaaaaataaatgattttgttgagatgctaaaaaacatgaaggatgattttgatatttttgtgtaagacwgagagagaaagccagagtatgtattgtgctttttccatttattgagaggatttttttccctgatatgttttggaaagcattggtacaaatggatattggtaatgtgaacttaattttaactgaatatatttttgaaagttaaaaaagcaaaagaatgattgggaatcactacaattccaaatacggtgatatctttagacacttcagattaattttgcagtgtctttggtctgtagtcattctcttatgtattcatttaattacagattttaaccttttgacttaggacagcaaaacggatttcttttggaactaagtactatgatttgtgtctaaaaaaaaacttctaaaagttatatttttctatttgtttttgtgtttgtcacaagatatgtttctcatgggtatagaagtttccagtgtgacagaacactttcaaatctctcattcttgaatatatgg

SEQ ID NO: 920372 - DNA, 561 bp, Homo sapiens
cccgcctaggcctcccaaagtgctgggattacaggcgtgagccatcctcccggcccacttaaatatttttaaagtcaggaagaaaatgtgttgcttttgatagatagtaggaagatggattgacagatgataaatgatagatgaatagatgatagatgatagagatagatggatagttgataggtaggtagatagattaattgatagggatagagagattgattgaaatattgatagacagaagatagctgatagatgaatagatgatagataaatgttagatagatatagacagatatagatagatrgatggatagatagatagggatagacagattgatagattgattgatagattgatgggatagatagatagatagacaggaaactgcatagttaaaacaaatgagatgtccttcttctcagctatttagttgtcacaataaactccataatataggaggatcctcattttacagcgtaggaaaagccaggtagagggggtcaatgcctggggccgcaaagatccaggaagtcaatgtctgagcccctttgcattat

SEQ ID NO: 920373 - DNA, 576 bp, Homo sapiens
tggcagttgatgggaagtgaaacaaaatagctcaaaaattaggccgggcgcgatggctcacgcctgcagttccagcactttgagaggccgaggctggtggatcacctgatgtcaggagtttgagaccagcctgaccaacatggcaaaaccccgtctctactaaaaattcaaaaattagccaggcatgatggcacgtgcctgtaatcccagctacttgggaggctgaggcaggagaatcacttgaacccaggaggcagaggttgcagtgagccaagatcgtgctgctgcactccagcctggcgacagggcaagactccgtctcaaaaaaaaaaaaaaaaaaaaaaaaaaaagctcaaaatcgcaacatcaatgccaccatatgacccaarggacattttattggcagtggtatgaaatccctactgttgttgggtgcccaacagttacaggggagaccatatacatcataaagatcattttttggtaagctataatattctttccagattcattcattaatattccaaatatttataaagcatctattacttgccaggcattgtgttaagcactaga

SEQ ID NO: 920374 - DNA, 638 bp, Homo sapiens
agaacaagagctctgtcttgttgaacagtttgtccgctgccacaacagtgcctagcacaagtaagtactcaattaaaacttgaataaatgaatgggaaaatggcagaagtcctgacctcagaggatccacccgccttggcctcccaaagtgctgggattacaggtgtgagccaccacacctggcctcttaaaaaaaaaaaataggactttaggaggctgaggcgtgcggatcataaggttaggagttcgagaccagcctggccaatatggtgaaaccccgtctctactaaaaatacgaaaattagctgggcgtggtggtgggtgcctgtagtcccagctattcgggaggctgaggcaagagaattgcttgaatccaggaggcggaggttgcagtgagccgagatcgcaacactgcactccaacctgggcgacagagcaagattccatctcaaaaaaaaaaaaattaaamtagctgggcatggtggtgcgggcctgtggtcccagctactcaggaagctgaggtgggacctgagcttgagcccaggacctcaaggctgcagtgatctatgattgaggcaggagaatagggcctggaggcagagaacctaaggactttctagaactaaatcaaatggaaa

SEQ ID NO: 920375 - DNA, 686 bp, Homo sapiens
ggggcctcgggtaagcctctgagacttgctgtcttcaggagagattcaaaacattatcagctttagtggcttagaggcaaaactgatcatgcttcagaaaagcacagggaaaagtaaatgatattttgtcttgcatcttaggtaccaacaaggtcacaggagggtagaggcctaagtgggctcttagggcccttaattccaggacttgactcttggatagtatttccggaycttccctgggtcagaggggagcctattgccctgaagggtgagtctcaggctaggcagcattcaccacaagctgacttaaaagcccttagaacttaaaagaacattggtggtagtctggcagtactcctcatggcctgtggtaaaggtggctatggagtgagactcttctgtttttgtaaaggggagggaagagtgagaaggtttgcctcctgtggtttgagtgcagcccacccacagtacaatggaacaccaggtagatttctaaggtttttccctctagtccctgacttccagatggtgcctctggacccatctggggcctgggaggaacttattgccttgaaggaaagaacatagtctggctggcttttctacctgcagattgtagagtcccaggaccttgagcagacataggcagaagccagggagtgaatacagcaggacttaggtgagac

SEQ ID NO: 920376 - DNA, 595 bp, Homo sapiens
aggcaggagaaatacttgaacctgggaggtggaggttgcagtgagctgagagcacccactgcactccagcctgggcgacacagtgagactctgtctcaaaaacaaaaacctgaagaatattttccctccttgctggcattaaaaatgaaaatgaaaagcaatgtatggagaattccacttctaagtagaatggagtaatttgcaggaggctaacacttttaatgtgaacacctagaagaccagataaattataaaaatcatatttttaaaggtttcacagagctgtggatacaagaaggattagacaaactacagttttagagaaaagctcagaaaaaatattcagaggtgagatcaagatttgtagatgccttttccctgggaaatgtgatgatttttagaatgatatggagcccgaggacttggttttcttyataaagagaagcaatgggaaggaacaaataaacaaatagagcttttaccagtcatccagggctggagacttaagcagcctcaaacccatgaccaatttttcttgtaagaatatatcttaacttatagatgggcagtgtgagtgcttaaaagagccaacctg

SEQ ID NO: 920377 - DNA, 478 bp, Homo sapiens
acttctgtcatttcagccatctcagcctcagcccagttccaaacccttgctggagaggtgtcgcagtcatttggaggaaagtgggcactctggctttttgagtcttccgtatttttgtgctgattccttctcatctttgtgggcttatctaccttcartcttcgaggttgctgccatttggatggggtttttgtgttttttttcttttgcaaaaatgaactcaagatggagtaaagaattaaatataaaacctaaaactataaaaacctcagaagaaagcctaggcaataccattcaggacatagacatgagcaaggatttcatgacaaagatgctaaaagcaattgcaacgaaacaaaaactgacaaatgagatttaattaaactaaagagcttctgcacagcaaaagaaactgtgaacaaataacctacaaaaagggagaaaacttggaatctatgcacctgacaaaggtctaata

SEQ ID NO: 920378 - DNA, 578 bp, Homo sapiens
attagcccatcacaagagagtcagactgtcctttgaagctttgaaggtaggaccatgcttgaaaaccagtgatgtagattgaagattgattgagtatatttgaaattttgtttgtttttaagtaaaaaatgcctctacccgtgatgaggaagagacttggacatacatccttagatttacatttgtatttgggccctgtggtaaccccacttccttacccagatgtgtcaacatgtaacatagaagggctcttaagcttcctgctgctttggcttttcacaaataactttttttttttttttgagacagtgtctckctctgtcacccagattggagtgcagtggcctgatctcagctcactgcaagctctgcctcccaggttcacgccattctcctgcctcagcctcccgagtagctgggactacaggtgcccaccaccacgcccagctaattttttgtatttttagtagagacggggtttcaccgtgttagccaggatggtctcgatctcctgacctcgtgatctgcccacctcggcctcccgaagtgctgggattacaggcatgagccaccgtgcc

SEQ ID NO: 920379 - DNA, 604 bp, Homo sapiens
cctgagtctggtggggacttggagaacctttatgtctagctaagggattgtaaatacaatcagcactctgtgtctagctcaaggtttgtaaatacaccaatcagcactctgtgtctagctcaaggtttgtaaatgcagttatcagcactcagtacctagctaatctagtggggacttggagaacctttatgtctagctaatggattgtaaatacaccaatcagcactctgtgtttagctcaaggtttgtaaatacaccaatcagcaccctgtgtctagctcaaggtttgtaaatgcaccaatcaatgctctgtgtctggctaatctagtggggacttggagaacktttgtctagctcagggattgtaaacccaccaatcagcaccctgtcaaaacggaccaatcagctctctctaaaatggaccaatcagcaggatgtgggtggggccagagaagggaataaaagcaggctgcctgagctagcagcagcaagctgcttggttccattccagagtgtggaggccgtgttctttcgctctttgtaataaatcttggtgctgctcactgtttgggtccgcgctggctgtatgagctgtaacactcac

SEQ ID NO: 920380 - DNA, 604 bp, Homo sapiens
cctgagtctggtggggacttggagaacctttatgtctagctaagggattgtaaatacaatcagcactctgtgtctagctcaaggtttgtaaatacaccaatcagcactctgtgtctagctcaaggtttgtaaatgcagttatcagcactcagtacctagctaatctagtggggacttggagaacctttatgtctagctaatggattgtaaatacaccaatcagcactctgtgtttagctcaaggtttgtaaatacaccaatcagcaccctgtgtctagctcaaggtttgtaaatgcaccaatcaatgctctgtgtctggctaatctagtggggacttggagaacttttgtctagctcasggattgtaaacccaccaatcagcaccctgtcaaaacggaccaatcagctctctctaaaatggaccaatcagcaggatgtgggtggggccagagaagggaataaaagcaggctgcctgagctagcagcagcaagctgcttggttccattccagagtgtggaggccgtgttctttcgctctttgtaataaatcttggtgctgctcactgtttgggtccgcgctggctgtatgagctgtaacactcac

SEQ ID NO: 920381 - DNA, 604 bp, Homo sapiens
cctgagtctggtggggacttggagaacctttatgtctagctaagggattgtaaatacaatcagcactctgtgtctagctcaaggtttgtaaatacaccaatcagcactctgtgtctagctcaaggtttgtaaatgcagttatcagcactcagtacctagctaatctagtggggacttggagaacctttatgtctagctaatggattgtaaatacaccaatcagcactctgtgtttagctcaaggtttgtaaatacaccaatcagcaccctgtgtctagctcaaggtttgtaaatgcaccaatcaatgctctgtgtctggctaatctagtggggacttggagaacttttgtctagctcagggattgtaaacccaccaatcagcaccctgtcaaaacggaccaatcagctctctctaaaatggaccaatcagcaggatgtgggtggggccrgagaagggaataaaagcaggctgcctgagctagcagcagcaagctgcttggttccattccagagtgtggaggccgtgttctttcgctctttgtaataaatcttggtgctgctcactgtttgggtccgcgctggctgtatgagctgtaacactcac

SEQ ID NO: 920382 - DNA, 697 bp, Homo sapiens
ccaggcacggaggcaagagacagaggacatgagctgttccaatataataaaatataaaacaagaatagttataccagatatagatcttagatatgattatgtatgaatatcattaatcattagtttgtagcaattactttttattccaatattatgataatcctcgctctataatcatagcctaggaaaaaccaggccatacagagataggagctgaggggacatagtgaggtgtgaccagwagacaagagtgcaagccttctgttatgcccagacagggccaccagagggctccttggtctagtgatgacgccaaagtctgggaagacgcccgttaccaggcggatcgtagtccagcggtagcaaaaggtgtcaaggaacaacacgcgctacttagtagacggggaaggtggggggggtctccctttccccgggggagtttagagaagactctgctcctccacctcttgtggagggcctgacatcagtcaggctcacccgcagttatctggaggcctaaccgtctccctgtgatgctgtgcttcagtggtcacactcctagtctgccttcatgttccatcctgtacacttggctctgccttctagatagcagtagtaaattagtgaaaatactaatagtccctgatatgcagaaataatggcataagctgtctttctctctgtctcctctccctct

SEQ ID NO: 920383 - DNA, 779 bp, Homo sapiens
agtgctgtgtaatgtccctggggttacagctatttggaaactgaggatttaccttcaatctttaacaagcaatcgaatttagcatgggaattcaccctgatttggaagtgatgatttggaagtgataagaaggttccaatgtaagtgtttgtttgttttttctgagatggagtctcgctgtgtcccccaggctggagtgcagtggtgccatctctgctcactgcaagctccgcctcccgggttcatgccattctcccgcctcagcctcccaggtagctaggactacaggcgcccgccactacgcccagctaattttgtgtgtgtgtgttttttttttttttgagacggagtctcgctctgtcgtccaggacagactgcagtggtgctatctcggctcactgcaagctccrcctcccgggttcatgccattctcctgcctcagcctcctgagtaactgggactacaggcgaccaccaccacgcccgggtaattttttgtatttttagtagagacggggtttcaccgtgttagccaggatggtctcgatctcctgacctcgtgatctgcctgcctcggcctcccaaagtgctgggattacaggcgtgagccaccgcacctggccaagtgtttgtttgtttgtttgttttcctttggggtaactgcatatggaaaggtgacatttctgattgcatctctaccaaacaagttcaggtggctgccatccccacacttgaggggcccatgctgtgctgccagtgggccagtgagcttctacatgc

SEQ ID NO: 920384 - DNA, 779 bp, Homo sapiens
agtgctgtgtaatgtccctggggttacagctatttggaaactgaggatttaccttcaatctttaacaagcaatcgaatttagcatgggaattcaccctgatttggaagtgatgatttggaagtgataagaaggttccaatgtaagtgtttgtttgttttttctgagatggagtctcgctgtgtcccccaggctggagtgcagtggtgccatctctgctcactgcaagctccgcctcccgggttcatgccattctcccgcctcagcctcccaggtagctaggactacaggcgcccgccactacgcccagctaattttgtgtgtgtgtgttttttttttttttgagacggagtctcgctctgtcgtccaggacagactgcagtggtgctatctcggctcactgcaagctccgcctcccgggttcatgccattctcctgcctcagcctcctgagtaactgggactacaggcgmccaccaccacgcccgggtaattttttgtatttttagtagagacggggtttcaccgtgttagccaggatggtctcgatctcctgacctcgtgatctgcctgcctcggcctcccaaagtgctgggattacaggcgtgagccaccgcacctggccaagtgtttgtttgtttgtttgttttcctttggggtaactgcatatggaaaggtgacatttctgattgcatctctaccaaacaagttcaggtggctgccatccccacacttgaggggcccatgctgtgctgccagtgggccagtgagcttctacatgc

SEQ ID NO: 920385 - DNA, 695 bp, Homo sapiens
gatgatttggaagtgataagaaggttccaatgtaagtgtttgtttgttttttctgagatggagtctcgctgtgtcccccaggctggagtgcagtggtgccatctctgctcactgcaagctccgcctcccgggttcatgccattctcccgcctcagcctcccaggtagctaggactacaggcgcccgccactacgcccagctaattttgtgtgtgtgtgttttttttttttttgagacggagtctcgctctgtcgtccaggacagactgcagtggtgctatctcggctcactgcaagctccgcctcccgggttcatgccattctcctgcctcagcctcctgagtaactgggactacaggcgaccaccaccacgcccgggtaattttttgtatttttagtagagacggggtttyaccgtgttagccaggatggtctcgatctcctgacctcgtgatctgcctgcctcggcctcccaaagtgctgggattacaggcgtgagccaccgcacctggccaagtgtttgtttgtttgtttgttttcctttggggtaactgcatatggaaaggtgacatttctgattgcatctctaccaaacaagttcaggtggctgccatccccacacttgaggggcccatgctgtgctgccagtgggccagtgagcttctacatgcccacaaatgagaaaataagcagacc

SEQ ID NO: 920386 - DNA, 779 bp, Homo sapiens
agtgctgtgtaatgtccctggggttacagctatttggaaactgaggatttaccttcaatctttaacaagcaatcgaatttagcatgggaattcaccctgatttggaagtgatgatttggaagtgataagaaggttccaatgtaagtgtttgtttgttttttctgagatggagtctcgctgtgtcccccaggctggagtgcagtggtgccatctctgctcactgcaagctccgcctcccgggttcatgccattctcccgcctcagcctcccaggtagctaggactacaggcgcccgccactacgcccagctaattttgtgtgtgtgtgttttttttttttttgagacggagtctcgctctgtcgtccaggacagactgcagtggtgctatctcggctcactgcaagctccgcctcccgggttcatgccattctcctgcctcagcctcctgagtaactgggactacaggcgaccaccaccacgcccgggtaattttttgtatttttagtagagacggggtttcaccgtgttagccaggatggtctcgatctcctgacctcgtgatctgcctgcctcggcctcccaaagtgctgggattacaggcgtgagccacygcacctggccaagtgtttgtttgtttgtttgttttcctttggggtaactgcatatggaaaggtgacatttctgattgcatctctaccaaacaagttcaggtggctgccatccccacacttgaggggcccatgctgtgctgccagtgggccagtgagcttctacatgc

SEQ ID NO: 920387 - DNA, 680 bp, Homo sapiens
atttgtggctgacttggtacagaagacagcaaaggtattggggatcacatggaaactatatactgcttactgaccacagagttccagaaaagtggagcagatgtatcggactacgaaaaatagtttagggaaagtgtgtcaagaaataggattaaagtgggtataaactctccctatggtattgttcaagattagatgtaccccttctaaaagaataggatattccccttatgtaatattatatcatatatatatatatatatatatgccccctcccatactacagggactcccagacactccttgagagctaggtgaaattgagttacagcaacagctacaggctttagggaaaattacacaaaaaatttcagcctgggtaaatgagaggcrccccatcagcttattctccccagttcaccctttctccccaggtgatcaggtgtggatcaaggattggaacgtagtccccttgcggccatggtggaaaggaccccagaccatcgtcttgaccactcccacagccataaagatagagggaatcccagcctggatctaccacagccgcataaaacctgcagcacctgagacctgggaggtgaagccaagtgtggacaacccctgcaaagtgactttgaagatgacaagccatgcttcagtcacacccggaagctgactgg

SEQ ID NO: 920388 - DNA, 588 bp, Homo sapiens
gactgttagaaggaaaactaacaaacagaaaggacacccacaccaaaaccccatctgtacgtcaccatcatcaaagaccaaaggtagataaaaccacaaagatggggaaaaaacagagcagaaaaactggaaactctaaaaatcagaccgcctctcctcctccaaaggaatgcagatcctcaccagcaatggaacaaagctggacrgagaatgactttgacgagttgagagacgaaggcttcagacgatcaaactactctgagctaaaggaagtgcaaacccacggcaaagaagttaaaaaccttcaaaaaaaattacacaaatggctaactagaataaccaatgcagagaagtccttaaaggacctgatggagctgaaaaccatggcacgagaactacgtcatgaatgcacaagcctcagtagctgattccatcaactggaagaaagggtatcagtgatggaagatgaaatgaatgaaatgaagcaagaagagaagtttagagaaaaaagaataaaaagaaatgaacaaagcctccaagaaatatgggactatgtgaaaagagcaaatctacgtctgattggtgtac

SEQ ID NO: 920389 - DNA, 742 bp, Homo sapiens
tactgttttgaaaaaaaacaaaacaaaaaacagcatactaggggccagaacataggcaaattatttgaaaaatttagcctcaatttccttatgtgggaaagaaaaataattgtaacttctgagctattatatcacagagatagtttaagtattagacagtccatataaaacacttagcatagtacctaaataagcatcccattcatgtttattagaggaattaatacatgaatgagttaatgatataattatttcaattggaattcaaatactagttatctgaatcagtttgatcaattctactcaatacatttatattgtcacctctcaatctcagcttttatctataaaatgcactacttgattagatcaataattctcaaacactcatgcataaaagaagcattcagagacttcgttaaaaattaagattccttggtcccatagcaaaggagtcttaattagaaggtctatggtgaggcctgtgaatctatattttaaaaagcatcacagttgatttyggttcacttggacaaaacatatttttttaaaagtctgggctaagatctttctggactctaaagttttcttcattttcattaccacaaactatttcaaaaaaatccacctgctacaatttgaggttattgactcattaataaaagaatcccatgatcatatatatgtatgtacaggcacatgcacagatgcacacatacacacacacacacacacacacaca

SEQ ID NO: 920390 - DNA, 560 bp, Homo sapiens
tgtgacttgtcttaacagaaacagtgttcactctctgtgaaatatcttctcttggcttccagggcatgacagtcttggttcctgccttgctacactgaccattccttcttagttccctttacttgcttctcctcatgttttcaatgttttaatgcgggattcttcaaagttcagtccatggccttcctctcttctctgtctgtttgtttacaggataatcttacctagtctcatggcattatgcagatgtcttccaaatttaaatgtccaacttgaacctgccacatgaattccaaacgtgtcaatccaactctctaaccsacctctccatttgatgtctaataatcatctcagatttgacttgtcctaaaccaagttcttgacacttctcccaaaattttgctcctcccacagtcctccagatcctagcaaacagtaactctatttttttttttttttttttgagacggagtcttgctctgctgcccaggctggagtgcagtggcgcgatctcgactcactacaacttccgcctcccggattcaagcgattctcctgcc

SEQ ID NO: 920391 - DNA, 719 bp, Homo sapiens
gaaagcaccacctcctggctgaaggccaaccaactcaggacattacagccacctccactagagcaagtcttggtatctatgtctgggagaccagaagacggatcacatcataggactctgcagacattgcccagcascagcctgcagcctagtagccccactgggtgactagacccagaagagcaacagcaattactgcagtctggctctcaggaagccccatccctaggggaagtaggacaccaccacatcaagggatcaccccttggaacaaaaaaatctgaacaacagcccttgagtcacagatcttccctctgacatagtctacccaaatgaaaaggaatcagaaaagtaattctggtaatatgacaaaacaaggttctacaacaccccccaaagaccacattacctccccagcaatggatccaaaccaagaagacatctctgaattgccagataaagaattctgatggttgattatcaagctgttcaaggagataccagagaaaggtgaaaacctgcttaaagaaatttaaaaaataaataaataaaggatatggatgaaaaattctccagagaaatagatatcatagagagaaaacaatcacaaattctggaaatgaaagacatactcagaaaaatacaaaagtgcactgaaaagtgtcaataatagactagaacaagtggagaaagacttcagaactcatagacaaggcttt

SEQ ID NO: 920392 - DNA, 806 bp, Homo sapiens
tcccacagtccttgtacctgtgtctagaatgtggataaatgttcagcttcctcttcagtaccacttctctaacatggtccctactttctttaaaaatccctgtcttgaaaatcatgtctcagactccactactttctacccttcctttttgtagccatttacagacccctgaatcatccctaacatgtcttgaagaatattagcacctggccactatcactttttcataatatttctgacacattacttggcaatttcaatgtccagggtgataattcttctaacctctagcttttcagttcattagcctctgcttcccaatcttgttctccactctacttcagttaaacactctgtttytgttttgtttttttgagacggaatctcactctgtctcccaggctggaatgcagtgacatgatctcagctcactccaacctccacctcctgggttcaagcgattttcctgcctcagccaccctagtagctgggattacagacatgcgccaccacaccctgttaatttttgtatttttagtagagacgggatttcaccatgttggccagactggtatcaaactcctggcctcaagtgatccacctgcctcggcctcccaaagtgctgggattacaggcatgaaccacactgctcctggcctcagttaaacactcttgtggacctacccgaggccatgtttttagccataaccatagatcatgtttttattcattgcttcccttccccctatacctatcttagctgccgtaaactattataatcaatccctaccatataccctcaacct

SEQ ID NO: 920393 - DNA, 491 bp, Homo sapiens
cagtcatagatgtgcaagtttacctggcccagtggatctcagtgtggctgcagagtagaattgcctgctgggggtcagggagaggtttttaaaaataccagtgccaggccgggtgtggtggctcacgcctgtaatcccagcattttgggaggcccaggcaggtggatcaggaggtcgggagatccagatcatcctggttaacacggtgaaaccccatctctactaaaaatacaaaaaattagccgggcatggtggygggcgcctgtagtcccagctactcgggaggctgaggcaggagaatggcgtgaacccgggaagcggagcttgcagtgagccgagattgcaccactgcactccagcctgggcagcagagcgagactccgtctcaaaaaaaaaaaaaaaaaggcagtgccaagataccaaagattctgacccaatccatgtgaggtggggcctgagcattagaggtttttttttctttagttttggca

SEQ ID NO: 920394 - DNA, 733 bp, Homo sapiens
cttggggacccacgcttctcccacaaatctttgcaaccctcaggtcaggagatctcctagtgaactcactctaccagggcctccagtctgacatgcggggctgtgtagggtttcagcagagcagccactcagcatacctggggaacctggagccttagatacccaggcttccccacaaaagaagctataactccagccaagcaggaggctagaccgctatacataccccartgaaaggggtttcatccatggggctgagcagtgacaagtggcaggcccaccttccatggtctgtctcagggtaagacccactggcttgggaatccagccagccactggtagcaccctcacacccccctgacatggagctcccagcggcagggtgtgggctgccatctttactgtttcacagccttagctattggagcctctgggttctagggagtccaaggcagctagggactggagcagccaccctgcacagcccagcagctctacagagaagcagtcagactgcttattcacgtcaatcccaaatcctgtttcttttcaccaggtgaaatctctccactggggtctccagtcacctccaccactgttttctggcagacagcagtttcaaatgtccctgggatggcgctcccaaagggaagggtgggttgccattgatgctgtttagcagccttagccattcttgcaaatgccattcttttgtgctgggggtggtagcaga

SEQ ID NO: 920395 - DNA, 632 bp, Homo sapiens
gatcttctaaagctgaaaaactcttacaagaattatataacacaatcagaagtattaacagcagaatagactaagctgaggaaggaatctcagagcttgaagactcagagcttccccaacctttctaaagaagttgacatacaaattgaggaaattcagagaaccccagcaagaaactatacaaaattaacataccaaagacacatastcatcagattctttgacattaacatggaagaaaaaatattgaagaaagctagagaggaggggcaggtcacctataaagggaaccccatcaggctaacaacatacctttcagcagaaaccttacaagccagaagagattgcgggcctatattcagcatccttaaagaaaagaaattccaaccaagaattttatatccagccaaactaagcttccttagcaaaggagaaataaaatccttttcagataaacaaatgctaaagaaatttgttaccaccagaccttccttacaagaggtccttaaggaagtatttaacatggaaatgaaagactattaccagccaccacaaaaacacacttaagtacctagcccactgacactataaaccaactgcagcccaactctatataacagcaggctaacaac

SEQ ID NO: 920396 - DNA, 646 bp, Homo sapiens
ttaagaaatactgcaaatgtggttgcaaggatcgaaagtggatggctcatttgatatgaaaattgagctggggggagagagagagagagagagagagaaagagagaaagagggagagggactggggtcgcccgcaggtctgtggcgacttgggaggaatcatatgaccaaagaccaagaaacgacttgagcctagttcatatagttaagcgaaattcacctcaggtagaagggttttctctcgtcgatttcaccttcactctacggaaatctagcaaggcttatctcgtttctcaagcctaggacgctggtgtattttgaggcagtctcctagaagtcctgggagactctgggagctggtactgtgtgcaggcgcgacctatagctctgcctggtggatctgcaattcgatttcaggccttttkccccctcggcatttttttttccctgactacttgagaggaaaaaaacaaaaactgtataagaaactcgagaagagactgtgggatgcagaaccgcacacgtggtcctgcaaattggataggagactgggggaggcggggaagagaggagaagtgaaactagaaattatggtacagctttagaattcgagaatctccattgttctttcccagtctgtattgttt

SEQ ID NO: 920397 - DNA, 848 bp, Homo sapiens
gtttacattctagcctgggaagaatattgcatacattaaaatctatgaataattttaagtagtgatcaatgtcacaagagaaataaaatagatcaatgacacaaagcatgtctggatgctatgggaaaggtgatgtcagctcagagggtcaagaatgggctctccgaggaggtgacatttgacctgagatgtacatgatgagagagagacggccatgcaaagacctgagggaagaattttttcaggcagatgaagtagcactgtcaagacccagaaggggaatgactgtgggtttgagaaacacaaaagggaccaacctggtcagaggcaggtggggttgagggtagagggtagacgatgattgattagattattaggaactgtagggcatggtggataatttgggacttttttccttgatataatgggtaatttttaggtttttatgcagggttactgatattatctgatttagactttgagaagatcagtctgactgcaaccttgagaatggagaktaggcagtagggaaagctgtaagaggacacaaaagatgatgatggctcagactagtgttttgggtgccaagaagtggtcagattaagaatatatgatggaggcagcactgacaagaattgttaagccattgaatgtgagtatgaaggaaatagaagaattaaaaataaatctcaagatttagcataagttacagggaggatgtagagatgagaaagagaggggccatgcttgagtgagaaatcaaggaattctgtgttacgtatgtgaactctgtgacatagagttgcaatctattgacactaatgtgaactattaacctattgcagcag

SEQ ID NO: 920398 - DNA, 610 bp, Homo sapiens
gaggtccactgttagtctgatgggctttcctttgtaggtgacctgttctttctctctggctgcccttaacattttttcctttatttcgtccttggagaaactgatgattatgtgtcttggggctgatcttctcatggagtatcttactggggttttctggagttcctgaatttgaatgtgggcctatcttgctaggttggggaatgttctcctggatgatatcctgaagtatgttttccaacttggtcccattctcctcayatctttcaggtacccgaatcagtcataggtttggtgtttttacataatcccctagttctcggagattttgtttattccttttcattcctttttctctaatcctgtctgcctgtcttatttcagcaagatagtcttcaaactctgaagttatttcctctgcttggtctgtttggttattgatacttgtggttgcattgtgaagttcctgggttgcgcttttcagctccatcaggtgatttgtgttcctctctaaactggctattctggttaacagatcctgtaatgatttatcatggttctttgcttctttgaattgggttagaatgtgctcctttagctcagcgaagtt

SEQ ID NO: 920399 - DNA, 584 bp, Homo sapiens
tatttctgtgaagaatgtcattggtattttgatagggattgcattgaatctgtagcttgctttgggtagtatggacattttaacaacattgattttttccagtccatgaacatggaatatctttcaatgctttggtgcccttttcaatttctttcatcagtgttttataattttcataatagagatatttcacttctttggttaagttaattcctaggtacttaattttatttgtgactgttgtatatgggattactttctgatttctttttcagattattcgctgttggcatatagaaaygcaactgatttttgtatgttgattttgtatcctgcaactgtactgaatgtttgtaagttcaaataattttcttgtggagtctttaggtttttccaaatatatcacctacaaataaggacaatttggcttcttctttttcaatttggatgccctttatttctttctcttgtctgattctgtagctaggacttacagtactatgttgaataataaaggggcatccttgtcatgttccagattttacagaaaaggctttcagcttttccccattcagtatgatagt

SEQ ID NO: 920400 - DNA, 584 bp, Homo sapiens
tatttctgtgaagaatgtcattggtattttgatagggattgcattgaatctgtagcttgctttgggtagtatggacattttaacaacattgattttttccagtccatgaacatggaatatctttcaatgctttggtgcccttttcaatttctttcatcagtgttttataattttcataatagagatatttcacttctttggttaagttaattcctaggtacttaattttatttgtgactgttgtatatgggattactttctgatttctttttcagattattcgctgttggcatatagaaatgcaactgatttttgtatgttgattttgtatcctgcaactgtactgaatgtttgtaagttcaaataattttcttgtggagtctttaggtwtttccaaatatatcacctacaaataaggacaatttggcttcttctttttcaatttggatgccctttatttctttctcttgtctgattctgtagctaggacttacagtactatgttgaataataaaggggcatccttgtcatgttccagattttacagaaaaggctttcagcttttccccattcagtatgatagt

SEQ ID NO: 920401 - DNA, 598 bp, Homo sapiens
agttggggacaacttttgtgtctagctaaaggattgcaaatgcaccaatcagcactctgtgtctagctaaaggattgtaaatgcaccaatcagcactctataaaaatgcaccaatcagcactctgtaaaatggaccaatcagcactctgtaaaatggaccaatcagtgctctgtaaaatggaccaattagcaggacgtgtgcagggccaaataagggaataaaagctggccacccgagccagtggcagcaacccgctcaggtccccttccatgctgtggaaacattgttctttcrcttttaacaataaatcttgctgctgctcactctttgggtccgcactacctttatgagctgtaacactcatagcgagggtctgcagcttcactcctgaagtcagcaagaccacgaacccaccaggaggaacaaacaactccggacgtgccacctttaagagttgtaacactcaactgcgaaggtctgtggcttcactcctgaagtcagcgagaccatgaacccaccagaaggaagaatctccagacacatctgaacatctgaaggaacaaactcctgacacaccatctttaagaactgtaacac

SEQ ID NO: 920402 - DNA, 627 bp, Homo sapiens
attgggcaatgactgctctagctacttccttctggataggggcaaagatggggccctgcagtggtagtgtcctccagaggggaactctttaggccagtgaaagggccagggggttggtctaggggtcctcagtagaagttgatagttgagctcatttggggttccatttgtwagaccatctgtagcttgatggcctcgatcctagaagaaacaaatttgacaaggaggttaaaaatacagggcccaaaggcgagtaatagcaagatggcagccatgggacatagaaagggaagaaaccatgttgcccaactccagaggttggtataggaatttgaaaggcgttgtctgatttcagaagcctttttctgtaaatgccgggcagcatctcatactatccctgactggttagtgtaaagacaacactcttcccttaagaaggtgcagagtcctcctttctcagcagtgaggaggtctaggccttggcggttttggagagtcactgctgccaaagagtctatttgggattgtagagtaaggatagatatcattatttcttgcaaactgtctgagaaatcctttgagagtgtgtggtagtaggataatacatgttacgctgttaacttttag

SEQ ID NO: 920403 - DNA, 627 bp, Homo sapiens
attgggcaatgactgctctagctacttccttctggataggggcaaagatggggccctgcagtggtagtgtcctccagaggggaactctttaggccagtgaaagggccagggggttggtctaggggtcctcagtagaagttgatagttgagctcatttggggttccatttgtaagaccatctgtagcttgatggcctcgatcctagaagaaacaaatttgacaaggaggttaaaaatacagggcccaaaggygagtaatagcaagatggcagccatgggacatagaaagggaagaaaccatgttgcccaactccagaggttggtataggaatttgaaaggcgttgtctgatttcagaagcctttttctgtaaatgccgggcagcatctcatactatccctgactggttagtgtaaagacaacactcttcccttaagaaggtgcagagtcctcctttctcagcagtgaggaggtctaggccttggcggttttggagagtcactgctgccaaagagtctatttgggattgtagagtaaggatagatatcattatttcttgcaaactgtctgagaaatcctttgagagtgtgtggtagtaggataatacatgttacgctgttaacttttag

SEQ ID NO: 920404 - DNA, 583 bp, Homo sapiens
ggaaaggtggaactcggctgtacattcaccttctgagctcctcaaatgtcttccaacactgctccaacggtagacaaaatattattgaaaatgagatttccattgtggcagtggtttactgtcttccattttagaatgcaattttttttttaatrtatttttggatttttattaatttagattatgtaaactagcagggtgttttttaatgagattggtgatgccaaacctaaaagagttaaaatccccttgtaatcacatataactcagagaaaggtagggaatgccccacagagagacaggggatgcgtttgtttgatttttgctcttttccaaagtgtggcttccttttgaaatgtctttgccttcggtttgaaatcatcagtcatttgttaatcactggctaaaattccgtatttgtagcagagggaagagagagggagaaagagagaggtgaggtaggtgtcaggcatcagagtcttggggtaccagtctcaatttagctatttctgaagccacccactctaaggcttggtttcctcaaatcctctatttttttctgaccttggacatcttgctccag

SEQ ID NO: 920405 - DNA, 665 bp, Homo sapiens
acacagggagaagatggacatcaacatgagagaggcttcagaagaaaacaaccctgtggaccccttgatcttggacttttagccttcagactgtgagaaaataaattgctggtgtttaagccacccagagtggtacatttttatagcggccccaggaaacaaatacagctacatgaaactactttactcattatttatgattacttatataaagctctggtaattaggatagagggtatttggtgtagaaagggaagattcagtaatggaagggaaaaatggactcaccaaaataccactcccatttgaaaatgccattgaaaagatatgatgttgcctagcaaggcaggaaagcatggatgtttaataaagtggttcacattaatacaccatccatatggagaaacaacagaacttctatcttaaatcacaaattcaacttcagctttattaaagatctaattgtaaatgtcaaaagcataataaaatattttaaaaataatatggaagaatatccttactcctttgkataggaaagcatttctaatacatggcagctcaagaagcataaaccacaaaagaaaagaaggaaatgtttgagaatattaatgttaagaaattctgctccttaatgtagaccataaattaaatggaaataaaagtca

SEQ ID NO: 920406 - DNA, 588 bp, Homo sapiens
tacccaatgactatacctccattgtctccaggaagtaacttttgcttttgattttacagtctcataggcaaaagggacttgctttgtctcagatgagactttggagttgaacttttgggttaagactgtaatgagttaagactttaggccgggcacggtggctyatttctgtaatcccagcactttgggaggctgaggcaggtggatcacaaggtcaggagtttgagaccagcctggccaacatggtgaaactccatctctactaaaaacacaaaaattagccgggtgtagtggtgggtgcctgtaatcccagctactcaggagggtgaggcaggagaatcacttgaaactggaaggcggaggttgcagtgagccaagatcgcatcactgcactctagcctcagtaacaagagtgaaactccatctcaaaaaaaggactttaggggactttggaagggcatgattgtgttaggaaaagtgaagacatgagaggggaggggccaggcacagaatgatatggtttggctttgtgtccccacccaaatctcaccttgaagtgtaatccccataattcccacgtgtcaaggg

SEQ ID NO: 920407 - DNA, 588 bp, Homo sapiens
tacccaatgactatacctccattgtctccaggaagtaacttttgcttttgattttacagtctcataggcaaaagggacttgctttgtctcagatgagactttggagttgaacttttgggttaagactgtaatgagttaagactttaggccgggcacggtggctcatttctgtaatcccagcactttgggaggctgaggcaggtggatcacaaggtcaggagtttgagaccagcctggccaacatggtgaaactccatctctactaaaaayacaaaaattagccgggtgtagtggtgggtgcctgtaatcccagctactcaggagggtgaggcaggagaatcacttgaaactggaaggcggaggttgcagtgagccaagatcgcatcactgcactctagcctcagtaacaagagtgaaactccatctcaaaaaaaggactttaggggactttggaagggcatgattgtgttaggaaaagtgaagacatgagaggggaggggccaggcacagaatgatatggtttggctttgtgtccccacccaaatctcaccttgaagtgtaatccccataattcccacgtgtcaaggg

SEQ ID NO: 920408 - DNA, 588 bp, Homo sapiens
tacccaatgactatacctccattgtctccaggaagtaacttttgcttttgattttacagtctcataggcaaaagggacttgctttgtctcagatgagactttggagttgaacttttgggttaagactgtaatgagttaagactttaggccgggcacggtggctcatttctgtaatcccagcactttgggaggctgaggcaggtggatcacaaggtcaggagtttgagaccagcctggccaacatggtgaaactccatctctactaaaaacacaaaaattagccgggtgtagtggtgggtgcctgtaatcccagctactcaggagggtgaggcaggagaatcacttgaaactggaaggcggaggttgcagtgagccaagatcgcatcactgcactctagcctcagtaacaagagtgaaactccatctcaaaaaaaggactttagrggactttggaagggcatgattgtgttaggaaaagtgaagacatgagaggggaggggccaggcacagaatgatatggtttggctttgtgtccccacccaaatctcaccttgaagtgtaatccccataattcccacgtgtcaaggg

SEQ ID NO: 920409 - DNA, 762 bp, Homo sapiens
ttttgtttgagacagtctttctctgtcacctagtctttagtgcagtggcgctagcatggtttactgtagcctcaaattcctgggctaaaagcaatccttctgtctcagcctcccaagtaactgggatcacaggcacttggcactatgcacagcttatttgaaaaaatgtttttgtagaaacaggatctcactatgttgaccasgctggtctcgaactccgggcctcaagggatccttccgcttcagcctcccaaggcactagattacaggcatgagccacctaacacggccagcctatacttttatgaaatgtttgttttaattatagttttatatgtttatatttatatacattatcttagaatataaatatataacataaatataaattttatatattatattcatatttatatttatatacattattttcttttagattgccttgagttataatttacatacaatacaatttttgtatttttaatgtcatttgataaatttagataattgtagatagtcataaactcatcaccaatcaacagttctatgacactaaaaagtctcctaattcttctttacaatagttcatcccctcctctgacctctgaccctagacaatccctggtctctcagtcaatattgtatatagttttttttattttcagaattcatgaaaatagaatcatataacatagagtcctttgtttttcacttcatttacttgcgtttgcatatattaatttttctaattcattgcta

SEQ ID NO: 920410 - DNA, 642 bp, Homo sapiens
cttctagaatttttacagtttcatcttgagtggatttttgtataagctgagagatggggatccagttttattcttccacatgtggcttgccagttttcccagcaccatttattgaatagggtgtccttttcccagtttatgtttttgtatgctttgtcaaagatctgttggctgtaagggtatttggatttatttctgggttctccattctgttccactggtctaagtgcctatttttataccagtgttatactgttttggtaaccatagccttgtagcataatttttaagtctggtattgttaagtctccagatttgttctttttgcttagtagtgctttggctatgtgggctcttttttggtttcacataaactttggattgttttttctagttctgtgaaaaatgrtgatagtattttgaggggaattgcattgaatctgtagattgctttaggcagtatgttcattttcacaatattgattcttcccatctatgagcatggaatttgtttccatttgtttgtgtcatctatgaattatttcaacagtgttttgcagttttccttttaagatctttcacctctttggttaagtatatttctagggtttgttgttgttgttgttgtttttgtttttattt

SEQ ID NO: 920411 - DNA, 584 bp, Homo sapiens
gagtctggtggggaccgggtggagagtctttatgtctagctcagggactgtaaatacaccaatcagcaccctgtgtttagctcaaggtttgtgagtgcaccagtcgacactctgtatctagctgctctggtggggccktggagaacctttatgtctagctcagggattgtaaatacaccaatcggcactctgtatctagctcaaggtttgtaaacacaccaatcagcaccctgtgtttagctcaaggtttgtgagtgcaccaatcgacactctgtatctagctgctctggtggggccttggagaacctgtgtgtcgaaactctgtatctaactaatctgatggggacgtggagaacctttgtatctagctcagggattgtaaatgcaccaatcagcaccctgacaaaacaggccactgggctctaccaatcagcaggatgtgggtaggaccagataagagaataaaagcaggctgcccaagccagcattggcaacccgttcgggtccccttccacggtgtggaaggtttgttctttcgctctttgcaataaatcttgctactgcttactctttgggtccacgct

SEQ ID NO: 920412 - DNA, 584 bp, Homo sapiens
gagtctggtggggaccgggtggagagtctttatgtctagctcagggactgtaaatacaccaatcagcaccctgtgtttagctcaaggtttgtgagtgcaccagtcgacactctgtatctagctgctctggtggggccgtggagaacctttatgtctagctcagggattgtaaatacaccaatcggcactctgtatctagctcaaggtttgtaaacacaccaatcagcaccctgtgtttagctcaaggtttgtgagtgcaccaatcgacactctgtatctagctgctctggtggggccttggagaacctgtgtgtcgaaactctgtatctaactaatctgatggggacgtggagaacctttgtatctagctcagggattgtaaatgcaccaatcagcaccctgacaaaacaggccactsggctctaccaatcagcaggatgtgggtaggaccagataagagaataaaagcaggctgcccaagccagcattggcaacccgttcgggtccccttccacggtgtggaaggtttgttctttcgctctttgcaataaatcttgctactgcttactctttgggtccacgct

SEQ ID NO: 920413 - DNA, 562 bp, Homo sapiens
tatcctttaacaaatctctccctatcctccctttcctcctaactttcccagcctctagtatcctctgtctactttttacttctatgagatcatctatttttactttccacatataagtgagaaaatgcagtgtttacatttcttttccyggattatttcacttaacataatgtcctccagtaccatccatgttgctgaaaataacaggactttatttctttttatggctgaataatgttccattgtatatatatatatcacattttcgttattcagtcatctgttgtggaacacctaggttgaatccctatcttggctattgtgactagtgctgcaataaatatgggggtgcagatgtcttgatatgctgatttccttacttttggataaatgcccagtagtggagttgctggatcatgtggtagttttatttgtaattttttgaggaaactccataatgttctccagagtggctgtactagtctaaattcccaccaacagtgtataagaggtcccttttctctgcatcctcaccagcatttgttcttttatgtcttttata

SEQ ID NO: 920414 - DNA, 564 bp, Homo sapiens
gaaaaccatcactgcactctggcgctacgtttgctacttttatgtaataaaagtaatacaccatttctattattaataaatgagtaatttattattaataaatgaccgctattattactatgtttattacttcctgcataaacatggtggatgattctcagatragccatagctaggtttaccatgcaatttgttgacactggctcttaaaaataaataacaaagtgacccttactaacaaagtgacccttacaaactctacatttcttgtttccaaccatttccatatgctttacatatgttgtattaaacaaaaaacagttactattatataaaattcatgcctgataaacccatgtggaaagaggcaggaggaacaaggtggccctctttcaggatggcatgtggaaaatgatgagaccattaaggcattaagactaagggcctgtgagataggattctctataggcccccatgactgctaccctttgcgtcacctgtgtatgatagcatgaagaataatggaaagataatacttctgaaccctacaaggcaggccaaact

SEQ ID NO: 920415 - DNA, 564 bp, Homo sapiens
gaaaaccatcactgcactctggcgctacgtttgctacttttatgtaataaaagtaatacaccatttctattattaataaatgagtaatttattattaataaatgaccgctattattactatgtttattacttcctgcataaacatggtggatgattctcagataagccatagctaggtttaccatgyaatttgttgacactggctcttaaaaataaataacaaagtgacccttactaacaaagtgacccttacaaactctacatttcttgtttccaaccatttccatatgctttacatatgttgtattaaacaaaaaacagttactattatataaaattcatgcctgataaacccatgtggaaagaggcaggaggaacaaggtggccctctttcaggatggcatgtggaaaatgatgagaccattaaggcattaagactaagggcctgtgagataggattctctataggcccccatgactgctaccctttgcgtcacctgtgtatgatagcatgaagaataatggaaagataatacttctgaaccctacaaggcaggccaaact

SEQ ID NO: 920416 - DNA, 775 bp, Homo sapiens
aatttcaggactataacatcaaagctttattcgagattttaagcacttgtcaaaatggatgaaggccatttttttttgagaaagaattgtgtatatagtctgctttctactccagtaggaaatccattcttagatcctctatgatgaatttccaatctrtgagacctttgtgaagtcaaagtacaataaaattgaattactaagaacttgaggccgggcacagtggctcacacctataatctgagcactttgggaggccgaggtaggcagatcacttgagctcaggagttcaagaccagcctgggcaatatggcaaaacgccgtctctacaaaaaaatggaaaaaaaaaaattagcccggtatgtttggcacacgtctgtagtcccagttactcaggaagctaaagtgggaggatcaccagagcctgggaagtcaagactgcagtgagtggtaattgcatcactgcacaccagcctaggtgacagagtgagacctatctcaaaaataaaaacaaaaaacaaaacacttgaaattaaaacaataaaatataagctcaattattttatagtttcaacagacgtaattatcaagtttctacaaaactttgtgaacaattgttgtctgtgtccatacatatctcattaaatattagtaacaaatcttttgagaccagcactggcttaagacctacactttgagtagtgcaggtttactccatcatccttccatttgatattggtttaaggtaatagatctcaaatcctgaactattctt

SEQ ID NO: 920417 - DNA, 613 bp, Homo sapiens
agagtattcacgatctggccctagcctacctcacgaaccttacctctttccacatcatccattttctatgccccacagtccaatcgggccaaattattttcatgatctctggacacatcccacttcttccttcttcatatctttgttcaggctgctctttctgtctggaatgttcttggtgactgtgtctacctgaccaacaaagcttgtctttgaagactyagctcaagagttttctatgaagtctttccaagctgctactgtaagtaagaagaatcttttattttattttttttaagagacggcatctaattttgttgcccaagctggagtgcagtggtgtgagcatagttcactgcagcctcaaactcttaggctcaactgatcctcccacctcagcctcccaagtagctacaggcacgtgccaccaagcctggctagttttatttatttatttatttttatagatacagggtctcaatatgttgcccaggttggtctcaaactcctagtttcaggtgattctcccaccttggcctcccaatgtgctgggattacaggcatgagccaccgcacccaaccagaagaatcatttctcatttagtgctgccct

SEQ ID NO: 920418 - DNA, 613 bp, Homo sapiens
agagtattcacgatctggccctagcctacctcacgaaccttacctctttccacatcatccattttctatgccccacagtccaatcgggccaaattattttcatgatctctggacacatcccacttcttccttcttcatatctttgttcaggctgctctttctgtctggaatgttcttggtgactgtgtctacctgaccaacaaagcttgtctttgaagactcagctcaagagttttctatgaagtctttccaagctgctactgtaagtaagaagaatcttttattttattttttttaagagacggcatctaattttgttgcccaagctggagtgcagtggtgtgagcatagttcactgcagcctcaaactcttrggctcaactgatcctcccacctcagcctcccaagtagctacaggcacgtgccaccaagcctggctagttttatttatttatttatttttatagatacagggtctcaatatgttgcccaggttggtctcaaactcctagtttcaggtgattctcccaccttggcctcccaatgtgctgggattacaggcatgagccaccgcacccaaccagaagaatcatttctcatttagtgctgccct

SEQ ID NO: 920419 - DNA, 642 bp, Homo sapiens
gctgctactgtaagtaagaagaatcttttattttattttttttaagagacggcatctaattttgttgcccaagctggagtgcagtggtgtgagcatagttcactgcagcctcaaactcttaggctcaactgatcctcccacctcagcctcccaagtagctacaggcacgtgccaccaagcctggctagttttatttatttatttatttttatagatacagggtctcaatatgttgcccaggttggtctcaaactcctagtttcaggtgattctcccaccttggcctcccaatgtgctgggattacaggcatgagccacygcacccaaccagaagaatcatttctcatttagtgctgccctcacatctgtacaatcttctggtatgatatatacgtattgtgctttctggtttacatgtctgtcattccttttatgctgaagatgagagaagatgccacattcattcttgtgttgtatttatatttgtattgccagttggttccatgttaggctctgccaaaggaagtgctagaatgaggctgcaagactggaggagaaagaagagacatgcttctttttggcttctggtctacctcccgttcctgtgagcatcactctagcaatgcttctttgccttcctgc

SEQ ID NO: 920420 - DNA, 669 bp, Homo sapiens
gaacataaaatagtacaaccacttggatatcagtttggcagtctcctaaaagttaaacataaacttactgtactgcccaaccattctacttctaaatagttaacagaattaaaaatatatttacacaaaacatcatatataaatgttcayagccaatttatttgtaattgctaatcattggagataattaaaatgtctctcaacagatccatattgtgaaaagaaaataaatcttagggccccaaaatcactaagctaaagggaaaagtcaagatgggaactacataaggcaaacctgccttcccattctatttagtcatccttctgctcactgagataaatgcacatctgattgcctccgttggaaaggctaatcagaaactcaaagtatgcaaccatttgtctctcacctacctgtgacctggaagccccacccctgcttccagttgtcctgtctttccagaccgacccaatgttcatcttgcatatgttgattgatgtctcatgtttccctaaaatgtataaaaccaagctgtgctctgaccaccttggacacatgttgttaggacctcctgaagctaagtcacaggcacacatcatcaaccttggcaaaataaactttctaaattaactgagacctgtctcagatatttggggttcataatagat

SEQ ID NO: 920421 - DNA, 602 bp, Homo sapiens
gcattcagttttataagggaggcagagcataaaagtttggaaaatttgcagcctgacaatgtgatagaaaataaaatcccattttctgagaagaaattcaagccagctacagaaatttgcataagtaacagggagccaaatgtactccccaagacaatggggaaaatgtctctaggacatgtcagagatcttcatggtggcccctcccatcacaggcccagaggcctaggaggaaaaaatggtttcatgggccaagcccagggtactggtgctatgtgcagcctaggaacttggtgccctgcatcctagccactccagccatgaccaaaaggggccawggtacagctcgggccatggcttcagagggtgcaagccccaagccttggcagcttccatgtggtgttgagcctgcagatgtacagaagtcaagaattgaggtttgggaacctctgcctagatttcagaggatgtatggaaatgcatggatgtccaggcagaagtttgctgcagggctttcatggagaacgtctgctagggcagtgcggaagggaaatgtggggtcagagcccccacacagagtccctactggggaacccctagtg

SEQ ID NO: 920422 - DNA, 603 bp, Homo sapiens
ctctctttcaatgctcacttttttggtattctcccatctcatggctttaagtgtcatctatgtattaatgatccccaaatgtatatctccagctcagacctctctcccaaactccagaagcatatatccaatttcacacttaacatctagaattgaatgtctaataggtatctcaaactcaacatgtccaaaattgaactccccctcttatctacagccttccgcgtcataacagatgacccacagtcctccaaatgacccagcccaaaatgcttagaattatccttgactcttctttcccatacacttccacattcaattcataagcatgtcctattggttctacctccaaaatgtatcctactgcttctcattatcttcactgctgttcccctgatccaagccaccatcagctttcacctagattackgaaatagcttccttatagctctcccttcttccaccattgtcccccttcccccagcatcttttcaacgttgcagtcatagtgatcttttgaaaatgtaagccagattatatcattcctctgttcaaaaactttcatggctcctatttcactcagagtaaaacccaagatcttta

SEQ ID NO: 920423 - DNA, 608 bp, Homo sapiens
tccagaggaacacacacaccgacaggcaccagcatcccggcaggccaccaaccagcagaatgacgcagagtttgcctggggcagtcagagggagagcccaggccgctgagcgcctgactccaggggaaaaccttcccactccatcccctcttgacttcccccatctgctaagagctacctccgctcaataaaaccttgcactcattctccaagcccacgtgtgatctaattsttccagtacaccaaggcaagaactcaggatacagaaagccctctgtccttgtaacaaggtagagggtctaactgagctggttaacacaagccacctatagatggcaaacaaagagcgaaactaaaagagcaccctgtaacccacacccactgggagctatgatattcgcccctagacgctgccgtggtgccggatccccaaagcctgcccctctgtatgctccccgagaggtttgagcagcaaggcactgaagaagcgagccacatgccgtgtgagggggacaggggaagctttcccattccatattcatccactgatggacactgaggttgattccatattttggttagtgtgaatagtgctacaatgaacatgg

SEQ ID NO: 920424 - DNA, 795 bp, Homo sapiens
gtggattttatttctgccttttagtttttactttttctttctttggaggcagaaattgggcataagacaatatgaggggcggtctcttcctttattcctcccctttgagactcactcaatagtggaagttctcactttcattctcactacccatgtcttcttgcacgacagatcgatagtgattcatatagtacacttgtgctgaagcattttggtgaactaaggtagcgatgaagcttttttttttttttgagacggagtctcactttgtcgcccaggctagagtgcagtggcgcgatctcggctcactgccagctccgcctcctgggttcatgccattctcctgcctcagcctcccgagtaactgggactacaggcgcccgccaccacgcccggctcatttttttgtatttttagtagagacagggtttcaccgtgttagccaggatggtctccatctcctgacctcgtgatccaccygcctcggcctcccaaagtgctgggattacaggcgtgagccaccgcgcccggcctgcaatgaagctttttatcatttgaagaagtacaggtagcaaacaaaggagcagtaagcaggttcctattactattataactcttattataagacttttaaattctcttagcactgggaaccattttctaaacatggcctcaggatcaaatccatgccacacttgcctaggcacatgtgccagttttgtcatatctctatgtcttcaactacttgcctttgattatctatgtgtaggcagcaattagtaaggttaaatttct

SEQ ID NO: 920425 - DNA, 414 bp, Homo sapiens
acacctgcttgcagtgcagcctcgggtgccctgggggcctacatcacagctcctgcactggtggaccacacctgaccagcagagagctccagcagagcagcccccatggacatgcaccagcttgctcactccctctgcccactgtagcttcccctgggccatggccaccccccacatatctttgccagcacgtgtgtgcctgggcagattttgccttccctgacctgccagcatgcgtgtgagcgtgcatcctgccctgccgctgctgccaatgtgagtgccccccaacaccctaacccccaccaccatactgccattgcagtctgagccttggtgggcacagaacccatcagccctgcccctacagagccccgccmctgcatcaatgctgctgacaagtgaaactaggcactc

SEQ ID NO: 920426 - DNA, 790 bp, Homo sapiens
ttaaaattttacattctaatagatgacttctaggcaaaattttggtatgattaccattaaacaggaaaacataccatgatttactttctataacttgctaatcactgtttcttttatttcaatttttgatattgttgcacaagtttatgactctttggtctttatatycaaaatttattaagtatcaattctttctttcaacaaatatgtactgaacacatgctgtgttagaacaactgtcttgggtagtaaaaagaggggaacactacaaattataatggataatattaatgaagggtggcatgaaataatcaagctttctcaaatcctcttaatatgtgattttatcaagtgacattagaaaaactgacatcagttcttgtctaattatatgtgagctgcaactaaaagatgcttcctttacctaaattatagaactcactggatcgcccttcatctctctccctccatctgaaatgtatgaattaaatcaggactcagctaggactgaatcaaatgaaaaagaaattttcaattaattgcttcttcaatgttagacctatataagtgatgctaaatttacaccagcaaactcctatcagacagtttcaaggaggatttgactcatgcataacccaggaaacatttcaggaaacttttaagacaacagtgtggaacacaatcactcttacttctatttataaaaagcctatcaaaacagcaaaatcctgttgcaaattccaaagacatcactttgcagcaggtggaaaacagagaggttgttagactc

SEQ ID NO: 920427 - DNA, 599 bp, Homo sapiens
tgcaagggatgtccctaaatgaccaaactgtctttagacgaggctgattgggattccaaagaaagaagcactaaatgctaagatgaataacacaaagcatttattatgggaacttaacatacagagggctgtagagtccttgcaacagatagcaagaaaagagatgctctaaactggtatatcagtaatgagagtttatatggagtttatatcaggttatggagtttgtatcagkgatgtccaatcttttggcttccctgggccatattggaagaagaaacattgtcttgggccacacataaaataaactaacactaacgatagctgataagcttaaaaaaattgcaaaaaaaatcaatgttttaagaaagtttacaaatttgtgttgccacattcaaggcagtcctgggccgcctgtgggccatgggccatgagttggacaaacttggtttatatggaagtttaaggaatgtagctcagggctggggctagtttctatgtgtttagcaacatgattgatcttttaatgttttgggaaagaatctaaacacctttatcagtgcctaggaatgttccaggccctggcttgggttcaagcc

SEQ ID NO: 920428 - DNA, 599 bp, Homo sapiens
tgcaagggatgtccctaaatgaccaaactgtctttagacgaggctgattgggattccaaagaaagaagcactaaatgctaagatgaataacacaaagcatttattatgggaacttaacatacagagggctgtagagtccttgcaacagatagcaagaaaagagatgctctaaactggtatatcagtaatgagagtttatatggagtttatatcaggttatggagtttgtatcagggatgtccaatcttttggcttccctgggccatattggaagaagaaacattgtcttgggccacacataaaataaactaacactaacgatagctgataagcttaaaaaaattgcaaaaaaaatcaatgttttaagaaagtttacaaatttgtgttgccacattcaargcagtcctgggccgcctgtgggccatgggccatgagttggacaaacttggtttatatggaagtttaaggaatgtagctcagggctggggctagtttctatgtgtttagcaacatgattgatcttttaatgttttgggaaagaatctaaacacctttatcagtgcctaggaatgttccaggccctggcttgggttcaagcc

SEQ ID NO: 920429 - DNA, 557 bp, Homo sapiens
aaatgggaggtgggggaactgggggacaccacagtccccaaaagatatcttattatcagtcactattctttttctctctccccatcttttaacaatcactaatctactttagtttccatctctatggatttgccaattttgtacrtttctttaaaggaattatacaatatgtgaccttttgagtcttacctttttcacttagtataatattttcaagatttatatatatgaggctgggcacagtggctcattcctgtaattcccagcatttgggaggccaaggcaggaggaccacttgagcccaggagtttaagacctgactgggcaacatagggagaccttgtgtttacctaaaaacttcaaaagaagtagctgagtgtggtgccatgtacctgtatccctgccacttgggggcatgaggcagcaggattgcttgagccaggaaggttgaaactgaagtgagccatgatcgtgccactgcactccagccttggcaatggagcaagaccctgtctcaaaaaaataaaaaaaatcatatatgttataacaggtaccaa

SEQ ID NO: 920430 - DNA, 557 bp, Homo sapiens
aaatgggaggtgggggaactgggggacaccacagtccccaaaagatatcttattatcagtcactattctttttctctctccccatcttttaacaatcactaatctactttagtttccatctctatggatttgccaattttgtacatttctttaaaggaattatacaatatgtgaccttttgagtcttacctttttcacttagtataatattttcaagatttatatatatgaggctgggcacagtggctcatkcctgtaattcccagcatttgggaggccaaggcaggaggaccacttgagcccaggagtttaagacctgactgggcaacatagggagaccttgtgtttacctaaaaacttcaaaagaagtagctgagtgtggtgccatgtacctgtatccctgccacttgggggcatgaggcagcaggattgcttgagccaggaaggttgaaactgaagtgagccatgatcgtgccactgcactccagccttggcaatggagcaagaccctgtctcaaaaaaataaaaaaaatcatatatgttataacaggtaccaa

SEQ ID NO: 920431 - DNA, 615 bp, Homo sapiens
aggaggcattttatccagctcaggcacagcacagttgaaatgccacatggagaacagagagtattcaattttctatgagctactattccagtggtatccacagagctgctgggctctaaaggaggaggtgtaggaaaaaaaaaccaaatgcctacgatcttaaccacaaacacccacaaaaatagtaataacgttcaaagacctcaacaacccatttctgaccacatcaragaagactcacctggagacctttctctaatatctgtatctgccatgaggttagggatgctgtaaaaatagatagaaaataggggcactgttaattaaggagacagctcaaaagctttctaatactcatcacacctttgaactagtaataagatgattgtagcttccaataccatttccccatcatcagacccagaaacagcttttggctgagaggtgagagagtggaacaagggcctgtgtaatcccacatgccaggatgccattttgtaaaataaagccaagcctattgtgtagtcttcacatgattcccactgatttcaagacacccagggcagtatctgtaacatactctcacatagaaagtgaaaacgcatgtacatgtgg

SEQ ID NO: 920432 - DNA, 584 bp, Homo sapiens
gtattaaaaaaatcacaaacccatcccctccctgcgggtaattaatgtacttcagtctttctgcaagcacaaagtactcttccttcaggccacaacatttgataaagaaatgaatctttgagattattaattccctgggctgagattttgtttaataactgttctgtcagtgatagatctgaagaggtagggcatgtgtgatgtgtgtgtgtgtgtgtgtgtgtgtgtgtgtgtgtgaaaaagagatggagggaaggaggtaggagggactgaaacagagacagagatagagacatggatagtaggagggtagtggagtggcgaggggagggtactgtgattgtggcctagagacctggcaggctggcattacaaagcacctccttaccsagagctggagcaccggtgtgacaaatcactgcttccctccattcccacctccccatctccccacctcactgtctgtactagctgattaggtccaaatcagccaattacagaacatgatttgggaaatatttcctccttgacattctggagaacaatcccttgctgaggaaaaaaatacattataaaataaatgg

SEQ ID NO: 920433 - DNA, 753 bp, Homo sapiens
accactaaattacaggaagccaaagttatacaggtagccaatgtacaatttaaagtctcaataaatgtcgaatttggcattaagctttgaattttgaaggccattatttatactgtaatattcacatttttgaatgactgatcttgagccaatggattgtaagtttcttatatggaaaaactctatcacattcatctttgttaccctcaccacctagtaaaacaagcagcacattgtaggtggatttgaaacactgatagctggatttgctgagtatctgagacctaagacagatcccccttctcagagaccttgcagttaggtgggccaagtgattagttcaggccagtaaactatgctgggacatgattttttttatatatatatttttattatactttaagttctagggtacatgtatacaatgtgcaggtttgttacatatgtatatatgtgccatgttggtgtgctgcacccattaactcgtcatttacrttaggtatatctcctaatgctatccctccccgcttcccccaccccacaacaggccccagtgtgtgatgttccccttcctgtgaccaagtgttctcattgttcaattcccacttatgagtgagaacatgcagtgtttggttttttgtccttgcaatagtttgctgagaatgatggtttccagcttcatccatggctgggacatgatatctgtcacctgagagctgaaacagtgagaagtctacaaacaaccctctaaat

SEQ ID NO: 920434 - DNA, 525 bp, Homo sapiens
aaataaagggaaagagtacaaaagagaggaattttaaagctgggtgtccaggggagacagcacatgtcagcaggttccatgatgccccgagccgtaaaaccagcaagtttttattagtgattttcaaaaggggagggagtgtatgaatagggtgtgggtcacagagatcacgtgcttcacaaggtaataaaatatcacaaggcaaatggaggcagagcaagatcacaggaccacaggaccggggtgaaattaaaattgccaatcaagtttcagccatgmattgtcattgataacatcttatcaggagacagagtttgagagcagacaactgatctgaccaaaatttattaggcgggaatttcctcgtcctaataagcctgggagcactacgggacaccggggcttatttcatcccttatctacagtcgtaaaagacagatgtccccaaagcggccatttcagaggtttccccttagggatgcattctctttctcagggatgttccttgctgagaaaaagaattca

SEQ ID NO: 920435 - DNA, 634 bp, Homo sapiens
cagagtttgagagcagacaactgatctgaccaaaatttattaggcgggaatttcctcgtcctaataagcctgggagcactacgggacaccggggcttatttcatcccttatctacagtcgtaaaagacagatgtccccaaagcggccatttcagaggtttccccttagggatgcattctctttctcagggatgttccttgctgagaaaaagaattcagcgatatttcccctatttgcttttgaaagaagagaaatatggctctgctccacccggcccacaggcagccagactttaaggttatctcccttgttccctgaacattgctgttatcctattcttttttcaaggtgcccagatttcatattgtttaaacaatttgtcmagttaacacaatcatcacagggtcctaaggcgacattcatcctcagcttacgaagatgacggattaagagattaaagtaaagacaggcataggaaatcacaaggtattgatttgggaagtgataagtgtccatgaaatcttcacgatttatgttcagagattgcagtaaagacaggcataagaaattataaaagtatcgatttggggaactaataaatgtccatgaaatcttcacaatttatgttctgcca

SEQ ID NO: 920436 - DNA, 670 bp, Homo sapiens
aactaggctgtctgactcatggctcagtgtatcacaggggcttccagcacctggcaagaccccatggtcaccatctgtattagtcagtgttcttcagagaaacagaatcaatgggatatagagagatacatattagaagagatytattataagaattggctcatgcagttatggaggctaagaaacctcacaatctgctgtctgcaagctggaaaaccaggaaagttggtagtgtcattcagtcttagctgaatcccaaaaacctgagaaccaggaatgccgatttctgagggcaggaggagatgggtatcccagctcaagcagggaaagcaaattcacccttcctcctgactagtcaggtcctgtttagtcacgtcctcactagattggatgatgcccacctatattggtgaaaggaatcttctttactctgtctgctgattaaaatgttgatttcttccaatcaccctcacagatatatttagaaataatattttaccagctatctaggcatcccttagcccagtcaagttgaaacactgcacctaactatcacgcaatcatagtaagtatcatttagatgattgaatccctagaacagccctagaaggtagttcttaccacacagaagagggactgaggtttagcgatcttatagaactctcccttt

SEQ ID NO: 920437 - DNA, 670 bp, Homo sapiens
aactaggctgtctgactcatggctcagtgtatcacaggggcttccagcacctggcaagaccccatggtcaccatctgtattagtcagtgttcttcagagaaacagaatcaatgggatatagagagatacatattagaagagatctattataagaattggctcatgcagttatggaggctaagaaacctcacaatctgctgtctgcaagctggaaaaccaggaaagttggtagtgtcattcagtcttagctgaatcccaaaaacctgagaaccaggaatgccgatttctgagggcaggaggagatggrtatcccagctcaagcagggaaagcaaattcacccttcctcctgactagtcaggtcctgtttagtcacgtcctcactagattggatgatgcccacctatattggtgaaaggaatcttctttactctgtctgctgattaaaatgttgatttcttccaatcaccctcacagatatatttagaaataatattttaccagctatctaggcatcccttagcccagtcaagttgaaacactgcacctaactatcacgcaatcatagtaagtatcatttagatgattgaatccctagaacagccctagaaggtagttcttaccacacagaagagggactgaggtttagcgatcttatagaactctcccttt

SEQ ID NO: 920438 - DNA, 587 bp, Homo sapiens
aacttcaatggttatgtggggatcttcacatagcaagctttggtacttggttaatctagcatttgttagccaatgatgtcctttggtattcatcaaagttaccacagcatgggggacctttatattcaggttttgcccaagcrttagtttatctgcttcttgtgctaacagagtcattgctgtcggggcccttagacataggggccagcctctatgtctaaaacaactagaaaccccgtctagttgttttgagagataggccactggccttggccagggccccacagtctgggttaaaactccaactgccatttcttctctttctgacacatagagtgtaaagggttttgtcaggtcaggtagctccagggctggggccgacatgagtttttcttttaactcatgaaaagctcattgctgttggttgtaatagatgtagtttatctaatctacatttttattaactgtcacccaccaaaatattgactcaaatcctgcagctatttgatttcaagttttaaattgatctggtattccctgtgggactccaattgcgtctcaatagacttgagagtcgaaagacccat

SEQ ID NO: 920439 - DNA, 588 bp, Homo sapiens
gataattttttgacatgcctcaactttctgacttgttgcaaacatcctttttttttttttttttttttttacttagaatacttctgaactggtgagctgcactcacaatgaagtttcctctaaaagttatttttctactttcttctgtaggcaaaggagttgcctctacagattgaatgcatttgggccatccgctggttactgggttaaggrtttttgataggaaggctgcaggttgtgagtggcctcagtgctttcgggctatgtcattgtttacacttacaacaaggtggtattggagtgttttagggtcacagagaagaccttcaattatcaattataggttttaaatttaccctagcttttaaatgaatagggtacactttttttaactacttgtatatctttctctttctctctttctctttctccttgactccctctttgtctctctgtctcttcctctctctctttgtctcttttcctctctgtctcttttctctctctctccctgctggtctttccttgcctctgccagccacttatgctgctgttctctcaaccactgtggggcggggatggggtgtc

SEQ ID NO: 920440 - DNA, 606 bp, Homo sapiens
ctgtgtgcttacgggcatgggaaaggataaatgttacagggatggacaacctctttctggaaacaggaaaaggggcccacctcgggcccctcaacaaactgaggcatatctggcacagccagtgcccttacaaacatagaattctcccctgccacagcaggcagtgctgccatagacctttgcagcacaattcccatctccctgcttcctggagagccaccagaaaaggtctctacaggagttaggggacscttacactcaggaacagttggtctaccacttgggaggtctagtctaaatttgaaaggtgtcactgtacgtacaggaataattgattctgattatactggagagattcaactagttattagttcctcaactccgtggtctgcctccccaggagaaagaattgctcagttgttgctgttaccttacacaaaactaggaagcagcacagtgaaaagaacaggaggctttggtagtactaatccagcagggaaggctgtatattgggttaatcaattaggttttttgtctgacaaaaaacctatttgtacagtaactattcagggaaaggactttgaaggactagtagatacttgagct

SEQ ID NO: 920441 - DNA, 606 bp, Homo sapiens
ctgtgtgcttacgggcatgggaaaggataaatgttacagggatggacaacctctttctggaaacaggaaaaggggcccacctcgggcccctcaacaaactgaggcatatctggcacagccagtgcccttacaaacatagaattctcccctgccacagcaggcagtgctgccatagacctttgcagcacaattcccatctccctgcttcctggagagccaccagaaaaggtctctacaggagttaggggacgcttacactcaggaacagttggtctaycacttgggaggtctagtctaaatttgaaaggtgtcactgtacgtacaggaataattgattctgattatactggagagattcaactagttattagttcctcaactccgtggtctgcctccccaggagaaagaattgctcagttgttgctgttaccttacacaaaactaggaagcagcacagtgaaaagaacaggaggctttggtagtactaatccagcagggaaggctgtatattgggttaatcaattaggttttttgtctgacaaaaaacctatttgtacagtaactattcagggaaaggactttgaaggactagtagatacttgagct

SEQ ID NO: 920442 - DNA, 786 bp, Homo sapiens
tgtgtcagaaaagtattttaaagactcctaacctgaaagctcattggcatcagaatagtgttcttgtctgtatgaaaatgaactttcaggctgggcgtggtgactcatgcctgtaatcccagcactttggaaggccgaagcaggtggatcacctgaggtcagaagttcgagaccagactggccaatatggtgaaaccctgtctctactaaaaacacaaaaattagccaggcatggtggctggggcctgtaatcccagctacttgggaggctgaagcaggagaattgcttgaacctgggaggcagaggttgcagtgagctgagatcgcaccattgyactccagcctgggtgaaaagagtgaaactccatctaaaaaaaaaaaaaaaaaaaaaaaaaaaagaactttcagtagagctaaatcagatttgactgaggcaactagatggcctattgcactcagtttctcaatctatgaccatattgtctcaaaagataatacatggtaataaaaaaattagttcattcactcttgagatttcagtgttatttccctaactcagtgtattataggaaaagtcattaatgaggatccttattttaaaatttgatttgagagattttagcaagatgtatttgcaatctccttactaagctcattaattctaatagcttttctgcagactccatcagattttctccatagagaatcatgaggtctgggaataaagaggagatggtgctaccagaacctgggagctgggctcacccggcagaaactaaagtccat

SEQ ID NO: 920443 - DNA, 647 bp, Homo sapiens
tcctcctcaaatcactcaatacctatgcattgtggttaaccctcaaacaacatgcaggttaagagcactcaccccttgcacagttgaaaatcccagtaaaacttttcactcccccaaaacataactactaacagcctagtgtttactggaagccttactgttgggagagacacaaggtcagacataatcaggtccatgcccatttgtgtctttccccaaggtcaggcctttattgatgctatttcagtcataaaagccacaggctgcatggagttcccaaggaggcaattctccgtaccacttcgttccctcaggagtcagggctacaggctcacaggctcaagccactccacaggtcagttgatatcgcaaaccatacctagtaggatacttaatcaatatatacaygttatagattaaacattccacatcaaacagagcaacatttaacatcaagagaaaaggggataggaaagcggttaattaatcagtccaaggacagtgacatggacaaggagagggtcctgggcagatctaggtgcacagcagcgtcttgtaagggagagccctcgatttggacagagccctcagtgacagatgccagatgctgatcacgagtgatagcaggatggtatttcataaaacag

SEQ ID NO: 920444 - DNA, 620 bp, Homo sapiens
gcattctgcagtttgattatatattctacctatgcaacagaagtctgccatgtgaatatatataaatacgttttctttaaaaggattatacagtgatgtgtaagcattttttttatactttaagttctagggtacatgtgcacaacgtgcaggtttgttacatatgtacacatgtgccacgttagtgtgctgcacccattaacttgtaatttacattaggtatatctcctaatgctatccctcccccctccccccacccgacaggccctagtgtgtgatgttcctgactctgtgtccaagtgttctcattgttcaattcgcacctatgagtgagaacatgcggtgtttggttttctgtccttgtgatagtttgctcagaatgatggtttccagcttcatccayatccctacaaatgacatgaactcatccttttttatggctgcatagtattccatggtgtatatgtgccacattttctttatccagtctatcattgatggacatttgggttgtttccaattctttgctattgtgaatagtgctgcaataaacatacatgtgcatgtgtctttatagcagcatgatttataatcctttgggtgtatacctagtaatggga

SEQ ID NO: 920445 - DNA, 734 bp, Homo sapiens
ttataatcaagaacaagacaaatctgttcactctcttgccatttctatctaacattatactgtaagtcatactcagggaaattgggtcagaataatacataaaattggaaaggaagaagtgaaattatcttttttgtagatgacatgatcttctacatagaaaaytaaaagaagtccacaaaacattacgttagctgtttaaaaatctatccaggcctgcagcaactcgattcttgcctcctcagaagaaagaattatgctgaggggcataaggcagggtgagagaccaaggtgagttttagagcaggagtgaaagtctattaaaaagttttagaacaggaacgaaaagaagtaaagtacacttggaaaggggccaagcgagtaactcgagatcgagccaagtgtgctgtttggcccttgacttaaggtttttatacactgcatttcttctcccttgatttttccttaggcaggctgtctacatgcacagtggcttgccaaaactagggaggggccacatgcgcaggtgtctactgaagttgtgcacatgttcatttgaggcatttttcccttaccagtcaagtgtttccagaggaaggtcatataccagttaaactctgccattttgcttctcggtgtgcatgctcaagcctgcttgcccaattcctgaaatcttatcaggaagcagccatcaccagcttcaggtgttttctattattggaagcgtgcttccc

SEQ ID NO: 920446 - DNA, 631 bp, Homo sapiens
atgctttttccagctttccacattccagtgtacaacagaagtcccagtaagcctatgccattcttcagtccacaattttacaccatatacgctatcacccaatcttatcgactctattttaaaactatccatattatgaccacttcttaccaaatctaccatcaccactcttgyccaagccaacctcaactctcccttggattttgtgatggtcttctagttaatcttcctgcttctgccctcaaccctccatggcctttggaaaacccagggaagctaccacacagaagctaaaagatgttgataaaaaccaaatcagatcacaactttccctcctcatacccctccaatggctccctttctcacttagaatcaaaactaaaatccatataattggctacaaagccctgcatgatctgtgccacctccttctattattctttcaccaattgttcaagactctttggctgccacattcttcacacatggcaggcatgtgcctctcttaagatctttatactgttacctcttataaaattctctttccccagatctgtgtgctttgtattcttacctccatggtacaactatctttctgcaaaaccatcttctcagtgaagccttttcagac

SEQ ID NO: 920447 - DNA, 631 bp, Homo sapiens
atgctttttccagctttccacattccagtgtacaacagaagtcccagtaagcctatgccattcttcagtccacaattttacaccatatacgctatcacccaatcttatcgactctattttaaaactatccatattatgaccacttcttaccaaatctaccatcaccactcttgcccaagccarcctcaactctcccttggattttgtgatggtcttctagttaatcttcctgcttctgccctcaaccctccatggcctttggaaaacccagggaagctaccacacagaagctaaaagatgttgataaaaaccaaatcagatcacaactttccctcctcatacccctccaatggctccctttctcacttagaatcaaaactaaaatccatataattggctacaaagccctgcatgatctgtgccacctccttctattattctttcaccaattgttcaagactctttggctgccacattcttcacacatggcaggcatgtgcctctcttaagatctttatactgttacctcttataaaattctctttccccagatctgtgtgctttgtattcttacctccatggtacaactatctttctgcaaaaccatcttctcagtgaagccttttcagac

SEQ ID NO: 920448 - DNA, 598 bp, Homo sapiens
tgcaacctctgcctcctgggttcaagcaattcttctggctcagcctcccgagtaactggtactacaggtggccactacaatgcccagctaatttttgtatttttagtagcgacaggttttcaccaggctggtctctgactcctgacctcaagtgatccgcccacctcagcctcctaaagtgctgcgattacaggtgtgagtcactgcacgtggcagaaatstctctctttagatgtagtgttacttgttttatcaatctggatgctccagtgttgagtacatataatttagaattgttatattcttttgctggattgatccctttatcattacataattactccaagccacaaaggaagtcacagataccactgacatcatttacagcagaagaaatatcatacacaggctacactactgcatgcaccccaaatcaaagccaaaatacctgacccaaccaacaacacatatacatcatcaggaaagggttttcccacacacaagcaaattcaaaaaatttgaagaagtgactgccgcacagactgtacagatatcaaattaagggcatagggaacataaaaaagcaagaaaacatgac

SEQ ID NO: 920449 - DNA, 627 bp, Homo sapiens
agaccccactgtctgttttttccatctttgtgttcataagttcttatcatttggctctcacttataagtgagaacatgcagtatttggctttctgttcctgcattagtttgctgacgataatagcctccagctctatctgagcgttctttttttatggccgcatagtattccatggtgtatacataccacrttttctttatccaatctgtcattgatgggcatttaggttgattccatgtttttcctactgtgaacagtgctgcagtaaacattcacgtgcatgtttctttgtggtagaatgatttatattcctctgcatacatatccagaaataggattgctgggtcaaatggcattctacttttagctctttgaggaatcgtcatagtgctttccacaagggttgaactaaattagcagtatagccattttaatgtggtacatatatacccagggaataatactatgcagccatcaaaagaatgagatcatgtcctttgcagcaacctggatgaaggtagaggctattatcataagcaaactagcacaggaacagaaaaccaaataggaatgctagtgatttttgtgcattcattttgtatcctgcaattttgatgaagttgttt

SEQ ID NO: 920450 - DNA, 654 bp, Homo sapiens
atgtttaacccatgaaaacactaaagaaaaaggttaactgacttgctgaattaagtcttgtgatagtgttaggtcttgggaccccaattgactatgccaaaaggaaaaaaaattcttgggaccccaattgactatgccaaaaggaaaaaaaattaagttgaaagctgaatcatgcaagaaactacctttccttctgttcctaagcagttagctacagataaaagcttaactatctccacagatagctactctaggttcaccttatcttatgtaaagcsccgatttactgagcgtgagaagaatacatatttgactattcccctatctgctccttttctctggcaacatgtggattcagtcatgtgaccatacattcccatttttccctccagcctacttttcccctttaaatactaaagacctcaaaatcacctttggagaaaggcacagactgcagattgtttctgtgattctgtgttcctttcttccaggcatgtccttaatcttggcaaaataaatctctaaactgattcagacatggctcagatactttttggtttctaggtcatccatctaataaataacagagcaaagatataaacccaggaatttcagattccagagcccacactccatgtgctgtcctgctgtaga

SEQ ID NO: 920451 - DNA, 595 bp, Homo sapiens
gcacccgtagtcccagctacctgggagggtgaggtgggaggatcacctgagccccagggagggttaaggttgcagtgagccatgattgcaccactgcactccagcctgggcaacagagagagaccctgtctcaaaaacaaaacaaaacaaaaacaaacaagcaaacagaaaacaccaatctctctctctttctggctattaacatgattttttttcttttcattgctgcacacttccagaaaaagaggcttgtatttccaattgtgattttgtcatctcttctcttcttcatctatttcagtctgacttcctgtcctgctattccactccactgctcctgttaaggtttatcactaaatctaacggttaaaaaaaaagttcactgtaktctacctcggcagtatttaatttatttccatgactcccttctttcctatctttctggctgctcctttttaacattccttgaattttggtgttccatggttttattcttgagcctcaacttttttttcagtctatgctccctaagaaagcttatctgtttgcacaattttgacagcctctgccatgcatgcagatagtttcccaattt

SEQ ID NO: 920452 - DNA, 623 bp, Homo sapiens
taagggactcctgaagccagaataaggcccccaggctgagcctcaggtgctggccatgagcatcctttctgtagaggtaagtgccaaggggatatgggtggggcaccaacagggtagactacatcctatgtattcatccgttctcacactgctataaagatactacctgaggctgggcatggtggctcatgcctttgggaggcagaggcaggcggatcacctgagggcaggagttcgagaccagcctggccaacgtggtgaaaccttgtctctactaaaaatacaaaaattcgctgggagtggccaggcacggtggctcacgcctgtaatcccaccactttgggaggccgaggcgggtggatcacctgaggtcaggcatttgagaccagcctggccaacatggtaaaaccccgtctctactaaaaacacaaaaaattagctgggcttgctggcggkcgcctgtaatcccagctactctggagagtgaggcaggagaatcacttgaacctgggaggcggaagtcacagtgagccgagatcgcaccattgcattccagcctgggtgacaggagagaaactccgtctgaaaacaaaaacaaaaattagctgggagtagtggtgggc

SEQ ID NO: 920453 - DNA, 627 bp, Homo sapiens
atgcccggcgagcctggtttttttctgtacagattcctagcactgtcgaaaacctatagctgcatttgatcaagagtgttcagtaattcctggagtccttgccgagtcatgtctgttaacccatcgtgcctggggagtggcagtccttccaggccaggttgcccaggaaagccctgcacytcaggttctggccacaaagagttctgaggctcctcccttacctgtagactgagagggtggggctagggccagggaggctctcaggagatggatgcacgtgctttgccacctctcatggggctgctgcatagaaggccgtggcagggttattcactttttaccttcctatccaggtgcactgccaaaatgctctgctttttcagactgtggctgcttctcccccacccccaagagccaaataacttaggggcagcttttaatttttttttgtaaaaagtactgttgacttgggatttttaaggtaaaaattttggtacaggagctattctgtgtgccatgatggacagaactggaattgctattttgtgatttgggacagttgaggattccttcctagaacattattatgtagattgtttgtggcatggccttgatccccatcctcac

SEQ ID NO: 920454 - DNA, 756 bp, Homo sapiens
tacagctgaaggtgccaaccttcattcgactcttgttcaacccatatctcttggtagtcccctgataatcatgttcctttcacatcagtttcttcaggcaacagagtatttccctacatgggtatcactcctactttattggtaaagctataggagaggaaggaaaagagaaagaaaaacacagagcaaaatatcaacaacccacatttattgaatcaacatttctgtagagggaatcataaataaattataatgctttctccacataattctgatgatcagttataatcatgaagctttctttgggagccttctaaaatgtatccattcaaggcctccaacacttcctgaaaattcagattctggggtacatctgataactacaytgaggaattgagagatttcatgagaaaaatactgcaaaggagtacaagaactctcagtgtttagtaaacatcatcaaggcttctagaccagctcagttcaacagaaatataatgtgagccaccaaagcgagtaacctataatttaaaaatttctagtagccactttaaaaaaaagtaacaagtaacaggtgaaataaattttagtaatatatttaacccaatatatccagagtattatgttttcatattaaagtataatttttacataatctttttcatatttaatctttgaaatttcatgtgtattttacacttactgctgatctcaattcagactagatcttaagtattcaggagcaacatgtggctt

SEQ ID NO: 920455 - DNA, 753 bp, Homo sapiens
accactagaatccagcaacctggacccctttccttgtggtcaagaaagatgggaaaacaggtgcaggactgctacatcagtgagcgtaactaatccaataagcagaggtccatgggtggttacacatcctggaaaggaactcacgcccgagcacaaaggcaatgttgggcacgctggtaaaggaccactagaatccagcagcccggacccctttctctgtggtcaagaaaggcgggaaaacaggtgcaggactgctacattggtgagcgtaactaatcagataagcagaggtccatgggtggttatgcaccctggaaaggaataagcattaggaccatagaggacgctctaggactaatgctcatcagaaaatgactagggktgctggcatccctatgttcttttttcagatgggaaacgttccccccaaggcaaaaacacccctaagatgtattctggagaatttggcctagtcagagtgtatgtacctttttccctctcagacttgaagcgaattaaaatagacctaggtaaattctcagataaccctgatggctatattgatattttacaagggttaggaaaatcctttgatctgacatggagagatataatgttactactagatcagacactaaccccaaatgagagaagtgccgccataactgcagcccgagagtttgacgatctctggtatctcggtcaggtcaatgataggatgacgacagaggaaagagaacaattccccacagg

SEQ ID NO: 920456 - DNA, 597 bp, Homo sapiens
ccactagaatccagcaacctggacccctttccttgtggtcaagaaagatgggaaaacaggtgcaggactgctacatcagtgagcgtaactaatccaataagcagaggtccatgggtggttacacatcctggaaaggaactcacgcccgagcacaaaggcaatgttgggcacgctggtaaaggaccactagaatccagcagcccggacccctttctctgtggtcaagaaaggcgggaaaacaggtgcaggactgctacattggtgagcgtaactaatcagataagcagaggtccatgggtggttatgcaccctggaaaggaataagcattaggaccatagaggacgctctaggactaatgctcatcagaaaatgactagggttgctggcatccctatgttcttttttcagatggkaaacgttccccccaaggcaaaaacacccctaagatgtattctggagaatttggcctagtcagagtgtatgtacctttttccctctcagacttgaagcgaattaaaatagacctaggtaaattctcagataaccctgatggctatattgatattttacaagggttaggaaaatcctttgatctg

SEQ ID NO: 920457 - DNA, 632 bp, Homo sapiens
gaaacaacttcaaaagtccgccttaggcctggagcaaaacttagaaaccctattgaacttggcaacctcagtttttttataatagagatcaagaggagcaggcagaacaggacaacacaggattaaaaaaaaaaaaaaggccaccactttagtcagggccttcaggcaagcagactttggaggctctggaacagggaaagcctgggcaaattgaatgcctgatagggcttgcttccagtgcagtacacaaggacactttaaaaagatcgtccaaatagcaataagctgcccccttgtccgtacccctatgtcaagggaatcactggaaggcccactgccccaggggatgaargtcctctgagtcagaagccactaaccagatgatccagcagcaggattgagggtgcccggcgcaagcaccagcctatgccatcaccctcacagagccacaggtatgcttgaccattgagggccaggttaactgtctcctggacactggtgcagccttctcagtcttactctcctgtcctggataactgtcctccagatctgtcagtatccgaggggtcctaggacaggcagtcactagatacttctcccagccactaagttgtgactggggaagtttactc

SEQ ID NO: 920458 - DNA, 619 bp, Homo sapiens
ttgatttttgtgtttttagtagagatggggtttctctatgttggtcaggtggtctcgaagtcctgacctcaggtgatttgccctcctcgacctcccaaagtgctgggattacaggcatgagccaccttgcctggccacgcatcagcgttttaaacaacgcttttttatgctcaaggattctgctggtcaagaattcaaacaaggtgtattagtctgttttcacactgctataaaaaatatccgagactgggtaatctatgaaggaaagaagtttaatcaactcacagtcctgtatggctgggaaggcctcagtaaacttacaatcacggcagaaggtgaaggaaaagcaagtactttcttcacaaggcagcaagaaaaggagagagtggaggaacagcctaacacttataaaaccatcagatctcgtgagaactcactcactatcatgagaacagcatgggrgaaaccacccccatgatccaatcacctcccaccaggtccctcgtttaacatgtggggattacaattagagatgcgatttgagtggggacacagagccaaaccatatcacaggacaaggcaagaatttcttctctctgctccacaatgtctgagggct

SEQ ID NO: 920459 - DNA, 580 bp, Homo sapiens
acgctttgagtgcaaggaggaaaaataacagaaaaacttgcccatccttcagccatataacagaacacttttctggggcttaaatgatgctccatttgttgatgtggaagtatgctaactgagcagatgtagaaaagatgtagaatagaatttcatattgtttaaatatagctagataaacagaataataggatttatcagataggagaaagagaaagggagggagaatgagatggggaaaggcgagggagagggaaggagagggaggaaggagaggagaatgaaaaagttgcataaaaaktcttgacaatggttatctctgggggatggaattgcagctcttattttttttttccttataagtatttgaattttcccattttctactatagccatgcatttttttaataatgtgaaaaaagttattttcctctttaaatgaactctaaatatgcgttcatttatctgcctaaaatgcattcatttatagcactccctataaacaaggtggtagctccagttgggtggtccttgggtgccccatagggagttagtcattggccctttggaaagggatgtg

SEQ ID NO: 920460 - DNA, 606 bp, Homo sapiens
ctgtgtgaccttgccgcatcacttcatcctctgaatctgtcagcctccacatcaaaaagcagacgtaatcgtttcctccttacagtatttctgtgaggaataaattaaataatatgtctgaaatagcttagacaaaggaaagctctaaacagcaagagggcagtattaaaaactaggaacatcctttagggattgccatcaggagacgacaagatgaaatcrctcccttctaagaaccttgggctctctcagcgtgaaagcagttaaatagacccagcatgttgttgaggcttggagaaagcaaggataagcagcttcccagtaaatgtaaaatttccatatgacccattaattccagtcctaggtctatatgcaaaagaattgaaaacaggtgttcaaacagaagttgtatcacagtgtaacagcactattcacaatagccaaaaggaggaaacaacacgaatgtctatcacctgatgaatgaataaacaaaatgtgggatggatagacagatagatgatagatagatagatagatagacagatagagagatagataatgatggaatattattcagccataaaaaggaatgaagtatggatacat

SEQ ID NO: 920461 - DNA, 557 bp, Homo sapiens
gcttacacttactctggatatgggtttgcctatcctggatgcaatgcttctgccaagactacaccaatggactcatggaatgtctcatccactgttatggtattccacacagcattgcctctgaccaaggcactcactttacagctaaagaagtgtagcagtggacycatgcttatggaattcactggtcttgccatgttccccatcatcctgaagcagctggattgatagaacggtgaaatggccttttgaagtcacaattacaaggccaactaggtgacaatactttgcagggctggggcaaagttctccagaaggctgtgtatgctctgaatcagcatctaatatatggtactgtttctcccatagctacgattcatgggtccaggaatcaaggggtggaagtgtaagtggcaccacttaccctcacccggagtgatccactagcaaaattttagtttcctgttcctgcgacattatgttccactagcctagaggccatagttccaaagggagaaatgctgccaccaggagacacaacaatgattccattaaac

SEQ ID NO: 920462 - DNA, 864 bp, Homo sapiens
aatggccttttgaagtcacaattacaaggccaactaggtgacaatactttgcagggctggggcaaagttctccagaaggctgtgtatgctctgaatcagcatctaatatatggtactgtttctcccatagctasgattcatgggtccaggaatcaaggggtggaagtgtaagtggcaccacttaccctcacccggagtgatccactagcaaaattttagtttcctgttcctgcgacattatgttccactagcctagaggccatagttccaaagggagaaatgctgccaccaggagacacaacaatgattccattaaactggaagttaagattgccacctggacactttggggtcctcctaccttgaagccaacagggtaacaagaaagttatagggttggctggggtggctgacctggactatcaagatgaaatcagtctagtactccacaacagaggtaagtaagaatatgaatggaatacaggagatccattagggcatctcttactattaccatgtcctgtgattaaggtcaatgagaaactacaacagcccaattgaggcaggactacaaatgacccagacccttcaggaacaaaggtttgggtcactccatcaggaaaaaacccacgacctgcagaggtgcttgctgaaggcaaagggaatacagaatgggtagtagaagaaggtagtcatcaataccagctacgaacacgagaccacctgtagaaaagaggactgtaattgttatgagtatttcctccttcttttgttaaacacgtttgtgcatgtatacacttgaactaagaaaatatttttattatttcctttcttttatcatgtgacataagatttattgacttc

SEQ ID NO: 920463 - DNA, 699 bp, Homo sapiens
agatccattagggcatctcttactattaccatgtcctgtgattaaggtcaatgagaaactacaacagcccaattgaggcaggactacaaatgacccagacccttcaggaacaaaggtttgggtcactccatcaggaaaaaacccacgacctgcagaggtgcttgctgaaggcaaagggaatacagaatgggtagtagaagaaggtagtcatcaataccagctacgaacacgagaccacctgtagaaaagaggactgtaattgtyatgagtatttcctccttcttttgttaaacacgtttgtgcatgtatacacttgaactaagaaaatatttttattatttcctttcttttatcatgtgacataagatttattgacttcacatcagcatttaagtattgctaactttatgtaatagtatgtgggttggggattcatgcgtttccagttgtacaaaggatagttgtattacattagatgtaattatgacctcactgtctttattgaaaattatgtatgatctcagggaatgtataatggttcaagttgacaaagggtggacttgtgatggttaatactgagtgtcaacttgattggattgaaggatgcaaagtattgatccttggtgtttctgggagggtgtaggcaaaagagattaatatctgagtctggctgggaaatgcagacccacccttaatctg

SEQ ID NO: 920464 - DNA, 782 bp, Homo sapiens
taaagagctaatatcaatgcttcctacactctttcagaaaaattgaagggtaggaaatagttccaaactcatttgatgaggccagtattattcttgactaaacccagacaagggcactgtaagaaaagaaaattacaggctatggccagggtgagtatagatgcaataattctcaagaaaatactagcagactgaattcgacaacacatttaaatgatcgtataacatcattaaatgggatttatcactgagatgcaagaatggttcaatacagtaaatgtgacacactacactagcagaataaagaacaacaaaaaacctatatgatcatcccagtcgatgcagaaaaggcattcaaaaaaattcaacattttttcataatacatactctcaacaaattaaaagtagaaggaatgtacctttatataacaataaaagttgyacacaacaaggccacatttaacattatactcaatactgaaaagctgaacacttctaacgtacaatcaggaattaaaaaaagcattctcagtctattcagcatagtgctagaagtcctcaccaagggcaactagacaagagaaaaaatataaaagccactcaaagcataatgaaagaacttaaatttcctctgttttcagataacttgatcttttatatatgtatttaaaaaaagaaacactgggggcacaagagctcatgcctgtaatcccagtgctttgggaggccaagtatgaaagatcagtggagcccaggagttcaaggttacagtaatctataac

SEQ ID NO: 920465 - DNA, 615 bp, Homo sapiens
cacacatggtttatatcacaggactctgtgcagacaacccccagtaccagcctggagcctggtagacttgctgggtggctagatccagaagggagataacaatcactactgctcagctctcaggaagctacaaccctagaaaaagagggagggtactacatcaagggaacaccccatgggacaaaagaatctgaacaacagccttgagccctagaccttccctctgacagakcctacccaaataagaccagaaaaccaactctggtgatatgacaaaacaaggttctttaacatctgcaaaaaaatcactagctcaccagcaatggatccaaaccaagaagaaatccctgatttacctgaaaaataattcagaaggttagttattaagctaatcagggaggcaccagtgaaaggtgaagccctacctaaggaaatcaaaaaaataatacaagaagtgaagggagaaatattcaatgaaatagatagcatgaataaaaaacaatcaaaacttcaggaaaaaatggacacatttatagaattgcaaaatgctctggaaggtctcagcaatggaatcaaacaagcagaagaaagaacttcagagctcaaagacaaggt

SEQ ID NO: 920466 - DNA, 620 bp, Homo sapiens
agccctttcttctacagctccgtgtctgagaggttttgtctgtggcttgtcctgctacagtccttggttccctgaccaggaagcgaggtgactgacaagccctgtggagcgtccctgcagaggactccggccagcctgastgacgcaatccaaagagcgctcccgggtaggaaatggccccggtggaatgccttgccagagcagcgcatagcaggctcccgagaaggattaacactggctgaacaccgggaaggaactggcacttgaagtccagacatctgaagcttgtcaagactagtttttggaacttgccccactccatgtgagtggaagcatggcctgatcacccacggtgtgcctgtattgacatctttgttctggttttgacttggcttgacttggtaagactagtctttggaacttgccccactccacgtgagtggaagcgtggcctgatcacccacggtgtgcctgtattggcacttttgttctggttttgacttggcttgacttggtaagactagtctttggaacttgccccactccatctgagtggaaacgtggcctgatcacccacagcatgcctgcatgggcactcttgttctggttttgacttgact

SEQ ID NO: 920467 - DNA, 620 bp, Homo sapiens
agccctttcttctacagctccgtgtctgagaggttttgtctgtggcttgtcctgctacagtccttggttccctgaccaggaagcgaggtgactgacaagccctgtggagcgtccctgcagaggactccggccagcctgactgacgcaatccaaagagcgctcccgggtaggaaatggccccggtggaatgccttgccagagcagcgcatagcaggctcccgagaaggattaacactggctgaacaccgggaaggaactggcacttgaagtccagacatctgaagcttgtcaagactagtytttggaacttgccccactccatgtgagtggaagcatggcctgatcacccacggtgtgcctgtattgacatctttgttctggttttgacttggcttgacttggtaagactagtctttggaacttgccccactccacgtgagtggaagcgtggcctgatcacccacggtgtgcctgtattggcacttttgttctggttttgacttggcttgacttggtaagactagtctttggaacttgccccactccatctgagtggaaacgtggcctgatcacccacagcatgcctgcatgggcactcttgttctggttttgacttgact

SEQ ID NO: 920468 - DNA, 599 bp, Homo sapiens
agtgccaccagcagtcccaaccctgccaagtagaggtagctgctccccagggcactcagctcagccttttactatagcacgtacatgtttacatgactttctccccccaaaactgtgaacccttcatggttacaagcatgtcttactcatctttctacctacctgcatggtgacagagctagccagctatctattaaattcagaattctcccctagcactgagttgctgctgggaagctgctaccaagccagggactacattttccagctcaatttccatccagatgtggccatgggataataattagccaatggaaaatgaacagatgtgaggtatttcacttggaggcttttataacacatcatatatatatacacgtatatatacatatatattatgtgttatatttcatatatatacatgyatacatatgtatatatatgatgtgttatatttatatatatttatatgatgtgttataaaagcctccatatatgtaactttttttttttgagatggagtcttggtctgtcacccaggctggagtgcagtggtgcgatgtcggctcactgcaagttccacctcctgggttcacacc

SEQ ID NO: 920469 - DNA, 744 bp, Homo sapiens
gcaccaggtactgagctgttcttgttacgctcgtatactactgcgtgttgctctcaaggaatagaccaggcagatgagttccacaagcctcaggcatcaataacatgcatacatacacatagcagccaacacgctattaaagcaaaatatatacctactttaacagaaatccaggagctgccactctctggtcacctgatcccatctaacaatgaaaacctcagaggtatactcaatcacctcagacaaactttcttttcttttgtttttgctttaaagaataaaattccaccaaatttccaggatgcaaaagcacgactcgcagctcccaagagcctaacccgtggatttaaacggtaaacatcacaagttagggtctcagggactgagaggagcgcaacaatgttttctttcttgagacaaagcaaagcaaaacaagaatgacaggcaatttctgttcgaggttcataactaagatgcaacaaacaggtggtatggtatttcttctctaagctcctttccttcacaaaattgagattccgtttaagcctaatacatatatacacacatacgcagtatctgggggcgcatakacaatcacgcacatacacatacgatcacgagtacatcagagaaaactctttcaagatttgggcaaaatagttcactaaaacggaaaataatatgcacagactcagaaatgcccaagtttttaaaaccatagtctacaataaggatttagtg

SEQ ID NO: 920470 - DNA, 647 bp, Homo sapiens
tgttattggtctattcagagattcaaattcttcctggtttagtcttgggagggtgtatgttttgaggaatttatccatttcttctagattttctagtttatttgcatagagttgtttatattattctctgttggtagtttgtgtttctgtgggatcgttggtgatatcccctttatcattttttattgcatctatttgattcttctctcttttcttctttattagtcttgctagcagtctatcaattttgttgatcttttaaaaaaaaccagctccaggattcattgattttttgaagggtttttttgtgtctctatctccttcagttctgctctgatcttaattatttcttgccttctgctagcttttgaatgcgtttactcytgcttctctcgttcttttaattgtgaagtcagggtgtcaattttagttctttcctgctttctcttatgggcatttagtgctataaattttcctctacacaatgctttgtatgtgtcccagagattctggtatgttgtgtctttgatctcgttggtttcaaagaacatcgttatttctgccttcatttcgttatgtacccagtagtcactcaggagcaggttgttcagtttccatgtagttgagcagttttgagttcgtttctt

SEQ ID NO: 920471 - DNA, 569 bp, Homo sapiens
atcgagaggaacagaggatcagaagagcacactgacagacaccagcagatgctgacaggccatcaatggtgggaccatgtggaatttggtcagtagtgatcagaggagatgcctgccgctgggcagcccaaactccagggaaacaccaccatcccattccatcccccyctggcctccccattcacctcactgagagctacttccaatcaataaaactttgcagccatcctccaagcccacatgtgattcaatttttctggtacaccagggcaataattcaggatacagaaagccctctgtccttgtgataaagcagaggctctaattgggcggattaacacaagctgcctacagacagcaaaacagcaaagctaaaagagcacactgtgacacacacccactgggacttcgggagctataaacactcaaccttagacgctgctgtggggtcagagcccaaaaactgcccatgacctgcccatctgtatgctccccctaggggtttgagcagccaggcaccaaagaagcaagccacatccctgttgcacgccctgcgaggaggataagaa

SEQ ID NO: 920472 - DNA, 721 bp, Homo sapiens
agtcacttctcagaccacagtggaatacaactagaaatcaattctaagaagaactctcaaaaatatacaaacacatgaaaactcaacaatcttctcctgaataatctttgggtcaaggacaaaattaagatgtaaatttaaaaacttttggaaatgaataaaaagagacacaatacaccaaaacctctgggatataggaaaagactaagagggaagttttgagcaataaatttatacatccaaaggacagaaagatcacaaattaacaacctaacattgcacctcaaggacccagaagartaagagggaaccaaaactgcaactagcagaaggaaaaaattcaatgatcagagcagaattaaatgaaattgagaccaaaaaaaagaatcaaccaaatgaaaagtttgttttctgtaaatgtaaacaaaagtgatagaacactagctagattgaccaagaagagagacaattcaatcagaaatttaaaaaaggagacattacaactgaaaccacagaaatacaattgataatcagaaactactatgaacatctctacactgacaaactagaaatcctagaggaaatgaataaattcctgaacacatagaaccttccaagattgaaccctaaaaatacagaaaccctaaaaagaccaaaatgagtagtgagattgaatcagtaataaaaactttcccaataaaggaaaacccaggaccggagg

SEQ ID NO: 920473 - DNA, 730 bp, Homo sapiens
gcctcgtgggctaaggcccggcgcctgctctgctacccgcgctgcctttagcggtcgcccccgccgccgctgccagggacgtgctgggaaagcccaagccccgggagaagatgccggccatcctggtcgcctccaaaatgaagtcgggactgcccaaacccgkgcacagcgccgcgcccatcctgcacgtgcccccggcccgggcgggcccccagccctgctacctgaagttgggaagcaaggtggaggtgagcaagaccacctatcctagccagatccccctgaaatcgcaggtgctgcaggggctgcaggagccagcgggggaggggctcccgctgcggaagagcggctcggtggaaaacgggttcgatacccaggtgagagatgccgtttgccggggtactgttctggaaggatggatgaatagttctttcgggatggtgtgggagaaagggctggatgggagaagggtctaccatgtggccagggaagggaaccattccccttaggccggcaggttgggggatgcgcgaggagagtgggccggccggtgggtgtggcccgggtgccggaggtttgccttaagagctcttcgagacctgggatggcgggcacgtctgcagcatcttcctggggaggaggaaaggtcgggatgttctcaaaaaacgtgtgcatcgctggaaatgtgaggtcctgcatgttgaggtcttggccccaagaagccagtatc

SEQ ID NO: 920474 - DNA, 602 bp, Homo sapiens
ctttaaccccagctctgcaacttacctgccatgtgaatgttttcgttagctattgttgtataataaaccaccctaaaagtttgtgatttaaagcaataatttactattagctctcatggttctgtgggcacactgggtttagctgggtggttctggagtctctcgtgcagttgcagtcagtatttaactggtgctacagkaatataaggctcaactgggcttatgacatcacttgtgctgtatttccttggtcaaagtttagtcacagggccagcagagattccaggaagactcaactttggagacaagctaccatagcaaccttgggcaattcatttatattgtgcttcatttttttccctccaaaaaaatgaaggtgataaaagtgcctatttgataagatgttataagaatcaaatgaggtagtacatggaatgtggtaagaagagaacctggcacataacagatgctcaatgaaagttactactattactctttctgaggcataccatgctagatactggggcgctattgctttataccccctaaatgccttaatcacactacactacacactacactactactaatgccttaaccac

SEQ ID NO: 920475 - DNA, 720 bp, Homo sapiens
aacaggccaagaactgtctctcaaaagaagagtagttatctgcagaatatggcagggccttgctctaaaatcctagaggcctccactgtgattcacctatgggggcctgacaaaggctccaaacagcatcatatctgccactgacacctcaagcaccattggatctgctgggtcatatggcccaagtggcagagcagcttgcacagcagcctggacctgttgcagagccttctccttttctggaccacattcaaaactggcagcctttcgggtcacttaataaataggccagagtaacacacccaaatgaggaatgtgttgcccacaaaaatccaaataagcccaccaggtgttgtgcctctttctttgttgtaggagggggcaaatgtaacaacttttccttctccttagaaggaatacctcaacaggccacacaccactggacccctagaaattttactgaggtagaaggtccccaaattttaatcagatttatttcccatcgyctggcatgcaaatgtctcaccaataaggccagtgtgtttgctacttcttactcactggatccaattagtataatatcatcaatgtaatggaccagtgtgatattctgtggtagtgaaaagagatcaagttctctccaaataaaagtatgacacaaagccaaagagttaatatagccctgaggtaggacagcaaaggtatattgatggctttgcc

SEQ ID NO: 920476 - DNA, 605 bp, Homo sapiens
aaacctactagaaaataacataggaaaaactcttcaggacataggtctagacaaagattttatggctaagatctcaaaatcacaggcaagaaaaccaaaaatagacaagtgggactatattaaattaaaaagctctccacagcaaaagaaacaatcagtagaatgaagagacagcctgttgaataagagagaatatttgcctactaatttcacaggggactcatatccagaatatacaagaaactcaaacaactcaacaggaaaaagaaaagaaaacccaaataatcccattaaaaatggggtaaggacatgaatagacagatctcaaaagtagacatacaggtggcctacagttgtgtgaaaaaatgctcaacatcaccaatcatcagggaartgcaaatcgaaaccacaatgagatatcctcttatcccagttagaatagctattactaaaaagacaaaaataacaaatgttggtgaggatgttgagaaatgggaaatcttatacactgtaggtgggaatgtagattagtacagcctctatggaaaacagtatgaagatttctcaaaaaactaaaaatagaactaccatgtacccagcaattc

SEQ ID NO: 920477 - DNA, 619 bp, Homo sapiens
ttcagacgtgggtatttggcagacattttcccaaaaatgaatgaagtgagtcacttcaaggaaaacaaccaacagtgtttgttgacaataataaaatttgagttttcaagtgaaaattggaattttggaaaaatcagtatctgtgtcygcttgacagtttctcagtatttaaagatttttgtgatgaaattagtggcaatgttaacaaatgtagtttttaaaattttgtctcagagtaaacaagtcaacatttggaagatctgaataattcagtgaaccaatattttccaaatgaccaaggcatgctgttacaaaatcatgcatgagtaaatgattcatacaaagaacaagagaaataaatggattttagtgaaacataatagaaaaagttcatggacttggtttaagattccacattgcaactaagctaaattaccacttgtcaagttttggaatatcaaagaagaatatccacaattagctaaaaaggaaatattcctctttctctctctctctctctctttttaattgcatacctgtattattaaagatgagattttcttcctatacttcaacccaaacaagtattgcagcagattgaatggagaggcagtgatgg

SEQ ID NO: 920478 - DNA, 582 bp, Homo sapiens
acatgtcaagggtggggccaggtggagataattgaatcacgggggcagtttcccctatactgttcttgttgtagtgaataagtctcatgagatctgatggtttataaaggggagttcccctgtacgtgctctcttgcctgccaccatgtaagacatgactttgctcctcattcaccttccaccatgattatgaggcctccccagacatgtggaattctgagtacactaaacctctttcctttataaattactcagtatcaggtatgtctttattagcagtctattagcgtagactaaccccaagcaatataacagcataaaagttaaaacaaccaaaattcccacaaactgatgaataagaaaaatgcagtatattcctaaattgaaaatcatttamccgcatcagagaatgaagtattcatacacgctataacaagataaacctgaaaagattatgctaaatgaaagaggccagaccccaaaagccacatattatatgattcaatttttaggaaatgctcataacaggaaaatccatagagatagaagatagattaatgactgtcagaggccatggagctg

SEQ ID NO: 920479 - DNA, 620 bp, Homo sapiens
atcagcacttcatggtctctagcctgactgcctttggactctgaccgtaactctttcctgaatctccagcttactggcctcctccatcagattttgttgttgccagagactccacaatcacagtagccaattccttaaaataaatctctaacctgttggttctgtttctctggtgaaccctaactaacataccattacagcaaattccttgctggtggtttatatacattgtttccagtgtctctacttccattctctcttttcacccactccaatcaatttttcaccccgtaacttgtcaaaatttctcatcaagaacactaatgacttctaattaacaataatggccaattttcatcctctgtagacaggataatacctcttttgctctccccgtattctaattcctggcatttgttaatatgttgccttagatgtcaaaagttactttgcatatktgattaaactatggatggagagagtatcctggattatccatgatagcccaatgtaatcacaggggtctttatatgagagaggcaagagggtaagtgttggagaagaagatgtgacaacacaatctgagaagagattttagataccgcactggctggctctga

SEQ ID NO: 920480 - DNA, 595 bp, Homo sapiens
tgattcagaaaaagcaatcttaaaatattaatggtgattgtgggatttttcatcatcttgttttgaaatttaatctgaatattaagggagatgaatctgcagtctgacactgatatttttggtatttatacatgtattatttattaatatgataagggcatatccatataatcctttgtaatatggacttttacacttaagaatagattctcaattttatcagattctttttggcaccaattgtaattttttttcacttgaagtgtttatataacttatacaatttataattkcatattatatttatattttaactatacgataggtggttctaggacagcatcatattaccttcacatatatatcttcagaaatgtactaatttttataaaatattttaatttttgagctattttttaaaagtttgttttcggataattttaattacataaaatatgttctgaaatatttatgttttctatgccattaaatgttataaattatactgtaattatctgcttatgaagctttgaacatatttgcttgcaaagccatctgccactgaatcctttttcatattactgtgtagatcttg

SEQ ID NO: 920481 - DNA, 795 bp, Homo sapiens
agcaaaacttgcacacatttttttttccttcttcataatttcacacatagaagattcgttcttactgtagatcttagcaaactaagcatatgcttttttcccttcagttgaggactttcaccttttcactgaaaggaagcactgcgctcgtctctttggcatatctgaattgccagcatcactacttttgcgcgttggggctgtgattaagtagcacaaggctgacctgaacacaagcactgtgctgccgcaacagtcgctctaagtggctgatggttggtgtaaacaacacagataggctggatgaagggaggattcatgcccaagacagggcagagyagcatgcaatttaaaacctatgaattgtccgtttctggagttttctatttgaccctggataacaccccagaaagtgaaactgcagataagaaggactactgatttgcacatcttttttctgtgcctgtttgtaaccgttgcccaacggattctccttgccctctgcctagacagagccaatttatcaagacaggggaattgcaatggagagagtttaattcacgcagagctggccgtacgggagatgggagttttattattactcaaatcagtctccctgaacattcggagactagggtcttttaaggataatttggcaggtagcgggcccgggagtgcggagcattgattggttggactggagatgaaatcatagaggggcaaagctgtcctcccacactgcagttcctgggtgggggccacaagaccagatgaacctgattaccaccagtctgg

SEQ ID NO: 920482 - DNA, 660 bp, Homo sapiens
tataaaatcaaaaataagttaataactcccaagatacaatggggggtataggcattgagtaaatactcccattccagaagggagaaatctgccaaagaaaaggggctacaggccccatgcaagtccaaaatccagmattgcaggcattaaatcctaaagctccaaaataatctcttttgactccatgtatcacatccaggtatgaaggatgggttaccaaggccttgagcagcttgtccccgtggctctgcaaggctctgccccatagctgctctcaagggcttgcattgaattcctgcagcttttccagttgcagggagcaagctgctggtggatgtaccattctggggtctggaggaaggtggccctcttctcacagctccactaagcagtgacccaactgggattctgtgtgaaggctccaatccatttcccctctgcattgccctagtagaggttctccatgagggctccacccctgcaacagccttctgcctggacttccaggcttttccatgcatcttctgaaatctaggtggaggctcccaagcctcaactcttgccctctgcacacctgtagccttaacaccatgtagaagtcaccaaggcttacagcttgcaacctctgaagcaacagcccaagctgtaactagagccctt

SEQ ID NO: 920483 - DNA, 660 bp, Homo sapiens
tataaaatcaaaaataagttaataactcccaagatacaatggggggtataggcattgagtaaatactcccattccagaagggagaaatctgccaaagaaaaggggctacaggccccatgcaagtccaaaatccagaattgcaggcattaaatcctaaagcyccaaaataatctcttttgactccatgtatcacatccaggtatgaaggatgggttaccaaggccttgagcagcttgtccccgtggctctgcaaggctctgccccatagctgctctcaagggcttgcattgaattcctgcagcttttccagttgcagggagcaagctgctggtggatgtaccattctggggtctggaggaaggtggccctcttctcacagctccactaagcagtgacccaactgggattctgtgtgaaggctccaatccatttcccctctgcattgccctagtagaggttctccatgagggctccacccctgcaacagccttctgcctggacttccaggcttttccatgcatcttctgaaatctaggtggaggctcccaagcctcaactcttgccctctgcacacctgtagccttaacaccatgtagaagtcaccaaggcttacagcttgcaacctctgaagcaacagcccaagctgtaactagagccctt

SEQ ID NO: 920484 - DNA, 660 bp, Homo sapiens
tataaaatcaaaaataagttaataactcccaagatacaatggggggtataggcattgagtaaatactcccattccagaagggagaaatctgccaaagaaaaggggctacaggccccatgcaagtccaaaatccagaattgcaggcattaaatcctaaagctccaaaataatctcttttgactccatgtatcacatccaggtatgaaggatgggttaccaaggccttgagcagcttgtccccgtggctctgcaagkctctgccccatagctgctctcaagggcttgcattgaattcctgcagcttttccagttgcagggagcaagctgctggtggatgtaccattctggggtctggaggaaggtggccctcttctcacagctccactaagcagtgacccaactgggattctgtgtgaaggctccaatccatttcccctctgcattgccctagtagaggttctccatgagggctccacccctgcaacagccttctgcctggacttccaggcttttccatgcatcttctgaaatctaggtggaggctcccaagcctcaactcttgccctctgcacacctgtagccttaacaccatgtagaagtcaccaaggcttacagcttgcaacctctgaagcaacagcccaagctgtaactagagccctt

SEQ ID NO: 920485 - DNA, 660 bp, Homo sapiens
tataaaatcaaaaataagttaataactcccaagatacaatggggggtataggcattgagtaaatactcccattccagaagggagaaatctgccaaagaaaaggggctacaggccccatgcaagtccaaaatccagaattgcaggcattaaatcctaaagctccaaaataatctcttttgactccatgtatcacatccaggtatgaaggatgggttaccaaggccttgagcagcttgtccccgtggctctgcaaggctctgccccatagctgctctcaagggcttgcattgaattcctgcagcttttccagttgcagggagcaagctgctggtggatgtaccattctggggtctggaggaaggtggccctcttctcacagctccactargcagtgacccaactgggattctgtgtgaaggctccaatccatttcccctctgcattgccctagtagaggttctccatgagggctccacccctgcaacagccttctgcctggacttccaggcttttccatgcatcttctgaaatctaggtggaggctcccaagcctcaactcttgccctctgcacacctgtagccttaacaccatgtagaagtcaccaaggcttacagcttgcaacctctgaagcaacagcccaagctgtaactagagccctt

SEQ ID NO: 920486 - DNA, 637 bp, Homo sapiens
ggacagctagtgttatcctttggtggtatcgctacattcagatttttcatggtgccagaattcttgcactgacttctcatctggagacaccagcacttctaattttttgtaattattttcatatgggaaggaatgtttttctttctttcccaaaaaagtttttttttttcttttcctttccccttaccccatctccctaggggatgtgactatagcaaatgttgggtaggatcttttggctttgcttccataamcctatactacattgagttttatactgacctgtgcagtttgacctataagctagtaggtggtgcttatgggttagacctcggtgtggccagcatggcaggagatatatttgatccttgtttactggaagaagctctctgttgcctcaggcagtggcctaatttgtggagtgcacagagatctgctcaatccactcagccctgggagtggggcacagggaaagaatggcaggcccagactgtgaagtctgcctactggtcccctgatggtgggcacaagcaccagtgctgagaaagaatccagtgggcagccactaaatacttagaggtgtgactaggcatggagctgggaaaccttttcagtcccaagttctcaaatggaagga

SEQ ID NO: 920487 - DNA, 733 bp, Homo sapiens
tgaagagcagccttgagccccagatcttccctctgacatagtctacccaaatgagaagggaccagaaaaataattctggtaatatgacaagacagggttctttaagacccccaaaacatcatactagctcaccagcaatggatccaaactaagaagaaatacctgaaatgccagaaaaagaattcagaaagtcaattcttaagctaatcaaggaggcaccagagaaaggtgaaatccaacttaatgaaatcaaaaaaatgatacaagatatgaagggaaaaatcttcagtgaaatagatagcataaatttaaaaaaacacaacttctggaaataaaggacacatttagagaaattcaaaatgcaccagacagtctcagctatagaattgagcaaatagaaaaaaaaagttcagggctcaaagacaagggttttgaattaacccaatccaacaaatacaaagaaaacagaaataaaaaaatgaacaaagccttgaaaaagtttgggattatgttaaatgaccaaacctaagaataattggtgttcctgaggaaraagagaactcttaaaagtttgaaaaacatatttgagggaataatcaaggaaaacttccctggccttgctagagatctagacatccaaataccagaagctcaaagaacacttgggaaatttattacaaaaagatcatcacctaggcacgtagtcatcaggttatctaaagtcaagacaaag

SEQ ID NO: 920488 - DNA, 604 bp, Homo sapiens
gcattcaatacattcacattgtcatgcaatcaatacccatccatctctagaactaaaacgtatctttgtttacattgtacatatctaaaaataattgttttatatgagtaatgtctgttaaaaattaagtattggccaagctaatcaaaactaatataaatattaagcgaatactaaaaaaccaatttatgagtatcttgaaatatctcattttcttctttttttactgtattagttttctattgctagataacaaattatcttagagttttgcagcttaaaacaacaaatattttacattctttttaatcatattaagcctttgaaatcttatgagtattttacattaccattacktctcaattcagactagctgcctttcaagtgcttgatagctgccacgtggctagtaattatcattgtgggcaccacatttctacgtgctgcagttactgttaagttttaatcatttgtttctgtctctagctctgtctgtatccgtagctatatctatgtaaacatcaatttagtacatttttattactaattctttaataaatgttggattctacatgaaagttaattaagagaactaccagattta

SEQ ID NO: 920489 - DNA, 580 bp, Homo sapiens
cttcagtatccactctaatatcctcatgcttttatatatatgtgcgtgtgtgtgtatatgggcatatacgtatacacacatatatacgtatacatacacacgtatatacataaacacatgtatgtatatatacatgtatacccatatagatacacacgtatacacgtctacacgtatatatacacctgtgtgtatatacacacatatatacatatatacatatacatatgtacacatacacacatatatacgtatatacgtatacacacatgtatatatgcacacaaatatgtatatacgtatatacatattacacatacacacacacayacacacacacacacacacacacacacacaagttgagttccaggttctctgtcaaattcttctttactactgccagtaaattactcccaacattaaaaatttgtttctcagtatactgtgatctgaatgcctcccaaagttcatgtgctaaaatttgatcattaatgcgatagtattaagaggtggggcttttagtagatgattaggtcatgaggggagagccctcatggatttataagggattaggacct

SEQ ID NO: 920490 - DNA, 580 bp, Homo sapiens
cttcagtatccactctaatatcctcatgcttttatatatatgtgcgtgtgtgtgtatatgggcatatacgtatacacacatatatacgtatacatacacacgtatatacataaacacatgtatgtatatatacatgtatacccatatagatacacacgtatacacgtctacacgtatatatacacctgtgtgtatatacacacatatatacatatatacatatacatatgtacacatacacacatatatacgtatatacgtatacacacatgtatatatgcacacaaatatgtatatacgtatatacatattacacatacacacacacatacacacacacacacacacacacacacacamgttgagttccaggttctctgtcaaattcttctttactactgccagtaaattactcccaacattaaaaatttgtttctcagtatactgtgatctgaatgcctcccaaagttcatgtgctaaaatttgatcattaatgcgatagtattaagaggtggggcttttagtagatgattaggtcatgaggggagagccctcatggatttataagggattaggacct

SEQ ID NO: 920491 - DNA, 602 bp, Homo sapiens
aaaatacattttttatattagagcaataatccaaaaggaattcaaaaaaataagacactaataaaacaaaacttctttcattcccttttagttatttaggtaaaaaagtttctcagcatctaaatcttgttgcaggaagtcagggaccccgaacagagggaccggctgaagccatggcagaagaacataaattgtgaagatttcatggacatttattagttccccaaattaatacttttataatttcttacacctgtctttactgcaatctctgaacataaattgtgaagatttcatggacatttatcacttccccaatcaatactcttacaatttsctatgcctgtctttaccttaatctcttaatcctgtcatcttcgtaaactgaggatgtgtgtcgcctcaggatcccgtgatgattgcgttatctgcacaaattgtttgtagagtatgtgtgtttgaacactgaaatctgggcatccaaaaggaacaggatggctgtgattttcagggaacaagggatataaccattgggcctgactgcctgcagtgccggacagaacagtcatatttctcttcttacaaaagcgaataggagaaat

SEQ ID NO: 920492 - DNA, 591 bp, Homo sapiens
ggtagtggggtactgctgtaaagatacccaaaattgtggaagtgactttggaactgcgtaacaggcagaggttgaaacagtttggacggctcagaagaagagaggaaaatgtgggaaagtttggaacttcctaatgacttggagkgctcagaagacaggaagatgtgggaaagtttggaacttcctagagacttattgaatggctttgacccaaatgctgataatgaaatggacaataaagtctaggctgaggtggtctcagatggagatgaggaacttgttgggaactggagcaaaggtgactcttgctacgttttagcaaagagtctggtggcattttgcccctatcctagagatttggggagctttgaacttgagagagatgatttagaatatctagtggaagaaatttctaagcagcaaagtgttcaagaggtgacttgggtactgttaaaaagcactgagttttatgtattcacaaagatatggcttggaattagaacatatgtttaaaaaggaagcagagcataaaagttcagaaaatgtacagcctgactatgcaataggaaagaaaaacccactttctgagga

SEQ ID NO: 920493 - DNA, 832 bp, Homo sapiens
gctgaaacctctcaagacataaaacctgcagttttattgaaagatgtaaacagcaatgtacggtgtggtccaaatgaactgttaacttggggaagagggtatgcttgtgtctacaccccctcaggtcctctttggattccagcatgacgcatcaaaccacaccatggcatggctaggaaccaagccggtaccagaaatgaaggaactgaccctacaggacctgcatccccggaggatgcggcttcctcaaacaacacaggccccagacattatactgaagaagacaagtcagaagactgagcaaatcctgctccgggaacaggcaccattcactccagataatgtattccttttttattctctccctgtgcctgctacctatacctgctacactcaattaagctcatcttctaaacctgccatttttcagccctgttatctgggcagacacttccttcccagcttctaacaatgagactgcttggctggaaggggttaacttatccccagtgaggtwccttagtaacagcacacatcaaactgaagcgccaagcaatgctgcaggtcgttccttgattggaaaagaatgttgctaattttactcatgactgtcttatgttatttgctaattctaggatgcaatgccagaataagagcaatgactgcctcgccccacagacctgttgttgcacatatctgcatgcttcaatcaacagaacctgatgcaaaaaaaaaacagggaagagggagatgtgggagttcggtcaagctggtgggaaaaattttaagatgaagttataggatatagacacaaaccttcttggaaggctgg

SEQ ID NO: 920494 - DNA, 818 bp, Homo sapiens
gactcacacagacatggggactaccacctgcagaaaggagctaccactctgggtcttctatttgtggagagctggacattcgtcaggatgacctgcctgcagaaaggagctactgctctgggtctcctatctgctgagagttggacacttgtcaggatgacctgcctgcagaaaggagctaccgctctgggtctcctgagagctgttctgttgcttaataaggctcctctccatcctgctcatcctccagttgtccatgtacctcattcttcctgaatgtgggacaagaacttgagacccaacaaatggcaagacygaaagagctgtaacacagagcttaaacacctgcccctcattcgccatgttgcgagcaccagaaaaaaagaagagctgtggcccttcacggagcccagacctagggactccctgagccagggctgtgactccctcttcggggctctgtgatttctggtgtctccaagtttctgggcaccaccacattccccttgtccagacatgggtgcccgcagcagaagccacttgcagtgcatcttatccagccacaggtttgcacagagccggcatctgtgacagcacctggagctgcctgccccactgcagcagtcagtgtacctggctgtgtgcaatggctggaccctgggctcactcacacacccctcatcatttggcgtctggctcacccttggcatgtgtgggacccaggctggtagcatgagctgagcacagcctgccaggctgagtgggcagaatgagcccagcaggtctgaacaaaactcaagcaaaggtgccactggcca

SEQ ID NO: 920495 - DNA, 818 bp, Homo sapiens
gactcacacagacatggggactaccacctgcagaaaggagctaccactctgggtcttctatttgtggagagctggacattcgtcaggatgacctgcctgcagaaaggagctactgctctgggtctcctatctgctgagagttggacacttgtcaggatgacctgcctgcagaaaggagctaccgctctgggtctcctgagagctgttctgttgcttaataaggctcctctccatcctgctcatcctccagttgtccatgtacctcattcttcctgaatgtgggacaagaacttgagacccaacaaatggcaagactgaaagagctgtaacacagagcttaaacacctgcccctcattcgccatgttgcgagcaccagaaaaaaagaagagctgtggcccttcacggagcccagacctagggactccctgagccagggctgtgactccctcttcggggctctgtgatttctggtgtctccaagtttctgggcaccaccacattccccttgtccagacatgggtgcccgcagcagaagccacttgcagtgcatcttayccagccacaggtttgcacagagccggcatctgtgacagcacctggagctgcctgccccactgcagcagtcagtgtacctggctgtgtgcaatggctggaccctgggctcactcacacacccctcatcatttggcgtctggctcacccttggcatgtgtgggacccaggctggtagcatgagctgagcacagcctgccaggctgagtgggcagaatgagcccagcaggtctgaacaaaactcaagcaaaggtgccactggcca

SEQ ID NO: 920496 - DNA, 585 bp, Homo sapiens
actctgccacccaggctggtgtgcagtggcgcgatctcagctcactgcaagctctgcctcccaggttcacgcgattctcctgcctcagcctcccaaatagctgggactacaggcgcccgccaccacgcctagctaattttttgtatttttagtagagacagggtttcacygtgttaggcaggatggtctcaatgtgacctcgtgatccggccccgtcagcctcccaaaagtgctgggattacaggcatgagccactgcgcccagcctagtgatttttctgctttgaattctgtgaggttttaaaatgtattttggatattcaccttttatcagatacacagtttgcaaatgttttctccaaatcgttgggctgcttttttattgttgtcacaggatttttagggtgtcgctttgccaccctgagttttgcttgggcctgctgggctcattttgtccacttgccttggcaggctgcccatggctcacattactggcctggatcccacaccgtccatcagcaagcaaggcatggagcagcgagtggtgtgtgaaggaacatagcatctgatcactgttcaaagccag

SEQ ID NO: 920497 - DNA, 590 bp, Homo sapiens
agttgcctttcccaaacagataggcggatgttcaaatcctaaagaaatattcataacagttccttcctcatgtgggtgagatgggcctctatcatctgtaggaccaagcatccaagagctatcattactgtatacctcctttggaggggtctagccaagttacaggctgtagaagtggtggaaaaggtaaatatgcccaataagtataattgttctctgtgtcagcccttgctgaaggaatactcatggcaatggtgatcactgctatcatagctatcattaaattactyattgtgactggttgtcccactttcctcaggttttcttctgccatctgtgacagcttcttgatctgtccccaggtaggtggctgtgttggacacgtgttgcttgtgacagtttaagatcctcttcagcatcagtctcgatatggctgcaaccgggggtcctcaggttcctcccagaatctcttctttggcatctggctcatgataaggtttcaggtgtcttgaaggcacaagaattggcagttgattcggtcctggagaagcacaagcataacctgtaccccaagttattattttacctat

SEQ ID NO: 920498 - DNA, 583 bp, Homo sapiens
gcgctaagtggcagcactcaatcatcaaaggcaaggtaggcatagctactgtaatggacagcagaggcaaagcagcaatcagaatagtctgacttgtgtagagctttggcattggctaattaatcatggtgttcctagaagtgaaattgataggaagcctactgcattcctacttaacttatacaaacagaaaacttctaggtcgaatggacaaaggactaatctgaattataaaaacagagaatcacagcctctcaatttccagacttgagccagtttacagaccagaaccccttgaatgaaggagaggccaggtccccttggggaaggaccccactacattascaacaatttatacagtgaatctttctcccatccttccccaagaagacctctggccttgtaccaaggtaactgcactggggaaagggaaataatcaggcattttggggactactggacactggctctgagctgacattgattccaggggacccaaagagtcatttcggtcctccagttaaagcagttaaagtaggggcttacagaggtcaggtaattaatggagttttagcttaggtct

SEQ ID NO: 920499 - DNA, 742 bp, Homo sapiens
aggagcctcaccaatggcaaaatcttctttgatatgcacttcttccaatttactgatggactctgaagatatttttcacatgtgtaaggaggtcagacatcatctttttctcacgacatatgaaacccttcaaagtcaccaccttattcatcatcatcactgaacagagttttaggccagagcttgagccaggcatgcgcaaatgtatctgtagttactgtgttccaagcattggtaattgcatatatggcatccttcctcctcttgaaaaccttccacacccacacctctgttcactgctgctagtctgctgttcaagaaagtgtttttatatttattcttctttgatctagcactggtcatggctgaattaatgaagtatgtagcacagacttttttttttttttttggtgagaatttttcagcaggaggatgagcagaacgattgttagggactaacaaaaccttgcaggtcctcatcctgtccagcttctctgtagtgagcatgggtcactgraacaatcagtgaaaccagtcagaaaacatgtccctggtgatccatgccattttattaaaataacaatgaactgataagaaattaagaccttgaagcactccttgaaatatcaaagacacatgccttttgcttatcactttagtttacaactatgcatgcctgctgcattagcacatcccagcggtgattctgtccttggcatacttagtttctgtacaggctatc

SEQ ID NO: 920500 - DNA, 547 bp, Homo sapiens
agagctctaccattccataaacacatcaaattcagtttattcatttctttcctgtattctttcttctttttgccctctctagctatattggaagtgagccaattcactgaaactcaatctgtcaaaagtcgattcatagaatgaccaattcactgaatttactaaatttactcattgacattggacacgagcaagtgggtttatgaatattctctccccattaccagtttccctatccacttacaatctcttctccagtgtatttcagtctgcactctctcatcagaacataraaaaaaaaaaaaaaaaaaaaaaacaccatgggctgggcgtggtggctcacgcctgtaatcccagcactttgggaggccgaggtgggcagatcacgaagtcaggtgacctaaccaacatggtgaaaccctgtctcagctaaaatataaaaattagccaggtgtggtggtgcgcacctgtagtcccagctactggggagactgaggcaggggaatcgcttgaacctggtaggcggaggttgcagtgagccaagatt

SEQ ID NO: 920501 - DNA, 578 bp, Homo sapiens
cagtgttatttataaattcatttacttttaaaataaatattaactgagaacctattttataccaggtacaattttaattttttaatttttatcataataggcatatatatgtatatatagtacatgtggcgttttgatacagtmatacaacatgtaataatcaaatcagggtaacggggtatcctcactgaaagcatttatcatttctttgagttaagaacattatagtgtttcccttttcattattttaagacatactctgaattattgactgtagttaccttgtcagtactatcaaatattagaccttattctttctaactacatttttgtacccattaaacatcccactttctctcttcctccttgctatccttcccagcatctggtcagcatcattgtactctcaaactctatgactccattgttttaatttttagtgccacatataagtgaaataatataaactttgtatttctctgccaggcttatttcacttaacataatgtcctccagttccatccatcctgttgcaaatgacatggttttattcttttttatgattgaataatattcca

SEQ ID NO: 920502 - DNA, 601 bp, Homo sapiens
ttaataagagctgaatgctttggaacagagcaaggcttcaattaaaggattacagttccagagctaaactgggagagactgtgagctcaaggctgaacctttcccctctgcattctttccctctgattctagtttggctttgattattctttccccttttcctttctttttttattcttttttttttttccacttgctgctggacagaattataaattacagggagaaagagcagtctgatcttaccaaggaagttctttttctcaagtcgtttctttcgttttcaaggtgtttcccaactctggccttactttgtaagacctgaaacttcatcacttctggtaacttaccaaggtccaaagtctgccacagaactacctgaaggcttgaatcacccagatatcggcttgctggcatggaactcttcttgtttttcytcatatacaaataggatttagaaatgtttaagcaataattaaatgaagaaataaggaaaagatttagatattggacttcattgttatcatcaccatttccttattcactttattttatatcatgtacatatctaagtatccaaagaagttaatgaaacatgagt

SEQ ID NO: 920503 - DNA, 439 bp, Homo sapiens
tgtacaccccccactaagagagaataagaaaaaacaagtacaaaattgaaccttgatgcataagatgcttacgatcccaagccatgttaatctaatgtcttgccttcttatccttctcttcccataccattcacctgtacttcagtcatatcacacataccagaaatatctcatattcctatttctacacatgctattctatcttagaatgtccttgctaagagctgattcaataataamctgttctttcatgattcaagtgtcaccactttttggtacatttccctgacatcagtaaataaatttgttcttaagttctcctattttaatgagaattacatgtagtatcttagtaaaaaattgcatgtctatgtttccattgtcctaagaatttatttaagataaattctatattgatttaaatctatcttgagcatcc

SEQ ID NO: 920504 - DNA, 613 bp, Homo sapiens
caactatatacatgtagcagacataactaaatatatgcaaaaaatatttgaaagtaaaattttcaaaaatatatattatttcaaccctaaccaaacaaactaaaacatcttggtgcatatttactagtatatattaagtatatattataatatgttattatatattatattcgtataaaatattattgcayagcaaaattattagttacaataaggttcatttaataatcatagaaatgtcactctaccatgaagacataaaaaattccaaataagtaagcagtcacttcattgttattctttcccatgtaacaaaaccacctcaacagttagtggctttaaataataatgtattggccggacacggtggctcatgcctgtaatcccagcactttggtaggccaaggcaggtgaatcacaaggtcaggagatcgagaccatcctggctaacacggtggaaccgcgtgtctactaaaaatacaaaaaattagccaggcgtggtggcgggcacctgtagtcccagctacttgggaggctgaggcaggagaatggcgtgaacccgggaggcagatcttgcagtgagccgagatcacgccactgcactccagcctgg

SEQ ID NO: 920505 - DNA, 604 bp, Homo sapiens
gtaagccactcatgtttgttgtaaatagcctacttgactgatctacttgacttctagatcctcactgatttttcactatgcaacattttccctgggttgctttcagccagtatctgagtacagcatgggtacttgtgctgacccatccctgcccaacaaagtagtcatataacagaaaacttttgctcatgactcatcatcagactggctcaaactttttcagaactgtgctattgtatgaggatcttctaactcaatccttttatttcactctattttacagatctcagactgcatcacagtcagaaggctttccttatcttatcttctcctgttccttcacccttttatccttcgcaataattccccacgataaatcctttgcatccaacacaggtaataccctaagtcctgcaggaaaacrggaaataaaataagattttggaactggttctttctttgtctagctgtcaggaaggacctcatacaaaatgtttatgcggtattgacagtctctggtactgatgacccaattgccgaggatatcatggatatcaattttgaaaatatatgggtggagtggaatgcccttggtgatgtagtg

SEQ ID NO: 920506 - DNA, 434 bp, Homo sapiens
ggctaaaaggggccaatgcagagctcgggccatggcttcagagggggtaagcctcaagcctcagaagcttccacatggtgttgagcctgcaagtgcaccgaagtcaagaattggggtttggaaacctctacctagacttcagaagatgtatggaaacacctggatgtccaggcagaagtttgctgcagggatggggtgctcatggagaacytctgatagggcagtgcaggagggaaaagtggggttggaacccccacacagagtccctactggggcactgcctagtggagctgtgagaagagggccaccaccctccagactccagaatggtagatctaccaacagcttgcaccatttgcctggaaaagccacagacactcaataccagcctgtgaaagtagctgagaaggaggctgtactctgcaaagccacag

SEQ ID NO: 920507 - DNA, 622 bp, Homo sapiens
tgtgtccagggcccatggtcacgtagaaatagggtgggagaggggtggggttttggcctttctttgtctggctgactctcctctgtcaatgctcagttccaaggtcatgccctcggagacggcttcctcctgctgcacctgccccgagggaccccagacgcctcctctgtggcctatagcaccatggcgccctgagcacagaaaacaaacacaagagaagctccgagaagcaggaggccagggagcctggagcgtctcagggaagactgggcaraaaggagagaagtcaaagaggtctgggacagcctatgaggggccagcaacgaacacgcagagtggaaggaaacaagcaggccccgggagccacgcaactctcgacccaagggattgggactcagctcctttaaagagtttattcttaaattatgcaaaactatcataaaacttcacatatacttcatatatagatatctgacactttcatataactttctacatataaaaccttataagaaacatatcataaggtgtttatccctcccctaccttcctgtgaccaatcatgcattcaattcatcgcagaacagtgatgaaagaaaaccaagctccacccctaaggaga

SEQ ID NO: 920508 - DNA, 602 bp, Homo sapiens
attctccccattactttcaggtacaccaatcaaatgtaagtttggtcttttcacatagtaccatatttcttggaggctttgttcattccttttcattcttttttctctaatcttgtcttcacactttatttcattaagttgatcttcaatctctgatatcctttcttcagcttgattgattcggctattgatacttgtgtatgcttcatgaagttctcatgctgtgtttttcagctccatcaggtcatttatgtycttctctaaactgtttattctagttagcaattcttctaaccttttttcaaggttcttagcttccttgcattggtttagaacatgctcctttagcttggaggagtttgttattacccatcttctgaagcctccttttgtcagtttgtcaaactcattttccatccagttttgttcccttgctggcaaggagttgtaatactttggaggagaagaggcagtctggtttttggaattctcagccttgttgcactggtttttcctcatcttcatggatttatctacttttggtctttgatgttggtgaccttcagatgggatttttgtgtggatgtcctttttgttgatgt

SEQ ID NO: 920509 - DNA, 602 bp, Homo sapiens
attctccccattactttcaggtacaccaatcaaatgtaagtttggtcttttcacatagtaccatatttcttggaggctttgttcattccttttcattcttttttctctaatcttgtcttcacactttatttcattaagttgatcttcaatctctgatatcctttcttcagcttgattgattcggctattgatacttgtgtatgcttcatgaagttctcatgctgtgtttttcagctccatcaggtcatttatgttcttctctaaactgtttattctagttagcaattcttctaaccttttttcaaggttcttagcttccttgcattggtttagaacatgctcctttagcttggrggagtttgttattacccatcttctgaagcctccttttgtcagtttgtcaaactcattttccatccagttttgttcccttgctggcaaggagttgtaatactttggaggagaagaggcagtctggtttttggaattctcagccttgttgcactggtttttcctcatcttcatggatttatctacttttggtctttgatgttggtgaccttcagatgggatttttgtgtggatgtcctttttgttgatgt

SEQ ID NO: 920510 - DNA, 601 bp, Homo sapiens
tcaaatgggagaaattgtccaaaacaaaggggctataggccccatgcaagtctgaaatccagtggggaaatcaaatcttaaagctctgaaattatcttctttgacttcatgtctcatattcaggtcatactgatgmaagaggtgggttcccatggtcttgagcagctccacccctgtggttttgtagggaagaatcccccctcctggctgctttcatgggctggcattgagtgtctgtggcttttcccggcacatggtgcaagctgttggtggatcgaccattatggtgtctggaggatggtggttctcttctcacagctccagtaggctgtgacccagtgtggactctgtatgggggatctaaccccatatttccccttctgcactgtcccagcagaggttctccatgagggctccacccctgcagcaaacttctgcctggacatccagtcatttctgtacctccactgagatttaagtggaggttcccaaacctcaattgacttctgtgcacccacaggcccaacactacatgtaagccactaaggcttggggcttgcaccctctgaagcaatggcctgagctgtatgttggccccttt

SEQ ID NO: 920511 - DNA, 734 bp, Homo sapiens
catatcatgcagaaccatctgtgaaccaggccagagtcttctcttcctttgtcaactgatcatagggaacattccataaggccattggtgcaggctgggggagagaaggcagggcagcaagagtagcaaccatgggcatttgagccacttcctcatgtaacttgtgccttcaggacctgctcaagcccaatcacaaatataccacttccatttgatgatggaatgctgctatgcatgacccacyttatggctagatgggtcagaaagcacccacttcatgataggcagttcaggtcacatggtgacttgatgactcatagtcaaaattcagtttccaccaaagcccagtgacaggccaagagctatctctcaaaaagagagtagttatcttcagaagatggcatgaccttgctccaatatcctagagacctccaccgtgattcacctatgggggcctaccaaaggctccagtcagcattcctgtctgccactgacacctcaagtaccattggatctgctagtttatgtggcccaagtggcagaccagcttgcacggcagcctggacctgttgcagagccttctcctgttctggaccccactcaaaactggcagtcttttgagtcacttgataagtggactggagtaacacacccaaatgggaaatgtgttgcatccaaaatgtaaataggcccactagacgtcatggctctttcttggttgtaggaggggccaa

SEQ ID NO: 920512 - DNA, 812 bp, Homo sapiens
aaatcccatgcaattattatgcacacagcttgattcttatgctcacagaaatttgaatcctaacaatcacagaaatcccttaggtatcttaataaagtaggaaggccaggtgcgatggctcacaccggtaatcccagcactttgggaggccgagaagggcggatcacgaggtcaagagatcragaccatcctggccaaccaacatggcgaaaccctatctctactaaaaatacaaaaattagctgggcgtagcggcgcacacctgtagtcccagctactctggaggctgaggcaagagaatcacttgccagattgcagtgagcgagactgtgccactgcactccagcccgggcgacagagcgaggtcccgtaattagctgggcatggtgacgggtgcctgtaatcccagctactcaggaggctgaggcaggagaatggcgtgaacctgggaggcggagcttgcagcaagccgagatcgcgccactgcacttcagcctgggcgacagagcaagactctgtctcaaaaaaaaaaaaaaaaaaaaaattaaagctgggcggcggtggttcacgcctataatcccagcactttgggaggccgaggcgggtggatcacgaggtcaggaaatcgagaccatcctggctaacatggtgaaaccctgtctctactaaaaatacaaaaaaaaaaattagcagggcgtggtggcgggcgcctgtagtcccagctactcgggaggctgaggcaggagaatggcatggacccgggaggcggagcttgcagtgagcaaagatcgcaccactgcactccagcctgg

SEQ ID NO: 920513 - DNA, 812 bp, Homo sapiens
aaatcccatgcaattattatgcacacagcttgattcttatgctcacagaaatttgaatcctaacaatcacagaaatcccttaggtatcttaataaagtaggaaggccaggtgcgatggctcacaccggtaatcccagcactttgggaggccgagaagggcggatcacgaggtcaagagatcgagaccatcctggccaaccaacatggcgaaaccctatctctactaaaaatacaaaaattagctgggcgtagcggcgcacacctgtagtcccagctactctggaggctgaggcaagagaatcacttgccagattgcagtgagcgagaytgtgccactgcactccagcccgggcgacagagcgaggtcccgtaattagctgggcatggtgacgggtgcctgtaatcccagctactcaggaggctgaggcaggagaatggcgtgaacctgggaggcggagcttgcagcaagccgagatcgcgccactgcacttcagcctgggcgacagagcaagactctgtctcaaaaaaaaaaaaaaaaaaaaaattaaagctgggcggcggtggttcacgcctataatcccagcactttgggaggccgaggcgggtggatcacgaggtcaggaaatcgagaccatcctggctaacatggtgaaaccctgtctctactaaaaatacaaaaaaaaaaattagcagggcgtggtggcgggcgcctgtagtcccagctactcgggaggctgaggcaggagaatggcatggacccgggaggcggagcttgcagtgagcaaagatcgcaccactgcactccagcctgg

SEQ ID NO: 920514 - DNA, 812 bp, Homo sapiens
aaatcccatgcaattattatgcacacagcttgattcttatgctcacagaaatttgaatcctaacaatcacagaaatcccttaggtatcttaataaagtaggaaggccaggtgcgatggctcacaccggtaatcccagcactttgggaggccgagaagggcggatcacgaggtcaagagatcgagaccatcctggccaaccaacatggcgaaaccctatctctactaaaaatacaaaaattagctgggcgtagcggcgcacacctgtagtcccagctactctggaggctgaggcaagagaatcacttgccagattgcagtgagcgagactgtgccactgcactccagcccgggcgacagagcgaggtcccgtaattagctgggcatggtgacgggtgcctgtaatcccagctactcaggaggctgaggcaggagaatggcgtgaacctgggaggcggagcttgcagcragccgagatcgcgccactgcacttcagcctgggcgacagagcaagactctgtctcaaaaaaaaaaaaaaaaaaaaaattaaagctgggcggcggtggttcacgcctataatcccagcactttgggaggccgaggcgggtggatcacgaggtcaggaaatcgagaccatcctggctaacatggtgaaaccctgtctctactaaaaatacaaaaaaaaaaattagcagggcgtggtggcgggcgcctgtagtcccagctactcgggaggctgaggcaggagaatggcatggacccgggaggcggagcttgcagtgagcaaagatcgcaccactgcactccagcctgg

SEQ ID NO: 920515 - DNA, 812 bp, Homo sapiens
aaatcccatgcaattattatgcacacagcttgattcttatgctcacagaaatttgaatcctaacaatcacagaaatcccttaggtatcttaataaagtaggaaggccaggtgcgatggctcacaccggtaatcccagcactttgggaggccgagaagggcggatcacgaggtcaagagatcgagaccatcctggccaaccaacatggcgaaaccctatctctactaaaaatacaaaaattagctgggcgtagcggcgcacacctgtagtcccagctactctggaggctgaggcaagagaatcacttgccagattgcagtgagcgagactgtgccactgcactccagcccgggcgacagagcgaggtcccgtaattagctgggcatggtgacgggtgcctgtaatcccagctactcaggaggctgaggcaggagaatggcgtgaacctgggaggcggagcttgcagcaagccgagatcgcgccactgcacttcagcctgggcgacagagcaagactctgtctcaaaaaaaaaaaaaaaaaaaaawttaaagctgggcggcggtggttcacgcctataatcccagcactttgggaggccgaggcgggtggatcacgaggtcaggaaatcgagaccatcctggctaacatggtgaaaccctgtctctactaaaaatacaaaaaaaaaaattagcagggcgtggtggcgggcgcctgtagtcccagctactcgggaggctgaggcaggagaatggcatggacccgggaggcggagcttgcagtgagcaaagatcgcaccactgcactccagcctgg

SEQ ID NO: 920516 - DNA, 676 bp, Homo sapiens
aaaaatgtacagaaaggaaagctttggttctgagtttgcaggcttccctgtctttcattcctattgtagaaagcagcttatataaaaagatgtgctgtgtggccctttgagctgctgtgattgtgttaggaccccactggatggtattcgcatgaattaatctactgtagcatctctacaaatcaagaggctggcttctgtttgaaatgtcccaaggctttgtgcacagggcaagctaaatgtctccctacagtgagactgaaaatgccttgggtgcccttgtcgataggatctgatrtatagatgcatgtctacaattgcacagtggctgctggcaacatttattacaatctgaatgtgaaatggctattctgttcaaggattctgataaaaagtatcagccacagtagatgtataaggagcctggtttcactgcaactgactacagttatctgattttttttttctagttcatttttagtctgtggagcaaacagagatttcctccccaaatgatgtcctttctcagtcaccagggtgtggttatttggttttatgtagaggagatagaaaccaatcagtctaaatcatattctgttgaaatcagaaccaaaggatccacaatctagctccaatctaactttccagcctcaactcctacctgttctttgttact

SEQ ID NO: 920517 - DNA, 530 bp, Homo sapiens
gtggttgaattgacatctaaaaaatagtgtagtcagatattgcaggataaatgatttggtgttgatgttgtcggctgtggagaacaggaactctggtccttgtggtgcatgtgacttctgaggatggggtttctcaagaggargcctttaggcaagcagtaaattctattttttctcaggtttaataagataagtagacgtagggagctttctgggaagaggttcagggtggagttggttctctctctctctctctctctgtctcttcccttttgtgtttaaaggaagactccagaaagcacaagagaaggtataagaagagagtataaggaaacttgactcagggcaaagaaagcattgattagaaatggattcaaaatccaggagatgattagtgttgggtcaggcatgttcatttttatatcttctgtgtaagtcctcttagattagcttgatttaaatgcttttcctttttgttcttataaaaaacggcacctaccttcatcaatatgttgatcacagtcagaggt

SEQ ID NO: 920518 - DNA, 559 bp, Homo sapiens
taatcaactaacttcaaaattttcagaatacaatcacaagtgttaacagcagaatctaccaaactgagggaagaatctcagagtttgaaaactggctgtccaaaacaacttagaaaaaaataaaaaatcataaagaagaatgagcaaaacaatcaagaaatatgggacctattcataatctgaattctatttttgttatttcagccatttcagcctggttaagaaccattgctggggaactagtgagatcatttggagttaagaagacactctggctttttgagttgttagagttcccctgctgttttttttctcatctgtgtgggttgatattccttcagtctttaaagctgctgtctttggatgggtttttatattttgtttttattttctttgatgttcttgggaacttgatttgstataaggtggttttagttgactggctttgtttctggtagatttttgtactccttggcttagcttagtactccttggctgtgtgctgtaactctagggggctggtatcaggcccctggctttgttctttcacccctcaagg

SEQ ID NO: 920519 - DNA, 559 bp, Homo sapiens
acatggtggcaggcaagagagaataagaaccaagcaaaagggaaaaccccttataaaaacatcagatcttctgtgagacgtattctctaccacaagaacagtatgggggaaactaaccacatgattccattatctgccactgggtccctcccacaacacatgggaattatgggggctaaaattcaagatgatatttgggtagggacagagccaaaccatatcaatccaggagctttttttttyttgaataaaaaaatacatagatcactagcgagactaataaagaacaaaagagaagattcaaataaacacaattagaaatgataagggggatagcatcactgaccccaccgaaatacaaataaacattagagaatgttacaaagacctctgtgcaaataaactagaaaatatagaagaaataggtacattcctggacacatacaccctcacaaaactgagccagcaaaaattgaattcctgaatagatcaataacaagttctgaaattgaggcaataataagtagcctaccaacaaaaacattgcccaggaccagac

SEQ ID NO: 920520 - DNA, 729 bp, Homo sapiens
taagttgaagccagcattcatttaccattctgaaaatcctggggcccttcagaatgatgctaaatttctctgcctgttctctgaaaatggaaaacaaagtctggatgacagcacatctatttacagcatggtttactgaatgttttaagcccactgttgagacatactgctcagaaaaaaaagatccctttcaaaatattactgctcattgacaatgcacctggtcacccaagagctctgacgtacatggagataaatgttatttttgtgcctgttaacacaacatccrtggatgaaggaataatttcgaagccttattatacatttcataaggctatagctgccatagatagtgatttctttggtggatttgggcaaactaaattgaaaacctggaaaggatttaccattctagatgccattaagaatattcatgattcatgggagaaggtcaaaatatcaactctttttttattatactttaagttctagggtacatgtgcacaacatgcacgcttgttacataggtatacatgtgccatgttggtttgctgcacccattaacttgtcatttacattaggtatttctcctaatgctatcctattccccagccccctaccctacgacaggccctggtgtgtgatgttccccccgctgtgtccaagtgttctcattgttcaattcccacctatgagtgagaacatgcagtgtttggttttctgtccttg

SEQ ID NO: 920521 - DNA, 626 bp, Homo sapiens
agtttggggatctgacatgcggtttgatggagtgccaaattcttgctggaaagttcccagacaaaaactgagcactatgaagatactagaccttggctatttctacccaatgcagcattcttctacagtcacttaagtacagaattcttcaatagcatcatttttcatttctctgagataaattctcaagagcacagtttcaggggcatgtggtaattacatttttatttttctaagaaaacacaaagctgttttccatagagaatgtacyattttatattcccaccaacaatgtatcagtgatccagtttctctgcatcctaaccaccattgatgttatcactttttttttttttttgaaacagagtcttactctgttttccagactggagtgcagtggtgcaatcttggctcacggcagcctccacctcctgggttcaagagatcctcatgcctcagcctcctgggattacaggcatacactaccacacccggctaatttttgtatttttagtagagacggggtttcaccaggctggtcttaaactcttggtctcgagtgatctgcccacctcagcctcccaaagtgctgggattacaggcatgagccagctcacccagcccag

SEQ ID NO: 920522 - DNA, 598 bp, Homo sapiens
cttgtaaggcaggcctggtggtgacagaatccctcagcatttccttgtctgtaaaggattttatttctgcttcacttatgaaacttagtttggctggatatgaaattctgggttgaaaattattttctttaagaatgttgaatattggcccccactctcttctggcttgttgcatttctccagagacattcactgatgggcttccctatgtaggtaacctgacctttctctctggctgcccttaacattttttcctgggtttcaaccttggggaatctgacaattatgtgtcttggggttgctcttcttgaggaatatcttagtggtgttctctgtatttcctgaatttgaatgttggcctatcttgctaggttggggaagttctcctggataatatactgaagggtgttttccaacttggttccattcttcccrtcactttcagggaccccaatcaatcagaggtttagtcttttcacatagtcccatatttcttggaggctttgtttgctcctttttaatctttttttctctaatcttgtcttcatgcctcatttagtaagttgatcttcaatctctgatattctttcttccgctt

SEQ ID NO: 920523 - DNA, 582 bp, Homo sapiens
aaattactgcaaactttcaaacatgtagcacacctgataatatttaatcttaactttacaaaatgtgtaatttatctattaaacctgattctttcagtcatctgttacaggacatcattttcatgacatcgaagtgtttattaatttaaaaactttagaaacaaacagcatagcctatgaaagtgtctcttaatggaaaattatcaatggaaagtaagtctggcaaagaatttagtgtgagtacaaagaggaccaggttggaagccatcatggtgacatcaggwcctgttaacctactcgcagtcagacaagccaaagtacaagttccctttgggtgatcccttcgaccaacataaacacagtcccagaatcacatggccccaggtcctcattcagaggtcctcaatattataatacaatactcatcaacaaaatgagaatatagaatttaaaatttcacaaagaacttgtagactcttaagattatgtttgtagaccccaagagttgactgaacccagttaaaggaaagctggaccaaataatcttttttttattattattattatactttaagttttagg

SEQ ID NO: 920524 - DNA, 582 bp, Homo sapiens
aaattactgcaaactttcaaacatgtagcacacctgataatatttaatcttaactttacaaaatgtgtaatttatctattaaacctgattctttcagtcatctgttacaggacatcattttcatgacatcgaagtgtttattaatttaaaaactttagaaacaaacagcatagcctatgaaagtgtctcttaatggaaaattatcaatggaaagtaagtctggcaaagaatttagtgtgagtacaaagaggaccaggttggaagccatcatggtgacatcaggtcctgttaasctactcgcagtcagacaagccaaagtacaagttccctttgggtgatcccttcgaccaacataaacacagtcccagaatcacatggccccaggtcctcattcagaggtcctcaatattataatacaatactcatcaacaaaatgagaatatagaatttaaaatttcacaaagaacttgtagactcttaagattatgtttgtagaccccaagagttgactgaacccagttaaaggaaagctggaccaaataatcttttttttattattattattatactttaagttttagg

SEQ ID NO: 920525 - DNA, 582 bp, Homo sapiens
aaattactgcaaactttcaaacatgtagcacacctgataatatttaatcttaactttacaaaatgtgtaatttatctattaaacctgattctttcagtcatctgttacaggacatcattttcatgacatcgaagtgtttattaatttaaaaactttagaaacaaacagcatagcctatgaaagtgtctcttaatggaaaattatcaatggaaagtaagtctggcaaagaatttagtgtgagtacaaagaggaccaggttggaagccatcatggtgacatcaggtcctgttaacctactcgcagtcagacaagccaaagtacaagttccctttgggtgatcccttcgaccaacataaacacagtcccagaatcacatggccccaggtcctcattcagaggtcctcaatattataatacaataytcatcaacaaaatgagaatatagaatttaaaatttcacaaagaacttgtagactcttaagattatgtttgtagaccccaagagttgactgaacccagttaaaggaaagctggaccaaataatcttttttttattattattattatactttaagttttagg

SEQ ID NO: 920526 - DNA, 567 bp, Homo sapiens
ctctttgctgtataattttggtttcggttttccttacatttcctattcaaggaacattttcctgtaaaacgacatgttgagagaagcagccataatttagtagagaatagcgcgagagctattctatttttttttwaaatttgattattattatactttaagttttagggtacatgtgcacattgtgcaggttagttacatatgtatacatgcgccatgttggtgtgctgcacccattaactcgtcatttagcattaggtatatctcctaaagctatccctcccccctgcccccaccccgcaacagtccctggagtgtgatgttcccctacctgtgtccatgtgttctcattgttcaattcccacctatgagtgagaacatgcggtgtttgtttttttgtccttggtgatagtttgctgggaatgatggtttccagtttcatccatgtccctgcaaaggacatgaactcatcattttttatggctgcatagtattccatggtgaacatgtgccacattttcttaattcagtctatcattgttggacatttaggttggttccaagtct

SEQ ID NO: 920527 - DNA, 594 bp, Homo sapiens
caattcactcctctgctacctctactggagcaggtgctagtatccatggctgagagacatgaagacagatcacatcacaggactctttgcagacactccccagtaccagccgagagcctggtagctctactggctggtgaaactcagcagagaaataacaatcactgcagtttggctctcaggaagcccyattcctaggggaaggggagagcaccacatgaagggagcaacccatggaacaaaataatctgaacagtagcctttaagccccaaatcttccctctcacataggtctacccaagtgagaaggaaccagaaaaacaattctggtaatacgacgaaactaggttctttaacatccctgaaagaccacatagctcaccagcaatggatccaaaccaagaagtaatctctgaattgccagaaaaagaattcagaaggttgattattaaactgctgaaaggtgaatatcaacttaaattaaaaaatgttacaggatatggatggaaaaatctccagagaaatagatagcataaataaaaatcaaacacaacttctggaaatgaaggacacacttagagaaatgcaatatac

SEQ ID NO: 920528 - DNA, 617 bp, Homo sapiens
tttattttcacatctgaaagtatgtagcagtgtggcaaatggttttctcaaatgaataaataatattctttttggaatcattgaatcaagattttgaagagtttctaggaggatatcatcttttttcaagtgaaattatatcttagccatattagaagaaagaaattattttaaawgacatccagaaatgtctaaactgctctttagtgtatcttataaatgcttccagaatgatagttgcaacttcttgcatgtcaaatatcagatattatattaaaactttcacataactgtttaaagatcatcacaacagtatctcagagatgacataatcctcattttacaggcaaagattatgagtctcagataatctaagcaagttgctgaaagctgacaatcattggggctagagttcagaatcagatttgtctcgctgtaaagtctgagctcttcccaccacacctccattgtcattcattagaccacaaattcatcatgcacattttagattattccctccaatccattgtcagcatagctggagaaaatgttttgttttatttgtcactgtctagattatctgctgacttaatctcacttgaacacacctttactct

SEQ ID NO: 920529 - DNA, 631 bp, Homo sapiens
gctccagccctggctaaaaagggtcagcatacagctcaggccattgcttcagagagtgcaaactccaagccttggcagcttacacatggtgttgggcctgtgtgtgcacagaagtcaagaattgaggtttgggaacttccacctagatttcagaggatctagggaaatgcctggatgtccagacagaagtttcctgcaggggcagagccctcatggagagcctctgtgagggcagtgcagaagggaaacgtgaggttkgtgaccccacacagagtccccatgcgggcactgcctagaggagctatgagaaaaaggccactgttctccagaccccagaatggtagatcaaccaacagcttgcaccatgcacctggaaaagccacagacacttaatgccagcagtgaaagcagccaggatgggttgtatcctgtgaagccagaggggcagagctgcctaagaccacgggaacccacctcttgcatcagcataacctagatgtgagacatgaagtgaaaggagataattttggaacttaaggtttaatgactgctctattggatttcagactcgcacagggcctgtagcccctttgttttagttaatttctcccattggaatggctatacccaa

SEQ ID NO: 920530 - DNA, 704 bp, Homo sapiens
ctgctgttttattcccactgtgtatggtatattttctcaatgctatttgtttacggttgtctaggttattttaatttttaactattgcaagcaatgtgtgaacatactgtggatgtctcctagagtacatgcggaagttttcactaggtatgtacctgggggtggaactactgggccgcaggtatgtgcaccttcatctttactagacaataacaaattattttccaaagcgattatacctatttatatcccacggcagtatataagtgtgcaaattgctcttcatttttttttttttttttttgagatggagtcttgctctgttgcccaggctggagtgcagtggcatgatctcggctctctgcaatctccacctcctgggttcaagagattctcctgcctcaacctcctgagtagctgggattacaggcatgccaacamgcctggctaatttttgtatttttggtagagacggggtttcgccatgttggccaggatggtcttgaactcctgacttcaggtgatccgcccctctcggtctcccaaagtgctgggattacaggtgtgagccaccgcacccggcctgccctatattcttaattttctctttttgggataagatctcgctatgatcctcaggatggtctcaaactcctgggttcaaatgaacctcccacttgggcttcctgagttgctagaactac

SEQ ID NO: 920531 - DNA, 603 bp, Homo sapiens
attcaaatgggagaaattgtccaaaacaaaggggctataggccccatgcaagtctgaaatccagtggggaaatcaaatcttaaagctctgaaattatcttctttgacttcatgtctcatattcaggtcatactgatgmaagaggtgggttcccatggtcttgagcagctccacccctgtggttttgtagggaagaatcccccctcctggctgctttcatgggctggcattgagtgtctgtggcttttcccggcacatggtgcaagctgttggtggatcgaccattatggtgtctggaggatggtggttctcttctcacagctccagtaggctgtgacccagtgtggactctgtatgggggatctaaccccatatttccccttctgcactgtcccagcagaggttctccatgagggctccacccctgcagcaaacttctgcctggacatccagtcatttctgtacctccactgagatttaagtggaggttcccaaacctcaattgacttctgtgcacccacaggcccaacactacatgtaagccactaaggcttggggcttgcaccctctgaagcaatggcctgagctgtatgttggccccttt

SEQ ID NO: 920532 - DNA, 732 bp, Homo sapiens
catatcatgcagaaccatctgtgaaccaggccagagtcttctcttcctttgtcaactgatcatagggaacattccataaggccattggtgcaggctgggggagagaaggcagggcagcaagagtagcaaccatgggcatttgagccacttcctcatgtaacttgtgccttcaggacctgctcaagcccaatcacaaatataccacttccatttgatgatggaatgctgctatgcatgacccacyttatggctagatgggtcagaaagcacccacttcatgataggcagttcaggtcacatggtgacttgatgactcatagtcaaaattcagtttccaccaaagcccagtgacaggccaagagctatctctcaaaaagagagtagttatcttcagaagatggcatgaccttgctccaatatcctagagacctccaccgtgattcacctatgggggcctaccaaaggctccagtcagcattcctgtctgccactgacacctcaagtaccattggatctgctagtttatgtggcccaagtggcagaccagcttgcacggcagcctggacctgttgcagagccttctcctgttctggaccccactcaaaactggcagtcttttgagtcacttgataagtggactggagtaacacacccaaatgggaaatgtgttgcatccaaaatgtaaataggcccactagacgtcatggctctttcttggttgtaggaggggcc

SEQ ID NO: 920533 - DNA, 730 bp, Homo sapiens
gatgggcttccctttgtgggtaccccgacctttctctctggttgcccttaacattttatccttcatttcaaccttggcaaatctgacaattatgtgtcttggggttcctcttctcgaggagtatctttgtggtgttctcagtatttcctgagtttgaatgttggcctgcctttgtaggttggggaagttctcctggataatatcctgaagagtgttytccaacttggttccattctccccgtcactttcaggtacactaatcaagcgtaggtttggtcttttcacacagtcccatgtttcttggaggctttgttcatttctttttactcttttttctctaaccttgtcttcttgctttatttcattaatttgatcttcaatcactgataccctttcttccacctgattgaatcggccattgaagcttgtgcatgcgtcatgtagttttcatgccatggttttcagctccatcaggtcatttaaggtcttctatacactggttattctagttagccattcgtctaatcttttttcaaggtttttagcttccttgcgatgggtttgaacatcctactttagctcagggaagtttgttattaccgaccttctgaagcctacttctgttaacttgtcaaagtcattctatgtccagctttgttcccttactggcgaggagctgtgatcctttggaggagaagaggcgctctggtttttagaattttcagctttt

SEQ ID NO: 920534 - DNA, 575 bp, Homo sapiens
ctgagctttcaatggaaattttaaacaagtgggatcaagatcctgaagcatttctttgagaattataacaggagatgaaacatggccttatgtgtgtgatcctgaagacaaagcacaatcaaaggaatagctaccaagaggtggaagtggtccagtcaaagcaaaagtggacmagtcaaagcaggtggaccagtgtagagccaaggtcatggcagccgttgtctgagatgctcaaggcattttgtttgttaactttctggaaggtcaaagaacgataacatctgctaattatgagagtgttttcagaaaggtagcccaagcttttgaagaaaaaatgtatcgaaaagcttcaccagagagtcttcctccatcatgacatgacaatgctcctgctcattattctcatcaaacaaaggcaatttttttgagaatttctatggagaagccattaggcatccaccttatagtccaaatttgactccttctgacttttttttttttgttacttaatctttaaaaatcttcaaagggcacccatttttctttagttaacaatgtaagaaagattgcattga

SEQ ID NO: 920535 - DNA, 657 bp, Homo sapiens
acagccaatggttgactgatatgtgtgaataaaagggaggttaacttgcacaagttggggctgggtatagtgtcatttatgttccagagttatcttttggacaaagcctgacttcacctgaatcacatcttcttcaagcatcaccccattgtaccgtttgcctcattcccttatagttttctcctgagagcacttcctcactgcattatttgcatcagaatcctcttctcaasttctgcttctgtggaacctggccaaagacagttggtaacaggagtggtcacaaaaagcaggccataataaggaatattgcattggattgttcaactggctaaatgtcaatgagtaccctatggtggtatttggagtactgaccgttgctgatatgtggtagcagtgtgattgttaaaactttcaattgtggtgaacttggacttagaagaggtggaagatgaatttgctcgtgggtatctctgactctgagaaatgcagagatgatagtgatgataaggattgtggcattggatggctgttgctaagcatgattggagcaccaaagacagaaaatagcaggctcgtatttattaatccaaaaatttagagcaaagtgtgagtcagaggcctttcttggcagcatttagaaataccttcatttct

SEQ ID NO: 920536 - DNA, 834 bp, Homo sapiens
gtggtgcctgcatatcatgcagaaccatctgtgaaccaggccctagtcttctcttcctctgtcaactcatcatagggaactcctcatgaggtcattggtgcaggctgagggagagaaggcagggtgacagaagtggagatcatgggcatttgagccactttctcatgtaacttacttgtgccctcaggaacagcctgagctccatcacatacataccacttccatttaatgatkgaatgctgctctgcatgacccactttatggctagatgggtcagaaagcaaccagttcatgataggcagttcaggttgcatggtgacttgatgacccgtagtcaaacattcagtttccaccaaagcctggtaacaggccaagagctgtctctcaaaagaagagtagttatctgtggaagatggcagggccttgctccaaaatcctagaggcctctgctctgattcacctatgggggcctgccaacggctccaaacagcatccctatctgccactgacacctcaagcaccattgaatctgctgggtcatatggccccagcacttacacagcagcctggacctgcagcagagccttctcctgttctggactccattcaaaatcagcaggcttttgggtcacttgataaatgggccagagtaacacacccagatgaagaatattttgcctccagaatccaaataggcccactaggtgttgtgcctctttcttggttgtaggaggggccaaatgaagcaacttatctttcaccttagaaggatataaagatatataaagatataggccacacaccactggagccctagaaattttactgaggtaa

SEQ ID NO: 920537 - DNA, 719 bp, Homo sapiens
ggagtcactactaggttaaacttataataatccactgccattctccaagatccatctgtcttctgcacaggccaaatgggagagttgaatgggaatgtggtgggaatcggaatcacctcccctgcatctttcaagtccttgatgctggtgttaatctctgcaatccctccagggatgcgatattggatttggtttactgtttttctaggtagaggcagttctaatggcttccatttggtctttcccactgtaatggccctctcyctacctgtcagggagccaatgtgggggttctgccagtggctaagtatgtctatgccaattatgcattctggcactgggaaaacaacaggatgagcccagggacccactagacccattgtaagttggacctgagctaaaacaccattaattacctgacctccatgagcccatactttaactgggggacaacaataacattttgggtcagttagaatcaacatcagctcagagtcagtgtctagtagtcccccaaaagtctgatcattcccctttccccagtacacaattactctggtaaaaggctggaggtctccttggggaaagatgggagaaagattagcagcataaattgttggtagtgtagtggggtcctttctcaagggaacctggcctccccttcattcaaggggttctgggtctgtaaactggctcaagtctggaaactgactgaaggg

SEQ ID NO: 920538 - DNA, 610 bp, Homo sapiens
tctcttggaattcgcacatgttgtggaagggacctgggggaggtgatcgaatcatgggggccagtctttcctgtgctattctcgtgacagtgaataaatctcacgagatctgatggttttatcaggggtttctgcttttgcttcttcctcattttctcttgctgccaccatgtaagaagtgcctttcacctctgccatgattctgaggtctccacaggcatgtggaactataagtccagttaagcctctttttcttcccaatctcaggtatgtctttatcagcagcaggaaaatggactaatacagtaaattggtaccagtagagtgggtgttgctgaaaggatacccgaaaatgtagatgtgactttggaactgggtaacaggcagaagttggaacagtttggagggctcagaagacaggaaaatktgggaaagtttggaacttcctagagacttgttgaatggcttttcccaaaatactgatagctctaagtacaataaaatccaggctaaggtgatctcaggtggagatgaggaacttgttgagaactggagcaaaagtgactcttgctatgtgttagcaaagagactggtgacattttgcccctgc

SEQ ID NO: 920539 - DNA, 566 bp, Homo sapiens
caatacccactgataaaactatagtagacattgtagaagttaaagatttaaagcaaactttagcgattgaaacaggataccatgatgcaaatgcctggctggaacggattgaatattctgttcacaggttaaatgaaagtgacagttatgcttgtgtggcagggaggccagaggcccagatagtccccttcccacttgggcrgtcttctgactgactaggcatgagctgcatggtgagtctctttcaaaaccccacagcctggggccacgaggcatgtaagaatctctcactgctattccctgaagttaaaggctctgtgggtcagccccaagggccctctggtctccagcttttgatgttaattgtacctcatgtctctcacgacagggggaaagattaacgtccctcagagacccaaaagaatgcagtgaaaccaagcctttccgagagcttactagtcaagttgcccttgtttattccctaggggatgcgtggtggtattgtggtggaccactgttgggtactctgtcaaagtaaatggagaagcacttgcgctctagtccaa

SEQ ID NO: 920540 - DNA, 566 bp, Homo sapiens
caatacccactgataaaactatagtagacattgtagaagttaaagatttaaagcaaactttagcgattgaaacaggataccatgatgcaaatgcctggctggaacggattgaatattctgttcacaggttaaatgaaagtgacagttatgcttgtgtggcagggaggccagaggcccagatagtccccttcccacttgggcggtcttctgactgactaggcatgagctgcatggtgagtctctttcaaaaccccacagcctggggccacgaggcatgyaagaatctctcactgctattccctgaagttaaaggctctgtgggtcagccccaagggccctctggtctccagcttttgatgttaattgtacctcatgtctctcacgacagggggaaagattaacgtccctcagagacccaaaagaatgcagtgaaaccaagcctttccgagagcttactagtcaagttgcccttgtttattccctaggggatgcgtggtggtattgtggtggaccactgttgggtactctgtcaaagtaaatggagaagcacttgcgctctagtccaa

SEQ ID NO: 920541 - DNA, 674 bp, Homo sapiens
tatgccctgctcccagaggtgggggctacagaatcagcaggcctagctgagctgtggtgggctccgcccagtttgagcttccaggcagctttgtttacctactcaagcctcagcaatggcaggtgcccctccccctgccaggctgttgcctcgcagttcaatctctgactgctgcactagctgtgagcaaggctctgtgggtgtgggaaccaccgagccaggcactggatagtagctcctggtctgcatttgctaagactgttgaaaacrcgcagtatttgggggaggagtgttccgttttttccaggtacagtctgtcagggcttcctttgtctaggaaagggaaatctcccaacgccttgcgcttcctgggtgaggcgacgccctgccctgctttggttcaccctccgtgggctacacccactgtcctcctgacctcaagtaatctgcccgccttggcctcccaaagtgctgggattatagtcataagccaccacacccggcccaggttttctatattcttattgatgttctgtacactacttctactgattactgcaaagaagaaatattaaagcctccaattgtaactagatttatctatttctcctttcagtttttgtttcatgtattttttgagggggggacgggagaggacagtgtctcactctgtc

SEQ ID NO: 920542 - DNA, 719 bp, Homo sapiens
acagggacgtttaagtatgcagaagtttctgctgccttttgttcagctatgccctgctcccagaggtgggggctacagaatcagcaggcctagctgagctgtggtgggctccgcccagtttgagcttccaggcagctttgtttacctactcaagcctcagcaatggcaggtgcccctccccctgccaggctgttgcctcgcagttcaatctctgactgctgcactagctgtgagcaaggctctgtgggtgtgggaaccaccgagccaggcactggatagtagctcctggtctgcatttgctaagactgttgaaaacgcgcagtatttgggggaggagtgttccgttttttccaggtacagtctgtcagggcttcctttgtctaggaaagggaaatctcccaacgccttgcgcttcctgggtgaggcgacgccctgccctgctttggttcaccctccgtgggctacacccactgtcctcctgacctcaagtaatctgccygccttggcctcccaaagtgctgggattatagtcataagccaccacacccggcccaggttttctatattcttattgatgttctgtacactacttctactgattactgcaaagaagaaatattaaagcctccaattgtaactagatttatctatttctcctttcagtttttgtttcatgtattttttgagggggggacgggagaggacagtgtctcactctg

SEQ ID NO: 920543 - DNA, 719 bp, Homo sapiens
acagggacgtttaagtatgcagaagtttctgctgccttttgttcagctatgccctgctcccagaggtgggggctacagaatcagcaggcctagctgagctgtggtgggctccgcccagtttgagcttccaggcagctttgtttacctactcaagcctcagcaatggcaggtgcccctccccctgccaggctgttgcctcgcagttcaatctctgactgctgcactagctgtgagcaaggctctgtgggtgtgggaaccaccgagccaggcactggatagtagctcctggtctgcatttgctaagactgttgaaaacgcgcagtatttgggggaggagtgttccgttttttccaggtacagtctgtcagggcttcctttgtctaggaaagggaaatctcccaacgccttgcgcttcctgggtgaggcgacgccctgccctgctttggttcaccctccgtgggctacacccactgtcctcctgacctcaagtaatctgcccgccttggcctcccaaagtgctgggattatagtcataagccaccacacccggcccaggttttctatattcttattgatgttctgtacrctacttctactgattactgcaaagaagaaatattaaagcctccaattgtaactagatttatctatttctcctttcagtttttgtttcatgtattttttgagggggggacgggagaggacagtgtctcactctg

SEQ ID NO: 920544 - DNA, 766 bp, Homo sapiens
acaaacaaatggaaaaacattccatgctcatggatagaaaaaaatcgataccatgaaaatggtcacactgcccaaagcaatttgtagattcaatgttcttcccattaaactaccagtgacattcttcatagaaatagaactattttaaaattcatatggaactaaaaaggagtctgaatagccaagacagtcctaagcaaaaagaacaaagctggagggatctcacaatccaacttcaaactatactgcagagctacagtaataaaacagcatggtactgatacaagaatagacacatagaaaaatagaaaagaatagagacatcagaaataatattgcacgcctacaactatctgatctttgacaaacctgacaaaaacaagcaatggggaaatgattccctatttgataaatggtgctgggataactggctagccatatgcagaagattgaaactggaccctttccttataccatatacaaaaattaagatagattaagacataagcttaaaaccccagaagacaacctatgcaataccattcaggacataggcaggggcaaagatttcatgttgaagatgaaacaaaagcaaaaatygatacacggactctaaagaactgcttcacagcaaacaaaactatcagcagagtaaacagacaacctacagaatgggagaaaatttttgcaaactatgcatctgacaaaggtctaatatccagcatctgtaaggaacttaaatttacaagaaaacaaaaaagtccca

SEQ ID NO: 920545 - DNA, 603 bp, Homo sapiens
ctattgtctaacatacatgtagaatctaaaacactgaaactcataaaaactgagggtagcacagtggctgaatagacaaatattttatgatctagcatatatgtagaatctaaaacagtcactctcataaaagccgagagtggaaaactggttgccaggagctaggggattsaggaaatggggagatgttagtcaaaggatcagactttcagttttaagatgaataacttctggagacctagtgtatagcatggtgactatcattaatagtaccgtattatttacttgaaattttccaagagagtagatattaactgccctcaccacacacacacaatggtaactgtgtgctgatagatgtgttaatttaattgtggcaacagtgtatacatatatcatcacattggacaccttgaaagtatatggtttttatttgtgaataataatagcttaacaaagctgataaattcaaataaaacaggtactacatgtataaaatgtaatattatccagcaataaaaagaaattgaattttacttagtgaaagaaggtagtctgaaaaggttacttagtagatgatcctatttatgacattcctgaaat

SEQ ID NO: 920546 - DNA, 594 bp, Homo sapiens
cagatggactgagtagaaatggctttgggcactaccagtgtctatcatacctacatttataatggaaggaaatgctaaatttcagtttgaggttagaatggaatttctttccatctaagctaacagaacttttggtatcccatgaaaaccatgtcaaaaactctaggcctagattagctgtggtggctcacgtctatagtcccaccactttgggaggccaagacaggtggatcgcttgagtccaggagttcaagaccagtctgggcaacatggtgaaactccatctctacaaaaaaaacaaaaattaactagtggtaatggcacgccacctgttgtctgtggtcctagctactcacaaggctgcgatgggaggatcacttgagcccaggaggtggaggctgcagygagccaaaatggtgccactgcacctccagccaggtgacagagtgagaccttgtctcaaaacaaaaactaaaccaaaaacaagacaaactcctggtctagaagctcagtaattgtgcattctctttcctggcatactggaagcctcattcttcatctaagttgatcatgtgactgggttctagccaggct

SEQ ID NO: 920547 - DNA, 798 bp, Homo sapiens
ccaacaatgagctacagaattgaatcagtataaatagcctaccaaccaaaaaagcccaggaccaaatgaattcacagctaaattctaccagatgtacaaagaagagctggtaccattcctgttgaaactattgcaaaaacttgaggaggaaggactcctccccatttcattctatgaggccagcatcatcctgataccaaaacctgtcagagacacaacaaaaaaaagaaaacttcaggccaatatccttgatgaacagtggtgcaaaaatcctcaacaaaatacttgcaaaccaaatccagcagcacatcaaaaagctaatctgccacaatccagtaagcttcatctctgggatgcagggttggttcaagatacacaaatcaataaatgtgattcacataaacagaactaaagacaaaaactacatgattatctcaatagatgcagaaaaggcttttaatataattcaacatccttcatgttaaaattctcaataaagtaggtattgaaggaatacatctcaaaatcataagagccatctctatgaaaaattcacagccaacatcatactgaatggacaaaagctggaagcattctcctcaaaaaycagcacagacaaggatgccctttcttaccactcctattcaacaaagtgttggaagtcctggccaaagaatcagtcaagagaaagaaataaagggcatccaaataggaagagaggaagtcaaactactgtccctgtttacagattacatgatcctgtatctagaaaaccccgtagttttggccccaaagctc

SEQ ID NO: 920548 - DNA, 557 bp, Homo sapiens
ggctgaggcaggagaatcacttgaacccaggaggcggaggttgcagtgagctgagatcgtgccactgcactccagcctaagtgacagagcaagacttcgtttcaaaaaataaaaataaaaataaagaatatgctgacttgggggaatcccagagtctttatcactatctcctttgtgtccttgggctaattaattaatttctctgagtgacatttgtttcttcatcttaaatgggactattgatackagcctcagaaggctgctggagtttacaggagataatgtgaggaattgcctggcatgggtggtcaataaatggtagctgcttattattagtatggttaggctgatttcgagggtagggttgggcaggaagaaccagaaaactggggaggagccagagtcctcagagggcatttaaattcaggctggggaagccaagatccttccacaaatgcgcagagcaggtacagggatggaagcggggcaaagctcaggtcagaagtaggtgggaggtcagagaggtgggagagtccctgggcagttgcggggatttt

SEQ ID NO: 920549 - DNA, 646 bp, Homo sapiens
atttactttaaatgtcccatatggcgcgggcatggtggcttatgcctgtaatccgaacactttgggaggtcaaggaggatggatcacctgaggtcaggagttcaagaccagcctgaccaacatggtgaaaccctgtctttactaaaaatacaaaattagtcaggcatggtggcacatgcctgtagtcccagctcctcaggaggctgaggcaggaaaatcgcttgaacctgggaggcagaggttgcagtgagccgagatcgcgccaaagcacgccagcctggggacagagcgagactctgtttcaaaaaaaaaaaaaaaaaaaaagtcccatattagcaatgttatactctacaagtggtacgtctrcagacataccgagtgtcactgtagaagagcgtggagtggcttttgtgaagaagttcaggtacatcagtgcaaaagttagctgaactagttcattcatctctatggcaacagcttccttctctttatcaacattacttatttgtgacaatttaatgtttccatttgcaagttctccagttgcagaaaatttcactccatctttcgcacaggaaattacaacaacatctccaatatgattgagatctcagcatatgcatgcaaattcaccagcaggcatctt

SEQ ID NO: 920550 - DNA, 719 bp, Homo sapiens
aacgaaaacaacaacaaataaagtaaccctggaactcctcctgcctgggtttttgggttttttcctggagattccttgagggcattttaaatataatccaagagatttttcttctgtggccagatgacctgggctgggtcttcatgccaccatttactagctgtatgtatttgtatcttagacaaataacccccatctctgagcttcagtggcagcatctgtaaaagagggatatgtaataacagaaccgtcctcatcagttatcaggaggaataaatgagttagcccaggggaaatgctgaaagcattgccagacttgagcrtgcctcacaatcatgcaggactcatcaaaacgcagattgtggctgggggcggtggctcacacctgtaatcccagcactttgggaggccgaggcgggtggatcacctgaggtcaggagttcgagaccagcctgaccaatatggtgaaactctgtctctactaaaattacaaaaattagctaggcatggtggggtgcgcctgtaatcccaactactcaggaagctgagccaggagaatcacttgaatccgggaggcggaggttgcattgagccaagatcgtgccattgcactccagcctgggtgacaagagcaagactttgtctaaaaaaaaaaaaacagatcacttgggccctaaccccagagtttctgaatccattaaactttgcttctctaacag

SEQ ID NO: 920551 - DNA, 634 bp, Homo sapiens
gaaggattggataaggtcactgattttttttttaattgagatgaattcacgtactatgaaattcacccatttaaagtatacaatttatagttctttagtatgttttcaaggttctgcagctatcattactatccaattctaatacatttctatcaactctaaaagaaaccctgtatccattactagtgactctgaattccccattccccctgacccgtgccaaccaccaatctactttctgtgtctatgcatttgcctcttctagacatttcatataaatggaataacgacgtgtggtctatcgggtgtggcttcttccagattgattcatattatagcattgatcactggtttttaatcttttatttgaaaagtaaaatgycctgaaaagaaattgtggttggaaccttgataggtaactccctgaccacctgagggccctcccagcctggcggcagcctcagaaacacatctgcaggactcgtgggcttcacagaacagagtttgactggctctgagctcaatcatttctcaagtgcctttaggttcaaagaccttgtttctctgaggttttcttcaaaaatacaaatcaccctgccacacttacttaaacttgaaatagtttccaacaccc

SEQ ID NO: 920552 - DNA, 602 bp, Homo sapiens
tggtgtctgttgattctcttttcccttaggagtgggtactattttcccgactctttatatgtcacataattttggattataagctggacattgtgagtgctttgttgggttcttgttttaaaaggcaatgaatttagccagacccaactacatcctgcctgtctgtgatgctgatggcagatctcagttcagttctttaaacattagctgcaaacttctttcagttttctccagacatgcatggttcagtggtctaccagagacttgaactgagtctgtatacaagaatttagtgttttcccccaactctgactctcctcttttgccttctcccctactgttagtagccctggcatccttctccgggtttcttcccccagaaagatgatctttctgttaatattttactttatctstactgccaccaccatgactgtgctgctctcagggcaaatctgccagcaaaaagaaaaataataaaacacggagaatatagagaactgcttgccacatgcttcaagtttcacctcatctccaaaacttgcctgtctttgttcacttctctagagatctcattagttgtttctaatctgttattcaga

SEQ ID NO: 920553 - DNA, 751 bp, Homo sapiens
gcctcccacacatatgaacaaccatctaccccatgtgtgcagtgctcttgtgaagaacgaaacacaaatttgttttaaaatgtaagataattcatagtcatgatcgtaactaacatttatggagcacttgctctgcgcaaggtaccacaccaaatacttagcatggattagctcatgtaatcctcactagagctctgtcaggtaagtggtattttccccattttacagatgattaaactgaggcttaaagaggctgaccgagttgcccaagttcccaaggctagaggaagagccagggtttgaagacacttctgtctgacccagtctgggctcctatcctcactcaccatgagcaactctcttaatcacaactgctattgtgtcagatacacttgaagttcaaagtcaaaaatgttttcattgaaaaaggggtcttcacacttgaattggctgggacctaccgggaagcgttccttcagtgcgtgggcacttctggtatttctggaactctatcttctctctgcccctgcctgaggcactaagttggggataagcaggatatgattttctgccctaagagascacagaatagctgtaacgatttcaaggactgtgtttgtttttgcaccttgtgctcaggatctcactttgagctgtgcagagaaggccctcacaccctgctgtccttgagggttggatcctcattctcccagatgctccttggtttggaagtgaggtggggacccccatg

SEQ ID NO: 920554 - DNA, 457 bp, Homo sapiens
atattttagcaaagagactggcagcaatttgcccctgccctagagatttgtggaactttgaacttgagagagatgatttagggtatctggtagaagaaatttccaagcagcaaagcatttaagaggtgacttgtgtgctgttataagcattcagttttaaaaggggaaaggggcataaaagtttggaaaatttgcagcctgacaatgcaatagaaaagaaaatcccattttctgaggagaaattcaagctggctgcagaaatttayataagtaactaggaacctaatgttaattcccaagaccatggggaaaatgtcttccgggcatgttagagacctttgaagcagcccctcccatcacaggaccagaggtttaggaggaaaaaaatggtttcatgggccagggccggggtccctctgctgtgtgcagtctatggacttggtgccctgcattccag

SEQ ID NO: 920555 - DNA, 594 bp, Homo sapiens
catttaagaggtgacttgtgtgctgttataagcattcagttttaaaaggggaaaggggcataaaagtttggaaaatttgcagcctgacaatgcaatagaaaagaaaatcccattttctgaggagaaattcaagctggctgcagaaatttacataagtaactaggaacctaatgttaattcccaagaccatggggaaaatgtcttccgggcatgttagagacctttgaagcagcccctcccatcacaggaccagaggtttaggrggaaaaaaatggtttcatgggccagggccggggtccctctgctgtgtgcagtctatggacttggtgccctgcattccagccactccagctgtgactaaaaagagccaaggtacagcccaagctgttgcttcagaggatgtaaaccccaagccttggcagcttccatgtggtgttgagcctgcaagttcacagaagtcgaggattgaggtttgggaacctctgtctagatttcagaaaatgtatggaaatgcctgaatgtccaggcagaagtttgctgcaggggtggggtcctcatggagaacctctgctagggcagtgaagaagggaaatg

SEQ ID NO: 920556 - DNA, 562 bp, Homo sapiens
ggaactagagaaaggcatttatttttctgacgctcaatttcctaaaagttgagtggctggattgggtaatctttaaaacacttccagaattaacgccctgtgcttctaactaacagtgtctatgagcatcatttttctcatttgtcagaaagaagtaaccaaatctcccttacccacctcagagagctgtgatgaataccaaatacgataatgcatgtaaaagtgatttattaaatcaasgtatgctatatgatcaagagattaaaatatttagaaatacagggggaaagttacagtcatgacgaagaaatatagcgagactgagattcaaataatatccagagaacacctcttccagtcactagctagagacctcgggcaggttagctgaccttgtgtgcctcagtttccttatctgtaaaatgaggattagaaagtggactacttcaaaagttgttgtgagaattaagtgagttggtttatgaaaagtatcttttaaaagcccttggcgtaacgcgtgtgctaagaacactattattgttattactacactgaaaacaca

SEQ ID NO: 920557 - DNA, 709 bp, Homo sapiens
gatatgggtgccctttatttctttctcttatctgattgctctggctagaacttccagtattatgttaaatagaagtggtaaaagtaggcattcctgtcttgttccacttcccagagagaatgctttcagcttttccctgttcaatataatgttggctgtgggtttgttgtaaatggttttttttttttgagacagagtttcactcttgtcatccaggttggagtgcagtggcgtaatcttggctcactgcaacctccacctcctggattcaagctattctcctgcctcagcagcccgagtagctgggattacaggcccacattaccargcccagctaattttttgtatttttagtagagacggggtttcgccatgttaagcaggctggtctcgaactcctgacctcaggtgattcgcccacctcggccttccaaagtgctgggattacaggtgtgagccaccgcgcccggcccataaatggcttttattactttaaggtatgcctttctatgctgattttgctgaggattttaaacataaagcgatgatggattttgtcaagtgctttttctgcatctattgagatgattatgtaatttttgtttttaattgtttatttggtgtatcacattgattgacttatgtatgttaaaccacccctgcatcactggtatgaaacccacttgatcatggcggattatctctttga

SEQ ID NO: 920558 - DNA, 627 bp, Homo sapiens
gagtagctgggattacaggcccacattaccaggcccagctaattttttgtatttttagtagagacggggtttcgccatgttaagcaggctggtctcgaactcctgacctcaggtgattcgcccacctcggccttccaaagtgctgggattacaggtgtgagccacygcgcccggcccataaatggcttttattactttaaggtatgcctttctatgctgattttgctgaggattttaaacataaagcgatgatggattttgtcaagtgctttttctgcatctattgagatgattatgtaatttttgtttttaattgtttatttggtgtatcacattgattgacttatgtatgttaaaccacccctgcatcactggtatgaaacccacttgatcatggcggattatctctttgatatcctgttggactttgattgctggtattttgttgaggatttttgcatctatgtttatcaggagtattggtctgtagtttcttttttttgttgtttttccctggttttgatattcgggtgatattgccttatagaatgatttaggaggactacctctttctctatcttttgaaatagtgtaagattggtaccaatccctttttgaatgtctgat

SEQ ID NO: 920559 - DNA, 627 bp, Homo sapiens
gagtagctgggattacaggcccacattaccaggcccagctaattttttgtatttttagtagagacggggtttcgccatgttaagcaggctggtctcgaactcctgacctcaggtgattcgcccacctcggccttccaaagtgctgggattacaggtgtgagccaccgcgcccggcccataaatggcttttattactttaaggtatgcctttctatgctgattttgctgaggattttaaacataaagcgatgatggattttgtcaagtgctttttctgcatctattgagatgattatgtaatttttgtttttaattgtttatttggtgtatcacattgattgacttatgtatgttaaaccacccctgcatcactggtatgaaacccacttgatcatggcggattatctctttgatatcctgttggactttgattgctgrtattttgttgaggatttttgcatctatgtttatcaggagtattggtctgtagtttcttttttttgttgtttttccctggttttgatattcgggtgatattgccttatagaatgatttaggaggactacctctttctctatcttttgaaatagtgtaagattggtaccaatccctttttgaatgtctgat

SEQ ID NO: 920560 - DNA, 579 bp, Homo sapiens
gtctggccccagactttttttgttggcaaattttttattatcatttcagtctccctgcttgttattggtctgttcatagattctatatcttcctgatttaatctaggagggttgtatatttccaggaatttattcatctcctctaagttttctagtttacaaagtaaagatgttcatagtagccttgaataatctttgtatttctgtgttatcagtcataatatctcttgcttagtttcraattgagtttattaggaccttctcttttttttttcttggttaatctcgctaatggtctatcaattttatttatcttttcaaagaaccagctttttgtttcatttatcttttgtatttttgttgttgttgttgtttcaacttcattttattctgctctgatctttgttatttcttttcttctgtggggtatgggtttggattgttcttgtttctccagttccatgaagtatgaccttagattgtctatttgtgctcttctagactttttggtgtaggcattcaatgagatgaagtttccttttagcaccatttttgctgtatctcagaggttttgacaga

SEQ ID NO: 920561 - DNA, 579 bp, Homo sapiens
gtctggccccagactttttttgttggcaaattttttattatcatttcagtctccctgcttgttattggtctgttcatagattctatatcttcctgatttaatctaggagggttgtatatttccaggaatttattcatctcctctaagttttctagtttacaaagtaaagatgttcatagtagccttgaataatctttgtatttctgtgttatcagtcataatatctcttgcttagtttcaaattgagtttattaggaccttctcttttttttttcttggttaatctcgctaatggtctatcaattttmtttatcttttcaaagaaccagctttttgtttcatttatcttttgtatttttgttgttgttgttgtttcaacttcattttattctgctctgatctttgttatttcttttcttctgtggggtatgggtttggattgttcttgtttctccagttccatgaagtatgaccttagattgtctatttgtgctcttctagactttttggtgtaggcattcaatgagatgaagtttccttttagcaccatttttgctgtatctcagaggttttgacaga

SEQ ID NO: 920562 - DNA, 579 bp, Homo sapiens
gtctggccccagactttttttgttggcaaattttttattatcatttcagtctccctgcttgttattggtctgttcatagattctatatcttcctgatttaatctaggagggttgtatatttccaggaatttattcatctcctctaagttttctagtttacaaagtaaagatgttcatagtagccttgaataatctttgtatttctgtgttatcagtcataatatctcttgcttagtttcaaattgagtttattaggaccttctcttttttttttcttggttaatctcgctaatggtctatcaattttatttatcttttcaaakaaccagctttttgtttcatttatcttttgtatttttgttgttgttgttgtttcaacttcattttattctgctctgatctttgttatttcttttcttctgtggggtatgggtttggattgttcttgtttctccagttccatgaagtatgaccttagattgtctatttgtgctcttctagactttttggtgtaggcattcaatgagatgaagtttccttttagcaccatttttgctgtatctcagaggttttgacaga

SEQ ID NO: 920563 - DNA, 598 bp, Homo sapiens
tggttccattctccgtgtcactttcaggtacaccagtcagatgtagatttggtcttttcacatagtccccatattttttggagggcttggttggtttcttttaattcttttttctctaaacttctcttcttgcttcatttcattcatttgatcttccatcactgatacccttcttgcagttgatcaaatcgtctactgagtcctgtgcatttgtcacgtagttatcctgccatggttttcagctccatcaggtcctttaaggacttctctgcattggttattctagttagccattcgcctaatcttttttcaaggtttttaacttctttgccatggtttcraacttcctcctttagctcagagtagtttgattgtctgaagccttcttctctcaacttgtcagtcattctccattcagctttgttccgttgctggtgaggagctgcattccttaggaggaggagaggcactctgccttttagaattttcagtttttctgctgtgttttttccccatctttgtggttttatctacctttggtctttgatgatggtgatgtacagatggggtttttggtgtggatgtcctttctgtttgt

SEQ ID NO: 920564 - DNA, 598 bp, Homo sapiens
tggttccattctccgtgtcactttcaggtacaccagtcagatgtagatttggtcttttcacatagtccccatattttttggagggcttggttggtttcttttaattcttttttctctaaacttctcttcttgcttcatttcattcatttgatcttccatcactgatacccttcttgcagttgatcaaatcgtctactgagtcctgtgcatttgtcacgtagttatcctgccatggttttcagctccatcaggtcctttaaggacttctctgcattggttattctagttagccattcgcctaatcttttttcaaggtttttaacttctttgccatggtttcaaacttcctcctttagctcagagtagtttgattgtctgaagccttcttctctcaacttgtcagtcattctccattcagctttgttccgttgctggtgaggagctgcattcyttaggaggaggagaggcactctgccttttagaattttcagtttttctgctgtgttttttccccatctttgtggttttatctacctttggtctttgatgatggtgatgtacagatggggtttttggtgtggatgtcctttctgtttgt

SEQ ID NO: 920565 - DNA, 507 bp, Homo sapiens
tgtcaaagggatacctgcaccctcatatttattacagcactattcacaatagccaagatacggaatcattctaatcaccaacagatgaatggataaagaaaacttgatatatacacacaatggaaaactattcagtcataaaaaataataaaatcctgtcatttgcagcaacatggatggaactgaagatcattatgttaagtaaaataagccaggtatagaaaggcagatattacatgctctcactcatatgtgggagctaaagaagttaatctcatggaggtagaaagcagagtgagagayaccagaggctggaaagggtgaggaacacggatgaagacagattggttaatgggtacaaacatacagttagatagaaggaataagttctagtgttggatagcacagtaaggtgattatgttaatagtaatttattatatatttcaaaacagctagaagagaagatttgaggccaggtgtggtggctcatgcctgtaatcccagct

SEQ ID NO: 920566 - DNA, 507 bp, Homo sapiens
tgtcaaagggatacctgcaccctcatatttattacagcactattcacaatagccaagatacggaatcattctaatcaccaacagatgaatggataaagaaaacttgatatatacacacaatggaaaactattcagtcataaaaaataataaaatcctgtcatttgcagcaacatggatggaactgaagatcattatgttaagtaaaataagccaggtatagaaaggcagatattacatgctctcactcatatgtgggagctaaagaagttaatctcatggaggtagaaagcagagtgagagacaccagaggctggaaagggtgaggaacacggatgaagacarattggttaatgggtacaaacatacagttagatagaaggaataagttctagtgttggatagcacagtaaggtgattatgttaatagtaatttattatatatttcaaaacagctagaagagaagatttgaggccaggtgtggtggctcatgcctgtaatcccagct

SEQ ID NO: 920567 - DNA, 491 bp, Homo sapiens
tcacccaggctggagtgcagtggcacaatctttgctcactgcaacctccacctcccaggttcaagcaattctcctgcctcagcctcccaagtagctgggattataggcatgcaccaccacacccagctaattttaggatttttagtagagacagggtttcaccatgttgcccggctggtctcgaactcctgatctcaagcgacccayccaccttggcctcccaaagtgctgggattacaggcatgagccactgcgcccggcctctttcccttttgttttctaacattcctgggccctataacacttttgtttcttctgagaaggggtctcactatgttgtccaagtgggtaccaaactcctgggctcaagagatcttcccacctcagcctcccaaagtattgggattacaggcgtgagccactgtgcctggccagtggagcctgccacatatggggaatgtaccctgctgtgctgcggggcgtattagact

SEQ ID NO: 920568 - DNA, 491 bp, Homo sapiens
tcacccaggctggagtgcagtggcacaatctttgctcactgcaacctccacctcccaggttcaagcaattctcctgcctcagcctcccaagtagctgggattataggcatgcaccaccacacccagctaattttaggatttttagtagagacagggtttcaccatgttgcccggctggtctcgaactcctgatctcaagcgacccacccaccttggcctcccaaagtgctgggattacaggcatgagccactgcgcccggcctctttcccttttgttttctaacattcctgggccctataacacttttgtttcttctgagaaggggtctcactatgttgtccaagtgggtaycaaactcctgggctcaagagatcttcccacctcagcctcccaaagtattgggattacaggcgtgagccactgtgcctggccagtggagcctgccacatatggggaatgtaccctgctgtgctgcggggcgtattagact

SEQ ID NO: 920569 - DNA, 597 bp, Homo sapiens
agggcctctggattctcggaaaagaaaaaccctcctcttggcgcacagctcctctcaggctcctcaaacttggcctcactgctaatgattcctcgcacccagatggtagccagtcttccaaaggactttcagagaaagagcactgtgggtggctggcaaygggccctctttgctgatggggacactgagacactgagactcattgagatgacaagactcgccgtctcctggcacagatctctttccctctgcctcaaagcccttccatccacccacctccctggggcactctaagccaccctcacagccctctgatgccagtcctgctcccaggtcatgccagccccatcttacccatctggtttttgagtttggacaagctcctctccagctcctctacccgacgcatatcttgctgcttctctttctttaatgtgcaaatctgcccaaagcacaaggggaaagggccttggagagaggggctggaggctggacaggctgccctctccctctctgcccccacctccacaaagcccagacccatgaccacctctggctctactattcccattttacagatgcccagaaagatccagt

SEQ ID NO: 920570 - DNA, 582 bp, Homo sapiens
tcagcactttggaaggctgtggggaggattgcttgagctggggaggtggaggttgcagtgagccaagatgttgacactacaccccagcctgggtgacagtgagaccttgtcttaaaaaaaaaggaagctagcttgctaatagtgcattatctgatgttgactctgcccttgcattattgtaataaaacctaattcaccatgatgcattatttgtgtgtgtgtacattgctgtattcaacttggtattattttacttaaagttttggaattcatgttcctaaaagttaataatagttaacatctatttggttttctatgttctgggtcttgttaagttactttccttgaattatttcatttcatcctagaaggcttattgtaaaggttatttccccctttatcaatgaggaagtgaaggcccagtgaaggcaagycattttccctaaggtcacagggaggataagtagtggcagcaggaatacaaatccggatttcctggctccagaggccaagcactaagcactgccctgtgccctctccctgtgacaaagactcgtcattcagactgttccatcgtgaact

SEQ ID NO: 920571 - DNA, 571 bp, Homo sapiens
ctgagggagttatgtggaaggaagatgaccccaggtggccaggagcaggtgaggaccagtgacagcccttcctaagttctgtgcccattcttgcagttgaaggagtcttttcaacaagtccaattagaaagagatgagtatkctgaacatctaaaaggagagagggcccggtggcagcagaggatgagaaaaatgtcgcaggaggtgagatctgacccttcagcccccccacattagataggtcactggatctttctggtcatctgtaaaatgggaatagtagagccagaggtggtcatgggtctgggctttgtggaggtgggggcagagagggagagggcagcctgtccagcctccagcccctctctccaaggccctttccccttgtgctttgggcagatttgcacattaaagaaagagaagcagcaagatatgcgtcgggtagagaagctggagaggagcttgtccaaactcaaaaaccagatgggtaagatggggctggcatgacctgggagcaggactggcatcagagggctgtgagggtggcttagagtgccccagggaggtgggt

SEQ ID NO: 920572 - DNA, 622 bp, Homo sapiens
gcggccacgtactgctgcaggtgaccccggtagtggtcttgctgctgctgcagactctgagcctcttggctcttcagctccacctgcaggataggcgtcagggtaggtagtcgctggcttccagattctgggcccataaacagggtggcaagggcactgcggggctctgtcgcctgctcaggcccctggccctggccccttcctccaggcctaagtgactgcctcccttgcctagaggcccatgcctccctccccagcctcaaatctcacacccttcttcccaccayttaaactgtaggccgcagactggtggaaaagcagagggagccaaccaccatctgctaagttgtggtgaggtcgttctgtatgatctccagggtttgcacacacctctgcctgctccccccaagagctccgccttctgccccagcttccccagcctctcctccagctcctgcagcctcacctcctgttcctgcatcttctcctcctgctgccacagcctcacttcctgctcccgcatcttctcctcctgcctctgcatcttctcctcctgttcctgcatcttctcctcctgttcccacatcttctcctcctgcctccacatcttctcctcctgctc

SEQ ID NO: 920573 - DNA, 764 bp, Homo sapiens
tgccgctgcctgcgcccaccctcacacccacccccacccccacccccacagagatgttgcacaccctaccttcatctcctccctgagctccagcctgatggtgtcctcctcccagtgccgcatctttggcacagccccctggttctgataaaaggtgatgggttttcctgcgggaggacagggctcagacgctggggcccctccgacggccctgtagctccccctgccgtgccctggcctcccactcactgatggcgtctgtctcgccagtggtggatgaagcagagtycttttttcaccagctcactcaggtctgccttctccttcaggtggtccataaagctgctctggagacaaaatattgcagtcacatctcggcagcgacctgccctcaggtggcattttcaagtcatggagaaggcggaggtgagtcctggcatgggccagcttctccgtgacttcctgcagggcccagtgggtctccccactcacagactcgcccccaggccctggggctccagggcctctggctgcctctggctccttctgggccgaggccaccgggtgagccaggcgctggcagcacaccctctgctctttcacctgctcttgtaactgtgcctgcttctcctgggcactagctccagcggacttgaaaaatgccacctgagggcaagatgtgagcattcttctaggggcatacacagaagaaatggggcagagaggtggagcgcagccccttcccttggggcctcagagagtgc

SEQ ID NO: 920574 - DNA, 517 bp, Homo sapiens
tcctgctaattttttttttttttttgtaattttagtagagatgaggttttaccacattggccaggctgatcccaaactcccgacctcaagtgattctcctgcctcagcctcccaaagtgctgggattataggcatgagccactgcacctggcataaggagcctgttataccactgtctcttcccctgtgattgggggctccatgcctctagctrggatgatgatgtccagacctgagaggagcccagggctacccacctttaaaagtcagaggcaggaagcaagaaacaggactgccctggggggtgctgtggtcaccagcccccaggctggaagctgcctctgacctggcacctcccctcccaagaggctgctgcccgcctcccagcccttcttggatggggtggaggtttccgtctccttcacctcgccaagcttctcctgtagctcctttacttgctgctccaactgcagtgcgttcttgttctcattgttctggacagagagaagcaatcagc

SEQ ID NO: 920575 - DNA, 517 bp, Homo sapiens
tcctgctaattttttttttttttttgtaattttagtagagatgaggttttaccacattggccaggctgatcccaaactcccgacctcaagtgattctcctgcctcagcctcccaaagtgctgggattataggcatgagccactgcacctggcataaggagcctgttataccactgtctcttcccctgtgattgggggctccatgcctctagctaggatgatgatgtccagacctgagaggagcccagggctacccacctttaaaagtcagaggcaggaagcragaaacaggactgccctggggggtgctgtggtcaccagcccccaggctggaagctgcctctgacctggcacctcccctcccaagaggctgctgcccgcctcccagcccttcttggatggggtggaggtttccgtctccttcacctcgccaagcttctcctgtagctcctttacttgctgctccaactgcagtgcgttcttgttctcattgttctggacagagagaagcaatcagc

SEQ ID NO: 920576 - DNA, 603 bp, Homo sapiens
ttgtaatcccaccactgagaatcactattaacatataaaaaatgtatgtgtataaatgtaatatacatatacacatgtatatatacatgactatacacatgtattaagtagcatgtgtgtatatacatgtaagtagtatatgcaygtatatatacctgtacagacatacgtatatatacacacgcacatacacatactacttacatagctacacttatcaatggagttctaaaagaacattttccatgggatggaaataaatttttaggccaggtgcggtggctcacgcctgtaatcccagcactttgggaggccaagacaggcggcacacctgaggtcaggagttcaagaccagcctggccaacatggcaaaaccccatctctactaaaaatacaaaactagttgggcacagtggcgtgtgcctgtaatcccagctactcaggaggctgaggcaggagaacagcatgaacctgggaggcagaagttgcagtgagccgagatcgtgccactgcactccagcctgggcaacagagcaagactccatctccaaaaataaaaaaaaatttaaaaagataaattttaatggcagcatagtattctct

SEQ ID NO: 920577 - DNA, 584 bp, Homo sapiens
aagaatggcatgcttggctgggcgcagtggctcacacctgtaatcccagtgtgtccggaattggtgggttctcggtctcactgacttcaagaatgaagccgcggaccctcgtggtgagtgtcacagctcttaaggtggcgtgtctggagtttgtttgttcttcctggtggctcgtggtctcgctggcttcaggactgaagctgcagacttttgtggtgagtgttacagctcataaaagcagtgtggacccaaagagtgagcagcagcaagatttattgcaaagagcaaaagaacaaagcttccacagtgtggaaggggacccgagcgggttgccactgctggctcgggcagcctgcttttattctcttatctggccccacccacatcccgctgattggtagagccgagtggtctgtgcrgacagggcgctgattggtgcgtttacaatccctgagctagacataaaggttctccacatccccatcagattagttagatacagagtatggacacaaaggttctccaaggccccaccagagcagctagatacagagtgtcaattggtgcattcacaaaccctgagc

SEQ ID NO: 920578 - DNA, 472 bp, Homo sapiens
aggtctcataatcgtagcagagggtgaaaggcacttttacatggtggcagcaagagagaatgaggaagaagcaaaaggaaacccctgataaaccaattatatcatctcatgagacttttcactgtcacaagaatagcatgggaaagaccagcccccatgattcaattacctccccctgggtgactcccacaacacatgggaattctgggagatacaattcaagttgagatttgaatgggacacagccaaaccatatcattccccctggccctccaaacctcatgtcctcacatttcaaaaccartcctgccctcccaacagtcccccaaactcttaactcatttcagcattaaccaaaaggtccacaagtcccaagtctcatctgagataaggcaagtcccttccacctgtgagcctgtaaaatcaaaagcaagctagttacttcctagatacaatgagggtacagataatg

SEQ ID NO: 920579 - DNA, 501 bp, Homo sapiens
ctgaacagtgattgccttatgcaattctcatagtaattctgtagggagatagtatcactgttcccatttttcagataaggcaatgaagctgcaataagattaaaactgttgctcaatgccacatagtggtggagccaagtttctttgtatttgatttaaaactgtcaaacattgttctctgctgtttcctgtaacatcttgtcttcccacttaggccattaagaacatcttaggcttcatttgaaccttgcaatgtgcgtggcacaggactggactgatgctcagttgctaattggcacatcagttttgataaattttaacaaaatatttaaactttctttcttttttwaaaaattatactttaagttttaggatacatgtgcacaacgtgcaggttcgttacatatgtatacatgtgccatgttggtgtgctgcaccccttaactcatcatttaacattaggtatatctcctaatgctgtccctaacccctccccctacc

SEQ ID NO: 920580 - DNA, 593 bp, Homo sapiens
tcctttaaaatgtaaagaatctaaggaaaggtcaaagagaagaatatacgaagaaattaggaaaatcagatgaatgatggaaaatgtagcatgggatgagataagtgaataaaataataaaaggattcatttctaattcatagatattttactttattcaacatttagtgtctatgatttagtggtggtttggcacagggaacaggagaacaaaaaataatgaaaatatgatgccagtaataccatccatcaatctgaaatatagagtactggcaggtctgcattcaagatcaaaagtcttrgtctggaacagcccagtatgctcgaccaaataccagtatttcagagttctttcatctaaattagaaaaagaaatgtcatctgtctataacatgcaccctatggtgatctgcttcccaaagaaaaatgaagcagtccaaagttaaagggacaaacacgtcattttggaggaatgctgttgcttattttcatttcccaaaagaagtaatggaatgaagggtgagtgataataattttcattgaaaagtaaaacttgctttgttgttcacattctttgtggttgttgggataaa

SEQ ID NO: 920581 - DNA, 606 bp, Homo sapiens
tggatgagcccagtgtgaaaagaggtgctcaactattcgtctctctcactcaggaatctagtttgagaagtgagatgacattgcaagtagaagctgaaaaaacttgaagaagccttgaggtataggtaggctacagtgagattatgagaggtatggaaagcttaaatatgcttgaggaatctaaaactgtaagcagaagctatgaagaaaaggaaaaaatggacagagtagaacaaaaggctaatccaggaaaacagggaaaatggtagactctctatttcagaaacagggaaaagggtggactgcctatttcagagagaaatagacaccatgtggaagagactttaggtcccaggaaattgaaaatctaggtccctaaagtatatccattaacattcaagaccctcagagaaatgcgtctcctggcttgttgcaaagccatattttcagccccracctgcacggtatttctatgatttcaaagacaacatgccctttaaaaataacatagagtattgctcagtcaaatgttttcacagatgtttaagtctttagagaacacaaaacaaagaaaattagtgcaacggagaaaaggataaatcaaat

SEQ ID NO: 920582 - DNA, 660 bp, Homo sapiens
ggcatggtggctcaagcctgtaatcccagcactttgggaggccgaggcagatggatcattcaggtcaggagttcaagaccagcctggccaatatggtgaaaccccatctctattaaaaatacaaaaattagccaggcatggtggcaggcacctgtaatcccagctacttgggaggctgaggcagaagaattgtgtgaacctgggagrcagaggtttcagtgagcccagatcccaccactgcactccagtctgggcaagagtgagactccatctccaaaaaaaaaaaaaagcctcctccccttgcccacagggcgtagctctcctattgcagcctccttggcagaataaatatatcccaaaacaacatgataccccatcattcttctacacagcatgacacagaataccagggcctatatctgctcaccaaggtggaaatatggggaagcaggcataacacattctctttgcaagaataatccctggatttagttctccaatgctttactgaagcttccatgctctgagttagaactcgccctgggggaatgctaccacagtacctccagcaaccttcccaggccttcctggagcagaccggtgagtctttcttctcaaaggccacatgtacaatctctcatctgccctgctctgcaatgt

SEQ ID NO: 920583 - DNA, 574 bp, Homo sapiens
tcgtgcagccaagtacacacaataggaggcagtttaacaagtagggaagacatatacctgctccttccgagtttcacctggaggaagagtctacaaagaaagggaagaaggttgcatctggtaacaggtgggggcctgtgcggcttgatagcttaacatgtatcaggcgatactcaaagagctttacaggcattcatttatttatgctttacaaccactccttgaggtaggtactactcgtatccctgtttttgaagawgaggaaactgggaaacagagaggcaagctgaaagagactgatcctgtttgatatggtttggctctgtgtccccactcgaatctcattttcgattgtaatctccagcttgtcaggggagaggcctagtgggaggtgattgaatcatgggggcagacttacctcttgctgttctcgtgacagtgagttctcacgagatctggctgtttgaaagtgtgtggcacttctccttcatgctctccctgtctcctgctccaccgtggtaaagacgtgcttgtttccttttcgcctctgccatgattctgagtttctttaggc

SEQ ID NO: 920584 - DNA, 655 bp, Homo sapiens
ctggaaacaggagtctgggctttctgtcctgcctcctgtccctcttccagcctgctatgtctcaggcagtcgccctgggagaggtggccagacatcaagaacttggtaatagaaatgccctgcctccttgggtctccttccgctccccgctgcgttccctctctgcagtcacacattctgctctccagggacatttgcacctctcctggggccaggccacaccgcttgttctcatggttttaaccaaaatatcattaccatggtcttttacatggaagtrcttgtctttggggaagtctgcatcctgcttatagcccaaggtggcatgtgtcagcttcaggcatgcttcctctgcttggaccagtgtctggtttttgacaggtacactccatagtttcctgtccagggtttgtcagttgccttgcatccttatttgtgatgtgctttttctcttctcctttctgaaatttttcagaagcacttgggaaaggtcaagggcaacacttacagtcataaatagaaagtttctccatagactcttttttctcttttgttcaatgggaactatatcatatacacaaagtactgcatataaaatacatgtaaggtttaaagaatgaaactaataaaacaatgtaatacaataacctgtatc

SEQ ID NO: 920585 - DNA, 788 bp, Homo sapiens
catttccgcgtccctgcctgtggccaccagacctccaccctgcgtccaggaataggtggcaatgtgggggtgtacctattgtctcttcgttgtcaatttccatcctcctgggtggatccagacttgtgtgtaagtttcggactaaagaaaatgttagggtcttcaggggacgtcctgagcatattcctcacccccacttcctaggttgcaaaatgagagtgtggagctgttcatttggtaagtcagtctattaacctaaccgtgcacaccctgaagtgccacctgctgtcactcttatgcctaaatctcactcaaaacttcttctgtggtttttcccattccttggatgaagggaacctattatattccttataataactcagcagcatctgaaaacctggaggtggatttgtgccctcctcctcctaggtcagttatggaaacgtcacagcaatctccacacctccctagagaggtctccagtcctccgattggagacattcttcatgccattctttccttttccacaagccaggtccccactcatgagtgtatragagtgtataatcctatatagttttagagtggctaacaggttgtttgtgttttgttccccccgaccctgccccctaggagcatgtggtggaaaagccatgaaagcgtttttcaggtctaaactcatgatctgtattgagattcctcctgtcttccagttccaggagacgagggtggcagaacatctgacatagatcaggttcacgtatgtcttctctgctacgacaatcatg

SEQ ID NO: 920586 - DNA, 755 bp, Homo sapiens
aaatatatttttatatttaatataaaatattttatatttatatgatatttatctatttaatatgaaatatagctatagactttataatataaaatataaagtatatatataaatatatatatacttaaagcacctgatatgcttctatgccctaaaaatgccatacttttacaaataccagtcatgcacctcataacaatatttcagtcaacagtgcaggtctcataagatcataatgaagataaaacattcctatcacctagtgacaatgaaggattcatagtgttgtagtgcaacatgcatcactcatgtgtgcatgatgatgtagtgtgaacaaagctatatacagttttgtgcagaacagaatacgatagcaatagtaaatggttatgttgttggtttatcagttgactacactgtacttttaatcattattttagagtgtaatcctcatacttattttaaaaaagagttcactgtaaaacagtctcaggtccttcaggaggaattccagaagaaggcattgttattacaggagatgatggctccgtgtgtgttgttgcycctgaagaccttccagtgggtcaagatatggaggtggaagatggtgatgttgatgagcctgaccctgtgtaggcttaggcaaatgtatgtgtctgatttttactttctaatgaaaaattttaaaagtaaaaaattaagaaaacatttttaaaatagaaaaaagcttataaaataaggatataaagaaagaa

SEQ ID NO: 920587 - DNA, 695 bp, Homo sapiens
ttcatgacaaatgtacttattttttgtcatatagcctcttttttaattaagagaaccatatcctatttctaacttattactattaatgacagcacaggcatcaaatttcaaggtgacttttttgggcacccctttttcttctgttttggctaacactttaatcatgtcatttatgagcccccacgagtcctcagtccttaatcttatttcaaaaactgtggtcatgggaagctcagatggktcataacacacataacacaggtcatttcctgggttacataccttgtatagaataacattatacaaacaagttattttcagagttccagtacacttataataaccataaaataataggaccatagcaactttttgtcctacctcagtgacttggtgtatacactgggaacagtcctcagtctgaggaaggtcagttgaagtccttactgtacaagttcaaattttaaggaaaatgagtcccatgatgagttttcttatgctttggccatgtgtggaccagtcagcttctggatgtgactggagcagggcttgttgtcctcttcagagtcactttgcaggggttggtgaaactgctactgtccacatacagctcacagtctactgatgttcaaggatggtcttggaggttgggcctgctagaataaactagtccaatacctctacatatttatgtt

SEQ ID NO: 920588 - DNA, 630 bp, Homo sapiens
acctgaaaggcttccagttttgagtggggtccaggacaggagaaggctctgcaacaggtccaaactgctatgcaagttgctctgtcacttgggccatagaacagagcagatctaattgtgcttgaggtgtcagcagcagagagggatgctgttaggagcctttggaagtcccccatagatgaatcacagcagaggcctctaggattttggaggaaggccctgccatcttctgcagataactactttcctttttagaaagagctcttgccctgttactggactttggtagaaactaaacggttggctatgggtcatcaagtcaccatgcgacctgaactacctatcatgaattgagtgctttctgacttgtctagccaaaagtggggcatgcacagcagcattccatcatcaaatggaagtggcatatatgtgatcaggcttgagcaactcctgagggcacaagtaagttatatgaggaagtggcwcaaatgctcatgatccccattcctgccacactgccttctctcccccagcctgcactgatggtctcatggggagttccccaggatcaattaacagaggaagagaagacaagggccctgtttacagatggctctgcacgatatgcag

SEQ ID NO: 920589 - DNA, 492 bp, Homo sapiens
cagccccttcctaggacatccctgaaggacagcggtgaaggaaaatcgtcccagtgggcagaatgttgagcactgcacctcattgtgcactttgcttggaaggagaaatggccagatctgcaattatatactgattcatgggctatagccaatggtttggctgagtagtcagggacttggaagaagcatgataggaaaattggtgacaaataaattttgggaagaggtatgtgaatggacctctccgagtggtcaaaaactgtgaagatatttgtatttcatgtgagtgcttatcaaacggtgacctcagcagaggaggattttaataatcaagtaaacaggatgactcattctatggacaccagtcagcctctttctccagccacccctgtcattgcccaatgagtccatgaaygaagtggccatggtggcagggatggaggatatgcatgggctcagcaacatggacttccattcactgacctggctatg

SEQ ID NO: 920590 - DNA, 850 bp, Homo sapiens
acttcagctgagggcaatcagcgctcacgagggaggattcagtgggcttgaagagcacgccacggtcttcgttcaagtctgctgggccccggagcaaacaatggtcttgacaagtctgtccagcgtgttcggtgtcagccttccttcctgagatatgggttcagttaacgaaaactcagggaagggactagaggtcattcctttcttctttggtgggtcagacttgaaggagataaggacacttcaggaactcygggagagatggtgggggtgggggagccgagaggccttgaagttccttttcagttcagcttgaacaaagcaccatattttggggtattggcttctgagccccaacatctgctctaacaaaagtaccctacactgggtggcttaagcaacagaaatcggtctcaattctggagactggaagtctgagatgaaggtatgggcagggcaggtttctcctgaggctgagcgggaagggcgtgctccaggccttgacccgcgtggctgctggccgtccttggtgtcccttgtcttgtacaagcatcacccgatctctgccctcatcttcttatgatgttctccctgtgtatgtgtgtgtgtccagattgtcccttctcataaggacacagttgtgtgtaatcaggggtccatcctatgcccatgtgaccttatctaaagataagtaattcaatctgcaatgaccctatctccatagaaggtcacattctgaggtcttgggggttaggatgtcaacatataaattttggtgggaaggtcagggggacagtagagaaaaggaggcagcagggcacaggccagagccttgggttgaggggtcccg

SEQ ID NO: 920591 - DNA, 565 bp, Homo sapiens
tcccacaagactgtttccacttcatatgtcaatcacaagctgcggtggtggggcagagtaggggtggtcaccagttacccagacttctgtctgatttgactacaaattggggtttgccattatccccttcccaagtttgataatatgctagaattactcatgaaactcagggaaatgcttacttacatttactagtttattatagaggatacgataaaggataaagatggacaggcagatgatgaagtgcacagggctagatccaaaagggtcctgggtatargagcttctgttaccatagagttggggtatgccaccctcctggcataaagatgtgcttaacaacctgaaacctctctgcacttcagggatttttatacagacttcaaaacattcaaaacataggcatgatttgttattcattcaatctctagcccctttctcatccccagaggatgagaggtgaagattaaacttccaagcttcaaatcattgcttggtcattctggtaaccagccaaaatccaggagcccaccaagagttgcctcatcaaaacaatagatat

SEQ ID NO: 920592 - DNA, 565 bp, Homo sapiens
tcccacaagactgtttccacttcatatgtcaatcacaagctgcggtggtggggcagagtaggggtggtcaccagttacccagacttctgtctgatttgactacaaattggggtttgccattatccccttcccaagtttgataatatgctagaattactcatgaaactcagggaaatgcttacttacatttactagtttattatagaggatacgataaaggataaagatggacaggcagatgatgaagtgcacagggctagatccaaaagggtcctgggtataggagcttctgttaccatagagttggggtatgccaccctcctggcataaagatgtgcttaacaayctgaaacctctctgcacttcagggatttttatacagacttcaaaacattcaaaacataggcatgatttgttattcattcaatctctagcccctttctcatccccagaggatgagaggtgaagattaaacttccaagcttcaaatcattgcttggtcattctggtaaccagccaaaatccaggagcccaccaagagttgcctcatcaaaacaatagatat

SEQ ID NO: 920593 - DNA, 565 bp, Homo sapiens
tcccacaagactgtttccacttcatatgtcaatcacaagctgcggtggtggggcagagtaggggtggtcaccagttacccagacttctgtctgatttgactacaaattggggtttgccattatccccttcccaagtttgataatatgctagaattactcatgaaactcagggaaatgcttacttacatttactagtttattatagaggatacgataaaggataaagatggacaggcagatgatgaagtgcacagggctagatccaaaagggtcctgggtataggagcttctgttaccatagagttggggtatgccaccctcctggcataaagatgtgcttaacaacctgaaacctctctgcacttcagggatttttatacagacttcaaaacattcaaaacatargcatgatttgttattcattcaatctctagcccctttctcatccccagaggatgagaggtgaagattaaacttccaagcttcaaatcattgcttggtcattctggtaaccagccaaaatccaggagcccaccaagagttgcctcatcaaaacaatagatat

SEQ ID NO: 920594 - DNA, 622 bp, Homo sapiens
caagaaatatggtactatgtgaaaagaccaaatgtaggtctgattggtgtacctgaaagtgacggggagaatggaaccaagttggaaatcactctgcagtatattatccaggagaactttcccaatctagcaatgcaggccaacactcaaattcaggaaatgcagagaatgccacaaaaataatcctcgagaagagcaactccaagacacataattgtcagattcaccaaagttgaaatgaaggaaaaaatgttaagggcagccagagggaaaggtcgggttaaccacaaagggaaaccaatcacactaacagcagacatctcagcagaaactctacaagccagaagagagtgggggccaatattcaacattcttaaagaaaaaaamtttcaacccagaatttcatatccagtcaaacaagcttcatcagtgaaggagaaataaaatactttacagacaagcaaatgttgagagattttgtcaccaccaggcctgccctaaaagagctcctgaaggaagtactaaacgtggaaaggaaaaattggtaccagccactgcaaaaacatgccaaattgcaaagaccattaaggctaggaagaaactgcatcaactaacgagcaaa

SEQ ID NO: 920595 - DNA, 425 bp, Homo sapiens
aatcctatgttacggacaaacattagacccccgtcgcagtcttctgcaaatctatatgagggagaaacactcagaacccagcagtagtgttctggaatcctatgtgactgacatacatgtagacccagcagtagygttctggaatcctatgggaaggaaaaacattcagaccccagcatcagtgttctgcaatcctatgggagggacaatcattcagaccctcgtagcagtgtgcaggaattctgtgtgagaatcaaaccttcagaccctcatagcagtgttctggaatcgtatgtgaggaacaaacattcagaccctcataggagtgttctggaatcctgtgtgaggtacaatcattcagaccctcgtcacagtgttctgtaattctatgtgagggagaaacactcagaacccaggggcagggt

SEQ ID NO: 920596 - DNA, 575 bp, Homo sapiens
accagaagatgttttatttaatcctacttgtaaccatgaacaaaaatcaaaaactctagtaggtatacaaaaaataaatagaaaagaatcaaagcctatgaatacaaaaattatcaaattatgaaagaaaatgtgacgagaaacagaacagaatatattaatgatgaaacagtccaagaagtttaataacatggcagtagtaagttcttacctattaataattactttatgtgtaagttacttaatttttttttaatccaaagacagagtgactgaattgacataaataagatccaactrtatgctttttaaaaggaactcactatgtttttaagagcacacataggttgaaagtaaagagatagaaaaggatatttttatgcaagtggttaaaaagaagagagtagggttgtctatatttttataatacaaaatagacattaggcaaaaacggaaacatgaaagaaagaatgtcataatataatgataaaggggtcaattcatgaaaactatataaaattatatatgcacccaacattgtagcacctacatatatagcaaatattaacagaact

SEQ ID NO: 920597 - DNA, 592 bp, Homo sapiens
tacaaatgatgctggaatgactagatagccacatgtaaagaacaaaattctacttctgctcacatgataccaaaccaagccccatcataatgaatcaaggacctaaatataagaactaaaactacaaaaatctcagaagaaagcatggaagtaaatatttgtgactttaaattagacaatggtttcttagataaaatactatatagaagacatatagatgaattagacttcataacattaaattttttgtgcttcaaaaaacacctatcaagaaactctaaagataactcacaaaatcagagggcatattttcaaattatatatctcacaagtgacttgtgttgcagctatataaattattyttgcaatccaacaacaaaaagacacataataaaatgagtaaattatttaataggcatttcttcaaacaagatatgcaaatggacattaagcacatgaaacaatgctcaacaccattagtcattaggaaaatgcaactcaaaatccaaataagaatctacttcacatgcagtaaaattgttgtaatgaaaaagacagtaacgattgttggcaagaatgtggagaaactgga

SEQ ID NO: 920598 - DNA, 609 bp, Homo sapiens; identical to SEQ ID NO: 919384

SEQ ID NO: 920599 - DNA, 596 bp, Homo sapiens; identical to SEQ ID NO: 919387

SEQ ID NO: 920600 - DNA, 669 bp, Homo sapiens
ataaacatgttttccctgacactagatccagaaaagaacctgtagcatagatccttctataaaagattgtgtgtgacattgcagaggacatgttcttatatttctacaagagacagaaatgttcttcaaatgagtggttttgttttttcttttctaatcaactctatatggctcatgaacacatttaaactgtaattcaataaacccaattttgtagaataaagcaaatacagcccagatacattgctttctaaatacccaatttattacatgaatcaaatgtgaagaatccaaagaaataaaggtggaagcatccattwaaagtctctaacaggccgggcacggtggctcacacctgtaatcccagcactttgggaggccgaggtgggcacatcacgaggtcaggagatcgagaccatcctggctaacacggtgaaaccccgtctctattaaaaatacaaaaaaaattagctgggcatggtggcaggcgcctgtagtcccagctacttgggaggctgaggcaggagaatggagtgaacctgggaggcggagcttgcagtgagccgagatcgcgccactgcactccagcctgggtgacagagtgagactccatctcaaaaaataaaaataaaataaaaagtctctaacagttcatttcttcagcatgtc

SEQ ID NO: 920601 - DNA, 669 bp, Homo sapiens
ataaacatgttttccctgacactagatccagaaaagaacctgtagcatagatccttctataaaagattgtgtgtgacattgcagaggacatgttcttatatttctacaagagacagaaatgttcttcaaatgagtggttttgttttttcttttctaatcaactctatatggctcatgaacacatttaaactgtaattcaataaacccaattttgtagaataaagcaaatacagcccagatacattgctttctaaatacccaatttattacatgaatcaaatgtgaagaatccaaagaaataaaggtggaagcatccatttaaagtctctaacaggccgggcacggtggctcacacctgtaatcccagcactttgggaggccgaggtgggcacatcacgaggtcaggagatcgasaccatcctggctaacacggtgaaaccccgtctctattaaaaatacaaaaaaaattagctgggcatggtggcaggcgcctgtagtcccagctacttgggaggctgaggcaggagaatggagtgaacctgggaggcggagcttgcagtgagccgagatcgcgccactgcactccagcctgggtgacagagtgagactccatctcaaaaaataaaaataaaataaaaagtctctaacagttcatttcttcagcatgtc

SEQ ID NO: 920602 - DNA, 583 bp, Homo sapiens
actctccaataaacccacgttggataaatgcacaaatagagaaacgaatgaacggttgcctgggaagagcacgtagccacctgcgcatggacacactgatgcgtggctttcctccctccctgtctcacttccgctctccctcccaggcttcctggggtcaccttccaaataaactacccacagcccaaatcttcatctcacacaggcagagtgacarggaaagaaatgaaactcgcttctcttgcctttccgcgtggggcctctgtgagcaacagcaaggccaatgaatcaacttcccagccagggggcacagtcttgacaactcactctactgttatcacattcagtacacctgggagcaggtaaatctagaattttcaaaactccatttaggaaaattgcaccctctccaccttagggaagccacattttcatatatataaatttttctttaaactttacattagatccgttttctaaaattctgcccccgcttctcttgagataaccctttgagctgtagatcatttgtctaatacctgcctccctccattcacctgtagctccaagaaggaagtatcac

SEQ ID NO: 920603 - DNA, 567 bp, Homo sapiens
ccccagagcttggagtcagaagactgagtttaagttccattattgcccccccacacttttttttttagccataatatccatccctctcagtcacttaagtgattgtgacaacaccttgtacagttgttggtggcattaaatcagatggtgtataagagtattttgcaaaaactgtaaggagggtgtggctgtaagggctggtagttctcatgagtattactgctcttctttcccacagctaaaagaatatcagcaaaggaagagcccctggtattmcagcaggagcaaagacaaaaaagaaaaaaactgacagtagccctgagacaaccacttccggtggtggccactcacctggggatgtgagtcttggctggccaggctcctggggacagggggcccaaggggcagtagagggtaattgttgagattgctgggtactggttaagaattctgggtttgaatcctgcttcttcatctgctagcgatctgatttatggcaagttgcttgagctctttgggcctctcttttcacatctgtaaaataggggtagtattgtttgacttcca

SEQ ID NO: 920604 - DNA, 718 bp, Homo sapiens
aattctatctctttccctctcccttccaactttactgagttcttttaataaccaggccacgggcttggaaatgccttgacctttactgaccgagttgtatattgagcctagccctagcccttttaaggggcactgcctgagctccccagatcaaaacttctcactcttcaccatccagtcctcgagctgcagagaagcggtcctccascggcggttacagcagaccataaaggagcgggcgctgctgaacgcacacgtgacacaggtgaggctttgcagagggagggatgtggaaggaagatgaccccaggtggccaggagcaggtgaggaccagtgacagcccttcctaacttctgtgcccatttcttgcaggtgacagagtcactaaaacaagtccagctagagcgagacgaatatgctaaacacataaaaggagagagggcccggtggcaggagaggatgtggaaaatgtcggtggaggtgaggtctgacccttcagcccccactttagataggtcactggatctttctgggcatctgtaaaatgggaatagtacagccagaggtggtcatgggtctgggctttgtggagatggggacagagaatgagatggtagcctgtccagccaccagcccctctctccagggccctttcccctgtgctttgggcaggctcgaacattgaaggaagagaagaagcgtgacatacatcggata

SEQ ID NO: 920605 - DNA, 747 bp, Homo sapiens
ccctctcccttccaactttactgagttcttttaataaccaggccacgggcttggaaatgccttgacctttactgaccgagttgtatattgagcctagccctagcccttttaaggggcactgcctgagctccccagatcaaaacttctcactcttcaccatccagtcctcgagctgcagagaagcggtcctccaccggyggttacagcagaccataaaggagcgggcgctgctgaacgcacacgtgacacaggtgaggctttgcagagggagggatgtggaaggaagatgaccccaggtggccaggagcaggtgaggaccagtgacagcccttcctaacttctgtgcccatttcttgcaggtgacagagtcactaaaacaagtccagctagagcgagacgaatatgctaaacacataaaaggagagagggcccggtggcaggagaggatgtggaaaatgtcggtggaggtgaggtctgacccttcagcccccactttagataggtcactggatctttctgggcatctgtaaaatgggaatagtacagccagaggtggtcatgggtctgggctttgtggagatggggacagagaatgagatggtagcctgtccagccaccagcccctctctccagggccctttcccctgtgctttgggcaggctcgaacattgaaggaagagaagaagcgtgacatacatcggatacaggagctggagaggagcttgtccgaactcaaaaaccagatgg

SEQ ID NO: 920606 - DNA, 673 bp, Homo sapiens
ggaaacaaaggggtgcgggacactaacctggtaggtctcaccttgcccgtcattcacctctcagtcctttgacactcaaggactctgcagtggtacaaccgggagcaggtacccttcacttttctcacccccgagtccctttgcctggagcactgtccatctatccagccgtgtactcagtagttattttctgagaagctactatattccagctttcttgttcccagtttagagctgggtgggatcaggaggaagggcatggaaggggttgctggagaatgtgcartggcatcagagccccattctggctctgggtccaaggccctcctagagaggcacagtctggaagatgtgagagccccacggtaggttggggtggatcatggaccccatcctagaagagtgggtgggtttgcccattcagagcccaggccagaagagccctctcggcagaagggccagcctggagtgtggcaccctgggcatagggagggccaagtttttggcagcaggattatgtagtttgtgtaggtcagagctggagatgggggttggggggcagttcctgaccattaggggcttggtagccctggagagcccttgctgtgggttgggagcaaagtaggtgggccaataacaacacatattttaccaagtgaattctaggagagtg

SEQ ID NO: 920607 - DNA, 824 bp, Homo sapiens
cctaggaatccaaggaaaagctgctgaattctgcggccccaggaggatctttgtcctccttttgcagagcagtaggtggatttgctctgttgagctggaaggaagaatttttagatttcctctggctgaagaagttaaaatggaaccatctacatcaawtccccacaattggactttaaagcaagttttcagaaaaaacggactcgattattttctatgtgtggaagcaaattccttgggaacttctggtgaattttttttttttttttttttttttttttgagacggagtctcactctatcacccaggctggagtgcagtggcacaatctcggcttactgtaagctccacctcctgggttcacgccattctccttcctcagcctcccgagtagctgggactacaggcgcccgccacccctcccggctaacttttgtatttttagtacagacgagatttcaccgtgttagccaggatggtcttgatctcctgatctcatgatctgcctgcttcagcctcccaaagtgctgcgattacaggcgtgagccaccatgcccggcctaacttctggtgaattttaaagtgcttgtctattttgttttattctccaatactgagaagtctttaacaactagaggctgcttgggtaggtcaaggtctgaggggcagcgctccccaccagagctaatcattaaatagatctgccatctgtagtttttgttttgcattttgagatggaggtgttgctatgttgtctctaggctggacttgaactcctgggctcaggcaatcctcctgcctcggtctcctgagtagctgggact

SEQ ID NO: 920608 - DNA, 824 bp, Homo sapiens
cctaggaatccaaggaaaagctgctgaattctgcggccccaggaggatctttgtcctccttttgcagagcagtaggtggatttgctctgttgagctggaaggaagaatttttagatttcctctggctgaagaagttaaaatggaaccatctacatcaaatccccacaattggactttaaagcawgttttcagaaaaaacggactcgattattttctatgtgtggaagcaaattccttgggaacttctggtgaattttttttttttttttttttttttttttgagacggagtctcactctatcacccaggctggagtgcagtggcacaatctcggcttactgtaagctccacctcctgggttcacgccattctccttcctcagcctcccgagtagctgggactacaggcgcccgccacccctcccggctaacttttgtatttttagtacagacgagatttcaccgtgttagccaggatggtcttgatctcctgatctcatgatctgcctgcttcagcctcccaaagtgctgcgattacaggcgtgagccaccatgcccggcctaacttctggtgaattttaaagtgcttgtctattttgttttattctccaatactgagaagtctttaacaactagaggctgcttgggtaggtcaaggtctgaggggcagcgctccccaccagagctaatcattaaatagatctgccatctgtagtttttgttttgcattttgagatggaggtgttgctatgttgtctctaggctggacttgaactcctgggctcaggcaatcctcctgcctcggtctcctgagtagctgggact

SEQ ID NO: 920609 - DNA, 606 bp, Homo sapiens
gcctcccaaagtgctggaattacagacctgagccaccatgcctggcctaaaagtaagatttcaatatgtgctgtatcatagaataaaagctattaatatttaaaagttcacaacacactgtgtaacacaaagtttccttttattscccccaaatgcattgttttgaatatttaagtgttaccactggtgcaatattctgaaacctaataaacaaggcccagccacttctacctacacacttcacaatttcttgatcttcaataacattttctcagaaattttcctctcttagttataacaaattttaaaaatccagaaagacctcaaaaatgatatcttttgaataatagtgtatgtatatcactgtttttagcaagtagcaaaataatgtaaagtaaagttataggataattctggattccccatcaaggattatgcagcaaaacagttaccaaaatgggagatgaattgatccaaattagctacattgaaaaactatttttttctgtttatttttttcccaatgcaaaaaaaaatgcattgctacagtttgaatgtttatgtctccccaatattcatttgttgaagccctaatccccaaactga

SEQ ID NO: 920610 - DNA, 606 bp, Homo sapiens
gcctcccaaagtgctggaattacagacctgagccaccatgcctggcctaaaagtaagatttcaatatgtgctgtatcatagaataaaagctattaatatttaaaagttcacaacacactgtgtaacacaaagtttccttttattgcccccaaatgcattgttttgaatatttaagtgttaccactggtgcaatattctgaaacctaataaacaaggcccagccacttctacctacacacttcacaatttcttgatcttcaataacattttctcagaaattttcctctcttagttatracaaattttaaaaatccagaaagacctcaaaaatgatatcttttgaataatagtgtatgtatatcactgtttttagcaagtagcaaaataatgtaaagtaaagttataggataattctggattccccatcaaggattatgcagcaaaacagttaccaaaatgggagatgaattgatccaaattagctacattgaaaaactatttttttctgtttatttttttcccaatgcaaaaaaaaatgcattgctacagtttgaatgtttatgtctccccaatattcatttgttgaagccctaatccccaaactga

SEQ ID NO: 920611 - DNA, 625 bp, Homo sapiens
agatggccgaataggaacaactccagtctacagctcccagcgtgagcgatgcagaagatgggtgatttctgcatttccaactgaggtaccaggttcatcgcactgcggagtgtcggaaagtgggtgcaggacagtgggtgcagcacaccaaatgtgagccggagcagggcgaggcatcgcctcacctgggaagcgaaaggggtcagggaattccctttcctagtcaaagaaaggggtgacagaaggcacctggaaaatcaggtcactcccaccctaatactgtgctttyccaatggtcttagcaaacagcacaccaggagattatatcccgtgcatggcttggagggttctatgcccacggagcctcgctcattgctagcacagcagtctgagatcaaactgcaaggcggcagtgaggctgggggaggggcgccagccattgccgagacttgagtaggtaaacaaagtggccaggaagctcgaactgggtggagcccacggcagctcaaggaggccttcctgcctctgtagactccacctctgggggcagggcattgccaaacaaaaggcagcaaaatcctctgcagacctaaatgtccctgtctgacagctttgaagagagtag

SEQ ID NO: 920612 - DNA, 563 bp, Homo sapiens
ggcaggcagctccaggtgctgacacaggtgccggccccctgtgaggctgtggctggaccaggcatactgcaagcagcttccactaggggcactggggaacacggtggcacctggaagctaggagacaccaggaaccacacagccccaaagaaggtgtcacagccctggcttggggagcttcaaggtctgggttgcccaaatggtcgcagctctcctttcttctctccttctcatcacctgcaacatggtgagcaggggggcatgtttaagctctgttagtgttacagctctttcagacttgccatttgggggtcccaagttcctgtcccacatccaggaagaatgaggtatgtggacaactggasggtgagcaaggtgaagaggtgttttattgagcaacagtacagctctcaggagacccaaagtgggtagctcctttctgcaagcaggtcaccctgacatctctgcttcctcagcggaaaggagacctggagtgggtagctcctatccacagacaggtcatcccatcatctcagcagagaggagactggagtgggtagctc

SEQ ID NO: 920613 - DNA, 611 bp, Homo sapiens
atctgtaacctattattatactggaatcctgttggtgttgttgtaaggtgtgagggaggggagccttctataatattctaattaaaccttttagtgggcctgtgtctctgaactggtttttttgtttgttttgttttgttttttgttttgagatgggagtcttactctgttgcccaggctggagcacagtggcacaatcttggctcactgcaatctctgyctcctgagttcaagcaattctcctacctcagcctcctgagtagctggaactatggccatggaccaccacactcagctaacttttttttttttttgtagtagtagaaacaagatttcaccatgttggccaggttggtcttgaactcctgacctcaagtgatccactcacctcggcctcccaaggtgtgagccaccacacccagcctgaactataattttcccaagttttctatagcttctcttttcccccttcccttaggtgagaccgggaggctagagggggctggaatgggacactcttccctaaaggctctgggacaagcttctgatgaagatttttactctggagaataggcctttattacagaaaaagctctgaacatatttcacaa

SEQ ID NO: 920614 - DNA, 684 bp, Homo sapiens
acacccaggggtggtgttcactgggtgacaaaaagctggtgctgaagtttctctccaaagactctttgcatctttgcttaagttgcctttttagctgcctgaatctagattgtggagagcctcaggaatgcctgccagggttgaattccacagtctgccctcagagaactcaggatactcatctgttaagtggatgtaagtcacactctttggagtctattttctcccttagataaaaaggaccaagcacattcttaacagctcaggtgttggtccatttcactgagcctgacaagcaagttgatctttctgggaaaggcctttgcttcttccggcctctgaggacctgggtccrcagcaggaggccagcaggaggcctccaagcattgaaactgccccacccacccaagggcttaatttagacccctcgacaggttgactctgccagcatgatctgacccatttcatttcctacatgtagcaagtaagaaaaagaaatggaaatattcccttctgcagactggtgtgaaatctctagctagacttttctaactgtaaaaacagtcagtgggcctagaaatgataatacatgcaaggttttggaaaaaccaagccgagagtccatacactcagatccttggacctcagcatctgtccggccgcccctccactcctaaaagcctg

SEQ ID NO: 920615 - DNA, 644 bp, Homo sapiens
tttcaagctaagtgttataacaaaagagtcaaaaagttataaaaactctttaaaagtaaaaaagttatagtaagctaaagttaatttattattaaagaaagaaaaatattttttataaactagcgtagcctaaatgtacagtgtttataaattagtgtagcctaaacatacagtgtttataaagtctacggtggcaaacaggaaggtccattcactcactgcccactcactggctcactcagagcaacttccagtcctatagatccatataccgcaagtgccctatacaggggtacmgtttttaatctttcatactgtatttttactgtagtttttctatgtttagatacacaaatatttgccattgttttccaattgcctacagttatcagtacaatccctttctgtacacgtttgtagactaggagcaataggccacaccatatagcctaggtgtacagaaggctctaccatctgggattgtgtatgtataatctgtgatgtttgcacctggaccaaattgcctgaggacctgtcattaatggatgcatgactgtcttgtgttataataagaaatatatttgtctttggtttctgtcacacagcacctaaagctctcagaatctctggagtgataggagtgt

SEQ ID NO: 920616 - DNA, 644 bp, Homo sapiens
tttcaagctaagtgttataacaaaagagtcaaaaagttataaaaactctttaaaagtaaaaaagttatagtaagctaaagttaatttattattaaagaaagaaaaatattttttataaactagcgtagcctaaatgtacagtgtttataaattagtgtagcctaaacatacagtgtttataaagtctacggtggcaaacaggaaggtccattcactcactgcccactcactggctcactcagagcaacttccagtcctatagatccatataccgcaagtgccctatacaggggtaccgtttttaatctttcatamtgtatttttactgtagtttttctatgtttagatacacaaatatttgccattgttttccaattgcctacagttatcagtacaatccctttctgtacacgtttgtagactaggagcaataggccacaccatatagcctaggtgtacagaaggctctaccatctgggattgtgtatgtataatctgtgatgtttgcacctggaccaaattgcctgaggacctgtcattaatggatgcatgactgtcttgtgttataataagaaatatatttgtctttggtttctgtcacacagcacctaaagctctcagaatctctggagtgataggagtgt

SEQ ID NO: 920617 - DNA, 602 bp, Homo sapiens
taggtgtacagaaggctctaccatctgggattgtgtatgtataatctgtgatgtttgcacctggaccaaattgcctgaggacctgtcattaatggatgcatgactgtcttgtgttataataagaaatatatttgtctttggtttctgtcacacagcacctaaagctctcagaatctctggagtgataggagtgtcattttgtattcataaggagacaacccctccccccacctccctgaaactcctgcactcaggattctcctggacctcaccctctgtacctctccatctagcggttcatttgtaccctttataattaatgggtagatgtaattaaagtggctttgtgagtgctgttagccattctagccaattacrggagcctgaggaaggggtcatgagaacccctgatttatactcactaggtcagaagtatggaggcctgggacttgtgactagcttctgagtggagggcagtcttatgggactgaactcgtaagctgtggggtttgcaccaactccatggagttagtgccagaatcgaattgttgaacatccagttgatatgagaggaatcagagaattggttgttggtgttggaa

SEQ ID NO: 920618 - DNA, 602 bp, Homo sapiens
taggtgtacagaaggctctaccatctgggattgtgtatgtataatctgtgatgtttgcacctggaccaaattgcctgaggacctgtcattaatggatgcatgactgtcttgtgttataataagaaatatatttgtctttggtttctgtcacacagcacctaaagctctcagaatctctggagtgataggagtgtcattttgtattcataaggagacaacccctccccccacctccctgaaactcctgcactcaggattctcctggacctcaccctctgtacctctccatctagcggttcatttgtaccctttataattaatgggtagatgtaattaaagtggctttgtgagtgctgttagccattctagccaattacaggagcctgaggaaggggtcatgrgaacccctgatttatactcactaggtcagaagtatggaggcctgggacttgtgactagcttctgagtggagggcagtcttatgggactgaactcgtaagctgtggggtttgcaccaactccatggagttagtgccagaatcgaattgttgaacatccagttgatatgagaggaatcagagaattggttgttggtgttggaa

SEQ ID NO: 920619 - DNA, 763 bp, Homo sapiens
atgaactgtgttactttgagcaagtgacttctccgggcccttttctcttctgtatacaacggtaataatattctcataggatcgctgtaaggatgcaaggagacaatgtatgtaaagcacttaccaaagtgaatgtccaaataataataataataatcttaaaaaacatatgggaaaagacattataaactgtgaagtgctattttcatgtataggggttactatttaccataaagtgcaagaaaaatgtttactactttaagaaaactaagtgtatgatttataattggatggttatttcacattatttacaattttcctttgaatggaaacattcaccttgacccacaatagaggcaaactgtaaagtactttacacagcactgtgaatggccagtttcttattctactcatcttaatttgatgcctatcatatgcaagacactatggtagaaacttttacataaatcattctattttaacctcactggattgttatttttgttcctgattcaaataaaactaggtatctgaaaggttaactggcttaaactttctaggcccatgctaggaggtaaacgaagtgaaatgaggacctagaccttgagatrgctaagtccagggcactttccaaaggaaaaatatatgttttaaggcagcttgtagagatagcaacatgttgtcaaatgttaagccttttagagctgtcttaatgcaagaaataggaagctctgtttggtgcttagggagtggccttggcttg

SEQ ID NO: 920620 - DNA, 727 bp, Homo sapiens
gagcccttgataaatttagaggagagacccaaattcaagcttattacctttttaattgactcaggggcagcttcctcctctgtttatcattccccatctggtgtaatttgttcacaagaagaactccttatttcaggagtgaagggagaaggatttaaagcaaaaactttagaggaaacaaaagtcatatataaaaatagatcagctaatatamaatttttgttaataccagaggaaggaactaacctaataggaagagatttaatgctagaattaggcttaggcctctatgttaaccagggaaaatttctcacctctctcaacttactcactactatagatgaagagtatatccatcctaatacctggtcaaaagaaggaaatcaaggaaaattatgagtttcctcaataaaggtcaaattaaaaactcttggggaagtagtaagaaaacaacaccctattcctttaaaagctaggataggtttaaaacctataattgaaagccttgttcatgatagacatcttgaaccctgtatacccccttataataccacaatattacctgtaaagaagccagatgggtcatactggctagtgtaagacctccgggctattaatcaagtagttcaaactacataccctgctgctcccaatccttacaccattaacagcaaaatcccacctaactatgaatggttcactgtaaaacctgaaaggtgccttctgg

SEQ ID NO: 920621 - DNA, 727 bp, Homo sapiens
gagcccttgataaatttagaggagagacccaaattcaagcttattacctttttaattgactcaggggcagcttcctcctctgtttatcattccccatctggtgtaatttgttcacaagaagaactccttatttcaggagtgaagggagaaggatttaaagcaaaaactttagaggaaacaaaagtcatatataaaaatagatcagctaatataaaatttttgttaataccagaggaaggaactaacctaataggaagagatttaatgctagaattaggcttaggcctctatgttaaccagggaaaatttctcacctctctmaacttactcactactatagatgaagagtatatccatcctaatacctggtcaaaagaaggaaatcaaggaaaattatgagtttcctcaataaaggtcaaattaaaaactcttggggaagtagtaagaaaacaacaccctattcctttaaaagctaggataggtttaaaacctataattgaaagccttgttcatgatagacatcttgaaccctgtatacccccttataataccacaatattacctgtaaagaagccagatgggtcatactggctagtgtaagacctccgggctattaatcaagtagttcaaactacataccctgctgctcccaatccttacaccattaacagcaaaatcccacctaactatgaatggttcactgtaaaacctgaaaggtgccttctgg

SEQ ID NO: 920622 - DNA, 727 bp, Homo sapiens
gagcccttgataaatttagaggagagacccaaattcaagcttattacctttttaattgactcaggggcagcttcctcctctgtttatcattccccatctggtgtaatttgttcacaagaagaactccttatttcaggagtgaagggagaaggatttaaagcaaaaactttagaggaaacaaaagtcatatataaaaatagatcagctaatataaaatttttgttaataccagaggaaggaactaacctaataggaagagatttaatgctagaattaggcttaggcctctatgttaaccagggaaaatttctcacctctctcaacttactcactactatagatgaagagtatatccatcctaatacctggtcaaaagaaggaaatcaaggaaaattatkagtttcctcaataaaggtcaaattaaaaactcttggggaagtagtaagaaaacaacaccctattcctttaaaagctaggataggtttaaaacctataattgaaagccttgttcatgatagacatcttgaaccctgtatacccccttataataccacaatattacctgtaaagaagccagatgggtcatactggctagtgtaagacctccgggctattaatcaagtagttcaaactacataccctgctgctcccaatccttacaccattaacagcaaaatcccacctaactatgaatggttcactgtaaaacctgaaaggtgccttctgg

SEQ ID NO: 920623 - DNA, 727 bp, Homo sapiens
gagcccttgataaatttagaggagagacccaaattcaagcttattacctttttaattgactcaggggcagcttcctcctctgtttatcattccccatctggtgtaatttgttcacaagaagaactccttatttcaggagtgaagggagaaggatttaaagcaaaaactttagaggaaacaaaagtcatatataaaaatagatcagctaatataaaatttttgttaataccagaggaaggaactaacctaataggaagagatttaatgctagaattaggcttaggcctctatgttaaccagggaaaatttctcacctctctcaacttactcactactatagatgaagagtatatccatcctaatacctggtcaaaagaaggaaatcaaggaaaattatgwgtttcctcaataaaggtcaaattaaaaactcttggggaagtagtaagaaaacaacaccctattcctttaaaagctaggataggtttaaaacctataattgaaagccttgttcatgatagacatcttgaaccctgtatacccccttataataccacaatattacctgtaaagaagccagatgggtcatactggctagtgtaagacctccgggctattaatcaagtagttcaaactacataccctgctgctcccaatccttacaccattaacagcaaaatcccacctaactatgaatggttcactgtaaaacctgaaaggtgccttctgg

SEQ ID NO: 920624 - DNA, 588 bp, Homo sapiens
aaggacctactttacctcctttaggagcttgggtatcgggtctcagccaagaaggcccaactttgtcttcccagagtgtcctacctggggtatgagataaaggaaaaagggcactcaccagtgctcggaaggaagccatcctgcaaatccccactcccaccaccaagagacaggtacatgaattcctgggggctgtgggatactgtcacctatggatatcrgggttcgcggaaattgccaagcccctgtacaccgctactggacagaatggcccactagtttggactaacactgaagaacagtcttttcaaaacctaaagaaagcattaactgaggcctctgccctagccctcccaaatatctcaaaaccattccacctttttttcatgaaagccaaggagtcgctaaaggggtactcactcaaactttgcggccatgtcgacgcccagtggcctgtttatctaaaagactggatcctgttgcctccgggtggccaagttgtctgggagctgtagcagccacagcaagcctggttcaggaggctgataaactgactctaggtcaaaatttaacccttatggcgcctca

SEQ ID NO: 920625 - DNA, 738 bp, Homo sapiens
gtctagtagggacttggagaacctttatgtctagctaagggattgtaaatacaccagtcagcactctgtatctagctcaaggtttgtaaacacaccaatcagcactgtgtgtctagctcaggagtttgtggatgcaccaatcagtgctctgtgtttagctaatctagtggggacttggagaatttttgtgtctagytcagggattgtaaatgcaccaatcagcaccctgtcaaaatggaccaatcagctctctgtaaaatggaccaatcagcaggatgtgggtggggccagataagggaataaaagcaggctgcccgagcccccagtggtaacgtgttggggtctgcatccacatggttgaggctttgttgtttggctgtttgcaatatatcttgctgctgcttgctctttgggtccgcattgcatttatgagctgtaacagtcaataccaaggtttgcagcttcactcctaagccaaggagaccatgaagccaccagaaggaagagactccgaacacatccaaacatcagaagaaacaaattccagagacgctgcttttaagaactgtaacactcactgcaagggtctgtgggttcattcttgaagtcagtgagactaagaacccaccatttccagacacgcacaatctcagctcactgcaacctccgcctcctgggttcaagcaatttttttgcctcagcctcccgagtacctgggactataggggcgcatcacca

SEQ ID NO: 920626 - DNA, 723 bp, Homo sapiens
tggagtttgtttcccagtgagggtatagaggatcctcttgtgacatcaagcctcttaacccaggctgttgcctgagccgattgccatttccctgggtctgctgagtcaccaacataatcatttaaggtcatagaagagaaactgaggtctcccctgtccacttccacaccccaggtatatgcattatcaagaatttggtaatgtgtgtaatgtatatacctggggcgtggaagaatttggttcagtgttaggagaatttggacaacagaactttaggagaatcccagatcctgagattaaacatgtcgaagacaatgcatcagctaatatttggatacagaatgttcccatttacacagttttttcattggtgttcacaaatgcagggcaggaggtaggctgcgcaaggcttaccatccctccccattgtacrggtgacaaacagatacttaggagggtaaatgagtctctcagcataatgtgtcagaactgagacactagtttccctggactcaaatcctgtgttctttgcacttcccatttaaaatattaacatactagaatactacatgctaatgtagtataatgatttcctagaacagtaacagggagaggtgacttttatctttagatcaagaataaggagtttccaactataataaaagggatttggattaggcattagaaagatatcttcctggccactctccatttacatctcca

SEQ ID NO: 920627 - DNA, 625 bp, Homo sapiens
ggtgtgtccaaagtttcctgaattttttattgttttttctttaagctatctatttccttgaatgtttctcccttcacttcttgtgccattttttggatttccttgcattgggctttgcctttctttggtcctgattaccttaataactaacctcctgaattatttttcaggtaaatcagggatttctttttggtttggatccattgctgatgaactagtatgatttttgggggtgttgaagagccttgttttgtcatattaccagggttgattttctggttccttctcatttgggtaggccctatcagagggaaggtctggggttgaaggctgttgttcagattcttttgtcccacgggatgttcccttgatgtagtactctcccccttttcctatgratgtggcttcctgtgagccaaactgcagtgattattgtctttcttctgggtctagccacccaataagtctacccagccgtgggctggtactgggggttgtctgcacagagttctgtgatgtgagccgtctatgagtctctcagccatggatacctgggcctgtactggtggaggtggcagtggggggtgcaatagactccatgagagttcttagctttggtggttta

SEQ ID NO: 920628 - DNA, 773 bp, Homo sapiens
tgaaaaactgaatactgtcctacgatcaggagcaaaaccaaatattcactttcatgacttccattcaacactatactgaaggctctatccattaccataaggtaagaaaagtaaaatataaatgccaaccagattggaaaagacaaagtaaaggtttatttgtgcatgatgtaattgtctatgtagaaaacacaataagatctataaaaagctattaaaactaagaagtaatttttaataaggctgtaaattatcagatcaatatrtacaaactttatttttaatatcagtaatgaaaaatcagaaatcaaaatcaacaaaatataccatttaaaatagcattaaaaataatgaaacgcttacagataaacctgacaaaagagacgtaagacctacacactgaaattatacatatagctgagagaaattaaagaattcctaactatattgagaactatatcatgttcatagatcagccagcacagtattaagatgtcaattcttcctaaaatgatctattgattcaacacaattacaatcaaaatttcaataggcacccttattttaattgacaggctgattctaaatttatacaaaaatgcatgagacttagaatatataaaacaactttgaaaaacaaaaacaaatttgaaagaattatgctatacaatttcaagacataatataaagatacagtaatcaaggcattagtgaaagtagaggcatgcaggccaatggcacagaataaagaacccagaaatagactcatacat

SEQ ID NO: 920629 - DNA, 773 bp, Homo sapiens
tgaaaaactgaatactgtcctacgatcaggagcaaaaccaaatattcactttcatgacttccattcaacactatactgaaggctctatccattaccataaggtaagaaaagtaaaatataaatgccaaccagattggaaaagacaaagtaaaggtttatttgtgcatgatgtaattgtctatgtagaaaacacaataagatctataaaaagctattaaaactaagaagtaatttttaataaggctgtaaattatcagatcaatatgtacaaactttatttttaatatcagtaatgaaaaatcagaaatcaaaatcaacaaaatataccatttaaaatagcattaaaaataatgaaacgcttacagataaayctgacaaaagagacgtaagacctacacactgaaattatacatatagctgagagaaattaaagaattcctaactatattgagaactatatcatgttcatagatcagccagcacagtattaagatgtcaattcttcctaaaatgatctattgattcaacacaattacaatcaaaatttcaataggcacccttattttaattgacaggctgattctaaatttatacaaaaatgcatgagacttagaatatataaaacaactttgaaaaacaaaaacaaatttgaaagaattatgctatacaatttcaagacataatataaagatacagtaatcaaggcattagtgaaagtagaggcatgcaggccaatggcacagaataaagaacccagaaatagactcatacat

SEQ ID NO: 920630 - DNA, 614 bp, Homo sapiens
atttcaatgtgggaagggctcacctagctgttgctgactatgaaggtggaggaaggggggccatgaggcaaggaatacaggcagcctctagaaactggaaaaggctaagaactggattctcccctagagccttcagaaaggaatgcagccttcaacttaaccctagtgagacccatcctggacttctgtccatagaattaaaagataacaaatgcatattatttcagccattaagtttatggtaatttgttgcagcagtcacagtaaactaatacactgcctgtccaaatagtgaacttggctccatgcattgatggagaagaaagacacccgagggctccattctgcaggatgagtctgcagggatctccttgccagctatggaagtcagtatgacagcttcagctacctacagtccacttgccaggtgattattattattmttattattaatttgcactatcgcatcccagtgtgtgcctccagagccatctattttctttattttttcactgcctaaactgcttataactgagagtcacaattgcagagctattatcaattaatttgctagcagcaaaagtcggtgtgactcacaatcaggcagccctgcc

SEQ ID NO: 920631 - DNA, 751 bp, Homo sapiens
atgacacccatgatttatgggtggattggtggcaggacaagatagaaaggaaccagcggtggctcagggttttgacctgagcaaccagggagaggaggtgtcgtgtagacagataggaaagacacaattctttgaayacatttgggactcagatagtcaaggcagcaaggatgaagatggtttgtctcatcacccgtcttccaggtgactctggtgggctccctctttgaaagggtgccttctgggggctgactttcaggctagcggttggcttcttttgactgggggtcaagtgggcctccagacaccctgagctgcatggagaacagcaagggccttttgctcatctgcagtgtacagcactgcctctacttcatcttgatgctgctcctggtcagtcttctcggcacgctggggacctccttactcacagacccaattcctgttaaacaagttaagtgctgccaggtagggtgctctggggtggaccctgcagttctagggagtcactgaagaatagggaaattcctgcattgtctttggaaaggggagggtttgggggagcattggggtgggcagaaacaggcaggtacattttaaagggctcagcagagtgaaacaaagctgaactcaaccagatgtcctgcagcgatctgccaggtattcctttagatcgagaagtttggcttttaaaatgcaaattttccttggaagttttaaatccaccaaccttagtatgaattaatacaat

SEQ ID NO: 920632 - DNA, 600 bp, Homo sapiens
ctcatatattattggtggcagtataaattgctataaacaaaagccatcacatacataacctatgactcaacaattctattcatatatatatatatctatatatgccccaaacaaatgcttatgagttcaccaataaayatgtaaaacaatattcataccagccctacttgtattagctgaaaactagaaataacccaaatgtccatcaacagttgaatagaataataaacaggtatgttcacacagtggaatatgtactacactgaaatgagaatgaataaaccacatgcaacaatatggataaatcttacaaagtgttgagtaaggcccagcgcggtggctcacacctataatcccagcacttgggaggctgaggtaggaggatcacttgagcccaggagtttgagactagcctgggcaacatggcaaaaccctgtctctacagaaaatacaaaaattagctggacatgatggcacatgcctgtagtccaagctactcaggaggccgaggtgtgaggatcacttcagcccaggagctcaaggctgcagtgagccaagattgcgccactgtactccagcctgggcaacaaaatgagacct

SEQ ID NO: 920633 - DNA, 578 bp, Homo sapiens
gcaaaagatcaggctggtcttgtgtctagtctaagatgtgaatgactgatagctgtccatttctggaacagtagaaagtgcaggtgtctggaagtcagagagatccagggtagtgccacttatcaccttgaacatgcgcacagaaagggcctggcctatgcttggtgtaggatggttgataagtaagtcagtccctctctccaggccacttcttctctgtgtagccctcagtctgccccctcctctctccttatactcctttacaaacactcttcttgctcactcaaytgcctaaaaacgaatggcctttctgtccctcctaatcaacatctttggaaaggagttatttcattgattaccatcctggtggatagatttgtttgaacaaataaattgccctttttgtaggtcaaacccagtcaaatacaggcaacttcatattacaacagtagaaacacgtgccccaagacttctcacttggcctttctagaaacaagaagtagattcatatctttggagaggccaccttagcccaattgttgggtgggggatggtgagagagaagagcttgccatctt

SEQ ID NO: 920634 - DNA, 775 bp, Homo sapiens
acacctcttctctggacctcagttccctcatttttcaaataatcctcactcacactgccccatagggaaccaatgtcttttgtaagagatgggggtttcactatgttgtccaggctggacttgaactcctgactcaagcgatcctcccacctcagcctcccaagtagctgggactacagatgtgcaccaccacatctggctttaaaattgattttcccctcttccccagccacctagtcttctttttcctcctcaaatatgctatgctagttttctagggctgccgtaacgaagaaccaaagctaagtggcttaaaaaacaaaaatgtcttcttctacagttccagagactagaagcctgaaatcaaggtgtcagcagagctgccctctcattcarggtcctaaaggagaagctgctccaggtctttctcttagcttctggtgcaccccacaatcctgcatgttccttagcttgtagacatatcactcccatctctgcgtctgtcgtcacatggcttctccctggggtcctcatgtcatcctccctctgtcttcttagtatctctctctttagtctctctcttcttcttataagaacagcaatcatattggattagggcccaccctagtgacctagttttaacttgattccattgcaaaatctctatttccaaatcaggtgccattcacagctaccagcagttaagattccaacatgtttttgagggacacagcttaacccataacacacaccacgttcatttccacttcagggc

SEQ ID NO: 920635 - DNA, 687 bp, Homo sapiens
aatgctgttagaaagaaaatgttatcaccactctaaatggagaaaccgtatcacttcccagaattagatactatgtgtggaaatagatacaatgaaaaacaaaacaatatcattacatagttactagcttctgcccaccaagtctccaagcctgagcctatggttgcctggataagcaagtgttagacggcacttaagacatgctaaaccccacagagagtctccttaaaacaatcagaagtgctgaaggagagctggaaagagagtgacttcctcacggaatgttaggcatctctgaaaatacctggttctccaggggtacccgtcccacacttcaggaaaccctgccttggtgggagtatcacataacgaggctgatctttatttcagggaccacccccgccaaaaaaagcgtgcaaagcaaactctttcttcagcaatatctgcattcagacaacctgcaactggtattataacacagactctcaaacactgtttgttaggcacgrgggttcgtgtttagctgggcttcagtcttccttaaatccccaagtataacacaactgcattttgttttcttcagatttttttttttttttttggagacagtctgctctgttgcttaggctggagtgcagtaatgggatcttggctcactgcaacctctgcctcctgggttcaagtgat

SEQ ID NO: 920636 - DNA, 746 bp, Homo sapiens
tacgaatggcttgaacccatgaggcagaagtagcagtgagccgagattgtaccactgcactccagtctgagtgacaaagcaagactctgtctcaaaaaaaaaaaaaaaaaaaaaaaaaaaaaaaaaaggccttaaaagtgtgcrtaccctttgacccagaaatttaacttaaagaaatatgcagaaatctatgaaaagaggaaaatcaatgggtgctcactacactgttatttatgagtgcctgaaattggaaagggcctaattatcaataataataagctggttaaattactatttaattctgggccttccatacattggactcttacgtaacaattaaaaagatgatgtagctctacatttattttcaaggaaatacgtcctgacatactgctaactgagaggttatataacagtatatactgtataactctattttaataaaaacatatatttatgcataaaattattggaaagctaaaccacaacatgttaatgatgttatgtctaggcagagggattagaaatatatatatgttttatttcttttggcttgcctgtgttttttaatttttattttaaagttatggattactttgggaacatatagagttccaaatacatttaagtaaggctccctatgtgctcattaattaggctcacctttgctattcttaggttgcttgtttttccctaaccctccagaacagaccagcccccatgttctgacccacctctccttcctc

SEQ ID NO: 920637 - DNA, 637 bp, Homo sapiens
actgaggcaggcgaattgcttgagtctaggaggtggaggttgcagggagccgagactgcaccactgcactccagcctgggtgacagagtgagactctgtctcaaaaaaaatgttaaaaaggaagttgccaagatggccraataggaacagctcccatctgctgctcccagcgtgatcaacacagaagacgggtaatttctgcatttccaactgaggtacctggttcatctcattgggattggttgtacagtgggtgctgcccacagagggcgagctgaagcagggcagggcatcgcctcacccaggaagcacaaggggtcgggcgatttccctttcctagccaagggaagccgtgacagactatctggaagaacgggacaccccctgcccaaatactgcacttttcccaaggtcttagcaaccagcagacaaagtgattctctaccatgcctggctcagtgggtcccatgcccaaggagccttcctgactgctagcgcagcagtctgggatcaatctgcgaggtggcagcctagctaggggaggggcgtccaccattgctgaggcttgagtaggtaaacaaagcggccaggaagctcaaactgggcagagcccaccgcagctcaacaaggcctaatg

SEQ ID NO: 920638 - DNA, 637 bp, Homo sapiens
actgaggcaggcgaattgcttgagtctaggaggtggaggttgcagggagccgagactgcaccactgcactccagcctgggtgacagagtgagactctgtctcaaaaaaaatgttaaaaaggaagttgccaagatggccaaataggaacagctcccatctgctgctcccagcgtgatcaacacagaagacgggtaatttctgcatttccaactgaggtacctggttcatctcattgggattggttgtacagtgggtgctgcccacagagggcgagctgaagcagggcagggcatcgcctcacccrggaagcacaaggggtcgggcgatttccctttcctagccaagggaagccgtgacagactatctggaagaacgggacaccccctgcccaaatactgcacttttcccaaggtcttagcaaccagcagacaaagtgattctctaccatgcctggctcagtgggtcccatgcccaaggagccttcctgactgctagcgcagcagtctgggatcaatctgcgaggtggcagcctagctaggggaggggcgtccaccattgctgaggcttgagtaggtaaacaaagcggccaggaagctcaaactgggcagagcccaccgcagctcaacaaggcctaatg

SEQ ID NO: 920639 - DNA, 600 bp, Homo sapiens
ctaggaggtggaggttgcagggagccgagactgcaccactgcactccagcctgggtgacagagtgagactctgtctcaaaaaaaatgttaaaaaggaagttgccaagatggccaaataggaacagctcccatctgctgctcccagcgtgatcaacacagaagacgggtaatttctgcatttccaactgaggtacctggttcatctcattgggattggttgtacagtgggtgctgcccacagagggcgagctgaagcagggcagggcatcgcctcacccaggaagcacaakgggtcgggcgatttccctttcctagccaagggaagccgtgacagactatctggaagaacgggacaccccctgcccaaatactgcacttttcccaaggtcttagcaaccagcagacaaagtgattctctaccatgcctggctcagtgggtcccatgcccaaggagccttcctgactgctagcgcagcagtctgggatcaatctgcgaggtggcagcctagctaggggaggggcgtccaccattgctgaggcttgagtaggtaaacaaagcggccaggaagctcaaactgggcagagcccaccgcagctcaa

SEQ ID NO: 920640 - DNA, 600 bp, Homo sapiens
ctaggaggtggaggttgcagggagccgagactgcaccactgcactccagcctgggtgacagagtgagactctgtctcaaaaaaaatgttaaaaaggaagttgccaagatggccaaataggaacagctcccatctgctgctcccagcgtgatcaacacagaagacgggtaatttctgcatttccaactgaggtacctggttcatctcattgggattggttgtacagtgggtgctgcccacagagggcgagctgaagcagggcagggcatcgcctcacccaggaagcacaagkggtcgggcgatttccctttcctagccaagggaagccgtgacagactatctggaagaacgggacaccccctgcccaaatactgcacttttcccaaggtcttagcaaccagcagacaaagtgattctctaccatgcctggctcagtgggtcccatgcccaaggagccttcctgactgctagcgcagcagtctgggatcaatctgcgaggtggcagcctagctaggggaggggcgtccaccattgctgaggcttgagtaggtaaacaaagcggccaggaagctcaaactgggcagagcccaccgcagctcaa

SEQ ID NO: 920641 - DNA, 616 bp, Homo sapiens
ctcagcctctcaactgtccttgccaaggcaccaaagatgtgtgtgtaccatcttggatatttaagcccagtcgaactcccagatgacagtagccctgactgacctcgtgagccaggtcagctcagaaaattgtgagagacaacagatcacttgttttaagaccctgcattgtgaggtggtttgtcaggcatgcagccagataatggacaaaatgctgtaggscttccgagaaaagagaaggacccaggatgtgaaggagaagagttgggggtaggagggcattctaaaagaggtgaggaggtacagaagtgtgagtctgaccaagagaaagtgcctttgctgcggaatatgggaagttctgaaggttgaataagccaaggtcagatcaaaggggtgttgagacccaggcagatataaggacaatggagatgatagtgagtgagctaaatcttcaactttcagggcaaagggtcagtagataattataaagctgataaattaagaaactgaggtataatcatgttgtttaggggtgggaaggtaatgactgcaagaattaaaagcctttgggaataggattagaggtgagggaggagatgacagtgtctcatcataa

SEQ ID NO: 920642 - DNA, 616 bp, Homo sapiens
ctcagcctctcaactgtccttgccaaggcaccaaagatgtgtgtgtaccatcttggatatttaagcccagtcgaactcccagatgacagtagccctgactgacctcgtgagccaggtcagctcagaaaattgtgagagacaacagatcacttgttttaagaccctgcattgtgaggtggtttgtcaggcatgcagccagataatggacaaaatgctgtaggccttccgagaaaagagaaggacccaggatgtgaaggagaagagttgggggtaggagggcattctaraagaggtgaggaggtacagaagtgtgagtctgaccaagagaaagtgcctttgctgcggaatatgggaagttctgaaggttgaataagccaaggtcagatcaaaggggtgttgagacccaggcagatataaggacaatggagatgatagtgagtgagctaaatcttcaactttcagggcaaagggtcagtagataattataaagctgataaattaagaaactgaggtataatcatgttgtttaggggtgggaaggtaatgactgcaagaattaaaagcctttgggaataggattagaggtgagggaggagatgacagtgtctcatcataa

SEQ ID NO: 920643 - DNA, 774 bp, Homo sapiens
aggattttggtttgattttatctagtgtagtattcaacttaactttataaattaagggttaggagaatatgaccttcagttaaatgcctagctctgttatcctggaaaccagataaaattgttttaacagtattgcaatataaaatcgacctctgattgggaaattgcctctggattgagaggaattagaaatgcctggtgagtgctgctgctcttagaactggcatgaccctgtgggaaagggaatcctgaagctatgcctttggagttaytagagacgttggctctggtggagcgtaaagctttgaagttagggcagctcctgcacctgtctcatgatgctctcatctcccttgagcctgagctgtgtcatctagggagttaaagaaaatagcttctgggccgggcgtggtggctcacacacagcaccttgggaggccaaagcaggcagatcatgaggtcaggtgatcgagaccatcttggctaacacagtgaaaccccgtctccacttaaactacaaaaaaaaattagccgggcctagtggcggtcgcctgtagtcccagctacttgggaggctgaggcaggagactggcatgaacctgggaagcggagcttgcagtgagccgagatcacaccactgcactccagcctgggcaacagagagactctgtctcaaaaaaaaaaaaaaaaaagaaaagaaaaagaaaatagcttctggacggctgggtgagctgtcacttgcatgaacaactgcacagactcccagggagagga

SEQ ID NO: 920644 - DNA, 633 bp, Homo sapiens
ttcttgagtgcttagttgtaatcaaagtaccggcagaatagtcacactggctccctgacctgtgatgtgaatgttattacagttggaagtgttaagaggaaggctctggaatggtccctccctgctgaaataataaacmaaatgctttgtgtctattaactcattgaattttcacagcaaccctatgatgtaggaaatatgatcgtgcccatttacagatgaggaaactgaggcacagagaagttaagcaatttgcccacgtttacatggctggtaagagtgaattcaaatccagtcaaattttagagtccacataccaaccaaaaatcctcagtcaggctgggcacagtggctcatgcctgtaatcccagcactttgggaggctaaggcaggaggaccgtttgagcccaggagttcaagaccagtaggggcaacacagtgagaccctgtctgaaaaaaaaaaattagctgggcacggtggtgcacgcctgtagtctcagctactcaggaggctgaggcagaaggatcacctgaacccaggaggttgaggctacagtgagttataattgtgcaactgcactccagcctgggtgacagagggagacattgtctcagaaaaaaagtccgcagtca

SEQ ID NO: 920645 - DNA, 633 bp, Homo sapiens
ttcttgagtgcttagttgtaatcaaagtaccggcagaatagtcacactggctccctgacctgtgatgtgaatgttattacagttggaagtgttaagaggaaggctctggaatggtccctccctgctgaaataataaaccaaatgctttgtgtctattaactcattgaattttcacagcaaccctatgatgtaggaaatatgatcgtgcccatttacagatgaggaaactgaggcacagagaagttaagcaatttgcccacrtttacatggctggtaagagtgaattcaaatccagtcaaattttagagtccacataccaaccaaaaatcctcagtcaggctgggcacagtggctcatgcctgtaatcccagcactttgggaggctaaggcaggaggaccgtttgagcccaggagttcaagaccagtaggggcaacacagtgagaccctgtctgaaaaaaaaaaattagctgggcacggtggtgcacgcctgtagtctcagctactcaggaggctgaggcagaaggatcacctgaacccaggaggttgaggctacagtgagttataattgtgcaactgcactccagcctgggtgacagagggagacattgtctcagaaaaaaagtccgcagtca

SEQ ID NO: 920646 - DNA, 633 bp, Homo sapiens
ttcttgagtgcttagttgtaatcaaagtaccggcagaatagtcacactggctccctgacctgtgatgtgaatgttattacagttggaagtgttaagaggaaggctctggaatggtccctccctgctgaaataataaaccaaatgctttgtgtctattaactcattgaattttcacagcaaccctatgatgtaggaaatatgatcgtgcccatttacagatgaggaaactgaggcacagagaagttaagcaatttgcccacgtttacatggctggtaagagtgaattcaaatccagtcaaattttagagtccacataccaascaaaaatcctcagtcaggctgggcacagtggctcatgcctgtaatcccagcactttgggaggctaaggcaggaggaccgtttgagcccaggagttcaagaccagtaggggcaacacagtgagaccctgtctgaaaaaaaaaaattagctgggcacggtggtgcacgcctgtagtctcagctactcaggaggctgaggcagaaggatcacctgaacccaggaggttgaggctacagtgagttataattgtgcaactgcactccagcctgggtgacagagggagacattgtctcagaaaaaaagtccgcagtca

SEQ ID NO: 920647 - DNA, 603 bp, Homo sapiens
caatatatttccatcatccctaatagattctttgtgcccccctgtagaaaatctgtcactttgctccaggctccagccagtcactgttttgtttttatcagtatagattaatttacattttctagaattttatatacatagaatcaaagcaactgttatctctagtttctttcacttagcagaatgagtttgagatttgtcttagttcgctcatgctgctataacaaaataacttagattgggtaatttataaacaacagaaatttattcctcccagttccggagcctgggaagtccaagatcaaggcacctgcagatctgatgtctgataaggactggttttctgcttcaaagatggcacctcgttgctgcatcttcacatggcataaggggtgaaagctttaagtttctttggtaagagcmctaatttcattcatgaaggaagagccctcatgacctaatcacctcctgaagggcccacctcttagtaccccacaatggagatgaggtgttttgttttgttttgtttttaatcttttaatttaaaagtaaactttactgtggaaaatgcaatcttggggagggcagaaagatcacacacaa

SEQ ID NO: 920648 - DNA, 619 bp, Homo sapiens
ttccatcatccctaatagattctttgtgcccccctgtagaaaatctgtcactttgctccaggctccagccagtcactgttttgtttttatcagtatagattaatttacattttctagaattttatatacatagaatcaaagcaactgttatctctagtttctttcacttagcagaatgagtttgagatttgtcttagttcgctcatgctgctataacaaaataacttagattgggtaatttataaacaacagaaatttattcctcccagttccggagcctgggaagtccaagatcaaggcacctgcagatctgatgtctgataaggactggttttctgcttcaaagatggcacctcgttgctgcatcttcacatggcataaggggtgaaagctttaagtttctttggtaagagcactaatttcattcatgaaggaagagccctcatgacctaatcacctcctraagggcccacctcttagtaccccacaatggagatgaggtgttttgttttgttttgtttttaatcttttaatttaaaagtaaactttactgtggaaaatgcaatcttggggagggcagaaagatcacacacaaggctgcctcttcacacctggaggg

SEQ ID NO: 920649 - DNA, 617 bp, Homo sapiens
ttcacaatagcaaagacttggaaccaacccaaatgtccatcagtgttagactgggtaaagaaattgtggcacatatacactatggaatgctatgcagccataaaaaagaatgagtttatgtcctttgcaggggcatggatgaagctggaaaccatcattctcagtaaactcacaggaacagaaaaccaaacaccacatgttctcactcataagtggcagttgaacaatgagaacatatggccacagggaggggaacatcaaacactggggcctgtcagggagttgggggcaaggagggataccattaaaagaaatacytaatgtagatgatgggatgatgggtgcaacaaaccaccatggcacgtgtatatctatgtaacaaacctgcatgttccgctcatatatcccagaacttaaagtataataaaaaaagtgaaaaaaagcattttattaaaaatattttgacaatggttgttataagtaactatgtttccatttttcaacctagtttgactataattgcattaaacaaagtactgtaacttgagagagaaatacttataatttgtcgttttatgaaaaatcttggttaaaaacctttttgactttccaaaaat

SEQ ID NO: 920650 - DNA, 744 bp, Homo sapiens
cttcagacaattttatcctcttcttgagagagttctcaaaagtgtattcaattattcaagaggaaatcaatgatccagaaatccaccatttcttccagaaaaatacagaagtgggaaccccaggcagacctggaaattgttgagaagaaagacagaaaagagttgtgaagccgggcgtggtcgttcmtacctataatcccagcactttgggaggccgaggtgggcagatcacgaggtcaggagattgagaccatcccagctaacacggtgaaaccccgtctctactaaaaatacaaaaaattagccgggcatgatggtgggcgcctgtagtcccaactacttgggaggctgagcgggagaatggcatgaacccaggaggcgaaacttgcagtgagccgagatcacgccgctgtcctccagcctgggcaacagagcgagactccatcgcaagaaaaaataataataaaaaataataataagagttgtgagacaacacataggttgttccgctgtttctggctttgttttttgtgagcagtcgttgggtagcagtggattaagtgcttgtatcaacacaatccctatactttcagagatgttattggtgtctcctagatcgggactgtaatgtcatagttattattcattagttgatatgataaattactcgccaacattccacccatggaataaatgcgtataaagtgtttgtggccagaacggtgaaacaaagtcaggtaatag

SEQ ID NO: 920651 - DNA, 583 bp, Homo sapiens
tgtgtgccaccatgcccggctaattttctgtattttttgtagagatggggtttcaccatgttgcccaggctggtcttgaactcctgagctcaaataatccgcccatctcagcctcgcaaagtgctaggaatacaagtgtgagmcactgtgcccggccaaaaccactgattttttttttttttttgaggtggagtctcactctgttgcccaggctggagtgcagtggtgtgatctcggctcactgcaacctccacctcccaggttcaagtgattttcctgcctcagcatcccaagtagctgggattacaggcatctgccaccacacccagctaatttttttttatttttagtagagatggggtttctccatcttggccaggctggtctcaaactcctgactttgtgatccacctgcctcggcctcccaaagtgctgggattacaggcgtgagccaccgcacgcggccaaaccactgaatatttttaagcaagaaagatttatgattattctaattgctatgtggaaaatagtctggggtaggggaggccaagagcaagaaactagtgaagatggcacttcagga

SEQ ID NO: 920652 - DNA, 647 bp, Homo sapiens
agctggacacacctccccagggaagagccttccttagctgcagactgagccacaaacctcgcggctcatctgctgcaaccattatgaatcatactaggattatcaaggaacaatcttctccaggatcagccctttcccyaccactgtcggattcagggaattttaagtggtggggggaggagggaggtagccagtgtattccagacagcaacactaactgcctgtcctgaggacgcaagattttctcatttgtaaggctctgcgtaacacactcatcctagcacacagggcttcaatgtcaggatgcagcctccttcccaggaagctggctggacactaggtcacagacgagctgaagctctcccaagaatacaccccctgtttgaccctgacatttactgctacggccacctgaagacgagactttccatctggaacgtttcggtacctatctccctggcatttctccagcactcttttcctctgtgattgtttagcccaataagcacacagaatggcattacacatagtggtaaagaagctgttacatgtggtgacgaagatgtcattacatgcagcaatgaagggggcttccaggagcctaacagaggtgacagaggcacaaaggggctgctgcccacttcctg

SEQ ID NO: 920653 - DNA, 778 bp, Homo sapiens
cctggcagacactggactagagcagtgtttctaaagtgtagccccttctctctcccgggaagggagacaagtgggtgaggggattggaatctgcattcataacacactccccaggagagactggagagcacctttcccggtgaactcccgtcatgtcaggcctcagcagactgagcgggaacccccaccagcgaggttgctcaggacagcgtttctcttgggcctgtgtttggaacaagtatcctttgaactaatcactaacctgtgaaaatggatagacctcgtgtgaaaatgaaaatgtctggcttcccttctgaggagcggaggcatgaaaggtgtggccggtaggggtgggggccccacacctgtgcagccgccctggccagagcccacaagcagcgtcccctggtcatgccccactcccttctccataatctcgcccctccctgaccaggccacctgacgttgccatttatattcaagttcattccgttgttattcttttagaaaagagagatgagaaatatttcttgtgcctacatctttatcaaaagtagagcaagaaacttgaggactctgtttctagaaaaatkagagtgggcatccctcttctctgaaaggaagaatttccatacctgccctctacccaatgtgtagacgaaaggatgagtgtccttttggtgtgtggagagctttgatggggcatgtgatgtgtagggcttagggggtatgctggggtggctgggaaaggtggttgggtgtcctgggaaggctttta

SEQ ID NO: 920654 - DNA, 856 bp, Homo sapiens
agcatgaatctataaactactttgggcagtatggccattttcatgatattgattcttcctatccatgactatggaatgtttttccatttgtttgtaacctcttttatttccttgagcggtggtttgtagttctgcttgaagaggtccttcacatcccttataagttgtattcctaggtattttattctctttgtaacaattgtgaatgggagttcactcatgatttggctctctgtataggaatgcttgtgatttttgcacactgatttttttatttttatttttttgagacggagtctcgctgtcgcccaggctggagtgcagtggtgcgatctcggctcactgcaggctccgccccccrggttcacgccattctcctgtctcagcctcccaagtagccaggactacaggtgcccaccaccacgcctggctaattttttatatttttagtaaagacggggtttcaccatgttagccaggatggtctcgatctcctgacctcgtgatctgcctgccttggcctcccaaagtgctgggattacaggcatgagccaccgcacctggccgattttttgcacattaattttttatcctgagactttgctaaagttgcttatcagcttaaggagattttgggctgagacaatagggttttctaaatatccaattatgtcatctgcaaacagagacaatttgacttcctctcttcctatttgaatgccctttatttctttctcttgcctgattgctgtggccagaacttccaatattatgttgaataggactggtgagagagggcatccttctcttgtgccagttttcaaagggaatgcttccagcttttgctcattcaata

SEQ ID NO: 920655 - DNA, 856 bp, Homo sapiens
agcatgaatctataaactactttgggcagtatggccattttcatgatattgattcttcctatccatgactatggaatgtttttccatttgtttgtaacctcttttatttccttgagcggtggtttgtagttctgcttgaagaggtccttcacatcccttataagttgtattcctaggtattttattctctttgtaacaattgtgaatgggagttcactcatgatttggctctctgtataggaatgcttgtgatttttgcacactgatttttttatttttatttttttgagacggagtctcgctgtcgcccaggctggagtgcagtggtgcgatctcggctcactgcaggctccgccccccgggttcacgccattctcctgtctcagcctcccaagtagccaggactacaggtgcccaccaccacgcctggctaattttttrtatttttagtaaagacggggtttcaccatgttagccaggatggtctcgatctcctgacctcgtgatctgcctgccttggcctcccaaagtgctgggattacaggcatgagccaccgcacctggccgattttttgcacattaattttttatcctgagactttgctaaagttgcttatcagcttaaggagattttgggctgagacaatagggttttctaaatatccaattatgtcatctgcaaacagagacaatttgacttcctctcttcctatttgaatgccctttatttctttctcttgcctgattgctgtggccagaacttccaatattatgttgaataggactggtgagagagggcatccttctcttgtgccagttttcaaagggaatgcttccagcttttgctcattcaata

SEQ ID NO: 920656 - DNA, 821 bp, Homo sapiens
aataagttataagatagtatttgcaagcttcatggtaacctcaaatcagaaaacatacaacctaccaatattgaaccaggaagaaatccaaagtctaaacagaccaataacaagtaatgagattgaagccataataaagtgtctcacagtaaagaaaagtccaggacctgatggctttactgctggattctaacaaacatttgaagaactaataccaatcctactcaaattattccgaaaaataggggagggaatacttccaaactcattcaacatggccagtattaccctgataccaaaagagacaaagacatatcaaaaaaaggaaaactgtacaccactatctctgatgaatattcacatgaaaatcctcaacaaaatactataatagcaagctgaatttaacaacacatgaaaaagatcatttatcatgaccaagtgagatttatcccagggatgcaaagatggttcaacatatgcaaatcaatcaatatgatacatcatattaacagaatggagaacaaaaacaacaagatcatttcaactgatgctgaaaaagcatttgacaaaattcaatgtctcaccrtgacaaaaaaaaccctcaaaaaactagggagagaagaggcatacctcaacataataaaagccatatatgacaaccacagatagtatcatactgatgggggaaaaactgaaagtctttcctctagatctggaacacaacaaagatgcccactatcaccactgttattaaacatagtactggaagccatagctagagcaatcagacaagagaaagaaataaagagtggtggcacttg

SEQ ID NO: 920657 - DNA, 558 bp, Homo sapiens
cctagagtgtcataataatatggataatacagtctatttctgaagtgttagagaatgtatcagtcagggttctccagagaaacaaaaccagtaggacatacatagacataaaagaggggatttatgatgagaattggctcatgaaattatggaagctgagaagccccatgattggcaaatcaagctggagacccaggggagccaggggtgtcattcagtctgagtctgaaggcctgaacaccaaagcagctgagagtgtgactcccagtttaaggctgaaggcctgagaacacaaagggccaacagtgttaagtcccagagtccaaagtcccaagaacctggagctctgaygtacaagtgcagaaggtggatgactcagctctaaaaaagagacctttctgttctacttgggccctcaacagattggatggtacccatcccacactggtgatggcaggtcctctttcctcagcccacccagttgaatgccagtctcttccagaaacaccctcacagacacacccagaaagaatgctttaccagctatctgggtgtgcc

SEQ ID NO: 920658 - DNA, 558 bp, Homo sapiens
tttgatttgtatttctctaatgaccagtgatggtgagctttttttcatgtttgttggccgcataaatgtcttcttttgagaagtgtctgttcatatccttcacccactttttgatggggttgtttgttttttcttgtaaatgtgttgaagttccttgtagattttggatattaccaccatggcacatgtgtacctatgtaacaaacctgcacgttctgcacatgtatcccagaacytaaagtataatttaaaaaattagaaaaataaatggactgctatacacaattgtagtattacttactgtctacaagtttgtgtgctgcctttttcagttaacactctcattgtgattgcctctcagaaaaaatgacttaatttttttcttcaaattacatagtcaatgttactttagaaaatatgagcagtatttctaagaatactgaacaaagtaagttacccaaaacctccgcatcctaagatagttaccattagcatttggggaatggtttttcatgcatctctttatgcgttttatgctgcttttaaaaatccaacctc

SEQ ID NO: 920659 - DNA, 746 bp, Homo sapiens
agtgtgagctacatatacattaagaaaggttaataaaaacaaggtaattgtttacccaatttttggtaaatcagctaatgatggtggtcatagtggtgatgagttaaatcaagaaataaatgcttgcaaagcaaaaattgtcaggaacacctcctcccaccacatagttcgaaaccaacaatcacaaatatggcaggctcgcagagctttttttgtgctgcattgtttattgttatgcatttgtatgattatggtaggcttgacgaatatttatttgacaataattggtattcatttattcattccttttctaacccatttattgcagttcagggtcacaggtggccagagcctatcccagcagcttagggtggaagacaggagccagccctggaggggacatcattcccatcacagagctcactcacacacacattcttaaaaccgggatcatttagacatgccrgttcacctaacaggcacaattctgggatgtgggaggaaaccagagttcccagaaaaacctcatacatatatgtggagaatgtgtaaaccccatacagacagtggtcccagcaagagagtaatttttttttctcatcaacattataaggaaatgagttgaaagaaatgacattattcaaggacccgctgcactctcttcaactactgtcctaactgttcctcgatataacatatgtggttaagagcatggcccctgaatccaatctgctgggtctgaattc

SEQ ID NO: 920660 - DNA, 599 bp, Homo sapiens
acctgtctgcccctgctcccagggctgactcacagcagtttattttagcagtggttgataaatagctgatcccccaatacccctgccagtgtttcccatcctgtgtaggcagccttgtccccactggggcctgccagaccctcccataatctagcaacagcaagtgcttccagaccctgctgtggtatcagactggatagtgcctggatgttacgcattgttacatatctgtcacccctgcktccattctttcaatcttggccttgagccacttaacaccctgtgcattcagcccctgcctgcaatccaaaccaggaggctcaggcccaccacgtggctgtgggacccatctgatttttggtttttcaatagagaagaacttagcagcttagaatgaggcaagagtctgcagaacccaaggccccttctctgaagttcttgccccacattttcagtcctgacatgttcccagatggcttcactcattcattcccacaccctaggtcttttaaatgggttaaaggacctgtgtgctctcacctgacctgaaaggccacctgtcccatgctagggcctaaccatctattggaccatctaaa

SEQ ID NO: 920661 - DNA, 599 bp, Homo sapiens
acctgtctgcccctgctcccagggctgactcacagcagtttattttagcagtggttgataaatagctgatcccccaatacccctgccagtgtttcccatcctgtgtaggcagccttgtccccactggggcctgccagaccctcccataatctagcaacagcaagtgcttccagaccctgctgtggtatcagactggatagtgcctggatgttacgcattgttacatatctgtcacccctgcgtccattctttcaatcttggccttgagccacttaacaccctgtgcattyagcccctgcctgcaatccaaaccaggaggctcaggcccaccacgtggctgtgggacccatctgatttttggtttttcaatagagaagaacttagcagcttagaatgaggcaagagtctgcagaacccaaggccccttctctgaagttcttgccccacattttcagtcctgacatgttcccagatggcttcactcattcattcccacaccctaggtcttttaaatgggttaaaggacctgtgtgctctcacctgacctgaaaggccacctgtcccatgctagggcctaaccatctattggaccatctaaa

SEQ ID NO: 920662 - DNA, 599 bp, Homo sapiens
acctgtctgcccctgctcccagggctgactcacagcagtttattttagcagtggttgataaatagctgatcccccaatacccctgccagtgtttcccatcctgtgtaggcagccttgtccccactggggcctgccagaccctcccataatctagcaacagcaagtgcttccagaccctgctgtggtatcagactggatagtgcctggatgttacgcattgttacatatctgtcacccctgcgtccattctttcaatcttggccttgagccacttaacaccctgtgcattcagcccctgcctgcaatccaaaccaggaggctcaggcccaccacgtggctgtgggacccatctgatttttggtttttcaatagagaagaacttagcagcttagaatgaggcaagagtctgcagaacycaaggccccttctctgaagttcttgccccacattttcagtcctgacatgttcccagatggcttcactcattcattcccacaccctaggtcttttaaatgggttaaaggacctgtgtgctctcacctgacctgaaaggccacctgtcccatgctagggcctaaccatctattggaccatctaaa

SEQ ID NO: 920663 - DNA, 601 bp, Homo sapiens
tcccaggagaagccgagaagctgctaagctgtcatccacaagactagagtttcatggactatcaaccgaaggggctcctagtgccgtctcctctaatcccctcaatatgcacatgagggaagttgcttcagatggtccctgtgtgtaagggaaagttacgggcagaatctcaactacatccaggggagcccagtgttctttcctgtgcaaaggggtcaggggaggtccacagatgggcagagctggccttaaatgaatttggtagaataaaaattttgcaatacatcagtggaaacagctagaatttctagaacctagaaattcacaggaataacaggtggatgtgaggtatacacacctgtagtagaatstctgaataataagatgagaaaaatgcaaaaatgaaaaggtataatgagatacacataactgaagggaattgtcttaaatggctgattgtaatgagatgtacataaattgtaaggcttgtaatgaaatgaaaagaaatcatattcttgcctgataatactgggtgtaatgtctataccagaaataagttgtctcagtgcattgagtgtaatgagatgcacataattttaaa

SEQ ID NO: 920664 - DNA, 556 bp, Homo sapiens
agaaggactagctaaatatataaaacacaggggaatttttagggtggtgaaaatattttgtataatacagtagtggtgaatgcaagatattaagcattatcaaaatccataggattttatggcaaaatataaaccttaacaggtacaaatttaaaaaaaattagtttggagaatacaaggatggaatgcagaaagtgacaagtctaagtatatgacargtttataaaacaacttcactgaaggtggttagggaataaggtgctgacccacttaacattgggaatgagtgtaatctgtaaagttaaagggaaataaattgtatgtacactgtactgtagctgataaagttgtttcccttaatggtacagattagcaattttgaagtcactaaacatacatactagaattgaacaattaggcaaattgatggcaaatggttggaatcagacttcttgctgctaaaatgaaaggctcaaataagcaagggaagaagactagaaggatccatatggtaatggattagagttggatacatcaataagaacttatatttagt

SEQ ID NO: 920665 - DNA, 722 bp, Homo sapiens
tataaaaagttttctgacccatattttaatacagttgactttagcaacacatatttgaactgcacaggtctacctatatgtggatttttttcaataaatatactggaagattttttgaagatttgtgacacgttgaaaaaaatatacatataaacctgtagtctagaaatatttttaaaaagtttaaaaaaaaggtcaggtatgtcctagatgcaaaaatgtatgtacatactattcatcatttgctataataaaatgtatacaaatctattataaaaagtgaaaatttatcaaaacttatgcacaaacacagactagacatggaamcatttacaactgagaaaaatataaacaaatgtaaaggtgtagcattaaatcacaactgcataaagttaactttagtgtatactatattaccgtaataatttcatagccagctcccattgctattgcagtgagctcaatctgcttaaaacaccatttcacactaatcatctctgcatgagcagtttgtctctccagtaaattgcatattgtagtaaaagatgatctcttgcagttcttatagtgttagtgtctcatgcaataccataaacctagaataacactatgggaccaatacaaagtgccactggtgaggaaggaagtgcttccaaaaagctgagactagtcatgacattacaagaaaaagttaaattattttatatgtatcatacgttaag

SEQ ID NO: 920666 - DNA, 633 bp, Homo sapiens
ctcaggcggctcatacaaaatgaatgttgactgttcatgtagcggtctggaggctggtgggcgtgggctggttgcatggctcctgctgatcagggttccaggattcctccgcctttctctttcaccatctttagcctcagagttcctcacagtgyatgatggctgctggagctcaataatcacaccatgaccaggcaggaggaaaagagagggtgggaagggcaaaggactcatcttccagatgagctagacccccttaaagatctttcctggaagctccctcttcacctaacaacttgactttctgttatgcttcatcagcaacaactacatgtgaggcggggaaatgagtccttgatctgggcattttgctgccccaaataaaaccgggattctgttggtgaggaagaaagggagactggacactgggtagagggctggcagtctctgccttggtgtggaaagggtgcacctccatgcatatgggagaagcaccagtgccttcattccctgacatcgtgtccctgaaggcacctgctgtcacaaacaccacaccatcattcccactcagcctccgcaggtttctctgcaagctcctttgtaggttggcgcagctttgacaacatccctttt

SEQ ID NO: 920667 - DNA, 633 bp, Homo sapiens
ctcaggcggctcatacaaaatgaatgttgactgttcatgtagcggtctggaggctggtgggcgtgggctggttgcatggctcctgctgatcagggttccaggattcctccgcctttctctttcaccatctttagcctcagagttcctcacagtgtatgatggctgctggagctcaataatcacaccatgaccaggcaggaggaaaagagagggtgggaagggcaaaggactcatcttccagatgagctagwcccccttaaagatctttcctggaagctccctcttcacctaacaacttgactttctgttatgcttcatcagcaacaactacatgtgaggcggggaaatgagtccttgatctgggcattttgctgccccaaataaaaccgggattctgttggtgaggaagaaagggagactggacactgggtagagggctggcagtctctgccttggtgtggaaagggtgcacctccatgcatatgggagaagcaccagtgccttcattccctgacatcgtgtccctgaaggcacctgctgtcacaaacaccacaccatcattcccactcagcctccgcaggtttctctgcaagctcctttgtaggttggcgcagctttgacaacatccctttt

SEQ ID NO: 920668 - DNA, 663 bp, Homo sapiens
tttgaatgttggcctgctttgctaggttcaggaaattctctggataacatcctgcagagtgttttccaacttggttccattctccccttcactttcgggtacaccaatcagacgtagatttggtcttttcacatagtcctatatttcttggaggctttgtttgtttctatttattcttttttctctaaacttctcttctcgcttcatttcattcatctgatcatccatcattgataccctttcttccagttgattgaatcggctactgaagcttgtgcattcgtcacgtagttcttgtgccatggttttcagctccatcaggtcctttaaggacttctctgcattggttattctagttagccatttgtctaatcttttttcaaggtttttaacttcttcgccatgggttagaacttcctcctttagctycgagaagtttgatcatctgaagccttcttctctcaacttgtcaaagtcattctctgtcctgttttgttccgttgctggtgaggagctgcattcctttggaggaggagaggcgctctgatttttagaattttcagtttttctgttctgttttttccccatctttgcagttttatctacctttggtctttgatgatgctgacgtacagatggggttttggtgtggatgtcctttct

SEQ ID NO: 920669 - DNA, 663 bp, Homo sapiens
tttgaatgttggcctgctttgctaggttcaggaaattctctggataacatcctgcagagtgttttccaacttggttccattctccccttcactttcgggtacaccaatcagacgtagatttggtcttttcacatagtcctatatttcttggaggctttgtttgtttctatttattcttttttctctaaacttctcttctcgcttcatttcattcatctgatcatccatcattgataccctttcttccagttgattgaatcggctactgaagcttgtgcattcgtcacgtagttcttgtgccatggttttcagctccatcaggtcctttaaggacttctctgcattggttattctagttagccatttgtctaatcttttttcaaggtttttaacttcttcgccatgggttagaacttcctcctttagctcsgagaagtttgatcatctgaagccttcttctctcaacttgtcaaagtcattctctgtcctgttttgttccgttgctggtgaggagctgcattcctttggaggaggagaggcgctctgatttttagaattttcagtttttctgttctgttttttccccatctttgcagttttatctacctttggtctttgatgatgctgacgtacagatggggttttggtgtggatgtcctttct

SEQ ID NO: 920670 - DNA, 858 bp, Homo sapiens
attctgctattaaggaactctgatgcattcttcagtatgccaattgcatttttcaactccagaatttctgcttcttttacttcaatctccattgaatttatctgatcaaaatatgaattctgtctttgtgttaccttgaatttctttgtgtttcttcaatgcagctattttgaattttctgttgaaaggctatatatcattgttactccaggatttgaccttggtgccttatttagttcatttgttgaagtcatgttttcctgaatggtgttgatgctagcagatgttcttttggtgtctgggcattgaagagttaggtatttattgtagtcttcactgtctgggtttatttgtagccatcattattgggaaagctttctggctatttgtctggacttgagtgtcatgatctagacttgagatgcttcagagagcaccccaagctcagtaatgctgtggttcttgcagactcacagaggtaccaccttgatggtcttggacaatatctgggagaattctcacaatgatcacacagagacttttcttcccttactcccaaacatagagcctgtctgttctgagccacctcaagcttgggatggagtgacacaagcacacctgagaccgccccctactgtgacttcactgggtctcacccaaggcctgctttaactactccstggccaacacctatgttcagtgaaggccctggggttctatagtcagcaggtggcaaaggcacaccagcctgtgtccttcactttggagcagtgaggttcccttcagcctcaggtgtgtctagaagggccatctgggagtcagcaactgaagtcaaacattttagaactctacctggta

SEQ ID NO: 920671 - DNA, 585 bp, Homo sapiens
caaacctagatggtatagcctactatacacctaggatatatggtaaagtctattgctcctaggctacaaacctgaactgcatgttactgtattgaatactgtaggcaattttaacacaatggtatttgtgtatctaaacatagctaaacatggaaatggtacagtaacaatatggtataaaatataaaagtggtatgcctgaataggcacttatgatgaacacagtttgcagaactagcagttgctctaggggtgagtgaatgtgaaggcctaggacattaccgtgcaccactgtagactctacaaatactgtacacataggctacactaaaattgttttttaaaaaccttttctttcttcaataataagttaaccttaatttactgtaactyttttttcctgcaaatgagttactatctccttattcttcatctattctttttttaattattataccttaagttctctgatacatgtgcagaacgtgcaggtttgttacataggtatacatgtgccatggtggtttgctgcacccatcaatccatcatctacattaggtatttctcctaatgctatccttcccc

SEQ ID NO: 920672 - DNA, 604 bp, Homo sapiens
gaatgtcttcctttgagaagtgtctgtttaggtcctttgcccactttttaatggagttgttttgttcctgtaaatttaagtttcttgtagtcgctgaatatcagacctttgtcagatcgatatattgcaaaatttttctcccattctttaggttgtctattcactctgatgatagtttcctttgctgtgcagaagctctgtagtttaattagatcccacttgtcaatttttgattttgtctcaattgcttttggcattttcatcatgaaatctttgcctgtgcctatgtcctgaatggtattgcctagattttctaggatttttatagttttgggttttcatgtaaatctttaatccatcttgagttaatttttgtataaggtgtaaggaaggggcccagtttcaattttctgcgtatggctagccagttctcccagcaccatttattaaatagggaawcatttcccccattgcttgtttttgtcagttttgctgaagatcagttagttgtaggtatgcagtcttatttctgacttctctgttacgtttcatttgtctatgagtctgtttttgtaccagtaccatgctgttttggttattgtag

SEQ ID NO: 920673 - DNA, 728 bp, Homo sapiens
tgcccacccagattaggggtgggtctgcctctcctagtccagtgactcaaatgttaatctcctttggcaacaccctcacagacacacctaggaacaatactttgcatccttcaatccaatcaagttgacacttagtattaatcatcacatgctctaaagaacaaacagctctgaataggacttccagtactacattaaatagaagtcatgataatgaatatccttgtctagttctggatcttgaaaaaacgttttcagcttttcactattgactataatgttagctgtgagtttgtcatatatagcctttcttatgttgaagtacattccttctacacttaatttgctgagacttttgctgaattttgtcmaacactttttatgcatctattgagatactgtggcttttttcctttattcttgtaatgtgatatatcctatttattaatttgaatatgttgaaccatccttgcatccaaaataaatcccacttgttcattgtgaataattcatttggtgtgttatttaatttgacttgatagtatattgttgagaagttttatatctctgttcatcagaaatgttagcctgtaatattcttttttatagtgtccttgtctggctttgctatcaggataattctgggctaacaaaatgagttgaaaatggttccctctttttccattttttgaaagagtttaagaaggattggtgttaactctttaaat

SEQ ID NO: 920674 - DNA, 745 bp, Homo sapiens
gctaacaaaatgagttgaaaatggttccctctttttccattttttgaaagagtttaagaaggattggtgttaactctttaaatgtttactatcattcaccaattaaaccatcaggtcctgtgcttttctttgttgagaggtttttaatcaattattcaatttccttactcaatattgtttttcttccaagatggcagattagaaggttctccagcatgcttcacccacctggtagtgtagtgattcacactgtgaaactttattcatgaaggatcatgggaattcaaccaaaaagtaaaggacactttacatcacggggaagagaagttggtcagacagccygcacaacaggatatggctgagaactgtgagtaaagttccaaagaggaaagaggaagagagtgtccctctgtgattcacccttccactggggaacagtgcaacccaggccacaggaaagcacattgtctctcccaatacctaaagctaacatgaggagaggctgtgagaagtaaaggctgtgagagactgtgagaagtgaaggcactaggaggttccctatgcatgttctcagatctggaaactgataggaggaaatcattctcaatccagcctcatatcaagctgggaagaatttagcaacctagcagcagcaactgccactggcattagagtctcaggctggagattggagtgttgggtctggagcaggggagaggactccacactcagaactgagagatga

SEQ ID NO: 920675 - DNA, 623 bp, Homo sapiens
gctgatcaaaatgttgaaagtttatcacagctgaaatgtacaagacagtagtgacactgagctctccaattatttttaagaatggggcaccaaaatgttcattggtagctgttggtgtttgtatggggagcataargcttatcaacttgggttgctcttagagtgcaactcttgttgagttttatgttgcaggaacccttcatgtcagtgcctctaggtttattcttggactggtcagcttccccaaaggaggctcttccaaactcctgctaagctttgtaagtgtggcttccctttctgaggctaagtgagagaagagagctgaatggtggtagggttaggggtgggggttcaactttttcttcttctcagctatacttctcttcatatgccaagagagcctctgttttgcaatcaacagagaataagtctttattcttctgccgaagtgaaggaagaaatctagggttttacagcatcaaatataattttaattgattctcctgtttttaacttcacctgtatctccacttttagatgtatatagagccacaaattccagaaccttttgagatttcttctgtttctggaagctttctccaacactggcttaggatacagct

SEQ ID NO: 920676 - DNA, 634 bp, Homo sapiens
tagtaccgatagcacttttaacttacgtctagttaaaagccagacatcctggattcagattctagcttgaccacttataagcgccatgaatgtggcaagttagccttttttgcatctgtttctttatctgcataaagcaataacaataccacctacctcatggtttttttcctgagaataaataattatatacagtcatgcattgcttaagatcagagaaatgtgtcactgggcgatcatgagtttgtgtgaacatcatagtgtgtacttacacagactcagatggtgtagccttctacacaccttggatatatggtatagcctattcctgctaggctacaaactcgtgcagcatgttatggtactgaatactgcaggcaattgtagcacactggtaagtatttatgtatctaaacacatctaaacatagaaaaagtacmcagtaaaaatacagtattatactcttatgggaccacaatagtatattgactgaaatattgttatacagcacatgaccttataaaacatgtttgaatagcgcttggcatatagtaaccatttagtacatactagttattaatgttattattttgattggataggcctggttgaagatggctgagcgtaaaacaga

SEQ ID NO: 920677 - DNA, 565 bp, Homo sapiens
ctctgtttcccttttaaaactgagtgcctttaatagcacccaagtcaattattgaatgctttgctgcttagaaatttcttctgccagatatcctaaatcatctgtctcaaattcaaagttctacaaatctctagggcaggggcaaaatgttgcagtctcttcactaaaacataacaagagtcaccttcactcaaacatagcaagagtcacctttgctccggttcccaacaagttactcrtctccatctgagaccacctcagcctggatttcattgtccatatcattttcagcattttagtcaaagccgttcaacaggtctctaggaggttccaaattgtcccacattttcctgtcttcttctgagccctccaaactgttccaacctctgcctgttacccagttccaaagttgcttccacattttcaggtatcttttcagcagcaccccactctactggtacaagtttactgtattagtccatttttacactgctgataaagacatacttgaggctgggcaatctacaaaagaaagaggcttaatggacttacagatccacatggc

SEQ ID NO: 920678 - DNA, 581 bp, Homo sapiens
caaaaactaatagaactggaggaagaaatagacaaagtcacaattatagttggagactctgacacctctctctcaataattgatagaacaattagacagaaaatcaacaagaatatagaagaactaaacaccaccatcactcaacaagatctaatcaacatttatacaacataccgctcaacaacagcagactacaaattcttttcaagtgcccacagaacacacaggaagagagaccatatcctgattcataagatraacctccactaatttaaaatattgaaatcatacaagtatgttcactaaccacagtggaatcaaagtggaaatcagttacacaaaggtaataggaaaacgtccagtccttggaaactgaacaacaaatttctaagtatccatgggtcaaacaggaaatatcaaaacaaatttgaaaaaacatattgatctaacttggccaggcacagtggctcacgcctgtgatcccagcactttgggaggccgaggtgggtggatcgcaaggtcaggaatttgagaccatcttggctaacacgatgaaaccccatctctactaaaaatacaaa

SEQ ID NO: 920679 - DNA, 581 bp, Homo sapiens
caaaaactaatagaactggaggaagaaatagacaaagtcacaattatagttggagactctgacacctctctctcaataattgatagaacaattagacagaaaatcaacaagaatatagaagaactaaacaccaccatcactcaacaagatctaatcaacatttatacaacataccgctcaacaacagcagactacaaattcttttcaagtgcccacagaacacacaggaagagagaccatatcctgattcataagataaacctccactaatttawaatattgaaatcatacaagtatgttcactaaccacagtggaatcaaagtggaaatcagttacacaaaggtaataggaaaacgtccagtccttggaaactgaacaacaaatttctaagtatccatgggtcaaacaggaaatatcaaaacaaatttgaaaaaacatattgatctaacttggccaggcacagtggctcacgcctgtgatcccagcactttgggaggccgaggtgggtggatcgcaaggtcaggaatttgagaccatcttggctaacacgatgaaaccccatctctactaaaaatacaaa

SEQ ID NO: 920680 - DNA, 562 bp, Homo sapiens
gtggaccaccacacctgactaatttttatattttttggtagagatagggtttcaccatgttgcccagggttctgggctcaagcaatccacctatcttggcctctcaaagtgttaggattacaggtgtgagctaccatgcccagccaaagtgagttgtttaaacaaaaagtcacaaactagtaaatcaagagccaaattagagacagggacatttttttctgtgagccacacaagttttgtttttcaattagttaccaagatttaatgttcttttaaaatccagattcacagcttcctattaaaaaacagaatttgggaatactggactgatgactataatcagctagagtgagtcacagatgcctccctgcccttgccccattyttcagccgggtgtaatctcaatcctgcccactttagccttttattgtcttcctggcctttgtaaatatttgaatctgcaactgtttttggttttttttttttttttttttttttgagacagagtcttgctctatcacccaggctggagtgcagtggcacaaactcagctcactgcagc

SEQ ID NO: 920681 - DNA, 629 bp, Homo sapiens
aacaaccagtggtgattacaaaggtaaaattaccaacattaaaaccagtcataggaaactggagaacattatgttaagcaaaataagccaggcacagaaggacaaatttcacatgttctcactcaaacgtgggagttaaaaagtaagcaaactgagctcgtggagacgcacagtagaatgatggttggcagaggctgggaagggtagcagggaatgggggataaagaggtgatagttaacgggcgcaaaaatacaattaaatagatctaatgttaggcggcacaataaggcaactatagttaactataatttgctgtacatttcaaactaacttaaagaatggaactagaatgtttctaacacaaagaaatgataratggttgagtggtggatacccagttaccctaatttgatcattgcacattgtatgcctgtatcaaaacctcacacataccccataaatatatacgtaattattatgtaagcataataattattttttttaaatgttaaaaaaaatcatagttaccgcttccaccacttcattttggtttgtgtttgtttaaccaagaaggaattccctagaggaaaggtggaaggacaaagacacacataggcagaaaggacag

SEQ ID NO: 920682 - DNA, 793 bp, Homo sapiens
aaagatgggtgatttctgcatttccaactgaggtacatggttcatctcactgggactagttggacagtgggtgcagcccatggagggcaagctgaagcagggtgagcacaaggggtcaggggatttccctttcctagccaagggaagctgtgacagacagtacctggaaaaatgggagactccccacccaaatactgcgcttttccaatggtcttagcaaatggtacaccaggagattatcctgcacctggcttggtggatcccacacccacagagccttgcttactgctagctcagcagtctgagatcraccttcaaggcagcagcctagcagggggaggggcatctgccattgctgaggcttgagtaggtaaacaaagcagcctgagatgctcgaattgggtggagcccactgcagctcagcaaggcctactgcctctgtggtctccacctctggggccaggacatagctgaacaaaaagcagcagaaacttctgcagacttaaatgcccatctgacagctctgaagagagcagtggttctcccagcatgctgtttgagctcagagaatggatagactgcctccccaagtgggtccctgacccccatgtagcctaactgggagacacctcccagtaggggctgactgacactgcatacaggtaggtgaccctctgggacaaagcttctagaggaaggatcaggcaacaatatttgctgttctgcaatatttgctgttctgcagcctctgctggtgatacccagggaaataggatacctccagcaaactcca

SEQ ID NO: 920683 - DNA, 793 bp, Homo sapiens
aaagatgggtgatttctgcatttccaactgaggtacatggttcatctcactgggactagttggacagtgggtgcagcccatggagggcaagctgaagcagggtgagcacaaggggtcaggggatttccctttcctagccaagggaagctgtgacagacagtacctggaaaaatgggagactccccacccaaatactgcgcttttccaatggtcttagcaaatggtacaccaggagattatcctgcacctggcttggtggatcccacacccacagagccttgcttactgctagctcagcagtctgagatcaaccttcaaggcagcagcctagcagggggaggggcatctgccattgctgaggcttgagtaggtaaacaaagcagcctgagatgctcgaattgggtggagcccactgcagctcagcaaggcctactgcctctgtggtctccacctctggggcmaggacatagctgaacaaaaagcagcagaaacttctgcagacttaaatgcccatctgacagctctgaagagagcagtggttctcccagcatgctgtttgagctcagagaatggatagactgcctccccaagtgggtccctgacccccatgtagcctaactgggagacacctcccagtaggggctgactgacactgcatacaggtaggtgaccctctgggacaaagcttctagaggaaggatcaggcaacaatatttgctgttctgcaatatttgctgttctgcagcctctgctggtgatacccagggaaataggatacctccagcaaactcca

SEQ ID NO: 920684 - DNA, 595 bp, Homo sapiens
acacctaatcctggaggataaatttattactcaagcagcacctgatatcaggaggaagtcacagaaacaggtcctggacctggatagtacattagacgacctcctgaaagtggccaccttgatcttttacaatagagatagggagacacaagaaagagacagaagctttgatggccatcatataagcccataagccccataattctcagggtgcacctattaactgctacaggtgtggcaagaacrgttatctctcttctaaaatttaactgctcccatagaaggtttaatttctttcaccagaatgaaacatcttggggtacaaattgttagtatattttacttcttatttctgttaatctttgtcactagattattttcttctataatacacatgtttaactcatgcatacttaaccttataaagcttggttttttgtttgtttgtttgtttgtttgtttgttttttctctcacctagaggctatcaaactccaaatggtcagtcaactggagcctcagatgatagctcccttttgccagggacccgcagataagacctctgggaggaatctgactgccattttccccaaaac

SEQ ID NO: 920685 - DNA, 611 bp, Homo sapiens
tccaggggaaaatacactctgattttcaaataatgtaagcacatgaaaaggtgctcaacatcatcagtcactagggaaagagatataaaaataatgagatacttcaggtctactaggatggctattaaaaaaaccacaaaacaaaaagtaacaagtgttgatgaggatgtaaagaaattgcaactcacacattactgatgagaatataaaayggtgcaggcactacgaaaaccagtttggtggttcctcagaaagctaacatagaattaccatatgactcagcaattccacccttaggtatatatcccaagtaactgaaagcagtgatttggacagatacttgcatgccagtgtttattatagaattactcacaataaccaaaaggtgaaaataactcaagtgcccatcattagatgaataaacaaaatgtggcatatatgtataattgaacagtattgtcataaaaacaaatgaaattctgatacatgctaacaaatgagtgtatcttgacaacataagtgaaataggccagtcacaaaaggacaaatattatacagttccacttttataaactatccagaataggcaaattcatagagacaaaaagtag

SEQ ID NO: 920686 - DNA, 658 bp, Homo sapiens
tcaacagtatttccaggggaaaatacactctgattttcaaataatgtaagcacatgaaaaggtgctcaacatcatcagtcactagggaaagagatataaaaataatgagatacttcaggtctactaggatggctattaaaaaaaccacaaaacaaaaagtaacaagtgttgatgaggatgtaaagaaattgcaactcacacattactgatgagaatataaaacggtgcaggcactacgaaaaccagtttggtggttcctcagaaagctaacatagaattaccatatgactcagcaattccacccttaggtatatatcccaagtaactgaaagcagtgatttggacagatacttgcatgccagtrtttattatagaattactcacaataaccaaaaggtgaaaataactcaagtgcccatcattagatgaataaacaaaatgtggcatatatgtataattgaacagtattgtcataaaaacaaatgaaattctgatacatgctaacaaatgagtgtatcttgacaacataagtgaaataggccagtcacaaaaggacaaatattatacagttccacttttataaactatccagaataggcaaattcatagagacaaaaagtagattaaaggttaccaggggctgggaagacagtggaag

SEQ ID NO: 920687 - DNA, 720 bp, Homo sapiens
cacaactagattttattctaatttataaaacaaaaaatgattagacaagcacatgatatcaagagtcttcaacctagtggattccatttcattaagcaaaaaaaaaaaaaagaaagaaagaaaacaagtagcccttaaattttcttagctctctatagcatacattatataaaattaaagttttgcttccaaaaatatgtctccatgttgtcgtgatgttgtccagtactattagggccaaaacaccaaagacatgagaagtttaaccactgacttgtcacttttcataaaaactaaacatttccttataggtctggagtaaaatcttctaggcattttagtgctaaaagtcatttcaaattaagtgtgaaataaaagctacaaaaagtatgagttctttcaatacaaaaagctgtgtagctgaagttgtgggctcgtttgacatacataagcagtttcagtaaaatatttgctcaggtaaggaaatagaatttgtctgctgtcatttagcatacgttccagtccatgtcctgcttawaccttccagaccttctaaagaacattagaatcgatatttctaaagtcttattcctgctccctctgtcggattcttatagacggtcaggagcagaaggccttagagtccatgaactccaaacccctcttcttattttacaataaaaaacactgacgtgaaggggtgttattaggtgatttgcc

SEQ ID NO: 920688 - DNA, 720 bp, Homo sapiens
cacaactagattttattctaatttataaaacaaaaaatgattagacaagcacatgatatcaagagtcttcaacctagtggattccatttcattaagcaaaaaaaaaaaaaagaaagaaagaaaacaagtagcccttaaattttcttagctctctatagcatacattatataaaattaaagttttgcttccaaaaatatgtctccatgttgtcgtgatgttgtccagtactattagggccaaaacaccaaagacatgagaagtttaaccactgacttgtcacttttcataaaaactaaacatttccttataggtctggagtaaaatcttctaggcattttagtgctaaaagtcatttcaaattaagtgtgaaataaaagctacaaaaagtatgagttctttcaatacaaaaagctgtgtagctgaagttgtgggctcgtttgacatacataagcagtttcagtaaaatatttgctcaggtaaggaaatagaatttgtctgctgtcatttagcatacgttccagtccatgtcctgcttatrccttccagaccttctaaagaacattagaatcgatatttctaaagtcttattcctgctccctctgtcggattcttatagacggtcaggagcagaaggccttagagtccatgaactccaaacccctcttcttattttacaataaaaaacactgacgtgaaggggtgttattaggtgatttgcc

SEQ ID NO: 920689 - DNA, 766 bp, Homo sapiens
ctgcacctgtgactttgttgacagaaacttcccaagagtggaaagacctggtattcaagacttgccacccagattcctttgtcccacagcagcttcccttgaggtggtacactcccccttcccctaggaatagaagttcctgagagccagactactgtgagtgctgttgctcttctgggtccagtcacccagtgggactgccacactccaggctggtgttggggaatgtctgcaagagatccagtgatgtgacctgccctcaagtctcccagcagtgggtaccagcacgaagggatccagttatatgacctgtcctcaagtcttccaacagcaggtaccagcaccagctctgataggggtggccggggattgatgtagactctgtgagattccttacttatagatagccttagtgtgatctctgttatcaccctttcatgcactactctggctaactcagagatcttgagtctgtccatgtgactagtttattactactatarccatcattcaagaaagccaacacactaaggctatcaataaccaaggtatttcagagtttacatcattcccctgccacctccattagagctggttatattagtggacagactcaggacctcctggttagccactgtggtgcaggcaatggtcatagctgaggtcatgcaccagctctctccctcctgggtacagtgttattctaccaggagatgctgtaatggacagtgtctgttggcctccagtcatgaggtggtacttgcaa

SEQ ID NO: 920690 - DNA, 657 bp, Homo sapiens
gtggatggtttaggataatgtattagtttcctgtggctgctgtaacaaattaccacaaatcaggtgactaaaaacaacagaaatgtattctctcacagttctggggaccaaaagtccaaaatcaatatgttggcaagtgctgtggtttgaacatttgtcttctccaaaactcatgttgaaacttaatctccagtgtggcagtgttgagagatgattgggtcgtaagggctctgcccttgtgaatggattaatccgttcatggattagtgggttaatggattaataggttatcatgggagtggaactggtggccttataagaagaagaaaagagacctgagctagcacgctcagcccctttgccatgtcatgctctgtgccgctttgggattctgcagagtctccaccagaagaaggctstcaccacatgtggcccctcaacctgggacgtcttagcctccatagctataagaaataaatgtcttttctttataaattactgtttcaggtgttataagcaatgaaaaacggactaagcagggctgtgctgcccctgaaggctgtagaggagaatctgttcctaggctctttcagcttctggtggctccaggtcttccttggcttgtgaccatgtgactccagtctctgcttctgtggt

SEQ ID NO: 920691 - DNA, 742 bp, Homo sapiens
ttacccaccttctgaagcctattcctgtcaactcagcaaactcgttctccatccagttttgttcctttgctgacgaagagttgtgatcctttggaggagaagaggcattctgttttttggaattttctgcattttacgctggttgttcctcatctttgtggatttatctacctttagtctttgatgttggtgaccttcagacggagtttttgcgtggtcatcctttttgttgatattgatgctactgctttctgtttgttagttttccgtctaacactcaggcctcttttctgcaggtctgctggagtttgctgggggtccactccagactctatttgcctgggtatcaccagcagagacyggagaacagcagagattgctgcctgctacttcctctggaagcttcgtcccagaggggctcccgtcagatgccagccagtgctctcctgtatgaggtgtatgtctacccctgctgggaggtgtctcttcatcaggaggcatggggtcaaggacccagttgaggaggtagtctgtcccttatcagagctcgagcctgtgctgggagatttgttgctctcttcagagctggcaggcaggaatgtttaagtctgttgaagctgcgcccacagccaccccttcccccagatgctctgtcccagggagatgggagttttatctataagcccctgactgggactgctgcctttctttcagagatgccctgcccagagaggaggaatct

SEQ ID NO: 920692 - DNA, 687 bp, Homo sapiens
tgaactagtattcctttccatataatataaatcttctcccagtaaaatacttctctaaaggagaaattctaaatagtctcagttttaaaaatcagatcaaatgtgacttaaatgtacacacagtatttctgagccaacaacgattgtataccatgcttagtctcaaaccaaaacttaattatgcaaatcatccccagacaaagcaggtgcataataggaggacaactatacttgggtgtgtgtaaggatgagggaagggtgttcaaaaacagcaagaggagaaaggaagccaatgaatgtatgaaagttaaaatatttagcatggggayggctctttcatctttatttagctgctagtttttctaccttgtcagtctaaatgtgaaattggtattataatttgaatactgaatattgaaaatgtgttttattattttttataaaaatagactttagaaaatcattatactattatttagacacaaagcataaaagtaaattaaaatatctttgaataaaatgttttatataagagaactttgtgtgacaactcaagttatttaagtaaagtttctgtccatctctataattaatgtttcaatttcttcattaagacagcaagtgaatagggctaagtagattttcttcaaatctgagtatgttgataatggtctggtttaagatatg

SEQ ID NO: 920693 - DNA, 687 bp, Homo sapiens
tgaactagtattcctttccatataatataaatcttctcccagtaaaatacttctctaaaggagaaattctaaatagtctcagttttaaaaatcagatcaaatgtgacttaaatgtacacacagtatttctgagccaacaacgattgtataccatgcttagtctcaaaccaaaacttaattatgcaaatcatccccagacaaagcaggtgcataataggaggacaactatacttgggtgtgtgtaaggatgagggaagggtgttcaaaaacagcaagaggagaaaggaagccaatgaatgtatgaaagttaaaatatttagcatggggacggctctttcatctttatttagctgctagtttttctacmttgtcagtctaaatgtgaaattggtattataatttgaatactgaatattgaaaatgtgttttattattttttataaaaatagactttagaaaatcattatactattatttagacacaaagcataaaagtaaattaaaatatctttgaataaaatgttttatataagagaactttgtgtgacaactcaagttatttaagtaaagtttctgtccatctctataattaatgtttcaatttcttcattaagacagcaagtgaatagggctaagtagattttcttcaaatctgagtatgttgataatggtctggtttaagatatg

SEQ ID NO: 920694 - DNA, 687 bp, Homo sapiens
tgaactagtattcctttccatataatataaatcttctcccagtaaaatacttctctaaaggagaaattctaaatagtctcagttttaaaaatcagatcaaatgtgacttaaatgtacacacagtatttctgagccaacaacgattgtataccatgcttagtctcaaaccaaaacttaattatgcaaatcatccccagacaaagcaggtgcataataggaggacaactatacttgggtgtgtgtaaggatgagggaagggtgttcaaaaacagcaagaggagaaaggaagccaatgaatgtatgaaagttaaaatatttagcatggggacggctctttcatctttatttagctgctagtttttctaccttgtcagtctaaatgtgaaattggtattataatttgaatactgaatattgaaaatgtgttttattattttttataaaaatagaytttagaaaatcattatactattatttagacacaaagcataaaagtaaattaaaatatctttgaataaaatgttttatataagagaactttgtgtgacaactcaagttatttaagtaaagtttctgtccatctctataattaatgtttcaatttcttcattaagacagcaagtgaatagggctaagtagattttcttcaaatctgagtatgttgataatggtctggtttaagatatg

SEQ ID NO: 920695 - DNA, 643 bp, Homo sapiens
taaaagtaccactctagtgagcatctcatagtaggtcttcagtaaatggcagtcatcattgttggttttgttattattttccttctttcaggcttcacctttctagcttatctccagtaattgtttataattattaataatttttaaacgactgttcaaaattatgttgcatttgtaagttttgcttcttgagctaggtttaagctctttgaaggcaaatgttctactgttgctatttacatactccactaaatgtgccttgtgtctaaagcagtgattgttaacaatacaattaatccatatcacttgaagtggttccttgaggaagaataaaatatttctcttgccctgcttgtctgtggttattctgcttttgctgtctgtataatgaaatataaagtgcttcatctggatttgagaccttctagytttccccagtaaatataggaaagagagaagacttttacatatctgttctctgtaagacttgtttccaatttttaattatataactattattaacttcaaattgtgcttagagtttcaagacgttaatgacatgttgccactaagtatgcagtcaacgcatgcagatgacagtgaggttaccctgagactggaaacaagatgactttcagacaac

SEQ ID NO: 920696 - DNA, 617 bp, Homo sapiens
aggagagtgcagtcaaatgaattgtaagggagaaaatggtcctgagtccaggccaagccattgggacaaaaggaggagtcctttgtgacagaaaagagacagaccctccattatgggacaaactaatgagttgcaggcaggagaagcagcacagtcagttgtcagggatagaattgctgaccagatagaagygctagaaggaggggagtggaggctgggcaggtgaaagcgtgcagaggacccagaggaccagaggagagcagggagctatgcgtatgatgcagcagtgatgagggctggttaggataaatcacaagaatggcttgttgtttattttttcccccagctactgtttaagtttataagtggcactatttgtctagttagaatcttactgctatatggaactcataccaaaagtcatggtgtataactgtttcgtatgtgccgtaagacagctttgagaccctctaacgacagagtcaccatctcagctttagataagaattcaaagatcctcttgaatccacccgttttttaaaaatacaaattggattatatcactcccatgtttaaaatttttcaatcatatttcatttcctttaacaaaaccttct

SEQ ID NO: 920697 - DNA, 596 bp, Homo sapiens
ttttttgccaaaattgataagctgagtcaaaaattcatacagaaattcaagagactcagaataactaaaacaatcctgaaaaacatgaacaaagttggaagaatcacactttcaattttaaaacttaccataaagccatagtaattaagacagtgtggttcatcaatggattggaattgagagctcagaaatcaaccctcatatttatggtcaattgattttcaacagggttggcaagacagtttaatggagaaagaatagtatttttaacaaataatactggsgtaaatggatattcatatgcaaaacaataaatttgacccttacctcacatagataaaaacctcaaaattaatcaaagacctaaatgtaagagcctaaactataaaactcttaggagaaaacataatcataaatcttcatgacaatgggttccttaactctgacaccaaaatcacaagcaacaaaagaaaaataaggtaaattagatttcaacattaaaaaactttgtgtttcaaaggtcactataaagaaagtgaaaagacaacccaaaggatgggaaaaatatttgcaaattatatacttgataagccact

SEQ ID NO: 920698 - DNA, 596 bp, Homo sapiens
ttttttgccaaaattgataagctgagtcaaaaattcatacagaaattcaagagactcagaataactaaaacaatcctgaaaaacatgaacaaagttggaagaatcacactttcaattttaaaacttaccataaagccatagtaattaagacagtgtggttcatcaatggattggaattgagagctcagaaatcaaccctcatatttatggtcaattgattttcaacagggttggcaagacagtttaatggagaaagaatagtatttttaacaaataatactggcgtaaatggatattcatatgcaaaacaataaatttgacccttacctcacatagataaaaacctcaaaattaatcaaagacctaaatgtaagagcctaaactataaaaytcttaggagaaaacataatcataaatcttcatgacaatgggttccttaactctgacaccaaaatcacaagcaacaaaagaaaaataaggtaaattagatttcaacattaaaaaactttgtgtttcaaaggtcactataaagaaagtgaaaagacaacccaaaggatgggaaaaatatttgcaaattatatacttgataagccact

SEQ ID NO: 920699 - DNA, 605 bp, Homo sapiens
tttctataccccgcctcctgctgccccggccaggaggctagatctcagaatgcagtcagaaaaatccttcactgagaggactagattgcagctctgaacagagcagcatgtggaggcgtgcattgtgaattttagctccagatcaactgcaagaataaacctgcaatcccaagaggacccacaaaccctctgaaggaagcagactgctcccgcaggacctaagagacaccccaaatactgtgagtgccccaactgcggaagtggraaaggaagaccctcctctcctgaacacacacccccactggagaagctgaaggtctgtttgtgggagaagtttccaacttaactggagctgagtcaagttagagagcccagcaaaatgcaggggtagaagaagcagcaaggccctgggagctctctgggtctccaagcagcccattcctctctggtaccatagggatccactgggagggtggctagaggagcagagggtaaaactccatggggagaaggaattctctagctgaactttgtaagtttgaacagggcaagaagcctcctggccagaactcaagggagggtgtgaatccggtgtgcagacttca

SEQ ID NO: 920700 - DNA, 809 bp, Homo sapiens
ctgctttattctttctaattaccttaatctctttgttaaatttatctgatagaattctgaattccttctctgtattatctttaatttcttttgagtttcctcaacacagcgaatttggattctctgtctgaaaggtcacatatctctatttctccaggattggtccttggtgtggtgttttatttagtttatttggtgagatcatgacctcaccatggatggtcttgatgcttgtggatgttcatctatgtctgtgcatagaaaagttaggtattaattgtagtctttgcactctgagcttatttgttcctgtctttcttgggaaggttttccagctatttgaaagaatgtaggtgttctgatctaacccatatctgcattacagggcaccccacacccagtgacattgtgtttctttcagacttgtaaaggtactgccttgatggtcttagataagatcgggaagaacactctggattaccaggcagagacccttgttttcttcctttcactcaaacaaatagagactctttctctctgttctgagacacctggggctggggctggggtgacacaaacacccccrtgacaaccaccactgggactgtactaggtcagacctgaaaccagcacagcacttgattttgcccaaggctcactgtaactactacctagctgccacctatgtccactcaaggccctgatgatgtacagtcagcaggtggcaaaggagataggctggtgtctttcccttcaggatgctgagtttccttaggccccaagcaggtccagaggtgccatccaggaac

SEQ ID NO: 920701 - DNA, 604 bp, Homo sapiens
tcagctattgatacttgtgtatgcttcatgaagttctctagctgtgtttttcagttccattaggtcctttatgctcttctccagactggttattgtagttagcaattcctctaaccttttatcaaagttcttagcttccttgcattgggttagaacatcctccactagcttggaggagtttattatccaccttctgaatcctacttctgtcaatttgtcaaactcattctccatccagttttgttcccttgctgatgaggagttgtgatcctttggaggagaagaggcattctggtttttggaattttcagcctttttgcgcctgtttttcctcatctttgtggatttatttacctttggtctttgctgttggtgacctacrgatgaagtttttgcatggtcatcctttttgttgatgttgatggtattgctttctgtttgttacttttccttctaacaggcccctctgctgcaggtctgctggagtttgctggaggtccactccagaccctgtttgtctgtgtatcaccagcggagactgcagaacagcaaaggttgctgcctgctccttcctctgaaagcttcatcccagaggtacacctgc

SEQ ID NO: 920702 - DNA, 626 bp, Homo sapiens
tagaaaatctccaacctagaagtgatcaagaattaggttaaccatagaaggcatatcatctgaaagtctgtcacctatcttgggctattttaatgtctttctatctgaaacacgaagatagaacccaaggagttgagttggtctcttctgaggaaaatgctaggacaaaaaacaaaaatacaaagttcactgtcacccaaacccctgagcatcacagaacaggactgaaragccacctgccatgactgaaaccagcctaatatttcatagaactgatgtctatgggtttttttcttgaataaacatggaaattgaccctcctgttcttgaagcttgagaaacttacatttgtcttatttgagtttcttactcaggaaaccaaccatcaggcctcccatatagtattagagttgaaactcactgcatctagccaggcaatagactcttcatccaaccatataggagttggcctcttggccaactcttatataaacccctaactttagggagagactgatttgagactggcctcctgtctcctagctgatgtcactcattttaaagtctttcttccctggcaatacttgttgtcttggtgattggctttctgtgcagtgagcagctgg

SEQ ID NO: 920703 - DNA, 562 bp, Homo sapiens
ttcatcagtatcattgcaatgagggtggcaggaagtggttggattctggatatatttttattttatttatttattttagagataggggcttgctttgtcacccaggctggagtgcagtggtgcaatcatagttcactgcaacctagatagaacccctggactcaagtgattctcccacctcagcctcctgagtagctaggtttgcaggtgtgtgccaccacaaccagctaattttttaaaaacagttgtagaaatggggcctcactatgttgtcttgaactcctggcytcaaacgatccttcctcctcaagcctcccaaattgcagggattataggtatgagtcaccatgcctggcctgcatgttatttttaatccagtaggatttcctgatggattggaaataaggtgtgagaggagaggagtcagggatgacttcaaggtttgtgtgctgaacaacaagagggatgaagagagagagataaatttattaagagaggtttgctggaagagatcaggagttcattgttggaactgacaaacctgagatgttagacgtccagg

SEQ ID NO: 920704 - DNA, 580 bp, Homo sapiens
gggtggctgtgggcacagcttcagcagacttaaacgttcctgcctgctggctctgaagagagcagcggatctcccagcacagtgcttgagctctgctaaggaacagactgccttctcaagtgggttgctgacccctgtgcctcctaatggggagacacctcccagcaggggttgacagacacctcatacaggagagctctggctggcatctggaggcttcccttctgggatgaagcttccagaggaaggaacaggcagcaatctttgctgttctgcagcctctgctggtgatagcagggcaaacagcgtctggagtggacccccagcaaacttcagcggaactgcagaagaggggcctgactgttagaaggaaaactaacgaacagaaagcagtaacatcaacatcaacaaaaaggaygaccatgcaaaaactgcatccaaagatcaccaacagaaaagaccaaaggtagataaatccacaaagatgaggaaaaaccagcgcaacaaggctgaaaattccaaaaccagaatgcctcttctcctccaaaggatcacaactccatgccagcaagggaacaaa

SEQ ID NO: 920705 - DNA, 626 bp, Homo sapiens
agtgttgggcgcctgtagtcccagctacttgggaggctgaggcgggagaatggtgtgaacctgggaggcaaagcttgcagtgagccgagatcgcgccactgcactccagcctgggtgacagagcgagactctgtctcaaaaaaacaaaacaaaacaaaaaacacctataagcatcttccacctttgattatcttctgactcaacatcagatagattttaaacatataagcttaccatttaagtagaactgtttragatgctggacattctaatacaatcgaattgagcttatttgataaatgacctcaatttatcaaatcccttttcatggtaaccaaatatgctttctctcatgattcaaaatcagacatatttggtggggtaccaagcatatttgttgcagtaaatggaatgaatggaacaccccaaatgaacaggaacacattggttgaacccccctcccaggccctctccacaacaacattcccagtgtgagccaggcagctcattctctccacccacttctttcctttgtggcacaaggtacggtagaagatgctggaaggagataaagaccagtggacaagcttctgtcctggagaatcttgctgtgaatcgttcttctt

SEQ ID NO: 920706 - DNA, 588 bp, Homo sapiens
atttattcctttttgtttaaaatacaaatatttgcatttccctgatcattagtgatgttgagcattttttcatatgtttgttggccatttgtatgccctcctttgagaattgtctattcatgtccttaagcccactttttgatgggattgtttgttttttcttgctaatttgtttgagtttgttgtagattctggatattagtcctttgtcagatatacagattgtgaagactttctcccactctgtgggttgtctgtctactctgcagactgttccttttgcagtgcaaaagctctttagtttaattaagtcccagctatttgtttttgtttttattaaatttgcttttgggttcttgatcatgaaatccttgcctaagccratgtctagaagggcttttccaatgttgtcttctagaatttttatagtttcaggtcttagatttaagtcatcgatccatcttgagttgatttttatataaggtgagagataaggatccagtttcattctcctacatgtggcttgtcaattatcccagcaccatttgttgaatagggtgtcgtttccccactttatgtttttgtttg

SEQ ID NO: 920707 - DNA, 567 bp, Homo sapiens
ggatataccacattagagatttatactcactgggtggttgaggtaggaggattgcttgaggccaggagttccagacaagcctgggaaacataaagagactctgtatctacaaaaaaattttaaaaattagctggctgtggtggtacctccctgtaatctcagctacttgggaggctgtggcaagaggattgtttgagcccaggagttcaaggctgctgtgagctatgatcacatcactgtactctaggctgggtgacagagsaagatcctgtctcagaaaacagaaaggagatttctgctcaaattattgtgctttaaatctcttggaataactctactctgtgaattaaactatcaactagaaacatgtggctttttaaagaaagtaatatttaaattaatttataactaggtaagaaatgtacctggttccaaagaaaaatcaagggtggaaccagcattgctctattttttttttcttgttgctgtcattaccatatggttctaatgcagattaagagatggtggtgttctggtagatttggaggaggtgatacttgaatcatg

SEQ ID NO: 920708 - DNA, 567 bp, Homo sapiens
ggatataccacattagagatttatactcactgggtggttgaggtaggaggattgcttgaggccaggagttccagacaagcctgggaaacataaagagactctgtatctacaaaaaaattttaaaaattagctggctgtggtggtacctccctgtaatctcagctacttgggaggctgtggcaagaggattgtttgagcccaggagttcaaggctgctgtgagctatgatcacatcactgtactctaggctgggtgacagaggaagatcctgtctcagaaaacagraaggagatttctgctcaaattattgtgctttaaatctcttggaataactctactctgtgaattaaactatcaactagaaacatgtggctttttaaagaaagtaatatttaaattaatttataactaggtaagaaatgtacctggttccaaagaaaaatcaagggtggaaccagcattgctctattttttttttcttgttgctgtcattaccatatggttctaatgcagattaagagatggtggtgttctggtagatttggaggaggtgatacttgaatcatg

SEQ ID NO: 920709 - DNA, 567 bp, Homo sapiens
ggatataccacattagagatttatactcactgggtggttgaggtaggaggattgcttgaggccaggagttccagacaagcctgggaaacataaagagactctgtatctacaaaaaaattttaaaaattagctggctgtggtggtacctccctgtaatctcagctacttgggaggctgtggcaagaggattgtttgagcccaggagttcaaggctgctgtgagctatgatcacatcactgtactctaggctgggtgacagaggaagatcctgtctcagaaaacagaaaggagatttctgctcaaattattgtgctttaaatctcttggaataactctactctgtgaattaaactatcaactagaaacatgtggcttttwaaagaaagtaatatttaaattaatttataactaggtaagaaatgtacctggttccaaagaaaaatcaagggtggaaccagcattgctctattttttttttcttgttgctgtcattaccatatggttctaatgcagattaagagatggtggtgttctggtagatttggaggaggtgatacttgaatcatg

SEQ ID NO: 920710 - DNA, 567 bp, Homo sapiens
ggatataccacattagagatttatactcactgggtggttgaggtaggaggattgcttgaggccaggagttccagacaagcctgggaaacataaagagactctgtatctacaaaaaaattttaaaaattagctggctgtggtggtacctccctgtaatctcagctacttgggaggctgtggcaagaggattgtttgagcccaggagttcaaggctgctgtgagctatgatcacatcactgtactctaggctgggtgacagaggaagatcctgtctcagaaaacagaaaggagatttctgctcaaattattgtgctttaaatctcttggaataactctactctgtgaattaaactatcaactagaaacatgtggctttttaaaraaagtaatatttaaattaatttataactaggtaagaaatgtacctggttccaaagaaaaatcaagggtggaaccagcattgctctattttttttttcttgttgctgtcattaccatatggttctaatgcagattaagagatggtggtgttctggtagatttggaggaggtgatacttgaatcatg

SEQ ID NO: 920711 - DNA, 728 bp, Homo sapiens
tcaattcacgcaccaagtctgattttttagaagtagctgcctgaagcacagggttgataaggaatcaaaagtctgagtctacactccaaaaatgacactgtgagctgggcacggtggctcacacctgtaatcccagcacattgggaggcccaggtgggaggatcacttgagctcaggagtttgagaccagcctgggcaacatagaccttgtctctactaaaaaatttttttaaattatctaggtgtggtggcatgtgcctgtagtctcagctactcagaaggccgaggtaggaggattgcttgagcccaggagatggaggctgcagtgagctatgagcatgccactgtactccagcctgggggacacagtgagaccttgtctcaaaaaagaaaaacaaaaaaaaaagattttgatctgccttagatggaaagagagagcagtatgccttagatgtagagggrgagatgagtagacccagtgacaaaacctagatcttaactgttaaggaaattatagatgcttcagtgctggtatgtgtggtcattctcagtgaatcttttttttttcctattctaaagctctaagtccaaggagctttaaggtattgttcaagattgttatctgagacagctagacaccttgaaaacaattactgttaagatactggggccaagatagtgcacagatgagaagcaacatttcttatagtatattccaagcagtttct

SEQ ID NO: 920712 - DNA, 607 bp, Homo sapiens
agtaaaactcaattattaagaaccccaggctagagtctcagacttgaccttgccaagttgaaggacatcagtctaattcaccatcctagaagataaggatcatcccttgctggaataaacctgattcctaccccaggagcaataggtccactgtattcttctgggaatatgcatcccagaatctaagaaagtaacataaataaagcttctcaatggtttgaaagctttcaaggaatctccaaagtgaatcatcagaagagggagagaaaggattgtaagtgtaactcaaaacatctattctcaaaaattcaccagatgagtgatgrctttagtatgaacctcagtgactgcttaacaccaaaccacttttactaagcaacaattatgtaccaggtgtcatgttctacttatgcttggcccagcttcctcatctatgaaactggaagtaagaagacctatttgttagaattactgtggtatttaaattgcaaatattgctttgataaattgataaatgtaaggaattttcactttcaccattcttaacatttaatttggcatatatgacctttcctaatttgtctgccgcatccctcttaacacctcc

SEQ ID NO: 920713 - DNA, 550 bp, Homo sapiens
atgttgctgcaaccaacatgatttccttttttatgggtgtgtggtgtttcatgctgtatacctacccgtattctttatccagtcccccgttgatgggcatctaggttgattccgtctttgctattgtgaatagtgttgcgatgaccctattagtgctgtgtctttcttggtagaatgatttatgttcctttgggtatatacccagtaatggggttgctgggttgaatggtagttctgttttaagttcttcgagaaaagctccaaaatgctttccatgggtgtctgactagtttactttcttaccagcagcatataagtgttcccttttctctacagcctcgccaagccaacatccattatttatttattttttacttyttactgatagccattctgatcgctgtgaaattgtatttcattgtggttctgatttgcatttctctgatgattagagatattgagcattttttatgtttgttggccatgtgtctgtcctcttctgacaagtattcacagaagtctctttatgtcctttgccctttttttaatg

SEQ ID NO: 920714 - DNA, 641 bp, Homo sapiens
gttgtattttcattttctttcagctcaacatattatttgaatttttttccttgatacttcctctttaacccatagattatttagaaatgtgttatttagtctctaagtgcttgaaggtatgtctgttattttttctgtcatttatttctagtttgattccattgtggtcagagaagacagtctgtattatttcagttctattgtatttgttaagatttattttatggcccagtatatgatctatcttgctgtcttggttcattttgtgttgctataacaaaatatggcagactgggtaatatataataaacagaaatgtattggctaacwgttctggatgctggaaagttcaagattgaggggctggcatgtggtaagagccttcttgctgcatcttaacacgggagaaatcatcacatggcagaagggcaaggaaacagtgagagagagagacaaaaaggggccaaactaacccttttataaaaaacccactcccatgataatagcattaatccaatcacgataatggtgccctcataacccaagtaactcccattaggccccacccccaacactactgcattggagattaagtttatcacacatggactttggggaacacattccaatcacagcgcata

SEQ ID NO: 920715 - DNA, 607 bp, Homo sapiens
ggtaaatcataaggcagaaatcaaattctttgaaactaataaaaacaaaaatacactgtatcaccatctctgggtacacagctaaggcagtattaagagagaaatttatagcactaaatgtccacatcataaagttagarcaatgtcattagcaacctaacatcacaactaaataattagagaagcaagagcaaacaaatcccaaagctagcagaagacaagaactaaccaaaagtagagctgaactgaagaagatagcgatacaaaaaaaccattaaaagatcaacaaattcaggagctggtttattgaaaaaattaataaaatagatagattgatagctagactaagaagaaaaaagagaagattcaactaaacacagaaacgacaagggagatattactactgaccccacagaaatacaaacaactgtcagggaatactacgagcacctctatgcacataaaccagaaaatctagaagaaatggatatgttcttggacatatacaccctcccaagactgaaccaggaagaagttgaatccctgaacagattgataactagttctgaattgaggcaataataacctaacaacaacaataaaagaa

SEQ ID NO: 920716 - DNA, 807 bp, Homo sapiens
atgaattctaaaatcaaaaacaagagcaaacagcaaacttatggtgaagcttgggtggaagaatagtgaaatctttgatttcactttatgaaaagttcatggagataatgccccaaagaaatcaaatgttttcaagtagaaaactcattctaagaagggatgagctaaggttaaggataaagcctgcagcggcagactatctcacattaactagcaaggaaaaaaaattcatcttctttatgccctccttaaagaagaccaatgattaacaaaagaaacaatcactaccaccacagacatctcagtttcaccagcagtgcagtggctcatgcccataatcccagcactttgggaggccgaggtgggtggatcatgaggtcaagagaactagaccgtcctggccaacttagtgaaaccctgtctctactaaaaaataccaaaagtagctggatgtggtggcacacacctttagtcccagctactcgggaggctgaggcaggagaattatttgaacccaggaagcagggaggtggaggttgcagtgagccaagatcatgccactgcacctccagcctggcaacagagtgagactctgtcttaaaaaaaaaaaaaaacaaamaaaaaaaactaattgaaaaattaaagttaagtaatttccactcaatgtgtgccaaaaactattgtgctcatatcagcttcagataacagcagaagtttcaaggaaaattttaaacaagcggggtcaagacccctgaagcatttctttaaagaattgtaacagcaggtacaacgtgattttaccagtac

SEQ ID NO: 920717 - DNA, 563 bp, Homo sapiens
gttttctaagtataaaatcatattttgaccaagcagaaatagtttgactttctgtcttcctatttggattcctttcatttctttttcttacctgatttctctggctaggacttctagtaaaagttgaataggtgtgatgagagtgggcatccttgtcttgttctgattctcaagggaaatgcttctagcttttgcccattcagtattatgttggctgtggctttgtcatagatggctctcattattttgaagttccttcagtgcctagtttgtggagagtttttaacatgaggggatgctgaattttatcgaaagccttttctgcctctattgagataatcttgtgattttcgttttcagttctgtttatgtgytgaatcaaatttattgatttgcatatgttgaactaatcttgcatcccaggaaaaagcctacttgaccgtggtagattaaatttttgatgtgctgatgaattcggttttctacccctattttgttgaggatttttttcatctgtattcatcaaagatattggcctgaaattttcatttttttttgttgta

SEQ ID NO: 920718 - DNA, 601 bp, Homo sapiens
cttcaggaaagccccagctcctcagcctcctctcattcttttacccaggaccgtctgggggccccagctccccgacaacaggccccacctccacatctggtgagtccctgaggcttctgaactcaagggagtgcggcctcccccagggcagccctgggtctcccagagaatcccattcccctcaaagactcgagcttccctccagggagccgggcagagccagaggaggggccacagggtccccagggctctgaggctgggctggtgaggggtggggggtcaaggcagagagaaatgttggggcccagcctgggggaggagcagccgggctgatgtggggagcagggcagccccagccctcacctccccgtcctgacccagcaggccctgaggaccagcccctcacccccaccgggtcggatccccagagtggtgagtgasgggctctgagtgggaggtgggcagggtccaggggaggcaggggtgggttctgtcctaggttcagtctcctctggaggtggtgatatagacaggctcctcccctgcttgggcctcagtttctccaaatgtaaaggtgagaggcctgcgggtgggaaagttc

SEQ ID NO: 920719 - DNA, 601 bp, Homo sapiens
cttcaggaaagccccagctcctcagcctcctctcattcttttacccaggaccgtctgggggccccagctccccgacaacaggccccacctccacatctggtgagtccctgaggcttctgaactcaagggagtgcggcctcccccagggcagccctgggtctcccagagaatcccattcccctcaaagactcgagcttccctccagggagccgggcagagccagaggaggggccacagggtccccagggctctgaggctgggctggtgaggggtggggggtcaaggcagagagaaatgttggggcccagcctgggggaggagcagccgggctgatgtggggagcagggcagccccagccctcacctccccgtcctgacccagcaggccctgaggaccagcccctcacccccaccgggtcggatccccagagtggtgagtgacrggctctgagtgggaggtgggcagggtccaggggaggcaggggtgggttctgtcctaggttcagtctcctctggaggtggtgatatagacaggctcctcccctgcttgggcctcagtttctccaaatgtaaaggtgagaggcctgcgggtgggaaagttc

SEQ ID NO: 920720 - DNA, 675 bp, Homo sapiens
gtggcatccctcaccttgctttctcttgctctctctctcaccatgtgacacactggccccccttccccttcgaccacaactggaagcttcctgaggccttcaccagaagcaggtgctggttccatgcttcctgtacggtctgcaggaccatagccatataaacctcgttttctttrtacattacacagctcaggtattcctttacaggagtgcaaaatggactaagtgtcatatggtaacatttttagagaaatgaaaaagcaaaaatggaggggccgttccaagatggctgaataggaacagctccagtctacagctcccagcgtgagcgacgcagaagatgggtgatttctgcatttccaacagaggtaccaggttcatctcactggggcttgttggacagtgggtgcaggacagtgggtgcagcccaccaagcgtgagccaaagcagggtgagcattgcctcacccaggaagcgcaaggggtcagggaattccctttcctagccaagggaaaccatgaaggacggcacctggaaaatcaggtcactcccaccctaatactgcacttttccaatggtcttagcaaatggcacaccaggagattatatcccacgcatggctcacagggtcccacgcccacagagcctcgctcattgtagcacagcagtctgaga

SEQ ID NO: 920721 - DNA, 730 bp, Homo sapiens
agcgtgagccaaagcagggtgagcattgcctcacccaggaagcgcaaggggtcagggaattccctttcctagccaagggaaaccatgaaggacggcacctggaaaatcaggtcactcccaccctaatactgcacttttccaatggtcttagcaaatggcacaccaggagattatatcccacgcatggctcacagggtcccacgcccacagagcctcgctcattgtagcacagcagtctgagattgatctgcaaggcagcagcgaggctgggggaggggtgcctgacattgctgaggctgagtagataaacaaagtgtccaggaagcttgaaatggatggggcccactgcagctcaaggaggtctgcttgcctctgtagactccacctctggggggagggcatagccaaacaaaaggtagcagaaacctctgcagacttaaatgtccctgtctgacagctttgaagtgagtagtggttctcccagcatggagtttgagatctgagaacggacagactgccccctyaagtgggtccctgacccccgagtagtctaactgggaggcaaccccagtaggggcagactgaaacctcacacggccgggtatccctctgagatgaagcttccagaggaacgatcaggcagcaacatttgctgttcagcaatattcgctgttctgcagcctccactgctgatacccaggcaaacggtctggagtggacctccagcaaa

SEQ ID NO: 920722 - DNA, 607 bp, Homo sapiens
aaatcttttcaactagaaataggtttcgattgggaaaattgtcagggtggatttttttctaaattatttctcacctaagttgaaaattgggttgcatttgtaattattttctaattgtttcaggaatagaattaaccttgcagccacacaacatcccttctgtggtattccttccctaaggtgcataacctcaatctcatcataaagataaaataagacaaacccaaattacaggtcattctacaaaataattgatctgtactttcaaaaggattagtgtcttcaaagtgaaactgagaatagctctggattgaaggagactaaacagacgtgataactaaatgcagcctgtgattctgaactgaatctttttgggasaatcacttgaatatgcactgtacattagatagcagcaatgcataaatgttaatttccccatatttggtcattggactatagttatataagagaatgttcttaatctctgcaatttacttttaactgaaaaaaaggaattaaaacaaaaaattgaatgaggatatgtaaatagtatgcacactatattagcttctgattgttgctttaacaagttaccagaaacttaggg

SEQ ID NO: 920723 - DNA, 619 bp, Homo sapiens
agatttttggggctactgggataaaataaaataggagaatgagaagaacatgagttttgggggccaaatggaatgctataatctcaatgtgtcctccaaatttcattcatcagaaacttaatttccaatgccacagtgttgggargtgtttaggttgggagggctttgccatcatatggattaatgcctctattgaaagggctttgggaagtggattcatacttgcctgtccacttccttccatatgaggacgcagagggaaagccctcactagatgccagtgccatggatctttgacttcttagcctccagaactgtaagaaataaatttctgatctttgtaaattacccggtctcaggtattctgttagagcagcacaaaatggactaagacagcgtctgctaaggaattgcttggtctgtggtgaaaaacccacacacacctggttacagaagagttctgtattgagcttaaggatagaggaaataatttttttcctttcagaatgatgaaatagcaacaatttttaattttattacttcttgacccttgagtacatatctttgtagtatttattgtgatacaataggaaatatgcaaaacacttttatttcataa

SEQ ID NO: 920724 - DNA, 619 bp, Homo sapiens
agatttttggggctactgggataaaataaaataggagaatgagaagaacatgagttttgggggccaaatggaatgctataatctcaatgtgtcctccaaatttcattcatcagaaacttaatttccaatgccacagtgttgggaggtgtttaggttgggagggctttgccatcatatggattaatgcctctattgaaagggctttgggaagtggattcatacttgcctgtccacttccttccatatgaggacgcagagggaaagccctcactagatgccagtgccatggatctttgacttcttagcctccagaactgtaagaaataaatttctgatctttgtaaattacccrgtctcaggtattctgttagagcagcacaaaatggactaagacagcgtctgctaaggaattgcttggtctgtggtgaaaaacccacacacacctggttacagaagagttctgtattgagcttaaggatagaggaaataatttttttcctttcagaatgatgaaatagcaacaatttttaattttattacttcttgacccttgagtacatatctttgtagtatttattgtgatacaataggaaatatgcaaaacacttttatttcataa

SEQ ID NO: 920725 - DNA, 619 bp, Homo sapiens
agatttttggggctactgggataaaataaaataggagaatgagaagaacatgagttttgggggccaaatggaatgctataatctcaatgtgtcctccaaatttcattcatcagaaacttaatttccaatgccacagtgttgggaggtgtttaggttgggagggctttgccatcatatggattaatgcctctattgaaagggctttgggaagtggattcatacttgcctgtccacttccttccatatgaggacgcagagggaaagccctcactagatgccagtgccatggatctttgacttcttagcctccagaactgtaagaaataaatttctgatctttgtaaattacccggtctcaggtattctgttagagcagcacaaaatggactaagacagcgtctgctaaggaattgcttggtctgtggtgaaaaacccacacacayctggttacagaagagttctgtattgagcttaaggatagaggaaataatttttttcctttcagaatgatgaaatagcaacaatttttaattttattacttcttgacccttgagtacatatctttgtagtatttattgtgatacaataggaaatatgcaaaacacttttatttcataa

SEQ ID NO: 920726 - DNA, 736 bp, Homo sapiens
ttatataaactcatgtcataggggtttgttatacagattatctcctcaacaggactaatcctagttcccagtagttatttattctgatctgctccctcctcccaccttccatcctctagtagaccccagtgtatattgtttcccccatgtgtccatgtgttcccatcatttagctccctcttataagtgataacatatagtatttggttttctgcttctgtgttaatttgctaaggataatggcctctagytccatccatgttcctgcaaaggacatgatatcattcttattttttcttggctacatagtattccatagtgtataggtgccacattttttattcagtctacaaatgatgggcattcagcctgctattgatgggcatttatgttgattctatgtctttgatattatgaatagtgctgcagtgaacatacatgtgcatgtgtctttatgatagaatgattatattcctttgggtatatacccagtaatgggatttctagatctaatgacagtcctgtttttagctctttgagaaactgcctcactgctttccacaatgactgaaataatttacactcccatcaacagtgtataagcattctcttttctttgcaacttcgccagtatctgttatgttatgactttttaatcatagccattctggctggtgtgagatgatatctcacggtggtttacaaccagagttttaaaacccagatttatcttttg

SEQ ID NO: 920727 - DNA, 736 bp, Homo sapiens
gaagacatgcagaagccttccacaaaaaagtctgcaattgtccccttccttgtctatctttattcacctgttctcctggccactgtctacaaaactagggcttagttgcaacacaaagctgtgtatgagttggccctgataaggtggaagagactattatctatttagaaggagtgacaagcccaatcagcaggtatcagcaagasgagggagagaaggggtgagattattttctgagggtgcttgatcaggtggtcagaacataagattagattttgagtactctcctgggataaagaattttactattggaaaggactacaggagacgattctaacttgttactagaatgactcccggaagtatgggaaaagtgatgacccagttaagtcaggttaaaataccagaattgctatggcagatggtgaaaaagagaatgaaagtctcaggaaagtagatatagtggaatgaacatactgggtagggtcggaaaacctaccaaatgagtatgatctatggaaaagcacagaggacatgccaattatcaaggccattaaaaattctgggtgagaatgatacaagaatcaccaagaagtccagtggtacctcccctgcatgggtcagagctgataatagaaaagatggttataaaacagggcccacttttagcaatggagatggcagagcattgacacaacagatataaatagccagaagccggatgaacagaattatg

SEQ ID NO: 920728 - DNA, 736 bp, Homo sapiens
gaagacatgcagaagccttccacaaaaaagtctgcaattgtccccttccttgtctatctttattcacctgttctcctggccactgtctacaaaactagggcttagttgcaacacaaagctgtgtatgagttggccctgataaggtggaagagactattatctatttagaaggagtgacaagcccaatcagcaggtatcagcaagacgagggagagaaggggtgagattattttctgagggtgcttgatcaggtggtcagaacataagattagattttgagtactctcctgggataaagaattttactattggaaaggactacaggagacgattctaacttgttactagaatgactcccggaagtatgggaaaagtgatgacccagttaagtcaggttaaaataccagaattgctatggcagatggtgaaaaagagaatgaaagtctcaggaaagtagatatagtggaatgaacatactgggtagggtcggaaaacctaccaaatgagtatgatctatggaaaagcacagaggacatgccaattatcaaggccattaaaaattstgggtgagaatgatacaagaatcaccaagaagtccagtggtacctcccctgcatgggtcagagctgataatagaaaagatggttataaaacagggcccacttttagcaatggagatggcagagcattgacacaacagatataaatagccagaagccggatgaacagaattatg

SEQ ID NO: 920729 - DNA, 617 bp, Homo sapiens
agcagaagcctgcagcatacatatgatttaagagtcatcatgatgtactgctggtctcaactatgcctccacaatcaaagtttccatgattggaattcccccgtaggcaccacaagggttgaggacattgtctcaagaagtcccataaaagggtactcacttgggacaccagagaaaagggttgtcctgggccattcctttaggaagttcccagactcatggtttttagaaatcctgcatcagaatactaatgggtagcacttactaagtgtctgctaagtgccatgtcttttagccatattacctaacttaatcttcactgtaatataagacamccggtaatgttacccccatctcacagatgaagaaaccgaggcacagggaggttagataacttccccaagatcatgtaattaatttgtaggtgccagaggagggatttgaacccagggagccttgtgccaaagcccactctgctctacttcctctaatcatacaggatagtattaaagtggaaactctagggcgggaccaaggagtctgcatttgaataagctacacaggtcacttttatgcattcaaagtttagaaaatcagaatattgtgtgccttaaaaa

SEQ ID NO: 920730 - DNA, 593 bp, Homo sapiens
tctctgccaatttgcacacagcttgcagaagccagtgtggtcaaaaaggaccctgtcctccaaatgttaatttaagaatctatggtctgatcactagttgctgcttctgattaccaaagtgcagacaaagagtccagtgrccatggttgttgcaccttcatggtttgggtcacttttttctatggctgaagtgactttctgggagtttaaaagaccaagtccccttgtacctctttatttcctcttttggtagacagatactgaagattaggagattcaaaagtctccacttacatgagggaaattagggaataaccacaaatctccagaggaagatgaaggctcagaaaagacccaagatgaccttaagtttatatgtcaagataatccttagcaaagacacaagctacaccaactttttaaagtagcaaagcctggggaagggagtgaatctgattttcagagttaacacattattagattcaaatatgcaattttgacaaaaaaatcacaaagtatacaaagaagcaggataatatggtccactcaaagattaaaaaaaagtgagccaacagaaattgtccctgaaaaag

SEQ ID NO: 920731 - DNA, 561 bp, Homo sapiens
tcttacatagcagaaggtgacaaggcccaagagcagacaaaatccctcactgaagccctttatgagggcacctaatccattataagggaggagccctcatggtgtaatcatctcttaaaggccctttctcttaatactatcacattgtcaataccggagttttggaggggacacattsaaaccataccagagagttttgcagatttggggagtaagaaggatgagttgtctgagagagagagaagacagataaagaatttcaggcagcctagccaggtagtgctgagaaatccacttgatgttggtgaacacgaagttaaaatgtggctaaatgtcatggctgtgtgctggctgctatcatgttcatctcatgggatcctgtcacagattaagcagattgtttaaccagtgctggggatttcatgggcaagtataccacagggagaaagaggcaagagcattcagattattttcaaaggaatgattattgtgtggcaccagaacatttagccaggaaagtgtatacatgagcaagataatagatcaataatggtcaatggc

SEQ ID NO: 920732 - DNA, 565 bp, Homo sapiens
cacttcttgccactctatgtcaccctgccgcttgttcaaaatgccctagctttcaagacctagtgttggtacctgaagaaagagagagaaatagaaatttgggattcttataattctgtacagtgaaaaatgctttgaatcttataaattttttaaacccaaacattctcaatgtcaggtcattgtgtttatctttttgttacaacacataaatggacttttgcttaagattgacatatattaggaattcaattggcctagtatatccatttcttctctaatgattccagaaatatttgctctttgagaactcttactttttgatgttgaaagtaacatatacatatgtgtgtgtgtgtaatatatatacatatatgtgtgtgtatatrtgtgtgtgtgtttgtgtgtatatgtatatataattttttctctagaagatctctggccaaggaagcatagcagattttcaaaggacccctgtaggaccacactttaaacatgcatagtcctcatctggcttcatgtatcaatttgtttcagcttgtatcaggaaagctgactttcc

SEQ ID NO: 920733 - DNA, 694 bp, Homo sapiens
ccttcctgagttcttaaaaaaagaaagttttgcattccatgactcatcctggaaaacctaaagtgatctaaattaaatatacattggtgtggtgatttctaaattgctaaaataatttgagtaatgtttactttgtcaaacccatattcctgggaagacaatcaaagcttcwgataaatttggctacctgatgggccatttaaacatatgtagagggattttattcaaatgtcattttcagtgcatgttttctggttgcattaaaaaactttcccatgcaagagggctgatgttataagagtaattgttatgccacagtggtattttcaccaggtaaagaaagctttttatggttcactgactgaccacaatcaacctcttcacaatctagaacccgaagattggatcttctgagaacatcagagaaagactgcccttgccatccacactacaacaaaactttaggaccttgaacctggtttcataatatcacaactgagaagggtcgctccacactcttggaactgcactcctattggaacccttaaggtaaagctaaccagggaagtttctccccaaaagaaaacggcatccttgatgtgaacagcttttcccaagatcatgcatgaagacttctctactattatgagatgcttatctttcaatatttttctcttgcttatgcctctatgaa

SEQ ID NO: 920734 - DNA, 752 bp, Homo sapiens
gcccttgtagacaatggaaaatacatcaaatgtagattacagacatttcattccagaggattaatgaagagtcttcttagttaagtgagtagactttttatctagcttattctttgatctatttaattttaggtgcttwggtttatgcggacaccgggtaaggagcatatgccaaactcatagtattatcctccagatagtcataataatagtctcccttgcaggctgtattctctcaaaggttttaaatatttgcatgcagccatatctagaatatcaaatggtctctcttcaactggaatgacaagagctgaaagaaacgtgagaccatgaagacactgtaacctatgaatgatgtgctgaggccagaaacccaaaatgatggtaactgagagtgatgctaaggccctaagttttagttacactctcacctaagtgaaaacctgaccaaaatgggggaattattttaaacaaaattatgggaggccgttgttttggactgagctcattctctaggccctaacagactaaaccaaaccaaaatagaatcactcatgctaaatgtgacataatcaaactaagaccttaagaaaacacgtaagtcctagaacagaccaggttttgcatttctctcataaacagggtgttccataaggaagtactctctactcagtccttgttcccaccttacaaaaccctctgttctgctgtttcccagtgaatttcaagaccaaaacagtatatttatgata

SEQ ID NO: 920735 - DNA, 730 bp, Homo sapiens
ctatgccaattttgctaaaggtttttttttatttttattttttgagatggagtctcactctgtcacctaggctgacgtgcagtgggagtgatcttggcccactgcaacctctgtctcctgggttctagtgattcttctgcctcagcctcctgagtagctgggattacaggtgcccaccaccatgcccagctaatttttgtatttttagtatagacaggatktcaacatgttggccaggctggtcttgaagtcctgacctcaggtgatccattaccttggcctcccaaagtgctgtgattacaggtgtgagccactgcacccagccctgctgaggtttttaatcataaaggatgctggattttgtcaaatgcctttctgcatcaattgagattatcatgtgatttttgtttttaattctatttatgtgaggtatcacattcattgacttgcatgtgttaaagcatctctgcatcactagtatgaaacctacttgaacatggtggattatctttttgatatgctgttggattcagttagctactattttgttgaggatttttacatctatgtgcctcagggatattggtctgtagttttcttttttgttatgtcctcttctggttttggtattagggtaaatactggcttcatagaatgatttagggaggattccctcttttggaatagtttcagtaagattggtaccaattctccttcgaatgtctggtag

SEQ ID NO: 920736 - DNA, 730 bp, Homo sapiens
ctatgccaattttgctaaaggtttttttttatttttattttttgagatggagtctcactctgtcacctaggctgacgtgcagtgggagtgatcttggcccactgcaacctctgtctcctgggttctagtgattcttctgcctcagcctcctgagtagctgggattacaggtgcccaccaccatgcccagctaatttttgtatttttagtatagacaggatttcaacatgttggccaggctggtcttgaagtcctgacctcaggtgatccattaccttggcctcccaaagtgctgtgattacaggtgtgagccactgcacccagccctgctgaggwttttaatcataaaggatgctggattttgtcaaatgcctttctgcatcaattgagattatcatgtgatttttgtttttaattctatttatgtgaggtatcacattcattgacttgcatgtgttaaagcatctctgcatcactagtatgaaacctacttgaacatggtggattatctttttgatatgctgttggattcagttagctactattttgttgaggatttttacatctatgtgcctcagggatattggtctgtagttttcttttttgttatgtcctcttctggttttggtattagggtaaatactggcttcatagaatgatttagggaggattccctcttttggaatagtttcagtaagattggtaccaattctccttcgaatgtctggtag

SEQ ID NO: 920737 - DNA, 606 bp, Homo sapiens
agtagctgggattccaggcatgagccaccgcacccggctagtttttgtatttttagtagagacagggtttcaccatgttggccaggctggtctcaaactcctgaccccaggtgatccacctgccttggcctcccaaagtgttgggattaacaggtgttagccactgcaccaggcctggaccaatasttttattcattcttttactcactgagtgcgtgctctgtgctaggtcttggagatacaaagatgacaatgtcttggcacttgtactagcagtttaatacacattaagaagtagttacaacaccatacaataagtttgaacaatgattccattgaggggaaaagcgtataccctctaaaagatttaaagtaatagaagcagagccacaaaggcaattctccacgaatgcacttcttctgtgttatcttgtttgctttcgcctacaatcccttaaaaatgacataagccagtttcactggagattcatttactatctcttaaggatactcggtctctgagagttgtggggtggacactttcaacagaccagggtttggcagaggtttgtcatgcctttttgccaagggctcaccctggcagat

SEQ ID NO: 920738 - DNA, 718 bp, Homo sapiens
ctacccaaaggaaaacaaattattatatcaaaaagatacctgcactcatatgtttatcacagcactattcacaatagcaaagatatgaaatcaacctaaatgtccatcaatggatgattgaataaggaaaatgtggtatatgtacacaatggaatactattcagccattaaaaaaatgaaaccatgtctttttcagtaacatggatggaactggaggccaacactttaaatgaaacaactcataaacagaaagtcaaataccacatattctcacttttaagtgggagctaaataatgtgtacacatggacatagagtatagaatgacaagcactggatcctcagaagggtgggagggtgaaagaagggtgggtgataagaaattatttcgtgggtacaatgtacattattccagtgacrgacacactaaaagcccagacttctccactgtacaacctagccatgtaacaaaattgcactcataccccttaaatttatacaaatcttagaaatgcttggctgtgggaactctgtggaactagatggtctaagggaattcaggagcatcgtagtctgtgggcagtggagaatggacatatcaagggaccaccgagaaactggaattgtacagatacctgcaaaaggcagaggcagcaaccagagcaaacagatggcaagtgcaacggacctgggggcaaaagtgctgtgtaaatatggac

SEQ ID NO: 920739 - DNA, 562 bp, Homo sapiens
gacagctgcttgtgcctgcatgaagggaaccagggcatggacttacctggcccagccctaacctggctttgcccctccacctaccttggtaatttaacacaacagacagaaattttggggagctccatggcctttaccattgactgagacaccagagtacctcctcagggaaacaaaaggcaagcacaaatccmactgctaccactggagcgggtgctcctttgcaagtgcaaccctctggctggagcccaatttagacagttcattacaacatctccaggcagaataacacagtgcccataaaggacaaagcttttgcatgatctcagctatcaccattgtctgcatcactctggctaaccaggaggtcttgagtctctccatatggccagtttgttacttctgcaactggcatttgagaaagccaacacactaaggctatttataagcaaggaatctcacagagtctatgtcactcccctgctccccccatcagagctagtgctggtacctgctgctaggagatttgaagataggtcacatcactgaatcccttgcagac

SEQ ID NO: 920740 - DNA, 754 bp, Homo sapiens
aaatataaaactcaggaatatacttaaccaaggaggcaaaagatctctacaagaagaactccaaaaccctactgaaagatcattgatatggtttggttttgtccccacccaaattgcaacttgaattgtatctcccmgaattcccacatgttgtgggagggatgcagggggaagtaattgaatcatgggggctggtctttcctgtgctattcttgtgatagtgaataataagtctcatgaaatctgatgggcttattggtggtttctgcttttgcttctcctcattttctcttgctgccaccatgtaagaagtgcctttcacctcccgccatgattctgaagcctccacagccatgtggaacagtaagtctaattaaacctctttttgttaccagtttcaggtatgtctttatcagcagtgtgaaaacaaactaatacagtaaattggtatcagtagagtggagcattgctgaaaaggtacccagaagtgtggaagtgactttggaactgggtaacaggcagaggttggaacagttcagagagcttagaagaagacagaaaaatgtggaaaagtttggaacttcctagagacttgttgaatggctttgcccaaaatgctgacagtgatatggacaatgaaatccaggctgaggtggtctcagatggagatgaagaacttgttggaaactggaggaaaggtgactcttgttgtgttttagcaaagagactggcagcattttgcccttgccttaga

SEQ ID NO: 920741 - DNA, 578 bp, Homo sapiens
ccctttctttcagggtcatttggttgaggcattaaggaaatacactaacacagaccctgactctgcagaagggcaagctcacctgggtatacattattcaatctgtccctgacattagaaggaagctcccaaaagcaaccatgagacttcatacacctatgagacaacttttaaatgtagtagttaaagttcacaacagtagggacaaggcaaaagagaaaaaaacaaaaagaccaaaagaaatagccaaaaagtataattgataacagttgttttatgcaccttccccactgaaggttacccatcttaagaaaatgtcatgaaagtggtgtctgggatgcccagacaagagccaccaactcactgacccccagatcaaaattagtgtgcctactgtgagcaagatggccattgwcaatgagaatgtcctaactgtctctggtgagagagaggaaaaatagtgtcccatcagtactagagctaaccttcttccactagccccaacaagctgccttgaacaagtaagcttactgagagtcttagaccgttgacccagcagacagcttcctacagtggca

SEQ ID NO: 920742 - DNA, 633 bp, Homo sapiens
catggctagaataaatcaggcagaagaatttggaaaaagcagactttctgagtcttctggccttcatttttctctcatgctagatgcttcctgacctcaaacatcaaactctaagagcttttggactcttagacttacaccagtggtttgctaggaactctcagtcttttagccacagactgaagattacactatcaactcgcctacttctgaggttttgggactcctgctggcttccttgctcttcaacttgcagatggcctattgtgggacttcaccttgtgattgtgtgaatcaatactccttaataaactccctttcattttatcctgttagttctatccctctagagaaccctaayacaagggtcataggctcttgggcccctaaaggttcacctaaaaattattgacatgattgatcaataagagaaaatgcatacagatttatttaaggtgtatacataggagcctccagaatgaacaccccatttttcaatgagtaacagaagtttacataccatcttgaggttacagaataaatgggagcttggatccttatacaacagatttagcggcaagacaggttatgagagagagaaaggaagagtttggccaagaaaagtgtccttgc

SEQ ID NO: 920743 - DNA, 607 bp, Homo sapiens
aaagtacaagagaaatgggtaatataaaaatctggatcaatattctagttctgaacaattatcctgcaaatcctgacagttgatgagaataaacgcgatgcccattacttggagtttttctttttgggaaagtaagaccaagggagctaatcagagctaagcctcatgcatccaaatcttagcaggcataactatagacaccagttatctgggtgggtcacaagacatcttttcctctcccttgttggagaaggactcagttccacagtttcaccttatcwttcagcttatgacaggaccatgcaagcccctgaggcacattttttcccaaactcaattccaagctttgggtcaaagccctaggaaggaaaactggatgtgaggtattcagaggcaaatgacaacagaggtttaaaggcacagcacagttgaccatggctgattcctgccaataagccaaccccaatcttcctgtttcatggataaagaccacattagtatccacggtataaatgagatctagggaactctaaggttactgacagtaggtaggtaagagacataggttagagtggataattcctattctctaggccctccttgcttc

SEQ ID NO: 920744 - DNA, 577 bp, Homo sapiens
aaatagaaaacaatcttaaaagttgtatggagctatggaacacattgaataaccaaagcagttttgattaaaacaataacaaagctgtagacatcacgatttctggtttcaaaatatatcacaaagttacagtaattaaaagagtattgcattgacaattactaacagacatagaaaacagacataaaagacatatgaaatggacaatggaatagaatagaaacccagaaacatacccacagayacatggtcaactgatcttcaacaaggattccaagaataaacaatggggaaaagacagtctcttcagtaaatggcattaggaaaacagaatatccatatgtatataaataaaattacaaccttatattccatacacaaaaagaactcaaaatgtaaaacctgaaactgttaaacttgtagaataaaacacagaggaaaagcttcatgatgtttctcttaagtccatttaatgttgcataaaagaatacctgaggctgggtaatttctaaagaaaataggtttatttggcacaagattctgatggttggaaagttcaaaagtgggcatctgcatt

SEQ ID NO: 920745 - DNA, 710 bp, Homo sapiens
acatgctctgggaaagccatgtggggcttggccacaggtctgaggaaggtgtagttgtgcagttgagagatggaatgggcaggctggtgcatggctgcaaatgccaccttgctaaaactctctgccagtcagacatggtcagcaagtagaagagctatgatgcaggcccttagtatactcaaggctgcaatgaaagcaagtacagccaagcttggaccctggtagaagccagcaaaccaacagrtgctcaggtcagaccagcctcatgtgatggtcaagaaccaccctgcagagttcaggtgtgaaagtttccctatggctaaagcctcttctgggagcaagtcaagccttgggggaaaggtatctatggctgtgcttcaatacaggtactctcacaccaaaccctctgggttccctgttgcccctaccacttctctgagcagttctccctgttgactcaactgtctgtggtggttgagggatctcctcctgccagcattcctgagatccatggcaaaaattagttgctctttgccagttcaactcacctgttcccctggagccattgggggccactattaagttccagtgcatggcagccttctttcagggttcctggcttcctccaccttcagcccagcttttgtttcttccctgcatccactctctgtgccttccctctgaagatctgataggaaagctccaattgt

SEQ ID NO: 920746 - DNA, 695 bp, Homo sapiens
ggcttggccacaggtctgaggaaggtgtagttgtgcagttgagagatggaatgggcaggctggtgcatggctgcaaatgccaccttgctaaaactctctgccagtcagacatggtcagcaagtagaagagctatgatgcaggcccttagtatactcaaggctgcaatgaaagcaagtacagccaagcttggaccctggtagaagccagcaaaccaacagatgctcaggtcagaccagcctcatgtgatggtcaagaaccaccctgcagagttcaggtgtgaaagtttccctatggctaaagcctcttctgggagcaagtcargccttgggggaaaggtatctatggctgtgcttcaatacaggtactctcacaccaaaccctctgggttccctgttgcccctaccacttctctgagcagttctccctgttgactcaactgtctgtggtggttgagggatctcctcctgccagcattcctgagatccatggcaaaaattagttgctctttgccagttcaactcacctgttcccctggagccattgggggccactattaagttccagtgcatggcagccttctttcagggttcctggcttcctccaccttcagcccagcttttgtttcttccctgcatccactctctgtgccttccctctgaagatctgataggaaagctccaattgtcctagtccc

SEQ ID NO: 920747 - DNA, 573 bp, Homo sapiens
aaaatagtagtagtagtgtgtagttaaagagaaagtatactctgaaacacaagacagagcgggctgcttgaaagaatgaaccagcagcagtagtgctgggggactctctttatgagaattttacatgattattcatgaaggtgcaagaaggagtgttacttgcaagcatgttttaggaggtctctttgggcacgcatgctctgtggttgtacatactagtacacacattgcatgtccattagcatttaaaatctttactcaggggtataatttttaatactataatgagaaaaaggctactgtagggtgagtttttgtggagactgcatgctyatcagtgcggagagtccctagtgtggttatctttggctagggcatggtcagtccccttcagacctggaagagcctaaccacaaggccagatgtaaccaatgtagccatttccctttgtgcttactgacagtgggcagcatctccaggacttcgttttccaggggcttccttgcctgcttatttttggctctttgtctatgctaacaataatattaaaacaattaatgaatctggattttg

SEQ ID NO: 920748 - DNA, 464 bp, Homo sapiens
agtgtgcaaggctcagataagtgtaataaaaactcccatttgcccaacagtgaactatccaaagaagaaatcaagagtacaattccattttacaagaataaaagttacttagaaataaatttaactaacagatgaaagatctgtacactgaaaattataaaacattgatggaaaaaattgaagaagatacaaataaatgaaaaatgcttcatgttcatgaactgaaaaaaataatattgtaaaaatggccatactattcaaagccatatacagattcagcagagtccctatcaaaattctaatgacatttttcatagaaatataaaaacaatgttaaatttgtatgaaaccacaggagaccccaagtcgccaaagaagtcttgagccaaaggaacaaaagtggaggaatcacactrcttgatttcaaaatctactataaatctttagtagccaaaacaatatag

SEQ ID NO: 920749 - DNA, 610 bp, Homo sapiens
ttccagcattaactcaaaagtccaaaatctcatctgagattcaagccatcttctttctacctataatcctgtaagataaaaaattaactatttacttctaagatagaatggtggtataggcattgggtaaacattcccattmcaaaagagagatctgccaaaagaaagaggcaacaggccccacagaagtctgaaacccggcagggcagacattaaatcttaaagctccaaaataatccttgatgccacgtcccatatacagggcatattggtgcaagaggtgggcttccaaggctttgggcagctctggccctgtggcttctctcatgggttggaggtgaggacctgtggcttttccaggctcaggttgctggtggcgccaccattcctgggtctggaggtggcacctcccttccaacagctccactaggcagtgcaccagtggggactctgtctgggggctccaacctcacatttccctttggcgtggccctctaaaatctaggtgcagcctcccatgcctctttcacttgtgcattctgtgtgcctgtaggcttaacaccatgcgaaagccaccaaggcttacagtagtgggcttgtgccccttcag

SEQ ID NO: 920750 - DNA, 610 bp, Homo sapiens
ttccagcattaactcaaaagtccaaaatctcatctgagattcaagccatcttctttctacctataatcctgtaagataaaaaattaactatttacttctaagatagaatggtggtataggcattgggtaaacattcccattccaaaagagagatctgccaaaagaaagaggcaacaggccccacagaagtctgaaacccggcagggcagacattaaatcttaaagctccaaaataatccttgatgccacgtcccatatacagggcataytggtgcaagaggtgggcttccaaggctttgggcagctctggccctgtggcttctctcatgggttggaggtgaggacctgtggcttttccaggctcaggttgctggtggcgccaccattcctgggtctggaggtggcacctcccttccaacagctccactaggcagtgcaccagtggggactctgtctgggggctccaacctcacatttccctttggcgtggccctctaaaatctaggtgcagcctcccatgcctctttcacttgtgcattctgtgtgcctgtaggcttaacaccatgcgaaagccaccaaggcttacagtagtgggcttgtgccccttcag

SEQ ID NO: 920751 - DNA, 732 bp, Homo sapiens
aatattactttgagctacagcctctgacaccagggaaacaggcacactattctcattgcacatctaaaatcaaagttcctgaagtaaattttacatacctgtctgtagtattgagaggtgacagcgtgctggcagtcctcacagccttcgcttgctctcggcgcctcctctgcctggcctcccactttggcagcacttgaggagcccttcagctcaccactgcactatgggagccgctttctgggctggccaaggcaggagccggctccctcagcttgcagggagatgtggagggagaggcgcgagcgggaaccggggctgcgtacggcgcttgcgggctagctggagttccgggtgggcgtggttgtggtggsccccgcactccgagcggccggccggctctgccagccccgggcagtgaggggcttagcacccaggccagcggctgcggagggtgtactgggtcccccagcagtgccagcccaccggcgctgcgctcaatttctcgccgagccttagctgccttcccgcggggcagggctccggacctgcagcccgccatgcccgagcctcccacccccactgtgggctcctgtgcggccggagcctccccgatgagcgccgccccctgctcctcggcgcccagtcctgtagaccacccaagggctgaggagtgcgggcgcacggcgtgggactggcaggcaactccacctgcagccccagtgcgagatc

SEQ ID NO: 920752 - DNA, 674 bp, Homo sapiens
gctggagcaatgtctaggaacctaacagagtttcctcatattttaagtattagcatattaagtctttttttttttaattatactttaagttctagggtacatgtgcacaacgtgcaggtttgttacataggtatamatgtgccatgttggtgtgctgtacccattaactcgtcatttacattagttatatctcctaaggctatccctccccccttcccctaccccatgacaggtcccggtgtgtgatgttgcccttcttgtgtccaagtgttctcattgttcaattcccacctatgagtgagaacatggggtgtttggttttttgtccttgtgatagtttgctgagaatgatggtttctagcttcatccatgtccctacaaagaacatgaactcatcattttttatggctgcatagtactctgtggtgtatatgtgccacattttctttatccagtctgtcattgatggacatttgggttggttccaagtctttgctattgtgaatagtgccgcaataaacatatgtgtgcatgtatctttatagcaacatgatttataatcctttgggtatatacccagtaatgggatggctgggacaaatggtatttctagttctagatccttgaggaatcgccacactgtcttccacaatggttgaactagtttacagtcc

SEQ ID NO: 920753 - DNA, 569 bp, Homo sapiens
accatagaataatatgtagtcatttaaaaattatgtactacacacatattgtggagggcaacgtggcacaatggataaaaaaatacagatccatatacctctaatctagcattccactttaagaaatttatcttacaggtgtgttcatacaggtgcaaaatgacatgtatacgattatttgccttgccttagaagaaaacctaggcaataccactcaggacataggcatgggcaaagacttcatgactaaaacaccaaaagcaatggcaacaaaagccaaaattgacaaatgggatctaattaaactaaagagcttctgcacagcaaaagaaactagcatcagagtgaacaggcagtctacggaataggagaaaattgttgmaatccactcacctgacaaagggctaatatccagaatctacaaagaacttaaacaaatttacaggaaaaaaaaaacaaccccatcaaaaagtgggcgaaggatatgagcagacacttctcaaaacaagacatttatgcgaccaacagacacaagaaaaaatgctcatcatcactgctgattagagaag

SEQ ID NO: 920754 - DNA, 569 bp, Homo sapiens
ctaactacttgggagactgaagcaggaggattgcttgagcccaagagtttgagactgcagcaagctgtgattgtgccactgtgctccagcctgggcaacagaggaagactctgtctctataaataaataaataaataaataaatagtactgctatgaacattcctgtacatgccttttggtaaacatatgaatggatttctattatatatattatgtatatgctatatgaatatatcatataaatgtatatatrcatatatatatattcagaattaaaaatgctgggtcacagagtatgcctatattaagctttaatagcttttcaatgtggtttaccatttagaaagggtcatttaagctgtggcctgaaaaacgaaatggaatggaagctgcattgagatttccacactaacatctccctactgctatgacaaaaatgtgaccttttataaagtggttagagtcaaatgggagaagtcctttgcctcttttttgctgtggtctcccagtacactttagtgtgaggagcctctgtcattttggtcagacccagggagtcaagagatga

SEQ ID NO: 920755 - DNA, 779 bp, Homo sapiens
tcagcaactgttttttttctttctttttttttttttttttttactttttagtaatagccgttctgactggtttgagatggtatctcattgtggtggtttgatttacatttctctatataattaatgatgttgatatggtttggctctgtccctacctaatcttgtcttgaagtccaaggtgttgcgggagtgacagatgggaggtaattgaatcatgggggcaggtctttcccttgctgttcttgcggtagtggataagtttcatgagatctgatggttttataaagatgagtctccctgcacaagctctcttctcttgtctgaccccatgtgagatgtacytttcaccttctgccatgattgtgtgtccggaattggtgggttcttggtctcactgacttccagaatgaagctgcggatcctcgcagtgagtgttacagttcttaaagatggtgtgtccagagtttattccttctgatgttcggacgtgttcagagtttcttccttctggcaggctcatggtctcgctggcttcaagagtgaagctgcaaacctttgtggtgagtgttacagctcttaaggcggcgtgtctggagttgtttgttcctctcgtctggagttgttcattcctcccggtgggctcgtggtcttgctgacctcaggagtgaagctgcagaccttcacggtgagtgctacagctcataaaggtagtgtggacccaaagatttacggcaaagagcaaaaaaacaaagcttccccagcgcagcaagagaccccag

SEQ ID NO: 920756 - DNA, 738 bp, Homo sapiens
ggtctcgctggcttcaagagtgaagctgcaaacctttgtggtgagtgttacagctcttaaggcggcgtgtctggagttgtttgttcctctcgtctggagttgttcattcctcccggtgggctcgtggtcttgctgacctcaggagtgaagctgcagaccttcacggtgagtgctacagctcataaaggtagtgtggacccaaagatttackgcaaagagcaaaaaaacaaagcttccccagcgcagcaagagaccccagcagcttgccactgttggctggggcagcctgcttttatttccttatctggccccacccgcatcctgctgattggtccattttacagagagctgattggtctgtttcatagagagctgattggtgtgtttacaaactttgagctagacacagagtgctgattggtgtatttacaatcccttagctagacacaaccattctccaagtccccaccagattagctagatacagagtgctgattggtgcatttacaaaccttgagctagacacagagtgctgattggtgtatttacaaaccttgagctagacacatagtactgattggtgtatttacaatcccttagctagacataaaggttctccaagtccccaccagattagctagatacagtgctgattggtgcatttacaaaccttgagctagacccagagtgctgattggtgtatttacaatcctctagctagacataaaagttctgcag

SEQ ID NO: 920757 - DNA, 653 bp, Homo sapiens
ttttccactcagccttcgtggagatagtctccagcaagctgaagtagcaatgttgtgcatgggctcaagagctcttgtctgtgctgaagacctttatatatatgtatacacatacaggttgagtatcctttgtctaaaatgcttggagccagaactattttagatttcgataattttcagatttcagaatattagcatattcataatgagaggwctcagggttgagactcaagtctaaacatgaacttcatttatggttcatgcacaccttatatatattggctgaaggaaattctattcaatttctaaaataatttcttgcattaaataaagtatgtgtgcactgaaccatcagaaagcaaaggcatcactgtctcagccacccatgtggacaatctgtggttgtttggcatcaccatcattcttgactctgaatttaaatcctgccgataagtaattattttcttaaacttattcacatgtaaatacttagcagcaaaaaatataacataccatcctggacaaaatggtgaaatctcgtcttctttactaaaaatacaaaaattagctgggcgaggtggtgcgcgtctgtagtcccagctactcggaagactgaggcaggagaatcgcttgaaccccggaggcaggggttg

SEQ ID NO: 920758 - DNA, 653 bp, Homo sapiens
ttttccactcagccttcgtggagatagtctccagcaagctgaagtagcaatgttgtgcatgggctcaagagctcttgtctgtgctgaagacctttatatatatgtatacacatacaggttgagtatcctttgtctaaaatgcttggagccagaactattttagatttcgataattttcagatttcagaatattagcatattcataatgagaggtctcagggttgagactcaagtctaaacatgaacttcatttatggttcatgcacaccttatatatattggctgaaggaaattctattcaatttctaaaataatttcttgcattaaataaagtatgtgtgcactgaaccatcagaaagcaaaggcatcactrtctcagccacccatgtggacaatctgtggttgtttggcatcaccatcattcttgactctgaatttaaatcctgccgataagtaattattttcttaaacttattcacatgtaaatacttagcagcaaaaaatataacataccatcctggacaaaatggtgaaatctcgtcttctttactaaaaatacaaaaattagctgggcgaggtggtgcgcgtctgtagtcccagctactcggaagactgaggcaggagaatcgcttgaaccccggaggcaggggttg

SEQ ID NO: 920759 - DNA, 653 bp, Homo sapiens
ttttccactcagccttcgtggagatagtctccagcaagctgaagtagcaatgttgtgcatgggctcaagagctcttgtctgtgctgaagacctttatatatatgtatacacatacaggttgagtatcctttgtctaaaatgcttggagccagaactattttagatttcgataattttcagatttcagaatattagcatattcataatgagaggtctcagggttgagactcaagtctaaacatgaacttcatttatggttcatgcacaccttatatatattggctgaaggaaattctattcaatttctaaaataatttcttgcattaaataaagtatgtgtgcactgaaccatcagaaagcaaaggcatcactgtctcagccacccatgtggacaatctgtggttgtttggcatcaccatcattcttgactctgaatttaaatcctrccgataagtaattattttcttaaacttattcacatgtaaatacttagcagcaaaaaatataacataccatcctggacaaaatggtgaaatctcgtcttctttactaaaaatacaaaaattagctgggcgaggtggtgcgcgtctgtagtcccagctactcggaagactgaggcaggagaatcgcttgaaccccggaggcaggggttg

SEQ ID NO: 920760 - DNA, 821 bp, Homo sapiens
ctgatacaatttttttaagctcaagttttgatatggtaaaaaagaacagataccagtgttactcagacttgccagctctcaaagcatttggtggttaaacttgaagaaaagacagcacatatatgcatacgtgaataaattttattttcctgtaattccttttaaatattaaaaaatttaaacaaacagggctctcatttggtcatctttgcaatatatttgagcctgttttagaatatgacaacaggaaaacatagagccttgaatttggtgtattcatagacgttggtattattccttctcacagtcctcagagggattaaaaaataacttgttgtacatggcagatcctggaaattggtaagcttgacttcctggcaaactgtagtgtctgttcaggactactaaatactaaaaatgtgagactcatccttaaaagtatttattgtgttctaatatatacatacatayacacacacacacacacacacacacacacacatatatatatacacacacataaatagataagaacgtactcattccaggcacatggaaaaaaagttaatcaagatctaaatctctaagtgtttatttactaaaaaatattttccatctttaagccttgctaaaaggcttaaatgcatcatgctaaattttttaatgcaacatgctaaatctgacattatattcaacattcatttaacaatgaattcatttaatgatgaatgaatgaatttaacagcgagcacatttaacattttaatgagtcctcactatttgcatggatttcaaaaaatccatgatcccacccttgcagt

SEQ ID NO: 920761 - DNA, 767 bp, Homo sapiens
attttttgtggggttttctgtgtatagattatgtcatctgcaaacagagacaattttatttcttcctttcttatttgaatgccctttattcatgtttttttttttcataactgctctggctaggacttcgactattatgtagaatagaagcaaagaaagtaggcatccttgccttgtttctggatctcagaggaaaagctttcagtttttcaacatcgactatgatgctagcagtgggctttaaaatgcaaataaaaaccacaacgagacgtcacttcacacccgttaggatggttgttattttaaaaagggggattggacagtatggggagatattagagctctaatacattattggtgtacgtgtaatggtaagccactacggaaaacagcacagaaggtctgcaaaaattttaaaatatgactatcttatgatccagcaamcttacttctgggaatatatccaaaagaattgaaagcaggatctcaaagggatatctacattgcagcattattcacaatagccaagacatgcaagcaacctaaattttcaatggatgaatgaataagaaaatgtgtgtgcgtgtgtgtgtgtgtgtacaacacaaagtggaatattattcatccttaaaaaataaggatatcttgcttatgtgacaataaaaatgaacctgtaggacattatcataagtgaaataaatcagttacagaaggatgagtgatgcatgattccacatacatgaactatttaaaacagtcaaactcat

SEQ ID NO: 920762 - DNA, 758 bp, Homo sapiens
tgatcaactgtgttcaatgctgttgttgagaggttgataaaataaggactgaaaattgaccattagattcacaaaaggggatcaatcaccactgtccttgccaagaacacatcttgttcagtgatggagtgaaaacttgaaggaacaaagttyatgagtgaacaagtcaggaagtagagtccatgagcacaaatacctcttttgtgatatttaatcattaaagggaaaagagaaatgagaagagagccagaaaggaagtgagttccacagtttttttttaaacagctttattgagatataattctcatttcatagcgttgtttcatgtatgtatttatttattttgagttaggagaaataagctcatgcatttatactgttgagaataatccaaaaggggggaaacctagagatgaatgaattgctggcataatattcttggatggaatccagtatacaaatgaaagagttggcctttgatcatggcacagagagttcatctggataaataagaacgtaggtaaagtttgagtagaaatctggtagagtttcttttgatagcttttgttttttcagtaaaactggaaataatgttattaacagaaagggatgatgggaaagaggtgttggatgttggagaggagagaagatatgaaatagaagaatatgacagcaaatggactagaaaatataattgcctagctgtcttaagggtccattcagggtaatgaatttaagagagacaagttagcatatgg

SEQ ID NO: 920763 - DNA, 758 bp, Homo sapiens
tgatcaactgtgttcaatgctgttgttgagaggttgataaaataaggactgaaaattgaccattagattcacaaaaggggatcaatcaccactgtccttgccaagaacacatcttgttcagtgatggagtgaaaacttgaaggaacaaagtttatgagtgaayaagtcaggaagtagagtccatgagcacaaatacctcttttgtgatatttaatcattaaagggaaaagagaaatgagaagagagccagaaaggaagtgagttccacagtttttttttaaacagctttattgagatataattctcatttcatagcgttgtttcatgtatgtatttatttattttgagttaggagaaataagctcatgcatttatactgttgagaataatccaaaaggggggaaacctagagatgaatgaattgctggcataatattcttggatggaatccagtatacaaatgaaagagttggcctttgatcatggcacagagagttcatctggataaataagaacgtaggtaaagtttgagtagaaatctggtagagtttcttttgatagcttttgttttttcagtaaaactggaaataatgttattaacagaaagggatgatgggaaagaggtgttggatgttggagaggagagaagatatgaaatagaagaatatgacagcaaatggactagaaaatataattgcctagctgtcttaagggtccattcagggtaatgaatttaagagagacaagttagcatatgg

SEQ ID NO: 920764 - DNA, 389 bp, Homo sapiens
atgaaatattcagaagcccagcccagctctagaactcacccctagcgcaaaggcaatgttgggcacgctggtaaaggacctctagaatccagcagcccagacccgtttctctgtggtcaagaaaggtgggaaaaggsgtgcaggactactacatcggtgagcgtaactaatccgataagcagaggtccatgggtggttatgcaccctggaaaggaataagcattaggaccatagaggacgctctaggactaatgctcattggaaaatgactagggttgccggcatccctatgttctttttccagatgggaaacatttctcccaaggcaaaaatgccactaagatgtattctggagaattcagcccagagtgcatatacctttttctctg

SEQ ID NO: 920765 - DNA, 620 bp, Homo sapiens
ctgaaaaagctgcatggagactataccactgcacctacctggaaaaacaagcaccacacccttcccgaccagcacactaagacctagctacaggtgagagtatatctccatgaaagtcactctagaaaatttagatgagacgactgttccaccagacaggcacacagacatgaacacagggactcatgaaacatgaaaaaacaaatatatatgacaccaccaaaggaacataattaactctctagcaacaggtcccaaagaaaaggaaatcaataaattgcctaaaaaggaattcaaaataatgatttgagggaaaagacacaagaaaatatagataaaaaattcartgaaactaggaaaacaattcatatgaatgagaaattcaaaaaagtaataaatatcattaaagagaaacaaaaatcctgtggcttaagaattcagtgaataaaataaaaatatataatagacagcttcaacagcagacttgatcaagcaaaagaaaatctctgaacttcaagatagaatgtttgaaattactcatttaggggaaggaaaaaaaaaggaagaaagtctataagacttatgggacaccaccaagtgaataaattttcatattataa

SEQ ID NO: 920766 - DNA, 598 bp, Homo sapiens
aaaatctagccagcttaacatcacaattttgcttaagccacagacatttacttcctgttaaagagcaactgctttctctttaaccaaatttcaaatgagagaaaagttcataaattgtattagtttgttctcacatcactatgaagaaatacctgagactgtttaatttataaagaaaagaagtttaattgactcacagttctgcatggctgaggaggcctcaggaaacttaaaatcatggcggaaggggaagcagacaccttcttcactaggtggcaggagagagtgtgagagcacgggaaagactaccttttataaaaccatcagatctcgtgagaattcactcactatcatgagaacagcatgggggaaaccagtccccatgattcagttatctccatctggtcccacacttgacacatggggattattacaatgcamgatgagatttgggagagaacacagaggcaaaccatatcacaaattttagcaagtaagacagacaaaactttaacttcaaggaagagtaaaaccacaaacctgcctgcaacagaatctctaaataggtagcaaagagaacccataccttaaagcttta

SEQ ID NO: 920767 - DNA, 645 bp, Homo sapiens
catggctaacagggaccaaggcacagctcaggctgtggcttcagagaatgcaagccccaagccttggcagctttcatgtggtgttgagcctgcaggtgcacagaagtcaagaactgaggtttgggaacctctgcctagaattcagaggatgtatggaaacacctggatgttcaggcaaaaattttctgcagktgtggggccctcatggagaacctctgctggggcagtggttctcagtggccccctggcacagagtccctactggggccctgcctagtggagctgtgagaagagaaccactatcctccagaccccagaatgatagatcaccaacagcttgcaccatgcaccgggaaaagctgcagacactcaacaccagcccatgaaagcagtcaggagggaggctataccctgcaaagccacagaggcagggctgcccaagaccatgggaacccacctcttgtgtcagcatgacccggctgtgagacatggagtgaaaggagatcattttggagctttaagatttgactgccctgctggattttggacttgcatgggacctttagccccttcattctggccaatttctcccatttggaatgggtatatttatccaatgcctgtacccccattgtgtctaggaag

SEQ ID NO: 920768 - DNA, 645 bp, Homo sapiens
catggctaacagggaccaaggcacagctcaggctgtggcttcagagaatgcaagccccaagccttggcagctttcatgtggtgttgagcctgcaggtgcacagaagtcaagaactgaggtttgggaacctctgcctagaattcagaggatgtatggaaacacctggatgttcaggcaaaaattttctgcaggtgtggggycctcatggagaacctctgctggggcagtggttctcagtggccccctggcacagagtccctactggggccctgcctagtggagctgtgagaagagaaccactatcctccagaccccagaatgatagatcaccaacagcttgcaccatgcaccgggaaaagctgcagacactcaacaccagcccatgaaagcagtcaggagggaggctataccctgcaaagccacagaggcagggctgcccaagaccatgggaacccacctcttgtgtcagcatgacccggctgtgagacatggagtgaaaggagatcattttggagctttaagatttgactgccctgctggattttggacttgcatgggacctttagccccttcattctggccaatttctcccatttggaatgggtatatttatccaatgcctgtacccccattgtgtctaggaag

SEQ ID NO: 920769 - DNA, 645 bp, Homo sapiens
catggctaacagggaccaaggcacagctcaggctgtggcttcagagaatgcaagccccaagccttggcagctttcatgtggtgttgagcctgcaggtgcacagaagtcaagaactgaggtttgggaacctctgcctagaattcagaggatgtatggaaacacctggatgttcaggcaaaaattttctgcaggtgtggggccctcatggagaacctctgctggggcagtggttctcagtggccccctggcacagagtccctactggggccmtgcctagtggagctgtgagaagagaaccactatcctccagaccccagaatgatagatcaccaacagcttgcaccatgcaccgggaaaagctgcagacactcaacaccagcccatgaaagcagtcaggagggaggctataccctgcaaagccacagaggcagggctgcccaagaccatgggaacccacctcttgtgtcagcatgacccggctgtgagacatggagtgaaaggagatcattttggagctttaagatttgactgccctgctggattttggacttgcatgggacctttagccccttcattctggccaatttctcccatttggaatgggtatatttatccaatgcctgtacccccattgtgtctaggaag

SEQ ID NO: 920770 - DNA, 760 bp, Homo sapiens
aaattgtttagatatacagtttgaataaacttcacggtctaagtcgaattacctatgataatccatcagttatcagtgctgtgatttagaaaaacaactggcactcaagaggatattagtctaatgttaattaagcatggccttctggagaaccaggataatcaccttgtcctccctgagtccttaaagattttattattaaaagttttgygttccatgactcatcatggaaaagataaaataatccaaattaaatacattggtgtggtaacttacaaattacaaaaatagtttataaccaatgtttagtcccatattcctgggaaaacagttaaagcatcgggtacacttggtaacctgatgggccatttaaacatcttataaaggaatttcattcaattgttattatcaatgcatattttctggttgataaaagctttcccatgcaagagggctgatgttataacagcagatcattatgctacagtgtgttttcactgggtaaagaaagctttttatggtttgaatcttttgggaagatcagagaaagaactgttgttgccatccacactacaacagaacttcgggaccttgaactttgggttcataatctcacaactgagaagggtatctccatattcttggaactgtgtacccattggaacccttgagatttctccccagaggaggatggcatccttgatgtaaatagcttttcccaagttcacagattaagacttctactatcatgaaactctca

SEQ ID NO: 920771 - DNA, 635 bp, Homo sapiens
aggaggggagaacataggtttttgcattggacagacctggtttaaattttagttgtgccactattagtagggttacctgaaacaagatatttagcttttctagtggagcctctgtttactcatctgtgaagtggaactaataatgtccacttcagtggtgtgtttaagaaaaaagggatttggctgggtgcagtggctcaagcctgtaatccctgcactttgggaggccagggtgggtcratcacctgaggtcaggagttcgagacaaacctggtcaacatggtgaaaccccatctctactaaaattactaaaattacaaaaattagccaggtgtggtggcgggcagcttgtaatcccagctactcgggaggctgaggcaagagaattgcttgaacctgggaggtggatgttgcagtgagccgagatcctgccactgtactccagcctggggaacaagagcgaaactcggtctcaaaaaaaagaaaaaagggattcattaaggggtttagatggtgcacagcctcagagggctgaagacacagacactaggctgagcttctagaaacagctctcaacaccagcagagagctggcccacccagggaactgctgcttctatcctaatcagcaagact

SEQ ID NO: 920772 - DNA, 620 bp, Homo sapiens
aggggagaacataggtttttgcattggacagacctggtttaaattttagttgtgccactattagtagggttacctgaaacaagatatttagcttttctagtggagcctctgtttactcatctgtgaagtggaactaataatgtccacttcagtggtgtgtttaagaaaaaagggatttggctgggtgcagtggctcaagcctgtaatccctgcactttgggaggccagggtgggtcaatcacctgaggtcaggagttcgagacaaacctggtcaacatggtgaaaccccatctctactaaaattactaaaattacaaaaattagccaggtgtggtggcgggcagcttgtaatcccagctactcgggaggctgaggcaagagaattgcttgaacctgggaggtggatgttgcagtgagccgagatcctgccactgtactccagcctggggaacaagagcgaaactcggtctcaraaaaaagaaaaaagggattcattaaggggtttagatggtgcacagcctcagagggctgaagacacagacactaggctgagcttctagaaacagctctcaacaccagcagagagctggcccacccagggaactgctgcttctatccta

SEQ ID NO: 920773 - DNA, 638 bp, Homo sapiens
aaacaagagcagggcatgtatgagtagttgaaaacagtcaatagaagtatgactagagagaagacagtagggatgacaagttttttgggggcacagtctaagttggtctggtgtctggaatgagactggggcctaataaaaaggagtgtctatactggagctcaaatgggctctgccttgtagcattctgaggacaggtmtgacttctgagaagggaaagtggtagaagtattgtccagtcctttgtaagttggtggctgagcttggtgacgtgtgtttttaaaagacctttagtccattctacttttcttgaagactgaggactgtaagggatataaaggtttcactgaatactaagaacctgaaaaaatgcttggctgatttgactaataaaggctggtctgttatcagactgtatagaggtaggaaggctaacctgaggaattatgtctgacagaagggaagaaatgactgcggtggccttctcagaccctgtaggaaaggcctctacttatccagtgaaagtgtctacctagactaagaggtattttagttatctgactcggggcatgttgagtaaagctaatttgccagtcctgggtgggggcaaatcttcgagcttgatgtgtagggaaggg

SEQ ID NO: 920774 - DNA, 646 bp, Homo sapiens
aatactaagaacctgaaaaaatgcttggctgatttgactaataaaggctggtctgttatcagactgtatagaggtaggaaggctaacctgaggaattatgtctgacagaagggaagaaatgactgcggtggccttctcagaccctgtaggaaaggcctctacttatccagtgaaagtgtctacctagactaagaggtattttagttatctgactcggggcatgttgagtaaagctaatttgccagtcctgggtgggggcaaatcttcgagcttgatgtgtagggaagggagggggcctgaataatccctgaggagtagtagaatagcagatggaacactgagaggttatttccttgaggatagatttccatgatggaaagaaaatgagaggttttaagaggcaggctwgtggcttgtactatagcatagcctgcctttgctggtgtgtggcgattaggcctggtggaactgccatcaataaatcaagcatgatcagggtgaggaacaggaaagaaggaaatatggggaaatggggtgaatgtcaggtggatcagagagatacagtcatgggggtcaggtgtggtatcaggaataatgtgggaggccagattgaggtctgggccaggaacaatgataattgtgggag

SEQ ID NO: 920775 - DNA, 597 bp, Homo sapiens
ctgtctctctccctctctttgactttcctctttcctgagacaaaaaaatatggaaattaagtcaattaataatcctacaatggcctctaagggctcaagttaaaggaagcgtcacatgtgtctcactttaaataaaaagctagaaatggtgaggcttagttaggaagccatgtcaaaagctgagaggctgaaaactaggcctgttgcagcaaacaatcagccaagttatgaagtgctactccagtgaacatacgaataataagaaagtagaacagtcttatcgctgatatggagaaagtatgagtggtctggatagaagatccaaccagccacaacattcccttaagccaagccttaatccagagtgaggcctaaactctcctcaattctatgaaggctgaaagatrtgagaagctgcataagaaaagtttgtggctagctgatgttggttcctgaggttgaaggaaagaagctgtctcataacattaaagtgcaaggcgaagctgcaaatgctgatgtaaaagctgcagaaggttgtccagaagatctagccaagatcctagatgaagatggctacactaaacaacagttttacag

SEQ ID NO: 920776 - DNA, 574 bp, Homo sapiens
cttctaatactatgttgaataggaatggtgagagagggcatccttgtcttgtactggttttcaaagggaatgcttccagcttttgcccattttatatgatattggctgtgggtttgtcataaatagctcttattattttgagatatgttccatcaatacctagtttattgagagtttttaacatgaagggatgtagaattttatcaaaggccttttctgcatctatcaagataatcatgtggtttttgtcttggttctgtttatgtgatggattatgcttattgatttgtgtaygttgaaccaaccttgcatctcagagatgaaaccgacttgatcatggtgaataagttttttgatgtgctgctggatttggcttgccattattttattgaggattttcgtattgatgttcatcagggatattggcctgaaattttctttttttttgttgtgtctcttcccagttttggtatcaggatgatgctggcttcataaaatgagttaaggaggagttccctccttttcaattgtttggaatagtttcagaagtaatggtaccagctcctctttgtat

SEQ ID NO: 920777 - DNA, 605 bp, Homo sapiens
ggcttatttgtttgccaagcaaggaaagccatttactgatgttgagttaattaaattgtattttattgaagcagtcaaaaaaattatgtccagagaaaataaacttgttttaggctattagctttttggcaagcacagttgatttaagagttgaggacatttgaagcaacatcactagtcaattaaaaaacaaggcaaatgatttggagtggtttttctcggctcttgatgagccggcagatgttattgatacaattcagttgttctttattcaaggagtcaattccaagtttgaagtggcagaaaagttggcctctgaatagcctgtgcagaacaactacaggcaagaatattttcaaagctgagaaaacactaagtacaatctgaagtggaatctgtaaggatgtgctgcaagcggtggtgatagaatacatacrgagcagcaaaaggcttagttggagtaatttacaaagcttgtaaaactgaggagttcatagtttatggttattcattgttattcattggcagatactttgcagaaaatatttccatctatccatgtgtgttactgaatcagtactgtcaactgtgaagtcagtttgctc

SEQ ID NO: 920778 - DNA, 605 bp, Homo sapiens
ggcttatttgtttgccaagcaaggaaagccatttactgatgttgagttaattaaattgtattttattgaagcagtcaaaaaaattatgtccagagaaaataaacttgttttaggctattagctttttggcaagcacagttgatttaagagttgaggacatttgaagcaacatcactagtcaattaaaaaacaaggcaaatgatttggagtggtttttctcggctcttgatgagccggcagatgttattgatacaattcagttgttctttattcaaggagtcaattccaagtttgaagtggcagaaaagttggcctctgaatagcctgtgcagaacaactacaggcaagaatattttcaaagctgagaaaacactaagtacaatctgaagtggaatctgtaaggatgtgctgcaagcggtggtgatagaatacatacggagcagcaaaaggcttagttggastaatttacaaagcttgtaaaactgaggagttcatagtttatggttattcattgttattcattggcagatactttgcagaaaatatttccatctatccatgtgtgttactgaatcagtactgtcaactgtgaagtcagtttgctc

SEQ ID NO: 920779 - DNA, 751 bp, Homo sapiens
tccccagggactattatgaatatctctatgcatacaaactacaaaacctagaagaaattgataaattcctggaaatatacagcctctcaaggatggaccacaaagaaattaaaatcctgaaaagatcaataatgaattctgaaattgaatcagaaataaaagcctacagaccaaaaaaaaaaaaaaaaaaaaaaaaggccctaccagacatatgaagaagagcgaataccaatcctactgaaattatttcaaaaaaatcraaggggatgtagtcctctctaattcattctacatagccatcatcattctgacaccaaagacttccagagacacaattaagaaaagaatacttgaggccaatatctctgatgaacctagacacaaaaatcctctacaaaatactggcaaagcaaatctatcagcataccaaaaaattaatttgccacagtcaagtgggccttatttctgggatgcaagatttgtttaccatatgcaaatcaataaatgtgattcatcacataaacagaattaacaacaaaaacacattatcatctcaatagacacagaaaaggcctttgataaaatttaacatcttttcatgttaaaaacctttggcaaattagccaccaaaggaagatacctcaaaatcataacagccatctgtgacaagaccactatcaacatcatgctgaatggaagcatgaatgaaacctggaagcacccccattgagaactggaacaagacaaggat

SEQ ID NO: 920780 - DNA, 474 bp, Homo sapiens
ccttctgttgctgaaccaggctgagacaatcagggccaagttagatatgtaaaaaatcggatttcaaatctttgtccagtttcattagaatctaaaatacttttccatatacgtaagcagtggcttgccaggagatgaagactctccctcctaccaatcccaacagagaagctggaatctgggtcaggatgatgtccccattcattgcttaagcgtaaaagaggaaagtggcattgatggtgcacagcaggaacatacacccaacagctcaatgacctgacctttccccggtgcctccccctcacctgctctccagaaagccggggtctagragagcagttcctgagttcacaggaacatgctagtagggagtacagctcagagcattactgagggaatatgatattggtctctactgtctctactaaaaatgcaaaaaattaaccgggcgtggtggcgggcgcctgtggtccc

SEQ ID NO: 920781 - DNA, 649 bp, Homo sapiens
tgcgtaggatggaatatagcagccctagaagaaatttaaacccaattatgggaatttatattaaacaacttactggggagctcgactgcaccaaaattatctaagacaaaagaaaaagaagaaatctgctgattaacttgttaaattaaaggaaatatttactgggcaattatattcttgagtatgcttccaaaaaagagcaagcttttatagctggcatgtggttttgagatttaataaaggtaatttgcttggaatagaaattaattcttaatagtggtcagaatagcagctcaacaatgtaaaaaccttataaacacccagggaagctgtggttttttggagaccttatttcarggacagagatccctttatttaagggtcagaactgagaaggaatcttagagggaataaagaatgtaagggacacagaatgcttagggatgcaacaaaatcactgcctcactttgtgcagtctgatgggggtgagatgggccccacagaaagatgaacatgcacggaggaaaagcatccctggaagcacaggactccactagctaatctcatatctcagtgtatactttatatcattttttttctgtttttttctaagaaagaggacaatcaattgaaacatttggaaacaggc

SEQ ID NO: 920782 - DNA, 470 bp, Homo sapiens
gtaactgtgccttgactgatcaggactcctcagttcaccttctcacaatgaggctccctgctcagctcctggggctgctaatgctctgggtctctggtaagaaaagaaggagatgaggaaggagaatagggtgggagggtgagctctagggctccacagcatcccatgatcccatgtttagtctaaccctgtgttagaggagtataatctgtgctgtagaaaagggaacttgatattttgctctgtgaataattagaagcctcataagaaatatgacgtctggtgctcygattaagatcttcaaaatataaaggtctcttatactttacaaaaattgaattcattttagaatgtgtatttttatggcataaatcagtattttttaaaattaagtttaaataaatgacataagataaattatgaaaattgctcattaggtttgtacataactttgcaattcattatttcag

SEQ ID NO: 920783 - DNA, 604 bp, Homo sapiens
tccctttttgcagataatatgatcttagatctagaaaaacctaaagacttgaccaaaaccactcatagatctgatagataaataaattcagtaaagttgcaagatataaaatcaacacacaaaaatcattagcatttctacacaccgataattaattagctgagaaagaaatcaagaaggcaatgtcatgtataatagctacaaaaaatgcataggaataaatttaaccatgaaggtgaaaaaatctctacaaggaaaactacgaaacacagatgaaagaaattgaagaggatagaaataaatggaaagccatcccatgcacatgttttggaataattaatattgttaaaatgatcatacttcccaaagaaatctacagattcratgcaatctctatcaaaatcctgatgtcatttttcacagtaatagaaaaaacaatccaaaaattcatacggaataaaaaaagagcccaaataggcaaagcaatcctgagcaaaaagaacaaagctagagacatgacactatctaacttcaaattacagaaataaaccaatgaaacacaatagagaaaccagaaataaatccacatatttatagccaactg

SEQ ID NO: 920784 - DNA, 534 bp, Homo sapiens
ccagtggaacagaatagagaactgatatggttggctctgtgtccccacccaaatctcatctcaaattgtaaaccccatgtgtcagaggaggggcctggtgggaggtgataggatcacggggaaagatacccccttgctgttctcatgatagtgagttctcatgatatctgatggtttaaaagtgtggcacgtcccccttcattctctctcctgctgccatgtaagatgtgccttgcttctccttcaccttctgccatgattgtaagtttcctggtgcctccccagccatgcagaactgtgagtcaattaagcctcttttctttataaattacccaatttcaggtatgtctttatagcaatgtgagaaygaactaataagaactcagaactaaaatcacacacccacaactatctgatctttgacaaacctgacaaaaacaagcaatggggaaaggattccctattcaataaacggtgctaggataactggttagccatatgcagaagattgaaactggacctcttccttacacc

SEQ ID NO: 920785 - DNA, 534 bp, Homo sapiens
ccagtggaacagaatagagaactgatatggttggctctgtgtccccacccaaatctcatctcaaattgtaaaccccatgtgtcagaggaggggcctggtgggaggtgataggatcacggggaaagatacccccttgctgttctcatgatagtgagttctcatgatatctgatggtttaaaagtgtggcacgtcccccttcattctctctcctgctgccatgtaagatgtgccttgcttctccttcaccttctgccatgattgtaagtttcctggtgcctccccagccatgcagaactgtgagtcaattaagcctcttttctttataaattacccaatttcaggtatgtctttatagcaatgtgagaatgaactaataagaactcagaactaaaaycacacacccacaactatctgatctttgacaaacctgacaaaaacaagcaatggggaaaggattccctattcaataaacggtgctaggataactggttagccatatgcagaagattgaaactggacctcttccttacacc

SEQ ID NO: 920786 - DNA, 652 bp, Homo sapiens
cagggataatttgatttcttctccaatttgaatgccttttatttctttctcttgcctgactgctctggctaggacttccaatattatattgaatagaagtggtgaaagtaggcattcttgtcttgttccaattaaaggaaatgcttccaacttttcctcattagtatgatgttggctgtgggtttgttgtatatggcctttattaatttgaggtatgytccttctatgcctcatttgttgagtttttatcatgaaggggtgctgaattataccacatgctttttctgtgtctactgagatgattatatggttttatccttaattctgttgatgtgatgtatcatgtttattgatttgtatatgttgaaccatccttgcaatccctggtaaaaacccacttgatcaaggtgtattatctttttgatgtactcttgggtttggtttggtagtattttattgagtctatttggcccatattcttcagggatattggtctgtggttttctttttttgtgcatctttgtctggcttggtatcagggtgatacagtcctcatagaatgagtttgggagaattttctctcttcaatgttttgggacagtttcaggagaattagtgttactatttccttatatgcttagtagaattcagc

SEQ ID NO: 920787 - DNA, 652 bp, Homo sapiens
cagggataatttgatttcttctccaatttgaatgccttttatttctttctcttgcctgactgctctggctaggacttccaatattatattgaatagaagtggtgaaagtaggcattcttgtcttgttccaattaaaggaaatgcttccaacttttcctcattagtatgatgttggctgtgggtttgttgtatatggcctttattaatttgaggtatgttccttctatgcctcatttgttgagtttttatcatgaaggggtgctgaattataccacatgctttttctgtgtctactgagatgattatatggttttatccttaattctgttgatgtgatgtatcatgtttattgatttgtatatgttgaaccatccttgcaatccctggtaaaaacccacttgatcaaggtgtattatctttttgatgtactcttgggtttggtttggtagtattttattgagtctatttggcccatattcttcagggatattggtctgtggttttctttttttgtgcrtctttgtctggcttggtatcagggtgatacagtcctcatagaatgagtttgggagaattttctctcttcaatgttttgggacagtttcaggagaattagtgttactatttccttatatgcttagtagaattcagc

SEQ ID NO: 920788 - DNA, 606 bp, Homo sapiens
tccaatttctccaccacttaccaacactgtgattgtccatctttttttttaattttgagacagggtctcagctctgttgcccaggctagaatgcagtgatgcaatcacaggtgactgtggccttgacttcctgggcccaagcaatccwtccacctcagcctccagagtagctgagactacaggcatgcgacaccatgcacagctaatttttaaattatttcttggtagagactgggtctcactatgttgcacaggtctcaaattcctgggttcaagcaatcctcccagatttggcctcccaactcaggcctgggattacaggcatgagtcactgtgcccagcctatccatcttttttattttggctatgctagtgggtgttaagtatctcactgtagttctgacttgcatttccctaatgactaatattttttcatgtgcttatcagccattaatatatctttggaaaaatgtttattaaagtcctttgcccatttgaaattgggttatatttttattgttgagaggtaagagttcttcatatattctggatacaagtctcagtatccagtaagatatatactttgcaaatattttctctcattct

SEQ ID NO: 920789 - DNA, 606 bp, Homo sapiens
tccaatttctccaccacttaccaacactgtgattgtccatctttttttttaattttgagacagggtctcagctctgttgcccaggctagaatgcagtgatgcaatcacaggtgactgtggccttgacttcctgggcccaagcaatccttccacctcagcctccagagtagctgagactacaggcatgcgacaccaygcacagctaatttttaaattatttcttggtagagactgggtctcactatgttgcacaggtctcaaattcctgggttcaagcaatcctcccagatttggcctcccaactcaggcctgggattacaggcatgagtcactgtgcccagcctatccatcttttttattttggctatgctagtgggtgttaagtatctcactgtagttctgacttgcatttccctaatgactaatattttttcatgtgcttatcagccattaatatatctttggaaaaatgtttattaaagtcctttgcccatttgaaattgggttatatttttattgttgagaggtaagagttcttcatatattctggatacaagtctcagtatccagtaagatatatactttgcaaatattttctctcattct

SEQ ID NO: 920790 - DNA, 638 bp, Homo sapiens
atccatctacctcagcctcccaaattgttaggattacatgtgtgagccaccacacctggctgtaaatttctaaagtttttgactccaatccttggctcccagacagcatctctggatatgccggggacctggaggaactcgccaccctgaaggaaaggtccctgggcaaggcccattgctgtgctggcttcaggtctgacccactgcagtaacagtagtggtggctagaagggtgcttgcatcaccatacccccagttccaggtgactcagcacacagagagagagagactccgtttgtctggaagaaagtaagaaaaaagaacaaaagtctctgcgtggtaatcaagagaattctggctcttatccatgaccaccaaggagataccttaggcatgagtccacaaaaaacacagcattattgggcttggggcccaagtccctttgaatacctagaaagacttctcaagaacracaggcacaaacaagcccagacggtggagactataataaatacctaactcttcaatgtccagacactgatgaacatctataagcatcagcatcatccaggaaaacatgacctcaccaaatgaactaagtaagacaccagggaacaatcctggagaaaaagagatat

SEQ ID NO: 920791 - DNA, 509 bp, Homo sapiens
aagcagctgctctaaagactgtgtgtatgtgctggcggaagacacagactccgtatcagttgtcccatgccttctccctcttcccgggttacagtgtgcatgtctagaagtgggaggtctgtgtttctcctttctcgaaggttcttcaaagattgttgagaggaaactgggcctattagattttttttaaaggttaagtgtgagattgttcaaaatctattgattcggccttacagaggtacacaataaaatgaaaatatcaaatgataagagtagaggaattaagtaactataagataagtgaaaggtgtatgargaattgctaaaacatttcttaaaatttagtcatcaaggccgggcgtggtggctcaaatctgtaatcctagcagtttgggaggctaaggtgggtggatcacgaggtcagcaagttcaagaccagcctggccaagatggtgaaaccctatctctactaaaaatgcaaaaattagccaggcacggtggcaggtgcc

SEQ ID NO: 920792 - DNA, 633 bp, Homo sapiens
accacatctgactccaaaaatgttttcttaacacaactctgctgccttgacaagatggcagatagatacaatgccgtctagtgtagctatgtggctacctgatctctgctgaagaaaactaaatgacagcaccatacccaacaccctagaacctacaaaatgtccccttacaaaacagacacttaacaggaaattctttttccaaagaaattgtagtggtatcagaaaacaggtaaattttgaaaagtttcaaacttctctgtatcagcccaggaatccgaccagttctaacaagtgaggtcagggacagatctagcatgtctgctttctttttctacaagtgtttcaaataaaaatttcccagaaagacctaaccatgaggtccaaaactatctcaattttcaagctaaataaaatttcccccactcatccatctacagtgcctagtccagatgctacacatacacatcyaagaaataagaaactagtggaatcacctagaaaactttatggtcactgctggtatctgcaccagagctttgaatttgcaatcactgctgtaactgtaatttttaacattcagtgtgatgagaactggcttcgataattctctcattttaaagataagaagcc

SEQ ID NO: 920793 - DNA, 598 bp, Homo sapiens
tattccatctcttccacttaattttgctgaatataactctagattgataggtttttctttcaatactttcaataactcacttcactctcttgtttatatggtttctgactagaaatctatgctaattcttattatcgtttctctatagatamggcattatttcccctatgggttctttcaaatatttttctgtctttggttttctaaagtttaaatatgatgtagttctcctacttggtgttctctgagcttcctgaatatttggtttagtgtttgtcattaatttggaggaagttctagccattatttcttccaatgttctcctactctgttctctcttcttcttcaggtattccaattaggcatgtgttatgccttttgattgttccttagctcctcaatgttgtgttgttttgtttgtttgttttacttgtttgttactttgcacttcgggttgggaagtttctaatgaccaatttttaggctcactgattttttcctttactgtgccaagactactaatgagtccatcaaaggcattcttcatttctattacatttttttatttttttatggtttcttagagttttcatctctc

SEQ ID NO: 920794 - DNA, 566 bp, Homo sapiens
cccacccagattaagggtgcatctgcctttcccagcccactgactcaaatgttaatttcctttggcaacatcctcatagacacacccaagatcaatactttgcatccttcaatccaatcaggttgacattcagtattaaccatcacaggtatattatgaaaaacatcatggcaataaatttggtaacacagatgaaatagataaatcccttgaaagacaaatcacaaaaagtgactcaagaagacctaaacatcctcatatttaaagcattgaatttgtaattaaaaccttttcaaaatgaaaactgtatccagatgtgtcttgacwggtgcagtctaccatttaaggaagatacaacatcaatcccacacaaactctttcagaaaattggaggaggttagaacacttctcattttatgaggacagtattactgtggacagagacatgacaagaaaaaactttcgaccagtatctttcttgaacatagtggcaaaaatccttaacaaaatctagcaaattaatccagcaatacataaaaagaagaatgcattgtgaccaagttgat

SEQ ID NO: 920795 - DNA, 658 bp, Homo sapiens
agttctcctggataatatcctgcagagtgttttccaccttggttccattctctcagtcactttcaggtacaccagtcagacgtagatttggttttttcacatagtcccatatttcttggaggctttgttcgtttctttttactctttttttctctaaacttctcttctcacttcatttcattcatttgatctttaatcaatgataccctttcttccagttgatcaaattggttactgaagctagtgcattcgtcacgtagttctcgtgccatggttttcagctccatcaggtcatttaaggacttctctacactggttattctagttagccatttgtctaatcttttttcaaggttttagcttctttkcgatgggtttgaacttcctcctttagctcagagaagtttgatcgtctgaagccttcttcactcaactcgtcaaagtcattctccatccagctttgttccattgctggtgagaagctgcgttcctttggaggagaagaggcgctctgatttctagaattttcagcttttctgctctgttttttccccatctttgtggttttatctacctttggtctttgatgatggtgacgtacaaatggggttttgttgtggatgtcctttctgtttgttagttttccttctaacagtca

SEQ ID NO: 920796 - DNA, 645 bp, Homo sapiens
gtgcagtggcgtgatatctttttttttttttttccaaatagagacggggtcttgctatgttgcccaggctggtcttgaattcctgggctcaagtgatcctcccaccttggcctcacaaagtgtcgggattacaggtgtgagccaacacgcccagctaagctctatgtctttagactgtctggatagtataatagcttggactctcaagccagatcaactaggtttgaatcccggccccaccacttcctgagtaaccttgaggtggtaatttaactgccccatgcctcagtttcctcatataaaatagtaagtgcgcatatagttgtgagactgaaataagttactataagactgcatgaagcacttgaagcagagcctagcatatagaaagtgcttaataaatattagaactatttttatgatcagcttcacgtcactaaacacatttgyctgagtagtttctaggcttcagtctcttgaagcattcagaaatagaaaggatataatccatgcactgaagaagtttgcagtgcagtttgtgggataaaaaatataaaaagcttatgtttgtgtgtgtgttttgattatttacacatatgttcaatcatagttcccattgatatacaacattcagttggcacctgt

SEQ ID NO: 920797 - DNA, 733 bp, Homo sapiens
attaaaccacacaggactgttttgaagatgaagtgagagaatggcccaacttcctcccacagcaggcaggctgcaccttggccctatacttgggtcagggggatgggcctggtaaagagagaccttctgtagcatctggtctctgcagtcctgggcccatttgcctacctggggtggggttagcgatgagtcagctaccagggtgagcccacttgaaaccacttgggagaacctgccagtgtcaggatcctatacctccagccttgaactgccaggtggggccagggactcaagagccctcatgccccagcagcttccaagtggtcatcatggaggcagccgattacagcagaaaggcattcttccttccctgccttcctcactgccccacctggggcaacawtccttactatatctgctcagacctgcccctctgccctggcctaacacatgcatacccttcccagccgagggcctggcacccagtgcattgggagctgatgtttctagggctgcaagtcagcacctcccctccttcccccagtgaccccagagcttaccttgcagttacaacccaggtgataccgatagttcagccccttgcgctgggagagggtgagctggtcccacctctccacgaagttgcacagccccgtgtacatcttgccatcatagacgcgacctacaggaggaaagaagaaaacaaggagaggttgttttgtccagagcctag

SEQ ID NO: 920798 - DNA, 728 bp, Homo sapiens
gctgtgcagaaaatgaaggcaaaacactcagagactttgccagttagcaagagagtcacgtggcaggctggatgggcagagatgtggcagaagaaagaccttggaacgcaaagggacccaagatctgattctagctccattrttttctcctgagaacagctcaccctcctggcaccttcccattgccagagggaggaaccgccccctcaaccccaaacaatggtgcagcctctcagtcctccatgcaattagcaaggtccaatgaactaggaagggaaggaatgcgctaagagtgatgagactccctatgcctgtatggggatctgcggaggcaaaaaactgagacataacagggccccgagccacaggatgtgacaaatgatccccaccttttgcctctgagaacaatagagaaggagatttttgtgggcaggatctgatcacaattcacatcacttattcactccctcattcaatcactatttattgagccttatgtggactaggcaccacaccaggcacaggagtagatacagcagatacagtggcagatgtagtccttgttcttggagagcttacatgcttattgaaaagacaaaaaataaataaataaacagataaaaagaatgagtactacgaataaaatgcacgaccaatggaattgaggataagatgtggggtgcaggggagattggacttcagttggtagaaaaggcttctttgaaaga

SEQ ID NO: 920799 - DNA, 728 bp, Homo sapiens
gctgtgcagaaaatgaaggcaaaacactcagagactttgccagttagcaagagagtcacgtggcaggctggatgggcagagatgtggcagaagaaagaccttggaacgcaaagggacccaagatctgattctagctccattattttctcctgagaacagctcaccctcctggcaccttcccattgccagagggaggaaccgccccctcaaccscaaacaatggtgcagcctctcagtcctccatgcaattagcaaggtccaatgaactaggaagggaaggaatgcgctaagagtgatgagactccctatgcctgtatggggatctgcggaggcaaaaaactgagacataacagggccccgagccacaggatgtgacaaatgatccccaccttttgcctctgagaacaatagagaaggagatttttgtgggcaggatctgatcacaattcacatcacttattcactccctcattcaatcactatttattgagccttatgtggactaggcaccacaccaggcacaggagtagatacagcagatacagtggcagatgtagtccttgttcttggagagcttacatgcttattgaaaagacaaaaaataaataaataaacagataaaaagaatgagtactacgaataaaatgcacgaccaatggaattgaggataagatgtggggtgcaggggagattggacttcagttggtagaaaaggcttctttgaaaga

SEQ ID NO: 920800 - DNA, 728 bp, Homo sapiens
gctgtgcagaaaatgaaggcaaaacactcagagactttgccagttagcaagagagtcacgtggcaggctggatgggcagagatgtggcagaagaaagaccttggaacgcaaagggacccaagatctgattctagctccattattttctcctgagaacagctcaccctcctggcaccttcccattgccagagggaggaaccgccccctcaaccccaaacaatggtgcagcctctcagtcctccatgcaattagcaaggtccaatgaactaggaagggaaggaatgcrctaagagtgatgagactccctatgcctgtatggggatctgcggaggcaaaaaactgagacataacagggccccgagccacaggatgtgacaaatgatccccaccttttgcctctgagaacaatagagaaggagatttttgtgggcaggatctgatcacaattcacatcacttattcactccctcattcaatcactatttattgagccttatgtggactaggcaccacaccaggcacaggagtagatacagcagatacagtggcagatgtagtccttgttcttggagagcttacatgcttattgaaaagacaaaaaataaataaataaacagataaaaagaatgagtactacgaataaaatgcacgaccaatggaattgaggataagatgtggggtgcaggggagattggacttcagttggtagaaaaggcttctttgaaaga

SEQ ID NO: 920801 - DNA, 728 bp, Homo sapiens
gctgtgcagaaaatgaaggcaaaacactcagagactttgccagttagcaagagagtcacgtggcaggctggatgggcagagatgtggcagaagaaagaccttggaacgcaaagggacccaagatctgattctagctccattattttctcctgagaacagctcaccctcctggcaccttcccattgccagagggaggaaccgccccctcaaccccaaacaatggtgcagcctctcagtcctccatgcaattagcaaggtccaatgaactaggaagggaaggaatgcgctaagagtgatgagactccctatgcctgtatggggatctgcggaggcaaaaaactgagacataacagggccccgagccacaggatgtgacaaatgatccccaccttttgcctctgagaacaatagagaaggagatttttgtgggcaggatctgatcacaattcacatcacttattcactccctcattcaatcactatttattgagccttatgtggactaggcaccacaccaggcayaggagtagatacagcagatacagtggcagatgtagtccttgttcttggagagcttacatgcttattgaaaagacaaaaaataaataaataaacagataaaaagaatgagtactacgaataaaatgcacgaccaatggaattgaggataagatgtggggtgcaggggagattggacttcagttggtagaaaaggcttctttgaaaga

SEQ ID NO: 920802 - DNA, 595 bp, Homo sapiens
ggtcaaggtaattgagtttcatcatcaaggtaattgagcttttgtcatctatactatcctcacctgtactctaagtgtaagggactgagagtaccaattgtacttcataagaattgtgaggattacatgagttaatatttacaaagcacttagatcagtgtctgacatgtgtaattgctatgtgttagctattattatttaaatcatacatgtattcaaagattttaaagtgcttttgtaggaaaaatacttaattcatgtaaatacagtacrtaagaacccagttggaaataatacattctagttacatggtaatgtgataaccttttaaaaagcataaaatataacagctaaaaagaactatactgctaataataagtagtggtacatgtaggcaagcaacaggacacaacatagctagtaaataaatcctcactcactatatatgaaagcaaacaccagtaaacattggtatccaaacctgtgtccccaagaacaccctcaggtttgatgattcactaggaaatctcacaggactcagcatctagtcttattcatggctatgatgtattacagtgaaaggatatagagcaaa

SEQ ID NO: 920803 - DNA, 822 bp, Homo sapiens
tctcaagcaggctatttagcaggcacaagccctatgggtagttgatcagaggtgcccatttaggctagatgtgcatgtgaccacagatagtttcagttagggcctatagcagtgcacggagtgcttgagtatgccagtaggcttttggccccaactatggagctgagcttgtctttattgatagagaagcagttagtaatagcaggatgggtatgttcatggataatgaccccctggactgggaagcagttagtaactgcatatgctgcccttcagactcataagagcatggcagaacaggctacagtcatcatgcagatgacttacccaatagcaggatggctgctacgttcatgggtagcgacccttmcagactgggacagcacagactgggacagcactttatcaaagtggggcacctacttagagcagtgaagtacactgaatacaagtcccttagcagcagagttacaagaggtcttagggcctgtagtcctcatgcaagataaggccatggagcctgaggcacccccggccccattcctgatgaggcataatatatagacaggtctagccagagtactgctgctgcctggattgctgctgcagtccagcctactactgacattatatggtttgataccaagagtgggcaaagtagctaataagttgagctcagggcaacacggatgaggatcaccaaggaggtgacacccatggtaatctacaccaatgctgggcagtttatcaacgcttaacattgtggttaattacctgaaagttacagaattagttagtcaccagcccatgtagggccaggcc

SEQ ID NO: 920804 - DNA, 822 bp, Homo sapiens
tctcaagcaggctatttagcaggcacaagccctatgggtagttgatcagaggtgcccatttaggctagatgtgcatgtgaccacagatagtttcagttagggcctatagcagtgcacggagtgcttgagtatgccagtaggcttttggccccaactatggagctgagcttgtctttattgatagagaagcagttagtaatagcaggatgggtatgttcatggataatgaccccctggactgggaagcagttagtaactgcatatgctgcccttcagactcataagagcatggcagaacaggctacagtcatcatgcagatgacttacccaatagcaggatggctgctacgttcatgggtagcgacccttccagactgggacagcacagactgggacagcactttatcaaagtggggcacctacttagagcagtgaagtacactgaatacaagtcccttagcagcagagttacaagaggtcttagggcctgtagtcctcatgcaagataaggccatggrgcctgaggcacccccggccccattcctgatgaggcataatatatagacaggtctagccagagtactgctgctgcctggattgctgctgcagtccagcctactactgacattatatggtttgataccaagagtgggcaaagtagctaataagttgagctcagggcaacacggatgaggatcaccaaggaggtgacacccatggtaatctacaccaatgctgggcagtttatcaacgcttaacattgtggttaattacctgaaagttacagaattagttagtcaccagcccatgtagggccaggcc

SEQ ID NO: 920805 - DNA, 640 bp, Homo sapiens
gaaatgacttaagtcggatctcaatgaactcatatttattcggtgtataggatgtgtgagatgctggcatatggcaagtacagggctgctattcagccaaaggcactgttaggggggtttgtggccagcatccattcttattagttggtgattattatctgataggttggtgccttggtgccttgtagtgtttgttaaatgttttgattattagtgaatgtgtgtcaaatgctttatcacctcgtagtaggctaaataatggccacagaaagacatcatgttctaatccctgaaacttgtaaatgttgccttgtaagaaaaatgggttgcagatgtgattaaggatcttaaaaatgagggrattatcctagattatctgggcgggtcctaaatgcaatccttataagaaaggggcagaggggaatttgatacagagagaagaggagaaaagaatgtaactatgaaggcagagattggagtgatgcagccataagccaaagcctgtggccatcagaaggtggaagaggcaaggaatgaatcccccctagggcccgcgaaggaccgtggtcctattgacaccttgatttcagctcagtgaaactgttttggacttttggtctccaaaactgtgttttaagtc

SEQ ID NO: 920806 - DNA, 623 bp, Homo sapiens
agcatgtgcactgtttttcaaactgtgcatctaacaaaggactaatatccagaatctacaaggagttcaaatcagcaagaaaaaagcaaacaatcccatcaaaaagtgggcaaatgttatgaatagacatttctcaaaagaagatacacaaatggccaaaaacatatgaaaaagtgctcaatatcactaatcatcagagaaatgtaaattaaaaccaccaatgagataccaccttaccccagccagaatggycattattagaaaatcaaaaaacaatagatgtttgtgtggatgtggggaaaagggaatgcttatacaatgctggtggatgcaagttagtacaacctccatggaaaatagtatggagatttcttaaagaacaaaaaatttatctaccattcaatccagaaatcctactgctgggtatctacccaaagaaaaagaaatcattatatcaaaaagacacctgcagacatatgtttatcacagcacaattgacaattgcaaagatatgaaaccaacctaagtaccaatcaaccaatgagtggataaggaaaatgtggtacatatatacacgatggaacactcaaccataaaaaagaatgaaataatatctcttgcag

SEQ ID NO: 920807 - DNA, 652 bp, Homo sapiens
atccttagggaattacattgtagcagtgttgggggagataacacataaataaagaagtaaaatacacagtatattggatggtggtaagttctatggggaaaataaaataaaatacaaaaggtggaaaggactgtgtgagtgtaggaggacaggatagagggtattgttattgaaaacagaatagtcacagcctgagcaacatagtgagacccagtctctacaaaaagtgaaaaaattagctgagcatgatggctcctgcctgtagtcccagctactcgagaggctgaggtgggaggatcacttgagcctggaggtcaaggctgcagtgagcartgatcgtaccattgcactccagcctgggcaacagagtgagaccctgtctcaaaacaaacaaaacacaacaaaaccaaacaaccagactagtcagacaaatactcacaaaggagaggacatttgagctaagagccaaagaggagagggagcatatcttatgcatgtggaggaatcattccaagctgagaaaacagccagtgcaaaagcctgaggttggagaacacctcgtgtatgcttgtcgtagcattcctgtaaaagattttgtgcatagcacatctagccttgcggagaatacagtatttccaaacttcactcattt

SEQ ID NO: 920808 - DNA, 636 bp, Homo sapiens
ggggaagaaccccaagatgagctactatactccccaactcaagttcacgaggcaggtgatagagcttgtttggaatccagcgtgatgcaggagataatgcagaaccagaccagggcctgagcaacttagagagcacccccagaggctgcaatgctctctactgcatgtatacagacatacaggggcccatgtttagtgctgaccaggaacaatcccttcccttccttgtatagggacctagctcatcctcccaactgagaattgagagcccctccctaacctgtggaatccctcaccccatatctcccaggttcctgggtctggtggggagggcactggaggattgggggccagccagatgcactcgacagtgtcaaacttctttgcaattaatgcagttagtctgtggtcagggatgttcaatagcccgggaatacaggccctcctctagcagatctttgagaactcccagatgatgcagaatgtgatctcagctycctgcatggatagcatgatgcagatgcttacccaaaaccctaactttgatgcttagatgccacttttttggggaatccctaagtgcaggagcagctctgcctgcagctctcagtcttcttgtaacagatgcagaatgtg

SEQ ID NO: 920809 - DNA, 607 bp, Homo sapiens
atcccttatagacaagcaagtgctgagagattttgtcaccaccaggcctgccttacaagagctcctgaaggaagcagtaaatatggaaaggaaaaaccaataccagtcacagcaaaaacataccaaaatgtaaagaccatagacactatgaagaaactgcatcaactaatgggcaaaataaccttcgagcatcataatgacaggatcaaattcacacataacawtattaaccttaaatgtaaatgggctaaaagccccaaataaaagacacagactgacaaattgtataaagagtcaagacccatcagtgtgctgtattcaggagacccatctcacgtgcaaagacacacataggctcaaaataaagggatggaggattacttaccaaacaaatggaaagcaaaaagaaaagcaggacgtgtaatcctagcctctgataaaacagactttaaaccaacaaagatcaaaaaagacaaagaagggcattacatgaaagtaaagggatcaatgcaataaaaagagctaactatcctaaatatatatgcacccaatacaggagcacccagattcacaaagcatgttcttagagacctacaaagagacttag

SEQ ID NO: 920810 - DNA, 665 bp, Homo sapiens
ctggctccaaactgacctgctttcttccttctcttttcctgccccttgcatcttgcaaaggactgaatgtttgtattcccccagcaattcatacgttgaaacttttaatcacctagttgatgatattaggaggcaggcctctgggaggtgactacgtcatgagggtggagactccatgagcaggattagtgcccttataaaagaggccccagggagctgccttggcccttccatcacacaaggacacagcaagtaggtgccatctaggaaccagaaagaagatcctcacacagcactagatccactggtgccttgagtttggacttcccagctttcagaactgtgagaaataagtttctgttgtttataagctacccagttcatggctttttttttttttctttttgagagagggtcttactttgttgccaaggttggagtgcagtggcgcaatcacagctcactgcagccttgacctcttgggctyaggtggtcctcccacctcagcctcctgagtagctgggactacaggtacacacccccacaccgggctaatttttgtatttttttgtagggtcggggtttcactatattgcccaggccagtctcgaactcctgcactcaagccatccgcccgctttggcctcccaaagtgctgggattat

SEQ ID NO: 920811 - DNA, 541 bp, Homo sapiens
gtggtttcccattgacgttaatcacagggcatggtaatactaagagatgccctaatggatctcctgtattccatgtatactcttctttaccttcgttgtggaataatacatcatcttgatagtctgggtcaatcactccagccaactcccttcttagcctgttgacttaaaggtaggaggagcccaaagcgcccaggcggcaatcttaacttccagtttaatggaaccattgttgtgcctmctagtggcagtcttcctccctctggaactaagacctctaggccaggagaacataatttcgtgggaataggaagcaaaaattttgctagtggatcactaggggtgatggtgagtggtgccacttccacttttaccctttgattcctggacccatgagtcctggctatgtgagaaacagtactatatatcagatgctgattcagagcaaacacagccatccggagaactttgccccagccctgcaaactactgtcacctagttggtgttgtaattgtgacttcaaaacgccattccacagtt

SEQ ID NO: 920812 - DNA, 541 bp, Homo sapiens
gtggtttcccattgacgttaatcacagggcatggtaatactaagagatgccctaatggatctcctgtattccatgtatactcttctttaccttcgttgtggaataatacatcatcttgatagtctgggtcaatcactccagccaactcccttcttagcctgttgacttaaaggtaggaggagcccaaagcgcccaggcggcaatcttaacttccagtttaatggaaccattgttgtgcctcctagtggcagtcttcctccctctggaactaagacctctaggccaggagaacataatttcgtgggaataggaagcaaaaattttgctagtggatcactaggggtgatggtgartggtgccacttccacttttaccctttgattcctggacccatgagtcctggctatgtgagaaacagtactatatatcagatgctgattcagagcaaacacagccatccggagaactttgccccagccctgcaaactactgtcacctagttggtgttgtaattgtgacttcaaaacgccattccacagtt

SEQ ID NO: 920813 - DNA, 544 bp, Homo sapiens
agaacataaattgtgaagatttcattttaatatggacatttatcagttcccaaataatacttttataatttcttatgcctgtctttaatctcttaatcctgttatcttcgtaaactgaggatgtacgtcgcctcaggaccactgtgataattgtgttaactgtagaaactgattgtaaaacatgtgtgtttgaacaatatgaaatcagtgcaccttgaaaaagaacagaatgacagggatttttatggaacaagggaagacaaccataaggtctgacagcctgcagggtcagacaaaaagagccacatttttcttctttcagagagcctataaacagacgtgcaagtaggaaagatattgytaaattcttttcctagcaaggaatattaatattaataccctgggaaaggaatgcgttcctggggggaggtctgtaaacggcccctctgggaatgtctgtcttgtgcagttgagataaggactgagatatgccctggtctcctgcagaaccctcaggcttactagggttggaaaaactccgccc

SEQ ID NO: 920814 - DNA, 577 bp, Homo sapiens
atttagagtcctctgattttcttacagaaattctgagattatagttgtaaggatatgcagcatgtgagaattgtggtcttgcaaagatgttaacatcctaatgcccagaacctgtgaatatattactttacatggcaaagaggaagtaaggctgcagatggagttamggttgatcatcagctaacgttaaaataagaagattatccttcctagattatcaagtgggcccaatattatcacaagggtgtttgaaagtgcaaaaaaggccaggcgtggtggctcacgcctgtaatcccagcactttgggaggctgaggaaggcagatcacctgaagtcaggagtttgagaccagcctggccaacatggtgaaaccctgtctctactaaaaatacaaaaattagctgtgtgtggtggcacgcagctttaatcccagctactcaggaggctgagacagaatcgcttgaacctgggaagtggagattgcagtgagccgagatcacaccattgcactccagccaaggttacaagagtgaaactccgtctcataaagaaaataaataaaagtgcaagagagagt

SEQ ID NO: 920815 - DNA, 622 bp, Homo sapiens
cctcaagtgaaaggaagaaagaaagaaaaaaaaaagaagattacaaaacaaccagaaaacatgtaacgaaatggcaggagaaagtacttacttatcaataataacattaaatgtaaatggactaaactctccaaacaaaagagacagagcacctgaatgaattaaaaaataagactgaatgatctgttgctgataagaaacacacttcctcaatgaagacacatatagactaaaaataaaggaacagaaaaaatattccatgcaaatggaaaccagaaaagcaggaatagctgtacttacattggaaaaaaacagacttcaagacaaaaactagaagaggacacaaagaaggtcactatgtaatgataaaggggtaarttcagcaagatgatatggcaattataaaaatatatgtacccaatactggaaaaccatgatatataaataaatattgctagagctaaagagtagagctactactccaatgcagtaatagacggagactgcaacaaccaattttcattattggacagatcttccagataggaaatcaacaaagaaacttcaggcataatctccactatagaccaaatggacctaataaatatttacagaacatttc

SEQ ID NO: 920816 - DNA, 613 bp, Homo sapiens
tcacagggacaggtatataagtaagcagcaggaaagataacaatccattggaataacaaagaacttgactcttgaattgtattttctgctaaaacttccccagtggtctttgtgtctgggatgctatgtgcttagaggaaagatcatgggctttgcaattaagcagatgtggattcaaatcctggttcctcatttactatgtgctctcaggcaggattattaacctgcataaggctagtccctcatctataaaattgtgatactgatrcttacctcttagtcataaaggtttaataaaatactaaatattctgtgcttagcatcaagctggtgctcatttgatgttttttccttcctcttggatctaaaccatcttgtagaacttccatattaagggacatttttatcagttcactaaccttttattgttctttcaatatcttaaataaccaaaggctagttatttttattaacacaagtgcaggatgtaacactgaaacggaacatttcttttctttcttttttttttttttttgagacggagtctcactctgtcacccaggctggagtgcagtggcacgatctcggctcactgcaagctccgcctcccggc

SEQ ID NO: 920817 - DNA, 603 bp, Homo sapiens
gtcttgctagcaatctatctattttgttgatcttttcaaaaaaccagctcctggattcattgattttttgaagggtttttttgtgtctctatctccttcagttctgctctgatcttagttatttcttgccttctgctaggttttgaatttgtttgctcttgcttctctagttcttttaattgtggtgttagggagtcaattttaggtctttcctsctttctcttgtgggcatttagtgctataaatttccctctacacactgctttaaatgtatcccagtgattctggtacattgcgtctttgttctcattggtttcaaagaacatctttatttctgccttcatttcgtttgtacccagtagtcgttcaggagcaggttgtttagtttccgtgtagttgtgcggtttttaatgagtttcttaatcctaagttctaatttgattgcactgtggtctgagagacagtttgttgtgatttttgttcttttacatttgctgaggagtgctttacttctaattatgtggtcaattttagaataagtgtgatgtgttgctgagaagaatgcatattctgttgatttggggtggagagttctgtagatgt

SEQ ID NO: 920818 - DNA, 603 bp, Homo sapiens
gtcttgctagcaatctatctattttgttgatcttttcaaaaaaccagctcctggattcattgattttttgaagggtttttttgtgtctctatctccttcagttctgctctgatcttagttatttcttgccttctgctaggttttgaatttgtttgctcttgcttctctagttcttttaattgtggtgttagggagtcaattttaggtctttcctcctttctcttgtgggcatttagtgctatamatttccctctacacactgctttaaatgtatcccagtgattctggtacattgcgtctttgttctcattggtttcaaagaacatctttatttctgccttcatttcgtttgtacccagtagtcgttcaggagcaggttgtttagtttccgtgtagttgtgcggtttttaatgagtttcttaatcctaagttctaatttgattgcactgtggtctgagagacagtttgttgtgatttttgttcttttacatttgctgaggagtgctttacttctaattatgtggtcaattttagaataagtgtgatgtgttgctgagaagaatgcatattctgttgatttggggtggagagttctgtagatgt

SEQ ID NO: 920819 - DNA, 624 bp, Homo sapiens
cactggttttgcccctcaggtctgggctcccagagtcttaggctcccgccagtgggggatgtggctttgcagagaggtcctaggcagttcaagcccaatttcagagatcccatttgacacagacaagatgccattccttactctttagaaaataccattactcctggctcagattggaaaaaagtctccttaccatggsctgttggggttcaggggctgctttcagtgaggcaagatcatacacgaggggctctctgcacactggacactgcacaccgactgccttctaaaaaagagaaaaatcatatgcctgtgtcacagcccaggatgccccctggtgctgacccatcagccaacctaatctgcagagggctgggactaaagggcacagggacaccggttcagcagtgagttgggacagagcacgggttgtctaactagagatctgggaaccccccgaaactgcatgcaatatgtaagtgtatataaggatgccctggccaggcacggtggctcgcgcctgtaatcccagcactttgggaggccgaggcgggcgggatcacttgaggtcatgagtttgagaccagcctggccaacatggtgaaaccccgtctctactgaaaa

SEQ ID NO: 920820 - DNA, 646 bp, Homo sapiens
atgcttatgaaagctctttaaaaattatgaaggctgcagggaaataaaactcaagactcagacagtgatgcaggcttgtttaaaattatagactgggtaatcctaggaaacaatttagagaatttggggaaacttgtttacagttcatattaaaaaaggaatgaacaggaagtatctataarctagggaaaaagacacaataataacaacgagaaccaccatttgctcaatgtgtattgtgttcttggtgttctcattttattctcacaatgaccttatacatcattacctctgttttctgagtgaggcaactgacactttgagaggctaggaaaatcctccaaggccaagcaattaggaggagctaaggcaagatttggaacgtatcagtctcactgcaagcccatattgttaactgaccacatgaccttgcttctttaacaaaaacaaaacttcttggaggtttgggtgctatatacatacatatatgtgtttatattacattatataattttatatatatatatatattttttttttttttgagacaaagtcttattctgtgagccaggctggagtgcagtggcacactctcagctcactgcaacttctgcctcccaggttcaagcaattctcctgcctcagc

SEQ ID NO: 920821 - DNA, 757 bp, Homo sapiens
ctcaactgtaggtttttttataacaggaaaatgtacagaacttaggaatagctaaaatgcttataaatgtcaagcaggacaaatgttaaaatagactaaactaacagaagaatgaaacaatctctttacctttagaatatttctaattcttgttttgttttttaaagtcaagtgcacttttttttaaactagctacagcttttaaaactgtcaattggtatactcctgttagcaaaactcaaaacatgctttttttctctgtgcctagttcctctaaaattcggaaagtatgtgtgattattcttaacttacaacaatataatcgttttactcagtgcaacaaaaatgtactttcatttgcagcataacccaatagaataagcgggttgatttyctaaggctttgactggaagagtgtgccttctttaatgacttacatctgacttctagaaccaataaaagccctctaagaaacgcagccttatactttgtttacacagtcccaatacaggttttctaatctgcagtaagagaaaaaaaaaaagccactttctatcaggcctaggaaccacatgcacttggaatctcaaaacaatagaggagtttatccaaataatatgtatccaagggtcaaacctatagttggactcagctttataatgtcctatttaagattccttgtagaatagagattcataaaagcccatgaggaaagcacatgtaaaggtatttctcacagcactgtacaaaaatattc

SEQ ID NO: 920822 - DNA, 757 bp, Homo sapiens
ctcaactgtaggtttttttataacaggaaaatgtacagaacttaggaatagctaaaatgcttataaatgtcaagcaggacaaatgttaaaatagactaaactaacagaagaatgaaacaatctctttacctttagaatatttctaattcttgttttgttttttaaagtcaagtgcacttttttttaaactagctacagcttttaaaactgtcaattggtatactcctgttagcaaaactcaaaacatgctttttttctctgtgcctagttcctctaaaattcggaaagtatgtgtgattattcttaacttacaacaatataatcgttttactcagtgcaacaaaaatgtactttcatttgcagcataacccaatagaataagcgggttgattttcwaaggctttgactggaagagtgtgccttctttaatgacttacatctgacttctagaaccaataaaagccctctaagaaacgcagccttatactttgtttacacagtcccaatacaggttttctaatctgcagtaagagaaaaaaaaaaagccactttctatcaggcctaggaaccacatgcacttggaatctcaaaacaatagaggagtttatccaaataatatgtatccaagggtcaaacctatagttggactcagctttataatgtcctatttaagattccttgtagaatagagattcataaaagcccatgaggaaagcacatgtaaaggtatttctcacagcactgtacaaaaatattc

SEQ ID NO: 920823 - DNA, 800 bp, Homo sapiens
aaaaaaaaaaaaagtccaaataataccatttacgtttatttctcactatccagacctggtctaagaattttaaaacagggataatgggccaggcccagtggttcacccctataatcccaactctttgggaggccgaggcaggcagatcacgaggtcaggagttcaagacctggaaaacatagtgaaaccccatctctactaaaaatacaaaaattagcggggcatggtggtgcatgcctgtaatcccagctactcaggaggctgaggcaggagaatcgcttgaacccgggaggcggaggttgcagtgagccgagatcatgccattgcactccagcctgggcgacagagccagtctccgtctcaaaaaataaataaaataaaataataaaatgaaattaaatggggataatgatgcccaagaggcaacaagacagatgcagaaagcgcacacgagggatggtattagcttactgatgctccaccatccttgtgaatttggaaatagatagactctcccctatactacatgcctaggaaaactgcagccsagggaggttaaataacttgacaaacgtcacacaacaaatcagcaactgaacaaaaattagatctctggtgtctgtgactcctaagctgctccctgtgctttggggtagaatctatgaagatttagaagcatccctccaactgggtaggtgctgactccagcgtgaccctgggtactgcgtgctcagtgagtgatatgggcctactagggtcatgtgctaggtcagaaacggtacactggcagagtgaagaga

SEQ ID NO: 920824 - DNA, 556 bp, Homo sapiens
aaggccttgcttccaaaaaaagatatgccagtggccaaacaagcatatgaaaaggtctcaacatgattagccatcagcaaagtgcaaattcaaaccacaatgagataccactacatacccattcaaatggctaaaattaaagatcaacaatactaagtgttgaagagaatgtgaaacaactgaaactcccacacattgttcttgggaatacaaaatgattgtatcattttgtatcttgtgaaagaatgttcacagtagctttatttgtaataaacaagtgtgtcctttaattgtactggtggttatgcaagtatatacatttattagagctcatagggttgyaacactttaaatgggtgcattttattgtatttaaattatggcagaatagagttgatttaacaacaaggaaagctgtttctcttaaaggtaaacattaacttactatatgactcaataactctactcctaggttttgttgcaggagaaatgaaaatgtgtctgcagaaagaatgttcacagtagctttatttgtgataaacaaaaactgaaaaca

SEQ ID NO: 920825 - DNA, 625 bp, Homo sapiens
ggctgctccaggcccacagagcactcacaaaggccgcacttgcaatcccaagaagcacaaagaacagggagcacagcttctcactgagaagtgatggggtcatttcagagtactgttgcttttgtctaaaagcgtgcaagttaaagagctttattttaataaatgaagtggaaaaattgtttagtctttaagaaaggaggataaattggcctttaaaaaaagtcaagcaactgtgggacaggcctttggatttaattgcaagcgtatatttggcaaatctggtacctttgcaatcacctccmacacatttgcctgcccagtgagccaggcagggagactggggagacaggtgtgcttgtttccttcttcctgatgggaaaatgaggcctggggatggccaggaacttgcctgaggttttttccaattatcaagcagcagaaattttgagagactggcatttagtaaaggacagacgattgaaaagattgcaagatgggagtttggagcaacaatatccacaatgggatattttgtctaactgtgtgccttggtttgggggttcccaacagtcaagtctgagatgagaacttgagtgcagggagtcatttggggggtggttccagg

SEQ ID NO: 920826 - DNA, 625 bp, Homo sapiens
ggctgctccaggcccacagagcactcacaaaggccgcacttgcaatcccaagaagcacaaagaacagggagcacagcttctcactgagaagtgatggggtcatttcagagtactgttgcttttgtctaaaagcgtgcaagttaaagagctttattttaataaatgaagtggaaaaattgtttagtctttaagaaaggaggataaattggcctttaaaaaaagtcaagcaactgtgggacaggcctttggatttaattgcaagcgtatatttggcaaatctggtacctttgcaatcacctcccacmcatttgcctgcccagtgagccaggcagggagactggggagacaggtgtgcttgtttccttcttcctgatgggaaaatgaggcctggggatggccaggaacttgcctgaggttttttccaattatcaagcagcagaaattttgagagactggcatttagtaaaggacagacgattgaaaagattgcaagatgggagtttggagcaacaatatccacaatgggatattttgtctaactgtgtgccttggtttgggggttcccaacagtcaagtctgagatgagaacttgagtgcagggagtcatttggggggtggttccagg

SEQ ID NO: 920827 - DNA, 625 bp, Homo sapiens
ggctgctccaggcccacagagcactcacaaaggccgcacttgcaatcccaagaagcacaaagaacagggagcacagcttctcactgagaagtgatggggtcatttcagagtactgttgcttttgtctaaaagcgtgcaagttaaagagctttattttaataaatgaagtggaaaaattgtttagtctttaagaaaggaggataaattggcctttaaaaaaagtcaagcaactgtgggacaggcctttggatttaattgcaagcgtatatttggcaaatctggtacctttgcaatcacctcccacacatttgcstgcccagtgagccaggcagggagactggggagacaggtgtgcttgtttccttcttcctgatgggaaaatgaggcctggggatggccaggaacttgcctgaggttttttccaattatcaagcagcagaaattttgagagactggcatttagtaaaggacagacgattgaaaagattgcaagatgggagtttggagcaacaatatccacaatgggatattttgtctaactgtgtgccttggtttgggggttcccaacagtcaagtctgagatgagaacttgagtgcagggagtcatttggggggtggttccagg

SEQ ID NO: 920828 - DNA, 589 bp, Homo sapiens
gagccaagatcatgccattgcactccagcctgggcagcaagagtgaaactccatctcaaaaaagaaaaaagaaagccgggcgcggtggctcacacctgtaatcccagcagtttgggaggccgaggcaggcagatcatgaggtcaggagttcaagaccagcctgaccaacatggtgaaaccccgtctctaccaaaaatacaaaaattacccrggggtggtggcaggtacctgtaatcccagctactcaggaggctgaggcaggagaatcgcttgaacgcaggaggcagaggttgcagtgagctgagattgtgccattgcactccagcctgggcgacaaagtgagactccgtctcaaaaaaaaaaaaaaaaaaaaaaaaagccattttgggacctacagacgtggccagaggctgacattgacatttcctgctgaggtttccacctttgattaatgctgtcatcaaggccatcctgagactgatttggctgttggacttgcaggagaggggtgtggagtttgaggacttgaagttcatggagttggcttctttacgcccacccctcccctcccccactttgcagtggagga

SEQ ID NO: 920829 - DNA, 412 bp, Homo sapiens
gcctctttccctttcgtaagtctcccccaggggtaaaggttttctgtgccatgtcatggtgccaaggaaacatctgctgccctcacacctatctaaggagccagggctctgtctgcctagacaaagtatagtcatctttttgaagtttggccacattcttgggtgctccacccaggacacggtgcatcggttcttccacccagggttccartaatcattcttagattttctcatctttcctctacactcatttcttagagtatgtgtgtatgggagtgtggtttgggattcctccttaaggacccacagttgtctcagttaacttgccttctaactcccttttgcccaacgtgggaatccatccagtatcaagggcactcaaactccttgttcatgccccagtctggtcctc

SEQ ID NO: 920830 - DNA, 602 bp, Homo sapiens
gggacaaattccctactggtcagcaagccatccccagtatggatccccactgggatctcaactcagatcatggggactggagttgcaaacatctattgacctgtgttctagaaagactaaggataattaggaaaaagcccatgaattattcaaatgatgtccaccataactcagggaaaggaagaaaatccttctgccttcctcaagaggctacgggaggccttaagaaaatatactcccctgtmacccaactcactcgagggtcaactggtcctaaaagataagtttattacccaatcagccgcagatatcaggagaaagctccaaaagcgagccctgggccctgaacaaaatctggaggcattattaaacctggcaacctcagtgttctataatagggaccaagaggaacaggccaaaaaggaaaagtgaggtcagagaaaggccacaaccttagttatggccctcagacaaacaaaccttggtggttcagaaaggacagaaagtggagcaggccaattgcccagtagggcttgttaccagtgtggtttgcaaggccgccttaaaaaaagattgtccaacgagaaacaagctgccccctc

SEQ ID NO: 920831 - DNA, 704 bp, Homo sapiens
tcctcaaggtccattaccatccaaggaatcctgggacagcctgtaaccaggtatttctcccaactcttcagttgtaattgggagactttgctacagatagtaagtatgcttatctaatcctacatgtccatgctgcgatatggaaagaaagggagttcctaacctctgggggaacccccattaaatatcacaaggaaaccatggagttattgsatgcagtgcaaaaacccaaggaggtggcagtcttatgctgccaaagccatcaaaaggggaaggagaggggagaacagcagcataagtggctggcagaggcagggaaagaccagcagaaaggaaagagagaaagagacagaaagtcacagaaagagagaggaagagacagagacaaggagtcaaagagagagacagaggaagagacagagtcaaagggagaaggaaagagaggaagagacagaaagtcatagaaagacagagagaggaagaaacagagagacaaagagaaggaaagaaaggaagagacagaaagtcatagaaagagagaggaagaaacagagacaaagaggagacagaggaagagatagacagtcaaagaaggaaagagaggaagagacagacaaagagggagtcagagagaaagtcagagagaaagagagaaagacaaaagagtcaaagaaagagagaaagagagagaagtaaagaaaaaa

SEQ ID NO: 920832 - DNA, 621 bp, Homo sapiens
ctcgaactcccgacctcaggtgatccacccgccttggcctcccaaagtgctgggaattcaggcattagccaccgtccccagccatgaggtcacttctgaatatgagtctacacactgtgtcatccatagagaaatgctggctagccaaaaaatgtcacctgaacttaacaacgttttgcaggatgtgattaaaattatcagccacattaaagtacatgcccttaactcatctgttcatgcaggtctgcaaggagayggatgcagagcacacacgtcttctcttatacacagaggtgagatggatttctaaaggtagctcactggccagagtttttgggttacaagagctgctccaggtatttcttttagaaaaacgatcaccactggcagcacatttcagtgacacagaatgggtcacaaaacttgtttacttgtgtgacatatcaacctggtcaacaaactcaatctgtcacttcaggggaaaacgacaactttgttcaagtcagcagataaggtggctgcattcaaaaccaaactggaattatggggccgacaagtgaacattgggatttctgacacgtttcaaacattagcagagattttgaaagaggctgagccagg

SEQ ID NO: 920833 - DNA, 621 bp, Homo sapiens
ctcgaactcccgacctcaggtgatccacccgccttggcctcccaaagtgctgggaattcaggcattagccaccgtccccagccatgaggtcacttctgaatatgagtctacacactgtgtcatccatagagaaatgctggctagccaaaaaatgtcacctgaacttaacaacgttttgcaggatgtgattaaaattatcagccacattaaagtacatgcccttaactcatctgttcatgcaggtctgcaaggagacggatgcagagcacacacgtcttctcttatacacagaggtgagatggatttctaaaggtagctcactggccagagtttttgggttacaagagctgctccagrtatttcttttagaaaaacgatcaccactggcagcacatttcagtgacacagaatgggtcacaaaacttgtttacttgtgtgacatatcaacctggtcaacaaactcaatctgtcacttcaggggaaaacgacaactttgttcaagtcagcagataaggtggctgcattcaaaaccaaactggaattatggggccgacaagtgaacattgggatttctgacacgtttcaaacattagcagagattttgaaagaggctgagccagg

SEQ ID NO: 920834 - DNA, 621 bp, Homo sapiens
ctcgaactcccgacctcaggtgatccacccgccttggcctcccaaagtgctgggaattcaggcattagccaccgtccccagccatgaggtcacttctgaatatgagtctacacactgtgtcatccatagagaaatgctggctagccaaaaaatgtcacctgaacttaacaacgttttgcaggatgtgattaaaattatcagccacattaaagtacatgcccttaactcatctgttcatgcaggtctgcaaggagacggatgcagagcacacacgtcttctcttatacacagaggtgagatggatttctaaaggtagctcactggccagagtttttgggttacaagagctgctccaggtatttcttttagaaaaacratcaccactggcagcacatttcagtgacacagaatgggtcacaaaacttgtttacttgtgtgacatatcaacctggtcaacaaactcaatctgtcacttcaggggaaaacgacaactttgttcaagtcagcagataaggtggctgcattcaaaaccaaactggaattatggggccgacaagtgaacattgggatttctgacacgtttcaaacattagcagagattttgaaagaggctgagccagg

SEQ ID NO: 920835 - DNA, 651 bp, Homo sapiens
gactagaagaaacattgaagggatgctccaagacattggtcttggcagatttttgggctgtgaccttaaaaacacaggaaacaaaaccgaaaactgacaaatggtataacatcaaactgaaaagcttctgcacaacaaaagaaacmatcaacaaagtgaagagacaatccacggaatggaagaaaatatttgctaactatccatctgacaagggatttataaccaaaagatctgactagatatttctcaaaagaagacaaacaaatggccaacaggtatatgaaaaggtgctcaacaccactaaccatcagagaaatgcaaatcaaaactataatagatatcatctcacaccagttaaaatggccttcctcaaaaagattattatctaataaatgctggtgagaaaatggagaaggaggaacccttgtacactgtgggtgggaatgtaaattagaatatccactatgaagaacagtacggaggttcctcagaaacactaaaaataaaatcaccatatgatccagcaattccatttctgagtacatatccaaaagaaaggaaatcaatatatcaaagagatatctgcagcagcttggctcacaggggattgggtcagggtgggaagccacacaccttgtgttcctaatctag

SEQ ID NO: 920836 - DNA, 757 bp, Homo sapiens
aacaggagaattgcctgagcctgcaaagtagaagctgcagtgagctgtgatctcaccactgcagtccagcctgggcaacagagtgagactctgtctcaaaaccagacaaaacaaaaaagatttgtaaggaaaactctcaggaggaattggaaatacctcatggaaaagttggtttttgaatttaaggccrtaaagaattgacgaaatctggaaagctggagcggggattggcataccatgaaggggaaacgccaggagaaaaccctgggagacagagaaggactggttagtttagggaagggtgagaactccgatttaaggagtatgcagggtaagtctaaggaacccttgggagggacctgttgtgcagtgtcttggatgccaggctgggccaaggagtttctctctaatttgccatgggactgttcaaggctgtggagcctagattgatggcagctagcacataggatttagaggttgttgaatagcagcatgcagacaggggtatatttggaaatgactgaagccagctaaaagatttaaagtagtccaagaaagaatgagtgatggaaacctgactgtaggcagcagaaactcacaggatggggacagatccaaaactcttcgtggagatatcgtccatgggattttggcaaagattagggagacggtgacacaggagcagatttggggatgagttcttttgggggcatgtggagattcaagcaacagtaggaagtccaagtagagatgccca

SEQ ID NO: 920837 - DNA, 757 bp, Homo sapiens
aacaggagaattgcctgagcctgcaaagtagaagctgcagtgagctgtgatctcaccactgcagtccagcctgggcaacagagtgagactctgtctcaaaaccagacaaaacaaaaaagatttgtaaggaaaactctcaggaggaattggaaatacctcatggaaaagttggtttttgaatttaaggccgtaaagaattgacgaaatctggaaagctggagcggggattggcataccatgaaggggaaacgccaggagaaaaccctgggagacagagaaggactggttagtttagggaagggtgagaactccgatttaaggagtatgcagggtaagtctaaggaacccttgggagggacctgttgtgcagtgtcttggatgccaggctgggcyaaggagtttctctctaatttgccatgggactgttcaaggctgtggagcctagattgatggcagctagcacataggatttagaggttgttgaatagcagcatgcagacaggggtatatttggaaatgactgaagccagctaaaagatttaaagtagtccaagaaagaatgagtgatggaaacctgactgtaggcagcagaaactcacaggatggggacagatccaaaactcttcgtggagatatcgtccatgggattttggcaaagattagggagacggtgacacaggagcagatttggggatgagttcttttgggggcatgtggagattcaagcaacagtaggaagtccaagtagagatgccca

SEQ ID NO: 920838 - DNA, 589 bp, Homo sapiens
ccaggcaccccatctgagcatccatgcccccaactggggccaactacccatgacacagaatccaggaaaacaaagtccatgccctcatgattatgcaatctggcaggtagaaacagaccactaatgattccacaattaagcacctcacatggcaggggaggagagaggctctaaatgctataaacagataaagcaaagccagtgagacagagtgaaaaggggagagttattgttttgtacaaaacaatcatggaagttacttgataggggagcccaagaagaagraagaaggcagtccttgcagatctctggagaaagaacagtgtgaacagaagcagcagaatgtgtaaaagccaggatcggaatgaaccaggtgtgccaggagaatcactcattggctgtcctggctgaggaagcatgaacaagggagccagaggaggtcagagaagaatgggagtgatcttttccagggtatatgtcatattgaaagactgaatttcaacctgagtgaaagtaaaaactgctgtttgtttgtttgtttattttctgtgcaaagaagtgatattttctgacttcgattttaaaggag

SEQ ID NO: 920839 - DNA, 633 bp, Homo sapiens
tctctggagcgacaacgccttgctttaaatcctagtcctcaattttccagctataagaccttgagaaagttgcttgcctctctgtgtgttttgtcttctgcagaatggagatgctaatagtactttcttacagtgtttctgttttgttttgttctgatgattaaacaagttattacacaggcagtgtttagaataatgcctgcatcggcccagcactgtggctyatgccagtaatcccagccctttgggaggccaagccaggaggatcacttgagcttaagagtttgagaccagcccaggcaacatggcaaaccatgtctctaccaaaaacaaacaaacaaaacaaaacaaaacaaaaattagccagatgtgctggcatgcacctgtagtcccagctacttgggaagttgaggtggaaggatcgcttgagtccaagagatccaagccgcagtaaactgagatcacaccactgtactccagcctggatgacagagagagaccctgtctcaaaaacaaagaataaaaaagaataatgcctgcatcacacatcacagtaagtctcattgcatagtattatgatttaattatatttcaataactaatcccctattgacagatatttgggttgtttcc

SEQ ID NO: 920840 - DNA, 760 bp, Homo sapiens
tgcaggaagatatatgggaacagacacacaactctctctcccagataagcacaacaaagagacacagaaacagtccaagtctctggtatactcttccaccctgaatcctgagaaactcttagtgtgtaagagactgtctcttgaactaactcggccagaaaacactctcaggtttgttttctttaaaatcagcctgtccttgactgccaagccaccttttgtttttctttcctcttccttcatttcttacatttggtgccaaaacctgtgactggtgttgggagaagaggctgtcttgcaacccaggaagcagtgggcaatggcagctcatcctgagttaactcctgtatcctaaaagcctctggccacacgcccaatcttatctctcacttcacttttcaagtaatttgtgtgagcaggacaactaacttgaaggggctgtgaggctcaggctgaggctactccccatgggctctaaaacactcaggtctcgggaatccacctctgaccacctgcattgggtattttgctcgctaaccctcccttgccccctctttctccatcttctmtctctctctctctctctctctctctctctctctctctctctcttcctcaaatggctacagtatgggaggccctttgccaattccagccagaacatccaacatcagatactatttcagatgaccggtgagatctgccttctcctggctttctctctgtacctggcctgctgtccaggtcctgggaggtccaa

SEQ ID NO: 920841 - DNA, 674 bp, Homo sapiens
gtttctataacaacgatgctatcctattgggaccacatggtatcacatatgttatgccagattactcactcttaacagacacctgtggttcattaacaaaatgtgctggagtatccctaattatacaaacaattgatagtttaaaataattttgctacatttttataataggggcttcttttccttaaatattctgctgcccagtttcttaaaactaaaaaaaaatcatgacaaaagaatgaaactttaagtcaggttattatattggccatatagttaattttactatatattagtaactaacatatagctttaagttgacttaacctacctttaaatcaatacaataatgtagcaattatgaggctgttgcaaactataaatgtattgcatacttctacaatatgtagcacttaaaactcataaaatgtttaaaagcaaagatcacactcatacataaaatacaactccacaataagaaataaaaartataacatgaagtagtgattgtaaaatacccaatgaaagataaatcccttaacttgaatagcagcctatttgttgtttcattcatattgtcatcaacagtatattataatattataatattataatatctattataacaaaacttgaaatatcttgagtatattcttagataacttgagcggctg

SEQ ID NO: 920842 - DNA, 605 bp, Homo sapiens
caaggctgaactgcagattccacgctgcagcagttctgctcagttgcgaccttcatctggctgcagagcataaatctgggctcacagagtattcgtgagagctccttggcaggaggcattcatcgtctgccagaggccctggcactcgccgccatggtgtacgacccgtggctctgattaaatttcagcaggaggcactgtggcctcccctcgcccatgcctgattaatcactgtctccccaggcagctctctgtcccctgctttcctggatggtggttttcttgtaagtggtccctgtccatacattccagctggaaraagacctgagttctgtgctttgccctttgcagccccttagggagtaaacaatcaatgcgctgtctcatctgtaccttagagaatttttgtagccttgtctttaaatattcctaaaatattccctccagcagcaactctgaagagtgattaagaagaagttgggatgtagtcatcagagccagcaaaaggtgtgccagggttgccctgggtggctgcatttcctcaagttgtggaaagacgttcatgaatcagttgtcactttcaagaccttctagcgtcacccgaa

SEQ ID NO: 920843 - DNA, 605 bp, Homo sapiens
caaggctgaactgcagattccacgctgcagcagttctgctcagttgcgaccttcatctggctgcagagcataaatctgggctcacagagtattcgtgagagctccttggcaggaggcattcatcgtctgccagaggccctggcactcgccgccatggtgtacgacccgtggctctgattaaatttcagcaggaggcactgtggcctcccctcgcccatgcctgattaatcactgtctccccaggcagctctctgtcccctgctttcctggatggtggttttcttgtaagtggtccctgtccatacattccagctggaagaaracctgagttctgtgctttgccctttgcagccccttagggagtaaacaatcaatgcgctgtctcatctgtaccttagagaatttttgtagccttgtctttaaatattcctaaaatattccctccagcagcaactctgaagagtgattaagaagaagttgggatgtagtcatcagagccagcaaaaggtgtgccagggttgccctgggtggctgcatttcctcaagttgtggaaagacgttcatgaatcagttgtcactttcaagaccttctagcgtcacccgaa

SEQ ID NO: 920844 - DNA, 605 bp, Homo sapiens
caaggctgaactgcagattccacgctgcagcagttctgctcagttgcgaccttcatctggctgcagagcataaatctgggctcacagagtattcgtgagagctccttggcaggaggcattcatcgtctgccagaggccctggcactcgccgccatggtgtacgacccgtggctctgattaaatttcagcaggaggcactgtggcctcccctcgcccatgcctgattaatcactgtctccccaggcagctctctgtcccctgctttcctggatggtggttttcttgtaagtggtccctgtccatacattccagctggaagaagacctgagttctgtgctttgccctttgcagccccttagggagtaaacaatcaatgcgctgtctcatctgtaccttagaraatttttgtagccttgtctttaaatattcctaaaatattccctccagcagcaactctgaagagtgattaagaagaagttgggatgtagtcatcagagccagcaaaaggtgtgccagggttgccctgggtggctgcatttcctcaagttgtggaaagacgttcatgaatcagttgtcactttcaagaccttctagcgtcacccgaa

SEQ ID NO: 920845 - DNA, 658 bp, Homo sapiens
tgacttcaccaaaagagactccccattacttggtttcagaccctggaagtcttttgaaagaaaatacatccaactttaaataaaagtttcttttaaaacatcaaaggcaaatatgaacaatttgggagattatcaactagtgccaataaaatctctttaaggtagtatacacatacaaatcattatttwaaaaaaaaagatatttataaagactagaaaagaaagtctccaaatcattatctaaaaagttttttcaggccaggcgtggtgactcacgcctgtactcccagcactttgggaggccaaggcaggagtagcacttgaggccaggagtttgagaccagcctggtcaacacagcaaaaccccatctccactaaaaatacaaaaattaagcggagcttgcagtgagcccagatcatgccagtgcactccagcctgggcaacagagtgagagcctgtttaaaaaaaaaagaagaagtttttccatgtatactttatgttatatacacacccccgccaccagcaaagcatgtgccatgtgcttgaattaaccttcatgtcttatgattataaaatgttaactgtgttgatactcacttggatcttcttacacaccatgactcttctagaatgtaatagttcacttttaactttatc

SEQ ID NO: 920846 - DNA, 658 bp, Homo sapiens
tgacttcaccaaaagagactccccattacttggtttcagaccctggaagtcttttgaaagaaaatacatccaactttaaataaaagtttcttttaaaacatcaaaggcaaatatgaacaatttgggagattatcaactagtgccaataaaatctctttaaggtagtatacacatacaaatcattattttaaaaaaaaagatatttataaagactakaaaagaaagtctccaaatcattatctaaaaagttttttcaggccaggcgtggtgactcacgcctgtactcccagcactttgggaggccaaggcaggagtagcacttgaggccaggagtttgagaccagcctggtcaacacagcaaaaccccatctccactaaaaatacaaaaattaagcggagcttgcagtgagcccagatcatgccagtgcactccagcctgggcaacagagtgagagcctgtttaaaaaaaaaagaagaagtttttccatgtatactttatgttatatacacacccccgccaccagcaaagcatgtgccatgtgcttgaattaaccttcatgtcttatgattataaaatgttaactgtgttgatactcacttggatcttcttacacaccatgactcttctagaatgtaatagttcacttttaactttatc

SEQ ID NO: 920847 - DNA, 658 bp, Homo sapiens
tgacttcaccaaaagagactccccattacttggtttcagaccctggaagtcttttgaaagaaaatacatccaactttaaataaaagtttcttttaaaacatcaaaggcaaatatgaacaatttgggagattatcaactagtgccaataaaatctctttaaggtagtatacacatacaaatcattattttaaaaaaaaagatatttataaagactagaaaagaaagtctccaaatcattatctaaaaagttttttcaggccaggcgtggtgactcacgcctgtactcccagcactttgggaggccaaggcaggagtagcacttgaggccaggagtttgagaccagcctggtcaacacagcaaaaccccatctccactaaaaatacaaaaattaagyggagcttgcagtgagcccagatcatgccagtgcactccagcctgggcaacagagtgagagcctgtttaaaaaaaaaagaagaagtttttccatgtatactttatgttatatacacacccccgccaccagcaaagcatgtgccatgtgcttgaattaaccttcatgtcttatgattataaaatgttaactgtgttgatactcacttggatcttcttacacaccatgactcttctagaatgtaatagttcacttttaactttatc

SEQ ID NO: 920848 - DNA, 572 bp, Homo sapiens
ggctccagacccaggcatccctatgctctcaggggctcaggaagcctccttcccccacaagctcagaagtgcctgctcccactccctggcctctccctatccctagcacccactctggtgtggaacacagttgtggccgagcccaggtactggtgcaacccagccaggtgtgtgtatccttggggcagtactgaggcaccagccctctgctacctcggccccttcagactttgggcactaatgagcatgggaggaaggctggggtgctgagggcagcttgacgtggrcctgcagacagcctgggcactgcaaatggcctgttgatggtggcaggaggcagacaggttcctaggtgggaagaagcaggtccctggtgaaaccccatcttcaggccaggcctaaaacctaggggcctggctcccagttccaggtggagttcatgacccagagtgagaacttccttgatgccttttggccagttggatggtgccttttccatgaaccaatcagcatgtacttcctcccttctgagctcataaaaaccccagactcagccagactcagagactcat

SEQ ID NO: 920849 - DNA, 566 bp, Homo sapiens
tccctggtgaaaccccatcttcaggccaggcctaaaacctaggggcctggctcccagttccaggtggagttcatgacccagagtgagaacttccttgatgccttttggccagttggatggtgccttttccatgaaccartcagcatgtacttcctcccttctgagctcataaaaaccccagactcagccagactcagagactcatcaggattacctgcttgtggataggagctacccactttgggtctcctctatactcgttgggaatacctgcctatgaataggagctacccactttgggtctcctctatactcattgggaatacctgcctatgaataggagctacccagtttgggtctcctgtctgctgagagctgtttggttgcccaataaagctcttctctgccttgatcaccctccagttgcccatgcaacctcattcttcctggatatgggacaagaacttgggacccaccaaatggcaggagcaaaaggagctgtaacacttccctggctggttccctgagctatggtgggagctaaagggctgcaacactatagctct

SEQ ID NO: 920850 - DNA, 566 bp, Homo sapiens
tccctggtgaaaccccatcttcaggccaggcctaaaacctaggggcctggctcccagttccaggtggagttcatgacccagagtgagaacttccttgatgccttttggccagttggatggtgccttttccatgaaccaatcagcatgtacttcctcccttctgagctcataaaaaccccagactcagccagactcagagactcatcaggattacctgcttgtggataggagctacccactttgggtctcctctatactcgttgggaatacctgcctatgaataggagytacccactttgggtctcctctatactcattgggaatacctgcctatgaataggagctacccagtttgggtctcctgtctgctgagagctgtttggttgcccaataaagctcttctctgccttgatcaccctccagttgcccatgcaacctcattcttcctggatatgggacaagaacttgggacccaccaaatggcaggagcaaaaggagctgtaacacttccctggctggttccctgagctatggtgggagctaaagggctgcaacactatagctct

SEQ ID NO: 920851 - DNA, 618 bp, Homo sapiens
tgcatgggtccacttttatgtggcttttttttttccgataaatacattggaaaattttttggagatttgcaacaatttgaaaaatctcactgacgaaccatgtagcctagaaatattgaaaaaattggctggacacggtggctcacgcctgtaatccaagcattctgagaggctgaggcgggcggatcacttgaggtcaggagttcgagaccagcctggccaacgtggtgaaacctcgtctctrctaaaaatactaaaagtacaaaagttagctgggcatggtggccatgcctggaatcccagctacttgggaggctgaggcaggggaattgtttgaatccaggaggcagaggttgcagtgagctgagatcataccactgcactcctgcctgggcgacagagcaagactccgtctcgaaaaaaaaaatactgaaaaaattaagaaaaaggtatgtcacgaaggcgtgaaatatatgtagatacttgtctgttttaccatttactgccataaaatgtacacaaatctattacaagaagttaaaatttatcaaaacgtatacaaacacagactgtacctggtgctatttgcagttgagagaaacgtaaacaaatgtaaag

SEQ ID NO: 920852 - DNA, 633 bp, Homo sapiens
tgcgccaccatgcccagctaatttttgtatttttagtagagatggggtttcaccatgttagccaggctggtctcaaactcctgacctgaagcaatcgcccacctcagcttcccaaagtgctgggattacaggcgtgaaccaccgtgccttgccccacctccacttctaatttccagcttgtcatttcttatgaatagaacccyggaacaaacatcctgaattcaagtggtctccagatcaaaaacaagaggtcctgggcacacacttaggaaaaaggtgcatacacgctggtgtgtaccccatacatgtattacatattctgaactgctcagagggcttccttgcttaactcccaagttgcaactgtgaatgggataacaagagtgatagttgagaaagagtggcattctggccactcctctgataagtagtgtcacctccagagtgacattactccatcagccttcaacagcgtgcaatgataaaaacatgaataccaccaaaggttgttgggaacgagtaaagttacgtataccaggatttcaaagcaacttctaagtagcagagctctttttttccacagttctgaaacactgaaaaagacattgatctctccattaatttatcttgaaa

SEQ ID NO: 920853 - DNA, 689 bp, Homo sapiens
agcggcccccagcagggcagcctgtggagataagctcccctgccacctcgttgcaggggctggaggcaagagtgaggaaggttttgatttgcagcatggctagttaaggtggtgatatcagtgaccaggaggaagaaaggccactgactcctagcctgaggctctgggcctttggagacgagcaaatgacctgcagattagtcatggatgtaagagggagctccgggaggtcggagagccagagggagcttagtaaactcttcacactacccaaatggactgaaggctcatagctggcagagattagagcaagcccaagccatgtccatatgcccagggcacacagcctgtgtgtgtgccggtgccagtgttaggaagtaaaagccggaacacccttgcaaatggcccggggcgtgcctcctccccattgcacatagatccagcagcagatggtggaaaccatattggctttaactgatgtttgacaaactatgcaaacaagaagcgacctctaagaagccaktctgaaaaattaaagcaaacaaatgccaacaataaaactgaacaatgacctgagtgagtgcacactgtggaggagacaggcttcctgcatggagtccagccaggagacagtacagaatgcatggagcagctattggaagacagtgaaaactaaatagttgcaggca

SEQ ID NO: 920854 - DNA, 762 bp, Homo sapiens
tagggaaaataaaaagaaccgactttgaaatattgggggctggttcccccgataatctgattgttaaaagagcttggcatcttccccctctctgtcttgcttcctctcttgccatgtgatgcacttgctccaccttcattgtccaccatgagtaamagcttcctggggttctcactagaagcagatgctggcaccatgcttcttgtacagcctgtataaccataagccaaataaacctgttctctttattaactacccagtctcaggtatttctttaaagcaatgcaaaacagactaacacattctcttgattttctcttgattgttgattttctcccactgctttcaagatatcttcttggtctttaattttcagaagtttaattatgtgtcttggtgtggatttcttttggtttatcttgtttgaagttctcccagaatcttgtatccggaggtttatgtttttggataaatttttttaaaagtcagaattatttatttggggatatttttaccccactatcttttccctttttttctgtcagtctaataatgcaaatgttctatcttttgatattgtccacagaactctgaggttgtattaagtttttaagtctattactctctgttcagagtgagtaatttctgttgttctaagttcaatgattcttccctctgttcttaccattctgctgccgagtacatccattaagtttttattttggttattgtattcatcagttccaaaatatatttttcatt

SEQ ID NO: 920855 - DNA, 762 bp, Homo sapiens
tagggaaaataaaaagaaccgactttgaaatattgggggctggttcccccgataatctgattgttaaaagagcttggcatcttccccctctctgtcttgcttcctctcttgccatgtgatgcacttgctccaccttcattgtccaccatgagtaaaagcttcctggggttctcactagaagcagatgctggcaccatgcttcttgtacagcctgtataaccataagccaaataaacctgttctctttattaactacccagtctcaggtatttctttaaagcaatgcaaaacagactaacacattctcttgattttctcttgattgttgattttctcccactgctttcaagatatcttcttggtctttaattttcagaagtttaattatgtgtcttggtgtggatttcttttggtttatcttgtttgaagttctcccagaatcttgtatccggaggtttatgtttttggataaatttttttaaaagtcagaattatttatttggggatatttttaccccwctatcttttccctttttttctgtcagtctaataatgcaaatgttctatcttttgatattgtccacagaactctgaggttgtattaagtttttaagtctattactctctgttcagagtgagtaatttctgttgttctaagttcaatgattcttccctctgttcttaccattctgctgccgagtacatccattaagtttttattttggttattgtattcatcagttccaaaatatatttttcatt

SEQ ID NO: 920856 - DNA, 782 bp, Homo sapiens
gatctctgcagcatattctgtgtgtgtgtgtgtgtgtgtgtgtgtgtgtgtgtgtgtgtgagagagagagagagagatgaccctttaaaaatgtacactccattcttctcatgagccatagtttgtcaacgcctggtctggcactcttcacatgccctctccgtgcccatctccagcaaaggatagcgggcttacccttgctatcaaaggtgcttggcttagaccaatcacccaaaactgatgtttcagagatgcctgctggaggagtataggcagatattactgatgtcagaaaaacagtttgagcgccacttccttctctggcaggaaggagtgattggctgctggtcctgccctgtccgaggaggaggacggaacccacccaccaagctgtggagaggtggaccccacaaatcccctcgcaagccacgtctgagagtgagcagagggaagaaactcaagcgtttgtagtcctctttcttaacaaccaggcttaaagcgycatcttgtgtcttgaaggcagaaggagatcaggatgtgtgtgctagaagcaggcagaggatcttcaccaatgtctcaaaaactagagaaggaaacatggcgatcctcaaggcccgcggcagccccagcccttcccgcaccctgcgatagtctggtgttgggagggtggcccacgtgtccaagcaaccacatcagggaggttccgggagaggagaaggcaaagctcatgccctcatgaggcaggcagtcccatccaggactggactggatgagcaccaata

SEQ ID NO: 920857 - DNA, 807 bp, Homo sapiens
ttttaggcttgtcaggtcacatatgatctctgcagcatattctgtgtgtgtgtgtgtgtgtgtgtgtgtgtgtgtgtgtgtgtgagagagagagagagagatgaccctttaaaaatgtacactccattcttctcatgagccatagtttgtcaacgcctggtctggcactcttcacatgccctctccgtgcccatctccagcaaaggatagcgggcttacccttgctatcaaaggtgcttggcttagaccaatcacccaaaactgatgtttcagagatgcctgctggaggagtataggcagatattactgatgtcagaaaaacagtttgagcgccacttccttctctggcaggaaggagtgattggctgctggtcctgccctgtccgaggaggaggacggaacccacccaccaagctgtggagaggtggaccccacaaatcccctcgcaagccacgtctgagagtgagcagagggaagaaactcaagcgtttgtagtcctctttcttaacaaccaggcttaaagcgtcatcttgtgtcttgaaggcagaaggagatcaggatgtgtgtgctagaagcaggcagaggatcttcaccaatgtctcaaaaactagagaaggaaacatggcgatcctcaaggcccgcggcrgccccagcccttcccgcaccctgcgatagtctggtgttgggagggtggcccacgtgtccaagcaaccacatcagggaggttccgggagaggagaaggcaaagctcatgccctcatgaggcaggcagtcccatccaggactggactggatgagcaccaataa

SEQ ID NO: 920858 - DNA, 565 bp, Homo sapiens
gtaatcccagcactttgggaggctgaggtgagctgatcacttgagtccaggagttctagaccagtctgggcaatatggcaaaaccctgtctctacaaaaaatacaaaaaggagctgggtgtggtggcatgcacctgtagtcccagctactcaggaggctgaygtgggaggatcacctgaggccaggaggttgaggctgcagtgggctgtgattgcaccactgcacttcagcctggtttggagtgagaccagcctggctggagtgaaacagagtgagaccctgtttcaaaaaacaagaggaagaagaaggaatagtagaattatcactgtttgctatccctaatgaaataacacatctaggcaacaatcctggatgctgctgaaaccattagctacaaagccagtggagagaatggggagatctaagggggatgaaccaggctaacagcacttaaacccacttatcaatcttagcatcattagaagtgaggtattccaacattacgcacctcctgatgggatacaatagtaagtacgcagcaccgcgtatattcttaaagaaactt

SEQ ID NO: 920859 - DNA, 728 bp, Homo sapiens
gacaatagcacagcaggtaacacaagctttctaaaattttaattttcacttgaaagtttgaattttatcattggcaacaaactgtcagttgttttccttgaagtgacaggctcactttgttcattttcaagaaaatgactgccaaatttctaagtctaaatagtcacagtttggtattcattctttcaagtaaaaatgatgcttcatgcaaaatttggctagtttcactagcaactcaaaaagaaaaatcacatatggatttttcctctagacaggcaatgtactctggatatgcagcagaaatgctttttgcacatttcgtatctcatcacagcaaatattaaaacaaagtatgcttaagggtcaaaatttaatcaattagcaattgttatcacttcttcaaggacaytcttaagtgaaagtggctttttctttttttctgtgaatgcacagctgtgaagaataccatgattactaggtacagttgggtcttactgccatttaatttctagaatgcttagtttcatcgatcattgcttttacaacagcagggcaaatgtcaaagcagtagaaaaggcaaaaagttagcgttactatgataatggtttttacctcatggacactcctgaaagggtctcagtgatccctagggatttgtacgccacaatttgtgaactgttatcttaaggaaacactaaaagctatgaataagtcaccatccccaaatc

SEQ ID NO: 920860 - DNA, 722 bp, Homo sapiens
ggaggctgaagtgggaggatcgcttgagcctggtagatggagattgcagtgaactgagattgtgccactgcactccagcctgggtgacagagcagagcaagaccatgtctaaaaaaaaaaaaaaaaagaaaagaagaaaagaaaaaaaatcaaaattagtattccacatggtttccatggctcaggaattcatgagtgacttggctgggtggttctggctcagagtgtcttataaaggtgcagtgaagatgtcactggggccgtattcatctgaaagcctgactggggctggaggatccagttcccacatggctcaggtaatgctgtcaagctggggctggctattggcaggaggcctcagcccctcaccacatggccctctccatagggctgcttgagtgttttcacgacatggtcactggcttccccmagagcaagtgatccaagagaccaaggctgaagtcaaagtgtcttttatggtttagcctcagaagtcacacactgtcatttctacaatatctgactgattacataaatcagccctatttagtgtgggaggggactccagaagggcatgatgagtagcagaggcaagaaatattggcagctacctgcaaggctggttgccacagtttcccattctgtaacacatctgaatatttcatcgatctgaaagtgagaggccagcagattgacaggcccaaacttgagattacagcaag

SEQ ID NO: 920861 - DNA, 597 bp, Homo sapiens
agttattaacatatctaaagataaaatatatagatgtaggtgtgcttgctgcttgtgtggatggtggtatagtatggggggagaagagggaaaagcagaaaatgtagaataaaaatagaggggtagtgaagcaaaccttgacattgcccacacaagyacgtatcaggaggcaagaactcttaaataataaattagcctttcatttttagaatgcttccaagttgaaagttctcaagcccctaagaattctctttagtaagtatctaagttaatgagtgttcattctagctgattgcaagttctgtcttctatggccttctctttccctagtatttctgattatccctggaaaattcttacatattccacaaattgatgctggcttcacttatcacctttcctacagacacaagctctggtcttctctttttgatgttgttttctcttttccagtgccacttcactccagtgtgaactaacatttctttcttaatgtcctaaatattttctaactctaatctgtagaagctatcagatctcttctgtgaagtaatatagcattctggttaaatgtgtggacactgatactatgtctta

SEQ ID NO: 920862 - DNA, 597 bp, Homo sapiens
agttattaacatatctaaagataaaatatatagatgtaggtgtgcttgctgcttgtgtggatggtggtatagtatggggggagaagagggaaaagcagaaaatgtagaataaaaatagaggggtagtgaagcaaaccttgacattgcccacacaagtacrtatcaggaggcaagaactcttaaataataaattagcctttcatttttagaatgcttccaagttgaaagttctcaagcccctaagaattctctttagtaagtatctaagttaatgagtgttcattctagctgattgcaagttctgtcttctatggccttctctttccctagtatttctgattatccctggaaaattcttacatattccacaaattgatgctggcttcacttatcacctttcctacagacacaagctctggtcttctctttttgatgttgttttctcttttccagtgccacttcactccagtgtgaactaacatttctttcttaatgtcctaaatattttctaactctaatctgtagaagctatcagatctcttctgtgaagtaatatagcattctggttaaatgtgtggacactgatactatgtctta

SEQ ID NO: 920863 - DNA, 597 bp, Homo sapiens
agttattaacatatctaaagataaaatatatagatgtaggtgtgcttgctgcttgtgtggatggtggtatagtatggggggagaagagggaaaagcagaaaatgtagaataaaaatagaggggtagtgaagcaaaccttgacattgcccacacaagtacgtatcaggaggcaagaactcttaaataataaattagcctttcatttttagaatgcttccaagttgaaagttctcaagcccctaagaattctctttagtaagtatctaagttaatgagtgttcattctagctgattgcaagttctgtcttctatggccttctctttccctagtatttctgattatccctggaaaattcttacatattccacaaattsatgctggcttcacttatcacctttcctacagacacaagctctggtcttctctttttgatgttgttttctcttttccagtgccacttcactccagtgtgaactaacatttctttcttaatgtcctaaatattttctaactctaatctgtagaagctatcagatctcttctgtgaagtaatatagcattctggttaaatgtgtggacactgatactatgtctta

SEQ ID NO: 920864 - DNA, 607 bp, Homo sapiens
gggaataacaatgtttttaattgctctcagattctgtacaatcatccatcctctaccatctggtatccttagagaaaagagaatgcttatacactgttgctgggaatgtgtattagttctgtcactgaagaaagcagttttgagatttctcaaagaaggattggagtgttacatggtctttacagagaatagtctgtcttctttttgtataatttgaaggctattcctatcaaactaccaatgtcatttcttcacagaattgaaaaaaaaacttctctaaatttcatgtggaatcaaaaaaaaaaaaaaaaagaacctggatagctaaagcaatcctaagcaaaaaggacaaagctggaggcctcacattacttaacttcaaactgtrctataagtctacagtaaccaaaagagcatggtactggtacaaaaacagacacataggccagtggatcataataaacaacccagaaataaagctgtatgcctacagccatttgatctttgacaaagttgacaaaataagcaatggataaaggactccaaattcaatagatggtgctaagatagctggctagccatatgcagaagatcaaaactggacctc

SEQ ID NO: 920865 - DNA, 608 bp, Homo sapiens
cttgggaggctgaggtatgagaattgcttgaaccccagaggaagatgttacaatgagctgagattgcaccactgcattccagcctgggggacagagtgaaattgtgtctcaaaaagaaaaagtatatatacatatttttttttaaagaaataacaacaaaaaccttccagatttgataaaaattataaacccacagatttaagaagctaaaacaaacatggaaaaaaaaaaaaacctataccaagccatagtatcatcaaattgtttaaaactagtgatgaaaagaaaaatcctgaaattagccagggatgggggaagggcacattgtatacaacagaaaaaagacaygtgaatatagcaaattcctcattaaaaacaatgtaagcttaaagacagtgaagcaacatctttaaagcattgaaagaaaggaaaaactgtcaacacagaattccacatgcagtgaaattatctttctaaaaacaaggataaaataaagactttttcagacataaaaaagctgaaataattcatcaccagcagacctgcactataagaatcgttaaaggaaatacttcaagcagaaggaaaacgataccaaatggaaatct

SEQ ID NO: 920866 - DNA, 644 bp, Homo sapiens
agctaaaatagaaaacttaatagaaagaccagaaaataaggaatcttcaaatatcctttttttttaaaataacagagttggaacataggaaagaaaagttgaaatgtcaggatcaatccagaatatctaacatctgactaatgctaattacagaaagataaaacagagaggagaaattatcaaagacataatcattatttttgaaaaaattttctagaaggaaagaacacgagttccaggattgaaagtatacaggaaaaaaaatgatgagaaaacagccatagaaagttatatcagagtaaaatttcaactcattgggataaggaaaaaatttaaagcctctatggaaaaaaattaaaattytcttccaaggattggatcaaaatggcatcagacttctcaacagcaacacagaatattagaaaacaaagaagccacatcttcaaaattctaaaagtaattttaacatagaccactatacccaaccaaactagccaaataatgtgaagatagaagaaaggaaattttagttaagcaagaactcacaagttttatgttctgtgcaccatttcttaggaagctggaataggttatgctccatcaaaacaatagattaaacaataagcaagcaagcaagctaggaa

SEQ ID NO: 920867 - DNA, 653 bp, Homo sapiens
attagacaacacagctaaaatagaaaacttaatagaaagaccagaaaataaggaatcttcaaatatcctttttttttaaaataacagagttggaacataggaaagaaaagttgaaatgtcaggatcaatccagaatatctaacatctgactaatgctaattacagaaagataaaacagagaggagaaattatcaaagacataatcattatttttgaaaaaattttctagaaggaaagaacacgagttccaggattgaaagtatacaggaaaaaaaatgatgagaaaacagccatagaaagttatatcagagtaaaatttcaactcattgggataaggaaaaaatttaaagcctctatggaaaaaaattaaaattttcttccaaggattggatcaaaatggcatcagacttctcaacagcaacacagaatattagaaaacaaagaagccacrtcttcaaaattctaaaagtaattttaacatagaccactatacccaaccaaactagccaaataatgtgaagatagaagaaaggaaattttagttaagcaagaactcacaagttttatgttctgtgcaccatttcttaggaagctggaataggttatgctccatcaaaacaatagattaaacaataagcaagcaagcaagctag

SEQ ID NO: 920868 - DNA, 561 bp, Homo sapiens
ctggaggcagggagatcagggaggaggctctcgtacttctccaggtgagagaagacatcagcttgaaccagcaggacagtggcagggaaatgtgaagaaagggaagatttgagaaataccttggtccaagaggtgcatcaccctgtggttggctggaggagggtgggagagggagggcctaggctgactcccagggtcctgaccatccaggtatttgcctggatggtgatgccattcactggaatggaggacacaagagatgatgagagaggtttttggggaaaaagggtaagttcaggtttgagctcccagcatttgacataggtggacatgggtgagaaatctaagaaaaatattcagcaagcagttgaactgaaggcttttaaatacagaagagagaaattggaggtgtagatggttgtcraagtcatagaaaaggagtggtatccgtcaggggcacgtgcaacaacagaagaagcttgagggcagaaccccgaggaacaccaacatgttggggggggacacgtaaaggtgtctgcaaaggagaacccagagacatag

SEQ ID NO: 920869 - DNA, 801 bp, Homo sapiens
ctgagattatgtggagaaagaggcccagccatcccagcaccccagtagactctagccttcaagcaagaccaaccaaagcatcagatatttgagttggccatcttagatgttctagcccagttgatccctcagatgatgatagcgcccagccaacattgcataatgtagaagaattatagtcatgcacacattaatgacattttggtcaatcacagactgcatatatgacagtggtcccacaagattataatggagctgaaaaattcctagcacctagtgaccttgtagccatcataacgttgtagcacaatgcattactcatgtgtttgtggtgacgtctgtgtaaattaacatattgtgctgccagtcatataaaagcctagcacatacaattatgtatagtacataataacttgataattatagtaaaaaactatgttactggtttatgtatttactataccatgctttgtattgttattttagagttcactcctacttacttaaaaaaaagtgatggtgaaacagcctcaagcaggttcttcaggaggtgtttcataagaaggcrttgttatcataggagatgacagctccatgcctgttagtgaccttgaagaccttctagtgggacaagatgtggaggtggaagacagtgatgttgataatcctgactctgtgtaggcctaggctaatgtgtgtgtgtgtgtgtgtgtgtgtctgcgactttataaaaaagtttaaaaactaaaaaaaaaaaaaaaaaatttaaatagaaaaagcttataaggttataaagaaaaa

SEQ ID NO: 920870 - DNA, 704 bp, Homo sapiens
ttttctctaaaatggtgttatatgttttgaattatagaagattttcaggaacgcatatcttatataattgtataagatgcaactgtcttgtatgcattcgtaaaactgggctcaacacattttctggaggggattctttgatcattttgtacttcttcaatcartttggtagctgagatgtcatcagatactgcctgttaacactggtataaatttgtacatattactataatgaaagctttgtatctattctgttttcatcttcattcttaattttatgtatttatgttattttccttttttattaggcttcatatcgtttcatctattttatagttgttttccatccaaagaaccagctctttaaaaattctgctgatattataatagattagtttctttaatttctacattcaagtcatttttaagctctctcaatctgaaattcctattatatgtattctagatatcttgggttatcactttatctctttctctctctcttgtttagaaaagactgttaaagggagctatttgtctatattttcttctaaaaattctgaagttttgcttttcacacttcagtatttatttcacctggaattgattttgcgtgcgtgttaattgtgaggtagagtttttttctcatgtaactaaccaatgaattaatatcatcatagaatgatctgtgctttctcattgat

SEQ ID NO: 920871 - DNA, 646 bp, Homo sapiens
gaggccgaggcgggcgggtcgcctgaggtcaggagtttgagatcagcctggccaacgtggtgaaacgctgtctctgctaaaaatacaaaaattagccaggtgtggtggcgcacacctgtaatcccagctactctggagtctgaggcaggagaatcacttgaacccrggaggcggaggttgcagtgaggtgagattgcgccaccgcactccagcctggacaacagagtaagactccatgtcaaaaaaaataaaaaacaaaaaacaaaacacctcaccctcctttgagagccaattcataattcctcttcaaatgcagcactgaaatgtccaggccggaacaccaagttgcccgaacggtccgtgagaactcatctctccagtcacctgtacacaggcttcccggatgcggcctcttgccctggactgtgggtttctattaacctatctaggggagcaccttcgacgttcaggcattgttcagaataagaccaaattcaatgaaaaacctaaagataattttcagaagccaggtcttccctgttctgtaagcaagcaaagagtatctgtacttaatgaaaagcacaagaaataaaagctaaataaagggaaggagagttttacactggtttctgtcaagtgtcatctc

SEQ ID NO: 920872 - DNA, 651 bp, Homo sapiens
cacacagagagggacaggtgacaggatgactaagatggggggtgaggcttctacaagccaacagctacctgcaaacccccagatgctaagggagaaagggctggaactgattctccctcagcctcagaaggaaccagccctgctgacactcatcttggacttccagcctcctgacctgtaagacaatccttttccactgtgcaaaccacccagcagtttgtggttcattgacaacagccccgtcaaagtaattctcacggctctgsccatctcagaggttgctgagggagtgacagatctgaaaatgctccgtgaactcttcacccaactcaacctacaggctggcctgtgctgaccacaccaagagctggtccacgctgcagagctgagtctttcagggccagacccgcatgagttcccagggaatatgcaggaacacacaaaactaattttgttccaacaacttcaggtatgggcccaaaagtccaacccacttagttatgggacacattcttgaagggttgaggtgaagcaatgttaggctggtgttgagtaaactggaaaacgtgtaagcctatttcttagattttttaagcctccacagtggacatcaatggagccatcggccagaagagcctctacagcctgcat

SEQ ID NO: 920873 - DNA, 633 bp, Homo sapiens
aatgactgcatcatctctctagcaagggttcagaactgggctgaggctgagatggctggaatgatacccaatacaaggagctaaaaaccataataaaacaatgcaagatctgacagacaaaatagccagtctagagaagaaaataactgacctgatagagccaaaaaacacactacaagaatttcttaatgcaatcacaagaattaakagcagaatagaccaagcagaggaaagaatctctgagttcaaagactggatttctgaaataagatcggcaaacaagaatagggaaaaaataaataaaaagaaagaacaagacctccaaggaatatagaattatgtaaaaagaaaataatctgtaactgattggtgtcccagaaaaagatggggaaaatggaaccaacttggaaaacatagtcaggatatcatccatgaggactttccaaaactcgctagaaaggccaacattcaaattcaggaaatgcagagaacccaagtaagatacttcacaaaaagatcatcctcaagacacataatcattagattccccaagggtgaaattaaagaaaaaatgttaaagacagctagaaataatagttaggtcacctacacaggaagctcatcagactaaca

SEQ ID NO: 920874 - DNA, 617 bp, Homo sapiens
tctaccatttaaaataggctcagatccttctttttcataaagcttcaaagtatcattccctccagtccacagcagttgctcagtcatagcatccaatgtttatcccattaacatctcagttgcttgcaaatcaccttctgacttttttgatattrtttggttaattcaatgatttttaacagtagtatttatgtgtttctgccttgttattgtaaacaatattaatttctttgaaagcataaaccataacagagcaagtttgcattctactccctgccactgtcttttacatagttaatcctcagtaactatagatatgctttgataattttaaaaatgttttagtaatatagtaaaaaaaagaaacccagtaggtcgaatatttttggcttctattttaaatgtattatgtcaaattatggattaaaatatcagtatagttaaacaatattaaaaatagttcattatagtttaaatatctttttatgttctgtgacagtaaaactacatgaatacatgatagtaggacataaaagctatcaatatgggatgaactaaagaaagtgagtggctgtaacaaaatggagataaataaatggtgatatgcttcaaaagtg

SEQ ID NO: 920875 - DNA, 617 bp, Homo sapiens
tctaccatttaaaataggctcagatccttctttttcataaagcttcaaagtatcattccctccagtccacagcagttgctcagtcatagcatccaatgtttatcccattaacatctcagttgcttgcaaatcaccttctgacttttttgatattatttggttawttcaatgatttttaacagtagtatttatgtgtttctgccttgttattgtaaacaatattaatttctttgaaagcataaaccataacagagcaagtttgcattctactccctgccactgtcttttacatagttaatcctcagtaactatagatatgctttgataattttaaaaatgttttagtaatatagtaaaaaaaagaaacccagtaggtcgaatatttttggcttctattttaaatgtattatgtcaaattatggattaaaatatcagtatagttaaacaatattaaaaatagttcattatagtttaaatatctttttatgttctgtgacagtaaaactacatgaatacatgatagtaggacataaaagctatcaatatgggatgaactaaagaaagtgagtggctgtaacaaaatggagataaataaatggtgatatgcttcaaaagtg

SEQ ID NO: 920876 - DNA, 617 bp, Homo sapiens
gaatattttattttattcattaatttatattttgcattaaactaaatatatgaaaataaactcaattacaagtatctaccaaaaagtctcctccagtttttgggtgatggcctagattgggctctattctagtggaaagtaagatcaggtaagatagctttgatgccaggaagtaaggataaaacagggcttggcaaagtgatgatcattttccctgcatatgctcctaagtgggattccctgtgttacagctggcrgtaccatgtggagagaaacaagtcttaccagaccagagtccagtatctcaaagcctcagaatcttctacgaaagggatttgaatgtccagaaagtctataatgtatacagatacataaggtgtaaattccatcggtgtgtaagcccatagatgtttgtctaaatatggatcaatctcgtgatttttgattaagtaatcaattcaacattaacattgaccacaaccaaatatttgcttgtcacctatctgcatttaaaggtcctcatctgtacaatgaggggttgggatttaattgccattaaggtccactttgtttgcattccagctgcaatatacagtaatgtgtgcccacataccctg

SEQ ID NO: 920877 - DNA, 621 bp, Homo sapiens
caagaaggcaaatgaatccccaataagatgaacccaaggaagtccacactgacacatataatctaactgtcaaaattcaaagacaaagagaattttgaaagcagcaagcagaaatccaatcattatgtagaagaaaactctcataacactatcagtggatttctcagcagaaaccttgcagtcaaaaatgaagttggatgatatattcatagagcttaaaaaatgccaaacaagaatattatacctggcaaaactctccttaaaaaatgaaggtatgtactttctcagatgaacaaaactgagggagttccactccactagacctgccctacaaaaaaatgctaatggagtactaaaaattgaaactgaaagatgctaaatgataaactgaaaacatataaaatataaagttcactggtaaagrtaaatatattaaaaatatacaatactataatactgtaagcatggtgcataaatcaattttaattctggtttagaagttgaaagacaaaagcataaaaatagcaataactataaaaatatactatttgatacacaacataaaaagatgtaatttgtggtatcagtaacataaagggtagaggaggacagaggttaaag

SEQ ID NO: 920878 - DNA, 587 bp, Homo sapiens
accacgcccagccaattttttgtgttttttagtagagacggggtttcaccgtgttagccaggatggtcttgatctcctgacctcgtgatccacccacctcagcctcccaaagtgctgggattacaggcgtgagccaccgcgcccggctctctccgacattttactataataataataataacaagccacaatgaacatcttgtgcttgaaattttgtccatatttggarcattttcctaaggtagagtcctaaggatgtgtgtgtgtttgttaaaatgtacataacatttaccattttagccatttttaagtgtacagttcaatagcattaattcacattctgtgcagccatcaccaccatccatctccagaactttttcattttcccaaacagaaatactatagcccttaaacagtgactccccattccttcttcctccagccccgcaaaaccaccattctcctttctctccttctgactttgactactccagatatttcatacaagtggaatcatatagtacttttgtgacgtgcttacttcacttagcatgaggttttcaaggttcatccgtggtgcaagtgtg

SEQ ID NO: 920879 - DNA, 587 bp, Homo sapiens
accacgcccagccaattttttgtgttttttagtagagacggggtttcaccgtgttagccaggatggtcttgatctcctgacctcgtgatccacccacctcagcctcccaaagtgctgggattacaggcgtgagccaccgcgcccggctctctccgacattttactataataataataataacaagccacaatgaacatcttgtgcttgaaattttgtccatatttggagcattttcctaaggtagagtcctaaggatgtgtgtgtgtttgttaaaatgtacataacatttaccattttagccatttttaagtgtacakttcaatagcattaattcacattctgtgcagccatcaccaccatccatctccagaactttttcattttcccaaacagaaatactatagcccttaaacagtgactccccattccttcttcctccagccccgcaaaaccaccattctcctttctctccttctgactttgactactccagatatttcatacaagtggaatcatatagtacttttgtgacgtgcttacttcacttagcatgaggttttcaaggttcatccgtggtgcaagtgtg

SEQ ID NO: 920880 - DNA, 694 bp, Homo sapiens
gatactggtgtgaaagaactgtgatgtcttgggaaaaaattcctgggctgggcacattggctcacgcctgtaatcccagcactttaagagattctcccccaagctgggcagatcacctgaggtcaggagttcaagaccagcctgaccaacatggtgaaaacccatttctacaaaaaatacaaaaattagccagacgtggtggcacatgcctgtaatcccagctacttaggaggctgaggcaggagaatcsctcaaacccagtgagccaagattgtgccactgcactccagcctgggcgataaagcgagactctatctgaaaaaagaaaaaaaaaagccgggcatggtggctcaagcctgtaatcccagcactttgggaggccaaggcaggtggatcacgaggtcaggagatcaagaccatcctggctaacatggtgaaaccccgtctctactaaaaatacaaaaaattagccaggcgtggtggtgggcgcctgtagtcccagctacttgggaggctgaggcaggagaatggcgcgaactcgggaggcagagcttgtagtgagccgagatcacgccactgcactccagcctgggaaacagagcaagactctgtctcaaaaaaaaaaaaaaattctggagcacaaaggatctggttcatttttcggtcatgggaagtcagcctcttgccctaccgc

SEQ ID NO: 920881 - DNA, 523 bp, Homo sapiens
gacagaagaagagctagagaaaaaataactaaacaatatcaggggaaattcagccagatattgggcaaaattcacccctgatatttcacataggttcttttctattttccctaagcttcagccaggttgagaaataaagggacagagtacaaaagagggaaattttaaagctgggcatccgggggagacatcacatgttgataggttccgtgatgccccacaattggcaaaaccagtaagtttttattagggattttcaaaggagagggagtgtacgaatagggtgtgggtcacagagatcacatgcttcacaaggcaatagaatatcactaggcaaatggaggcagggtgarataagaggaccacaggacctgggcaaaattaaaattgctaacgaagtttcgggcaccattgtcattgataacatcttatcaggagacagggtttgagagcaaccggtctgaccaaaatttattaggtgggaatttcctcatcctaatgagcctgggagcactatgggaga

SEQ ID NO: 920882 - DNA, 523 bp, Homo sapiens
gacagaagaagagctagagaaaaaataactaaacaatatcaggggaaattcagccagatattgggcaaaattcacccctgatatttcacataggttcttttctattttccctaagcttcagccaggttgagaaataaagggacagagtacaaaagagggaaattttaaagctgggcatccgggggagacatcacatgttgataggttccgtgatgccccacaattggcaaaaccagtaagtttttattagggattttcaaaggagagggagtgtacgaatagggtgtgggtcacagagatcacatgcttcacaaggcaatagaatatcactaggcaaatggaggcagggtgagataagaggaccacrggacctgggcaaaattaaaattgctaacgaagtttcgggcaccattgtcattgataacatcttatcaggagacagggtttgagagcaaccggtctgaccaaaatttattaggtgggaatttcctcatcctaatgagcctgggagcactatgggaga

SEQ ID NO: 920883 - DNA, 603 bp, Homo sapiens
cctcattcattctgttctcctggtttcaaattctctatatcctttctattgtcatgaaaattaaataaaaggcatatggggcttagtactgaagctgactcgcggttacactcaattaagtgtgaactgctattaaacccatcactccccacttctcttccattagatatctctgactggtctaattacattgaagtctcctatttggctagtcctaccaaagtactgacatctctcaatcagctatcttactgaataaagtatcagtgttttcgaacttaaaaaagcaaagttggtagacatctctcaagtggctgtagaagtgcaaagactcctccattctttgaaagaacaagtctctacctttaaaaacattcttatttgttcagaagaasaacttctattatagacatgctttgctcttttaaaggtgctattaaaaattatcccattttacaaacttggttttaacctcattttacatgcgagaaactaagtgagagaaattaaaatggcttgtacaagaacacataagaaatcactcataatgccggactgtggactgaggtttccagactccctctagacttggcaaacttaaga

SEQ ID NO: 920884 - DNA, 742 bp, Homo sapiens
gggatttgaacctaacattccctgtgaagttctcagctagaagcagtctgagttcttaactccaggcactactatgttgccttgcgagccacgtgctaccactctacgtaaggtacaaacaagttaatcattatcagttaaaaataaaatattaagggccaggtgcagtggctcatgcctgtaattccagcactttgggaggctgaggactgcttgagcctaggagtctgaaaccagcctgggcaacatagtgagatgctgtctctacaaaaaaataataaaaattagccaggcaagatggcatgccctgtagccctaactacttgggaggctgaggtgggaggatcatttgatcttgggaggtcaaggctgcagtgagctgtgattgtgccactgcactccagcctgggtgacagagtgagaccctgtctcaaaaatacatatatacataaaacattaagagctttcccttccagcactttgggaggctgaggcaggcagatcacgaggtcaggagatcaagaccatcttggctaacacggtgaaaccccgtctctactaaaaatacaaaaaatcagccaggtgtggcagcgggcrtctgtagtcccagctactggggaggttgaggcaggagaatggcgtgaaccagggaggcagagcttgcagtgagccgagattactgcactccagcctgggagacagagcaagactccgtctcaaaaaaaaaaaaaaaaaaaaaaag

SEQ ID NO: 920885 - DNA, 412 bp, Homo sapiens
tatacaaaaatcaattcaagatggattaaagacttaaatgttagacctaaaaccataaaaaccctagaagaaaacctaggcatcaccattcaggacataggcatgggtaaggacttcatgtccaaaacaccaaaagcaatggcaacaaaagacaaaattgacaaatgggatctaattaaactaaagagcttctgcacagcaaaagaaactaccawcagagtgaacaggcaacctacaaaatgggagaaaattttcgcaacctactcatctgacaaagggctaatagaggcttcttgatctgagcctctggaatggcccttcctggtccccaaggccactggaaactcactgaggacacagagagctcagcctcaggcttcatgagcagcacactttggtccacagcacgaag

SEQ ID NO: 920886 - DNA, 751 bp, Homo sapiens
catgcgttatctcctcttataattccttgaagaaatgcttacagtcttcattgctcctatttaaattttttagggaaacttctgctcttgtctgtacttcatcttggtgacacagtttgggcatccatcaagtgaaaagtttactaaactttaatcattcagttagaatcatgtaaactgaaccaactgagaagtctgcaatgttggctattgtgtgaactgctaatcatcacacatcttctcctgggtataaagaagatgaatttattccttgcaatatgatgtgaatcatctgtcactgtagactttaggttcaacattgcctcattccttcctgaaatgaggaactcctcattgaatttgtgaactgctgacttctwcaaccaatgtcaacttaccatgtgccaagtaggacaactttttggacaccatcaatgatttcatcttcttccacccaagcttcaccataaatttgatgtttttactcactttacttttagaagaattcatgttgctcttctaggagctcttttgaaactgctctcttatttttcttgatgcctcaaactagctcgtgttcagacatgttatagcaaaacattatgatttcattttggtgccaaaaaacttggaatccattcatggtatttcttaatagaatatacattttccattaacattttaacaacccactgcatataggaaggcgtcctgatacaacaagctctactacaggtaacttagacttttc

SEQ ID NO: 920887 - DNA, 626 bp, Homo sapiens
ttctcagtaatgtgaaagcctaatgatttaccatgagaactctcatataattgccctgtttgataagagaaatgagcaggaggaaggttgtggtgaaggactctgctgaagctttcccagggattcatctagtaaagctttgrctttctcaaaatattctcagaataaggagatactgtcattctccagaaagtcaaccagcaaaatgacttgagctttccaataaactcttgccaagatctttgtgctctcctcatccacttttgttttgactggacatttccgcctcttggtagccattgctttgattgtatttgttttctggattttactggtaaagtcatgtgttatctcctcttataattcattgaagaaatgcttatggtcttcgttcttcctatttaaatttttagggaaagttctgctcttgtctgtacttgatcttggtgacacagtttgggcatccattaagtgaaaagcttactaaactttaatcattcagttagattcatgtaaactgaaccaactgagaagtctgcagtgttggttattgtgtgagctgctaatcatcacacctcttctcctgggtataaagaagatgaatttattccttgcaatatgatgtg

SEQ ID NO: 920888 - DNA, 741 bp, Homo sapiens
tctggtctcctccataggaactggagatgaccaatcctgcctaggtgtcttaagttagaccatcaggtaacaaaggaatgtcagaaacaaggagcagcagagaggccaggccaacattgcctgatgttgtcgccaacttaggttgctgcaggcctgatacaagaaagatttgtccttggcaggagagtagaggaagacaacagaaatgcccctaaaagtcccttatctcaggccctttccctgactttctccaatgtcagcaatgagtaaagtgtatcaggaaagcataaatatcagctatgcactaaccagacaaaacaaaaacagaagtgatggaaatgtggaaagggacactgtctgtgagtgagggtgggtggaagagaggagcaggactgcagcaggagattgggcatctagaggtgagtggcagccctcagcactccacttgccttctaatatccatgttcatattctgaggccctgaaggaacagtcttcaacatatgaaattttaggaaacacaattcagctctcataacaactcccaaccttttytaagtcactaacaggtgttcagtggttcaaaaatcctcactcccttcaggcactgtcctttagcaaattgagttgcctccactttcaacactcatcccaaataaaaccacttgcataatctttactagaaggtgatagttcaggccacgatgcactctcctgaagagcttaatatcctcagctgctc

SEQ ID NO: 920889 - DNA, 721 bp, Homo sapiens
tgctggagtttgctggaggtccactcccgaccctgtttgcctgggtatcactagcagaggctgcagaacagcaaagattgctgcctggtctttcctctggaggcttcgtcccagaggggcacctgccagatgccagccagagctctcctgtatgaggtgtctgtcagcccctactgagaggtgtctcccagtcaggatacatgggggtcagggaccgacttgaggaggcagtctgacccttagcagagctcgaacgccgtactgggaggtctgctgctctcttcagagccatcaggcagggacactaaagtctgctgaagctgcacccatagcckccccctccgccaggtactctgtcccagagagatgggagttttatctataagtccctgactgaggctgctgcctttttttcagagatgccctgcccagagaggagaaatctggcagtctggccagagcagccttgctgagcagcagtgggctacacctagttcaaacttcccagtggctttgtttacactgtgagtgtaaaaccacctactcaagcctcagcaatggcggacgtccctcctcccaccaagctagagcatcccatttggatctcagactgctgctgtgctggcagtgagaatttcaagccagtggatcttagtttgttggctccatgggggtgggacctgctgagacagaccacttggctccctggcttcagcacccc

SEQ ID NO: 920890 - DNA, 746 bp, Homo sapiens
aggctgctgcctttttttcagagatgccctgcccagagaggagaaatctggcagtctggccagagcagccttgctgagcagcagtgggctacacctagttcaaacttcccagtggctttgtttacactgtgagtgtaaaaccacctactcaagcctcagcaatggcggacgtccctcctcccaccaagctagagcatcccatttggatctcagactgctgctgtgctggcagtgagaatttcaagccagtggatcttagtttgttggctccatgggggtgggacctgctgagacagaccacttggctccctggcttcagcacccctttccaggggagtgaatggttctgtcttgctggcattccaggcgccactggggtatggaaaaaactcctacagctagttcggtgtctgcccaaatggctacccagttttgtgcttgaaacccagggccctggtggggtaggcaccggagggaatctcctggtttgtgggttgtgaaaatcataggacaagcacagtttctgtgccagagttcctcaggctcagtccctcatggtttcacttgggttggggagaaaattctcygacgccttgcacttccagggtgaggtgatgtcccactctgcttcggctcaccctccgtgggctgcacccactgtccaaccattctcagtgagatgaaccgagtacctcagttggaaatgcagaaatcacccaccttctgcgttgatctcactgggagct

SEQ ID NO: 920891 - DNA, 634 bp, Homo sapiens
gtcttgaaagcaccacctctgggctagaagtcaaccaacacaaaattagtacaataaacaaaaccacaaccaaagatcctaacagagtccacctgattcccctccacctccaccagagcagatactggtgtccacggccgagagaactgaagacggttcacatcacaggactctttgtagacactccccagtaccagcctggagcccagtagttctgctgggtggctagatccaggagaaaaataataatcactgcartttggttctcaagaagccacatccctaggggaagggggaaagttccacatcaaggaagtaccccttgggacaaaaaaatctgaacagcagcccttgagtcccaaatcctccctctgacatagtctatccaaatgagaagaaaccagaaaaacaattctggtaacataacaaaacaaggttctttaacacccccaaagtatcacaccagctcaccaccaatggacccaaaccaagaagaaatatctgaattaccagaaaaaataattcagaaggtcaattattaagctaatcaaggaggcaccagagaaaagtgaagtccaatttaatgaatacaacatatgaagggaaaaatcttcagtaaaatagatagcataag

SEQ ID NO: 920892 - DNA, 794 bp, Homo sapiens
agctgagactggtacatagaaccaagacagctgaccaaaggacttcaaaaagacctcagtcttcatgataatcttatttccatgctaaatgatactccctccagcaccacgacagttgacaattgccatgacaatgactggaagaagccgtaaaaggactaaaagggaggcggtactactgattccaggaggttcaccacccacttctggaaaagacatgaatattcttcccttttcttttaatgtcasctccttcattagagaaatcctgtatcttaagcccctcaccctcacttgttgagaagttgattgtgagccatctcctgcttctcaattccacggccattgaataaagcctgcactgcttgacactcacttttggttttgtgtattggctttgtgatactgaataaggaaagactccatctttggtaagaccagctttgtcagtaacaacctgagtagtcatatagggcccaaggcttagttgtgtttacttggtttaatgctttgctgtctctgttgtaaaactcttgttaatttttgaacaagagccccaaattttcatttgcactgggccccacaaattatatagctggcgctttggggaggagaccaatccctttccaggtgactgacactactaactcttcatactgggtctggtctgattgctttttctaaaccagtggggcagaaaggaactcgtgtttctttgggccctgacctaggtactcctgaaagtatcgtgccatttaattcccgttttaccaaagaagagcaaaggctttgct

SEQ ID NO: 920893 - DNA, 781 bp, Homo sapiens
cttcatactgggtctggtctgattgctttttctaaaccagtggggcagaaaggaactcgtgtttctttgggccctgacctaggtactcctgaaagtatcgtgccatttaattcccgttttaccaaagaagagcaaaggctttgcttttccatgtcacttgcccaaggccacataactaataaatggagtctgagtcaggagtctactgccaaaaactgggccttccaacccttctgccataagtaaacttaaaatccatccaggagttacacatatcagtgcaggaagggagggttgattcttgcctaagacaataagatatgcttttttggtatacatcatttaaaagcaattgatttttaaaatcccaaaagggaaaaacctaccacataacttytgaagggatttctcagagtaggtctcccggtcacaacccttcccaatgtaattagtctgcagctctgtgacgatctggagggaagacacggctccatcgcacgtctccaggtggatgctggggaacaggggcatgctcccggagccaggctggtactcaatcctcttggtccagtctaaacaaacaaggaaaggatgaaaagtgaatcaggtgcagtcagttctgctggaacatttcttttagaaatgtgaatttgttccaacgaattatttgccccaacacatatattagatattagggaacagtttgagaataatggcagttttacatttgcttatgcagggtttcctccctgggaaatactaggcaaacacagaaaactgc

SEQ ID NO: 920894 - DNA, 766 bp, Homo sapiens
tcgaactgggtggagcccactgcagctcaaggaggcctgcctgccactgtagactccacctctgggggcagggcatagccaaacaaaaggcagcagaaacctctgcagacttaaatgtccctgtctgacagctttgaagagagtagtggttctcccagcacacagcttgagatctgagaacagacagactgcctcctcaagtgggtccctgagccccaagtagcctatctgggaggcaccccctagtaggggccgactgacacctcacacggctgggtacccctctgagacaaaacttccagaggaacaatcaggcagcaacatttgctgttcaccaatatccgctgttctgcagcctctgctgctgatacccaggaaaacagggtctggagtggacctctagcaaactccaacagacctgtggctgagggtcctcactgttagaaggaaaactaacagataggacatccgcaccaaaatcccatctgtacgtcaccaccatcaaagaccaaaggtagataaaaccacaaagatgggggaaaaacagagyacaaaaactggaaactctaaaaatcagagtgcctctcctcctccaaaggaacacagctcctcaccagcaatggaacaaagctggacggagaatgattttgatgagttcagaggagaaggcttcagacgatcaaactactctgagctaaaggaggaagttcgaacccatggcaaagaagttaaaaaccttgaaaaaaaataagacgaatggctaact

SEQ ID NO: 920895 - DNA, 756 bp, Homo sapiens
cagttggctcaaagagaacatcccccacagatgtaggctataacccccatgaaccttctggcttaccattctgtttatacacattcttttatttaccattgtagatggcaccaagggaaggaaagaaaatggagagaggaaaggaaaggggaaagagggagagtaggagggaggaaaatgggggaaggaaggaaaggaaaaaaaargagggaggaatgaaagggaggaagggcgggtgggcaaaaataaagggagaaaagaaagacggggatgtagaaaaaaagaaggaagaaaggaaccggatgaggaatggaaaggagggaggaaggaaggatctcagatatattcctgccttctctgtattctggcctgtatctcagagaattacatttcctaggctcctttgccctctgggtaggtttggacactgggagggctttgtaggaaactggagggtggaagaagaggcaaatccagagtcagtctctctctctctctctctctctctctctctctctctctctctctctctctctgtctttccctacactccccctcctatctccctcccagctttctctctccttcctatggcatctccagcagtgactgggtctcctctgtggctccagctcctaccagagaagtccccctccatggttgcagctcctaccaagtagccatcactatggttctagttccttctggatggttctgagttccagtgctaccacctcctcctcctgtttttccagt

SEQ ID NO: 920896 - DNA, 732 bp, Homo sapiens
caaaaggaataacatgtacatggtttaagaaatcctggtcattgctcctggcaggtgtagcctatggacttgtcttttttcgtttaccacatctggctttgaaaaaagaccagccagatgttcacaaagcagtgttcgccattcttcataaagtaaaacaatgtaccatggtcaaatgtgaatgcatgtgtaggtttaaaagcttatgctcttggtttggtaaatgtttaaaagatgttacatcctatatgattacaccaagttctgtaaataaagccccaagtggtacaggtacaggaagatgagacatctgcctgtcagccaacactgtttctccttcttgctcttctttcctctctctctgtcttctatgtcttggtcccacttttatttctagccctctttttaagctgcatcatgttgggctctttttaacaaacagaacacttgaaatccaatctcagctcagccattaagcctgtggatgaccttgggcaagtcactcaactgccaccacatygccccccttcacctcccaggcagaaagcaaaacactgcccatagcaccgctttcctgggtcactcgaatagaaaatatgcttgcgaggtctgctctgtgggggatttcagacgttgactcagtggttccgctgacatttattaagcacttttttgtgtgctgggcattattccaagatgaaggggacaatacccagagcatgtggtcatgag

SEQ ID NO: 920897 - DNA, 620 bp, Homo sapiens
tccaggtaaaacacacaactgtgtctctccagggtggcagcaagagagaagggatttgcagggattccataaagctattgacttaagatgttagttacattctgagagcagagacaggcacaatggttaaatgactgccattttgaggaaatattgactctgaccagtggattccgtggcttgtttcacaatgcctggacacaatggcctgttacttgcacgtgtgtgtgcacatgcacgcacatacacaagcaatcagttaataattaaagccttgcttatgtgtccgcattgaaaaatgcttccggctttcatttcatgtcatactgtctcccacttcaccctcaaatgcatgctttgaaggaggattatttctattttgtatgctctggaaattaactgatagatgtgtgcatttctatcccccgcttctccatttgtgtccctccttaccttttattcttgtctgctctctgctcctcccycctgattttcaccaacttgtttctttgctttaaatctctccctcatctgaggctgcttgtcttccctgccccactgccccctccacttccctttctccttcttctgtattcctttctgactcctttttctcctcg

SEQ ID NO: 920898 - DNA, 607 bp, Homo sapiens
tacttgaaagccaagctgcattattcagtacaccataaaatacttgttgtgaatttgttcatttgttaattgctgtattcattacttgatagactattgatgataccaaaagtgtaaaaaactggccaggcgcagtggctcacgcctgtaatcccagcacttagggaggccgaggcgggcggatcacgaggtcaggagatcaaggccatcctggctaacacggtgaaagcccatctctactaaaaatacaaaaaaattagctgggtgtggtggcgggcacctgtagtcccagctactcaggaggctgaggcaggagaatgggcatgaacccaggaggcagaacttgcagtgagctgagatcacgccaccgtactscaggctgggcgacagagccagactccgtctcaaaacaaaacaaaaaacaaaagtataaaaaagtatggggccaggcacggtggctcacgcctgtaatcccagcactttgggaggccaaggcaggtggatcacccgaggtcaggagtttgagaccagcctgaccaacatggtgaaaccccatctctactaaatataaaaaattagcagggtgtggcggcaggcacctgtaatc

SEQ ID NO: 920899 - DNA, 648 bp, Homo sapiens
aaacttctgcactcaagcaatcctcctgcctcagcctccccagtagctgggactacatgcatgttccaccatgcctaattttaaatttctttttttttttattttttgagacagagtatcgctctgtctcccaggcagtggtgcgatcttggctcactgcaacctctgcctcccaggctcaggcaattctctgcctcagcctcctgagtagctgggattacaagcgcataccactatgaccggctaatttttgtattttttgtagagaaggagtttcgccrtgttggccaggctgttctcaaactcctggccccaaacaatcctcctgccttggcctcctaagatattgggatcacaggtgtgagccaccgcgcctggccctgcccacgttatttaacctgcagcccttaccttccggacttgctatatattaatatttcgcttgcttatctgtttattacccggctccccatctagagtgtgagcaccacaagggcagagatttttattttatttcccatctaaggcacagttggtgctccaaaaaatagctgttgcccaggtcaatgaataacagctcccatttaccaggcgcctgggatgtgctgagccctttacatacctgcgacccctggtcctcatagaaac

SEQ ID NO: 920900 - DNA, 648 bp, Homo sapiens
aaacttctgcactcaagcaatcctcctgcctcagcctccccagtagctgggactacatgcatgttccaccatgcctaattttaaatttctttttttttttattttttgagacagagtatcgctctgtctcccaggcagtggtgcgatcttggctcactgcaacctctgcctcccaggctcaggcaattctctgcctcagcctcctgagtagctgggattacaagcgcataccactatgaccggctaatttttgtattttttgtagagaaggagtttcgccatgttggccaggctgttctcaaactcctggccccaaacaatcctcctgccttggcctcctaagatattgggatcacaggtgtgagccaccgcgcctggccctgcccacrttatttaacctgcagcccttaccttccggacttgctatatattaatatttcgcttgcttatctgtttattacccggctccccatctagagtgtgagcaccacaagggcagagatttttattttatttcccatctaaggcacagttggtgctccaaaaaatagctgttgcccaggtcaatgaataacagctcccatttaccaggcgcctgggatgtgctgagccctttacatacctgcgacccctggtcctcatagaaac

SEQ ID NO: 920901 - DNA, 592 bp, Homo sapiens
caccacagcttgccacagtgggcaggactgttcctagttttgagtggaaccaagagatttggggaaggattgcaaaagaagataaaattatcgagggctcccaggaggtgctggcctcatcactctcaagctggaggcagcatcatttcccgcccctgctgatgaagctatagtgactatagtcactgcaagtggaggcccaagatccttccccaaatcactgagatccaacygcaggtgaacaaaagggctccagttactctgcttatattacagatataagagaagtgaaacagcctgtctaggtcccatagtaggtaagtggaaaccacgtgttatgcgtcaacctcattcactcatttgtccactcaaaagacattcaatgaacaccaactatccgaaagccaccaggagggaagcaccatgtcctcagtgaccctacaattgagaccagtgctgtcccatagagggagatatcatgcaggccacacttacaatctaaaatgttctagcagccaccttcgaaagcaaaaagaggcaggtggaataaattctaatcatttatttcactcaatatatccaaaatatcatt

SEQ ID NO: 920902 - DNA, 512 bp, Homo sapiens
aattacattttattttggggccaaggaaacagcagagaaccaggaaaattataagacatcagagtacagtttttctaagaatatcaactccaaacttttttttttattttttatttttttgagacggagtctggctctttcgcccaggctggactgcagtggcgcartctccgcccactgcaagctccgcctcccgggctcacgccattctcctgcctcagcctccggagaagctgggactgtaggcgcccgccaccacgcccatagaattttttgtatttttagtggaggcggggtttcgccgtgttagccaggatggtctcgatctcctgaccccgttgttgttttattggttaggggtttgcaaggcactaaaataagaaatcttggacactaaaataaaaaactctgtacactcaaatcagattatagccaatttccccatattatagccagttttcccagattatagccaaaatttcccaattttcccaaccctttgtccagtgaaa

SEQ ID NO: 920903 - DNA, 658 bp, Homo sapiens
ccccacccaggaactgactcagcgcaagaagacagtttcaactccctgtgatttcatctctgaccaatcagcactcccagctcactggtttccccctgcccaccaagttgtccttaaaaactctgatccctgaatgctcrgggagacttatttgagtaataacaaaactctggtctcctgcacatctggctctgcattaattactttctctattgcaattcccctcttttgataaatcagctctgtctaggcagtgggcagggtgaacccattgggcacttacaatataatatacttctttgtctcttataacctgtttgttgtatagtgaaactatacccattaaacacttaatccccatttcccccacacttcagcttctggcaaacaccatgctttctgtcactataaatttatcactctaggaaactcatttaagaggaatcatacaatgtttgtcttttttgttactggcttatttcatgtcgcataatatcttcaagtttcatctgtgttgtaggaagtgtcaaaatttccttcatttttaagaccaagtaatattccactgatgcatatataccacattttatccattcatctgtcactggttacttcgttgctcccaccttttggcttttgtgactaatgctgctatgaa

SEQ ID NO: 920904 - DNA, 600 bp, Homo sapiens
gcccccacccaggaactgactcagcgcaagaagacagtttcaactccctgtgatttcatctctgaccaatcagcactcccagctcactggtttccccctgcccaccaagttgtccttaaaaactctgatccctgaatgctcagggagacttatttgagtaataacaaaactctggtctcctgcacatctggctctgcattaattactttctctattgcaattcccctcttttgataaatcagctctgtctaggcagtgggcagggtgaacccattgggcacttacaatataatatacttctttgtctcttataacctgtttgttgtatagtgaaactayacccattaaacacttaatccccatttcccccacacttcagcttctggcaaacaccatgctttctgtcactataaatttatcactctaggaaactcatttaagaggaatcatacaatgtttgtcttttttgttactggcttatttcatgtcgcataatatcttcaagtttcatctgtgttgtaggaagtgtcaaaatttccttcatttttaagaccaagtaatattccactgatgcatatataccacattttatccattcat

SEQ ID NO: 920905 - DNA, 635 bp, Homo sapiens
gcaattgtattgaacctgtataacaactttaggaaattaacatatttactgagtttgtttacaatccatgaatatattatgtctctccatttattttgatctttgatttcctgcatcagcactttctagttttcagcatacatgccccgttttgttgttacgcctagrtatttcatttttaaagtgattgtaaatggtatcatatttttattttgttgttcatgtgttcatcactggtaaatagaaatacaagtgatattattttatttgttatttatttaattatttatttttaaaagactttattttttagagcaggtataggttcatgacaaaattaagcgggaagtgcagagattttccatatatcctctgccctacatgtgcttaacctccctcattatgaacatcccccaccagattagtacatttagtacaactgatgaacttgcatggacacatcattatcactcagcttccatagtttacattagtgttcactcttggtgttgtacatttctacgtgtttgaccattgtataatgaccagtatccaccattatagtatcacacggaagagtttcactgcactaaaaatcttctgtgctctgcctgttccccccacactctcctata

SEQ ID NO: 920906 - DNA, 635 bp, Homo sapiens
gcaattgtattgaacctgtataacaactttaggaaattaacatatttactgagtttgtttacaatccatgaatatattatgtctctccatttattttgatctttgatttcctgcatcagcactttctagttttcagcatacatgccccgttttgttgttacgcctaggtatttcatttttaaagtgattgtaaatggtatcatatttttattttgttgttcatgtgttcatcactrgtaaatagaaatacaagtgatattattttatttgttatttatttaattatttatttttaaaagactttattttttagagcaggtataggttcatgacaaaattaagcgggaagtgcagagattttccatatatcctctgccctacatgtgcttaacctccctcattatgaacatcccccaccagattagtacatttagtacaactgatgaacttgcatggacacatcattatcactcagcttccatagtttacattagtgttcactcttggtgttgtacatttctacgtgtttgaccattgtataatgaccagtatccaccattatagtatcacacggaagagtttcactgcactaaaaatcttctgtgctctgcctgttccccccacactctcctata

SEQ ID NO: 920907 - DNA, 635 bp, Homo sapiens
gcaattgtattgaacctgtataacaactttaggaaattaacatatttactgagtttgtttacaatccatgaatatattatgtctctccatttattttgatctttgatttcctgcatcagcactttctagttttcagcatacatgccccgttttgttgttacgcctaggtatttcatttttaaagtgattgtaaatggtatcatatttttattttgttgttcatgtgttcatcactggtaaatagaaatacaagtgatattattttatttgttatttatttaattatttatttttaaaagactttattttttagagcaggtataggttcatgacaaaattaagygggaagtgcagagattttccatatatcctctgccctacatgtgcttaacctccctcattatgaacatcccccaccagattagtacatttagtacaactgatgaacttgcatggacacatcattatcactcagcttccatagtttacattagtgttcactcttggtgttgtacatttctacgtgtttgaccattgtataatgaccagtatccaccattatagtatcacacggaagagtttcactgcactaaaaatcttctgtgctctgcctgttccccccacactctcctata

SEQ ID NO: 920908 - DNA, 623 bp, Homo sapiens
tcagattgagggtgggtctgcctctcccagtccactgactcaaatattaatctcctttggcaacaccttcacagacacacccgagaacaatactttgcctccttcaatccattcaagttaacactcaatattaaccatcacactgcactactgttagagtaakttaaaaaaaaatcctgacaataccacgtgctggggaggatgaagagcaacaggagctgccatgcttttcttgtgggagtggaaaatgggatggccactctggaacacattttgatagttccatttaaagttaaacatctaggaccatatgactcagccattcaactcctgggtcacttcaaaataaagaaaaacttaaggccatagaaaaatctgtacgcaaatgttcataacacctttatttttaacagcaaaaaatggagacaacccaaagttctcccaacagaaaatagataaacaaactgtgctatatttatacaatgtaacaccactcagcaataaaaaggaatgaagtattgacatatgcaatatgtatctcaagggcgttatgcgaagtgaacaaagccagtcctaaagttacatactgcgtgattccctgtatattgcattcctgaagagac

SEQ ID NO: 920909 - DNA, 623 bp, Homo sapiens
tcagattgagggtgggtctgcctctcccagtccactgactcaaatattaatctcctttggcaacaccttcacagacacacccgagaacaatactttgcctccttcaatccattcaagttaacactcaatattaaccatcacactgcactactgttagagtaagttaaaaaaaaatcctgacaataccacgtgctggggaggatgaagagcaacaggagctgccatgcttttcttgtgggagtggaaaatgggatggccactctggaacacattttgatagttccatttaaagttaaacatctaggaccatatgactcagccattcaactcctgggtcacttcaaaataaagaaaaacttaaggccatagaaaaatctgtacgcaaatgttcataacacctttatttttaacagcamaaaatggagacaacccaaagttctcccaacagaaaatagataaacaaactgtgctatatttatacaatgtaacaccactcagcaataaaaaggaatgaagtattgacatatgcaatatgtatctcaagggcgttatgcgaagtgaacaaagccagtcctaaagttacatactgcgtgattccctgtatattgcattcctgaagagac

SEQ ID NO: 920910 - DNA, 608 bp, Homo sapiens
ccacatctatttactcttccttttacaacagatttctctatagcatgtgatgatgttatatagcattttacccacaatagaactttcaaaattggaaccaatcctctccaatcctgccacagctttatcaattatgtttattctaaattttttgttgtcaatttgaaactgttcatagcatctttaccagcagtttgtttcatctcaaaaaagcactttctttgttcatccgtaagaagcaattcctcatctatttacgtgtgatcatgagatttcaacaattcagtcaaatcttctagctctagttcccttgccatttttaccacatccaygattacttcctccactgccgacttgaaagtctcaaaattgtctatgagggttggaatcaacttatttcaaactcctattcatacttatattttgacctccattcacaaatcataaatgttcttagtgccatttataaaaatgaattctttctagaaggttttcaatatactttgccttgatctatcagtggattctctctctatagaagatatagtcttaaaattatatttcttaaataataagacttgaaagtcttgatcaatgggctgcagagc

SEQ ID NO: 920911 - DNA, 531 bp, Homo sapiens
acacttcaggatattatccaggagaacttccccaacctagcaaggcaggccaacattcaaattcaggaaatatagagagcaccgctaagatactccttgagaagaataacccccagacacataattgtcagattcactaaggttgaactgaaggaaaaaatgttaagggcaaccagagagaaaggtcaggttacccataaaggggagcccattagaawaacagcagatctctctgtagaaaccctgcaagctagaagagagtgggggccaaaatacaacattcttgaagaaaagaattttcaacccagaatttcatatccagccaaactcagcttcaaacacaaaggagaaataaaatcttcacagacaagcaactgctgagggattttgttgccaccaggcctagcttacaggatctcctgaaagaaaccctaaatatggaaaggaaaaactggtaccagccactgcaaaaatgtaccaaattgtaaagaccatcaacactatgaagaagctacatcaactaatgtgcaa

SEQ ID NO: 920912 - DNA, 546 bp, Homo sapiens
caatttaacaaaagacttaactattctaaatatatatgcaccaacgcaggagcacccagattgataaaacaagttcttcaagacctacaaagagacttagataacaacacaataatagcgggagacttcaacaccccactgacagtgttagacagatcatcaaagcagaaaactgacaaagatattcaggacctaaacacgatactttaccagatgggcctaatgggcatttatagaacattccacccagcaacaactgaatatacattcttctcatctgcacatggcayatgctctaaaattaagtatatgcttagccataaaacaattcttgacaaattcaaagaaaccaaaaacatatcaaccacactcttgaaccacagcacaataaaaataagaatcaatattaagagggtctctcagaactatacaattatgtggagattaaacaacctactcctgaatgacttggataaacaatgaaattaaggcagaaatcaagaaattcttttaaacagtgaaattaaggcagaaatcagattcttt

SEQ ID NO: 920913 - DNA, 603 bp, Homo sapiens
actccagcctatgatagccggtgtccacacacaccactgagtggcctgaggtcaggaacacccagcctggctttgccttcctcaatgcctaagcaagttgtctgggaacccagagacagccttgtgccatccaccatgactggtacctaagcaaccctcccagaagcctgatgatgggcctacccaatctgccactgccatcacaactggcacctcctgcatgtgccacctgtgggtctgaagactggctcattcagcccttgcagccaccaccaacaccagtgcagactgcttgggagccagagggttgtcctgcagttgctacagccatcacccacaccacacccactgcccagaagcctgaggacccacacaccagcccagtctactatggccactactgacacccaagcaaactgcctgaargccaaagaatcaacccaactagactcattaccatcagtgccaatgtacacagccatggggcccaaggacaggaatgctaggcccaccaccaccactggggccaaggactggcccacttgatattcttgtctccagcacaacctcatcaccaccttcactaacaaatgcaccctaagc

SEQ ID NO: 920914 - DNA, 602 bp, Homo sapiens
aagaacattcatgcttcatgggaacaagtgaaaatatcaacattaatrtgagtttggaagaagttgattccaaccctaatggatgacttcgagaggttcaagacttcagtggaggaagtcactgtaggtgacttaggaggaaatagcaaaataactagaattagcagtggagcctgaagatgtgactaaattgctacaatctcatgataaaacttgaacagacgaggagttatttcatatggatgagcaaagagtggtttcttgagatagcatctactcttgatgaagacaacgtgaacattgttgaaatgacaacaaacgatttagaagattaaataaactgagttgaaaaagcggtggggtttgagaggattgactctaattttgaaagaagttctaggctggtttcagtgattcatgtctaatccgagcactttgggaggctggggcaggatgatcgcttgaggccaggcattggagattagcttgggcaacatagtgagaccctgttgctattaaatcaaacagcaccccatgctatagagaaatctttcatgaagagtcaatcaatatggcaaacttcattgctgtcttattttgtg

SEQ ID NO: 920915 - DNA, 590 bp, Homo sapiens
tctgggtgagtcagtgagtgagtggtgagtgaacgtgaaggcctaggacattgctgtatgctacagtaggctttgtaaacactgtagacttaggctgcactgtttatttctaaaagttattcttccttcaataataaattacccttagcctactgtaactttagtttataaactttaaaattttaaaaaactttttgacttttttgtaataacacttagcttaaaacacaaatatattttacagctctacaaaatactttctttgtttcttattctattaatataagctttttctattctttaattctttaattttaattttgacttcttaaaccttattattaaaaacaaagatacaaatcacacattagcttaggcttatacaagctcagrataatcaacatcaccgtcttccacctccacgtcttgtcccattggaaggtctttagaagcaataacatgcattgagctgtcatctcctatgataacaatgcctccttctggaatacctctgaaaggaccaccacaaacacatgagtaatgtactgccctacaatgttatgagagctatgatgttactaggtgaccag

SEQ ID NO: 920916 - DNA, 747 bp, Homo sapiens
acagtgggtgcagcccatggagggcaagccaaagcagagtggggtgttgcctcacccgggaagcacaaggggtcaggggatttccctttcttagctaagagaagctgtgatggactgtacctggaaaaatgggacactcccacmcaaatactgcacttttcccatggtcttagcaaccggcagaccaggagattctctcccgtgcctgactggacgggtcccacacccacggagccttgctcactgctagtgcagcagtctgagatcgacctgcaaggctgcagcctggcggggggaggggcttctgtcattgctgaggcttgagtaggtaaacaaagtggctgggacgctcaaactgggcggagctcagcaaggcctactgcctctataaactccacctctgagggcagggcatagctgaacaaaaggcagcagaaacttttatagacttaaccgtccctgtctgacagctctgaagagagcagtggttctcccaccatggtgtttgagctctgagaacagacagattgcctcctcaagtgggtccctgacccctgtgtagcctaactgggagacacctcccagtaggggccgactgacacctcatacaggcaggtgcccctctggaatgaagcttccagaggaagaatcaggcagcaatatttgctgttctgcaatacttcctgttctgcagcttctgctggtgatacccaggcaaacagggtctggagtggacctccagaaaac

SEQ ID NO: 920917 - DNA, 744 bp, Homo sapiens
tatgggcagtgggctcggggctacagtttcagcagggagaatgaaggtttcttgggaggaataatacgaaaggcatcagagagaagagaagggcaggctggggtaggcctaggaagcagcagggcaggcttccccgtccctctgtgagccaagtctttgtttgatgatggcttttaatacccaaggcaaaacttctcttctccggcctacacatccctaatccttcggttgatgctccctctctgctcatttcctacaagcacccctcacaacccctcacacatgcgcacacacacgcacgcacacacacatgcactggcccgcgaagttccgcgtcaaaagccccttactgccaccctctagaggagtcgagctccagtgataatgttcctttgattcttcatggcctccaaccccgccccctaggttttgatttcaggactggggcaatttgctgaagacccggagttcacagaggtctcaacccagaagctggcctccgcctgtgacagcacaggagacgaggtggagtgcgaggcccacagcgtcctcagcggggcgccccgcggagccctgcagasgccctcttgcctttagtgaactgcggggacctggccaatgccggcaggggccagcgcagaaaagcctgggagatgcgcgtccagggccgcgagtgcagggaagctgcgggaccgcagagtccgctcggcagccggtagtcagggcgccggggcgttaggcttc

SEQ ID NO: 920918 - DNA, 586 bp, Homo sapiens
atgctaatccccttcctctctcagggtcttcaaactggttgctggaattggggcctgaaaaacatcttaagtgatccttcaacaaaagccttatgattctaatgatagagatcctgtatgtgggaacaatggggatgcaagtcaattctttttttttttgagatggagtcttgctctgttgcccaggctggagggcagtggcttgatcttgtctgactgcaacctcygcctctgggttcaagagattctcctgcctcagcctcctgagtagctgggattacaggtgtgcaccaccacacccagctaatttttgtatttttagtagagacggggtttcaccgtgatggccaggctggtctcgaactcctgatctcaggtgatctgcctgccttggcctcccaaagtgctgggattataggtatgagccaccgcgcctggctgcaagtcaattcttaaacagtcttatgatcctaatgtcagaaatctcgtctacaggaacaaggggatacaattggtcaggatctagtgctgcatgactttcagcaacaaggaagtgagccaaagtgcagcctgattaatgcttaat

SEQ ID NO: 920919 - DNA, 493 bp, Homo sapiens
aatagtttggctgttagttacccccaaaattaaacataaaattaccatatgatccagcaattctactcctacgtatacatccaggagaactctgaaagcagggactcaactggatacttgtacagcaatgttcatagcaacattattcacaatagccaaaagctagaaacaacgatagatgaacgtatacacaaaatgtggtataaacatacaatgaaatataattcarccataaaaaggaatggaattctgatacatgttataacatggatacatcttgaaaacatgctaagtaaaatgagccagacacaaaaggacaaagactatgtgactgcacttatatgaggtgcctagaataggtaaattcctagagacaaaaagtacagtagaggttaccaggggctggaggtaggggtaatggggagttattgctcaatgagtacagagtttctacttggaatgatgacaaaattctggaaatagatagtgatga

SEQ ID NO: 920920 - DNA, 582 bp, Homo sapiens
aggatggaacagaaaggctatgacctaatgctactagactaagtggcgaaaaccagcaaggactgtctgtctagattcttcttggcctctctgagcagcgttccttccttctgggtgtggggcaggaccttctctggaatgaggatcttatgacctgcaatcaagcaggtcagataatttatttaagtctagtttttacacagaaaggmgggaaggggttagagtactattttcaggttttatggccggctttggtgaaaagggggtctgttttctttttttttattattatactttaagttctagggtacatgtgcacaacgtgcaggtttgttacatatgtatacatgtgccatgttggtgtgctgtacccattaacttgtcgtttacattaggtatatctcctaatgctgtccctcccccctctccccaccccacaacaggccccggtgtgtgatgttccccttcctgtgtccaagtgttctccaaaagcaatggcaacaaaagccaaaactgacaaatgggttctgttttctacaacccactttggggaagaaggattctaatgtctacagcaagcct

SEQ ID NO: 920921 - DNA, 582 bp, Homo sapiens
aggatggaacagaaaggctatgacctaatgctactagactaagtggcgaaaaccagcaaggactgtctgtctagattcttcttggcctctctgagcagcgttccttccttctgggtgtggggcaggaccttctctggaatgaggatcttatgacctgcaatcaagcaggtcagataatttatttaagtctagtttttacacagaaaggagggaaggggttagagtactattttcaggttttatggccggctttggkgaaaagggggtctgttttctttttttttattattatactttaagttctagggtacatgtgcacaacgtgcaggtttgttacatatgtatacatgtgccatgttggtgtgctgtacccattaacttgtcgtttacattaggtatatctcctaatgctgtccctcccccctctccccaccccacaacaggccccggtgtgtgatgttccccttcctgtgtccaagtgttctccaaaagcaatggcaacaaaagccaaaactgacaaatgggttctgttttctacaacccactttggggaagaaggattctaatgtctacagcaagcct

SEQ ID NO: 920922 - DNA, 630 bp, Homo sapiens
tggtgtgtgggggagaaaactccacgcacacggtcacagaatttttctgtgttgatgattattgttgtgtgagcagaggaaaaacatcgttagagagtttccctatacactacaacactcagttccttctaaaataccatttttttaaattgtttttggctctgtctgccctgactatagtaagccctayagggcaaagatctttgtctgtctgttctctcatacatcccaagcacccagattggtgtctgccacatagtaggtcctcagttaatatttgttgaatgtacaatacctttaatctctcagacactctgctagggactgaggacaagatccctgctctcttggagctgatcttctagttggggagaggcaaacatgtaagaaggcaagtaattgcaaattctaatagaccaggaagatcaaagtggatgaagcgagcagagcatgggatgggaggagagaggagagaagctgctctgaaggggtgatgaattagggtaaacctaagagatgagaaggatgagagggtgaaaagcatgccaggcacagggagctgcatgtccaactgttctcaggggagaaagtttggccttctctaggaacagacggagagaaggcaaggga

SEQ ID NO: 920923 - DNA, 618 bp, Homo sapiens
agcttggagatgaaaccctgggagggtaaggtgctatcttccaggatgcagtatattccataaatcaacagttatgcacctgtaacgccagcattttgggaggccaaggcgggtggatcatttgaagtcaggtgtttgaaaccagcctgaccaacataccgaaaccccatctctactaaaaatacaaaattagccrggcatggtggtggtgcccgtaatcccactattcaggaggctgaggcaggagaattgcttgaacccaggaggcagaggttgcagtgagctgagatcaagccgctgcatccagcctgggcgacagagtggactccatcccatacacacaatcataaaacccaacagttatgatatggtgctgtgtgcccagtgggcagaacacacaggtcaaagaaacaaggcatgagagaaggagtggccccactcgccatcattcccagtaacccacctgaggaatatctcatctctacagcttaggctctgaggagctagaaatcccgattcacaaggaagaattcttccatttaggaacacaatggaaatcctagtcaacatatggttacgactgctgctcagtcactttggggtcctcgtgccaagacc

SEQ ID NO: 920924 - DNA, 621 bp, Homo sapiens
ctctctgtattcaggagatgggagagggttgcacttactgccttcttattatagggcagggtcatgtgactagtcctatccagtgagttgcgagtggaaataatagatgtcacctccgggctggaacgttgcattgctgatgcaagatgctccagaactctttccctctgtcatgggccatggcaaccaccaatgttgaatcttgcaagcagggacttggagcagatgtcccagctgaatggagcataamcaagaagtaaaccctggttgttataagtcactgacttttggggattatttgttattgcagcataatgtgacctatcctacctggtgcagttactctgggtggtgtgtgaaaggtgggtgttaagggcaagaatggaagcaaggagagcttggaggaggttatttcattcctgtgggtgagagactgagagtaatcgcctgatgccgttactctgggtgcttgggcaagggtagtagtggtggaggtggtgagaaagaaatggattcaattacattttggagctaaagaggccatcacttgataatgaatataaggaataagagaatgaaaaatctacgctaagggtccctgtcactcaccactttaagagc

SEQ ID NO: 920925 - DNA, 736 bp, Homo sapiens
gttggagcttgctggaggtgcactccagaccctgtttgcctgggtatcaccagtggacgcagcaaaacagcaaatattgcagaacagcaaatgttgccgcctgatcctctggaagcttcatctcagaggggcacctggctgtatgaggtgtcagttggcccctacagggaggtgtctcccagttaggctactcgggggtcagggacacacttgaggtggcagtctgtccattctcttatctcaaactccatgctgggagaaccgctactctcttcaaagctgtcagacagggatgtttaagtctgcagaagtttctgctgccttttgttcagctatgccctgcccccagaggtggagtctayagaggcaggcaggcctccttgagctgtggtgggctacacccagtttgagcttctcagccactttgtttacccactcaaacctcagcaatggcagacgcccctctcctagccttgctgcccccttgcagtttgacctcttactgctatgctagcagtgagcaaggctccatgggcattgaaccctctgagccaggtgcgggatataatctcctggtgtgccatttgctaagaccattggaaaatcgcagtatgagggtgggcgtgccctgattttccaggtaccatctgccacggcttcccttggctaggaaagggaatttgctgaccccttgcacttcccaggtgaggtgatgccctgccctgctttggctcac

SEQ ID NO: 920926 - DNA, 594 bp, Homo sapiens
gacttaacgtccttgtctgacagctctgaagagaacagtggttctcccagcacagtgtttgacctctgagaacagagagactgcctcttcaagtgggtccctgacccccaggtagcctaaatgggagacacctccctgtaggggctgacagacacctcatataggcagctgactctctgggacaaagcttccagaggaaggatcaggcagcaatatttgcggttcwgcaatatttgctgttctgcagcctctgctggtgatacccaggcaaacagcatctggagtggaactccagcaaactccaaagacctgcagctgagggatctgactgttagaaggaaaactaacaaacagaaaggaatagcattgacgtcaacaaaaaggtcatctacaccataaccccatctgtaggtcaccaacatcaaagaccaaaggtagataaaccacaaagatggggagaaaccagagcagaaaagctgaaaattctaaatatcagagcacctcttctcctccaaaggatcgcagctccttgccaacaacaaaacaaagctggacagacaatgactttgatgagttgacagaagtaggcctcag

SEQ ID NO: 920927 - DNA, 646 bp, Homo sapiens
accaagaactccaagagtatcccttccaagctacccacctattctctgaatgagagaaatctccttcaaatcttcctgactgaggagacatctcccaaaacaaaactcttcctaataattagggagagctgaccaagaacccagaaggagccaaactgagacagacatcccacagtggggctacggaagaactcaggccccagaataagacaaaccaatcaggagaaggaaggaggcattggcagcacctacaatactcaccaaaccaaacactatataatggagctaaagctatggacactccatgactgggctacacacagagaccctgtgatatgcctatagttatatctccccaggactatttccttattgcaattaaatccatgcacattggctcagcagtgccccaccagtagagagagtaccagagtyagcccctcatccaacagaactaagcagccacttgggctggtctttggatctgttgtgggagggggctactgaaccatggggcaggtagccacaagggcaatcccagacgagcccccaaatttgtaaacacccaatgggttcactttgcccactgcctagacagagccagtttatcaagacagggaaattgcaatggagaaagagtaattta

SEQ ID NO: 920928 - DNA, 596 bp, Homo sapiens
tgatatcttctgcctccatctttcactttaaggacccctctgattacattgggcgcatttggataatccaggacaatctccttgttttaaagtcagatgactagcaaccttaattcccttttgccatgtcaccaaacatattcacaaattctgaggattatgtcctgggcatctttggtgagccattgtyctgcctactacattcagtaaataagcattattatcgctattcaaattaagttaatttcacctttctaagctgcccaaagccttggtaagataggcaaggtcattaaaatatggttcctgtagtactcagtaatgtcagctcaggtccttatttgtttttctcagtaaaaccaacagtagccagctgttatcttgtggctttatatagacaggctgatgacagggaacctgcttggccctgaaaatttctacaaagccagtgatcacccactcaaagccaataccagctcaggggagctcagagagttgagaaggttaagaatcaacatctaattttaaaatcagatggccaggcattgtggcttattcttgtaatcccaacactttgggaggccaaagtgggcagt

SEQ ID NO: 920929 - DNA, 596 bp, Homo sapiens
tgatatcttctgcctccatctttcactttaaggacccctctgattacattgggcgcatttggataatccaggacaatctccttgttttaaagtcagatgactagcaaccttaattcccttttgccatgtcaccaaacatattcacaaattctgaggattatgtcctgggcatctttggtgagccattgtcctgcctactacattcagtaaataagcattattatcgctattcaaattaagttaatttcacctttctaagctgcccaaagccttggtmagataggcaaggtcattaaaatatggttcctgtagtactcagtaatgtcagctcaggtccttatttgtttttctcagtaaaaccaacagtagccagctgttatcttgtggctttatatagacaggctgatgacagggaacctgcttggccctgaaaatttctacaaagccagtgatcacccactcaaagccaataccagctcaggggagctcagagagttgagaaggttaagaatcaacatctaattttaaaatcagatggccaggcattgtggcttattcttgtaatcccaacactttgggaggccaaagtgggcagt

SEQ ID NO: 920930 - DNA, 588 bp, Homo sapiens
gatctaaatgtgaaatgaaaaacaataaagctgctaggtgaggagaatgtcttcctgaccctgaagtagacagaaatcaaagcactgacctaaacggagaggttgataacttagactacattacaattaggaacttctgtgcatcaaaatacatcattaagagaatgtgggccaggtgcggtgcctcaygcctataatctcagcattttgggaggctgaggcaggaggattgcttggggtcaggagttcgagaccagcctgggaaacatagcaagatccccatctctatcaaaaaaaaaaaaaaaagagagagagagagacaatgtgttctatgtataccaacataccatgttgtacacattaaatgtatgcaataaaagactgagtgtgtgttttaagcacttggattatattattcaatcctttcaaacaagaatatcccaaataagtatcctcgttttacagatgaggaattgaggcccagagaggttaatgaacttgtcctgggccacacagcttacaagtggagaacttaggtgtgagctcaggtctgtgtgagtctagagactgagctcccaactcctggca

SEQ ID NO: 920931 - DNA, 727 bp, Homo sapiens
actgtgttgcccaggctggagtgcagtggctattcacaggcgtgatcccactgctgatcagcatgggagttttgacctgctccatttccaacctggaccagttcacctctccttaggcaacctggtggtcccctgctcccaggaggtcaccatactgatgccgaacttagtgcggacacccaatagacacagygcattgcagctcagaactcctgggctctagcagtcctccggcctcagtatccccagtagctgtgaccacaggcacatgccatggtgcccggcaacatatcgacatatggcttgtttctattgtcctcttccctggaaaatactccataaaagttgggattttgtctgtttcactcatgctggatccaaagtgcctacaacagtgcctgacgccacgtagatgtctaacaaatatttatggaatgagaagttaacagaaaaaaaaaagtggaagcgggaggcagaagagtgatgtaatgtgagaaaacctcacaccactgttgctagaattgcagatggaagaaggggccccgagccaaggatacaggcagcctgtaaaagctgaagaggacaagaaaatggattctccttcaaagtctccagaaaagaattccttggtttcagcccactaagacctgtgccggactcctgatccccagaactggaagataataaatctgtgttgtttttacccactcagtttgtggtcctttgt

SEQ ID NO: 920932 - DNA, 568 bp, Homo sapiens
tgacgctgcccaatcgcctcagaagccccctggaccatcacagacgccaagcttcaggtaactctcacagtggagggtaagtccatacccttcttaatcaatatggagactacccactccaccttaccttattttcaagggcctgtttcccttgcctccataactgttgtgggtattgacggccaggcttctaaacctcttaaaactccccaacgctggtgccagcttggacaacatacttttaagcactcctttttagttakccccacctgcccagctcccttttttggttgagatattttaactaaattatctgcttttctgactattcctgggctacagccacacctcattgccaccttttctcccagttcaaagcctccttcacatcctctccttgtatctccccaccttaatccacaagtataggatacctctactccctccttggcaacaaatgatgcaccccttatcatcccattaaaacctaatcacctttaccccactcaacaccaatgtcccatcccacagcatgctttaaaaggattaaagccagttatcactcacc

SEQ ID NO: 920933 - DNA, 643 bp, Homo sapiens
cgagaccagcctggccaacatggtgaaactccatctctactaaaaatacaaaaagtagccgggtgtggtggcgcatgcctgtaatcccagctacttgggaggctgaggcagatgaattgcttgaacccgagaagcgtaagttgcagtgagctgagatcatgccactgaactccagcctgggcaacagagcaagactctgtctcaaaaaaaaaaaaaaaaatcatatgttgaagtcctgactccactgcaccmcccaatcccactgccagttacctcagaatatgactgtatttggagatggggcctttaaagaggtaactgagttaaaatgaggtcatcagggtaggccctaatctaatgtgattggtgtccttataagaagaggggattaggacacagatacacatgggggaaggccctatgaaggcatagggagaagatggccattacaagtcaaggaggaagccttacaagaaaccaaccctgctgaaaccttgttctcagacttctggccaccaaaatagtgagagaaaaaaattctgctgtgtaagccactcagtctgtggtactttgttatggcagccctagcaaatgaatatagcacccaaagatgaaactgcctcatgtcgagtttttttctgtc

SEQ ID NO: 920934 - DNA, 738 bp, Homo sapiens
ttctaaagttcatatgttggccgggcgcggtggctcacgcctgtaatcccagcactttgggaggccgaggtgggtggatcacctgagtcaggagttcgagaccagcctggccaacatggtgaaactccatctctactaaaaatacaaaaagtagccgggtgtggtggcgcatgcctgtaatcccagctacttgggaggctgaggcagatgaattgcttgaacccgagaagcgtaagttgcagtgagctgagatcatgccactgaactccagcctgggcaacagagcaagactctgtctcaaaaaaaaaaaaaaaaatcatatgttgaagtcctgactccactgcaccccccaatcccactgccagttacctcagaatatgactgtatttggagatggggcctttaaagaggtaactgagttaaaatgaggtcatcagggtaggccctaatctaatgtgattggtgtccttataaraagaggggattaggacacagatacacatgggggaaggccctatgaaggcatagggagaagatggccattacaagtcaaggaggaagccttacaagaaaccaaccctgctgaaaccttgttctcagacttctggccaccaaaatagtgagagaaaaaaattctgctgtgtaagccactcagtctgtggtactttgttatggcagccctagcaaatgaatatagcacccaaagatgaaactgcctcatgtcgagtttttttctgt

SEQ ID NO: 920935 - DNA, 629 bp, Homo sapiens
tctgtgtgtcttctctaagagtagccttcctgttccgaggtgactaaagctgtttctcatcgctcacttccagtttctaccaaaacaatctttctttttctttcctctgtccttccctgcctgcttgccttttttccttctcctctcttcctcattattctctggaatgaacaagtcagaaagttatttctcttttgccaactacccattgacttgtagcatttaaacctacatttaaaaaatgttatttataagttgtttgtataagaatgtactcaggcatctgccaggatttagaaaattttattgcttcttttattacaaggacaagttagagaagatttggaaggggaaatagaggttgtttttgttttttgtttttktttagacaaggtctcactctgtcaccctcgactagagtacagtggcaggatctccactcactgcaacctccaccttccagggtaagtgattctcctgcctcagcctcctgagtagctgggattacaggcacgtgccattgccacccagctaatttttgtattttttagtagagatggagtttcactgtgttggccaggctggtctcgaactgctgacctcaaatgatctgcctgccttggcctccc

SEQ ID NO: 920936 - DNA, 639 bp, Homo sapiens
agctggaaagaaccatgtgctgccagtctgagctttttattttgttttacttagaaagatagagacagggtcttgccatgttgcccaggctggtctcgaactcctgggctcaagtgatcctcctgcctcggccttccaaagggctggggttacaggcgtgtgccaccgcactcagccgcagccagtctgttttcaaagatggtctttgggttaatgacaattctctctctgcttactctccaggcagtgtggctttctgaatccaaggaggctgggcatagggagatgggatttgtttgcccggtttggactcagcattttttgtactcgatttaatagactcataaaatgtcaaaggtttaagtgagcktagagttgatctggcccaaacctggctgatcagaatctccaggggaagttttattgaaatgccagatctctgcgttctgagatcctgatttagtaactccagggttggaacctgagttttttgtttttttgtgtgtgtgtgtgaaggcaaggtcttactctgttgctctggctggagtgcagtggtgtgatcacagctcactgcagccttgaattcctgggcctaagcaaccctcttgcctcagccttccaagtagctgggactccggg

SEQ ID NO: 920937 - DNA, 740 bp, Homo sapiens
aagaaccatgtgctgccagtctgagctttttattttgttttacttagaaagatagagacagggtcttgccatgttgcccaggctggtctcgaactcctgggctcaagtgatcctcctgcctcggccttccaaagggctggggttacaggcgtgtgccaccgcactcagccgcagccagtctgttttcaaagatggtctttgggttaatgacaattctctctctgcttactctccaggcagtgtggctttctgaatccaaggaggctgggcatagggagatgggatttgtttgcccggtttggactcagcattttttgtactcgatttaatagactcataaaatgtcaaaggtttaagtgagcttagagttgatctggcccaaacctggctgatcagaatctccaggggaagttttattgaaatgccagatctctgcgttctgagatcctgatttagtaactccagggttggaacctgagttttttgtttttktgtgtgtgtgtgtgaaggcaaggtcttactctgttgctctggctggagtgcagtggtgtgatcacagctcactgcagccttgaattcctgggcctaagcaaccctcttgcctcagccttccaagtagctgggactccgggtgtacaccactgtgcccggctaattttaaatgtttttgtagagatgggatctcactatgttgcccaggccagtctcaaactcttgagctcaagtgatcctcctgcctt

SEQ ID NO: 920938 - DNA, 731 bp, Homo sapiens
ccagggttggaacctgagttttttgtttttttgtgtgtgtgtgtgaaggcaaggtcttactctgttgctctggctggagtgcagtggtgtgatcacagctcactgcagccttgaattcctgggcctaagcaaccctcttgcctcagccttccaagtagctgggactccgggtgtacaccactgtgcccggctaattttaaatgtttttgtagagatgggatctcactatgttgcccaggccagtctcaaactcttgagctcaagtgatcctcctgccttagcctcctaaagtgctgggattacaggcatgagccaccgtgcctggctgatactagcattcttttttattttttattwtttttttaagatagagtcttgctctgttgcccaggctggagtgcagtggcacagtctcagctcagtgcaacctccgcctcccaggttcaagcaattctcctgcctcagcctcccaagtagctgggataacaggcacatgccaccacgcctgcgcttgatcgtgggaggcagaggttgcattattgtgccactccattctagcctgggcaacagagcgagactctgtcttccaaacaaagcggaaaaagattatctgcgagaatgactgcattggccccttgggtgggagggcttctccagggcaaggtgaggggatgcccagtgctgggagtgctgcctggagaggagtcagttccagtggcgggggccctggg

SEQ ID NO: 920939 - DNA, 635 bp, Homo sapiens
ccttggcagggcggctccgtccctgggaggtgagggctgctgctgctggctgctgtgccagcccagggtccgttctctgttgctgctgggtcccggctggcctgccgcctgcccacagcttgcttgggctgccaggcctttgtcttcgtgagttcctggcttcgcccctgatttgggtggtggatacagatgactgacacagagcaatgctttctggacacacagggcactccctcctcctcttggagaacggagggtgtgtgccaggacagaggctgtgcctggcatgtgggagagagygagccacaggagggtaagggctagtcctcaggccacatggagagcagcatgagctgtttttttctagattctgtaagaactcttcctgctgagtgaaaaactctctcctactgagaaagaaaaggctggggagagttgtctcctccctggatagttcctgcactgtcctcagaagctggggagatggaagatgggagaaggagagttggttttgcttaagactggggagctgagtcttaggagaatccaccaaatcccatggttttgctgaggacctgctggctggcaggagattggacaagatgaccctttggtcaactgaacctggcatctgc

SEQ ID NO: 920940 - DNA, 756 bp, Homo sapiens
tgctctctgctggctcctctagtgtgtttgtcaaggtgcctggcatacagcagaactgcgcgagtgtgtggttgagcccaggtctgcgtgtttctgagcccatgcaaggtatttgaaagttcctctgagctcttctttttgccctgtggcagcccccttgccttccctggaaagtactgcttgttggtggggggaggtctcgggttgacaacaccctaccgccagctcgctagcccctttaggccccgaagaaactattgagtcatgcattttgcttgggttttgatgattcgtgattcakgcttgtgaggaaggcaagggagtgactcatgctgatttaataagcttaggaatagtcctgagaagtggctgataaagtgccggctggcagcccactcccccgtggctgccagcgccaagtgctcagaaatcaccaggttaaacaagtctgcagaaaattcaatcttcccggcatgattttccttatttgagctaatagcatgaggcgcctttctcctggcactgcgaagtgcaccggtggccttgccgtcttccctgggggcgtgggggagaaggagagcaaatgccttacgtttagcggatgcgctaggaacggctaggacctcccagggtttgccttgtgcccatggaaccagcagttccgccccaagggaagccagccgtgtgtcctagtgccggaatgatggggtaatgccagtgagccgccccttctccacagggtactgagaacgaggc

SEQ ID NO: 920941 - DNA, 647 bp, Homo sapiens
caacctgctggtggctctaccaccctcagctctggagggcagcagccttgttctactaaggagtagcccagtagggactctatgggggctccaaccccacatttccccttggcactgccctagtagagtctctctgtgggggctctgcccctgtggcaggcttctgcctgggcatgcagactttctgatacatcttccgaaatctaggtggaaactgccagaatgygctcttgcattctgtgtgtctacagacttaacaccacatggaagctgccagggcctctgattggcagcctgagccatgcctggggccttttgagccctgactggggcctgaacagcctgaatttggattgggctcctgaaaccattctgtccttctaggcctctaggcctttttcccattgtcttgctaatttcttctgcaagtggttgctcttcagcacctttaaatttctctcctaaaaatgcttgttccttccctaccacaggactgggttgcaaatttttcagacttttacagtctgctttccttttaattttaagttcaaaccttagatcagcccattgctcccacatttgattgtggactgtgagatttagaacaaagcaatgatatttgcttttactgctcctattcagatgtt

SEQ ID NO: 920942 - DNA, 647 bp, Homo sapiens
caacctgctggtggctctaccaccctcagctctggagggcagcagccttgttctactaaggagtagcccagtagggactctatgggggctccaaccccacatttccccttggcactgccctagtagagtctctctgtgggggctctgcccctgtggcaggcttctgcctgggcatgcagactttctgatacatcttccgaaatctaggtggaaactgccagaatgtgctcytgcattctgtgtgtctacagacttaacaccacatggaagctgccagggcctctgattggcagcctgagccatgcctggggccttttgagccctgactggggcctgaacagcctgaatttggattgggctcctgaaaccattctgtccttctaggcctctaggcctttttcccattgtcttgctaatttcttctgcaagtggttgctcttcagcacctttaaatttctctcctaaaaatgcttgttccttccctaccacaggactgggttgcaaatttttcagacttttacagtctgctttccttttaattttaagttcaaaccttagatcagcccattgctcccacatttgattgtggactgtgagatttagaacaaagcaatgatatttgcttttactgctcctattcagatgtt

SEQ ID NO: 920943 - DNA, 647 bp, Homo sapiens
caacctgctggtggctctaccaccctcagctctggagggcagcagccttgttctactaaggagtagcccagtagggactctatgggggctccaaccccacatttccccttggcactgccctagtagagtctctctgtgggggctctgcccctgtggcaggcttctgcctgggcatgcagactttctgatacatcttccgaaatctaggtggaaactgccagaatgtgctcttgcattctgtgtgtctacagacttaacaccacatggaagctgccagggcctctgattggcagcctgagccatgcctggggccttttgagccctgactggggcctgaacagcctgaatttggattgggctcctgaaaccattctgtccttctaggcctctaggcctttttcccattgtcttgctaatttcttctgcaagtggttgctcttcagcmcctttaaatttctctcctaaaaatgcttgttccttccctaccacaggactgggttgcaaatttttcagacttttacagtctgctttccttttaattttaagttcaaaccttagatcagcccattgctcccacatttgattgtggactgtgagatttagaacaaagcaatgatatttgcttttactgctcctattcagatgtt

SEQ ID NO: 920944 - DNA, 706 bp, Homo sapiens
gtgcagaaaaggaacaaattgagtggtagctggaaggggatatattataggatcaagagaaagttgtttatttgttttaaggtgagtgggagaaataaatgtatgtttgcacgccaatgagaatgagccaataaagagggcagaggggaaaatccctggagcaatgtctttgaatagttgagagggagtgagatctgaggaccactggggcattggccctgaagaggagcacagatggttcatctgctgaacaggaggaggcagaatatatggacatgggtgcacgtaggtcacggatagatgtggaggtgggggtggagcttgtcaaaatttccttccgattatttctgtttaattggggaagtaaaacggaaaggtcagcaggtgacagggttgttgatggcagtttgaggtcagaggaaaaggcatgagagtcatctaggcaagtaggagagtgatgaactaaggaaatctgatactataattgccaggaagcattaaggacccacttaaggtttgtggtcataaattttgagaccagtcaacatggttgcatgttttctcccagccaygttctgctgcaaaaatacaggcagagtgagcagacagatggatttagcctgggtttggtttagccaagaaagtttgaggaagcttgagaagcacaggatgatggaagtgtttgaccatataatgtagccctggc

SEQ ID NO: 920945 - DNA, 472 bp, Homo sapiens
gaatgtaatttctctatttcattttgtaattggttattactggcaaaagcaaaaatgcaactgatttttatatgtttatattttatatagcaatcttgctgaactatcatttcccagccttcttggcaagaaaaaccattgtkcttgatgggtaatgcttttttgttagtattattgtagctatgcctttctattctttggtagtattatcatagtattattgtagctatgcctttctattctcttagtcattacccttaattttatctatcagcctaacaataagtagatattgattatttctgccctggttgtggtcttatccaataaactgtacataggctgtggctggtgacattccattgtgggtagttctgcagagaaaccaattctgtgattcaggagggctgggagactctctgaagtgataccctggagccagggaggtagggtttcccccatccgtcctggg

SEQ ID NO: 920946 - DNA, 628 bp, Homo sapiens
tgcatgtgaaaggggcccaaggggcttcatgcaaggggacaagtcagtatggcctcccaacctcactcatcctgcctcactaacagcagtgagaaagagttccagttgttccatatcctcacatgcacttggtgtggccagtctttttaacttctagccattctaatataagtaaaaatggtatctcattgtgattttaatttgcattgtcttaatgactaatgatgttgaacaattttttgtgtgtttatttacctacatatataatttttatgaaagtgtctgttaaatatctgaagaagaaaatrtctcccaacttactgtatgaggccaatattacccagataaccaagtaatgttcatttccaggaatgcaaaccttgtttgtcatcaatcatgttaagcaactagcaaagaaagaatacatgataatcccaacagatatagaaaacctatttggcaaaatccaacatgtattcctgatttaaaaaaaaatctttcagtgaattaggaataaagggaagtttctttacttgaaaaaatacatctatgtatgtatgtatatgtgtatatatgtatgtatgtttgtatgtatgtatctatctatctatctacctacagatagcat

SEQ ID NO: 920947 - DNA, 628 bp, Homo sapiens
tgcatgtgaaaggggcccaaggggcttcatgcaaggggacaagtcagtatggcctcccaacctcactcatcctgcctcactaacagcagtgagaaagagttccagttgttccatatcctcacatgcacttggtgtggccagtctttttaacttctagccattctaatataagtaaaaatggtatctcattgtgattttaatttgcattgtcttaatgactaatgatgttgaacaattttttgtgtgtttatttacctacatatataatttttatgaaagtgtctgttaaatatctgaagaagaaaatatctcccaacttactgtatgaggccaatattacccagataaccaagtaatgttcatttccaggaatgcaaascttgtttgtcatcaatcatgttaagcaactagcaaagaaagaatacatgataatcccaacagatatagaaaacctatttggcaaaatccaacatgtattcctgatttaaaaaaaaatctttcagtgaattaggaataaagggaagtttctttacttgaaaaaatacatctatgtatgtatgtatatgtgtatatatgtatgtatgtttgtatgtatgtatctatctatctatctacctacagatagcat

SEQ ID NO: 920948 - DNA, 625 bp, Homo sapiens
aatccatttatattcaaggttattatcggtaggtgaggatttatttttgtcattttgttaattgttttctggttgttttgtatagcctttttttcctttctttcctattgtttatcattgtggtttgatttttttgcagaggcaacacttgagtcctttctctttctcatttgtgtgtctgctctgccactgaattttattcttgtgtttttgtgatggtagatattgttgttttgcttatagaggtaaaatctggacttctttatgcatttgttgtagggatgttctaatgcgaatgaattccctcaagttttgcttgtctgggaaaactttgctgggaatagtattcttggatgarttgttttttgcttttaacactttgaatatatcaatttacactgtctcccgatctgtaaggtttaagctgagaaagttgctgttagtccgaagggggtttccttatatgtgacttgatgctttactcttgatgtttttagaatttagtctctgtttttaacttttgaaaattccactataatgtgtctcggagaagaccctttacgttgaagctatttggggatcactgggattcctctatctggatatctgtatctctttcaaaacg

SEQ ID NO: 920949 - DNA, 629 bp, Homo sapiens
gagacagaaaattaacaaggatattcaactggaactcagctctggaccaagtggacctaatagacatctatacaactctccaccccaaatcaacagaatatacattcttctcagtaccacatagcacttattctaaaattgacaacataattggatgtaaaacactcttcagcaaatgcaaaagaatgraaattataaaaaaacagtctctcagaccacagagcaatcaaattagaactcaggattaagaagctcactcaaaaccacacaactacatggaaactgaacaacctgttcctaaatgactactgggtaaataaggaaatgaaggcagacataaagaagttctttgaaaccagtaagaacaaagagacaacatacaagaatctctgggacacagctaaagctgtgttaaaagggaaatttatagcaataaatgcccacatcagaaagcgagaaagatctgaaatcaacaccctaacatcataattataagaactagagaagcaagagcaaacacgttcaaaagctagcagaagataagaaataaccaagaccagagcagaactgaaagaaatacaaacagaaaaaacccttcaaaaaaaccaatgaatccaggagctggtttt

SEQ ID NO: 920950 - DNA, 630 bp, Homo sapiens
gggagagtcatatttcacgtttgctgcttccatgaacccagtatatagttcccttcctgattccagattggatattcctctgggaatgaccccttctctatttttggacctgtgctttgtttttactccatacccagccccgggatggagcatgtggcctagacctaaaccaatcagtgcatgccacgactttgggcagtgattgattcagtaatagacacaagcctcatttagagcccatgagaagccaggaaattctcattggatcttgagaaagatatttttctcttttcattagaagtgaacacgagacaggccaggcacggtggttcacgcctgtaatcccagcactttgggaggctgaggcgggtggatcacaaggtcaggagatcgagaccatcctggctcacacggtgaaaccccgtctctactaaaaatacaaaaaattagccaggcgtggtggcgggcacctgtagtcccagctactctggagkctgaggcaggggaacgccgtgaacccaggagctggagcttgcagtgagccaagattgagccactgtactccagcctgggcgacagcgagactccgtctcaaaaaaaaaaaaaaaaaaaaaaaaaagagtgaacacg

SEQ ID NO: 920951 - DNA, 596 bp, Homo sapiens
gtgggcatggactaagacatcctctcttgattctttacaatgtattccccatataataaccagatcactcttaaaaataaaaaccagattatatcagtcccctgattagaatccttcaatgatttcccaccttgcttggaaagcaatccaaggtgattaccgtggtttactaggttggatgagatctggctcagtgaggttgccctttgtctgctgctctatgcttaatgtgcttcagccacactgggctgattactgactcttgtctgcccagagccttcatacttcacagcgtgtgcatttgcagttccctctgcctagcatctcctccctctgaccctcacacagcttcttcctcagcagccaactctcctagtacaaagaatttccatggccatcctgattagcgtagccctctagcacaggcccctttcrctataaaattggtttattgccataatggcaccatttttagcactcagtccaaactattttgtttaactatttgtttctgaatttattgtctaacttctccaatgaaagataaactccttgagagcaggcaacttgtcctcctttctcaccactgagtcccc

SEQ ID NO: 920952 - DNA, 590 bp, Homo sapiens
gaaaacagtgtggcgattccttaaataactaaaagtagaactaccatttgatccagcaatcctgcttcccagaggaaaacaagtcattattcaaaaaagacacttgcacacacatgtttatagcagcacaattcagcaaaaatcatggaaccatgattatatatattatgtatatatataccatgattatatatatattttatatatataccatgattayatattttatatatatatatgagatcaagctgccctttctatttttctatgcgcccacttatgtcttgaaggtctcattcttcaggagatcttgcagagccagtagacattgctgagcatctaacttgtcccaaggggctttcttgattctagagagaatagaacactatgatacgttctgaataacagtgggaagggcttgaaaaagggatttttaattttcagggaggaaagattatgttgtgtaaatataatatgtattttcttttggataatgcatttgctcatacacacacacacacacacacacacacacacacacacacacacaccatggaatactatgcagccttaaaaaggaatgaattaaa

SEQ ID NO: 920953 - DNA, 449 bp, Homo sapiens
cataattctagataatagaatacagcaaatgtgatggttacatctgatgtgagattctgccttagcaagtgggggcaagagagactccctcttgctgacttgtgtaagaagggctgccgtcctgtaggaaggactgtgagaggccacgtggcaggaaccatggcagcccctggatgctgagagtggtccccagctgataggtttggctgtgtctccacccaaatctcatcttgaattgtagctcccatatttcccacatgttgtgggagggacctggtggagataattgattcaygggggcagtttcccccatactgttctcatggtagtgaataagtctcatgagatctgatggttttataaggggaaaccccttttgcttggcgctcattctctcttgcctgctgccatgtaagacatgccttttgccttccaccatgatggtgagg

SEQ ID NO: 920954 - DNA, 627 bp, Homo sapiens
attccaatgtgccttatctcagtaatttcagaagtgaagtgaaaaaaacagagattcagaacaactatttgcctagtaaacggcagccaccacccccttcatttcctgcaaagaaagctctgttgcaagctaatccatgctggctccacgcagaaaacattatcatttttatcggcctcataaatcrcctttccagattacacaaaaatatacattgccccactgtaattattccagaccccccccttctcccttttcattttgatcccaggtaaacccagtcattacccacatcagtgtggcttcccaaaacgtcaagattaaaacggaccagggagacttacgcaagactgagtcagccgagcaatttgaaccaataaatatcaaagtcgtgtctaagcagagaacaattcatttgataccacatctgtcaacaggaccatggaggattttccttcctggggccgcgccctggtggcccagcttgccttcttcctggtgctgtagagaagctgggtttggtctcgctggaggactgtgtcccgtgcccaggacaggacttggtgcccagaccaggggggtttagaggttgagctgcctgccctccagccactatcaaaatgccct

SEQ ID NO: 920955 - DNA, 799 bp, Homo sapiens
cagggcaccaagtccctaggctgcacacagcatggagaccctggacctggcccacaaaaccattttttcctcctaggcctcagggcctgtgatggaaggggctgtcgtgaagacctctgacatgccctggagacagtttccctattgtctgggggattaacattyggcttcttgttacttatgcaaatttctgcagccagcttgaatttctcctcagaaaatgggattttcttttctattgcatggtcaggctgcacattttctgaacttgtatgctctgcttcctttataaaacagaatgcctttaacagcacccaagtcacctcttgaatgctttgctgcttagaaatttctttgccagataccccaaatcatctctctcaagatcaaagtcccacaaatctccagggcaggggcaaaatgctgccaatctctttgctaaaacatagcaagagtcacctttgcttcagttcccaacagcttcctcatttccatctgagatcacctcagcctggactttattgtccatatcattaccagcatttggggtaaagccattcaacaagtctctaggaagttccaaactttcccacattttcccgccttcttctgagccctccaaactcttccaacctctgcctgttacccagttccaaagttgcttccacattttcgggtatcttttcagcagcaccccactcctggtaccaatttactgtgttagtccacttttatgctgctgataaagacacacctgagacagggaagaaaaataggtttaatggactcacagttccac

SEQ ID NO: 920956 - DNA, 623 bp, Homo sapiens
tatttttctttatatccttattctctacttttgcctattaaaatttgtatttttacttttaaaattcttgtgttaaaaactaagacacaaacactcacattagcctaggcttacacagggtcaggatcatcaatatcactgtctttcatctccacatctgtcccactggaaggtcttcaggggcagtaacacgtacagagctgtcatctcctacgataacagtgccttcttttggaatacctcctgatgaacctgtcagaggctgctttatagttaacttcttttttatatataaatagaaagggtacactctaaaatagcaataaaaatatagtatagtaaatatataaaccagtaacatattcattatcgttatcaagtattatgtactgtacayaactgcatgtgctagacttttatatgactggcagtgcagtaggtgtgtttacaccagcatcaccacaaacacgtgagtgatgtgttgtgctaacattacgatagctacgatatcactaggtgataagaattttcagctccattataatcttacgaggccaccgttattatgtggctcgtgactgtacatagttttccattcttagtatttttataagtaggaaata

SEQ ID NO: 920957 - DNA, 486 bp, Homo sapiens
aggccatgatttcaaaatattttttaaccttttctgaagacaattataaacatatattgtggcataattaaatttcagtttaacaaattcatcagtcattttggtattatgataagaattataaatctcatagcttsgtgcaaaaattattcatcagtcctataaagcaattggtattaaagagttggtattaaaggcgacctttgaaacattaatacctattctgcttgattttcaccctttgtaaattcttataaccaatttgtagaaatatgtggaaaacatttgtaatatgaaatcaactattaattatttagagaatggtatccaatttgtgaaatatctagtaactaccttctggttggccactgtgttgccattttatcatcttacaaatacctatcagagagaaagcaaaccaaagtaaaccaaataaaccaaaaataaagcaaacccaaacctgcttagttttgttggtatttaatt

SEQ ID NO: 920958 - DNA, 626 bp, Homo sapiens
tgaaagaaatgtgcctgggttaagagttgcacaagtgcgcagttgcagcactggcccttcaagtaatagagcctgatatttaagtaaacttttgtctgacggccacaagtctcctttagcagtgagtatgccattcacatcatgagatgtccacacagtaaaatctcttccctgtattattttaactgcttcagatactaagactgttactgccgtcactacctgtaaacaatgaggccaaccctttgccactgcatcagtttccttactcaggtatgccacgggttgcaaactcatctcttggacctgtgtaaggactcttagagctattcctgtttttttgtgtgtgacatataaaraaaagtcttgccccattggcaagcttaacactggggcttggttagggccttctttagggcctggaaagctgcttctgtttcaggtatccatcttactaaatggatattggctttctgagtttccttaattagtgtatataatggtctggctatttcactgtacctggaaatccatattcggcagaaacctgttatgccaaggaaccgtcttagttgctttagggttttggggtgaggataagccagtataggctggatacatctcac

SEQ ID NO: 920959 - DNA, 594 bp, Homo sapiens
attccactacttggtatatgcccaagaggactgaaaacatacgtaaatgcaaaaacttttatgtaaatgttaatggcagcattattcgtagtacccaaaaagtggaaacaaccccaatgttcatcaattgatgaatacataaacaaaatgtggtaaagccatgcaccacataatgacattcagtcaattaytgatcatacatagaagagtagttccataagattattatgaacctggaaaattcctatcacctagtgaatccccccaaaaattaacagtgaagtgtttagcagtagcttttgcagactgtaaaaagtttgaggggccagggggtggtggcttacgcatgtaatcccagcactttgggaggtcacggtggatggattgcttgagctcaggaggtcaagaacagcctgggtgatagagtgagacctcatctctacaaaaaaattaaaaaaatagctgggcccaagggtgcatgccatagtcctacctactcaggaggctgaagcaggaggatcacttcagcatggatggtggaggttgtagtgagctgagattgtgccacatggactcccacactgaaaggtttgc

SEQ ID NO: 920960 - DNA, 800 bp, Homo sapiens
agaactccctttcttgatcagtcacactggtgacagatttctgtgatccttcttagggaaacatttgagtttgcctgcctaccctgccaggctccctaagctgctctagttattcttgttgccagtccaggtttacctcctagcacttcacagtctaggtcctaattttctagtgctgattcaaagtcaaagtgagtacctagaagagcgggcacatctagtgcaagactatcctcaacaaaactgtaacagggaatctatctgtgttcagtgttgctcccctgaacaccrtgctcttcactcagccttcacacccctcacatggtattctatttaaaaaaataataataatgtgaatttagagatggggtttagctatgttgcccaggctagagtgctgaggttattcacaggtacaatcatcctgcactacagcctcgaactcctagactcaagcaatcctcctgctacttagtctcctaagtagctgggattacaggcatctgctacagtattctttttttttttttttttttttttttttttttttttttttgagacagaatctcactctgttgcccaagctggagtgcagtggcatgatcttggctcactgcaaactctgcctcctggattcaagtgattctcctgtctcagcctcccgagtagctgggactacaggcgcgcaccaccacgcccagctaatttttgtatttttagtagagactgggtttcaccatgttggccaggatggtctccatctcttgacctcatgatcggcctaccttggcctcccaaag

SEQ ID NO: 920961 - DNA, 747 bp, Homo sapiens
tgtagataacacattgaagctcggtcaatccaaatgtccattaactggtgaatggataaacacagtgggatacgatggggcaccgctgagcaatggaaaggagggaagtactgatagacacaacatggatgaatccaaacacattatacttggcaaaagaagcyggagcagaggacccagtgttgtgtgattccatttctatgaaatggccaaaaaaggcactggaggtgggaagcagaggagtggttgctggggctggggtggggctggagtgactgctaaggggtatgtgagtgctttctgggtgctggaaataatctaagactgaactgtgaagaaggttgcacaactccacatttactaaaaaattactgaactgtgcacttcaagtggtgaggggtagttatgtaaatcatacctcaataaagcatttagaaaacagaacaaagctaggccaaggagggtgggtcatgaggtcaggagatcgagaccatcctgactaacatggcaaaaccccgtctctactaaaaatacaaaaaattagccgggcgtggtggcgggcgcctgtagtcccagctactcgggaggctgaggcaggagaatggtgtgaacctgggaggtggagcttgcagtgagctgagatcgtgccactgcactccagcctgggtgacagagtgagactccgtctcaagaaaaaagaaaaaaaggaaaaagaaaacagaacaaagctgaagccctggagggtga

SEQ ID NO: 920962 - DNA, 603 bp, Homo sapiens
agctacaaaataagaaaggggaaaaaataaaacaaattaatgcaaaaccagcaagtacatgctaacgggatttagactacttaaaacaataatcaatcaacaagaagtttgttatgatgataaaatacattcagactatcatccaaactttacataaaatttctgaaccctcccatctagattcaagctcatctaaaaawatgtctagactttgtaccttctccttacagttagtgtatgcccgcatgtaaaacttcaaacacttttgcaacttagaaaaagcatttctaagttatcattttttattgatacataacagatacacatattttgggggtatatgtgataatctgatacatcctaacaaaagcatttggctatctcattggtgtttctttgggatcccctgcatctgagcaaatccctgcatctgagggatcccctgcaaatccctgcatctgagcaaatcagaaagagatacctacaaagcatcgtcatgcttcctggtgaattcaaataacgcaggacacttcaacagcaataggtatgatccatgcctgaccaaagttaagttagagcactttctatggggagagatgaagg

SEQ ID NO: 920963 - DNA, 603 bp, Homo sapiens
agctacaaaataagaaaggggaaaaaataaaacaaattaatgcaaaaccagcaagtacatgctaacgggatttagactacttaaaacaataatcaatcaacaagaagtttgttatgatgataaaatacattcagactatcatccaaactttacataaaatttctgaaccctcccatctagattcaagctcatctaaaaaaatgtctagactttgtaccttctccttacagttagtgtatgcccgcakgtaaaacttcaaacacttttgcaacttagaaaaagcatttctaagttatcattttttattgatacataacagatacacatattttgggggtatatgtgataatctgatacatcctaacaaaagcatttggctatctcattggtgtttctttgggatcccctgcatctgagcaaatccctgcatctgagggatcccctgcaaatccctgcatctgagcaaatcagaaagagatacctacaaagcatcgtcatgcttcctggtgaattcaaataacgcaggacacttcaacagcaataggtatgatccatgcctgaccaaagttaagttagagcactttctatggggagagatgaagg

SEQ ID NO: 920964 - DNA, 547 bp, Homo sapiens
aatttttgtatttttagtagagatggggtttcgccatcttggccaggctggtctggaactcctgacctcatgatccacccaccttgggctcccaaaatgctgggattaacaggagtgagccaccacacacggcccaatgctgcttcttttaagacctccctgattgtccctgtgtggtctcttgyaataccgacagctctcattacttgatatcttgcatggcatatctatttattcttttctcttaaactttggaagggcatagatcactagtctttttgtagactcctacacaatgccttgctctcagaatgcaaattgtgcccagtgactgggtccataaacttggggaaatgcaagagacagactgatgaataatgaatacttctgcacacagttaatatatttgttttatagcacctcaatggtctcaagtgataatgcaacttggctatttaagcctattttatataagtggaatgtacagctcaaataatgcaacctaaattacacttgcatatatgagctacggagcatatagtgctct

SEQ ID NO: 920965 - DNA, 654 bp, Homo sapiens
acagccacccaagctgtggctgtggacccgggcatctctgcaatctcaagggcccagaaagggaattccccctccctctgcaggctcagaagtacctgctccgactgcctggcctctcccagctcccagcacccactctgatctcaaagttaaggccaagcctaggaactgttgcaacctggctgggtgtgcacatgctcagggcagtgctaacatgccagmcccctgctgcctcggccccctctggactttggacactgatgaacatgggaaggaggccaaggagagggctgagggcagctcagagctgtcctgcaggtgccccatggcacaaacagcctgggtgccatggatgacggcaggaggcagacaggctcctgagcagaaagggtcaggtccgggtgaagccccaccttcaagccaggaacagcctgaagcctgggggccaggctgacgaaccagaattagaacttacggtgttttctgagcccgcccatggcagcccatgaaccaatcagcacacacttcctcctctcaagcccatacaaatccccagactcggccaaacttgaagagacaagcagacaacctgcctgcggagaggagctacccactccagggtcccctctcggctgaaggctcatcacttctcac

SEQ ID NO: 920966 - DNA, 616 bp, Homo sapiens
atcttttcttgtgcttattgaccatttatataccttccctggagaaatgtctactcagatcctttgcccattttaacacaagccccttatcagatatatgatttataaaagtcttctcccattttgttgtctctccattttcttcttggtgtcctttgaagcacaaaagtttttcattttcatttagcccaagtatctattttttatgttattgcttttactttgggtgttatatctaggaaaccattggctaatccatggtcaagaagatttatgcctatgttatcttctaagagttttayagttttatctcttacattaaggtctttaatccttttgagttaatttttgtatatggaatgaggtagaggtttaaaattcttttgcacatggatatccagttgtcccaaccccatttttttgaagagtgttctttccctcattgaattgtcttagcacctatgttgaaaatctgttgaccataaatataaggtttatgtctggaccctgcattctattccattgatctatctttttgtcctcatgtcagtatcacactgtcttgattaacatggctttgtaagtaagttttgatatcaggaaatatgagtcctcc

SEQ ID NO: 920967 - DNA, 602 bp, Homo sapiens
actgcatcctcaacttcctgggcccaggtgatcctctcgcctcagcccctgcaggtagctgggactataggcatgtgccaccatgcccagctaaatttggtttttttgtttgtttgtttttgagacagagtctcactstgtcacccaggctggagtgcagtggcacaatctcagctcactgcaatctctgccgcccgggttcaagtgattctcctgcctcagcctcccaagcagctgggattacaggtgactgccaccacgccagctaagttttgtagttttagtagagatggggtttcaccttgttggccatgctggtctcgaactcctgacctcgtgatctgcctgcttctgcctcccaaagtgctggaattacaggcatgagccaccacgcccggccaaaatttttgtatttttagtagacacaaggttcttaccctgttgcctaggctggtctggaagtcctggactcaagcaattcacctgccttggcctcccaaaatgctgggattacaagccaccatgcccggcctaaatcctgttgttttgttttgttttattttgttttgttttgttttgtttgttttttgagacagagtctc

SEQ ID NO: 920968 - DNA, 602 bp, Homo sapiens
actgcatcctcaacttcctgggcccaggtgatcctctcgcctcagcccctgcaggtagctgggactataggcatgtgccaccatgcccagctaaatttggtttttttgtttgtttgtttttgagacagagtctcactctgtcacccaggctggagtgcagtggcacaatctcagctcactgcaatctctgccgcccgggttcaagtgattctcctgcctcagcctcccaagcagctgggattacaggtgactgccaccacgccagctaagttttgtagttttagtagagatggggtttcaccttgttggccatgctggtctcgaactcctgacctcgtgatctgcctgcttctgcctcccaaagtgctggaattacaggcatgagccaccacgcccggccaraatttttgtatttttagtagacacaaggttcttaccctgttgcctaggctggtctggaagtcctggactcaagcaattcacctgccttggcctcccaaaatgctgggattacaagccaccatgcccggcctaaatcctgttgttttgttttgttttattttgttttgttttgttttgtttgttttttgagacagagtctc

SEQ ID NO: 920969 - DNA, 601 bp, Homo sapiens
gaaagtttggaacttcctagggacttggagggctcagaagaagacaggaagatgtgggaaagtttggagcttcctagaaatttgttgaattgctttgactaaaatgttgatagtgatatggacaataaagtccaggctgaggtggactcaaatggagatgaggaacttcttgggaactggagtaaaggtcactcttgttatgcaaagagactggcagcattttgcccctgccctagagatatgtggaaccttgaacttgagagagatgatttagggtatctggcagaagaaatttctaagcagcaaagtgttcaagagaaagcagagcataaaattttggaaaatttgcagcctgctgacatgatagaaaagaaaaccccattttctgggragacattcaagcctgctgtagaaatttgcataagtaatgagaagccaaatgttaatcaccaagacaatgtggaaaatgtctccaaggcaagtcagagaccttcacagcagcccctcccatcacaggcctggaggccttggagggaaaaatggtttcataggcctgacccagggctcccctgctgtgtgcagtctggggtatatggtgcct

SEQ ID NO: 920970 - DNA, 700 bp, Homo sapiens
agggaaggaagcctgagtcaagttgagccacatgtggcttctgttctgaattttgaaattaagatcaaacgatatttgtgttcattttgagtcagatttaggtttttactttaatatgctaatgcaagatggttaagttaaccgtatgtcactttgtggatctaagaagtagagactattggttggaagagagcagagggaagcaggtgatgagaaaaaagcagcagtgggggaagagttctgcccagtgtccaggctgctggctgtctttacacacctctgtagccttacagtacactcttcctgatatatgcattctgttactcgcatatagataagcaaatagagatcactcagaacaattattttgaagattacttcattttgatataacgttttgtcagtagaacaacataaaaagaggagggcggtagactgaggggcacatgtccctctcccctcattgtcacattctctacccactgtcwcatgtgatatcagagaataatgtgctactgtcccagaaaggaaaaaagaaatctgttagacaacagtatgtgatagaactagaaacatgaaaaagtacatgaatccaggtgggtaaactgcaaacacacacacacacacacacacacacacacacacacacacaccagcatgctgacttgaggatattacctgttataaccatacaaacata

SEQ ID NO: 920971 - DNA, 585 bp, Homo sapiens
tataagatttatgaaaagcaagttggcaacatctatgaaaagtacaaaggcatatacctcttggcacagaaattccaacttgggtaatatcctagagacatatgtatgtgcataatgaggtatgtacaaggttattcatagcagcattattattaaatgtaaaataatggaataatcatatatgcattgatggggacaagaattggctatgttaattataatatatctactcaatgaaaatgtgacatagctatagaaataatgagaattctcctaaratatccaggatgtatgattgatgaaagaaaaatctaagttaacacagcttttacgttaagaaacctcagtgcttacaaagaaggtagaaaataaaaatatttatttttagtcatttttatatagacaaactttggaagtgctgtaagaagctgaaaacagttgttcccctgtttgagtgatgaaactaaagagacaagaaagagggaggggagaaagatatgaatatactgctttttatagcttcaatttcttgaaccatgcaaataaatttctgattcaaaaaattaaaatttaattaagaaagaa

SEQ ID NO: 920972 - DNA, 658 bp, Homo sapiens
acatgatggttcccaaaagctcgaagatgccaggaaccgcagagtcccaaagatgatgttacagtgtcacagccctgtctcagggagccccaaggtctggactcccaaaagacccatgactcttctctccttctagtcacctgtaacatggtaagtggtttcaaccttatttgttttatagctctttcagtcccaccatttagcaggayccgagttcttgttccatgaccaggaacaatgaggtagatggcaagctggagggtaaggaaggcagagaggagattcactgaatgacaaaacagctctcaggagacctgaagtgggtagcttctttccgcaggcaggttgtcccaagcaagtgcccagctctcagtgcagaggagacctgaagtgggtagctcctttctgcaggcaagtcatcctgatgactgtagaaaagacctgaagtgggtagctcctatctgcaggcaggtcatccaacaagtgtctgagtctggctgaatctggggtttttatgcactcagaagggaggaagtgcatgctgagtgctccatgggcagccatgggtgggcctggaaaaagcaccataagttctcactctaagtcacagactccacccagaactggcagcctgatcccgaggcttcaggccatccct

SEQ ID NO: 920973 - DNA, 768 bp, Homo sapiens
cacacagcagaatagaggtgggcaaatgatgtttccaattaggcaaacacattaaccatctaccttgggaaggggtcccagtctttagaattgtggtctcacgtgcaactatctgcaggggacagacaagtatgcaaatagaaagagggagcaacatgagtgaatggcagactgttgaatatgcccccatctaaaagggcatgaacaccacacatgtaacttccttccagctttgaggtaatgtgaatcatcacgtctagaagatccattttaagaagtcaagcaaatcagctacttgggaggctgaggtggaaggatcattagagcccaggagtttcagttttgcagtgatctataatccagatagctatgtgacatcaccttaattttagagattaaaacttaattggcaaaacaattggatttcataatggttaaacaaaccacatctatgagagattcatctcatttttggaagtgaagcacaacmttcaggttattatatgaattctactgatttttaaatattggcaatttactgacaaaaaaaatcctgcaacaaccaaacaaaacacatctgtgagaggtattcattccccaaccaccaggctaagtgtattggataactcttgcttttcaacttacatcttctacacccagcaatattctggatgttgctcaggaaatcagcccctctgaggggaacctgatgtatttttgttcagcagcactgagtagatttcacttttccatccagggcttttctga

SEQ ID NO: 920974 - DNA, 673 bp, Homo sapiens
gctacttcactttgcacttttatgttatggagatggcttcttttcttaaccctcatgaagcaacctgtgctagcttcaaacttttttctgcagcttcatcacctctctcagccttcacagaattcaagagaattaggatcttgctctggattaggctttggcttgaagacattttgtgactggtttgatcttctatttggactactcaaattttgtcccatttcagcagtacggctgytttgcattcttatgattaatgttttcactagagtagcacttttaacctacttcacaaatttttcctttgcatcacaacttggttaaatggcacaagaagcccagctttcagcctgtcctgacttacgacatgacttccccactaagcttaatcatttctagcttttgattaaaattaaagatgtgcaactctttctttcagttgaagactttgaggttgttgtggtgttattaattgtcccaatttcaatattgctatgtttcaggaaataaagagcctctccttcaaggagaaggggcaagatgggaaaatagcaagtcaatggagcagtcagaacacacaaaacgtattaagtttgccatcttatgcagatgcagtttatggcgtacagaagcaattacaacagtaacgtgaaagatcatggattacagatca

SEQ ID NO: 920975 - DNA, 587 bp, Homo sapiens
accacatccctaacaggcacctcaggctaccataaccaaatactatagagtgggcaacttaaagaaacaaaaatttatcctccacatttttgaaagagaacgatccaggttgcagttggttaggtttctggtgagggctctccwgggttgaagccttctccatgtcctcacatggcctttccttgtgtggtacagggagagagagacttgagagcatgagctgtcttctgtctcttcctacaaggacaccaattctgtcggatcagggcctcacgcagatgacctcatttaaccttaattacttccttaaagacttcactcccacatacagccatactatgggtttagtgcttcaacacataaatttagggaggacacgattattgagaccccaacattttgtccttggtcccccaaaatttatgcccttcaaatacacaaaatacatttatttgattccaacagctcccagttaacttgttccagcatcaactttaaagcctaaaatttacttttatctaaatatcatctaagtcccagatatgggtgtgatgtgaggtataattgatcctgtggcaaaatttcct

SEQ ID NO: 920976 - DNA, 557 bp, Homo sapiens
tccctaacaggcacctcaggctaccataaccaaatactatagagtgggcaacttaaagaaacaaaaatttatcctccacatttttgaaagagaacgatccaggttgcagttggttaggtttctggtgagggctctccagggttgaagccttctccatgtcctcacatggcctttccttgtgtggtacagggagagagagacttgagagcatgagctgtcttctgtctcttcctacaaggacaccaattctgtcrgatcagggcctcacgcagatgacctcatttaaccttaattacttccttaaagacttcactcccacatacagccatactatgggtttagtgcttcaacacataaatttagggaggacacgattattgagaccccaacattttgtccttggtcccccaaaatttatgcccttcaaatacacaaaatacatttatttgattccaacagctcccagttaacttgttccagcatcaactttaaagcctaaaatttacttttatctaaatatcatctaagtcccagatatgggtgtgatgtgaggtata

SEQ ID NO: 920977 - DNA, 724 bp, Homo sapiens
aaatgacttaagtaaggggcctgatggggacgggcgaggagagcacaatggtgacttcggatttagggcttttcctatcagatcattagcctgatttgttatcggatgccttttgatgttgcccgtcttagacaaacgttttgtctttgttaaatggggagatggcggggtgtttttgtcttctccccatggacttccccttgctccctatagaggctggcacattgcttttgcacaaagagatacttccctgcttgtctctgagacagtacatccaattctctgggtcctcatctttggaaggagaacatctaccatctatcatgaagaagacagaggaggaggagaaagaagagggggagaaggaaaaggaaatggtgtatttttaaagaaatggttacattatgggaatgaatacgcaaaaatgtcaataaagcatactgagtttgaaagttcctatgtcttaacaaggccacaatgagtagcatttaaatatttatgaatgcattaataccttggaaagtgaggtgacttatgtcacackttatgcaaatgactgttgaaaagatgcctcccattgctcaggcagtggccttaagggccttgggaccctgtaggtcagccccactgtatctctcctgtagcaaatacacacaacaggtgcattttctacaaacacaaatgccaagatgaaaacatgaaagcttctctcaggtccaactta

SEQ ID NO: 920978 - DNA, 630 bp, Homo sapiens
gaggtctggaagggccctgaatgtaggaggttttgtccccgtggagttggggtgcaccaccctctcagcacatggatgagttcttcacctttctattggcctctaggtgttcagctctctggaagctccccaaaccctatcctttggggtttttaatggaaccttcattataggcaaaattgacaaccacgtagaaaggtgattggacaaaaagggtgtgatctcatatgtgagttcatacactgaygaggaaagccagggaggccagacctgttcagattcttcttggtctctctgtgcagcattccttcctccagagtatggggcaggagcctctctggaagcagggccttttgatccacaaccagattagagtcctgccttcagcaggcaagaggaggacaggaaaaggggagagagagagagattcagttttctgaggcctgaagtgccccaagattataacaaaagactgtaacaagtgtaacaagggctatgggagttatgagccaggaacttcggacaaaagcctatttcatacatgtatgatgattatatatatacacatacataatatatattatgactatacataatcatagtatcacaataagcatatgtataaatatt

SEQ ID NO: 920979 - DNA, 618 bp, Homo sapiens
tagttctatcactatttccactgtatctgaagtgacttcctctactgaaatcttaaccccttaaagtcaccaatgaggattgaaaacttcttcaaaactcctgtttatattgattttttttacctcctttcatgcattgcaaatgttcgtaatggcatttggaatgatgaatccctaccagaagattttcaatttactttggccagattcatcagaaggatcattatctatggaagctatagccttacaaaatgtatttcttaaataataagagttaaaagyagaaattactccttgatccctgggctgaagaattgatattgtgttagtgggcatgaaaacaacattaatctccttgtacatctccatcatagtgcttgtgtaaccaagtgcatcatcaatgagcagtaatattttggaaggaatctttttttttcctgagcagtagatctaagcaatgggcttaaaatattcagcaaaccatactgtaaacagatgtgctgtcatccaggctttgtttttccacttacagagcacaagcagagttgatttagcataatgtttaaggaccctaggatttacagaatggtaaatgagcattggcttcaacttaaagct

SEQ ID NO: 920980 - DNA, 544 bp, Homo sapiens
ggagtttggaaaaagaagcccatttcaaaatcaacaacataactccaggacatgagaaaccaaactgtatcagtgttttgagcaagaagtataatttggaaatcatactaaatagctggataatttgacaaaagtactgacaattcagtttgtgcccatactatacttctaaatatcttaatatagagagaagccaatcataaatggtaagaatattttgtttgctttagtagatttgtaaattgacttaaaatacacatttatagcacttatttgtaaaatgtcagttttagcagagcataggctcttttcgrtggagacaggagaatgtgatacttttatatattaattcaaacataagtgatttaacacacacacacacacacacacacacacacacacacacacacacttgccatacccaaaagcattttcttgcgtattgtcatttaaagtatagacataaataagaaagtggcatgaatgaaaagtacaaaaaaaaatttcctccaatctaattgtctccccctttcaactacaagaa

SEQ ID NO: 920981 - DNA, 776 bp, Homo sapiens
gaacgtgttctgtgggcatgccggagtaatgcttttcaaacttcaggttggggcccattaggggatcatgatattaattttgtgggccatagctgctttttctattctaaaaaaaaataaagtagggccaggtatggtgacccacgcctgcaattccagcactttgggaggctgaggtgggaggattgcttgagcccaggagttcaagacaagcctgggcaacatagtaagaccctgtctctaccaaaataataataaaaattagcggccagatgtggtagctcacgcctgaaatcccagcactttgggaggccgaggtgggcagatcacaaggccaggagatcgagaccatcctggctaacacggtgaaaccccatctctactaaaaatacaaaaaattagctgggcatggtggcacgcatctatagtcccagctacttgggaggctaaggcaggagaatcatttgaacccaggaggcggaggttgcagtgagccgaggttgtgccactgcactccagcctgggtaacagagcaagactccgtttcacacamaaaaaaaataaataaaagccaggcatggtggtgtacaacatacaggtgcacacctgtagtgccagctacttaggaggctgagatgggagaatcacttaagtcccaggaaactgaggctgcagtgagctatgattgtaccactgcactccagcctgggtgaccagagtgagaccctgtctcaaaaaagaaagaaaatagaaaatgtccgaatgtatcacatgac

SEQ ID NO: 920982 - DNA, 765 bp, Homo sapiens
tctggctcaaatgatcctccccactcagcctcccaagtggttaggactacaggtatgtgccactgtgcctgaataattttaaaatattttgtagagatgggatctcaccatgttactattgttcattttttaattgagttgtttgtctttatgttgttgagttgtaagagttctttacgtattttagataccagattctcctcagatatatgatttaaaaatacattctaacattctgtaggttgtcttttcactttcttgataatgttctttgctgcacagaagttttaaattataatgaagcctaatttatctgtttattttcttttgttgcttgtgtttttggtgtcgcagttcagaatccattgcctaatccaagcataaagatttatatctgcttttttgtgttttacaattttaactcttacatttaggactttgatagagtttgagttaatttttgcatgtggatatacagttgtctcagtattatttgttgaaaagactattcttttcgcattgwattaccttggcacgcttgttgaaaataaatggatttctgagctctaaattctattccattgatatatatccctatctttatgctagcaccatacagtcttgcttagtgtaactttgtagtaagttttaaaattgagaagtttgagtgctacaactttgttctttttcgaagtgttttggctatttggagtgccttgaatttccaaatgaattctagggtcagcttgtcaatatctgcaaaaa

SEQ ID NO: 920983 - DNA, 610 bp, Homo sapiens
ctctgggtagctgggagtccttgtgagatgttatgttctgggaataatggagtcttgttactacaggctgttaacacacacccttccattgttgagaacaacatccaggcagccacaaagcacatggcttccagtagaatcctaggctcgaggatctcttggggagtttggttctgtgaaaggaacatagaaaccccaggccattacttctaagagctgtttttctcttttttttttttcctgagtaagttgtttaattttatctttatgtttggcagcacaaagagtttaaggtagctggttgtaacaaatcgccaagtacaagygatttcagggaatttgctttgtaatatggttatattatcttctttgaaggaatgataaatatctttatctacacaataggttagatatcttactttctggaattttctatgatatcattctaccttgattctcatggagaataaatatacggaatatgttctaatatgccactatcacctgtgtatgtaggcattgttcttcagtcatgacgttctttcctgctaagccttgatgtggctgccaaaacattgtcaaagaaggttctagggagtcattcaattga

SEQ ID NO: 920984 - DNA, 599 bp, Homo sapiens
attgcttgttgcttgaacatctgaactcataggtaccttttttacttgtaatactctctacctgcccccaagccccattctccctatgaaaccctcctcgtcactctctgtcttctcagatacaggaagttagttgcagcctctagtctggctttagtagtaatartaacctataacttctaaagaatattttagagtttataaaatgagttgatattcattcattcacttactcatttatgcaactattatgtttcaaatgcctaccacatgccgggcattgaccaaggtgctggaagaacagcagggaccaacactggcaaggtctgtgccctcatggaacttaggttctagtggcggagaggcacacaacagtgaattaatttaaataatattctaagcaagtatttaaaaacacatatatttgggaggctgaggtgggcagatcacttgaggtcaggagttcgagaccagcctggccaacatggcggaaccctgtctctactaaaaatacaaaaattagccaggcctggtggcggtcacctgtaatcccagctacttgggaggctgaggcaggagaaacacttgaacctgggagg

SEQ ID NO: 920985 - DNA, 572 bp, Homo sapiens
agactctgtctcaaaaaaaaaaaaaaccgctataagataccatctcactccagttagaatgtcaatcattaaaaagtcaggaaacaacagatgctgaagaggatgcggaaaaatagggacacttttacactgttggtgggaacgtaaattagttcaatcattgtggaagagagtgtggctattcctcaaggatctagaactagaaatacatttgacccagcaatcccgttactgggtatatacccaaaggattataaatcattctactataaagacacatgaacatgtatgtttactgcagcactatttacaatagcaaagacttggaaccaacccaaatgcccatcaatgatagactggattaaaaaaaaatgtggcacatatatgccwtgaaatactatgcagccataaagaagaatgagttcatgtcctttgcagggacatggatgaagctggaaactatcattctcagcaaactaacacaggaacagaaaaccacacatcacatgttctcataagtggcagctgaacaatgagaacacatggacagagggaggggaacatcacacacc

SEQ ID NO: 920986 - DNA, 834 bp, Homo sapiens
aagcacagagagcagcccaggtgagaatgagtggaaatcacgctgcctcagagagtgaccttgttatgggctgaatcatcatctcctttctaaagttcatatgttggccgggcgcggtggctcacgcctgtaatcccagcactttgggaggccgaggtgggtggatcacctgagtcaggagttcgagaccagcctggccaacatggtgaaactccatctctactaaaaatacaaaaagtagccgggtgtggtggcgcatgcctgtaatcccagctacttgggaggctgaggcagatgaattgcttgaacccgagaagcgtaagttgcagtgagctgagatcatgccactgaactccagcctgggcaacagagcaagactctgtctcaaaaaaaaaaaaaaaatcatatgttgaagtcctgactccactgcaccmcccaatcccactgccagttacctcagaatatgactgtatttggagatggggcctttaaagaggtaactgagttaaaatgaggtcatcagggtaggccctaatctaatgtgattggtgtccttataagaagaggggattaggacacagatacacatgggggaaggccctatgaaggcatagggagaagatggccattacaagtcaaggaggaagccttacaagaaaccaaccctgctgaaaccttgttctcagacttctggccaccaaaatagtgagagaaaaaaattctgctgtgtaagccactcagtctgtggtactttgttatggcagccctagcaaatgaatatagcacccaaagatgaaactgcctcatgtcgagtttttttctgtctgctcagct

SEQ ID NO: 920987 - DNA, 741 bp, Homo sapiens
cctttctaaagttcatatgttggccgggcgcggtggctcacgcctgtaatcccagcactttgggaggccgaggtgggtggatcacctgagtcaggagttcgagaccagcctggccaacatggtgaaactccatctctactaaaaatacaaaaagtagccgggtgtggtggcgcatgcctgtaatcccagctacttgggaggctgaggcagatgaattgcttgaacccgagaagcgtaagttgcagtgagctgagatcatgccactgaactccagcctgggcaacagagcaagactctgtctcaaaaaaaaaaaaaaaatcatatgttgaagtcctgactccactgcaccccccaatcccactgccagttacctcagaatatgactgtatttggagatggggcctttaaagaggtaactgagttaaaatgaggtcatcagggtaggccctaatctaatgtgattggtgtccttataaraagaggggattaggacacagatacacatgggggaaggccctatgaaggcatagggagaagatggccattacaagtcaaggaggaagccttacaagaaaccaaccctgctgaaaccttgttctcagacttctggccaccaaaatagtgagagaaaaaaattctgctgtgtaagccactcagtctgtggtactttgttatggcagccctagcaaatgaatatagcacccaaagatgaaactgcctcatgtcgagtttttttctgtc

SEQ ID NO: 920988 - DNA, 720 bp, Homo sapiens
cagaatttgaagctctgacgtctactaccttcccagactatgatcttccgatatactatagtactatgccctaagaatgcagaagaaatgcttattacgaagcactgaccacatcccaggcactatgctagatcttaattgatgagagcactggctaagtggttctgaccctgtgccagccattagaacagactgccgggctccacctcagagtttgattcagtaggtccctgttagtctggggtggagttcaagaatttctttctaataaaktcccaggtgttactgatgctgccggtcccaagaccacaccttgaggaccactgctcccaaggttcaagtaatggtcttttgaaacaaacaaaaaaaatctacttagctcctcattttcaacctgcaagagctggcagcctccaccttctgcaatcgaaacacctgataccttgctcaggcctagcagggaggagagaacaagacttattctttattctgtgcttgtctggaagaactgagaagaaagtaagatggttgaaaaggggggacagataaaaagtaatgaaaaatgttgtatccttactacaaaacagaatttatacctttaagctgtgaccttgagtaaaacttgagcctgtttccttactgggaagacggttgattcctaacatggggagagttagggcaaatgaataggatcgcatgcaatgagtcaagcggagctct

SEQ ID NO: 920989 - DNA, 720 bp, Homo sapiens
cagaatttgaagctctgacgtctactaccttcccagactatgatcttccgatatactatagtactatgccctaagaatgcagaagaaatgcttattacgaagcactgaccacatcccaggcactatgctagatcttaattgatgagagcactggctaagtggttctgaccctgtgccagccattagaacagactgccgggctccacctcagagtttgattcagtaggtccctgttagtctggggtggagttcaagaatttctttctaataaattcccaggtgtkactgatgctgccggtcccaagaccacaccttgaggaccactgctcccaaggttcaagtaatggtcttttgaaacaaacaaaaaaaatctacttagctcctcattttcaacctgcaagagctggcagcctccaccttctgcaatcgaaacacctgataccttgctcaggcctagcagggaggagagaacaagacttattctttattctgtgcttgtctggaagaactgagaagaaagtaagatggttgaaaaggggggacagataaaaagtaatgaaaaatgttgtatccttactacaaaacagaatttatacctttaagctgtgaccttgagtaaaacttgagcctgtttccttactgggaagacggttgattcctaacatggggagagttagggcaaatgaataggatcgcatgcaatgagtcaagcggagctct

SEQ ID NO: 920990 - DNA, 728 bp, Homo sapiens
ggggctttgaaaccagagagaactggtgtcttggtgtctattgctgcttaatgcactgccccaaaacttggccgtgtaaagcaacatttactcattaccgtcccttccagaggacacagtgggaggggctgtctctgctccacaatgtctggggcctcgaatggctggggctgccccctagataaggggacacctacctgccttcaagtcctggatctgctagctgtgtgaccttgagcaggttaagtggcctcactgtgtctgcttcctcgttggaaatggaaataaaaatagggcctgcctgctatttttgttggaattaagtcataccatktctatgaagcactgggcacagatgcccgacgggaaatgtgaagaaacgatgaaagcagtggtgatgcctctccctgtcttttgttcccagggtgcaccaggagactttggcccccgggtaagaaccaggcatgacctccctcactgcccacatggtttgttttgtgtaataatgaggcataactggcgctgcttctgggtcccagctccccgcagctcatcacagaaagaggccaagagggctcttccccacccatagcaccggtggaagcccccagggacctgggttgtggggctgcccctcttgcgcaggtggagtgtctctggaagacggccaggtctccatgcttaccactgtggatgctggacagtggggctggcacgtgaccccagac

SEQ ID NO: 920991 - DNA, 728 bp, Homo sapiens
ggggctttgaaaccagagagaactggtgtcttggtgtctattgctgcttaatgcactgccccaaaacttggccgtgtaaagcaacatttactcattaccgtcccttccagaggacacagtgggaggggctgtctctgctccacaatgtctggggcctcgaatggctggggctgccccctagataaggggacacctacctgccttcaagtcctggatctgctagctgtgtgaccttgagcaggttaagtggcctcactgtgtctgcttcctcgttggaaatggaaataaaaatagggcctgcctgctatttttgttggaattaagtcataccatgtctatgaagcactgggcacagakgcccgacgggaaatgtgaagaaacgatgaaagcagtggtgatgcctctccctgtcttttgttcccagggtgcaccaggagactttggcccccgggtaagaaccaggcatgacctccctcactgcccacatggtttgttttgtgtaataatgaggcataactggcgctgcttctgggtcccagctccccgcagctcatcacagaaagaggccaagagggctcttccccacccatagcaccggtggaagcccccagggacctgggttgtggggctgcccctcttgcgcaggtggagtgtctctggaagacggccaggtctccatgcttaccactgtggatgctggacagtggggctggcacgtgaccccagac

SEQ ID NO: 920992 - DNA, 728 bp, Homo sapiens
ggggctttgaaaccagagagaactggtgtcttggtgtctattgctgcttaatgcactgccccaaaacttggccgtgtaaagcaacatttactcattaccgtcccttccagaggacacagtgggaggggctgtctctgctccacaatgtctggggcctcgaatggctggggctgccccctagataaggggacacctacctgccttcaagtcctggatctgctagctgtgtgaccttgagcaggttaagtggcctcactgtgtctgcttcctcgttggaaatggaaataaaaatagggcctgcctgctatttttgttggaattaagtcataccatgtctatgaagcactgggcacagatgcccgackggaaatgtgaagaaacgatgaaagcagtggtgatgcctctccctgtcttttgttcccagggtgcaccaggagactttggcccccgggtaagaaccaggcatgacctccctcactgcccacatggtttgttttgtgtaataatgaggcataactggcgctgcttctgggtcccagctccccgcagctcatcacagaaagaggccaagagggctcttccccacccatagcaccggtggaagcccccagggacctgggttgtggggctgcccctcttgcgcaggtggagtgtctctggaagacggccaggtctccatgcttaccactgtggatgctggacagtggggctggcacgtgaccccagac

SEQ ID NO: 920993 - DNA, 609 bp, Homo sapiens
tgggggcagcacaccgagcgtgcgctgaggcggggtgaggcatcacctcatccaggaaacgcaaggggtcagggaattccctttcctagccaagtaaagctgtgacagaaggcacctggaaaatcaggtcactcccaccctaatactgcacttttccaatgctcttagcaaacggcacaccaggagactatatcccgtgcctggctyggagggtcccatgcccatggagcctcgctcgttgctagcacagcagtctgagatcgaactgcaaggcaacagcgagactggtggaggggcgcccgccatagctgaggcttgagtaggtaaacaaagcagccaggaagctcaaactgggtggagcccaacgcagctcaaggaggcctgcatgcctctgtagactgcacctctgggggcaaggcatagccgaacaaaaggcagcagaaacctctgcagacttaagtgtccctgtctgacagctttgaagagagtagtggttctcccagcatggagtttgagatctgagaatggacagactgcctcctcaagtgggtccctgacccccaagtagcctaactgggaggcaccccccagtaggggcagactgacacc

SEQ ID NO: 920994 - DNA, 609 bp, Homo sapiens
tgggggcagcacaccgagcgtgcgctgaggcggggtgaggcatcacctcatccaggaaacgcaaggggtcagggaattccctttcctagccaagtaaagctgtgacagaaggcacctggaaaatcaggtcactcccaccctaatactgcacttttccaatgctcttagcaaacggcacaccaggagactatatcccgtgcctggcttggagggtcccatgcccayggagcctcgctcgttgctagcacagcagtctgagatcgaactgcaaggcaacagcgagactggtggaggggcgcccgccatagctgaggcttgagtaggtaaacaaagcagccaggaagctcaaactgggtggagcccaacgcagctcaaggaggcctgcatgcctctgtagactgcacctctgggggcaaggcatagccgaacaaaaggcagcagaaacctctgcagacttaagtgtccctgtctgacagctttgaagagagtagtggttctcccagcatggagtttgagatctgagaatggacagactgcctcctcaagtgggtccctgacccccaagtagcctaactgggaggcaccccccagtaggggcagactgacacc

SEQ ID NO: 920995 - DNA, 807 bp, Homo sapiens
ttacaggtacctgccatggcaccgagctagtttttgtatttttagtagagacggggtttcaccacgttggtcaggatagtctctaactcctgaactcaagtaacctacccacctcagcctcccaaagggctgggattacaggtatgagtgaccgagcctggcttgaaactttgtgcccctcagacgaacatctcattaccaccaccccacccgcccaacttcagacccttggcaaccaccattttacgctgatatttctatgcacttgactttaagaagattccctatgtaaagtgagatcatgcagtattctctctctctactgggcttgttccagttagtgtaatatctttcagatttatccatgttttcgcaaatggcaggattgccttcaagggccacataatattgtaagcaacsttggcaggttcttggtctcactgaccaagaatgaaatcacagatcctcacagtaagtgttagtttttaaaggcagcgtttcaggagcttgctcctttcgaaggtgttttgagctttttcttcccggcaagatcacagtttcggtggctcagaaaataagctgctggaccttcacagtgactgtcacagctctcaaagcaccgtctctagaattctttgttccttgcagtaggttcacagtctctttgagcttgagaaacaaagctgtacacctccatagtcagcgttttaactcataaacggaacgcggacccaaactgaattacagcaggaattattgcaaaaagcaaaagaacaaagcccaaaccacatgtataaaggacctaaa

SEQ ID NO: 920996 - DNA, 761 bp, Homo sapiens
cctcatggtgagagttacagttctaaacgatggtgtgcctagactttttcctttctggtaagttcatgtaatcacttaactacaaatctccacggtggtacaacccttgaaagtgtcacgtgtgaagtttatttttcccagggggtttgtagtctgttctagcctccatgagtgaagctacaracctccacagtgattgcttcaactcgaaaatggacgtaccctaaattgttgacgcccacctgcccaaacttttttctctcccagcaaattcataatctcctagctttaaaacccaagccacaaacctttccagtaaacgttacaactcgcaaatctcacggaccaaaaacacaataaaccaacacgatgaaacctccaccacccgcctaacagtatcccagtggtttttcccatcctagagtcgggtggcctgcttttattcccttatctggccccacccatatcctgctcattggtccattttacagagagctgattggtctgttttacagagagccgattggtccatttttaacagagtgctgattggtgtgtttacaaacctttagctacacccagagtgctgactggtgcgtttacaatcctttagctagacacaaaagttctccaagtctccacccgattagctagacacagagcactgattggtgagtttacaaacctttagctagacacagagtgctgattggtgcatttacaatcctttagctacactgaaaaattcttcgtgtccccac

SEQ ID NO: 920997 - DNA, 730 bp, Homo sapiens
gggcaagctgaagcagggcggggcatcgcctcacccggaaagctgaaggagtcaggggatttcccttttctagccaagggaagccatgacaggctacctggaaaaatggggcactcccgaccaaatatagtgcttttcccaaggtcttagcaactggcagacaaggtgattctctcccgtgcctggctcagtagctcccatgcccacagagccttgctcattgctactgtggyagtctgagatggatctgccagaaggcagtctggctgggggaggggcatctgccattgctgtggcttgagtaggtaaacaaagcagccagggaagctcaaactgggtggagcccaccacacctcaacaaagcctactgcctctagactccacctctgtggtcagggcatatctgaacaaaaggcagcagacaacttctgcagacttaaacgtccctgtctgacagctcttaagagagcagtggttctcccagcatggcgtttgagctctgagaacagacagactggctcctcaagtgtccctgaccctcgtgtagcctaactgggagacatttcccagtacgggccaacagacacctcatataggcggctgcccctctgggacgaggcttccagaggaaggatcaggcagaaatatttgctgttctgcaatatttgctgttctgcagcctccgctggtgatacccaggcaaacagggtctggagtggaactccagcaa

SEQ ID NO: 920998 - DNA, 757 bp, Homo sapiens
attgggactggttgcacagtgggtgcagcccacggagggcaagctgaagcagggcggggcatcgcctcacccggaaagctgaaggagtcaggggatttcccttttctagccaagggaagccatgacaggctacctggaaaaatggggcactcccgaccaaatatagtgcttttcccaaggtcttagcaactggcagacaaggtgattctctcccgtgcctggctcagtagctcccatgcccacagagccttgctcattgctactgtggcagtctgagatggatctgccagaaggcagtctggctgggggaggggcatctgccattgctgtggcttgagtaggtaaacaaagcagccagggaagctcaaactgggtggagcccaccacacctcaacaaagcctactgcctctagactccacctctgtggtcagggcatatctgaacaaaaggcagcagacaacttctgcagacttaaacgtccctgtctgacagctcttaagagagcagtggttctcccagcatggcgtttgagctctgagaacagacagactggctcctcaagtgtccctgaccctcgtgtagcctaactgggagacatttcccagtasgggccaacagacacctcatataggcggctgcccctctgggacgaggcttccagaggaaggatcaggcagaaatatttgctgttctgcaatatttgctgttctgcagcctccgctggtgatacccaggcaaacagggtctggagtggaa

SEQ ID NO: 920999 - DNA, 631 bp, Homo sapiens
acgcctgtaatcccagaaatcaggaggctgaggcagcagaatcgcttgaacccaggagacggaagttgcagtgagctgagatcacaccactgcactccagcccagccaacagagcgaaactccaactcaaaaaaaaaaaaaaaaaaccatcagaccttgtgagacttatttaccatcactattgcgagaayagcacagaaaaaccctgcccccgtgattcaattaccttccactgggtccctccaacgacacatggggattatgggagctacaattcaagatgagatttgggttgggacacagccaaaccacatcagacatgatttgtttagccctaccaagtcgcatgttgacatctgatccccagtgatggaggcgggcctggtgggaagtgttcatgatcgtgggggcagatccctcatgaatagcttgcaggaactcattcttacagggaagagtgaattctcactcttagttcctatgagaactggttgttgaaaagagcctggcactctcccctctctattgcttcctctctcaccgtgtgatctgcatacggagactcctctttggcttttgctctgagtggaagcttcctgaggcctcaccagaagcagatactggtgccatg

SEQ ID NO: 921000 - DNA, 631 bp, Homo sapiens
acgcctgtaatcccagaaatcaggaggctgaggcagcagaatcgcttgaacccaggagacggaagttgcagtgagctgagatcacaccactgcactccagcccagccaacagagcgaaactccaactcaaaaaaaaaaaaaaaaaaccatcagaccttgtgagacttatttaccatcactattgcgagaatagcacagaaaaaccctgcccccgtgattcaattaccttccactgggtccctccaacgacacatggggattatgggagctacaattcaagatgagatttgrgttgggacacagccaaaccacatcagacatgatttgtttagccctaccaagtcgcatgttgacatctgatccccagtgatggaggcgggcctggtgggaagtgttcatgatcgtgggggcagatccctcatgaatagcttgcaggaactcattcttacagggaagagtgaattctcactcttagttcctatgagaactggttgttgaaaagagcctggcactctcccctctctattgcttcctctctcaccgtgtgatctgcatacggagactcctctttggcttttgctctgagtggaagcttcctgaggcctcaccagaagcagatactggtgccatg

SEQ ID NO: 921001 - DNA, 598 bp, Homo sapiens
agagttcagaggagattgaagtatcttaggatggatcgaacttccaggtccctttctacttagacagtagtatttaagagatctacagtataaatggcttttgcttgctcatggaagcaaagcttatactcaagaggtaaatcctcactcatttaataaacatataggcagtggtgcatagtgactaagaatgtgggctctggaattcgagttctggatttcttacttactaatgtatgaccttgacaaagttactgaacatctccaaactttagtttccttatctgtaaaatgatggtaatagtattactactgggatgttgtgaagtmatgcataaggaacacttaacatggtgcctggcacagaggaagtactcaattgttattactactaattgttattatattactactcaattgttgttactactgaggctctacctctactcctcctctcctaccaggagccctagcctctgtctgtgttctgcatttccttggggctgccaaaatccttccttcctggtaatgtcttagacttcaggcagaaaaggtcagggaggttcccccagagaccttagagcttgtgcctctgagc

SEQ ID NO: 921002 - DNA, 775 bp, Homo sapiens
acttgtgcttattaactctctttcattgattactgactgggtgcacatccattatttcgattcagaatccctcccttggtatccagggaggacacgttccaggctcctctgtgtggtgttatgatacacatataccttggtttttgtccacagttcctggctcataactcccatagcccttgctacagtctttgggtataatgttgggttagaccttctctgcagaccttaagaaaaataacctctccaaccttctcctcctcttctttcacctgccctaaggcaggactctaactttccccctacctttctgattgcgggtcttaagacctccccagagaggttcctgctgtataccctgggggaaggaatgctgatgtcacaaagcttccatgaaaacccaagaggactgggttccaagagcttcaggatgtctgaacacatggcggcttcctggagagtggcacgcccagggagggcttggaagctccacagtccttcccccatacctgtcccacaygtctcttcatctgtacccttgcaatatccttcataataaaccggtaaacctgagtgtttctgtgacttctgtgagctgctctagcaaactaattgggcccaaagatgggattgtggaaacctcaactggaagccagttggtcagaagtttggagacccagacttgcaactggtgggaaggggggcaagtcttggagactgagccctaaacctgtgggacctggccctatctccagatacagtgttggaagtgagt

SEQ ID NO: 921003 - DNA, 612 bp, Homo sapiens
ccgcattcacccgtgcaagcttctgtgtctgcagctcaattttacaggctgctgtttgttagaaaagaaatgattcaggggctgcttttcattaaaaggaaaccttactgaggacttccttaccctcactgtctgcctaaataatttcttctttactcctatatcaccggcatcagaggccagcagaagtctcagtgatcgggcaggacaaaggacatttctgcagagaatactgaaggtccaggagacagcacagtgggacatatgtgggcccctgccccatcattaggaggaagtgtargcttttctgaggacctggatgccataccatcttgagacagagaatgaggaaccaacccttgacaagagagagatggccctggtagagaatttgaaccttgaattggattgaatatttatccaaaagaaattgaaccagcactagagagactgttttgaactagaagtaaccaagttaccttaactggaagttaggatttttccacccctgacatcagtgggacaagggcacatgagcaagatatttacggacaaagaagaacgttcatgttttgtacacctgctttgtagtatgttgcagataccgttggt

SEQ ID NO: 921004 - DNA, 540 bp, Homo sapiens
cttgccttcgtcaagaacacaaagttttgttatgaagttcggtctgtgccctgtttgtcagacactaaaaaaagggaggcccgtcggcaccgttttaccgcagaaccgaattcccagatggaaccccatatagctttatcactcaagtatggatctctagacaaatatttagtctggcccatttttaaaaaatgggtacacytgtaatcccattgaattgggggaggctagtgtgccggaactgcttgagccctggagttcaagaccagcctgggcaatatagtgagactccatctgtacaaaaaataaattaaaaaaaaattagcggctgggcgcggtggctcacgcctgtaatcccagcactttgggaggccaaggagggcggatcatgaggtcaggagatcgagaccatcctggctaacagggtgaaaccctatctctactaaaaatacaaaaaattagtcgggcgtggtggcaggtgcctgtagtcccagctactcaggaggctgaggcaggagaatcacttgagcccaagaggtg

SEQ ID NO: 921005 - DNA, 540 bp, Homo sapiens
cttgccttcgtcaagaacacaaagttttgttatgaagttcggtctgtgccctgtttgtcagacactaaaaaaagggaggcccgtcggcaccgttttaccgcagaaccgaattcccagatggaaccccatatagctttatcactcaagtatggatctctagacaaatatttagtctggcccatttttaaaaaatgggtacacttgtaatcccattgaattgggggaggctagtgtgccrgaactgcttgagccctggagttcaagaccagcctgggcaatatagtgagactccatctgtacaaaaaataaattaaaaaaaaattagcggctgggcgcggtggctcacgcctgtaatcccagcactttgggaggccaaggagggcggatcatgaggtcaggagatcgagaccatcctggctaacagggtgaaaccctatctctactaaaaatacaaaaaattagtcgggcgtggtggcaggtgcctgtagtcccagctactcaggaggctgaggcaggagaatcacttgagcccaagaggtg

SEQ ID NO: 921006 - DNA, 540 bp, Homo sapiens
cttgccttcgtcaagaacacaaagttttgttatgaagttcggtctgtgccctgtttgtcagacactaaaaaaagggaggcccgtcggcaccgttttaccgcagaaccgaattcccagatggaaccccatatagctttatcactcaagtatggatctctagacaaatatttagtctggcccatttttaaaaaatgggtacacttgtaatcccattgaattgggggaggctagtgtgccggaactgcttgagccctggagttcaagaccagcctgggcaatatagtgagactccatctgtacaaaaaataaattaaaaaaaaattagcggctgggcgcggtggctcacgcctgtaatcccagcactttgggaggccaaggagggyggatcatgaggtcaggagatcgagaccatcctggctaacagggtgaaaccctatctctactaaaaatacaaaaaattagtcgggcgtggtggcaggtgcctgtagtcccagctactcaggaggctgaggcaggagaatcacttgagcccaagaggtg

SEQ ID NO: 921007 - DNA, 540 bp, Homo sapiens
cttgccttcgtcaagaacacaaagttttgttatgaagttcggtctgtgccctgtttgtcagacactaaaaaaagggaggcccgtcggcaccgttttaccgcagaaccgaattcccagatggaaccccatatagctttatcactcaagtatggatctctagacaaatatttagtctggcccatttttaaaaaatgggtacacttgtaatcccattgaattgggggaggctagtgtgccggaactgcttgagccctggagttcaagaccagcctgggcaatatagtgagactccatctgtacaaaaaataaattaaaaaaaaattagcggctgggcgcggtggctcacgcctgtaatcccagcactttgggaggccaaggagggcggatcaygaggtcaggagatcgagaccatcctggctaacagggtgaaaccctatctctactaaaaatacaaaaaattagtcgggcgtggtggcaggtgcctgtagtcccagctactcaggaggctgaggcaggagaatcacttgagcccaagaggtg

SEQ ID NO: 921008 - DNA, 510 bp, Homo sapiens
actcactacactttacatgtcacaagcattaattacctcatttgattttcacccaaaccaagaaatggaagtatctagagaaagaagcccagcataaagacacaagggagcatttttggaggtaaccattgacagaaatgagttaaagaaaattcaactggtgtccaggctctggtgtaaaattctgctttggggtgaaacgcagggttacctgggcacactgtgatggtcctggctaaccagtagcaggtgggcttttgcagagataatccagggccctgtgatgagttggtcaccctagtgacccaattttggcctccagatattggcttctggccaattctaggagkatcaggaagccaaatttagcacagaatgtgctgcttcttcattgaactcctattcacccttcaaaacccagtacaaaagttcccttcctctgtaaggcagagtatagcaagaaaagctagggttctgaagccagagagactgtgggttcaaatcctagct

SEQ ID NO: 921009 - DNA, 645 bp, Homo sapiens
actacaatgctagcaacaatgtaactaccatgtttatcattcccgtatcctcttctctgatcctcacaacgagcttgtgatacatgttgggtttggttttggtgttgattttttgagacagtctccctctgtcacccaggctaaagtgcagtggcgccacctcrccatctcggctcactgcaacctccgcttcctgggttcaagtgattctcctgcctcagcctcctgagtagctgggattacaggcaccagccaccacacctggctaatttttgtatttttaatagagacggggtttcaccatgttggccaggctggtcttggactcctgacctcaggtgatccacccacctcagcctcccaaagtgctgggattacaggcgtgagccaccatgcccagcctgtgataccttttggttcccattttacaaaagaggaaacagatcccggagaactccagtggacttgcccagagccccacggctactaacaggttaagcctggttccaaaccatcgtactatgctgtgtggcctggcatgtgctaggtagggggagaaagaaatgaaacatgactgcaacttttcagaaacttctacaagcaagccctgaccccgagtgctgggaaccaccctatcaatgaaag

SEQ ID NO: 921010 - DNA, 645 bp, Homo sapiens
actacaatgctagcaacaatgtaactaccatgtttatcattcccgtatcctcttctctgatcctcacaacgagcttgtgatacatgttgggtttggttttggtgttgattttttgagacagtctccctctgtcacccaggctaaagtgcagtggcgccacctcaccatctcggctcactgcaacctccgcttcctgggttcaagtgattctcctgcctcagcctcctgagtagctgggattacaggcaccagccaccacacctggctaatttttgtatttttaatagagacggggtttcaccatgttggccaggctggtcttggactcctgacctcaggtgatccacccacctcrgcctcccaaagtgctgggattacaggcgtgagccaccatgcccagcctgtgataccttttggttcccattttacaaaagaggaaacagatcccggagaactccagtggacttgcccagagccccacggctactaacaggttaagcctggttccaaaccatcgtactatgctgtgtggcctggcatgtgctaggtagggggagaaagaaatgaaacatgactgcaacttttcagaaacttctacaagcaagccctgaccccgagtgctgggaaccaccctatcaatgaaag

SEQ ID NO: 921011 - DNA, 645 bp, Homo sapiens
actacaatgctagcaacaatgtaactaccatgtttatcattcccgtatcctcttctctgatcctcacaacgagcttgtgatacatgttgggtttggttttggtgttgattttttgagacagtctccctctgtcacccaggctaaagtgcagtggcgccacctcaccatctcggctcactgcaacctccgcttcctgggttcaagtgattctcctgcctcagcctcctgagtagctgggattacaggcaccagccaccacacctggctaatttttgtatttttaatagagacggggtttcaccatgttggccaggctggtcttggactcctgacctcaggtgatccacccacctcagcctcccaaagtgctgggattacaggcgtgagccaccatgcccrgcctgtgataccttttggttcccattttacaaaagaggaaacagatcccggagaactccagtggacttgcccagagccccacggctactaacaggttaagcctggttccaaaccatcgtactatgctgtgtggcctggcatgtgctaggtagggggagaaagaaatgaaacatgactgcaacttttcagaaacttctacaagcaagccctgaccccgagtgctgggaaccaccctatcaatgaaag

SEQ ID NO: 921012 - DNA, 571 bp, Homo sapiens
gggtcaataattaatatctaccatgcaggccgggcgcagtggctcacgcctgtaattccagcactttgggaggccgaggcgggcggatcactaggtcaggagattgagaccatcctggctaacacgctgaaatcccgtctctactaaaaatgcaaaaaaaagttagccaggcgtggtggcgggcgcctgtagtcccagctactcgggaggctgagrcaggagaatggcgtgaacccgggaggcggagtttgcagtgagccaagatcatgccactgcactccagcctgggtgatagagcgagactccgtctcaaaaaaataaataaataaatatctaccatgcaaaaggatcaagtgggttaataggtttgcttgcctttgccatgggcttaacaaaccgatgcataacacatacgaacttgattcctccatttccccccttgtcttcctcccaggctttaagctttccaagagccagggctgagtctgacagtttttcctcagcctctgccgccttggcctcctgatatgcccgtctagcatttggtggtgaatgtcagatccgtgtctag

SEQ ID NO: 921013 - DNA, 641 bp, Homo sapiens
gctcctggctggtgacctactttgagtagctttcttgcaggtacttccttatttttatttttattttattttatttttttttgaggcagagtttcactcttgttgcccaggctggagtgcaatagcgagatctcggctcactgcaacctccacctcccaggttcaagtgattctcctgcctcagcctcccgagtagctgggattacaggcatgcgccaccacacttggctaatttttttatttttttaaatagggatgacatttctccatgtttgtcaggccttggactctctacgtcaggtgatccayccacccacctcggcctcccaaagtgctgggattacaggtgtgagccactgcgcctgacccttgcaggtacttcttaaagctatggggttttcccagagcttggtagcatgtgtgttcaaagggctatcaatgttgagttgtcctagcaggcactggatagagagcaggatggtcctgatatcatacggggcagaccacttctccttcagatgtccaggcatatgttaccctgggtgtccacgttagggtggtagcagggtgtgaggaacttcactgtgggtgcatcgtaaaggtgggtagtcattgaggaactccagcaagagcttatacct

SEQ ID NO: 921014 - DNA, 740 bp, Homo sapiens
ttgccagtatgtccctggtgttgcccgtgtagaaggatgcaccccacgaggtttggctccagatgaaatctgacagatggatgttaccaatatagccacctttggcaaactcagctatgtccatgtgactatagactcctactcccatatgctgcatgccacatgccaaacaggggaaatagctggtcatgcctggtgacattgttgtcatttgcccatataggggggtccctaaacaattgaaaactgacaatgaacttgcttatgctagtgatgcctttcaaaattttttagttatgggcagtcacccataaaacaggaattccttacaatcctcgagggcaaggccttactgagtgggtacatcaaacggtacaacgtatgttgaaaaaacaaaaagggggaataggagaccaactaccacctcaggcaaaattacattagccttgcttactttaaactttttgactcctggtacagacggtaagactagcagaacgacattggcaagtgttagaggaaaagaggcaagtttacccaaaggtgttatggaaatctccagatgagggacagtggaaaggcccggkggaattgctgatgtggggacgagagtatgcttgtgtttttacaggagatggacaaaccatgtgggtgccctccaggtgtgtgcgaccatgaaatgggagactagcaggacccacgttggccaaccgtggacctggtccctccagtaggagtcg

SEQ ID NO: 921015 - DNA, 435 bp, Homo sapiens
gaaacccgctgtggaacatggacctttctccagtgcagaggggccacggggccctgggaagggagttggagggttacagccctggtcatggcagggagacgcaggaactggaggcaggaagagctgtgttcatccccacagggtgcccctccgctcaggaatttgtgcaatagaatggggtgagctaatggggtcacatttagggaaaggagtctttctgtccacccaacacacatctcatcctatgcacacgcttctccctttccccattgtcctctctatgatgggaaactaatgcttcccyaggcgggtgattgagggagaggaggggttggtctgcttgtgtctctcctttctcccctccctcaagtctcctgcctgcctttctgctgctctgttcagactctcacttcctgcagttctgcagtcagtttg

SEQ ID NO: 921016 - DNA, 569 bp, Homo sapiens
aaagctcaatagcaagctaacaattgcttctcaaaagaggaataagcttttccagcctctggcagtttctgggtccaaaacatgaaaagtaccctctttccatcttgtttctgcctaaggctccaattagcatgttgatctacgacagttactcgcagttcatcaggcccatcccatataggccatagatccagggccagttgcactgcttgtttagcttgttcaaaagccatgctgtctttctctccacagtgagagtcatacctttttctagtggctgcattcagatgttgtaaaatgttacccaagtaaggaatatgatgtgttcagaatccaaacaagycaatacatttctgggcctccttcttagtggtaggggttgcaaattatagtattttagccttagcctttggtgaagtggactgtttctttgcattccataggatgccaaagaattttacactttgtgcggatccttaattttactaggcttaatttcccatttttgagataggaactgggtttttacatgctctaagccccggctgactagttcttcagttttaccc

SEQ ID NO: 921017 - DNA, 774 bp, Homo sapiens
aaatattgtagcttccacctgaaaatctacttgccaccaccaagttttgattcagtagtaccaggtagtaaaattaggaaacctacaaattgaaagtattttcttttcttttcttttcttttcttttcttttcttttttttttttttttgagacagagtctcactctgttccccaggctggagtgcagtggtgcaatctgggcttactgcaacatccacctcccaagtttctcctgcctcagcctcccgagtatgtgggactacaggcacacatcactatgctcsgctaatttttgtattttcagtagagatggggtttcaccatgctggccaggctggtctcaaactcctgaccttaggatctgcctgcctcggcctcccaaggtgctgagattacaggcatgagccactgcaccaggcaaattggaagtattttctaaatatttagaaatctctgttacaaatttgtattttgttattaatttactagaatattttatcacatcatctttcctgagcacattactagcttgtaattggagaatgtgagcaagattcatgttatttatttttgataaaacaggtattgttgtctcaaagccagacctcatcacccatctggagcaaggaaaaaaaccttcgactatgcagagacatgagatggtagccaacccctcaggtaggtgtgagtgaaaatgaatacaacagacaacacagtaagaagtccaaggtcaaaaagaaagccagtccttaaggtgtgattctggaagctgt

SEQ ID NO: 921018 - DNA, 594 bp, Homo sapiens
ttggggacacacaaatatcttcctaattttgagaaactgaaactattttttagttttctttttgtatccggtctgaaatttgtgagagtagtagtttctgttgcatttttttttgttcatttttgtgcacagtccattctatttttattactatatagtcttgaaatatagtttgaaattgtaagtacgatattctgttttcttctttttcctsaagattgctttggctattcaaagtttattttagtttcatgtaaattttagaattgtattttccattattgtaaaaaaaaacactgcaattttaataggaagattattgagtctgtaaatcactttggataatatgattctttaataatatttattcttttaattcattgacataaaatattttaaaattaatttttatcttctaatttttttattttgttattgtaaacttttttttacctccttggttaatttttttctcaggaatttatttaatgctatattaaataagattttttcttcctcatcagatagtttgttttaagtgtaagaaaccatacatatacttgtgtgtttaattttatattttgctaatttact

SEQ ID NO: 921019 - DNA, 741 bp, Homo sapiens
ctcccaaagtgctgggattacaagcatgagccaccgcatctgaccataccatattttctttatcttgtctaccattgataggcatttagggcctgtccttgtctttgctattgtgaatagttctgcagtgaacatgcatgtggatgtgtcttgataatataataatttatatttctttggatatatacccaattatgaggttcctgggtcaattgataattctgtttttagttatgtgaggaatcaccacactgctttttatagttgttgaactaatttacactcccaccagcagagtataagcattcccttttctctgcaaatttgccagcatctgttactttttgacttttaaaaaatagccatcctgatgggtttgtagtgttctgacmagtgtgatgtggcatctcattgtggtttctcttttaatttctctaatgattagcgatgagcattttttttcatttgcttgttagccacatgtatgtcttcttttgaacagcatctgttcatattttttccctctttttaatgagattgtttggttttttcttgtaaacttgtttaagttcttaagaaattttgattattagacctttgtcaggcaaagtttgcaaatattttcttttattctctaggttgtctgtttactctgttgatagtttcttttgctgtgaagaagctctttagtttaaataggtcccatttgtcaatttttgcttttgtggcaattactttcgg

SEQ ID NO: 921020 - DNA, 635 bp, Homo sapiens
tgctgcaaagcacgtaattttattctgttttatggctgactcgtattccatggtgtacatgtgcctcatttttctcattcagtccactgttgatgggcacctagattgattacgtatctttgctattgtcaaaagtgctacaatgaacatatgtgtgcatgtgtctttatagtagaatgatttatatccctttggtatatatctggtaatagtgtagcaggatgagtcgcagacaaaactcctcagacgccagattaaagaaggaagaggttttttattcggccgggakcattggcagactcgtgtcttaagagccgagctccccgaaaaagaaattcttagcccttttaagggcttacaactctaaggggtctacatgaaaaagtcataatagatcaagtaagcgtgagaaacatgactgggggctacatacatcagctaacagaacaaaaagttttacagtattttctcatacagtgtctggaatttacagataacaccaatagttttggtcaggggttaataatattattattattttagccaccagggccaggtggtggtgccaaggtcgtctagctatttatcttacttctgtttcttttcaactttttgctttctcccttttctcctgt

SEQ ID NO: 921021 - DNA, 777 bp, Homo sapiens
gatcggtgtccaggagatgcgggatgccttcaaggaggtgagttaacagtgtcatggtgctggtgatggtagaggcagaccctctgaggtctgcctgtaattagccaatgccatggcacagcacccaccaaccaggcccccacctttttttttccagccatggtgggatcaataaatagggaagaaaaataacgtattccaaacacctgcaatggatcaatgcctctgtatactttatctgatttaatcctcaaaaaaacaaacaaacaaaaacaaaaacacgcacacaaacacattaggagtaagcaagcagtcatgtatcccaattaaacagatgagaaaagtgaggctcatgaagattataaatcttatccaagatcctgccatctctagaataaatgttaggactttttttttttgagacggggtttcactgttgtccccaggctggagtgcaatggtgcaatctcggctcactacaacctctgcctcccgggttcaagccagtctcctgtctcagcctccyaagtaactgggattacaggtgcgcgataccacacccagctaatttttgtatttttcgtagagacgggggtttcaccatgttgaccaggctggtctcgaactcctgaactcaagtgatccacctgcctcggtctcccaaagtgctgggattacaggcatgagccaccgtgcctggccagggcctctattcttagtgcctgtaacaggaagaatccaagaatttgagatcccagaagggaatgcaaagtggtc

SEQ ID NO: 921022 - DNA, 640 bp, Homo sapiens
atgttgcctaggctgatctcgaactcctgagctcaagcagtctccccacttcagcctcccatcccaaagggctgggattacaggcataagccacctcacctggcctcattctggtctttttttttttagtggggaaaaccacaatctttcggaaccttaattccttcctctgtaaaaytgcatctggggactctctgaaatgaaataaaatgcctggacaactaacaaatgcaaaggaaactcactccactctggtcaggccacgtgagagagagctggtacctggattctgctgaatattgtcagcttggacttggagggatctgccgggggcccggccgatgagaaggaggccatggctacctggctcggagaagccgcacagcacatatccatcttcgccttctctttccggaagccggagaatcgcggggccctggggttgcccaagagccggtagcctccaccccgggagcaggctgggcccttttcaccttttgtgatccttgaagccgcgccattctcggctggggcctgcttccctggcagcgaggctcctggtggctcctccccacctaactgggtctgccgttggcctgtggaggggaagatgtcctccaggtccaaggtccctttagag

SEQ ID NO: 921023 - DNA, 565 bp, Homo sapiens
ctgttatccccagctgcaggggtacctctcctatcaagaacatgtgaaattttgccctcattaaaaaaaaaacaacaacttgctactatgtttatatatatatatattttgaaaatctgggaaaaatgacaaccctctgtattttcatttttcaatttattgtctacataggttttattattttggggacatgtatatacaaaatgamttttcatgctttgctcaattttctttccatgtattttagtatgtgttttaatttctgtggtttttatttctttcatatgccctgatgtcttttatttcaggttatacattttttaattgtaagacaaatctttcatttataccttctgatttttgttgtgcctttgtttgtttcatcttgatttggaaggccttgcatgattatgaagtactaagtttcatttaggaataaagttttgttgtttaaaattttgtttacatttgtgtttaatttgaatttttgcgtatatcataagtatttgatttgttgtaaaattacagatgtttgtcataagaggttcttacatatttggaaaac

SEQ ID NO: 921024 - DNA, 576 bp, Homo sapiens
tctctattctgttctgttgctctatgtgtctatttttatcccagtagcaagctgttttggataccattactttctagtatattttgaagtcaggtagtgtaatacccctcagtttggttctttttgctcagaattgctttggcttttttggatcttccgtagttccctatgaattttaggagttttttttttttttktttttgtttttgttttttttttttagacaaggtctctattgcccaggttggagtgcagtagtgcgatttcagctcactgcaacctctgcctcccaggctcaagcgattcacctgcctcagtctcctgagtagctaggaccacaggtgcatgccaccgcacctggctaatttttgtattttttgtagggatgggttttgccatgttgcccaggttggtctcaaattcctgagctcaggtgatccgcccatcttggcctcccaaagtgctggaattacaggcacaagccacctcacccagccgtaggattcatttttttctatttctgtgaataatgtcttttgatattttgaaagagaatgtgttgaatatgtacattgc

SEQ ID NO: 921025 - DNA, 567 bp, Homo sapiens
gtgacaaccacgtccacctggtgatcctgagagcacacgattcccaacagttacacaacaccccgattaaactaatcagtcttcgagccgcatgataccgtgacccgagagaccaaggcagcacctcgctggagagactgggacacacagtccttctgcttctggggtctaccctgggctgcaagggctgttcctccacctttctgtagttcagggctggcaggagggtgggcaccaggtcaggctgggtgcgccatggttgagaggcaaaggtgatcccctatataggaaggttcatgcagagccagcctctccactctttcccacgtggggactagaatgactattagcctctccytttgctttttaaggttattacctggcctaacctagggatggctggctttgcgggggggggggggggggggggcatggttcctttcactgcattttccaccaacagtcattagacacctggcactgtcacagctcacttttccagagggatattcctgtggctttggcaaggagccattagtgatgtgcaacttgagttcagagaacttc

SEQ ID NO: 921026 - DNA, 700 bp, Homo sapiens
ttctctgggggactgcctcagccctcccagccaccatcctcttcctgtgggtctctgagatccacgtgtgacggtggctctgcctcggcccagatggcctccaggccccatgtggctcctctgggccacctcatcttgcctgcagtggcctccctttgggcctgaggaggtggccttgggcctccccgatctctgcatccccccaaggttggagctcaggggtggctggtggagtctctctaacgagcctgaaaggcggcctcatgcagtgggtgggatgagcccagcctcagtttccctaatgtccatgctgcctcagagcaaggtgggacaagagtgctcacagactctgagggccacaacgccagcatcatacggatgtggttcatggggacaagtgagaaacagtgaagctctccttctccccaggagcagtggatccgctagaatccctgggccaaggcttgagccacagtctctgggcctgggggcggagggggcacctctgtattggatggckcttctttctcaagcactccatggtttctccaacctacaccccactgccaggccctgctgggtcaggccaggatggcagcgggacctacagcgtcgctcccggcccctccagggcatgtgtccctgtggcctgcagggcttaggactgcagccactgggggtccctgcgatcaggaaggcc

SEQ ID NO: 921027 - DNA, 621 bp, Homo sapiens
cacaggccaggttgcttcaacagaagaagggtatcaactcacagttctggaggctggaagcccgagaccaaggtgtcagcagggttggtttctcttgaaggcactgggaagggatctgtcacaggcctctctcacagcttctggtggaggctggtggtctctggcactgcttgstttagagaagcatcaccccagtgtctgcctccatcttcacacagacttctccctgtgagagtgcctgtatccacatttcccgcctttctaaattgaatttatgttttcaaaaaaaatactttttttttttttgagatggagtcttgctctgtcactcaggctggagtgcagtggcgcgatctcggctcactgcaagctccgcctcctgggttcacgccattctcctgcctcagcctcccgagtagctgggactacaggcgcctgccaccatgcctggctaattttttgtatttttagtagagatggggtttcaccatgttagccaggatggtctcgatctcctgacctcgtgatccacccgcctcggcctcccaaagtgctgggattataggcatgagccactgcgcccagccaaaaaaaaatactttttttttttttttaaagaca

SEQ ID NO: 921028 - DNA, 444 bp, Homo sapiens
tgtcataaatcctgtgaagtcatgctcaacatatagacacggttttcttcagcaggaatgcactgtttcaggcctcatggctttcacagctttttctataacaacaatgacatctttaatgatgtcacccttccagacttgcatgatattctattaagattctcttgcatagtgttgaaaatcctttccataaataccaagtgtaatgagccctaaaggtccttatgaccctgatctttaggctgaattacaaactttgtgactgggggcaagktgaccacttcaatgcctttggtgttgaactcatggggttctgggatgccagggggattgtccaatatcaaaaaaactttaaaaggcagtcacttactagcaaggaatttcctagcttcaggaacaaagtatctatggactcaatccagaaaaggggttctcatccactcc

SEQ ID NO: 921029 - DNA, 671 bp, Homo sapiens
aatgctgcctggcctgggactcacacttcagggcagtgggcttctttatagcccagggtaggtccagaaatgccatccagaagtcaacctcttgaatcaaaaatgccaagagccctcttgattatctaccccactgtggctgtgctggtatctaaagccagcaagtttcagaggctcacccaagggccctgacgtaatacctcggtatcactgtttgttattcagggcccaaggttcttccgttarcatgagatgaatgctgccaggtctaggttcttcctttcaggacagcaaattccctcaggctctgagtggatccagaagcgctgtctggaaatcagggactagggtcaaaaaccttagaagtctatttagtattctactgtcttgctgctagggtggcactcaaaccaaagacacagtccttcccattattcctccaccccttggcaaaagcagagcagtcttatcctgtggccaccatcaccagaggcccatggggaatactgccagactactgtcaatgttccctcaaggcccaagggctgttaaatcagtctgtggtgagtaatgtctggcctaggattcacccttcagggaagtggactctcctctggccagggccaagggtcaagtcctggaatcaggtaccccaagacatgacttggtat

SEQ ID NO: 921030 - DNA, 839 bp, Homo sapiens
tccgttagcatgagatgaatgctgccaggtctaggttcttcctttcaggacagcaaattccctcaggctctgagtggatccagaagcgctgtctggaaatcagggactagggtcaaaaaccttagaagtctatttagtattctactgtcttgctgctagggtggcactcaaaccaaagacacagtccttcccattattcctccaccccttggcaaaagcagagcagtcttatcctgtggccaccatcaccagaggcccatggggaatactgccagactrctgtcaatgttccctcaaggcccaagggctgttaaatcagtctgtggtgagtaatgtctggcctaggattcacccttcagggaagtggactctcctctggccagggccaagggtcaagtcctggaatcaggtaccccaagacatgacttggtattctattcccctgtggccaagctggtacctgaggtcagcaagtctcagaagcccatccaaggcccttgctgtattacctgggtatcgctgctgcttattcagggtccaagattcttcagatagcaggtgatgaatgttgccaggactgggtccttcccttcaaggcagtgggttcccttcttccctaagatatgtctagaaatgtctccctggagctaggaggtagggcctggaatgggggcctcacaattctgactggtgtcctgtcctgctgcggctgaactggtatgcaagatgcaagacaatattctccctactctttcctctcttctactcaagtggaagaaagggatctcttttggagccacgaattgtacagcctggggttgaggtagtggtgatgccag

SEQ ID NO: 921031 - DNA, 839 bp, Homo sapiens
tccgttagcatgagatgaatgctgccaggtctaggttcttcctttcaggacagcaaattccctcaggctctgagtggatccagaagcgctgtctggaaatcagggactagggtcaaaaaccttagaagtctatttagtattctactgtcttgctgctagggtggcactcaaaccaaagacacagtccttcccattattcctccaccccttggcaaaagcagagcagtcttatcctgtggccaccatcaccagaggcccatggggaatactgccagactactgtcaatgttccctcaaggcccaagggctgttaaatcagtctgtggtgagtaatgtctggcctrggattcacccttcagggaagtggactctcctctggccagggccaagggtcaagtcctggaatcaggtaccccaagacatgacttggtattctattcccctgtggccaagctggtacctgaggtcagcaagtctcagaagcccatccaaggcccttgctgtattacctgggtatcgctgctgcttattcagggtccaagattcttcagatagcaggtgatgaatgttgccaggactgggtccttcccttcaaggcagtgggttcccttcttccctaagatatgtctagaaatgtctccctggagctaggaggtagggcctggaatgggggcctcacaattctgactggtgtcctgtcctgctgcggctgaactggtatgcaagatgcaagacaatattctccctactctttcctctcttctactcaagtggaagaaagggatctcttttggagccacgaattgtacagcctggggttgaggtagtggtgatgccag

SEQ ID NO: 921032 - DNA, 898 bp, Homo sapiens
caagggccctgacgtaatacctcggtatcactgtttgttattcagggcccaaggttcttccgttagcatgagatgaatgctgccaggtctaggttcttcctttcaggacagcaaattccctcaggctctgagtggatccagaagcgctgtctggaaatcagggactagggtcaaaaaccttagaagtctatttagtattctactgtcttgctgctagggtggcactcaaaccaaagacacagtccttcccattattcctccaccccttggcaaaagcagagcagtcttatcctgtggccaccatcaccagaggcccatggggaatactgccagactactgtcaatgttccctcaaggcccaagggctgttaaatcagtctgtggtgagtaatgtctggcctaggattcacccttcagggaagtggactctcctctggccagggccaagggtcaagtcctggaatcaggtaccccaagacatgacttggtattctattcccctgtggccaagctggtacctgaggtcagcaagtctcagaagcccatccaaggcccttgctgtattacctgggtatcgctgctgcttattcagggtccaagattcttcagatagcaggtgatgaatgttgccaggactgggtccttcccttcaaggcagtgggttcccttcttccctaagrtatgtctagaaatgtctccctggagctaggaggtagggcctggaatgggggcctcacaattctgactggtgtcctgtcctgctgcggctgaactggtatgcaagatgcaagacaatattctccctactctttcctctcttctactcaagtggaagaaagggatctcttttggagccacgaattgtacagcctggggttgaggtagtggtgatgccagt

SEQ ID NO: 921033 - DNA, 604 bp, Homo sapiens
gcctgtaggccttggagagcccaaaccaatcagggattgaaaggatccccaacatagcacaactgctctaccaaaatgcagcactactccttctttaagcaggtcccagatcccgttccttctgattgggtgagacctcccgacctgggtctccaaccacctcctacagttgcattygaattggcaacaagtcagtatccacctgggatggagctcccagaggaaagggcaggctgacatatttgctgttttgcagccttaactggagtggaccaccagcaaactgcaacagccctatgaagaagtggccaggctgttaaaaacaaacaaacaaacaaacaaacaaacaaacaaagaacactaaaacccaggttgtgtgaccacgaaaaggtcagcaacctcaaagattgaagataaataagcaaatacacatgaaaaaaaatcagcacaaaaacattgaaaactaaaaagccagagtgccctcttttctccaaatgaccacaacaccactccagcaagggttcataacctgggtgaggctgagatggttgcaatgacagaagtaggcttcagaatatggataaaaatgaattttgctgagcta

SEQ ID NO: 921034 - DNA, 589 bp, Homo sapiens
catccagtggttgtggttggtcttcattccaccagaccttaatgtgggaagtgagaaatggtagaatgacatgccacagttggtccactggaaaggcccaccaccgtttgggaagattggccatttatagacaggctgtgtatataatatgaaaaagatgctctcaacaatccttccaaccttttaaaagaaaaatttgctacatctagcctttctagatgaaaagaggttgctgacatatgatagagttagaaaactacacatcctgtaaaagcccwcttgtttaaaaatatcatagaaattaagggtattctgaaagtgactttttgaaatagagttgttagaccgcctctggaagtgacacaaggaaccacacatgtccatgttggttcagtgggttagaggatggaggacgtggagcagaagacttaagaaggaaagaagaaggttcatgccagactagtcatatttagaagacattttcatattataaccattgttttgtatgtgcattttattcctcactactgtatgtataattgacaatgataagaactttttgaaatatcttcatggatgttcaggagtg

SEQ ID NO: 921035 - DNA, 630 bp, Homo sapiens
tcttccgcttgattaatttggctattgatacttgtgtaggcgtcaagaagttctcgtgctgtgtttttcaggtccattaggtcatttatgttcttctctaaactggttattctagttagaaattcctctaaccttttttcaaggttcttagcttccttgcattgggttaaaacatgctgttttagcttggaggagtttgttataacccaccttctgaagccgacttctgtcagttagtcaaactcattttctgtcyagttttgttcccttgctggtgaggacttatgatcctttaaaggagaagaggtgttctggtttttggaattttcagcctttttgcactggtttttccctcatattcgtggatttatctacctttcgtctttgatgttggtgaccttcagatggggtttctgtgtggacatcctttttgttgatgttgatgctatacttttctatttgttagttttccttctaacagtcaggcctctctgatgcaggtctactgcagtttgctggaggtccactccagaccctgtttgcctgggtatcacaagcagaggctgcagaacagcaaagattgctgcctgttccttcctccggaagcttcatcccatagaggcacccgcc

SEQ ID NO: 921036 - DNA, 630 bp, Homo sapiens
tcttccgcttgattaatttggctattgatacttgtgtaggcgtcaagaagttctcgtgctgtgtttttcaggtccattaggtcatttatgttcttctctaaactggttattctagttagaaattcctctaaccttttttcaaggttcttagcttccttgcattgggttaaaacatgctgttttagcttggaggagtttgttataacccaccttctgaagccgacttctgtcagttagtcaaactcattttctgtccagttttgttcccttgctggtgaggacttatgatcctttaaaggagaagaggtgttctggtttttggaattttcagcctttttgcactggtttttccctcatattcgtggatttatctacctttcgtctttgatgttggtgaccttcagatggggtttctgtgtggacrtcctttttgttgatgttgatgctatacttttctatttgttagttttccttctaacagtcaggcctctctgatgcaggtctactgcagtttgctggaggtccactccagaccctgtttgcctgggtatcacaagcagaggctgcagaacagcaaagattgctgcctgttccttcctccggaagcttcatcccatagaggcacccgcc

SEQ ID NO: 921037 - DNA, 618 bp, Homo sapiens
cctcataaactctttcctgaacccattctcccctcttcccttataaagaatgaaataaggccaggcctggtgactcacacttgtaattctaacactttgagaagctaaggtgggaggatgtcttgaagccagaagctcaagaccagcctggggaacatggcaagaccctgtctctacaaaaacatttaaaaattaggccgggcatggtggctcacacctgtaatcccagcactttgagaggccgaggtgggtggatcacaaggtcaggagatcgaggccatcctggctaatatggtgaaaccccatctctactgaaaaaaaaaaaatacraaaaattagctgggcctgtagtcccagctactcaggaggctgagacaggagaaccacttgaacctgggaggcggaggttgcagtgagctgagatttcaccactgcactccagcctggacgacagagagagactccatctcaaaaaaaaaaattaaaaattagccaggtgtggtgatgtgcacctgtagtcccagctattcaggaggctgaggcaggaagatcacttgagcccaggagttccaggctgcagtgagctgtaattgtgccactgcactccagcctggatga

SEQ ID NO: 921038 - DNA, 583 bp, Homo sapiens
agttgatttttgtataaggtgagagatgaggatccagtttcattcttctacatgttgattgccagttatactagcaccatttattgaatagagtgtcctttccccactttatgtttttgtttgctttgtcgaagatcagttggctataagtatttggctttatttctgggttccctattctgttccatcagtctacatgcctatttttataccagtacaatgctgttttggtaactataggcttgtagtataatttgaagtcgagtaatatgatgcctccagatttgttctttttacttagtattggctatgtgggctctcttttgttccayacacattttaggattgttttttctagttctgtgaagaatgatgatggtgttttaatgggagtttcattgaatctgtagattgcttttggcagtatagtcattttcacaatattgattctacccatttatgaacatgggatgtgtttccatttgtgtcatcaatgatttcttccctcagtgttttgcagctttccttgcagacatctttcatctccttggttaagtacattcctaagttggttttgtttgtt

SEQ ID NO: 921039 - DNA, 583 bp, Homo sapiens
agttgatttttgtataaggtgagagatgaggatccagtttcattcttctacatgttgattgccagttatactagcaccatttattgaatagagtgtcctttccccactttatgtttttgtttgctttgtcgaagatcagttggctataagtatttggctttatttctgggttccctattctgttccatcagtctacatgcctatttttataccagtacaatgctgttttggtaactataggcttgtagtataatttgaagtcgagtaatatgatgcctccagatttgttctttttacttagtattggctatgtgggctctcttttgttccatacacattttaggattgttttttctagttctgtgaagaatgatgatggtgttttaatgggartttcattgaatctgtagattgcttttggcagtatagtcattttcacaatattgattctacccatttatgaacatgggatgtgtttccatttgtgtcatcaatgatttcttccctcagtgttttgcagctttccttgcagacatctttcatctccttggttaagtacattcctaagttggttttgtttgtt

SEQ ID NO: 921040 - DNA, 609 bp, Homo sapiens
ggtctttgctttatcttctgtgcagtgatgactccctacagtgagatgaatagtctggccaggtctgtaggtaatgtatattcttgcccttgaaaaagggaaaacttaagttgttgcagtcctatgattcaggcaagaactgtgatactgctttgttgacatgctttgacctgcagacctctgaatgaacactcttcatgctatctttgcataaagagttgttgctttctagcttttttggttagtgtccactgcctctatccagaaggctctcaactcagtgactcttttaatcacccacagaaatatgggatttttgtatccactaaataccaaaaatctatttattaagacagggagttctcattctttttgtctacgcatgtaatacacataatgttttytttttcataactatgcttttggcataagaccacactggttgacccttacaattatgattaggttttcagttaacctaatgaacacccatcctcttcagaattttaatttgtagtctgtagccaagatacaaccagtctgactgcatgcttccctcactttgtttcctataattttctcacccttctgactttcagaagaaaaagt

SEQ ID NO: 921041 - DNA, 635 bp, Homo sapiens
tgatcacagtgggatcatactaaaatactgtttttgtctgttttaactcactaatatatgacattcaactaaattttgtttactttgcagaggcagtcatttattcatgaaacatacttaattagcatgtactatatatcaaacaccatgctagatactggaagacatagctaaagaagatgcagctcctgcctgaagtattttacagtcaaggaggaggaaaaacaattagactaatagccataattgatatgttaagagctagaatagaggcagaatataggtaggatatttcttcaaaccagagtacttgtattcccaraggtttgtgaaaaatttccatgagggcacttggacactaagattattttaaggcaattcagttgcaatttctcaatgctcatttgtattttttctttcagttgagctgcgctagactggtaaaaatgtagtcaaggcacatgggtagggggaggcttaaagcatagtctctgatcttctgtacctttcttgatagccttttccttcactttagagaaaggaaaacctctcacccactgcaattctataatgttgcattggcctggatgcaaagaccactagattgccaaacaaagggacaatttgaaatcatc

SEQ ID NO: 921042 - DNA, 784 bp, Homo sapiens
acatgcagtgtttagttttctgtccttgcaatagtttgctgagaatgatggtttccagcttcatccatgtccctacaaaggacatgaactcattcttttttatggctgcatagtattccatggtgtatatgtgccacattttcttaatccagtctatcattgatggacatttgggttgtttccaagtctttactattgtgaatagtgccgcaataaacatacgtgtacatgtgtctttatagcagcatgatttataatactttgggtatatacccagtaatgggatggctgggtcaaatggtatttctagttctagatccttgaggaattgccacactgtcttccacagtagacgaactagtttacagtcccaccaacagtgtaaaagtgttcctatttctccacatcctctccagcacctgttgtttcctgactttttaatgatcgccattctaactgatgtgaggtggtatctcattgtggttttgatttgcatttctctgatggccagtgatgatgagcattttttcatgatatatcacattttctttatccattcrtctgttgatgtgcacttacggtgattccacattttggtcattgagaataatgctgcaataaacatgggagttgtgatggttaatgctgagtgtcagtttgattgaattgatggatacaaagtattgatcctgggtgtgtctgtgagggtgttgccaaaggagagttaacatttgagtcagtgggctgggaaaggcagatccacccttaatctaggtaggcacaa

SEQ ID NO: 921043 - DNA, 637 bp, Homo sapiens
atgtcagctgagatttatgtcagaatccaatgcaattgttagaacaaacaactttactttgatttcaacacaaatttttcaccgaggtttatcaagtgtcttgaatctgtttcaaaagagaattttctcaaattctttatcctctggccatgaatgtgtgagttctttgctcagccacgcattaatttggtttttgccagtgttaggaaaagtatgcaaccccaatctatctgttcatatctcagcctcctaggtttcttaaaaattttgtttaatgtttccaatggtaaatacgcctctgcttagagacttctttcytttttgtttttgttttgttttgtttgtttgtttgagatggaatcttactctgtcatccaggctgaagtgcagtagtgcgatctcggctcactgcagcctccgcctcctaggttcaagagattttcctgcctcagcctcccaagtagcagtgataacaggcatgtgccaacttgaccagctaatttttgcacttttagtagagacggggtttcaccatgttggccaggccggtcttgaactcctaacttcagatgatccacctgcctcggcttcccaaagtgctgggattacaggcatgagccactgcacccggccccaa

SEQ ID NO: 921044 - DNA, 730 bp, Homo sapiens
agtgtgaaaacagactaatacagtaaattggtaccaacagagtggggcattgctggaaagatacctaaaaatgtagaagtgacttcagaactgtgtgacaggaagaggttgaaacagtttgaagggctcagaagacaggaaaagtttggaacttcctagagacttgtttagtgactttgacaaacatgctgatagtgatatgaacaataaggtccagcctggggtagtctcaaatggagatgaggaacttgttgggaactggagtaaaggtgactcttgttatgttctagcaaagagagtggtggtatttttctcctatcttagagatttgtggaactttgaacttgagagagatgatttagggtatctggcggaaaaaatttataagtagcaaagcattcaagtggtgacttgggtgcagttaaaggcattcagttttataagggaagcagggaataaaagtttggaaaatttacaccctgacaatgcaatacaaaatraaatcccattttttgaggagaaattcaagctggcttcagacatttgcatacataacaaggagccatatgttaatccccaagacaatgggaaaaatgtatccaggacatatcagagatcttcatggcagcccctttcatcacaggccccgaggcctatgaggaaaaagtggtttcattggctgggcccagggtccctgcgctgtgtgcaggctagggacttggtgtcctgc

SEQ ID NO: 921045 - DNA, 583 bp, Homo sapiens
tagttttaagtcaggtagtatgatgcttccaagtttgttctttttgcttaggattgtcttggctatttgggctcttttttggttccatatgaatttttaaatagtcttttctaattctgtgaagaatgtcaatggcagtttaatgggaataacattgaatctataaattactttgggcagtagggtcatttttacaacagtgatacttcctatccttaagaatggagtggttttccatttgtttatgtcctttctgatctgatttttttgaacagtggtttgtagctctctttaaagagatccttcacttcycttgttagctgtatttctaggtattttcttctttttgtggcaattgtgaatggaagttcatttgtgacttggctttctgcttgcctgtttttgatgcatagcaatgctagtgatttttgcacatcgattttgtatcctgagactttgctgaagttgtttatcagcttaagaaggttttgggctgagacaatgtggttttctagatacaggatcatgtcatctgcaaataaagataatttgacttcctctctttctatttgaatacccttta

SEQ ID NO: 921046 - DNA, 695 bp, Homo sapiens
tcagcaaaaacacacaacagcaggctttcagtctccagctatgatgctgtgttttatgaaaaggttatgtacactgtatttttttttttttttgagatggagtctcgctctgtcgcccaggctggagtgatctcggctcacagcaagctccgcctcccgagttcacgccattctcctgcctcagcctccccttgtacactgtattttttttttttttttttttttttttttgagatggagtctcgctctatcgcccaggctggagtgatctcggctcacagcaagctccgcctcccgagttcacgccattctcctgcctcagcctccccatactgtatttttttgttkttttttttttgttgttgttgttgtttgcgatgcagtatcgctctgttgcctaggctggagtgcagtggcacgatctcggctcactgcaagctccgcctcccgggttcacgccattctcctgccgcagcctccccagcaactggaactacaggcgcacgccgacacgcccagctaattttttgtatttttagtaaagacggggtttcactgtgttagccaggatggtctcgatctcctgaccttgtgatccgcccgcctcagcctcccaaagtgctgggattacaggcgtgagccaccacgcccggcctgtacactgtatttttttttttaggtgagaagaaacatcg

SEQ ID NO: 921047 - DNA, 591 bp, Homo sapiens
gtacaccaatcagacatagatttggtcttttcacatagtcccatatttcttggaggctttgttcgtttctttttattcttttttctctaaacttctcttctcacttcatttcattcatttgatcttccatcactgataccctttcttccagttgattgaattggctactgaggcttgtgcatttgtcacgtagttctcgtgccatggttttcagctccataaggtcttttaaagacttctctgcattggttactctagttagtcatttatctaatttttttcaaggtttttaacttctttgctgtgggtttgaacttcctccttaactcrgagtagtttgatcatctgaagccttcttctctcaacttgtcaaagttattctccgtccagctttgttccattgctggtgagaagctgagttcccttggagacggacaggtgttctgatttttagagtttccagtttttctgctctgtttttcccccatctttgtggttttatctacctttggtctttgatgatggtgacgtacagatggggttttggtgtggatgtcctttctgtttgttagttttccttctaacagtcag

SEQ ID NO: 921048 - DNA, 731 bp, Homo sapiens
tagttcacccattcatctgttgaagaacatttgatttcttttttagctacaaagcttttatgaacattcatgtacaattctttgtgtggatgtatgctttatttcctgagtaaatacctaggagtccatggtcagtctatgcagtccatttaattttagccattttaatagctgtgtagcagtgtctcattgtggttttaacttgcattttcctaatcagtaaggatgttgagcttcttttcctgtactgactgggtatccgtatacgttttgtagtgaagcatttatgtaaatgatttatctttttaaaaattgagctgttttcttattgasgctcaaaaattctttatgtattctggatataaatcctgtatcagatatatgatttgcaaatattttcttctaagcatgcctggttttttcattctctaatcagtgtctttgaagtgcagagttcttaattttgatgaagttctatttatcagtttgttcctttatggattgtgcttttggtgtcacatgaaagaaatctttgtctaacttaaagccacaaaggctttcttctagaggttttataactttagcttttacatttatacctatgaactattttgaattaacttgtgtatacagagtgtagttgggatcaaagtttagttttttacttatggacatccaatttttccagaagtatttgtcaaaatgaccatcctttctccactgaattgcct

SEQ ID NO: 921049 - DNA, 575 bp, Homo sapiens
  misc_feature 366: n = A,T,C or G
ggaggacaaaaccctgtctctactaaaagaaaaaagaagaataaggagaagaagaagaagataaggaagtttttccttcgttctttgaaatctctttctgagtagcattcctcccccaccacaaaagtaaatgattccatggtgaaagacaagaaaataacttctccagtaggatgaggtggtctcataccaaccaaagcaaccaaagcttgcataccaacattgtcaggtgggtgagaattgcattcattcctaacctcttgaggcttcagcatcccaagactagatagtggaaaatctcagtagctctcgcaggcaaagctggcccggctggcggtctggggggcattggggccggggttgganttcagaacgctcmcccaccatgtctgaaaagcatccagagagatcataatgctttgacttctgatataaccttttggggtgtttatgtacttttgatgcttcaagggaataaaaagtctaaatagaattctaaatgcaaaacctctctctgtactactgaggattctcagatggaagaatacattggttaaccatggtaacaacatata

SEQ ID NO: 921050 - DNA, 734 bp, Homo sapiens
agcctttctttctgtttttaatagcctcctaggctgcaacctcccaaatgagaaccttgttaaccagaaggactgtaggctactgatttatatttcagtcataccgagaggaggaaaaattacaaaggtagaaagaaaaatgccaatgtacacatggactagttccgacatcttctctgataaagaatgtatatatctattcaggctctggmtgctaagggattccttccagatctcagtatttgacctcttacttttgggtcacgtggattcttcgtgcctcttgtgggcttgctgaaagcaaaagtaacaatttcatactcttgccattgaaacaaggggtctattacttttaaatcataagggcacttgtttcaacagaaatgttagtatcttggtgaagatggggtctaagttcttggtggcttctgaggatggcgaagggctcaccttctgtcatcccgaaccatcactgatgggacagtgtctctccatgtgtagctatgcaaaggccacagaacaaatgggtaaaaatatttggtggtcagaattctagctcaatagtcaaggaaggcttcctggaggagaaagttcattttgaactgggctttaaaagttggtgtcacagaaaatgcaagctgtccctcagaattaagactagagttctgtgaaatagtgattgcaaaaatggccacaattattctcctctctataggcacacccctttgcaatgt

SEQ ID NO: 921051 - DNA, 734 bp, Homo sapiens
agcctttctttctgtttttaatagcctcctaggctgcaacctcccaaatgagaaccttgttaaccagaaggactgtaggctactgatttatatttcagtcataccgagaggaggaaaaattacaaaggtagaaagaaaaatgccaatgtacacatggactagttccgacatcttctctgataaagaatgtatatatctattcaggctctggatgctaagggattccttccagatctcagtatttgacctcttmcttttgggtcacgtggattcttcgtgcctcttgtgggcttgctgaaagcaaaagtaacaatttcatactcttgccattgaaacaaggggtctattacttttaaatcataagggcacttgtttcaacagaaatgttagtatcttggtgaagatggggtctaagttcttggtggcttctgaggatggcgaagggctcaccttctgtcatcccgaaccatcactgatgggacagtgtctctccatgtgtagctatgcaaaggccacagaacaaatgggtaaaaatatttggtggtcagaattctagctcaatagtcaaggaaggcttcctggaggagaaagttcattttgaactgggctttaaaagttggtgtcacagaaaatgcaagctgtccctcagaattaagactagagttctgtgaaatagtgattgcaaaaatggccacaattattctcctctctataggcacacccctttgcaatgt

SEQ ID NO: 921052 - DNA, 734 bp, Homo sapiens
agcctttctttctgtttttaatagcctcctaggctgcaacctcccaaatgagaaccttgttaaccagaaggactgtaggctactgatttatatttcagtcataccgagaggaggaaaaattacaaaggtagaaagaaaaatgccaatgtacacatggactagttccgacatcttctctgataaagaatgtatatatctattcaggctctggatgctaagggattccttccagatctcagtatttgacctcttacttttgggtcacgtggattcttcgtgcctcttgtgggcttgctgaaagcaaamgtaacaatttcatactcttgccattgaaacaaggggtctattacttttaaatcataagggcacttgtttcaacagaaatgttagtatcttggtgaagatggggtctaagttcttggtggcttctgaggatggcgaagggctcaccttctgtcatcccgaaccatcactgatgggacagtgtctctccatgtgtagctatgcaaaggccacagaacaaatgggtaaaaatatttggtggtcagaattctagctcaatagtcaaggaaggcttcctggaggagaaagttcattttgaactgggctttaaaagttggtgtcacagaaaatgcaagctgtccctcagaattaagactagagttctgtgaaatagtgattgcaaaaatggccacaattattctcctctctataggcacacccctttgcaatgt

SEQ ID NO: 921053 - DNA, 628 bp, Homo sapiens
acaagactaggacaaggctgtctcttggatggagctcattggatgcaaaatttagagacaccctcactcccagggtcatgcaggtgcagagttgctcagggattacattttatttcaaagtaaaacatttttaaaaatacaagtgaccctcaaatgctacatcatacttttaacttggtgaaratgccttaagcaaaaattcagaatcaaaatttagattaaatttcaatcctatatgatggcataaatgcaaataatttaagtgagatatcaattcaataaataaataagtctagattctaactcaggctttctggctccaaaggccctgctctttccatgggtacaatgtttgaagacaattcctgcagtagggttacactgtgaatctacattttggttcttatagttttctctccatgaatcaataggtcagctgagtggagctctgaccctagaaacagaagttagacattaaaaaaaaaaattaaagtaccctcccaacccttttcaagatatcattatcaaattttataaaaataattcaattaagtaccatgtagccccgttttattttttaggagctcagttaaatccttcagaattatctggtgtatgtgagtgtgta

SEQ ID NO: 921054 - DNA, 603 bp, Homo sapiens
cagggttccccagagaaatggaaccaatagagtgtatgtgtatgtgcatgtacacgtgtgtgtgcgtgtgtgtgtgtgtgtggagagggagtgagagagggagatttattttaagaaattggctcatacaattatggaggctactaaatgcaaaatctgcagggttggtcagcaggctggagacccagggacaggccaatgttgcagttcaagtctgaaggccatctgtgtaattcactcttgcttggggaagatcagtctttttgttctattcaggccttcaactgattggatgaggcccaccaacattttgaaggcaatctrctgtactcaaaatctactgatttaaatgctgatctcatccaaacaatctctcacggaaacatctccaacagtgttttacaacatatctaggcaccatggcccagccaagttgacacataaaattaaccactcaacccctattttctttattacccaatcctgaatcagatgacaatagcctcccgacaagcctctctgcttctactcttgtttcctctcaatgcatttataagcagtagcaagaataatcataaaacaaaaccccaattctttctctta

SEQ ID NO: 921055 - DNA, 453 bp, Homo sapiens
ttctagtgcagacaagaaaagtataatatacttctctttagagatgtataataagtgaaacacaaacttcgcaagagtgtttcaacagtagaatgagcaatcaggagaaataatcagtgaacttaaagatagacaatagtatttatgcagtgtgagaaacagaaagaaaaacgatttttttaaaaaatgaactgatcataagagacctgtggaacattacayagaaggccaatgtattcattatgggagtcccagaaggaagactatgagaaaataagttggaaagactattttaagaaataatggctgacaatttcccaaatttaatgaagggcataaaactgcacattaaaaatgttcggcaaatttcaggcaaaatatagtcaaatcattaaaagctaaacacagaaaaaacttaaaaacaacatgagaaaagtaagatacaaaatattt

SEQ ID NO: 921056 - DNA, 566 bp, Homo sapiens
attggaaacaatggaggacagaggcagtgggttgatataaagtactgtaaatagtccagggtttgggtcacaaaactgtcaacccagaattctacatacagcaaaattgtccttcaagtattaaaaaaaaatagctaagggaacttgttactaatagacttatcttacaagaaatgctaaaggaaattcatccagttgaaataaaagagccctagacagtggtttgaagctgtatgaggaaattaagaacattggtgtaggtarctatgtaggtaagtaaaaaagccaacctcattgtatttttgtttgtaactcttcatagttttcctatatgatttaaaagacacatgcataaaatgataactgtaaatatatataatacacatacaattcaaaaagaggtaatttttataagattgttaagagagtggcagaatgtatgaaaaagaaaacattattcatttatatgctgtgtatgaaagaatcactttagatgcaaagacacaacgaaatttaaagtaaaataatgaaaaaatatattctatattaacaattatcacaaaaga

SEQ ID NO: 921057 - DNA, 594 bp, Homo sapiens
ttttacagcctggagaagcatgagccaaataaacctcttttctttataaattacccagcctcaggtatttttttatagcaatacaagcaagctaatatagaaaattggtaccaaggagtagggaatttctataaaaatatckgaagacgtggaagtatctttggtagtggggaacaggcagagtttggaggtctcagagaagacaacagggaatgagaaaaagtacagaacttcatgagacttgttaaatggttgtgaccaaaatactaatgaaaatactgccagtgaagaccaggctgatgaggtctcagatggaaatgagaaagttattgggaattagggcaaaggtcacatttgttacactttagcaaagaacttggctgaattgtgcccatgccccaggactctgtggaagtttgaacttaaacagtgatgacctaacgtatctagcagaagaaatatctaagcagcaaaattttcagggaagcagagtatagaactttggaaaagtcacaacttgaccatgtgatagggaaggaaaaatcattttcaggatagaaattcaagtggcatatggtgcaaccactttctata

SEQ ID NO: 921058 - DNA, 602 bp, Homo sapiens
gaagatgtcctctaagaacttttataactagagacaagaagtcaatgcctggcttcaaagcttcaaaggacagtcagactctcttgttagaagctagcgtacatctagtgactttaagttgaagccaatgcttatttactgtttgaaaatcctagggcccttaataattatacttagagctgggcacaagggctcacaccagtaatctcagctactcaggaggctgtggctggaagattgcttgaggccagaaatttgagaccaacctgggcaacatagtgagacctcctctctaaaaacagacaaataaatgaaaaactttgccctgtgtggtagtatgcaccagcagcygcagctactcaggaggctgaggaaggaagattgcttgtgcacaggagtttcaggcagcaatgagccatgatcatgccactgcacttcctcctgggtgaaccaagcaagactccaactctcaaaaaaaaaaaaagttatgcttaatctactctacctgtgctctataaatggaataacaaaggctggatgacagcacatttgtttacaacatggtttacttactcaatattttaagcccactttagagatct

SEQ ID NO: 921059 - DNA, 602 bp, Homo sapiens
gaagatgtcctctaagaacttttataactagagacaagaagtcaatgcctggcttcaaagcttcaaaggacagtcagactctcttgttagaagctagcgtacatctagtgactttaagttgaagccaatgcttatttactgtttgaaaatcctagggcccttaataattatacttagagctgggcacaagggctcacaccagtaatctcagctactcaggaggctgtggctggaagattgcttgaggccagaaatttgagaccaacctgggcaacatagtgagacctcctctctaaaaacagacaaataaatgaaaaactttgccctgtgtggtagtatgcaccagcagctgcagctactcaggaggctgaggaaggaagattgcttgtgcacaggagtttcaggcagcaatgagccatgatyatgccactgcacttcctcctgggtgaaccaagcaagactccaactctcaaaaaaaaaaaaagttatgcttaatctactctacctgtgctctataaatggaataacaaaggctggatgacagcacatttgtttacaacatggtttacttactcaatattttaagcccactttagagatct

SEQ ID NO: 921060 - DNA, 603 bp, Homo sapiens
ttccaaagctctttattattattttaaatagtattttttccaagaaatgtatacttagtataggtatcacaggaaatatataaattttcaaataaacttttaaaaaacaactataaggccaccaaaacattgtgtaatattctttcataggaatccaccacaatttataatttataaaaataattgatcatttatttgattctcccctagttaggttcatttagattggtaaacctatgctctttctactatatgacatcaaccaagagcagcaagcataagtaggaagagcagggtcctaggcaggtgcccaggtagaaagctactgagtaaaagggattcagatggacatagttcagcaccctggagagctccatgacagtattgctccattatggactcrgcagtaacactggctgggaaccctttagggttctgaactgctttcccagaatgggatgttaaaagagataatacacggctaagttttggggggtggaggtggtctctttgtccctgaagggattcatccttaccagtccccggttcaaagagcactgtggctgtgggtagtttttctcaccactctgctttttctcatgc

SEQ ID NO: 921061 - DNA, 762 bp, Homo sapiens
ttatttctgggttctccattctgttccattggtctatgtccctatttttataccagtaccatgctgttttggtaactatagccttgtagtacagtttgaagttagttaatgtgatgcctccagacttgttctttttgcttagtcttgctttggccatgcaggcttttttctagttccgtatgaattttaggatttttttcctagttctgtgaagaatgatgatggtattttgatgggaattgcaatgaatttgtacattgcttttggcagtatagctattttcacaatattgattctacctatccataagcatgtgatgtgtttccaattgtttgtgttgtctgtgatttctttcagcactggttcataaattttccttgtagagawctttcacctccttagttaagtatatttctcagtattttatcttttgcagctattgtaaaagaggttgagttcttgatttgaatctcagccttgtcactgttggtgcatagcagtgctactgatttgtgtacattgattttgtatcctgaaacttcactgaattcatttatcaaatctaggagcgtttttggacaagtctttagggtcttctaggtatacaatcacatcatcagcaaacagcaacagtttgacttcctcttcctctttaccaatttggataccctttatttctatctcttgtctgattgttctggctaggacttccagtactatgctgaatagaagtggtgaaagtgggcatccttgtcttgttcc

SEQ ID NO: 921062 - DNA, 762 bp, Homo sapiens
ttatttctgggttctccattctgttccattggtctatgtccctatttttataccagtaccatgctgttttggtaactatagccttgtagtacagtttgaagttagttaatgtgatgcctccagacttgttctttttgcttagtcttgctttggccatgcaggcttttttctagttccgtatgaattttaggatttttttcctagttctgtgaagaatgatgatggtattttgatgggaattgcaatgaatttgtacattgcttttggcagtatagctattttcacaatattgattctacctatccataagcatgtgatgtgtttccaattgtttgtgttgtctgtgatttctttcagcactggttcataaattttccttgtagagatctttcamctccttagttaagtatatttctcagtattttatcttttgcagctattgtaaaagaggttgagttcttgatttgaatctcagccttgtcactgttggtgcatagcagtgctactgatttgtgtacattgattttgtatcctgaaacttcactgaattcatttatcaaatctaggagcgtttttggacaagtctttagggtcttctaggtatacaatcacatcatcagcaaacagcaacagtttgacttcctcttcctctttaccaatttggataccctttatttctatctcttgtctgattgttctggctaggacttccagtactatgctgaatagaagtggtgaaagtgggcatccttgtcttgttcc

SEQ ID NO: 921063 - DNA, 762 bp, Homo sapiens
ttatttctgggttctccattctgttccattggtctatgtccctatttttataccagtaccatgctgttttggtaactatagccttgtagtacagtttgaagttagttaatgtgatgcctccagacttgttctttttgcttagtcttgctttggccatgcaggcttttttctagttccgtatgaattttaggatttttttcctagttctgtgaagaatgatgatggtattttgatgggaattgcaatgaatttgtacattgcttttggcagtatagctattttcacaatattgattctacctatccataagcatgtgatgtgtttccaattgtttgtgttgtctgtgatttctttcagcactggttcataaattttccttgtagagatctttcacctccttagttaagtatatttctcagtattttatcttttgcagctattgtaaaagaggttgagttcttgatttgaatctcagccttgtcrctgttggtgcatagcagtgctactgatttgtgtacattgattttgtatcctgaaacttcactgaattcatttatcaaatctaggagcgtttttggacaagtctttagggtcttctaggtatacaatcacatcatcagcaaacagcaacagtttgacttcctcttcctctttaccaatttggataccctttatttctatctcttgtctgattgttctggctaggacttccagtactatgctgaatagaagtggtgaaagtgggcatccttgtcttgttcc

SEQ ID NO: 921064 - DNA, 762 bp, Homo sapiens
ttatttctgggttctccattctgttccattggtctatgtccctatttttataccagtaccatgctgttttggtaactatagccttgtagtacagtttgaagttagttaatgtgatgcctccagacttgttctttttgcttagtcttgctttggccatgcaggcttttttctagttccgtatgaattttaggatttttttcctagttctgtgaagaatgatgatggtattttgatgggaattgcaatgaatttgtacattgcttttggcagtatagctattttcacaatattgattctacctatccataagcatgtgatgtgtttccaattgtttgtgttgtctgtgatttctttcagcactggttcataaattttccttgtagagatctttcacctccttagttaagtatatttctcagtattttatcttttgcagctattgtaaaagaggttgagttcttgatttgaatctcagccttgtcactgttggtgcatagcagtgctactgatttgtgtacatygattttgtatcctgaaacttcactgaattcatttatcaaatctaggagcgtttttggacaagtctttagggtcttctaggtatacaatcacatcatcagcaaacagcaacagtttgacttcctcttcctctttaccaatttggataccctttatttctatctcttgtctgattgttctggctaggacttccagtactatgctgaatagaagtggtgaaagtgggcatccttgtcttgttcc

SEQ ID NO: 921065 - DNA, 563 bp, Homo sapiens
tttccttcatttcaaccttggtgaatctgacagttatgtgtcttgcagttgctcttctcagggagtatctttgaggtgttctctgtatttcctgaatttgaatgtgggcctgccttgctaggttggggaatttcccctggataatatcctgacgagtgttttccaacttggttccattctccccgtcactttcaggtacaccagtcaaaggtagatttggtcttttcacatagtcccatatttattggaggctttgttcgtttctttttactcttttttctctagtcttgtcttctcactttatttcattaatttgatcttcaatcactgacatcctttcttccacttgatcgaatcagctattgaagcttgtgyatgcatcacaaagttttcatgccatggttttcagttccatcaggttatttattctagttagccattcatctaaccttttctcaaggtgttagcttccttgcgatgcgttagaacatgctcctttagctcagagaagattgttattaccgaccttctgaagcctgcttctgtcagctcgtcaaagtcat

SEQ ID NO: 921066 - DNA, 544 bp, Homo sapiens
aaattccctacctgtcagcaagctgtccccagaatggatccccactgggaccttgactcagattttggggactggagtcacaaacctctgttgacctgtgttctagaaggactaaggagaattaggaaaaaccccatgaattattcaatgatatccaccataagtcagggaaaggaagaaaatccttctgccttcctcgagtggctacaggaggccttaagaaaatatactcccctgtcacctgactcacttgagggtcaattgattctaaaagataagtttattacccaatcagccrcagacatcaggagaaagctccaaaagtgagccctgggccctgaacaaaatctggaggcattattaaacctggcaacctcagtgttctataatagggcccaagaggaacaggccaaaaaggaaaagtgagatcagagaaggcccgcagccttagtcatggccctcagacagacaaaccttggtggttcagagaggacagaaaatggagcaggccaatcacctggtagggcttgttatcactgtagtt

SEQ ID NO: 921067 - DNA, 756 bp, Homo sapiens
taagtattatatgtgcacttgaaaagactgtgtattctaatcctgttatgtggtaagttctattaatgttaattaagtcaagttgatggatagtgtttttcaagcctactattttttgctgactttatgcttactttttctaacaattattgagagacattgaaatctctgactataattgtcaacttacctatttttccttgcagttctatcaattttcacttaagtcattttgaagctcttttattattaagagcataagcttttaggattattatatccattgatcttttattaagttactgtctttatcccaattatattctttgttctgaattatcctttgtctgacattaatataaccattctagctttttaaaagttaatattagcatggcataacttctttcatttttttaacatttaacctgtgtgtctttacatttatgattcatttcttgtaggcatcatgtagctgggtcttggttttttatccaatctgacaagctctcccttttatttggagtttttggaccattccacttaatatgatgtattagtctgttcttacgctgctaataaagacatacccaasactgggtaatttataaagaaaaagaggtttaatggactcacagttccacatggctggggaggcctcacaatcatggtagaaggtgaaggcaaaggcaagtcttaacatggcagcaggcaagagtgcctgtgcaggaaactgccctttataaaaccatcaga

SEQ ID NO: 921068 - DNA, 600 bp, Homo sapiens
ttatatgttacaacgttaactcttggcaattttaatttttggtgaaaaaccaggtaagtgaatgattttaattatgtactaggtgtggagcttaggacaccagatagaagtgcaggtaaagtctgactttccagcatagccatggggcttggctaacttcacatgtccccaggccttacctagaatctaatggctccaaagcaggtgatttaaacaattttcaaacgccaaagaagcagtttatcwccttaaagcatttagcaaacctaatatctgacctgcttaatttagaccaaatctctttattttaccaatgatcttgaaaactctttatttcccaaaggtgaactaaaaggcatcacagttgtatttttctgacaaaatatttgatttaagcacttattgtttttaagccaattaatcagaactctttcatattattaaacattacacacataacacatataacaacacagcagagacagaagagtctagtaattgtacagcatttttcatttgcagtttacaagtttctttcattaggttactggattcaggtggtgtccttagaagaacagagctaggaaaacatgtagtttc

SEQ ID NO: 921069 - DNA, 716 bp, Homo sapiens
caaaggcaattcagtggagaaaggatggtcattttgacaaatacttctggaaaaattggatgtccataagtaaaaaactaaactttgatcccaactacactctgtatacacaagttaattcaaaatagttcataggtataaatgtaaaagctaaagttataaaacctctagaagaaagcctttgtggctttaagttagacaaagatttctttcatgtgacaccaaaagcacaatccataaaggaacaaactgataaatagaacttcatcaaaattaagaactctgcacttcaaagacactgattagagaatgaaaaaaccaggcatgcttagaagaaaatatttgcaaatcatatatctgatacaggatttatatccagaatacataaagaatttttgagcstcaataagaaaacagctcaatttttaaaaagataaatcatttacataaatgcttcactacaaaacgtatacggatacccagtcagtacaggaaaagaagctcaacatccttactgattaggaaaatgcaagttaaaaccacaatgagacactgctacacagctattaaaatggctaaaattaaatggactgcatagactgaccatggactcctaggtatttactcaggaaataaagcatacatccacacaaagaattgtacatgaatgttcataaaagctttgtagctaaaaaagaaatcaaatgttcttcaac

SEQ ID NO: 921070 - DNA, 539 bp, Homo sapiens
aaaccggtacttcaccatattaataaatctaaggaaaaaataattttacaatcatataatcatgtttagatgccagaacggcattaataaaattcaacatccattattggtttttgaaagtgtttccggagttggttcctttaggtgggttcttggtctcactgacttcgagaatgaagcygcagaccttcacagtcagtgctacagctcttaaaggcgacacaaacacaaagagaaagcagcagcaaggtttatcgtgaagagctaaagaactaagactccaaagaagggaacgggaccctaccagattgctgctgttggcggggggtggccagcttttattcccttatttgtccccgcccatgtcctgctgattggttcattttacagagcactgattggtccattttacagagtgctgattggtgtgtttttacagagtgctgattggtgtgtttttacaatcctttagctagacacagagcactggttggtacgtttacaatcctctagctagacagaaaagttctccaagaccc

SEQ ID NO: 921071 - DNA, 539 bp, Homo sapiens
aaaccggtacttcaccatattaataaatctaaggaaaaaataattttacaatcatataatcatgtttagatgccagaacggcattaataaaattcaacatccattattggtttttgaaagtgtttccggagttggttcctttaggtgggttcttggtctcactgacttcgagaatgaagctgcagaccttcacagtcagtgctacagctcttaaaggcgacacaaacacaaagagaaagcagcagcaaggtttatcgtgaagagctaaagaactaagactccaaagaagggaacgggaccctaccagattgctgctgytggcggggggtggccagcttttattcccttatttgtccccgcccatgtcctgctgattggttcattttacagagcactgattggtccattttacagagtgctgattggtgtgtttttacagagtgctgattggtgtgtttttacaatcctttagctagacacagagcactggttggtacgtttacaatcctctagctagacagaaaagttctccaagaccc

SEQ ID NO: 921072 - DNA, 539 bp, Homo sapiens
aaaccggtacttcaccatattaataaatctaaggaaaaaataattttacaatcatataatcatgtttagatgccagaacggcattaataaaattcaacatccattattggtttttgaaagtgtttccggagttggttcctttaggtgggttcttggtctcactgacttcgagaatgaagctgcagaccttcacagtcagtgctacagctcttaaaggcgacacaaacacaaagagaaagcagcagcaaggtttatcgtgaagagctaaagaactaagactccaaagaagggaacgggaccctaccagattgctgctgttrgcggggggtggccagcttttattcccttatttgtccccgcccatgtcctgctgattggttcattttacagagcactgattggtccattttacagagtgctgattggtgtgtttttacagagtgctgattggtgtgtttttacaatcctttagctagacacagagcactggttggtacgtttacaatcctctagctagacagaaaagttctccaagaccc

SEQ ID NO: 921073 - DNA, 506 bp, Homo sapiens
gaaaacagtaactataagatgtaagagaactttataatgttccacagggctgagggagagtgctcaaggaaggatggaaggggatctttcctcaaggctcaggttcttatctggttgcagaaggtctagttgcacttcaatggatggaagagaggtttgctggcttgctcatgccagagctggttaacagtcactgagtaagaagaaagctactctctaggaagtacatgagccacagccagattgggtatgcacagatactttgggamtaccactgttgggtagaaggcttggcactcctagtgtccatgtcaggagggcaaatctgagtggcagggtacaagtgagtcacaactggtgaggcaggtgagtgggcatgcagaggggcaagagggctagaatttctagtgtctgtgttgggagggctatgagaaggtgatcactaggataggtcagggctgcaagcttaccaagggactgtgtgctctggctggggcacagtacca

SEQ ID NO: 921074 - DNA, 506 bp, Homo sapiens
gaaaacagtaactataagatgtaagagaactttataatgttccacagggctgagggagagtgctcaaggaaggatggaaggggatctttcctcaaggctcaggttcttatctggttgcagaaggtctagttgcacttcaatggatggaagagaggtttgctggcttgctcatgccagagctggttaacagtcactgagtaagaagaaagctactctctaggaagtacatgagccacagccagattgggtatgcacagatactttgggaataycactgttgggtagaaggcttggcactcctagtgtccatgtcaggagggcaaatctgagtggcagggtacaagtgagtcacaactggtgaggcaggtgagtgggcatgcagaggggcaagagggctagaatttctagtgtctgtgttgggagggctatgagaaggtgatcactaggataggtcagggctgcaagcttaccaagggactgtgtgctctggctggggcacagtacca

SEQ ID NO: 921075 - DNA, 585 bp, Homo sapiens
gtttcctccatgtcatttcatagcgttataagtctcatttcttttaatattccactgtatagatgtaccacagtttatctattttcctactgaagcacaacttggttacttccaagttttggcatttgtgactaaagatgctataaacattcgtgtagaggttttgtgtggatatacattttcaactcatttgggtaaatgccaaagtgtgtgattgctggcttgtacggtaagaatatgtttagttttgtaagaaactgccaagcttctcacaatrtggctgaaccactttgcatttcagacacttaaataggtatggtgtagtatctcattgttgttttaacttgcaattctctaatagcatatgttgttgagcatcttttcatatgctttttgccacctgtatactttatttgatgaagtgtcttttcagatttttttttttttgccaatttttaattgggttgtttgcttttgtactgttgagctttaagagttctttgtatattctgaatttgggtttgtttttatcagagaagtcttttgcaaatattttctcctgttctgtgaattgtctttttattc

SEQ ID NO: 921076 - DNA, 709 bp, Homo sapiens
aactggtcatgtggttgtagctggtattgatcactaccttcttctgctacccattttgtattccttttggtttcagcaagcacctcaacaagtcatagttttttaccttgtggggtgacccaacccttcaatcctgaagggtctgggccatttgtagtcctgcctggattgggctgttgtaatttcctattgaccttaattatagcgcatggtaatatcaagagattccctaagraagctcctgtattccatgcatactcttccttacttccattgtggagtggtagactgatttcatcttcatagtctaggtcaattgcccccagacaacactgtaactcacttcttagcctgttgacataaaggtaggaggagcccaaagtgtccaagtggcaatcttaacttccaggataatggaatggttgttgtgtctcctggtggcagtgtttctccaacgtaatgtcatgggaacaggaagcaaaaattttgctagtggatcactaggggtgatggtgagtggtgccacttctactttcacccattgattcctggacctatgaatcctggctatgggagaaacagtaccatatattggactctgattcagagacaacacagcattctgaagaactttgccccagtcctgcaaagtattgtcacctagttggaattgtaattgtgacttcaaaaggccattccactcttctat

SEQ ID NO: 921077 - DNA, 501 bp, Homo sapiens
ctgtacctgatatggtttcattgcttgagctaattaacacatctcctggtagctggtatgcagccattaacttggcaaatgactttttctccattcctgtctgtaaggcccaccagaagcattttgcctcccactggcaaggccagcagtacacatttactgtcctatctcaggtgtttatcaactctccagctttgtgtcataatcttattcagagagaacttgatyacttttcgtttccataagatgtcacactggtccattacattgatgacgttatgctgattggatccagtgagcaagaagtagcaaacacactggacttattgctgagacatttgtgtgccagaggatgggaaataaatctgactaaaattcaggggccttctacctcagtaaaatatctaggggtccagtggtgtggggcctgctgaggtattctttctagtgaaggataagttgctgcatgtggcctcccctacaaccaagagaaaaccaaga

SEQ ID NO: 921078 - DNA, 675 bp, Homo sapiens
cacttagttcggcaatcacatgatcgcccaaagccctcagcaagataggggaaattctttgcccatttctcccctctgtcatcactttctttgtatctatgtctctctgtccttctcttatgagtaaggatcttatgagtaaggacaggctaggttttgttgtggtttaacaaacaacccttacatcttccactgcacatacacagttccaaatcttyttttttttttttttttaattgagacagggtctctgtcacctagtccagagtgcagtggtatgatcttggctcactgcaacctctgcctccgaggttcaagtgatcctcctgcctcaccctccgagtagctgggactacaggtgcatgccaccatgtctggctaatttttgtatttttagtagagatggggtttcaccatgttgcccaagctggtcttgagctcctgacctcaagcagtccacctgcctcagtctcccaaagtgttggggtttcaggcataagccattatgtagggaccagtgtcaaatattggaagccccatctctgtccctaaaccaggtcagaccttttggggaaaattatagaggcaggagttgatggatggagatggaccacagagagagacagaaacagagaggcagatgacatagtgatgacagagagacagagacagcga

SEQ ID NO: 921079 - DNA, 711 bp, Homo sapiens
tttcttgacaacatgtgacatggacaggagttggataatccttggttcataagctactctgccaatttcagttattttatttaggtaaagcatctcattctctgttcagcataaatatctgcatcctcctcctccactcatcaccgattgatcagaataaaaaagttatttaatttctcaaagccacattttcctcatctttaacatgggtacgattatatctgcctcataatgttttagaaattttataagataatgtatatacctggtatgtagtaagcacacaataaatttaaccatgacttcgttgttgtctgaaatgcmttaaaaaagatacttagactgcaaaactctttgatggcagaaagtatgtctggctcatatatacatacataatctttagggtctagctcactggtttttacattgtaggtcaatcaatgcatgttttattcaattgaattgaatctactgtgttgagtctgatttttcctgtgaaagaggaaatgactacgataaaggaacaatgacttcctttatatggacaagtagaatagaaacctgcttttctcccaaaacgagttaaactaagctgcatggtcctaccaccatcctggtgacatctacaagctgtccttatggttctgagactggcactattccatagactccttcacaaggtgagcctggctcctggaggccactcagctc

SEQ ID NO: 921080 - DNA, 650 bp, Homo sapiens
tattttaagaaattgccgcagccaccccagccttcaagcagccaccaccctgagcagtcagcagccatccacatcgtggcaagaccctccaccagcaaaaagattacgactctctgaaggctcagatgatgttagcactttttcttttctttttttttttttttagcaataaagtatttttaaattaaggtgtgttcatttttaaagacaaatactaccacacatttaataaactacaatataggataaatgtaccatgtaaygtatagtgtaaacataatttttatatgcactaggaaaccaagaaagttgtgtgactcgctttattgcagttgtctggaaccaaacccacaagcatattgagttgtattgtaaaaggtatttcttaatgtgggttaaggtcacaaaagtttgaaacccagtaggttagatgatgtcttagttccctttcatcgcaacctcattttgtattgttttgaatccttagctcagacccccagccagtaaatcatctgctctgagacaaacactaagaataaaagaagctgggaagcttttaacctgacctaagcattgtcttggaaacagtaaaatgcagccccttccagacctcttttctcagtatctttggggcggggctttggaacctg

SEQ ID NO: 921081 - DNA, 579 bp, Homo sapiens
tcagttaactacaggaagtcactgacaactaaataaagtagtaaaattacatatgagcaaattagattagtagtagagatagaaattatatattttttaaaaaccaaaaagaaactggagctggaaagtacataactgaaataaaaakttcattagaagagttcaacagatttgagcaagcagaagaaaggatcagctaagttgaagacaatcgaaattatccagtcttaggaccagaaaaaaaaaaaagattaaggaagatgaacagagcttgaaaggtttgttagacaccatcaagggtaccaacatatgcaacataggagtctccaaagtagaagagaaaaggaaagaggcagaaaaaatacagtgttcgcccattatcagcagttgtgttttctgcactttcagttacctctgggtaaccacagtccaataatattaaatggaaaattccagaaataaacaattcacaagttttaaattgtgtgtagttctcagtagcatgatgaaatatcattctgccctgctctgcccacccaggacatgaatcattcctttgtccagcatatccatgctgta

SEQ ID NO: 921082 - DNA, 579 bp, Homo sapiens
tcagttaactacaggaagtcactgacaactaaataaagtagtaaaattacatatgagcaaattagattagtagtagagatagaaattatatattttttaaaaaccaaaaagaaactggagctggaaagtacataactgaaataaaaagttcattagaagagttcaacagatttgagcaagcagaagaaaggatcagctaagttsaagacaatcgaaattatccagtcttaggaccagaaaaaaaaaaaagattaaggaagatgaacagagcttgaaaggtttgttagacaccatcaagggtaccaacatatgcaacataggagtctccaaagtagaagagaaaaggaaagaggcagaaaaaatacagtgttcgcccattatcagcagttgtgttttctgcactttcagttacctctgggtaaccacagtccaataatattaaatggaaaattccagaaataaacaattcacaagttttaaattgtgtgtagttctcagtagcatgatgaaatatcattctgccctgctctgcccacccaggacatgaatcattcctttgtccagcatatccatgctgta

SEQ ID NO: 921083 - DNA, 579 bp, Homo sapiens
tcagttaactacaggaagtcactgacaactaaataaagtagtaaaattacatatgagcaaattagattagtagtagagatagaaattatatattttttaaaaaccaaaaagaaactggagctggaaagtacataactgaaataaaaagttcattagaagagttcaacagatttgagcaagcagaagaaaggatcagctaagttgaagacaatcgaaattatccagtcttaggaccagaaaaaaaaaaaagattaaggaagatgaacagagcttgaaaggtttgttagacaccatcaagggtaccaacatatgcaacataggagtctccaaagtagamgagaaaaggaaagaggcagaaaaaatacagtgttcgcccattatcagcagttgtgttttctgcactttcagttacctctgggtaaccacagtccaataatattaaatggaaaattccagaaataaacaattcacaagttttaaattgtgtgtagttctcagtagcatgatgaaatatcattctgccctgctctgcccacccaggacatgaatcattcctttgtccagcatatccatgctgta

SEQ ID NO: 921084 - DNA, 597 bp, Homo sapiens
ctgcccggggccggcagtgccggccggctgctctgagtgcagggcccgctgagcccatgcccaccccgaactagtgctgggttcccgcctgcgcctctcccttcatacctccccacaagccgagggagccggctcyggcctcggccagcccagagagggactcccacagtgcagcagtgggctgaagggcccctcgagtgtggccagagtgggcaccgaggccgaggaggtgccgagagtgagcgagggctgccagggctgccagcgtgctgtcacctctcaacaccactgcgtggtccttgggctgggccatcccaggcaagtctctggtaaatggtgagcgtggtgtgtatcgctgtggtgcaggcagggaggtgtaggggctggatgcagagtgagcaggtgccatgaggacagcagcctgccagcctgagtgcctcagccatgggcaaggccatgtctctctttcctgaaacttgttcctgtggcgtctttcagtttatagaggtagagagtacagtcaagcggacccgcaggtgccagtcacctgcttcaacagtgaagcttttgctaaccttgttttatatctcacatgca

SEQ ID NO: 921085 - DNA, 552 bp, Homo sapiens
ggagatatgtttccttgctatttcatgcttcttttgttcttacattgatatctgcacatttggtgtaatggtcatttctaattttatggattagctttcgtagggaaaaatagatgtatatataatgtcagttaagtggagtacttttggctttagttctgggtaggcattctagtgtagattccatataactacctttcatcagtgtcagcagtgtgtgtaagcttcttagtggctaagtggcggtggtttgtgaaagctgtgatgtggctttgatgggcataggggtactaagcaggccagtccttagtcccttagctggtagatgctrtcattaattgcagcagaggcattcactggttgggtcagtctttgggccccaggtggagtatgtgggtgccagcagtggtggtggtagtctgggtgtaccagtcctggggccccagggcagggtacacagacactggcagaccagacattgcactctctgagccctggagtgggatatgtatgcatcaatagtgttagtggtgggatggagacacaggcagt

SEQ ID NO: 921086 - DNA, 661 bp, Homo sapiens
agaagagcacctgaggaatcggcagcaccctcactgctacgttcagtacatgatcgccatcatcaacaactgccagaccttcaagtgagtgtggccgggcgctgtggcgggggagcggtggaggccggcctgcccagccgctgtgttgaacctgaaccctttccttgcagggaatccatagtcagtttaaaaagaaagtatttaaagaatgaagtggaagagggtgtgtctccgagccagcccagcatggacgggattttagacgccatcgcgaaggagggctgcagcggtttgctggaggaggtcttcctggacctggaggtgggcctggctctttcctcctgccgttttctgggccgaagcccagtgcttcctcactgccctctgggacacaggctgtgaactgtaccgtgcggatgccgtctggggagccgggctgtgcacttgcattccgrtcagatcgcttaaagcgcctccgttttcggtgacgctgcttcgtatgatgcagggtccttcttacgcacaattcagtagattcaccctgtaagtattaaagacatcagacaatttagtggatttccaaatagaaaacgatatgtaggaccgtcaaaagtcaatgagagtgcacacacacacacatcctcacatagatcagtttcgc

SEQ ID NO: 921087 - DNA, 811 bp, Homo sapiens
gctgtcttgtagttttcagtgaaaaagtctttcacttctttggttaattcctaagtactttattctttttgatgctattgtaaatgaactgttttcttaatttccttttcagattgctcactgttagcatagagaagtgtgactgatatttgtgtgttgactttgcatcctgctactttgctgaattaacttatttttatttwtttttttttttttgtggaactgttagggttttctgcatataagatcacatcatctgggaatagagataattttacttcttcctttccagtttggatgcctcttctcccccaccccccactttttcttgtccaattgctctagctagaacttccagtaatatgttgaatagaagtgggcattattgccttgttcctgattttagatgagaagatttcagtttttttgccattgagtatgatatttgctgtagatttttcatataacttttattatgttgaggtagtttccttctatttctagtatattgagtgctttcatcatgaaagatgttgaattttgtcaaatgctttttttttggcatcaattgagatgatcatgtgtttttcccccttcattctgtttacactgatcagttttcatgtgtcgaaccatccttgcattccaggaacaaactgtacttggtcagggtgtataatcctttcagcctgctactgaatttgatttgctagtattttgttgatgattttggcatcaaccttcataagggatattgctctacagttttctttacttttagtgtctttggctggctttagtatcagggtaa

SEQ ID NO: 921088 - DNA, 628 bp, Homo sapiens
gaaactaagatacaagatggaggaatcaaattacctcttagtttattattgtgttttcccctaaaaaaaatatcagcttcaaacaacaaatcttcactacctcacctgtggaacacaggtgagactgggccactgcctgtggctcagggactctcacggctgcaatcaaggaaggtatcaatgaggactgcagtcacctccaggatctgccaggggaggatcctcttctaagctcatgcacttggccatcaccaggcctcaggtcctcactggctagtgaccaaagacatgagattttttttgccacctgggactctccatccgttactcatgacacagcagcttgtttctcccagagtaagtgctctctctgggagagtgagaaagggcgaaaggkctctcaagacagaagctacttttttgtgtgtaaattaatcacagaaatgattttccatcactcctgctgtagcctcttcatcagtaagtgcagactgctctcaaacggaggggattacataaggttgtaaatcccaggtgtctgggatcattgggaatcatcttccagtctgcttctctaaactttgctctcttcatctttgttttagcttttccatcagaaatttagaaa

SEQ ID NO: 921089 - DNA, 511 bp, Homo sapiens
agaggctgttgagaatctgtgcagctctggggttgggggatgccaggccttggtggcctgggtttgtgagtaagatcttctgatccatgggttgcacagttccgtggaaaaagcacgttttccccgtgaaggactaagtggctaagttggctggacttcctgagtcaacagggacttccctaaggggactttcccctaagccaaaataagtcatagctgcamgctaagggactgaaacttcaaccaatcatatagggagtttaagctctagctgcagcctgacgtttttaaccaatcaggcccgccaacccacaagcagatagaaaataagctaattctataggacagaaaaaggaaaaggggaggggtcatgaggggatataagcataagacacccaagccagaaactgctacccttcccggttcccttccaccaagtggaagctttactttcgcttttgctttacttttgctttcgctttagtaaatcttgctgccacacactctttgg

SEQ ID NO: 921090 - DNA, 511 bp, Homo sapiens
agaggctgttgagaatctgtgcagctctggggttgggggatgccaggccttggtggcctgggtttgtgagtaagatcttctgatccatgggttgcacagttccgtggaaaaagcacgttttccccgtgaaggactaagtggctaagttggctggacttcctgagtcaacagggacttccctaaggggactttcccctaagccaaaataagtcatagctgcaagctaagggactgaaacttcaaccaatcatatagggagtttaagctctagctgcagcctgacgtttttaaccaatcaggcccgccmacccacaagcagatagaaaataagctaattctataggacagaaaaaggaaaaggggaggggtcatgaggggatataagcataagacacccaagccagaaactgctacccttcccggttcccttccaccaagtggaagctttactttcgcttttgctttacttttgctttcgctttagtaaatcttgctgccacacactctttgg

SEQ ID NO: 921091 - DNA, 576 bp, Homo sapiens
ggggaccactaccaccaagacgcagagaccgatagtggccccaaatgcctggctgcgctgttatttattggataataaggggcagagtaaggagtgtgagtcatctccaatgattgataaggtcatgtgagtcacgtgtccactggacagggagcccttctatgttaggtagccaaggcgtagagagagaggatagcttatgtcattatttcttttatgttcttttcagaaagatcaaagactttaatattttaatactttcactaattctgctactsctatctagagggtgcagccaggtatacagagtggaacaggaaagtgaaacaggagtgtgaccactgaagcacagcatcacagggagatggtcaggcctctggataactgcgggcgggcctgacatcactcaggccctccacaggaggcggtggagcagagtcttccctaactcccccggggaaagggagactccctttcctggtctctaggcactgacgcaaccgctagaccaaggtccgctaggcaatgggcatcttcccagacgctggcgttaccccaagaccaaggggccctcta

SEQ ID NO: 921092 - DNA, 620 bp, Homo sapiens
gcgctccagcctgggctatctcaaaaaaaaaaaaaattttttttttgaggaacgaccataccattttccacagtggctgtaccattttatattctgcccaatggtgtcccagggttccaatttctccacgtcctcatcaacacttattgttttctggggttttttggataccagccatcctaatgggtgtgtcttttttttttttttttttttttttgagatggagtctcactctgtckcccaggctggagtgcagttgtgtgatctctgctcactgcaacctcccaggttcaagttattcccctgcctcagcctcccaagtagctgggactataggtgcataccaccaggcctggctaatttttgtattttttagtagagatagggtttcaccatgttagccaggctgattttaaactcctgacttcaattgatccgcccacctcagtctcccaaagtgttagcgttacaggcgtgagccaccgtgcctggctgattattcattttttatgtctccctgtatcatatacagatgtgtttggctaaaagtcactaaccaaccacagtgccccgaggacatgtgggattaattttcttacaaaagaaaaagacagaccggg

SEQ ID NO: 921093 - DNA, 732 bp, Homo sapiens
aggggttgagttcttgatttgaatctcagcttggtcattgttggtgtatagcagtgctactgtttgtgtacattgattttgtatcctgaaactctactgaattcattcatcagacctaggagctttttggatgagtctttagggttttctaggtgtacaatcatatcatcagtgaacactaacagtttgacttcctctttactggtttggatacccttcatttctttctcttgtctgatggctgtggctaggacttccagtactatgttgaatacaagtgataagagtgggcattcttgtcttattgcagttctcagggggaatgctttaaacttttccctgttcagtgtaatgttggctgtgggtttgtcatagatggcttttattacattgaagtatgtctcttgtataccgattttgttgagggctttaatcataaagggatgtgggattttgtgaaatgcttctgcatctcctrtgatttttgtttttaattctgtttctgtgatatatcacatttgttgacttgcatatgttaagccatccctgcattcctagtatgaaacccacttgatcacatcatggcaaatttcaagctaccaacatgaggtcagcgagcacagagttggaagacgggtacaaaattagctctccagaacccgtatcaacagactccaacccatggctgccatttctattaaagagacgtcgctgcaggtaatctgtattttc

SEQ ID NO: 921094 - DNA, 598 bp, Homo sapiens
tagattctagctcccatttaaaaattgttgaaaaacttcatttactgattagagcaactcatagtactagtgagttaaccaatactagggataaatattaatttaaatatgtttaaatatgatttaattaacgattataaattaaatattcaattaaataactaacttaaccacaataattgttatgcctttcctatacatcaggcattaagaattatctcatttaattctttctgtaattctrtagtataattttattattgttagccttttatagatgaggaaaatgagccctgaagaaattatgtagtataccattggtttcatatatagcaaatttcaatttcagaattctggttacactatattacctctacaacagatagactctactgtcaatgtttctaagaatactaaagacagaaggatatttatctatttattaattacaagacaaatttctatgtgacatatatttaaaaaaacttcatgtgatgtaattgtaaatagcttatatttaaatattaaatagtttgaattataaaaataattgaattaaattttaaattaaatatttaatttgctatagaaatttaac

SEQ ID NO: 921095 - DNA, 598 bp, Homo sapiens
tagattctagctcccatttaaaaattgttgaaaaacttcatttactgattagagcaactcatagtactagtgagttaaccaatactagggataaatattaatttaaatatgtttaaatatgatttaattaacgattataaattaaatattcaattaaataactaacttaaccacaataattgttatgcctttcctatacatcaggcattaagaattatctcatttaattctttctgtaattctatagtataattttattattgttagccttttatagatgaggaaaatgagccctgaagaaattatgtagtataycattggtttcatatatagcaaatttcaatttcagaattctggttacactatattacctctacaacagatagactctactgtcaatgtttctaagaatactaaagacagaaggatatttatctatttattaattacaagacaaatttctatgtgacatatatttaaaaaaacttcatgtgatgtaattgtaaatagcttatatttaaatattaaatagtttgaattataaaaataattgaattaaattttaaattaaatatttaatttgctatagaaatttaac

SEQ ID NO: 921096 - DNA, 554 bp, Homo sapiens
ctctggtgcctccttgactagcttaataattgactttctgaattctttttctggcaattcagagtttattttcttggtttagatacattgctggtgagctggtatgatcttttgggggtgttaaagaaccttgttttrtcatattaccggaattgtttttctggttccttctcatttgggcagaatatgtcagagggaagatctgggattcaagggctgccattcagattcttttgtgccacagggtgctcctttgttgtggtgttctccctgttcccatagaaatggggctttctgagagctgaactgggtagtaattgtttttgctcttctgggtctagccactcagggtcccggctggtactggggagtgtctgcaaagagtcctgtgatgcaatcagtcttcagatcttgcagccgtgaataccagcacctgcttcagtggaggtagcaggggagtgaagtggactctgtgagggtccacagttgtgtttttgtttagtgggctggttttgtgttagttggcctccagccaggaggtggacttttaagag

SEQ ID NO: 921097 - DNA, 554 bp, Homo sapiens
ctctggtgcctccttgactagcttaataattgactttctgaattctttttctggcaattcagagtttattttcttggtttagatacattgctggtgagctggtatgatcttttgggggtgttaaagaaccttgttttatcatattaccggaattgtttttctggttccttctcatttgggcagaatatgtcagagggaagatctgggattcaagrgctgccattcagattcttttgtgccacagggtgctcctttgttgtggtgttctccctgttcccatagaaatggggctttctgagagctgaactgggtagtaattgtttttgctcttctgggtctagccactcagggtcccggctggtactggggagtgtctgcaaagagtcctgtgatgcaatcagtcttcagatcttgcagccgtgaataccagcacctgcttcagtggaggtagcaggggagtgaagtggactctgtgagggtccacagttgtgtttttgtttagtgggctggttttgtgttagttggcctccagccaggaggtggacttttaagag

SEQ ID NO: 921098 - DNA, 554 bp, Homo sapiens
ctctggtgcctccttgactagcttaataattgactttctgaattctttttctggcaattcagagtttattttcttggtttagatacattgctggtgagctggtatgatcttttgggggtgttaaagaaccttgttttatcatattaccggaattgtttttctggttccttctcatttgggcagaatatgtcagagggaagatctgggattcaagggctgccattcagattcttttgtsccacagggtgctcctttgttgtggtgttctccctgttcccatagaaatggggctttctgagagctgaactgggtagtaattgtttttgctcttctgggtctagccactcagggtcccggctggtactggggagtgtctgcaaagagtcctgtgatgcaatcagtcttcagatcttgcagccgtgaataccagcacctgcttcagtggaggtagcaggggagtgaagtggactctgtgagggtccacagttgtgtttttgtttagtgggctggttttgtgttagttggcctccagccaggaggtggacttttaagag

SEQ ID NO: 921099 - DNA, 648 bp, Homo sapiens
gacaggaaacaaaaattttgctagttgatctttggggttaagggttaaggaggagccttttccacttctacccctgtgattcccagagccatggatcctagcaattggagaaatggtaccatatttttgttgctgattcaggacatgtaccaccttcgggaggacattatctcagccatacaattatcctacactgtgctgtaactgaattttcaaaaggtttcattattttatcaagccatctgcttcagggtgatgggaaatgtggtaataccagtgagttccataagcaagagyccattgccagatttcatttgctacaaaagaagtttcctggtcagtaacaatgatgtgtggaatatcacagtagtgaatatgtgtttctcttaagtccacagatggttgttttggcagaagcattgcaggcagagaagaaaaatttctgtccagggtaaatgtctgtttcaatgagaacaaaacactgagcttcctgtgatgccagtataatcaacctggcactaagtgactggctgatctagacatggaatggtatggagttaaatgttggtctctgctattggcattttgggtactcagcagtgactgtagtcagatcagccttgggaaatgaaaatccatgttgctgaa

SEQ ID NO: 921100 - DNA, 737 bp, Homo sapiens
ggacctagaattgcagggacaggaaacaaaaattttgctagttgatctttggggttaagggttaaggaggagccttttccacttctacccctgtgattcccagagccatggatcctagcaattggagaaatggtaccatatttttgttgctgattcaggacatgtaccaccttcgggaggacattatctcagccatacaattatcctacactgtgctgtaactgaattttcaaaaggtttcattattttatcaagccatctgcttcagggtgatgggaaatgtggtaataccagtgagttccataagcaagagcccattgccagatttcatttgctacaaaagaagtttcctggtcagtaacaatgatgtgtggaatatcacagtagtgaatatgtgtttctcttaagtccacagatggttgttttgscagaagcattgcaggcagagaagaaaaatttctgtccagggtaaatgtctgtttcaatgagaacaaaacactgagcttcctgtgatgccagtataatcaacctggcactaagtgactggctgatctagacatggaatggtatggagttaaatgttggtctctgctattggcattttgggtactcagcagtgactgtagtcagatcagccttgggaaatgaaaatccatgttgctgaacccatgtgtaatttttatccttgtctttatggtcactttgttcatgggccaattgggcaagggcatgggtgg

SEQ ID NO: 921101 - DNA, 641 bp, Homo sapiens
tgatgtgtggaatatcacagtagtgaatatgtgtttctcttaagtccacagatggttgttttggcagaagcattgcaggcagagaagaaaaatttctgtccagggtaaatgtctgtttcaatgagaacaaaacactgagcttcctgtgatgccagtataatcaacctggcactaagtgactggctgatctagacatggaatggtatggagttaaatgttggtctctgctattggcattttgggtactcagcagtgactgtagtcagatcagccttgggaaatgaaaatccatgttgctgaacccatgtgtaatttttayccttgtctttatggtcactttgttcatgggccaattgggcaagggcatgggtggttggagaaaaagactaatatccatagattgtgtcatcttgtgcacctgattattaagatcctcctcttactgaagttgctctttggcagttatttacgtggctcacaaatatcatcacacttagttatctactgctttataacaaaccacctcaaacttaatgctttaaagcaaccaccatttatttgctcatcattttgatagctgtattgcactcagttggactagtctcaagtatgctgttcctctgctagtcttatgggattgc

SEQ ID NO: 921102 - DNA, 579 bp, Homo sapiens
gtcatttttaagatacaagaggttgtcctggtgtggtggctcacacctgtaatctcagcagtttgggaggctggggtgggaggatcgcttgagtccacgagttcaaggccagcctgggcaatatagggagaccccatctctataaaaaataagaaattagccagacatgggatatggtagtgcaaggtcagggtctcaagactatcctggctaacacggtgaaaccctgtctctactaaaaatacaaaaaattagccaggcatggtggcgggcgcctgtagtcccagctattcagaggctgaggcaggagaatagcatgaacccgggaggcggagcttgcagtgagccgagattgcgccactgcactccaggccgggcaacagagtgagactccatctaaaaaaaaaaaaaaaaaaaaaaargtgggtgtggtggctcacgcctgtaaccccagcactttgggaggacaagacgggcagatcttttgaggccaggagcttgagaccagcctgggcaacatgacaaatacccatctctactaaaaatacaaaagttagccaggtgtggtagggtacacct

SEQ ID NO: 921103 - DNA, 653 bp, Homo sapiens
tatctctttgtcttgtgtctttatttctacactctctcatctctgcacatggggagagacccaccgaccctatggggctggaccctacaacatgaaatttgttttttaatcctgctgcatttacatgagtgaaagcatgaagttcttgtgcttttatgaatgcagatggtaccagtaagtcagcttgttcatttgctttagttaaaggccctggtaaattagtgtgtcctcgaatatgagtaacataaaatgggaaatttcttttttttttacagtttgttgtaataaattgaactgctggtttaactgatcatctatgctatatttaattagagctgtctcaacatccyttgtagcctgcactacatatgcagaatctgatacaatattaataggttgatcaaagtcttgtaacactgtaatgactgcaaccaactctgctctttgagccaattgatattgagttttgatgactcgctcttttggccctgtgtaagctgcttttctattgctggaaccatcagtaaacactgtcagagcattttctaaaggtttatgtctggtaattttaggtagaatccaagtagtcaattttaaaaactggaagatttttgttttcgggtaatgattatcaataattcccacaaaattag

SEQ ID NO: 921104 - DNA, 653 bp, Homo sapiens
tatctctttgtcttgtgtctttatttctacactctctcatctctgcacatggggagagacccaccgaccctatggggctggaccctacaacatgaaatttgttttttaatcctgctgcatttacatgagtgaaagcatgaagttcttgtgcttttatgaatgcagatggtaccagtaagtcagcttgttcatttgctttagttaaaggccctggtaaattagtgtgtcctcgaatatgagtaacataaaatgggaaatttcttttttttttacagtttgttgtaataaattgaactgctggtttaactgatcatctatgctatatttaattagagctgtctcaacatcctttgtagcctgcrctacatatgcagaatctgatacaatattaataggttgatcaaagtcttgtaacactgtaatgactgcaaccaactctgctctttgagccaattgatattgagttttgatgactcgctcttttggccctgtgtaagctgcttttctattgctggaaccatcagtaaacactgtcagagcattttctaaaggtttatgtctggtaattttaggtagaatccaagtagtcaattttaaaaactggaagatttttgttttcgggtaatgattatcaataattcccacaaaattag

SEQ ID NO: 921105 - DNA, 762 bp, Homo sapiens
tgtttctaaaagcatatagtcatatgcattcacaaggagataatcagaaattggaacttatgtttaaaagggaagcagagcacaaaagtttgggaaatttgcagcctaatcatgtggtagaacagaaaaacccattttctggggagaactgtaaacttttggctgcagaaatttgcgtaactaaaatgaaactgaatgttaatagccaagataatggggaaaaagtctccagggcatttcagagatcttcacagcaatccctcctatcaaagacctggaggcctaggagagaaaaatggttttgtgggccatgctcagggtccttgctgctctgtgcagcccggggacatggtgccctgtgtcccagcyactccagctccagccatggctaaaaagggccaagatacagcttgggccatgactgtagagggtacaagccccaacccttggtcacttccatgtggtgttgtacctgagggtgcacagaagcccagagttgaggtttggaaacctctacctagatttcaggggaggtatggagatgcctggatgtccaggcagaagtctgctgcaggagttgagctctcatggagaaccactactaaggcaatgctgaggggaaatgttgggttggagcccccatatagagtcccacactggggcactgactagtgaagctgtgagaaaagggtcaccatcctccaaccccagaatgatagatccattgacagcttgcaccatgtgcctggaaaagcttcaggc

SEQ ID NO: 921106 - DNA, 762 bp, Homo sapiens
tgtttctaaaagcatatagtcatatgcattcacaaggagataatcagaaattggaacttatgtttaaaagggaagcagagcacaaaagtttgggaaatttgcagcctaatcatgtggtagaacagaaaaacccattttctggggagaactgtaaacttttggctgcagaaatttgcgtaactaaaatgaaactgaatgttaatagccaagataatggggaaaaagtctccagggcatttcagagatcttcacagcaatccctcctatcaaagacctggaggcctaggagagaaaaatggttttgtgggccatgctcagggtccttgctgctctgtgcagcccggggacatggtgccctgtgtcccagctactccagctccagccatggctaaaaagggccaagatacagcttgggccatgactgtagagggtrcaagccccaacccttggtcacttccatgtggtgttgtacctgagggtgcacagaagcccagagttgaggtttggaaacctctacctagatttcaggggaggtatggagatgcctggatgtccaggcagaagtctgctgcaggagttgagctctcatggagaaccactactaaggcaatgctgaggggaaatgttgggttggagcccccatatagagtcccacactggggcactgactagtgaagctgtgagaaaagggtcaccatcctccaaccccagaatgatagatccattgacagcttgcaccatgtgcctggaaaagcttcaggc

SEQ ID NO: 921107 - DNA, 666 bp, Homo sapiens
aatagtgatatctttgcctaagcttgaaaagttttctgttattatccctttgaataaactgtctatccctatctctctacattctctttaaggccaataactcttagatttgcccttttgaggctattttctagatcctctaggtgtgcttcattgatttttattcttttttcttttgtttcctctgtgtgtatgttttcaaataccatgtctgcaagctcactaaatctttcttctgtttgatctattctgctctcagagactgatacatccttcacatgttcaatttttcaactccagtatttctgcttgattcttttaaattattcaagcttcagtaaatttatctataaattctgaattccttctctattaatacttgtcattttgttgatttttctcaaagcagcgtattttgaatttcctgtatagaaagattatcatatttctgtctctccaaaattggttcctagatgccttatttagttcatttggtaaggtcatgttttcctagatkgtcttgatattcataggtgtttctctgtgtctgggcattgaagatttaggtatttatttaagtctttgcactccgggcttgttggtaccagtcttttttgagaaggctttccaggtatttgaattggcttgggttttttggcctaagtt

SEQ ID NO: 921108 - DNA, 750 bp, Homo sapiens
gacatgaaaaaccattaaaaagatcaacaaatccagaggatgattttttaaaaaagtaataaaataggtcactagttagaataataaaaaagaaaacagagaagatccaaataaatacaattagaaataatgaagggactrttactaccaacgcagcagaaattaaaaataaccatcagaatctactatgtacattcttatgtacaaaaactagacaacctagaaaagaagggtaaatttcttcaccggtataccctcccaatactgagccaggaagaaactgattccctgaacagagcaattatgagctcaaaaattcaatcaataataaatagcctaccaactaaaaagcccagtacatgatggattcacagtcaaattctaccagatgtacaaagaagagctggtaccatttctacagaaactatttaaaaaatttgaggaggagcaacccctcccaactcattctgggagaccagcatcctcctgatactaaaacctgtcagagataccaaaaaaaaaaaaaaaaaaaattaaggccaatgtcctcgacaaacattgatgtaaaaatgctcaacaaaatacttataaaccaaatccagcacacgtcaaaaagcttatccaccataatcaagttggctctgttcccagaatgcaaggttggttaaacatatgcaaatcaataaatgtaattcatcacataaacagaactaaagacaaaaaccacatgattctctcaatagatgcgga

SEQ ID NO: 921109 - DNA, 748 bp, Homo sapiens
aagctgataacatgtgactcaagatcctccactatacaacataaatcacgttgttagcacagactatctggtgtggccataaacatgcagctaaacagagacacctttattgggtaggacattccaaaggcttagaagttatttttcaggagccaaacaaaagatcaaacytctctttaagcaagaaaaatcatttactatacacattttgattagtatttcttgatcttttgatcaattttgggaacattgatatttaaacagtattgataactatactatactgtaggtcacaatactgtattatatacttgaaatttactaagaaggtagatcttatgcattttcattacaaaaaaatggtaactatgtgaggtaatggacacattaatttaattaattgtggtgatcatttccaaatgtatgcatatatcaaaacatcgcgttgtacacgtgtgatagtgtgagatatacacttggtctttctcctccctttcagcatatgactcacagaattcttggcatctcctacatgattagggtgtcttttgtatgctaatgagatgactggtggctggcagcctctatataactttagagtagggctggtcactggaaagagcaagacagaattacaaaatagggactttcagctccattttccaacctgtaaggagatcggaggagctgaaggttgagttgtgatcaccaaagaccaatgatttaattaattatgcttatataataa

SEQ ID NO: 921110 - DNA, 672 bp, Homo sapiens
atgttgtagcgttgtgtggagagaaatggaaacagctactttggaaggtgctttggcaatatgtgtaagaaagaaaagaaaaggaaaagaaggaaggggccgggcacggtagctcacgcctgtaattccagcacttcgggaggccaaggcagggggatcacctgaggtcaggagttcgagaccagccttgccaacatggtgaaaccccatctctactaaaaatacaaaaattagccgggcctgatggcacatgcctgtaatccaagctacttgggaggctgaggaaggagaattgcttgaacccaggaggccgaggttgtagtgagccaaggttgcgccactgcactccagcctgggtgacagagcgagactccatctcaaaaaaaaaaaaaaaaaaaaagaaaagaaaagaaatagaaaaaggggttaattactactgactttacagaaataaaaakgattataaaggaatattataaataacatatagcaacaaattggataacctatttgaaacaaacaagaaataaccataaaaatgggcaaccagcagccattcttttttttttttttttttttagacggagtcctgctctgtcccccaggctggagttgcagtggcaaaatcttggctcactgcagtctgtgcctcccggttcacaccattttcct

SEQ ID NO: 921111 - DNA, 514 bp, Homo sapiens
ggctacctggaacactgtgttgaaagggcttctaaaaagttgcctctaggcacagtgcgaaggagggcagtgattgattagtaatgcctgccatgggttggagataaagagtactggcctgaatatcatttattttgccatcctcaaccagtgcaaagaacccaagattaggaattgggtctggtcttggtttagccatagcattgagaggtgatggcctgctggcaccccttgcagccctcgctcgctttcggcacctcctcggcctccgtgcccacccactctggaggtgcttgagragcccttcagcccgccactgtgggagcccctctctgggctggctgaggccggagccggctccctctgcttgcggggaggtgtggagggagagatgcaggcggaaccggggctgcccgcatggctcgcatgtccgggtgagcgtgggctgggcgggccctgcactccgatcggtggccgccgcgcccccggctctgggcagtgaggggcttagcac

SEQ ID NO: 921112 - DNA, 514 bp, Homo sapiens
ggctacctggaacactgtgttgaaagggcttctaaaaagttgcctctaggcacagtgcgaaggagggcagtgattgattagtaatgcctgccatgggttggagataaagagtactggcctgaatatcatttattttgccatcctcaaccagtgcaaagaacccaagattaggaattgggtctggtcttggtttagccatagcattgagaggtgatggcctgctggcaccccttgcagccctcgctcgctttcggcacctcctcggcctccgtgcccacccactctggaggtgcttgaggagcccttcagcccgccactgtgggagcccctctctgggctggctgaggcyggagccggctccctctgcttgcggggaggtgtggagggagagatgcaggcggaaccggggctgcccgcatggctcgcatgtccgggtgagcgtgggctgggcgggccctgcactccgatcggtggccgccgcgcccccggctctgggcagtgaggggcttagcac

SEQ ID NO: 921113 - DNA, 532 bp, Homo sapiens
ggcccatgcacatccaaaatatagcatggcagtcaaattttaaagctctaaaataatctcctttgactccaggtctcacatccaggtcatggtgatgcaagaggtgggttcccatggtcttgggcagccctacctctgtggctttgcaggayacagcctccctcctggttactttcactggctggcattgagtgtctgcaggttttctaggtgcacagtgcaagctgtcagtggatctaccattctgggttctggaggatggtggccctcttctcacagctccactaggcagtgccccagtagggactgtgtgtggaggctccaaccccacatttcccttctgcattgccctagcagaggttctccatgagggccccacccctgcatcaaacttttgcctgggcatccaggtgtttctatacatcttctgaaatctaggcagaggttccccaacctcaattcttgacttctgtgcacccacaggctcaacaccacatggaagctgccaagacttggggcttccactctctga

SEQ ID NO: 921114 - DNA, 700 bp, Homo sapiens
cacagtgcgctgcgcccactgtcctgcacccactgtctgccactccctaatgagatgaacccggtacctcagatggaaatgcagaaatcacccatcttctgcgtcgctcacgctgggagctgtagaccggagctgttcctattcggccatcttggctcccctcctaattaatttttattgatacatggtagttgtacatattttggtggtacatgtgataatttgatatattgatataatcaaatcaaggtaactggcatatgcatcaccttagatatttatattttctttacgctatactttcttttcttatcattattcaagtatgtaggtccccatgaggcaactctctataggtttttggacagcttagggtccatcttccttttaaactagaaaagaacaattttacatgaaattgcttcctatgccacaggagcaagatacctgctctctgaagtcattgtccagtcaccaggtgttccatttatstaatgttattgtaacaaaacacccagagcttagttgcttaaaacaaccacaacatttatttttcttccaagtcagcaatttgtgtcgtgttcagtggggacaactggtctctgctctacttcctgtcacctggcatggcttgaaggctgggggctggaatcatctgcagtgtcacccgttttcatgtttggcagttgaggcaatgcta

SEQ ID NO: 921115 - DNA, 649 bp, Homo sapiens
ctcatctctatgagcatcagccgaaatggcttgactgggacttaaggatctatttccaaaatgcacatggttggcaagttgcagttggcagttagctgggaattcagtcagtgctgcaggctggggattttcctcatagcattgaaagccgagctccaagaagaaaggtttaggaggcttggtcagaaggtacatggcttcttatgagcttgccctatcatattgcattagtaactaggaaagtcatcaaaaccagcccacattcaaagggaggggaattaggctctatcttgaatatcttgcagaagttatcatgcccaaatctctacctataagtgaggctatttatgatctctctcttatatacagtgatgcatcctttattgacagggatacattctgagaaacrgaccattaggcaattttgtcactgcgcaaatatcatagagtgtatttatacaaacctagatggtatagcctactacacttctaggctataacatatagcctgtttatagactgcaaacctgttcagcatgttactctactgaattttgtaggcaattgtaacacaatggtaagtatttgtgtatttaaacatagctacgcaaagcaaagcaaaggtacagtcaaaatatggtataaaaag

SEQ ID NO: 921116 - DNA, 633 bp, Homo sapiens
cccactatcggttgatgtgcgtctagtcattaacccacatacacatatcaaattcagtttctttttccttttttttttttttatttgggacaagaaactaaatgccttttcagtggttcatttgaatctaccatacttcaaaaattataaatctaccatcaccaaagaagtacagcgccatytgtattagttgcaaaattaggctatttacttttctgtatgtacttttgtgaggtttaaaacgttaggcttattacttctccttggtatgagagaaaaagcacaggcactggaaagaaaaaggaataggtgtgaaatcttgattttgtgaattaggatgaatgtgaccttatgtaaattacaaagttcctgaatctgtttgcgcagatgaaaatggaaatatactaactgcacctaccaaacacggctgactgaggattaaataaaacaatacatgtaaaggtagtgcctggtgcacagtagaaactccaggccgggcgcgatggctcacgcctgtaatcccagcactttgggaggccgaggcgggtggatcacgaggtcagaagttcgagaccagcacggccaagatggtgaaatcccgtctctactaaaaatacaaaaattagccgggtg

SEQ ID NO: 921117 - DNA, 633 bp, Homo sapiens
cccactatcggttgatgtgcgtctagtcattaacccacatacacatatcaaattcagtttctttttccttttttttttttttatttgggacaagaaactaaatgccttttcagtggttcatttgaatctaccatacttcaaaaattataaatctaccatcaccaaagaagtacagcgccatttgtattagttgcaaaattaggctatttacttttctgtatgtacttttgtgaggtttaaaacgttaggcttattacttctccttggtatgagagaaaaagcacaggcactggaaagaaaaaggaataggtgtgaaatcttgattttgtgaattaggatgaatgtgaccttatgtaaattacaaagttcctgaatctgtttgcgcagatgaaaatggaaatatactaactgcacctaccaaacacggctgactgaggattaaataaaacaatacatgtaaaggtagtgcctggtgcacagtagaaactccargccgggcgcgatggctcacgcctgtaatcccagcactttgggaggccgaggcgggtggatcacgaggtcagaagttcgagaccagcacggccaagatggtgaaatcccgtctctactaaaaatacaaaaattagccgggtg

SEQ ID NO: 921118 - DNA, 789 bp, Homo sapiens
atgattagaaaaaataactaatggatactaggcttaatacctgggtgatgaaataatctgtataacaaacccccatgatataagtttacctatgtaagaaacctgtacttctatccctgaacttaaaacacaaattgaaaataattatttattttcaaatatgtatgaatcttgatcaatagtaaccccttaacacttattttctatacttrtaacatgtattaatataaaaacaaaatatattaaccgtacttaaagtgccaatttttcattaatattgccatggaaaatagagaatatattttatttttataacttaataagaataagatctaggaataacaaatagtataatgtagaaatatggaggacacagagatattataaaagaaataggacagaactcagcaaaatgcacttaccctttagttcatgacattcttggctttgcttcaagattgaaacaaactgagaaatgatacagtggttttgtccatgaacctaccttcaactactataattaagcacattctgaaacatttcagaagtaactaactgaacaagaagttaagaaaaacatcatggatgtgaagtgacttctgttatttgtattcccttcatacaaaatagagagaaaaaaaccctagtggccatgcacgctgagaatttcagttttcatatgaatcatctattcacatgtcacagaattagctagatgagaaggataaaactgcattgaactgggaattaaactctgagtcaggtatctcagtttgccctacaaaatat

SEQ ID NO: 921119 - DNA, 609 bp, Homo sapiens
ccccttttcattttacagcacctctgtacctgtagcttaatacaagcaagcttaaaatggcacactagacatatgaacatggtgcaaggttgtatattcttataaagcattatttcttcggacattaatgcattatcagttttcaggcatcactgcaaagaacaatattccaacacagattttcacagcttttcaccaaggtggatatttgcttaaatgattttttcattgaatatgtacaattcttatattgtgaactatgtattttttcttcttattttartacaaaaattatttgtgtcatttatgtgacatgtgtagataaggacagttgcttttagaaaaatacttaaagtagaaaaacatataggactatattagtcccttgcaacttggaatttgccctgatcaggtttgaaaatctgacagtttccacctcttctaatcactgtaaacgttatgaaaagagcagaaagagaagattattagaaggctcagaataaaaaggcattttaacagtttatgtttttatagaaagtatgggcataaagttagataccagtaaagtgcggtatcttgtactacgatcttgaacaaaatttcaagaat

SEQ ID NO: 921120 - DNA, 609 bp, Homo sapiens
ccccttttcattttacagcacctctgtacctgtagcttaatacaagcaagcttaaaatggcacactagacatatgaacatggtgcaaggttgtatattcttataaagcattatttcttcggacattaatgcattatcagttttcaggcatcactgcaaagaacaatattccaacacagattttcacagcttttcaccaaggtggatatttgcttaaatgattttttcattgaatatgtacaattcttatattgtgaactatgtattttttcttcttattttagtacaaaaattatttgwgtcatttatgtgacatgtgtagataaggacagttgcttttagaaaaatacttaaagtagaaaaacatataggactatattagtcccttgcaacttggaatttgccctgatcaggtttgaaaatctgacagtttccacctcttctaatcactgtaaacgttatgaaaagagcagaaagagaagattattagaaggctcagaataaaaaggcattttaacagtttatgtttttatagaaagtatgggcataaagttagataccagtaaagtgcggtatcttgtactacgatcttgaacaaaatttcaagaat

SEQ ID NO: 921121 - DNA, 609 bp, Homo sapiens
ccccttttcattttacagcacctctgtacctgtagcttaatacaagcaagcttaaaatggcacactagacatatgaacatggtgcaaggttgtatattcttataaagcattatttcttcggacattaatgcattatcagttttcaggcatcactgcaaagaacaatattccaacacagattttcacagcttttcaccaaggtggatatttgcttaaatgattttttcattgaatatgtacaattcttatattgtgaactatgtattttttcttcttattttagtacaaaaattatttgtgtcatttatgtgacatgtgtagataaggacagttgcttttagaaaaatacttaaagtagaaaaacatatargactatattagtcccttgcaacttggaatttgccctgatcaggtttgaaaatctgacagtttccacctcttctaatcactgtaaacgttatgaaaagagcagaaagagaagattattagaaggctcagaataaaaaggcattttaacagtttatgtttttatagaaagtatgggcataaagttagataccagtaaagtgcggtatcttgtactacgatcttgaacaaaatttcaagaat

SEQ ID NO: 921122 - DNA, 680 bp, Homo sapiens
gagatcaaatgttgtagcgttgtgtggagagaaatggaaacagctactttggaaggtgctttggcaatatgtgtaagaaagaaaagaaaaggaaaagaaggaaggggccgggcacggtagctcacgcctgtaattccagcacttcgggaggccaaggcagggggatcacctgaggtcaggagttcgagaccagccttgccaacatggtgaaaccccatctctactaaaaatacaaaaattagccgggcctgatggcacatgcctgtaatccaagctacttgggaggctgaggaaggagaattgcttgaacccaggaggccgaggttgtagtgagccaaggttgcgccactgcactccagcctgggtgacagagcgagactccatctcaaaaaaaaaaaaaaaaaaaaagaaaagaaaagaaatagaaaaaggggttaattactactgactttacagaaataaaaakgattataaaggaatattataaataacatatagcaacaaattggataacctatttgaaacaaacaagaaataaccataaaaatgggcaaccagcagccattcttttttttttttttttttttagacggagtcctgctctgtcccccaggctggagttgcagtggcaaaatcttggctcactgcagtctgtgcctcccggttcacaccattttcct

SEQ ID NO: 921123 - DNA, 524 bp, Homo sapiens
agagtttgaacacttagcagtgtaagaatggtggaagaacggccactgggattggagaagactcagctattgttacaggcacatactccaaagttagattttcaattttgtctacctatgaagttaggttgcagtttgtccacaatgactcaaataaagaagtatggagtccttctcaggccttctagtttgctttaccaattccccccttttggtcattttctccatttttgagagagatttaccaaaactttagtcattgatgtcactatcaccatagtagatrtacttatttggtagtgaaacccactgggaatcagtagaacaatgagttttgtaaaggtaggaacaaacactgagtagagggaacttccccttatgctagaatgccctgtttacaggagagaaacaaaacctggtctgttctggtctaagatctatgtgtttccttaaagtctcagtttcattatgttacttttagcatgagtgactccagttttgtttggtttggtctgttgaggtgt

SEQ ID NO: 921124 - DNA, 608 bp, Homo sapiens
catggccgaggggacggggcctgcaggcagaagtggggctgacagggcagagggttgcgccccctcaccatcccttctgcctgcagcggtgggctgcacgtacgttcagcaacaagacgctggtgctggatgagaccaccacatccacgggcagcgcaggcatgtgactggtgctgcggcggggcgtgctgcgggacggcgagggatacaccttcacgctgacggtgctgggccgctctggcgaggaggagggctgcgcctccatccccctgtcccccaaccgcccgccgctggggggctcttgccgcctcttcccactgggcgctgtgcacgctctcaccaccaaggtgcacttcgaatgcatgggtgagtrcaggcctgcgtagggggagcagcgggatcccccgactctgtgaggtcacggagccctcctgtgatgccgtggggaccgtccctcaggctggcatgacgcggaggatgctggcgccccgctggtgtacgccctgctgctgcagcgctgtcgccagggccactgcgaggagttctgtgtctacaagggcagcctctccggctacggagccgtgctgcccccgggtttcaggccacaa

SEQ ID NO: 921125 - DNA, 589 bp, Homo sapiens
cactgcactccagcctgggtgacagagcaaactccagtctcaaaaaaaaaacaaataataatattttacataaccaaccacttctaaagattaaaaaaacccctacgattaaaaacctcaggtccctcaggcaatcataccagatattgaaacaaagcaataacataaggactgcagtattcattttatttttatattatttatttattcttccttagtttcttgagattatcatccgctgagggtggaaggggagtgagcagacacactcaggaggtgtcttgagattatcatccrctgagggtggagctgagggtggaaggggagtgagcagacactcgggaggtgtcttgagattatcatccgctgagggtggaaggggatagagcaggcactcggcaggtgtcttgagattatcatccgctgagggtagagctgagggtggaaggggagtgagcagacactcgggaggtgtcttgagattatcatccgctgagggtggaaggggatagagcacacactcggaaggtgtcttgaggctcagggagttatcaattatagaatgttgttgagttggaggaggtggctg

SEQ ID NO: 921126 - DNA, 619 bp, Homo sapiens
ccattttacattctcaccagcaatgtatcagtgtcctgtttcaccatatcttcaccaacacttctgactttttgtattggggtgaagttcatataatttaaaattgaccattttaaagtgtacatctcattgacatttagtacactgctggtgaccaccacctatatgaagttctaaaacatgtcacccccaaagaaaatcctgtgctcattaagcagccattccccattatcatctttttggttatagtcattctagtgggtgtgaagtactatctcattgtagttggatttggatttkgatttccctaatgactcacaacgttgagcatcttttcatgtgctttcttggtcacttgtatatcttctttggagagaggtgtctgttcagatcctttgcctaatttttaagctggttatttggttttttgttttgttaattgttgtaaaagttctttattctggatacaggatccttatcagacatatgatccattcttgattatctgctttttttttttttttatttaaatcgaaaaggattggggctgggcccaaagcaggaggaaaaaacgttgtggcttcaccattgctgtgcactgtgggataatggatggaac

SEQ ID NO: 921127 - DNA, 605 bp, Homo sapiens
taggactccaatattatgttgaatagaagtggtgagagggggcatcctgtcttttgctggttttcaatgggaatgcttccaacttttgcccattcattataatgttggatgtgagtttgtcataggtggctcttattattttgaggtatgttctttcaataatttattgagagtttttaacatggagggttgytgaatgtatcttttcttggagggttattgaatgtatcttttctgcatctgttgagataatcatgtggtttttgtctttagttctgtttatgtgttgaatcacatttattaatttgcatatgttgaacaaaccttgcctcccagggatgaagcctacttgatcatggtgcattcactttttgatgtgctgctggatttggtttgcaagtattttgctgaggatttttgcattgatgttcatcaaggatattggcctgaagttttctttttttggtcatgtctctgccaggtttttgtatcaagatgatagtggcctcatagaatgagttggggaggagtccattcttctgaattttttcaaatagtttttgtagaaatggaaccagctcttctttgtacatcttgtggagttc

SEQ ID NO: 921128 - DNA, 740 bp, Homo sapiens
gacagaaaaaaactcgacatgaggcagtttcatctttgggtgctatattcatttgctagggctgccataacaaagtaccacagactgagtggcttacacagcagaatttttttctctcactattttggtggccagaagtctgagaacaaggtttcagcagggttggtttcttgtaaggcttcctccttgacttgtaatggccatcttctccctatgccttcatagggccttcccccatgtgtatctgtgtcctaatcccctcttyttataaggacaccaatcacattagattagggcctaccctgatgacctcattttaactcagttacctctttaaaggccccatctccaaatacagtcatattctgaggtaactggcagtgggattggggggtgcagtggagtcaggacttcaacatatgatttttttttttttttttgagacagagtcttgctctgttgcccaggctggagttcagtggcatgatctcagctcactgcaacttacgcttctcgggttcaagcaattcatctgcctcagcctcccaagtagctgggattacaggcatgcgccaccacacccggctactttttgtatttttagtagagatggagtttcaccatgttggccaggctggtctcgaactcctgactcaggtgatccacccacctcggcctcccaaagtgctgggattacaggcgtgagccaccgcgcccggccaacatatgaactttagaaa

SEQ ID NO: 921129 - DNA, 645 bp, Homo sapiens
gacagaaaaaaactcgacatgaggcagtttcatctttgggtgctatattcatttgctagggctgccataacaaagtaccacagactgagtggcttacacagcagaatttttttctctcactattttggtggccagaagtctgagaacaaggtttcagcagggttggtttcttgtaaggcttcctccttgacttgtaatggccatcttctccctatgccttcatagggccttcccccatgtgtatctgtgtcctaatcccctcttcttataaggacaccaatcacattagattagggcctaccctgatgacctcattttaactcagttacctctttaaaggccccatctccaaatacagtcatattctgaggtaactggcagtgggattgggkggtgcagtggagtcaggacttcaacatatgatttttttttttttttttgagacagagtcttgctctgttgcccaggctggagttcagtggcatgatctcagctcactgcaacttacgcttctcgggttcaagcaattcatctgcctcagcctcccaagtagctgggattacaggcatgcgccaccacacccggctactttttgtatttttagtagagatggagtttcaccatgttggccaggctggtctcgaa

SEQ ID NO: 921130 - DNA, 676 bp, Homo sapiens
aaaaacttaggccaaaaaacccaagccaattcaaatacctggaaagccttctcaaaaaagactggtaccaacaagcccggagtgcaaagacttaaataaatacctaaatcttcaatgcccagacacagagaaacacctatgaatatcaagaccatctaggaaaacatgaccttaccaaatgaactaaataaggcatctaggaaccaattttggagagacagaaatatgtaawctttcatacaggaaattcaaaatagctgctttgagaaaaatcaacaaaatgcaagattacatagagaaggaattcagaattctatcagataaatttactgaagcttgaataatttaaaagaatcaagcagaaatactggagttgaaaaattgacatgctgaaggatgtatcagtctcttgagagcagaatagatcaaacagaagaaagatttagtgagcttgcagacatggtatttgaaaacatacacacagaggaaacaaaagaaaaaagaataaaaatcaatgaagcacacctagaggatctagaaaatagcctcaaaagggcaaatctaagagttattggccttaaagagaatgtagagagatagggatagacagtttattcaaagggataataacagaaaacttttcaagcttaggcaaagatatcactatttaagtaag

SEQ ID NO: 921131 - DNA, 620 bp, Homo sapiens
tttaccactatataatgtccctctttgtctctttcaactgctattgctttaaagtttgttttgtctgatacaagaatagctacccttgcttgtttttggtgtccatttgcataaaatgtcttattccacccctttactttaagtttatgtgagtccttatgtgttaggtgagtctcctaaagacagcagatggttggtgagttcttgcctattctgtggttctgtatcttttaaatggagcatttaggccatttacattcccatgttagtaatgaaatgtgaggtactgctgcattcatcatgctttttgttgctggtgtaatttggttttttgtttttgctttttaacttgtatttttgttttgtaggtcctgtgtgattcatgctttaaagaggttcygtttctatgtgtttccaggatttgtttcaagatttagagctccttttagtagttcctgtagtggtggcttggtaatggtgaattctctcagcatttgttcgaaaaagactgtatgtttccttcatatatgatgcttagttttgctggatacaaaattcttggctgaaaatagttttgtttgaggaggctaaagatagggccccaatctcttctagcttgt

SEQ ID NO: 921132 - DNA, 653 bp, Homo sapiens
ggcttcctccagagcaaatgttatgagaaagggggagagagagagagagagcatgtaaccaataaccaggatggcagcgacagtgtctttttttttttttctttgagacatagttttgctcttgttgcccaggctggagtgcagtggcacaatctcgactcactgcaacctctgccacccaggttcaagcaattctcctgcctcagcctcctgagtagctgggattataggtgcccgccaccacgtccggctaatttttgtacttctagtagagacggggttgccatgttggccaggctggtctcgaactcctgacctcaggtgattcacccgcctcggcctcccaaaatgctaggattatagacgtgagccactgcacccaaycttttatttttttattttttgagatggagtcttgctctgttacccaggctggagtgcaatggaccaatcttggctcactgcaacctccacctcctgggttcaagtgattgtcctgcctcagccttccgagtagctgggatcacaggcatgtgacaccatgcccggctaatttttgtatttttagtagagacggggtttcaccatgttggccaggctggtctcaaactcctgggctcaagtgaccttgaactcctgagctcaagtcatcc

SEQ ID NO: 921133 - DNA, 772 bp, Homo sapiens
aagtaaatttactgaggcttcagaggaagatcttcaggactcagatcttagttctagattaaaagaagttgggctgggcgcggtggctcacgcctctaatcccagcactttgggaggccgaggtgggtggatcacgaggtcaagagttcgaaaccagcctggccaacatggtaaaactccgtctctcctaagaatacaaaaattagctggtgtggtggygtgcgcctgtaatcccaactactcaggaggctgaggcaggagaatcacttgaacccgggaggcggaggttgcagtgagctgagattgcaccactgcactccagcctgggtaacagagcaagactccgtctcaaaaaataaataaataagttaatcacttatgtctttagatgaatgtacacttacacataaacatatagcttagaaggtatataaactctgaaacccgaattttgagttggtctggtgacatttcctaggccttcttccccataactggttacagaaataaaaactcccttcctccccagttcatctgcatctcgttactgggccgtgagaaatagcagcccaaccctcaatttggcctggaaacgctaatagacggggtctttccttgcagacccgagtgctccacggacccccggtgcaacagtccctaggactctggaacagagacacagaggaggtgtttctcccagagcgctatacacagaataaaatcctatgaggcccatgtggcctggcccctgccctcctccagcctcacctca

SEQ ID NO: 921134 - DNA, 780 bp, Homo sapiens
agctgcaaagaaataaaacacctagtaatatacttaaccaaggaggtgaaagagctctacaagcaaaactataaaacactgctgaagaaaacacagttgaaataaataaatgaaaacacattccatgctcattgattgaaaaagtaaatatcattaaaatgaccatactgtccaaagcaatctacagatttaatgcaattttcatcaaaatacatcatttttcacaaaactagaagaaacaattctaaaatttattcggtaccaaaacagagccccagtagccaaggcaatcctaagtaagaaaagcaaaagtagaggcatcaaattgccagtgttcatattttacyacaaggctgtaattaccaaaacaacatggtactggtatgaaagtagacacagagaccaatggaacacaatagaaaatccagaaatgaagccaaatgcctacaaccaactgatttttgaaaagcatacaaaaacataaattagggaaagaacaccctatttaataaattgtgctaggaaaactggctagccacatgtagaattaaattggatctctatctctcaccttgtgcaaaaatcaactcaaaacgtgtcaagtacttaaatataagaccccaaagcataaaaattctagaagataaccttgaaaaaactctcctggacattggcctaggcaaagaatttatgactaaaacctcaaaagcaaatgcaacagaaacaaaagtaaataaatggcacctgactaaattaaaaaggttctgcacagaaaaagag

SEQ ID NO: 921135 - DNA, 619 bp, Homo sapiens
tcagaaacttctttgtgttgtttgcattcaactcacagagttgaaactttcttttcattgagcagttttgaaacactctttttgtagaatccgcaagtggatatttggactgctttgaggccttcattgtaaatgggaatatcttcacataaaaactagacagaagcattctcagaaacttctttgtgatgtgggcattcacctcaaagtgttgaaccttcttttgatacagcagttttgaaaaactctttttgtggtatctgcaagtggatatttggagcgtgttgaggccttcgtttgaaacgagaatatcttcacataaaaacyagacagaagcattatcagaaacttctttgtgatgtgtccattcaactctcagagttgaaccttccttttgatagagcagttttgaaatactttttttgaaggacatgcaagtgtatatttggagtgttttgaagccttcattggaaacaggaatatcttcacataaaaactagatggaagcattctccaaaacttctttgtgatgtgtgcattggtagagcagatttgaaacactctttttggagaatctgcaagaggatatttggagccctttaaagcctatggtagaaaa

SEQ ID NO: 921136 - DNA, 557 bp, Homo sapiens
tgctttgtgattagtccattcatcacacagagataaacctttcttttgattgtgcatcatagaaacactgttttgtagaatctgtgaagggatatttgggagcacctgaggcctgtggtgaaaaaggaaatatctccacataaaaactagtaagaagctttctgagaaactgctttgtgatatatgtactcatctcacagagttaaaactttccttttagtgagcagtttggaagcactgtttttgtagaatctgtcaagggatatatgggaatgcattgattcctatggcgaaaaatcaaatatcttcacataaaaactaggaagaaactttcagagaaactgctttgtaatgtcagttccktctcacagaggttaagcattcttttgattgagcaattttcaaagacagttttagtggaatctgtgaaaagatacttgggagcgcattgaagctcatggtgaaaaaggataaatcctcagaaaaaactagaaagaatctttctgattaactgatttgtgatgagtccattcatcacacagagttaaaccattctt

SEQ ID NO: 921137 - DNA, 678 bp, Homo sapiens
cagggttaccgtaatcatccccagtttaggataaatcttattaaggataaatataggccgggcgtggtggctcacgcctgtaatgccagcactttgggaggccgaggcgggcgaatcacgaggtcaggagatcgagaccatcctggctaacacggtgaaaccccatctctactaaaaatacaaaaaattagccgggtgcggtggtgggtgcctgtagtcccagctactcgggaggctgaggcaggagaatggcgcgaacccgggaggcagagcttgcagygaaccgagatcgcgccactgcactccagcctgggcgacagagcaagactccatctcaaaaaaaaagaataaatatgatgaccgggcacggtggctcatgcctgtaatcctagcactttgggaggccaaggtgggcgggttacctgaggtcaggagttcaagaccagcctggacaacatggcgaaaccccgtctctaccaaagatacaaaaattagccaggcgtggtggtgcatgcctgtaatcccagctactcaggaggctgtggcaggagaattgcttgaacccaggaggaggaggttgcagtgagctgatatcgcaccactgcactccagcctgggagacagagcaagactccatctcaaaatttaaaaaaagaataaatatgattaggcggggca

SEQ ID NO: 921138 - DNA, 599 bp, Homo sapiens
cagagtttactgattcattatctcatggtccatttctagtttccatattctccaactccttctaatgttgcttatatttatattgcagattttgcttttgctaaatatcttcatcttgctatcttattattctgttattattatttaaattgaagcaaatttaactaagcaacattgattgaactgctaatatgggcaaacgytgttgtttgttacttttacatacattatcccagacaatttttcaaactgtgcaaagattataatatcccatatcttataagaaacaaaactgagaaactaagagggaagcaatttctcacaagcacatggaaaataacagaactagaatttgaagtcctctaggtttcattgaattttataagcacataactgaccctggaacactgacattattgcattctaattaaactagtttattttaatatccacaataggttggttaattagttgaattccatcatagcctataattagacaaaaaaaagaaaaactcagtttctagactcagtttctagataaaagaacagttcttagaaacctaagattttttgtggcaaagagacccacaaacaatc

SEQ ID NO: 921139 - DNA, 730 bp, Homo sapiens
gtgtactgtgtgatcgcggcattagaaaggtggcctcttcagatggacccatttgggggataaagcctgtcaggtggtgccagccctgaggcacactgcaggcacgctttggagctttggggctggtctacagggaaggcctccagccccttccatccaaaatgcgcccacagggttggggggtctgtaagcaaccactgtagctgcccccggttctcacasaattcctttccattgcagagagttaagaaagacgtggacaagggcacacggcactcagacatgttcctgctgaagccagaggacggaagagaaggtagaggtgctgtgcctccagggcgggagctggctggtctgtgtgtggcgggaggcagagcccacaccctcccatggatgtggggctggcggtgagcccctgcaccctgcccggagcggagggcctgccgagatggctcatttcggggtgggccgggtgggacaggctccatagccctggtgtctgctgggcaatcacctttgggggcattgatgatggactgactgagaagcacgggcgctgttaccctgcagacagccctctgtggagcagtgagcacagtgcccctcagcagctcctgatgggcccctccaagggtcttgagctctcgaagggagaaccatcctgggccttgagtacaagccaccaggagtcactggggctgcctggcactgtggtgacgggcctcgctct

SEQ ID NO: 921140 - DNA, 709 bp, Homo sapiens
agccagggtgtggttccgcaggtcacccttggtcctggaaggtcgtgtggagtgtgcgtctgataaggagacacagcctgttgtgagtacggatttggaggtcagggaatggagggtgtgcgcttaatctttctctcactctctttctctctctgtctctttctctctttctcgctctctctctctttctctctttgtggtcttgtctttttctcctctctgtctcttttctctctctctctttctccttccttyctttctttcttccttcttcaagagacaaagtcttactctgttgcccaggctggaatacagtggtgtgatcacaccttattgcagcctcaaactcctgggctcaagtggtcttcctgcctcagcccccctagtagccaggattacaggcgtgcaccaccgtgccgggctaattaaatttttttttctttttttagagatggggtcttgtcatgttgcccaggttggtcttgaactcttggcctcaagagattctcccacttcagcttcctgagtagctgggattataggtgtgagccactgtgccaggctgagctgcttaatttctgtatttctactgctcagcaggattcggttactgctgcttaatgtatttgtgattgggagatgcctaatgttgagccttattcagttgttaagaccctgacgagacgcacagcggtgacaaatggtctgc

SEQ ID NO: 921141 - DNA, 663 bp, Homo sapiens
gttggtaatggctacaggaaacggaataaaattgaagcggcttcattgttctgaagccattactgcactgggatatccagagagctgaaggagggtcccgggggcccctgggctccaggtccatgggtttgcctcgcataggcctgggcttgtgcttgagaactgccatgcagtgagctccagtatgcccccgggttctagatttccaaataaaagagcatttcggaaagttttaagactctcttaaggaacagtggtgaggtgccaacgtcctcactgtccagcttcacrgtgggtcctcgggaggaaggggatggaggtggtgctgcctcagtgctctgaccgggacacctggggcccagcactgctctgcgcctgcagtgctgaggatgcctctgtctcgaccccgccctccaggggcacaggacgacctgaggaaggtcacccgcatcgcctactccatggtgaagcagtttgggatggcacctggcatcgggcccatctccttccctgaggcgcaggagggcctcatgggcatcgggcggcgccccttcagccaaggcctgcagcagatgatggaccatgtgagtcggctctggccacaccgctgccctctgtgctccccggggagggagtccctgggtctaccacacaagggtcgcc

SEQ ID NO: 921142 - DNA, 721 bp, Homo sapiens
ctgaagcacagcatcacagggagacgattaggcctctggataactgcgggcaagcctgactgatgtcaggccctccacaagaggtggaggagcagagttttctctaaactcccctggggaaagggagactccctttcctggtctgctaagtagtgggtgtttttccttgacactgacgctactgctagaccatggtctgcttggcaacgggcgtcctaccagacgctggcgttaccrctagaccaaggagccctctggtggccctgtctgggcataacaaaaggctcacactcttgtcttctggtcacttctcaccatgtccccccagctcctgtctctgtatgacctggtttttcctaggttatgattgtagagcgaggattattataatattggaataaagagtaattgctacaaattaattaatgatattcatatataatcatgtctgtgatctagatctagtataactattcttattttatatattttattacactggaacagctcgtgccctcggtctcttgcctcggcacctgggtgacttgccgcccacagtggtgcgtgctggtggtcccagctacttggaaggctgaagtgggaggatcatttgagcccaggaagttgaggcttcagtgagccatgatcatgccacagcatttcagcctgggccacagaccttcaagatcctgtctcaaaaagaaaaagggatatcgctcag

SEQ ID NO: 921143 - DNA, 721 bp, Homo sapiens
ctgaagcacagcatcacagggagacgattaggcctctggataactgcgggcaagcctgactgatgtcaggccctccacaagaggtggaggagcagagttttctctaaactcccctggggaaagggagactccctttcctggtctgctaagtagtgggtgtttttccttgacactgacgctactgctagaccatggtctgcttggcaacgggcgtcctaccagacgctggcgttaccactagaccaaggagccctctggtggccctgtctgggcataacaaaaggctcacactcttgtcttctggtcacttctcaccatgtccccccagctcctgtctctgtatgacctggtttttcctaggttatgattgtagagcgaggattattataatattggaataaagagtaattgctacaaattaattaatgatattcatatataatcatgtctgtgatctagatctagtataactattcttattttatatattttattacactggaacagctcgtgccctcggtctcttgcctcggcacctgggtgacttgycgcccacagtggtgcgtgctggtggtcccagctacttggaaggctgaagtgggaggatcatttgagcccaggaagttgaggcttcagtgagccatgatcatgccacagcatttcagcctgggccacagaccttcaagatcctgtctcaaaaagaaaaagggatatcgctcag

SEQ ID NO: 921144 - DNA, 568 bp, Homo sapiens
gatgatgagcattttttcatgtgtcttttggccacataaatgttttcttttgagaagtgtctgttcaagatatggattcttaagagcaatgtctggttttgacttttcgactgtagttttttatccccctttctcaggaagctttgagtcttagaatgttgcctataaagagaatttgggatcattaaaattgatttactgaatggttttcatgatcataaccagatatatggtgcccaaggacagaagaagaaattagcccttgttcataccaaagccacttacacgcataaatctaaaggaaaaaacgatcattttggataaaaaatgatgcacaaaaagttatagaatataaatgcaaagtagcccgggtttatgttatgcttggggaaaraaaaggaaaacccaagtttaagattgtaaatggatggagcatgtggcttggaaaatgtcctctcttctcctgttactgacacctactgtgtgcctggtaccgaaccaagcacttacacacagaatcaacttttacccatacaaatccctgcttgatgggaattaccatttccat

SEQ ID NO: 921145 - DNA, 631 bp, Homo sapiens; identical to SEQ ID NO: 920205

SEQ ID NO: 921146 - DNA, 554 bp, Homo sapiens
tcatttactgtaaatgtaaggatttatttctggactctcgactttatttcattgatttatatatatacccttgggccagtaccacactctcttgattactgtagctttctttaaagttttaaaaatgggaagtatggatttaaaawttttttctcctttatttcaagtttggtttgtggatttgggcttttttaattttcatagaaattttaagttgatcttgtcaatttcttcaaatgtatatgggcttttgatagatactgtgttgaatctgtcgatcaatttggagtgtattgtcatcttaactatactagcatcctgatccatagcatagtgtattacttcatttataggtttacttttatttatttctacaatttttacattttcagattataagttttataaatttttgataatttattcttagggttttaaaaatattgtaaattaaattgttttcttaattttatttttagtttgcttattgctagaaattcaatagaaatgcaattgaattttgtatattgatctgtatcctgtaattgtgctag

SEQ ID NO: 921147 - DNA, 554 bp, Homo sapiens
tcatttactgtaaatgtaaggatttatttctggactctcgactttatttcattgatttatatatatacccttgggccagtaccacactctcttgattactgtagctttctttaaagttttaaaaatgggaagtatggatttaaaatttttttctcctttatttcaagtttggtttgtggatttgggcttttttaattttcatagaaattttaagttgatcttgtcaatttcttcaaatgtatatgggcttttgatagatactgtgttgaatctgtygatcaatttggagtgtattgtcatcttaactatactagcatcctgatccatagcatagtgtattacttcatttataggtttacttttatttatttctacaatttttacattttcagattataagttttataaatttttgataatttattcttagggttttaaaaatattgtaaattaaattgttttcttaattttatttttagtttgcttattgctagaaattcaatagaaatgcaattgaattttgtatattgatctgtatcctgtaattgtgctag

SEQ ID NO: 921148 - DNA, 643 bp, Homo sapiens
ccccactcacgcacggctgatgcacttgtggctaaatgcggtgcagtcagggccccgggccagattcagggcaggaaatagaataccacctccattgccaggaaacaatggtctacggacatgatttaaactggagccaacgagaacgctcagagggccgaccagcagaggaagggagaccagagggcagcttgcacagatcttgtcttgggttataactgttgacaagmcacttaactgcctccaggtttaagtttgtctgtgtataagatggaggtaacaatatttatacatctcactggagacttatgaaaacaagattttggacagatcccttgggacccatggatggaaagtggtatgtaagtgcagtgataaacctactgtgtgtgtgtgggggggtgttttcagcagtgtattagggacttgtagacccaccagaaaacacttttggagtctgatcaaaaacgacaagaaaaatgagcagctcttggttgcaagtgcatgggtttgctttggttttgtacaggtctgggagaattgcatgtgtaactcagacttcagaattgttttccacctgtcgctgtgatgagtcatacaggtgctcagatcatctgagaatgctgtagtgattgttcccaaa

SEQ ID NO: 921149 - DNA, 646 bp, Homo sapiens
acagggttttgccatgttggccaggctggtttcgaactcctggactcaggtgatccgtctgccttggcctcccgaagtgctgggattaccgaggtgaaccgctgcacccaaccattctctaagagtcctgagtgacatttatacagttaaattacctttgaaattatggacttttcactaacttattcaagaacttaacaagcygtcaaagataaagaaatggaatactttattataaaacttataaaataattaaatattacacatatattttgacttttctctataatccatggttttattcaacattttatctcaaaatattacttagagaagcaagtgagaacacataataggctattaattaataaattaattttccataaaataataaaatgataattatataaagaaataacttgctgtttttcagaaggcaacggggttgtagtagagaaaatttttttttttcctgttgataaaatggccacttctctaggccaagccaagcagattgagagaagttcctaagcattatttctctgggattcaagaactcatgactttaattagaatgggaacgaagtatgctgctaaatttaacaaaccactgtctagttgattatgctgagctggctaatccagc

SEQ ID NO: 921150 - DNA, 717 bp, Homo sapiens
gtcaagcgtcctctggggaagtgggagctggactccagggcttggcctcagcagagggggaggttgtgcaggcagagggttctggggccaccaaaggaggcccagcctgggaagtttgcaggggtggggaccccagagctggccaagctcttgactggcctgggcagcatgtggataccatctgatagcggaggctgccctgaggtcatgtcgggtctccctgcagcctgtgactctggtagagtgcggaccgatgcccctgactgctacctgtctttccataagctgctcctgcatctccaaggggagcgagagtaagtacaccaccctgtggcccccattcctgctcgtgcccatcctgttagtgtgtccacggcyccttccaggctcaaccccacacagggcatgcttgtgggtggccaaacctgagggcagcaataccttcagtggggtcacttcctaccccctcccatcaatacaccctcaaaggctggaaacaacaataaccaacagctagtaactaacagctattaagaacttgctgtgtgcaaagcactattccaagcccttttcatgaattaattgattttgtccttaaaaccaaccctaggatatagattctgttatcatcccctttttacatatgggtaaactgagtcacagagaggttagaaaggaaaagctcatatctacggagtgcatcctgcattccaagca

SEQ ID NO: 921151 - DNA, 717 bp, Homo sapiens
gtcaagcgtcctctggggaagtgggagctggactccagggcttggcctcagcagagggggaggttgtgcaggcagagggttctggggccaccaaaggaggcccagcctgggaagtttgcaggggtggggaccccagagctggccaagctcttgactggcctgggcagcatgtggataccatctgatagcggaggctgccctgaggtcatgtcgggtctccctgcagcctgtgactctggtagagtgcggaccgatgcccctgactgctacctgtctttccataagctgctcctgcatctccaaggggagcgagagtaagtacaccaccctgtggcccccattcctgctcgtgcccatcctgttagtgtgtccacggctccytccaggctcaaccccacacagggcatgcttgtgggtggccaaacctgagggcagcaataccttcagtggggtcacttcctaccccctcccatcaatacaccctcaaaggctggaaacaacaataaccaacagctagtaactaacagctattaagaacttgctgtgtgcaaagcactattccaagcccttttcatgaattaattgattttgtccttaaaaccaaccctaggatatagattctgttatcatcccctttttacatatgggtaaactgagtcacagagaggttagaaaggaaaagctcatatctacggagtgcatcctgcattccaagca

SEQ ID NO: 921152 - DNA, 636 bp, Homo sapiens
caagtggccaaatgaaataaacctagaggtttcagtctcaccaatagctctgtctattatctccctcactgcttccttcaatatatgggtctacttttcaccagcactaaagtcctacagatcagtaacactgctgcagagctggtcctcatcagcctctttatatataatacttttatattccattgyatgggcacagacctatgcctacttattctgagagtggagcttggtagtctcactagtctcaccttctcagaagtctcttagcctcataggcaaacatactttaagcacacacagcaaagtcttcgccttcacagtcctgaaacagttataatagtgccattctaccagattcaaagtctgatcattttgaaccttagtgatgagaatttctgcttcaatcaagttggggattctgtaacgttggtcagggggctggtgatatgggcaaagaaagagagctgagatctcttgcatgttattatatgtgcttgtgtacatgtgtcctgggaattaggagaagaagatgcgttctgagtctgtatcacatcgatcttctgtttgttacctttgttgtgctatatcatttccaggagaaactcaagaagtctgttgggggtaagggtgcat

SEQ ID NO: 921153 - DNA, 737 bp, Homo sapiens
aggccagcaatacactgccactgtccttctcaggagtctatcagctctccaacactatgtcataatttagttcacagggatcttgctcaccttttttttccacaagctataacagtggtccattgcattgatgacattatgctgattggacttagtgaggaagaagtagcagctactccctagacttatgggtaagatatttggatgccagagggtgggaaataaatttgacaaaacttcaggtgcctcctacgyctgtaaaatttctaggggtccagtggtgtggagcatgtcgagacatcccttctaaggtgaaggaaaagttgttgcatctagccccctcctacaaccaagaaagagacacaatgcctagtgggcctctttgaattttggaggcaacatattcttcatttgtgtgtgctacttggcacgtttactgagtgagctgaaaagctgctatttttgagtgatgtgcagacgagagaaggctctgcaacaggtccaggctgctgtgctagctgctctgccacttgagccatgtaatacagcagatccaattgtgcttgaagtgtctgcagagagagatgctgtttggagcctttggcaggcccctacagatgagtcactacacaaaccctttggattttgaagcaaagccctgtcatcttctgcagataactactctccttttaagaaatatctcttgatctgctactgggccttactagagactgaat

SEQ ID NO: 921154 - DNA, 590 bp, Homo sapiens
cctcctgatttctgagtcacatactgtaccaactgagctaggaagaatcttcctgtaggactctcatcccacctgtaggccatttctggtttacttatataaatttgcataggacaccaattgcttttccttctgtagtaaggccatccaatcgtatcattgaagtcaatgatcaaatgctactaatttttaaggagaactctccctatttggcattgtctttaaagaagttgtcttaaaataatccaccatagaatttttgagctaaaaacaaacacctaagatcatttgatttacatctcatgttacagacaaaaatgtttaaacttatccaacatcacacagctaattagccacagctaggcctacactcaagaatttattctcaggccaggcgcagtggctcatgcctrtaatcctagcactttgggaggctgaggctggcggatcacttgagctcaggagttgaagacctgggcaacatggcaaaaccctgtctctacaaaaaatatgaaaattatctggatgtggtggcacccacctgtatagttccagctatttggggcactgaggcaggaggatcacttgag

SEQ ID NO: 921155 - DNA, 745 bp, Homo sapiens
ctttgctatattcagagttgagctcagtctttcttctctatttcaacagtctttaatgaagtctttcttattgttttcacaaatgtaatatggtttggatgtttgttccatctaaatctcatgtagaagtgtgatccccaatgttggaagtggggcatagtaggaggtattgcatcatggggccagatcctcatggatggcttggtgccatccccttggtgatgagtgagttctcactcagttcacaagagatctggttctttaaaagagtctgggatctcccctttctcgctcttgttctctctctcaccatgtgacaccacctgcttccccttcactttctgccatgattggaagcttctgargccctgaccagaagcagatgctagcattatgcttcatgtacagcctgcagaactgtgagccaataaaccccttttctttacaaattacccagcctcaggtatttccttgtagcaaagcaagaacccaccaatacaaagggtctgaataatgtttctttaacatccctcatctctatctgaccggaaagtcatgatggtgctaccgcccataaagacatcaaatggaacttggcctcccatagttaggacgtgtaatcaggagagaccagttgattcccctgaagccaggctaccactaatccatacgccacactggacaaacacccatcctctgaaatgcagcaatagagccagctccacttgaggccctgaaagacgtg

SEQ ID NO: 921156 - DNA, 778 bp, Homo sapiens
gctgccactgatctgacaggaggtgcagctcaggtggtaatgtgagtgatggggagtggctataaatacatgggaagctttgctcactcacctgctactcacctcctgctgtgtggcctggttcctgacagaccacggagtggtactagtttgtggcctgggagttggggacctctggcttatggaggtcaggtaatcaatggagggttttttttgttttgttttgtttttttctggaggcagagtctcactctatcctccaggctggagtgcagtgatgcaatcttggctcactgcaacctctgcctcctgggttcaagcaattctcatgccacggcctcccaagtaactgggattacagacacctgccaccacgcctggctaatttttttttttgagttggagtttcactcttattgcccaggtgggagtgcaatggcacaatctcagctcactgcaacctccgcctccaggttcaagcaattcttctgcctcagcctcccaagtagctgggattacaggcatgygccaccatgcccagctaattttgtatttttagtagagacagggtttcaccatgttggtcaggctggcctcgaactcctgacctcaggtgatctgctcgcctcagcctcccaaagtgctggggttaaaggcgtgagccacgacgcctggctcaatggagttttaactcaggttcatctcacagtggattgttaaaccctcctgtgatcatttccccagtttccaaatgtgtaataagaatagatatattcaa

SEQ ID NO: 921157 - DNA, 566 bp, Homo sapiens
actcatatgttcattgcagcattattcaccatagcaaagacatggaatcaattcaaatgcccatcaatgatagactggataaagcaaatgtggtacatatgcaccatggaatactatgcagccataaaagggaagagatcaygccctttgcagggacatggatgaagctggaagccgttatcctcagcaaactcacacaggaacagaaaaccaaacaccacatgttctcacttgtaagtgggagctgaacaacgagaacacatgacacagggaggggaataacacattctagtgtctgttgggggagggtgaggagggataggggagcattagggaacagagctaatgcatgccgggcttaatacctaggtgatgtgtagacaggtgcagcaaaccgccatggcacacatttacttatgtaacaaacctgcacatcctgaacgtgtatcccagaacataaaaaaataaataaataaaccccccaaaaccaaaaacaaacaaacaaaagagacatgaagtaacttggctaaacttatgaaactagtgggggtagagtcagtaaggaa

SEQ ID NO: 921158 - DNA, 565 bp, Homo sapiens
gggacaatttggaaaaacttggacataaaatacatagcctagaaatatcaaaaacaattttaaagttaggtatgtcatgaatgcataaaatatatgtagacactataatagtgtattttatcattgactaccataaaatatgcacaattctattatagaaagttaaacattatcaaaacgtatgcacccaaacacttacagactgtacatggcatcatttgcagtcaagataaatgtaaacaaatttaaagattaagtattcaatcccmattgcatacaattaactgtagtgtatactgtactactgtaataaatttgtagccacctcccattactattgcagtaagctcaagtgttttcagcatgctctaaaagcctcttatgatgttcatcacctcagagtgagcaatttgtctttccagtagattgagtatcacagtagaaagtgatctcctgtagttctcacgtatttttatccagtttaatgtgataccataaactttccataatatcgtggggccagtacaaagcgccactagtgatgctttcttgttatgcactgtag

SEQ ID NO: 921159 - DNA, 565 bp, Homo sapiens
tcatctcactagggagtgccagacagtgggcacaggtcagtgggtgcgcgcaccatgtgcgagccaaagcagggcgaggcactgcctcacttgggaagcgcaaggggtcaggaagttccctttctgagtcaaagaaaggggtgacggacggcacctggaaaatcgggtcactcccacctgaatactgcgcttttccgatgggcttaaaaaacagcccacaacgagattatatcccgcacctggctcggagggtcctacgcccacggagtctccctgattgctagcacagcagtctgagataaaactgcaaggcggcagcgaggctgggggaggggcgcccgccactggggwggggcgcccgccattgcccaggcttgcttaggtaaacaaagcagccaggaagctccaactgggtggagcccaacacagctcaaggaggcctgcctgcctctgtaggctccacctctgggggcagggcacagacaaacaaaaagacagcagtaacctctgcagacttaagtgtccctgtctgacagctttgaagagagcagtggttctcccagca

SEQ ID NO: 921160 - DNA, 774 bp, Homo sapiens
gaacgtgttctgtgggcatgccggagtaatgcttttcaaacttcaggttggggcccattaggggatcatgatattaattttgtgggccatagctgctttttctattctaaaaaaaaataaagtagggccaggtatggtgacccacgcctgcaattccagcactttgggaggctgaggtgggaggattgcttgagcccaggagttcaagacaagcctgggcaacatagtaagaccctgtctctaccaaaataataataaaaattagcggccagatgtggtagctcacgcctgaaatcccagcactttgggaggccgaggtgggcagatcacaaggccaggagatcgagaccatcctggctaacacggtgaaaccccatctctactaaaaatacaaaaaattagctgggcatggtggcacgcatctatagtcccagctacttgggaggctaaggcaggagaatcatttgaacccaggaggcggaggttgcagtgagccgaggttgtgccactgcactccagcctgggtaacagagcaagactccgtttcacacamaaaaaaaataaataaaagccaggcatggtggtgtacaacatacaggtgcacacctgtagtgccagctacttaggaggctgagatgggagaatcacttaagtcccaggaaactgaggctgcagtgagctatgattgtaccactgcactccagcctgggtgaccagagtgagaccctgtctcaaaaaagaaagaaaatagaaaatgtccgaatgtatcacatg

SEQ ID NO: 921161 - DNA, 583 bp, Homo sapiens
cacttgtagtcccagctacttgcgaggctgaggtgggaggatcccttgagcccaggagacggagcctgcagtgagctgagatcacagcactgcactccagcctgggtgacagagcaagaccctgtctcaaaaaaaagatcagattattgatgatctctgagtatgatggaagggaaaggaaagcaggcttctaaagcactggtaatattccatttcagaacttagttggtggacagawaagtattttattgttgtttaaaaataaatacacaagcacacacacttttttacttatgtagggtttcctgggaaacagattctgaggtggagatttgcaggcagatggttttggaggagtgctctgtggggggaaacttctaagggagagaggagcgcaaggtgggcagagggagacgtggaagtgtgatgtgcttgccaccagagcctcagccaggatggcagagaatgcggagctggggtggcctgtccgagggatccccggctgaggcatggagccaggcctttgtacttccttatgaaccagatatagaatgtgggctgcccctggggattggggataacc

SEQ ID NO: 921162 - DNA, 583 bp, Homo sapiens
cacttgtagtcccagctacttgcgaggctgaggtgggaggatcccttgagcccaggagacggagcctgcagtgagctgagatcacagcactgcactccagcctgggtgacagagcaagaccctgtctcaaaaaaaagatcagattattgatgatctctgagtatgatggaagggaaaggaaagcaggcttctaaagcactggtaatattccatttcagaacttagttggtggacagaaaagtattttattrttgtttaaaaataaatacacaagcacacacacttttttacttatgtagggtttcctgggaaacagattctgaggtggagatttgcaggcagatggttttggaggagtgctctgtggggggaaacttctaagggagagaggagcgcaaggtgggcagagggagacgtggaagtgtgatgtgcttgccaccagagcctcagccaggatggcagagaatgcggagctggggtggcctgtccgagggatccccggctgaggcatggagccaggcctttgtacttccttatgaaccagatatagaatgtgggctgcccctggggattggggataacc

SEQ ID NO: 921163 - DNA, 605 bp, Homo sapiens
aggctgaggcaggagaacagattgaacctggaaggtggaggctgcagtaagctgagatcacaccactgcactccagcctgggtaacagagtgaaactccatctcaaaaaaaaaaaaaaaaaaaaagaaagaaaacattatgctaagcaaaaagtgagacacaaaagaccacattttgtatgatttcatttatataaaatgtcaagaattgggccaggaatggtagctcacatctgtaatcccagcactttgggaagctaaggcaggaggatcacctgagcccaagagtttgagaccagccagggcaacatagcaagaycctgtctctacaaaaaataaacaaattagctgggcgtggtggtccgcacctgtggtcccagctactcaggatcacgccactgcactatagcctgggtgacggagggagacactgtctaaaaacaaccccctcaaaaagaagagacacatctatagagacggaaagattagtgcctgccaagatgttcaggagggagaactggggagagaccatttcatgactatggggcttatttttggtgtgacaactatgttctggaattagtggtgatggctgtactacactgt

SEQ ID NO: 921164 - DNA, 605 bp, Homo sapiens
gagtgggggtaagtggagggtgaggaaacactgcaggtgatagaaacacaagtgcaaaggccctgagataggatcaagctgcatggctgctgtgctctgggcacagggaggccgatgtggttatggggtggggattggaggagacagaggcaggaggcaggtcccaaagtgctttatcagcctcaaaaggatctggtaggtggggcgcagtggctcacgcctgtaatcccagcactctgggaggccgaggctgctggatcacctgaggtcaagagttcgagaccagcctgaccaacatggcaaaacaccatctctactaaaaaggctgaggcaggagaattgcttgaacccgggaggcagaggttgcactgagccgagatcatgccactgtactccagcctgggcgacagaatgagartccatctcaaaaaaaacccaaaacaaaacaaaaaccaacctaggctacatggtgaaacccccacagctacaaaaaaaagaaaaaaaaattagccaggtatggtggtgcaaacctgtagtcccagctactcaggagtccaagacaggaggattgcttgagccagggggtggaagttgcagtgaaccaa

SEQ ID NO: 921165 - DNA, 625 bp, Homo sapiens
gttctcaaggaatgaacccaggggcctgagaggatgtagccccttttggcagtagagatataagagtccacttccgaggcttgcctttctcatttgcagggctactgccttctccagacctcccagcccaggaaactgttggtaagtgaaagggtgagtgagtgtgtgttgcgggggtgggagttctacacaacacagscggctctcctcatgagtgcttccagcattagtgcacgcaatgcgcgcgggggaagggcgggaatggcgggggcgataggggtaaaaatgcagattcctggactccacacccagtgactctgttcagtagttctgaggcagggtctaggaatgtgcctttttaactaggaccgtggctgagttaggttacaaagctgtggtcttagatcacatgttgagaagccctacagggttgcaacttctgccatcaggacagacaaggctttggttccttctcagaggtttcatctggccatgtggctccagagaagtgtgagggtttgggtttctctggggaggtgcacacaggacctttgctgtctatagttgcgccttctggaaacattgggcaggcacaaggggtgagaggtggagctggggaggcagc

SEQ ID NO: 921166 - DNA, 640 bp, Homo sapiens
tatttgtgttgtttgcagtatggtgtgattgtgaataaagcttccataaacatgtacaaggttttaggtgactataagtcatcatgtcacttggtgaatatctaggagtatgattgctgtgttgtgtgataaatgtatgtttattttataaggaactgccaaactattttccaaagtgactgtaacattttacaattctttccaagatgtatagggattataatttgtccactttcttgctagcacttggtatggtcaatcttttaaattctggccattcatagaggtgtgtaatgttatctcactggagtgttaatttgaattttcctgatgattaatgttgtggaacatctttttgcttgcttatttgccattgatatayatttgatgatgtatgtgtccaaaccttttgcccattttttattgggctattcttcttagtatcaaattttgagaattctttgtgtgctctggatacaagtcctttgttagatatgtattttgctaatattttatcccaggttgtggtttatcttttcactctctgaacagtgtttttgtgaagtagaacttttgaattttggattagatttgaatgaaatccaattttcaccttttctttgatagatcatggttaagg

SEQ ID NO: 921167 - DNA, 598 bp, Homo sapiens
ggagtttatggaaagcaattttaggataaaagtaaaaacactgagcaaaataatgaaaagaacagttactatattataataattatgtaaattacgtaatttacattatgtagctcttaaaattataggatgccttgctacaagtactatattattgaaagtgatatttagagcaatagctgtcacttactttttgagattgtgaaaagttagaaatatttcatgggatcacattttaaagaattgctcaatgggtgcagcacaccaacatggcacatgtatacatgtgtaactaacctgtgtgttgtgcacatgtaccctaaaacttaaagtatatataaaaaaaaagaattgctcatctttctggatacacttgagtgcttatgcgacctgggtaccatattggtgttactttgttagctggaattccaaagcatcttggacgtgagcrtgcagtagtgttggtaggatggtaactcctacaacattgtgttgcttcatagtgctctgggtacagggaatgtgccttcaggccctgtgctgatcagatggcagagatggggtagtcatggtagtggggtggtggtggtggtgtgtg

SEQ ID NO: 921168 - DNA, 581 bp, Homo sapiens
gaggccacaggtgggtgcagtgtgactctgccagatggtctgccacctcgatttctctcgctcccctgtcctcccctccctggggagccagttctggctctcgggtccctcccgtggctctggccctgggtggggcacagagttagctctgggctaggcgaggcctggcctgctggcctgccgggcagccagggcccctgaggctgcttggcgatgcggagcgcgtctgggccgcggcggccggccgggaggggggagcgggcgggggggccgtttagccgtgatagatccgcgcgccgcttgtctcttaatctccagagcgaccgatcgattcgctatttccctttgttgccagaaaattcgatcctgggcctggaattaggtccccggcttaatctgagcggaaaccagcgagrgggagacagagacagagatgctgggagagacagagacagagagacagtaagagacagaaagaggcagagagagagagatagaaagagatgccgagaaaggaagagagagagatagatgccgagaaaggaagagacacagggagagataagcacagagatttagag

SEQ ID NO: 921169 - DNA, 613 bp, Homo sapiens
agtcgagtggggacttgaagaattgttatgtctagctggaggattgtatatgcaccagtgaacactctgtgtctagctaatctggtggggacttggataacttttatgtctaactagaggattgtaaatgcaccaataagcactctgtgtctagctcaaggtttataaacacaccaatcagtgctctgtgtctagctaatctagtggggacttggagaaattttaagtctagctaaaggtttgtaaatgcaccaatgagcaccctgtgtctagctcaaggtttgcaaatgcaccaatcgcaccaatcagtgttctgtgtctagctaatctagtggggacttggagaacttttgtgtctagctaaagatttgtaaatgcaccaatcagcaccctgygtctagctcagggattgtaaacacaccaatcagcaccctgtcaaaacggaccagtcagctctctgtaaaatggaccaatcagcgctctgtaaaatgggccaatcaggaggatgtgggtggggccagataagggaataaaagcggactgctggagccagcagcggcaaccggcttggggaccttttcacagtgtagaggatttgttttttaattctctg

SEQ ID NO: 921170 - DNA, 575 bp, Homo sapiens
tatctcccatctccatgcccttcactcagtcccacttgcagagtcgctttggccatggaaggcaccacatttacagattctggggattaggacctggatgtcagagttattattctgtggccacaggaccgacctgagatgtcatttcttttttttttctttttgagatagagtcttgttctgttgcccaggctgaagtgcagtggcacgaccttggctcactgcaacctctgcctcccaggttcaagcgattcttctgcctcagcctctcragtagctgggattacaggcatgtgcccccacgcccggctaatttttgtatttttagtagagatggggtttcaccatgttggccaggctgatctcaaactgacctcaaatgatccgctctccttggcctcccaaagtgctgggattacaggcatgagtcgctgtgtccagccccaagatgcatttctaggaacgtacccagagacactgtcagattctctgtaccaaggagtcaaggctctttctgacctttgcttggttcaaaggaagattctgccgcctgatttctgcctgctctccacccg

SEQ ID NO: 921171 - DNA, 550 bp, Homo sapiens
cagtcccacttgcagagtcgctttggccatggaaggcaccacatttacagattctggggattaggacctggatgtcagagttattattctgtggccacaggaccgacctgagatgtcatttcttttttttttctttttgagatagagtcttgttctgttgcccaggctgaagtgcagtggcacgaccttggctcactgcaacctctgcctcccaggttcaagcgattcttctgcctcagcctctcgagtagctgggattacaggcatgtgcccccacgcccggctaatttttgtatttttagtagagatggggtttcaccatgttggccaggctgayctcaaactgacctcaaatgatccgctctccttggcctcccaaagtgctgggattacaggcatgagtcgctgtgtccagccccaagatgcatttctaggaacgtacccagagacactgtcagattctctgtaccaaggagtcaaggctctttctgacctttgcttggttcaaaggaagattctgccgcctgatttctgcctgctctccacccgg

SEQ ID NO: 921172 - DNA, 454 bp, Homo sapiens
tacaggtgcgcaccaccatgcctggctaatttttgtatttttaatagagtcagggtttcaccattgtggccaggcttgtgttgatctcctgacctcatgatctgcctgcctcggcctccctaagtgctgggattacaggcatgagccacagcgccctgctgagatatacttttttttttgatacagggttttacatctgtcgccyaggcgggagtgcagtggtgcaatcctagctcactgcaacttccccctcctgggctcaagtgattctcctgcctcagcttcttgagtaactgggactacaggcgtatgccactgcgcccagctaatttttgtattttttctagagatggggttttgccctattggccaggctggtctcgaactcccgagctcaagtgacctgcccacctcggcctcccaacatattgggattacaggcgtgagccattgc

SEQ ID NO: 921173 - DNA, 649 bp, Homo sapiens
gcctgctgcagctgtgaagctggtcctttcagccgtatgcagcatcctaggtctgatgtcccctgcactcatgtcagagcacacagcccatgctaagggatctctgcctccccatgtcactccccgcactggcctctcctgagaccatctctttcacacactttcacacacctcccctgccccaagattcctcaytggatgaaactagcctgtctcatgtcctgggtgagcctctctcatgtcctgggtatgttcacgtgcaccctcaacactcccagttggggtggcaagccactcttgccaccctgccagcaagctctaccttgctgcacttgctgctctattggcccatttcctcatttttttccagttccagtgttagtggggacttgaggtgcatccaaattggcaagccactcctgatgcccccagccactctgggttggattagtgttcattctccgggaggtgatcaagctccccttcatcctcatgggatgggctttgctgccttgggcactttctctttactgcagttcctgaagtgctggtatcatcctgcagccccattcccagttccattgcactgccaggcagggtgtcagaatatggggagagctggtttctatccagttgaagctcccctgtg

SEQ ID NO: 921174 - DNA, 649 bp, Homo sapiens
gcctgctgcagctgtgaagctggtcctttcagccgtatgcagcatcctaggtctgatgtcccctgcactcatgtcagagcacacagcccatgctaagggatctctgcctccccatgtcactccccgcactggcctctcctgagaccatctctttcacacactttcacacacctcccctgccccaagattcctcactggatgaaactagcctgtctcatgtcctgggtgagcctctctcatgtcctgggtatgttcacgtgcaccctcamcactcccagttggggtggcaagccactcttgccaccctgccagcaagctctaccttgctgcacttgctgctctattggcccatttcctcatttttttccagttccagtgttagtggggacttgaggtgcatccaaattggcaagccactcctgatgcccccagccactctgggttggattagtgttcattctccgggaggtgatcaagctccccttcatcctcatgggatgggctttgctgccttgggcactttctctttactgcagttcctgaagtgctggtatcatcctgcagccccattcccagttccattgcactgccaggcagggtgtcagaatatggggagagctggtttctatccagttgaagctcccctgtg

SEQ ID NO: 921175 - DNA, 649 bp, Homo sapiens
gcctgctgcagctgtgaagctggtcctttcagccgtatgcagcatcctaggtctgatgtcccctgcactcatgtcagagcacacagcccatgctaagggatctctgcctccccatgtcactccccgcactggcctctcctgagaccatctctttcacacactttcacacacctcccctgccccaagattcctcactggatgaaactagcctgtctcatgtcctgggtgagcctctctcatgtcctgggtatgttcacgtgcaccctcaacactcccagttggggtggcaagccactcttgccaccctgccagcaagctctaccttgctgcacttgctgctctattggcccatttcctcatttttttccagttccagtgttagtgkggacttgaggtgcatccaaattggcaagccactcctgatgcccccagccactctgggttggattagtgttcattctccgggaggtgatcaagctccccttcatcctcatgggatgggctttgctgccttgggcactttctctttactgcagttcctgaagtgctggtatcatcctgcagccccattcccagttccattgcactgccaggcagggtgtcagaatatggggagagctggtttctatccagttgaagctcccctgtg

SEQ ID NO: 921176 - DNA, 545 bp, Homo sapiens
ctttgctgccttgggcactttctctttactgcagttcctgaagtgctggtatcatcctgcagccccattcccagttccattgcactgccaggcagggtgtcagaatatggggagagctggtttctatccagttgaagctcccctgtggtgtgccttggatgctgggtctctcctagccccagagctctagtctcacaggcaaaggagacagtaaatctgtcatctccaaycccaggcaagccccccacccccaagaaatgtagtgggatttttaaggaatcagagagaccattggggttcaggaggatattcattaattatttaggtgcaccagccgtcggattaacatccaaaggactgagccctgaacaaagagttaagttaccttttaagcatttagtggggtggggggagatctctgcagagggaagcatactacagaagtgagaaacaaagccagttattcaattgaggtatgcattacatcatttcttacttttcaaggagaaacatgttttgtgacttgagtttgtctgtctagtgac

SEQ ID NO: 921177 - DNA, 545 bp, Homo sapiens
ctttgctgccttgggcactttctctttactgcagttcctgaagtgctggtatcatcctgcagccccattcccagttccattgcactgccaggcagggtgtcagaatatggggagagctggtttctatccagttgaagctcccctgtggtgtgccttggatgctgggtctctcctagccccagagctctagtctcacaggcaaaggagacagtaaatctgtcatctccaaccccaggcaagccccccacccccaagaaatgtagtgggatttttaaggaatcagagagaccattggggttcaggaggatattcattaattatttaggtgcaccagccgtcggattaacatccaaaggactgagccctgaacaaagagttaagttaccttttaagcatttagtggggtkgggggagatctctgcagagggaagcatactacagaagtgagaaacaaagccagttattcaattgaggtatgcattacatcatttcttacttttcaaggagaaacatgttttgtgacttgagtttgtctgtctagtgac

SEQ ID NO: 921178 - DNA, 805 bp, Homo sapiens
caagccttgttacttttctgtctcaatgatctgtctaatattaacagtggggtgttaaagactctcactattattatgtggaagtctaagtctctttatagttctctaagaatgtgttttatgaatctgggtgctccttgaattgatctctttaccattatgtaaygtacttctttgtcttttttgatctttgttggtttaaagtttgttttgtcagaaactgtgattgcaggctgggctcggtggctcacgcctgtaatcccagcactttgggaggccaaggtggacagatcacaaggtcaggagatcgagaccatcctagctaacacagtgaaacctcgtctactaaaaatacaaaaaattagccaggtgtggtggcgggtgcctgtagtcccagctacttgggaggctgaggcgggagaatgacatgaacccaggagatggagcttgcagtgagctgagatcgcaccactgcactcgaacctaggtgacagagcgagactccatctcaaaaaaaaaaaaaaaagaaactatgattgcaacccctgcttttttttctgcttttatttgctttgtaattttcctccattctttaatttgagcctacatttgtcttttcatgcgaagtgggtctcttgaatacagcacacaaatgggtcatgactctttatccagtttgcccttctatgtctttcaattgaggcattcagcctattacatttaaggctaatattgttatgtttgattttgattctatccaagtggtgctagctgcttattttgcagagtcgttgatgtagttgtt

SEQ ID NO: 921179 - DNA, 805 bp, Homo sapiens
caagccttgttacttttctgtctcaatgatctgtctaatattaacagtggggtgttaaagactctcactattattatgtggaagtctaagtctctttatagttctctaagaatgtgttttatgaatctgggtgctccttgaattgatctctttaccattatgtaacgyacttctttgtcttttttgatctttgttggtttaaagtttgttttgtcagaaactgtgattgcaggctgggctcggtggctcacgcctgtaatcccagcactttgggaggccaaggtggacagatcacaaggtcaggagatcgagaccatcctagctaacacagtgaaacctcgtctactaaaaatacaaaaaattagccaggtgtggtggcgggtgcctgtagtcccagctacttgggaggctgaggcgggagaatgacatgaacccaggagatggagcttgcagtgagctgagatcgcaccactgcactcgaacctaggtgacagagcgagactccatctcaaaaaaaaaaaaaaaagaaactatgattgcaacccctgcttttttttctgcttttatttgctttgtaattttcctccattctttaatttgagcctacatttgtcttttcatgcgaagtgggtctcttgaatacagcacacaaatgggtcatgactctttatccagtttgcccttctatgtctttcaattgaggcattcagcctattacatttaaggctaatattgttatgtttgattttgattctatccaagtggtgctagctgcttattttgcagagtcgttgatgtagttgtt

SEQ ID NO: 921180 - DNA, 805 bp, Homo sapiens
caagccttgttacttttctgtctcaatgatctgtctaatattaacagtggggtgttaaagactctcactattattatgtggaagtctaagtctctttatagttctctaagaatgtgttttatgaatctgggtgctccttgaattgatctctttaccattatgtaacgtacttctttgtcttttttgatctttgttggtttaaagtttgttttgtcagaaactgtgattgcaggctgggctcggtggctcacgcctgtaatcccagcactttgggaggccaaggtggacagatcacaaggtcaggagatcgagaccatcctagctaacacagtgaaacctcgtctactaaaaatacaaaaaattagccaggtgtggtggcgggwgcctgtagtcccagctacttgggaggctgaggcgggagaatgacatgaacccaggagatggagcttgcagtgagctgagatcgcaccactgcactcgaacctaggtgacagagcgagactccatctcaaaaaaaaaaaaaaaagaaactatgattgcaacccctgcttttttttctgcttttatttgctttgtaattttcctccattctttaatttgagcctacatttgtcttttcatgcgaagtgggtctcttgaatacagcacacaaatgggtcatgactctttatccagtttgcccttctatgtctttcaattgaggcattcagcctattacatttaaggctaatattgttatgtttgattttgattctatccaagtggtgctagctgcttattttgcagagtcgttgatgtagttgtt

SEQ ID NO: 921181 - DNA, 585 bp, Homo sapiens
gattggacagttcccagcccagagtcactgattggataacttttgttttgttttgttttgttttgagacggaatctcgctctgtcattcaggctagagtgcagtggcatgatggctcactgcaacctccgcttctcaggttcaagcaattcttctccctcagcctcctgagtagctgggactgcaggcatgagccatggcgtccagcctgtataacgtttaaaaccccaccctctcaggccctgagtgacagaagatatgattaaatgatgggctgcagcccyctcaggcagggcttcctccctgaggtgagcttgacccaccccagaggatatttgcattcaaccttgcgtataaggtcatacgcatttgtaaataatatatcatatggcggccaggcacggtggctcatgcctgtaatcccagcactttgggaggtcaaggtgggtggatcacgaggtcaggagttcaagaccagcctggccaacatggtgaaatcccacctctactaaaaatacaaaaattagcctggcatggtgggcagcacctgtggcgcaggtggcacatgtgggctgcaggagccaat

SEQ ID NO: 921182 - DNA, 507 bp, Homo sapiens
gcaggctgattttttcttagggactaatgcagctggtgacttgaagttaaaatcaatgctcatttaccattctgaaaatcctggagtccttaagaattatactaaattaactctgctatgctctagaaatggaacaacaaagcctagctgacagcatatcggcttacagcatgaatattttaagccaactgtttagacctgctcagaaaaaaaaawtttctttcaaaatattactgctcattgacaaggcacctggtcacccaagaattctgatggagatgcacagggaggtgagggttgcatccattctgcagaccatagatcgaggagtaatttcaactttgaagtcttattatataagaaatacattttgtaacactatagctgccacagatagtgattcctctaatggttttcagcaaagtaaattgaaaatctctgaaagcattcattactttagatgtcattaagaacatccctgattcatgggaagaagtcaaaatataa

SEQ ID NO: 921183 - DNA, 507 bp, Homo sapiens
gcaggctgattttttcttagggactaatgcagctggtgacttgaagttaaaatcaatgctcatttaccattctgaaaatcctggagtccttaagaattatactaaattaactctgctatgctctagaaatggaacaacaaagcctagctgacagcatatcggcttacagcatgaatattttaagccaactgtttagacctgctcagaaaaaaaaattttctttcaaaatattactgctcattgacaaggcacctggtcacccaagaattctgatggagatgcacagggaggtgagggttgcatccattctgcagaccatagatcraggagtaatttcaactttgaagtcttattatataagaaatacattttgtaacactatagctgccacagatagtgattcctctaatggttttcagcaaagtaaattgaaaatctctgaaagcattcattactttagatgtcattaagaacatccctgattcatgggaagaagtcaaaatataa

SEQ ID NO: 921184 - DNA, 612 bp, Homo sapiens
gaggagatgttgctgtcagagagaccagttgaagaaacgagatgctgaagccttgtattgagcaagacaataatgatggagaacaataaataaatcagaaaaatttcataaatggaaccagtaagaatagggagctaattggaaattgatggtaaaggaaagaaaaatattgatgttatttttgacttttctggtttgggtgattggacaggttatatttcctttgtaattacatgtgtaattaatagaaaaaattaattacacgtgtaattatttaatggctgtcttcttcactaagctgaaccccacaagagcagagtgtctttcttgtgtgtgtgtgtgtgtgtgtatatatatatacacacaaatatacatataatatatacatatatatacraatatacatataatatatgtacatatatatatatatatatatatatatatatatatatgtatgtatatattccctagcacctgacccagtgtctggctatattaatgttctcaactaatagttgttgatcaaccaactagtttcatttgtttactaaattttgtattaatgaccaggcactgttctagatgaactttaatacccttagctaagac

SEQ ID NO: 921185 - DNA, 460 bp, Homo sapiens
caggaaagaaaggaaaattcatttgaaagagacccaagcgggcacctgaagatccaagagagaaaagagagcaaaagaagactgcaaaaagagagcctttcaccttgatcccaggactttttgggctcacctcttcccatgattcttccctttagggtgggctttccacatgcccagtgcttgcaccctttggcattgagcacagcgcagtgtgtttaaggagttatatgcatgcccacgtgagcctttcttcccttttctggtggagttgcccccagaagatcatacttcaccacttttgtctcttgacacgtatgyccaggaagttgcttctccctggggtttgcattcaattgacattttgatgttaatgggtgtggaccattagtaagtggcctctccctcgtgctgccaaactgtcatttttagaaaggcaatgcaataaccaccgaaccatcac

SEQ ID NO: 921186 - DNA, 695 bp, Homo sapiens
tgaattttcacctaaaaatacaaattttattacacttgtatccaccagcttgagcttgacagcttgccagtacttaaagacttttctagtaaaagaagcattatattaacaatttatttttgactatataatgaaatatgtcaacatttttgtgatctttacaacttagtggacacctatttttcaaatggccagtgggtgccattacaaaggcaaaaagcctctggtatgtgcaagatagattgatggatttcagtgcttaattgatgtggtttcagattcagtccacactgcaatgaaggctaagaaactaccacatgtaagtttggtaccgtatcaaagaataatatctagaactatctggaaaggctrtaaagtagttttcccttttccaacaccttatctttatgagatcagatttccctcatatatttcaaccaaaacatatcacaacagatcgaatacacagaaaactcatgatcacaaagaaggaaacgtcagtcactgtggtctacttgagggtggagggtggaaggagggagaggagcagaaaaaattattgagcactgggcttaatacctggatgatgaaataatctgtacaacaaacccccatgacatgaattatctatgtaacaaaccttcacatgtacccctggacctacaataaaagttggaaaaaaataaagaatacat

SEQ ID NO: 921187 - DNA, 477 bp, Homo sapiens
ctcttgttatctccaccacaactgtggttacttcctctgctaaggtcttgaacccctcaaagtcatttatgagggttggaatcaacttcttccaaactcctattaatgctgctacttttacctcatctcaagaatcatgaatgttcttaatggcatctacaatagtgaatcctttccagaagttttccaatttactttgctgagatccatcaaaggaatcatgatctatggcagcaacaggcttataaaatatatttctcaaataataagacttgaaaatcaaaatgacacccaatccaygggatacagaatagatgttgtgttggcaggcatgaaaacagcattcatttccctgtacatctccgttagagctcttgggtgaccaggtatgttgtcaataagctgacgtatttgaaaggaatctttttttctgagcagtaggtctcaacagtgggattaaaatactcagcaacacat

SEQ ID NO: 921188 - DNA, 758 bp, Homo sapiens
caagtgttgttccacttatagagcatgggcaaagtagatttagtataattcttaagagatgccctaggatttatggaatcacaaatcagcactggcttttaacaagagagtcagcctgtcctttgaatgtttctttctttttttttttttttgtgagatacggtctcactctgttgcccagactggattgcagtggtgtgatcttgggcaactgcagacttgacctccttggctcaagtgatcctcccacctcagcctcctgagttgctkgtaccagaggcatgcaccacaatacatagctactttttgatttgtttttttgtttgtttgtttgttgttgttgtttgtagagacagggtttcaccatgttgcccaggctggtctcaaacttctaagctcaagcaattttcccacctcagcctcccagagtgctgggattacaggcatgagccaccgtggctggcccctttgaagctctgaagccaggcatggacttatcctctctatccaaagtcctggatggcattttcttccaatagaaggctgtttcatctacattgacaatccattgttcagtatagccaccttcatcaatgatcttagccagatcttctggataacttgctgcagcttctacaacagaacttgcagcttcatcttgcactattatatcatagagatggcttccttccttaaacatcgtgaaccaacctatgctaacttcagacttttcttctgtagcgtcctcatctctctcg

SEQ ID NO: 921189 - DNA, 758 bp, Homo sapiens
caagtgttgttccacttatagagcatgggcaaagtagatttagtataattcttaagagatgccctaggatttatggaatcacaaatcagcactggcttttaacaagagagtcagcctgtcctttgaatgtttctttctttttttttttttttgtgagatacggtctcactctgttgcccagactggattgcagtggtgtgatcttgggcaactgcagacttgacctccttggctcaagtgatcctcccacctcagcctcctgagttgcttgtaccagaggcatgcaccacaatacatagctactttttgrtttgtttttttgtttgtttgtttgttgttgttgtttgtagagacagggtttcaccatgttgcccaggctggtctcaaacttctaagctcaagcaattttcccacctcagcctcccagagtgctgggattacaggcatgagccaccgtggctggcccctttgaagctctgaagccaggcatggacttatcctctctatccaaagtcctggatggcattttcttccaatagaaggctgtttcatctacattgacaatccattgttcagtatagccaccttcatcaatgatcttagccagatcttctggataacttgctgcagcttctacaacagaacttgcagcttcatcttgcactattatatcatagagatggcttccttccttaaacatcgtgaaccaacctatgctaacttcagacttttcttctgtagcgtcctcatctctctcg

SEQ ID NO: 921190 - DNA, 613 bp, Homo sapiens
ggcactgctacagcagtgttaagagggaaattcatagcactaaatgcccacatcaaaaagttagaaagatctcaaattaacaacctaacttcaaaaccaaaagaattccagaagcaagaacaaatcaaccccaaagctagcagaagatgagaaataagaaaagtcaatgaagaaccgaaggaaatagagacacacaaaaaaaatgcaaaagatcaatgaatccagaagttgtttttttgaaaaaattaataaaacaggccactatctagatgaataaagaagaaagagagaagatcaaaataaacacaattataaatgatgaagggaatgttaccactagccccacagaataaaaataaycatcagaaagtacgaacaactctattcactcaaactagaagagatggctaaattcctggacaaatacaccctcccaagactaagccaggaagaaactgattccctgaacagaccaataacaatggctaaattcctggacatatacatgctcccaagactgagccaggaagaaactgattcccagagcagaccaataaaaagctccaaaattgaatcagtaataaataatctaccaataaagaaagctcaggac

SEQ ID NO: 921191 - DNA, 723 bp, Homo sapiens
agaggatgtcttaccctgaaatcagcatgttcttaggagggacataaaatggggttgtatgctgactcagactgagggtagctcaaagttcaggagcctgagggagggagataagcttaagaagagttcgattaagggatattttattttaggctaagtgtggtggctcatgcctgtaaacccagcactttgggaggctgagacaggcggatcacctgaggtcaggtgttcaagaccagcctggccaacatggtgaaatcctgtctctactaaaatacaaaaattattgggaggctgaggtgggcagatcacctgaggtcgggagttcgagaccagcctgaccaacatggagaaaccccatctctactacagaaaaaaaaaaagaaaaagaaaaatcaggtattgtggtgcatgcctgtaatcccasctactcatgaggctgaggcaggagaatggcttgatcctgggaaatggcttgaaagtttgtggtgagccgagatcacaccagtgcactctagcctgggcaacaagagtgaaattccatttcaaaaaaaaaaaaaaaaaattagccaggtgtgttggtgggtgcctataatcccagctacttgggagggtgaggcaggagaattgcttgaacctggaaggcagaggttgcagtgagctgagattgctccactgcactccagcctgggtgacaaagtgaagaaatattttgagcgctga

SEQ ID NO: 921192 - DNA, 723 bp, Homo sapiens
agaggatgtcttaccctgaaatcagcatgttcttaggagggacataaaatggggttgtatgctgactcagactgagggtagctcaaagttcaggagcctgagggagggagataagcttaagaagagttcgattaagggatattttattttaggctaagtgtggtggctcatgcctgtaaacccagcactttgggaggctgagacaggcggatcacctgaggtcaggtgttcaagaccagcctggccaacatggtgaaatcctgtctctactaaaatacaaaaattattgggaggctgaggtgggcagatcacctgaggtcgggagttcgagaccagcctgaccaacatggagaaaccccatctctactacagaaaaaaaaaaagaaaaagaaaaatcaggtattgtggtgcatgcctgtaatcccagctactcatgaggctgaggcaggagaatggcttgawcctgggaaatggcttgaaagtttgtggtgagccgagatcacaccagtgcactctagcctgggcaacaagagtgaaattccatttcaaaaaaaaaaaaaaaaaattagccaggtgtgttggtgggtgcctataatcccagctacttgggagggtgaggcaggagaattgcttgaacctggaaggcagaggttgcagtgagctgagattgctccactgcactccagcctgggtgacaaagtgaagaaatattttgagcgctga

SEQ ID NO: 921193 - DNA, 608 bp, Homo sapiens
aaaccaccacatttaatctggcagttgtccttttttcttaattttttctaaatatttttctttggaaaatgaagactcttatctttgtttacaggccagaaaaactgggaaaaacaggctcttccacttactggatgtttgacaaaatatccttcttgggccaaaaacattgacattattggtgagcttgttagaaattcaaaaaatcaaactttattccagatcttctggaaaaaaaccctgcataacaaggtcttcaacttattgtatatatttaaattttagaggtgccttctaaactcaacatgtctttgtcatctgaaaaatattcacagctcattccatatgatgtaaacatagcactcaaaaatgtacatgttcgtgttcatacccttaattttacactttactatctagaaaaatacatgaactgatgttgtggatcttaygctgttcttttttctcagagaatactttagagaatatttctgtgttgaaagttattttattggataattttagtcagtcctataagtcagaaccatttgtctttactctctcatttgaacttaagtcaaattaaaaattccacccttggccacttggta

SEQ ID NO: 921194 - DNA, 561 bp, Homo sapiens
tactccgtctgcgggaaaaaaaaaaaaaaaatgcaacactggacctgggaggcatatttgaaaattcatctttattataccagtattcacaaaagccaaaagtctgaagcaacctagatgttccttgatttataaacgtatcaaaaaatgtaacatatacatgcgatggaatattattccaccttaaaaagaacaatcttgtcacattttaagatgaacattgagaatattatgtcagttgaattaatccagtaacaaaaytatggataccgtatgattccacttatatgagatatcttaagtagtcaaaatcataaaaacaaaaagtggaagttttgtctgccaaaagctggagagagggtaaaatgagatgttgttacttaatggttactgagttttagttttgcaatatgtaaagtttctagaaatcttttgcacaacaatgtgaatatacttaacatgcctgaagtgaacagcattttttttttttttttgagacagggtctcactctgtcacccaagctggagtgtagaggcacaattttgactcctcctcaatct

SEQ ID NO: 921195 - DNA, 609 bp, Homo sapiens
cccttaacattttttccatcatttcaactttggtgaatctgacaattatgtgtcttggaattgctcttctcaaggagtatctttgtggcgttctctgtatttcctgaatttgaatgttggcctgccttgctagattggggaagttctcctgtataatatcctgcagagtgttttccaacttggttccattctccccgtcactttcaggtacaccaattagacatagatttggtctttccacatagtcccatatttcttaggggctttgttcatttccttttattcttttttctctaaacttctcttcatgcttcatttcattcatttcgtcttccatcactgacaccctttcttccagttgatcgcatcggttactgaggcttgtgcattcatcacgtagttctcrtgccatggttttcagatccatcaggtcctttaaggacttctcttcatgcttcatttcattcatttcgtcttccatcactgacaccctttcttccagttgatcgcatcggttactgaggcttgtgcattcatcacgtagttctcatgccatggttttcagatccatcaggtcctttaaggacttctctgcattggttattctag

SEQ ID NO: 921196 - DNA, 637 bp, Homo sapiens
tcagctcactgcaacctccacctcccgggttcaagcaattctcccacctcagcctcttcagtagctgggattacaggcatgcgccactatatccagctaatttttgtgtttttagtagagacggggtttcacaatgttggccgggctggtctcgaactcctgacctcaggtgatccgcctgcctcagcctcccaaagtgctgggattacaggcatgagccaccgcgcctsgcctatttatttatttattttcggagacgggatctcactgtgttgcccaggctggagtgcagtggcttattcacagggacaatcccactactgatcagcaagggatcctttcctttctactctttggtaaactcttattcaactatcaaagccccagcctcagtgcccctctcctgatcccaggcatgaagaatcacatgggggacactcacagctcatagtcgggcactgggtggggcctaggcttatgccccttagggatggctccaataggcttcttggcgcccaggagggcctgggagagcaactcatcctcaaacacaatcttcttggtctttgccttgtggggtcccggctggggctggcacggagggcggggggcgctggttttgaggcctcggggcgcc

SEQ ID NO: 921197 - DNA, 614 bp, Homo sapiens
catggtgtatacgtctcacattttatttatccagtccaccattgatgggcacctaggttgattccatgtgtttgctattgtgaatagaatggcaatgaacatacgggtgcatgtgtccttttgatagaacgatttactttcttttggatatatacccagtaatgagactgctgggtcaaatggtaggaacttttatttttacccctccccaacaggggattgctgcttttcacaagggtttatttttgccccctctacttttggacttctatgtgccagtgcagcgtcaattgatccactcatttgacaggcattttctgagcacctgctktttgtggtattgtgccaagcactgggctattacagcacataagataggtgcactttgggcctttttggttcttatatactaatgagggagacaaacccaaaataagcaagatatgttaattaacatgattataaatggctattaaacctctgaagaggataaaaatcaagtgctaaaatagaaaatagcagggtgggtggaggcaattaaaacaaagtggtcagtgaaaagtatggtaaggagtttggaattcattctaagtatggcactatgtgctattcat

SEQ ID NO: 921198 - DNA, 568 bp, Homo sapiens; identical to SEQ ID NO: 917630

SEQ ID NO: 921199 - DNA, 609 bp, Homo sapiens
tgaatttaattccctctgcttacatctcatcagccagcagatagtaacataactgtatctagctgtgagagagggaggctgataagtatatccttttagctgaaaacattaccatcctgacaaaaagcagagctttatcattaaagcaaaggggaagtacagtgtgatggttaattttaggtgtcaatttgactggattaagaaacatctggagaactggtaaagcattatttctgagtgtgtctttgagggtgtgtccagaggagactgaytgacatatgagtccatgaactaagtgaagaagattttctctcaatgtcggcaggcactacccaatcagatggtggcccagacagaacaaaaaagactgaggaaaggtgatttcctcctctccatttcctagaggtgggacatgtgtcttctcctgcccttgaacatcagaactccagactctccaccctttggaatccaggacttaccctaatggcccccaaggttctcaggccttctgcctcagactgataattacaccattagtttccctgcatctgaggctttcagacttgtattgtgctgaaccatgctactgtcattccagggtttctagct

SEQ ID NO: 921200 - DNA, 492 bp, Homo sapiens
aacaagccaagtgcagtggctcactcctgtaatcccagcagtttgggaggccgaggcaggcggatcacttgaggtcaggagttcaaaaccagcctggccaaaatggcgaaaccctgtctctatttaaaatacaaaacattagtcaggcatggtggcttgagcctgtaatccagctactcgggaggctaaggcacgagaatcgtttgaacctgggaggtggaggctgcmgtgagccaagatcgcgccactgcactccagcctgggcatagactttgtctaaaaaaaaaaaaaaaaaaagatactcaacagagtttaattgggcctatcggtggatatgggattatgggtgatgttagcatttttctttattttacttacctatgttttctaaacctcctgcaattaacatgtattactttggtaatatggaaaaataacaaaggttgttagactgaagggtttgtgtataacctaaaaccatactggaggagt

SEQ ID NO: 921201 - DNA, 846 bp, Homo sapiens
gaggaaagtgagaataggacggagaagttgcaagagaggtttgtaaccaacatggaaggagttgtggaggctttggataaagattgtttgagagtgaggaagaatgaagcacctttccttgacataccatggtccttgcttttgaaggttgggggctcagaagtcctccttttcttctgaggagtaaagaggagagaacagcgacagggacagaaactggtcttgcacgggttgtagagctacttctttggctacctgatctgccagcgcatttccagctattataggattgtctggggtttggtggcctctgcaatgaatgatggcaactttctgcaggagcatggcagcttgaaggagtttgctggtgagagagccatttatgacaggagtgtttttttgcagttaggaaaccccattctttctagatggacaagtgtgagtgcactatgtggaacgcataacgaggatttgcatatatatwtttttttttttttttttgagatggagtcttgctctgtcgcccaggctggggtgcaatggtgcgatctcggctcactgcaacctccgcctcctgggttcaagcgattctactgcctcagcatgccaagtagctgggactacaggcgcgtgctaccacgcccagctaatttttgtatttttagtggagacagggtttcaccatgttagccagggtggtcttcatctcctgaccttgtgatctgcccgcctcagcctcccaaagtgctgggattacaggtgtgagccacagcgcccggccaagatttgcatatatgttgatctgttgtctggctgctacagtgagagctcgagtgagggcgatga

SEQ ID NO: 921202 - DNA, 558 bp, Homo sapiens
gtagcccagggcaagttttcaagcctgtcatgctgtctgcctggaaacggattgggggctgttgcagggggcacagtgggagtgaaaccagcccttcggtttgcatgggagctgggtgaggcctgtgactgccggctttcccccacttccctgacaacctgcagagacagccataatcctcctagagataggcagcaacacaataatagtgggagatttcaatactccactgacagcactagaccagccatcaagacagaaagtcaacaaagaaacartggatttaaaatataccttggaacaaatggacataacagatatatacagaacacttcatccaacaactgcagaatatacattctattcaacagtgcatggaactttctccaagatagaccatatgataggccataaaacctcaatcaatttaagaaaactgaaattatatcaagcactctctgagaccacagtggaataaaactggaaatcaactccaaaaggaaccttcagaaccatgcaaatatatggaaattaaataacttgctcctgaatgagcag

SEQ ID NO: 921203 - DNA, 558 bp, Homo sapiens
gtagcccagggcaagttttcaagcctgtcatgctgtctgcctggaaacggattgggggctgttgcagggggcacagtgggagtgaaaccagcccttcggtttgcatgggagctgggtgaggcctgtgactgccggctttcccccacttccctgacaacctgcagagacagccataatcctcctagagataggcagcaacacaataatagtgggagatttcaatactccactgacagcactagaccagccatcaagacagaaagtcaacaaagaaacagtggatttaaaatataccttggaacaaatggacataacagatatatacagaacacttcatccaacaactgcagaatayacattctattcaacagtgcatggaactttctccaagatagaccatatgataggccataaaacctcaatcaatttaagaaaactgaaattatatcaagcactctctgagaccacagtggaataaaactggaaatcaactccaaaaggaaccttcagaaccatgcaaatatatggaaattaaataacttgctcctgaatgagcag

SEQ ID NO: 921204 - DNA, 587 bp, Homo sapiens
tcaatattgtgaaaatgtccatactgccaaaagcaatctacaaatttaacacaatccccaccaaaataccaccatcgttcttcacatagttagaaaaaacaattctaaaattcacatggaaccaaaaaagagcccgcatagccaaagcaagactaagcaaaaagaacaaatgaggcatcacactacctgatttcaaactatactataaggccatagtcaaccaaaacagcatggtactggtataaaaataggcacatagaccaacggaacagaatagagaatccagaaataaaccaaaacacttacagccaactgatctttgacaaagcaaasaaaaacataaagtagggaaaggacacccttttcaacaaatggtgctaggataattggcaagccacatgtaggataatgaaactggattgtcatctctcaccttatacacaaatcaactcaagatggattaaggacttaaactaagacctgaaactataaaaattctagaagataacattggaaaaacccttctagacattggcttaggcaaggatttcatgaccaagaacccaaaagcaaatgcaataaaaaca

SEQ ID NO: 921205 - DNA, 741 bp, Homo sapiens
aatactgcaaaccattcaatttaattcatttaaaaaatatttaggtagacagaatttgagaatttgaactatataaaggacacaaagatataatcattccagaattttaaagttttcctttgttttatattttcttactgcttatcaaaaatttggagttcaaatttttatagactcaaccattttctgcacaaaattgacattattaggataaagcaaagctggattgcctagcttattgatgatatggatgacataatatgacaattttaaaagtttgattctagtaatgtgataaaaggtaaaagtatgaktgtccctgttctgaatgaagtgcattctgctacgtcgacacatttactggatgtactaccttcaacacttccaaaagcaatcttttcctcaaaggagcttttaccatattcccatttttgccaaaagcacattcctggtccttcagacttaaaatcttagagtcataattgcttcctgcagtacatattctccaaaatctaataaccaaatcttggttcttatccttttgctttcttttctactaacccattccatctactaatgcttttctgtatttactttattctatttgccagaaaagaatatttctctatttctcacagttaaatgtgggagattggtcagagtggtgggagaaactataggtaaagaaacaggccttctgaaaggtcagaaggctctggctctgcatacctttgggggaga

SEQ ID NO: 921206 - DNA, 741 bp, Homo sapiens
aatactgcaaaccattcaatttaattcatttaaaaaatatttaggtagacagaatttgagaatttgaactatataaaggacacaaagatataatcattccagaattttaaagttttcctttgttttatattttcttactgcttatcaaaaatttggagttcaaatttttatagactcaaccattttctgcacaaaattgacattattaggataaagcaaagctggattgcctagcttattgatgatatggatgacataatatgacaattttaaaagtttgattctagtaatgtgataaaaggtaaaagtatgattgtccctgttctgaatgaagtgcattctgctacgtcgacacatttactggatgkactaccttcaacacttccaaaagcaatcttttcctcaaaggagcttttaccatattcccatttttgccaaaagcacattcctggtccttcagacttaaaatcttagagtcataattgcttcctgcagtacatattctccaaaatctaataaccaaatcttggttcttatccttttgctttcttttctactaacccattccatctactaatgcttttctgtatttactttattctatttgccagaaaagaatatttctctatttctcacagttaaatgtgggagattggtcagagtggtgggagaaactataggtaaagaaacaggccttctgaaaggtcagaaggctctggctctgcatacctttgggggaga

SEQ ID NO: 921207 - DNA, 580 bp, Homo sapiens
gtggggcttccggttttttgggcacagccacagatactttcttttcaagtacaacttctttaggagcttcaggaactttgaagatattagtatcttttagttagaagctataaagggggaatatcgactccacatttacccaagcaaatacaacttgtgagatcggcggacacttctatrcagtctttccccagggccccccgactgacaatgtgtaatgatacctacctttaggaggtggagcttctggctttttggcaggaggcaccggtactttcttttctgggaccacttccttcggtggcagcacttcaggcacttcaaagatatttgtaatttgtgtttagaaaaggtgaaaatgatggatgccttttgcatataaacacccaccaagatattttggatagtgattgacatttgttttctttagaattatatcatctttatgtagtaggatttttaacatgtaatttcctagttaaaataacagttatttttctcctatagtttgtatagctttggcattaccttcagggggaggactttccggtttgggaggaatagcttcaggcaccttctt

SEQ ID NO: 921208 - DNA, 662 bp, Homo sapiens
atagatggtactgatgacaaaatttttctgaagaaaaactggctgcgggaacactgttttaaaaagggcatatgcttaccttcgacaggatttggtttcttaaatttgtggtcagtcttatgggaatcttttacaaaaaaaaaaaaaaaacacctacaacttccttctaaccaatgacttctccattctcaaacacatctctattttctgaaataaatacatttctgaaatgtatatcttgcagagatgaagaaacagggtcattttttgaaaaagaaatagtgtgacctaaaaatcccagtcacattatgtcatatcctagggaaaaaaawaatctcaaagctttgttcttgatgaaatatccatgagtgatcacataacacatttatgtcagaaaaacattaagaataacaggtttgatcatactgtttttgtgcaaatgtgactgatttccttttttcaagcctgaagaagccagagctgctcaaataaattttgaaatgattataagaagatatttgggtacagtacctttatgctccaaatatttcatgcttttgaaatattctttccaacgttaaacatttagatattgacaaataagaacttcagcaacacagcattaatcattagcattttgcacacatttctcattggacact

SEQ ID NO: 921209 - DNA, 615 bp, Homo sapiens
ccatcaatacctagtttatggagagtttttaacactaagtgatgttgaattttatcaaaggccttttctgcatctattgagataatcatgtggtttttgtctttgcttctgtttatgtgatggattatgtttattgatttgcatatgttgaaccagccttgcatcccagggatgaagcyaacttggtcttggtggataagctttttgatgtgctgctggattcagtttgccagtattttactgaggatttttgcatcgatgttcatcagagatattggcctgaagttttcttttttttgttgtgtctcttaccagttttagtatcaggatgatgctagcttcataaaatcagttagggaagagtctttccttttcaattgtttggaattgtttcagaaggagtggtaccagctcctctttgtatttctggtagaattcagctgtgaatctatctggtcttaggctttttttggttggtaggctattaattactgcctcaatttcacagcttgttattggtctattcagagattcaacttcttcctggttttgtcttggtagggtgtatgagtccaggaatttatccgtttcttctagattttctagtttatttgc

SEQ ID NO: 921210 - DNA, 615 bp, Homo sapiens
ccatcaatacctagtttatggagagtttttaacactaagtgatgttgaattttatcaaaggccttttctgcatctattgagataatcatgtggtttttgtctttgcttctgtttatgtgatggattatgtttattgatttgcatatgttgaaccagccttgcatcccagggatgaagccracttggtcttggtggataagctttttgatgtgctgctggattcagtttgccagtattttactgaggatttttgcatcgatgttcatcagagatattggcctgaagttttcttttttttgttgtgtctcttaccagttttagtatcaggatgatgctagcttcataaaatcagttagggaagagtctttccttttcaattgtttggaattgtttcagaaggagtggtaccagctcctctttgtatttctggtagaattcagctgtgaatctatctggtcttaggctttttttggttggtaggctattaattactgcctcaatttcacagcttgttattggtctattcagagattcaacttcttcctggttttgtcttggtagggtgtatgagtccaggaatttatccgtttcttctagattttctagtttatttgc

SEQ ID NO: 921211 - DNA, 615 bp, Homo sapiens
ccatcaatacctagtttatggagagtttttaacactaagtgatgttgaattttatcaaaggccttttctgcatctattgagataatcatgtggtttttgtctttgcttctgtttatgtgatggattatgtttattgatttgcatatgttgaaccagccttgcatcccagggatgaagccaacttggtcttggtggataagytttttgatgtgctgctggattcagtttgccagtattttactgaggatttttgcatcgatgttcatcagagatattggcctgaagttttcttttttttgttgtgtctcttaccagttttagtatcaggatgatgctagcttcataaaatcagttagggaagagtctttccttttcaattgtttggaattgtttcagaaggagtggtaccagctcctctttgtatttctggtagaattcagctgtgaatctatctggtcttaggctttttttggttggtaggctattaattactgcctcaatttcacagcttgttattggtctattcagagattcaacttcttcctggttttgtcttggtagggtgtatgagtccaggaatttatccgtttcttctagattttctagtttatttgc

SEQ ID NO: 921212 - DNA, 604 bp, Homo sapiens
aaaatgctgtgaacagaggctcacaggaacctaacctcgtacttcccctaagagcaatcattcactattcaataattcactcctctcagcaactttatagaccatagctaccatgactaatgagaatcaactgtatgtacaattcatttatgcttttcacaaatccaatcatgtgtgacatatcaatgttttagtcaacaatggactgcatatacaattgtagtcctataagataatgatagagctgaaaaattcctattgcctagcgatattgtagccataatcatattgtagtgcaatgcattactcatgtgtttgtggtgatgctggtgtaaacaagcctaccaygctgccagtcagatgaaagcatagcacacacatttatgtacagtacataatacttcataataaacaactatgttactggtttatgtatttactaaactacactttttatcatcattttagggtgtactccttctacttgttaccacaggagatgacagctccatgcctggcctatggtatttttttttactttgtaaactttttaatgttctaaaacattttgactcttttgtaataatagtttaaaacacaaaca

SEQ ID NO: 921213 - DNA, 606 bp, Homo sapiens
tgatggactgtgccatgaaggacggtgcattctaacccagatactaggcttttcccatggtcttcacaacccacagaccaggagattcccctgggtgcctacaccaccagggcccggggtttcaagcacaaaactgggtggccatttgggcagacactgagctagctgcaggagtttcttttcatacaccagtggtgcctggaatgccagcaagacagaaccattcactaccctggaagaggggctgaagccaggtaaccaagtggtctagctcaacggatcccaccactacagagcccagcactggtttgaaattctgactgccagcacagcagtctgaagtcgasctggaatgctcaggcttggtggggggaggggcatctgccattactgaggcttgagtaggcagttctcacctcacagtgtaaacaaagccatcaggaagttcaaactgggtggaacacactgcagctcagcaaagccactatagccagactgtctctctaagattcctcctctctgggcagggcatctctgaaagaaaggcagcagccctagtcaggggcttatagataaaacttccgtctccctgggacagagcatctg

SEQ ID NO: 921214 - DNA, 642 bp, Homo sapiens
taaaacataccactaattcaaatatgctccaaatcagggatctatgacctttttcctggaaataaacactaaagttaatgagatatagaagtaatacctcttctctccttttaattttgtttctaccaagtacacaaactatgagcaagtctatattccttctacattttaaactcggtttcacagttttaaaactgggatttagttattttccttctagtaaatttaaagtttcagtgacttcctttcatttccttctgatcatctcccttctttcaagacttcttcctattggccagatgtagtggctcatgtctgtaatctcagcactttgggaggcagaggtgggtggattgcttgagcctaagagttcaagactagcctggacaacatgatgaaaccttgtctttacgaaaaatacaaaamttagctagacgtggtggcatgctcctgtagtcccagccacttgggaggttgaggcgggagatcagttgagcccaggaggcgagaagcagtgagcaccactgcactccagcctgggcaacagagtgagactctgtctcaaacaaacaaaaaaaccccgcttcttcctgtctcctttaagtgacagttaattttatttttattaatctagaacttgct

SEQ ID NO: 921215 - DNA, 772 bp, Homo sapiens
aacctctttcttttataaattacccagtcacaggtattatttattagcagcatgagaacagactgatacagttggtatttggtagtgaggtgccgctgtaaagatatcagaaaatgtggaggtgactttggacctgggtaataacaggcagaggttggagcagtttggagggctcagaagaagataagaaaatacgggaaagtttgaaacttcccagagacttggagggctcagaagaaaacaggaaaatatgagaaagtttggaacctcctagagatttgctgaatggcttttagcaaaatgctgatagagatatggacaataaagtataggctgaggtggtctcagatggtgatgaggaacttcttgggaactgaaggaaaggttgttatgcagagactggcagcattttgcccctgccctagagatatgtggagcattgaacttcagagagatgatttaggttatctggcagaagaaatttctargtggcaaagtgttcaagatgaagcagagcataaaagtttgaaaaatttgcagcctaacaatgcaatagaaaagaaaaatccattttatggggagaaattcaaacccacagcagaaatttgcatgagtaatgagaagccaaacactaatcaccacagcaatggggaaaatatctccagggcatgtcagagaccttcacagttacccttcccatcacaggtcctgagcctaggagaaaaaaaaaaaatggttttcttggcacggcccagagcccccttactttgtg

SEQ ID NO: 921216 - DNA, 627 bp, Homo sapiens
atgaggatttgaaacacctaagctgcagaaacccactggatggtttcctaggttccgagttggcattatctttcagaacgatcttctagaagagatcacataacactgttacaaaggatctggagaaagggaccctggcttcatcactctggctctccagtcatgctttacattttcacttcttacactctctttcataggaagtcaatttacaggcttccaccaagcccttaagtgacstttttgtactatccatgacaagttcttgatgttatgtctgcacttctgacaaattcttagcagttaacttactaggcagttaaggtttttgttcaagcacaatatagctagaatagggtcatacattcaataaaacaaatatttaccaagcatttattgagtggaagataaaaagcacaaagcataattataaaacattctcccctgccaccataaaaatttttttaaagccttacagaatatagcataacataaccaaagcaaaaataggactaaagaggggaggaaggggaaatatcagcatgaattaaatatgacccagaagagccttgatggtcagacacgtaaagacaaattgggtagggttagggggtggctgtcaggggc

SEQ ID NO: 921217 - DNA, 683 bp, Homo sapiens
tgttacatgaaagcagccccagtgaacttgtgaatttgctcagtcatttcactggctactgggtgaggaagaagtaggattttctctcttaaaattccttggtgaaatcattggatgggcacggtgtgtttctttaattttccttttggtcaaaaatctgacaaagcaaagactttcagttgttcttggtctttcaataggtttagtttttaagtgtrtctactctgaccaaaaattgccttcctgtaatatgctccttcctttagaacacagttcttaagtagagtttgtttgtttaaatgtataaaaataagttaatgcattctatgcagcgaggttttgcatcagaaccctgagttctcaatgtggcaggtttaagtgtctagaacaccttttacctgttttttctattacttgcttttttatttttggggtaaatgatatctttctcagggaggccttccctcagcaccatgtttaagagggcatctccctcatttgctattccttcttctgttttattttgctatatggaatttgctactatgtgaaaactattttaatgttttatttacctgtgttacccctagaataatatctatgaaggtagggatttttatctgttccttctgtgcctacagagtgttgaggagtatggtgtctggcacgttgtaggtgcacag

SEQ ID NO: 921218 - DNA, 608 bp, Homo sapiens
agtaggattttctctcttaaaattccttggtgaaatcattggatgggcacggtgtgtttctttaattttccttttggtcaaaaatctgacaaagcaaagactttcagttgttcttggtctttcaataggtttagtttttaagtgtgtctactctgaccaaaaattgccttcctgtaatatgctccttcctttagaacacagttcttaagtagagtttgtttgtttaaatgtataaaaataagttaatgcattctatgcagcgaggttttgcatcagaaccctgagttctcaatgtggcaggtttaagtgtctagaacaccttttacctgttttttctattacttgcttttttatwtttggggtaaatgatatctttctcagggaggccttccctcagcaccatgtttaagagggcatctccctcatttgctattccttcttctgttttattttgctatatggaatttgctactatgtgaaaactattttaatgttttatttacctgtgttacccctagaataatatctatgaaggtagggatttttatctgttccttctgtgcctacagagtgttgaggagtatggtgtctggcacgttgtaggtgca

SEQ ID NO: 921219 - DNA, 658 bp, Homo sapiens
aaaacaaacgtgctgatgaggatttgaaacacctaagctgcagaaacccactggatggtttcctaggttccgagttggcattatctttcagaacgatcttctagaagagatcacataacactgttacaaaggatctggagaaagggaccctggcttcatcactctggctctccagtcatgctttacattttcacttcttacactctctttcataggaagtcaatttacaggcttccaycaagcccttaagagacgtttttgtactatccatgacaagttcttgatgttatgtctgcacttctgacaaattcttagcagttaacttactaggcagttaaggtttttgttcaagcacaatatagctagaatagggtcatacattcaataaaacaaatatttaccaagcatttattgagtggaagataaaaagcacaaagcataattataaaacattctcccctgccaccataaaaatttttttaaagccttacagaatatagcataacatgaccaaagcaaaaatagtgaggactaaagaggggaggaaggggaaatatcagcatgaattaaatatgacccagaagagccttgatggtcagacacgtaaagacaaattgggtagggttagggggtggctgtcaggggcacattctacagg

SEQ ID NO: 921220 - DNA, 620 bp, Homo sapiens
aaacacctaagctgcagaaacccactggatggtttcctaggttccgagttggcattatctttcagaacgatcttctagaagagatcacataacactgttacaaaggatctggagaaagggaccctggcttcatcactctggctctccagtcatgctttacattttcacttcttacactctctttcataggaagtcaatttacaggcttccaccaagcccttaagagacstttttgtactatccatgacaagttcttgatgttatgtctgcacttctgacaaattcttagcagttaacttactaggcagttaaggtttttgttcaagcacaatatagctagaatagggtcatacattcaataaaacaaatatttaccaagcatttattgagtggaagataaaaagcacaaagcataattataaaacattctcccctgccaccataaaaatttttttaaagccttacagaatatagcataacatgaccaaagcaaaaatagtgaggactaaagaggggaggaaggggaaatatcagcatgaattaaatatgacccagaagagccttgatggtcagacacgtaaagacaaattgggtagggttagggggtggctgtcaggggc

SEQ ID NO: 921221 - DNA, 702 bp, Homo sapiens
tggggttgtcatgggggagaaccctccctgtcctctcccggtgcagcctccatgctatcagtgaggctcagcccactaagatcttcagagagagggaggggggtgggaatctgggcacagtgcgagcctcccctgctcctgcctgcccacccgcctgagggctctactcaccaccctgcttgtccgcacatccaagctccttgtgggactggggctccagctactggtctggctgctgctgcagactcggagcctcttggctcttcagctccacctgccggaagaccctgggcatgaggacatgtggtggctggcttccagattcctggcccattaatagggtagcgaggacactgtggggctctgtggcctgcccaggcccctggcccsttgctccaggcctaagagactgtctcccttgcctagaaccccatgcctccttccctagcatcaaatctcacgtcctttttcccagcatttaaactgtaggccacagactggtggaaaagcaggcggagccaaccaccatctgctaagtgtgctacatgcctaatgtttccacgtattatctcatttaatcctcagcacctctgcaaggaaaaggctaacttccttttgaagttaaagaaacagagacttagagatgcaaagtagttgaattatgaccagtggaaccgaggccggaatccagtttgaatctaa

SEQ ID NO: 921222 - DNA, 679 bp, Homo sapiens
catctgctaagtgtgctacatgcctaatgtttccacgtattatctcatttaatcctcagcacctctgcaaggaaaaggctaacttccttttgaagttaaagaaacagagacttagagatgcaaagtagttgaattatgaccagtggaaccgaggccggaatccagtttgaatctaaggagtcttttttgtttgtctgttttgttttgttttgagagagtgtcactctgtgtcccaggctgcagtgcagtggtgcaatctcagctcactgcaaccttcatctcccgggctcaagtgattctygtgtctcagcctcctgagtagctgggattacaggcatgcaccaccaggcccggctaattattattttttttttaattttagtagagatgagctttcaccatgttggccatgttggtctcaaactcctgacctcaagtgattgtcctgcctcagcctcccaaagtgctgggattgcaggcgtgagccaccacacccgacataaggagcctcttataccactgtctcttcctctgtgattggggggctccatgcctctagctgggatgatgatgtccagacctgggaggaccccagggctacccacctctaaaagtcagagggcaggaagcaagaaacagtcataggactgccccggagggtgctggggtcacctgtccc

SEQ ID NO: 921223 - DNA, 647 bp, Homo sapiens
caagccaaagcatcattattattttaaaaaggcaccaatccctctgcaaaagcactgaattatatcatgatacaatcatcaattgtaccatgaatcaccatcagcggtggtcttttagggatatgaagaaggggttttcacaatacatcgcatgacacaccatcttccaaatctctaaacatttctctccacagcccagtcctctccatagttgtccaaatccctccctcttttctcttgttgtctccaaaactcaaaaccatgctctgactttctatatcctgccctccccttcttggaccatctgggaagccccctgcttccccagggtgtcccctcctccccttctgggatcagtcatctttcctcaaatggaccagttcggcctctcttagtttctccaactctgcatctcaacctttctcccttcactacacaataatgtccaggaggcaaagagcccacaamcctgggaacctccctttccagaagggaggttctggaatgactacaaatatttggttatgattttcttccctgccacgcctgttttcatgggcagtgctgagccccggtcctggcagagctcagaaccaggctctcatgagctggggcaagtggggcctagggaacctctgggttgagga

SEQ ID NO: 921224 - DNA, 578 bp, Homo sapiens
cctcacttgctgggagcctttgtcaagaatgcccaggaatgaggagggcacaggacgcagaccatcagcaaccctcttgcactctatagtcccatgttactcagagcttccccatgctccagcaagatgaaggactagattgaatgggcaccaagctgacagtgccacccaggaaagccgggaagaggctacatgggctacctggcccactcagggaggagggcaggactgggtattgtcttgacagcaaccctgtcccacaacactgaactgggtagggaaggggtcaggtgtcctcatttttcagataagaaaactgaagctcccagagggcaggtaaatgtattcagagcacakggcaagtaagaggcaaaacttctgccagcaagtccaggatttttttcaccagaggacattgcttggtccccagacctcaggaccctgtgttttgcctcactcccacccacagagctcctgtatccaggtatcaactccaactcccactcctggaggccgaggcaggaggatcacttgagcccaggagttcgagaccagcctgggccacatagtgagacctt

SEQ ID NO: 921225 - DNA, 843 bp, Homo sapiens
tgtcactaggatgtcacgtaccaagtcccaatcaccccaaacagtgatgggaacatagtttcctgtcgggaccagttccccagaattttgcaccaacatgatcccatagttccacatctaacattgccttttcaggaaacaaggacagtgttcttccactgccctgaatagagtgaccatatttttcatgggaacctgaactccacctgattttaacagaagtttaatataccagagataagcataatgtttagattctgcatgacccatagttaccccagacaatacacagacaactcaccaattttcagggagcaaacaagcatttctgtggaccagactgatgaacgtttcaccacacctaccaaagggaatcaggttcccacatgcacttaggaaaaagaaaaccacattggtgtgccaaatatcagggaatcccacctccaatatttcaatgtaggttctttctattttccataatcagactgtgatgtccacctgagccacaaatccatcaagcttttattaaggatctcaaaaggggaaggagtgtacaaacagggagtaggtcacatgyttcagggggcaaaaaccacagcaaagatcacatgcttctgaggaaacaggacaaagggaaaaaggcagaaactcctgataagggtctatgttcagcagtgcatgtattgtcttgatagacatcttaacagaaagtagagtttgacagcagagaactggtgtgaccaaaaatttaccaggatggagtttcccaatcctagtaagcctgagggtactgcaggagaccaaggtgtatctcagtccttatctcaaccacataggacacac

SEQ ID NO: 921226 - DNA, 564 bp, Homo sapiens
cagacataatcaggaagcagataatttggttaaaatgtctcagcctaataagcgaactgggcaggtgggataactaaaaaggagtgtataaaagaatattgtccaagttggcaagagagttggggagttttaagaggtttagaagcctggccgtcaatacccacaacagttatggaggcaagggaaacaggcccttgaaaacagataatgtggagtgggtagcctctgtattgattaagaaggggacggacktaccctccactgtgagagttacccaaagcttggcgtccgtgatggtctacggggcttccgaggtgatcgggcggtgtcagtcttcagccgctaagctgagaagatctaggaaggagtcagtcagagagccctgggccagagttccaggggctctgggagtggctgccaggtgagttgaacagtccaattttcagtggggtcccgcacagatgggacatggcttaggaggaatcccgggctgtgggcattccttggcccagtggccagatttccagcacttgtagcaagctccgggggaggaggttctggagg

SEQ ID NO: 921227 - DNA, 608 bp, Homo sapiens
ttggggaaacagtgtaaaccggcagtgtaaacaagagcagggcatttatgagtagttgagaatggtgaataggagtatgactagacagaagatagtagggatgaccagttttttgggtggcagtccaagttggtctggtgtctggaatgagactggggcctaawaaaaaggagtgtctatacaggggcttaaatgggctgtaccctttagcattccaagaacaggcctgaattctgagaaggccaagtggtaaaagtattgtccagtcctttttaggttggtggctgagcttggtaaggtgtgtttttaaaagaccattagtccgttctacctttcctgaagattgaggaccgtaaggggtatgaaggtttcactgaataccaagagcctgagaaactgcttgggtgatttgactagtaaaggccggtccgttatcggactgtatagaggtgggaaggccaaaccaaggaattatgtctcacagaagggaagaaatggctgcagtggccttctcagactctgtgggaaaggcctctgcccatccagtgaaagtgtctacccagaccaagaggtattttagtttcctgactcgaggcatatgagtaaag

SEQ ID NO: 921228 - DNA, 608 bp, Homo sapiens
ttggggaaacagtgtaaaccggcagtgtaaacaagagcagggcatttatgagtagttgagaatggtgaataggagtatgactagacagaagatagtagggatgaccagttttttgggtggcagtccaagttggtctggtgtctggaatgagactggggcctaaaaaaaaggagtgtctatacaggrgcttaaatgggctgtaccctttagcattccaagaacaggcctgaattctgagaaggccaagtggtaaaagtattgtccagtcctttttaggttggtggctgagcttggtaaggtgtgtttttaaaagaccattagtccgttctacctttcctgaagattgaggaccgtaaggggtatgaaggtttcactgaataccaagagcctgagaaactgcttgggtgatttgactagtaaaggccggtccgttatcggactgtatagaggtgggaaggccaaaccaaggaattatgtctcacagaagggaagaaatggctgcagtggccttctcagactctgtgggaaaggcctctgcccatccagtgaaagtgtctacccagaccaagaggtattttagtttcctgactcgaggcatatgagtaaag

SEQ ID NO: 921229 - DNA, 594 bp, Homo sapiens
caattactgagcacacaaaacagggctcgtgtgaattgagaggtgccgtcagtgtaaaaggcacacttgatttcaaagatttggtatgaaaaaagaatgtaaaatatctcaatttttaaatattcattacatttcaaaattgtatttaggacatattattagaatcagttcttcccctgtttctctttactcttttaacatggtccctagaaaagggaaaatttcacatggggcttgctttgtctattggccagcactgatctaaacaatccgacttcaacacttttctctcctctccaagcagcatttcagaacccctcgagatggcagtgccctggcaatggggctgsaataaatgcctgagctacacctggagccgctcatccaagggcgtcggtcctgccaaggtcactggaaggggaatgttcccagccagtcaaggggctggtagggcacttcctgggactcctgcagtttatctgggaagtgcgggtttcattcgccactaatcaggcttaatcatacagcacttggagccctattttccatccctcacccactaagagtggaggtgacagtaagagcgtgggagca

SEQ ID NO: 921230 - DNA, 641 bp, Homo sapiens
caatttttattattttctacaatttggactgaaccctagaattttttcctggctacaagtctttaaaataacatttcaatctttctccttccttctattcctttttttccccccatttttctgatttgaaatcattaaaaaataagctgtgctcttcttaaagctctgagaactaaagctagacaacttaaactctggagtaacagcgacctatttatatacagaaccattttcgtacctgcctgctgatatatggacttcagagtaatatggcctatatgagttttccagtgttgtcttcccttttttgtttgttgtttttctctcttcctcccccactattttttcttcaygggacatgagacttcacaacctgctaaaaatgagcttacctaaaaacatatctgactaggaataaaccattctggacatgacagatcagacaaaacccaagccctgagactcattttcctctaaaatcctttctccaaaagatttctgaaagacaaagcaggaaaaaataaaaactcaggactccaattcactctgccaaaaggaaaaattaagctaaaagctgagtcttgcaagaaactgcctttccctttgttcctaagcagacagctacagataaaaggtttaaa

SEQ ID NO: 921231 - DNA, 726 bp, Homo sapiens
  misc_feature 668, 669, 674: n = A,T,C or G
tttgtatttttctgtagagacgtggtttcgtcatgttgcccaggctggtctccaaatcctgggctcaagcgatccacccatcttggcctcccaaaggccagaattttgaattttctttccttttttttcttagacaggtctcactctgtcacccacgctgccaggctggagggcactggtgcaatctcagctcactgcaacctccaccgcctgtgctcaagcaatcctaccacctcagccaccgaagtagccgggactacaggtacacaccaccatgcccgactaatttttttttttttggtagataatggggttttaccatgttgcccaggctggtctcaaactcctgagatgaagtgatccactgacctcggcctcccaaagtgctagaattacaggygtgagccactttgcctggccgggaattttcaatttgctactagccacattgaaaaatgtaagaaagaaaccagtgccatttattttaatagtattttatctaatccaatatatgcaaaatattgtcatttccacaatgtaatcaatgctaaaaggtactgacgaggtcctttacattcatttcttttgaacccagccttagaaacgctgtgtgccctccgggtatacggcacacactgatatggctgggtgcgctttcaggcgctcanngtgancacgtggccggcaacagcgcaggtctagacagaacatgaaagcgtctgaaag

SEQ ID NO: 921232 - DNA, 739 bp, Homo sapiens
tagctcacaaaactgtcaggtttctctctttccatagctcttgtttctgctgctgtgtatgttgacagcacccacttctactgcagatggactttcttcatgccgcaggaagcctgcctgcattcaaggctggtgaggcaggagcagttccccaaaggaagtggtgtacatggtggcgaagcaatggttcaagctccaactgataagagtgtcaggaacaaatcaggtaaggatgaagaaccatgtctccccacccacagaggttagctcagggcagcaggagcagcagggaaatatatatatatatatatatatatatatatatatatatatatatacatayacatacacacacacacgcacacgcacacatatatatgtaatcacacacaaacacatacacatatgtacatatatctatgttaatatcatatcatggccacctttccctgtggaatccccacccggaggatttagtgaggagaaaactcgatttcagtggctctgcatcagtcgaggaagactagattatgttgtggtaaccaataacctgcaaatcttagtgacttaacataatgaagctccatctcacaaccctagtgcatggcagtacaagacggtaggtgaataaatgcctgacctatgtcaatgtaggctaattgcacccaattaagctagtcccttcctcccttcctgttcgtcattgcttgctcatcattgtcctcactctgggaccaag

SEQ ID NO: 921233 - DNA, 739 bp, Homo sapiens
tgctcaggaggctgaggcaggagaatcacttgagattacccgggaggcagagattgcagtaagccaagattgcaccactgcactccagtctgggcaacagactgggactccatctcaagcaaagaaaaacacatcacttagactaatcattgaagggctaacagaatttaaaataaaagtaagcaaagtcattaccttttcttttctgttcatttttttaaaaccataaacatggattgcttttgatataactgtgtagaaatgtggcagtatatggccgagcacggtggctcacacctgtaatctcagcactttgggaggctaagkcaggcagatcacaaggtcaggagttggagaccagcctggccaatatggtgaaacctcgtctctactaaaaataaaaacattagccgggcatggtggcaggcacctgtagtcccagctactcgggaggctgaggcaggagaatcgctttgaacccaggaggcagaggttgcagtgaagagagtgcaccactgcactccagcctgggcaacagagtgagaccccatctcaaaaaaaaaaaaaaaaagttgcagtatagcaaaacttccctgtgcagaattcagtttaatgcaggattattttgattttcttttcaaaaaacatatttagtccctatatgacactattgatggaaagtaagatactccagcagtgcagtccatttaaatgtttaaagagcatgaattccacatta

SEQ ID NO: 921234 - DNA, 651 bp, Homo sapiens
aatgcctccagattcacaccatgaggaagaataggcaagattaccagacttttttttttttttttttttgagacagagtttcactcttgttgcccaggctggagtgcaatggcgcaatctcagctcaccacaacctctgcctgccaggttcaactctcctgcctcagcctcccgagtcgctgggattacaggcatgcgccaccatgcccagctaattttgtatttttaatagagatggggtttctccaygttggtcaggctggtctcgaactcctgacctcatgtgatccgcccgcctccaaaagtgcctggattataggcgtgagccaccgcgcccggccccagacatttaacaaattgcaattgcctaatagatcacaactagaggctgtacagttttgaaaaagtattaagattccaagctctaaaagctggcagaggaagacaatcagatggtcacagtcattctttccatcctagaattcagaatgttaaataatcaaaccaacacctgcttcacagggttagaggcatttggatttcccctctgaacataaacgcaaagaaatgaataaaatgataaatacagaaaggataccagattactgactttaaagggaggtcattcttaagtttgttcattttgaccag

SEQ ID NO: 921235 - DNA, 651 bp, Homo sapiens
aatgcctccagattcacaccatgaggaagaataggcaagattaccagacttttttttttttttttttttgagacagagtttcactcttgttgcccaggctggagtgcaatggcgcaatctcagctcaccacaacctctgcctgccaggttcaactctcctgcctcagcctcccgagtcgctgggattacaggcatgcgccaccatgcccagctaattttgtatttttaatagagatggggtttctccatgttggtcaggctggtctcgaactcctgacctcatgtgatccrcccgcctccaaaagtgcctggattataggcgtgagccaccgcgcccggccccagacatttaacaaattgcaattgcctaatagatcacaactagaggctgtacagttttgaaaaagtattaagattccaagctctaaaagctggcagaggaagacaatcagatggtcacagtcattctttccatcctagaattcagaatgttaaataatcaaaccaacacctgcttcacagggttagaggcatttggatttcccctctgaacataaacgcaaagaaatgaataaaatgataaatacagaaaggataccagattactgactttaaagggaggtcattcttaagtttgttcattttgaccag

SEQ ID NO: 921236 - DNA, 549 bp, Homo sapiens
gtttaaggggaaaaaaaatatcacagggcatttccttgcccctagaagcaaagagaagctgaatacacacagcagatacctaaaaaaaagaagaagaagaagaagaaaagacaactccactttcactgcaattgtgtgtatagttctttctttagctattatcaaatacaaaagtcttctagaatagttagcaaactgagctgctaatattcaagtctgttttacatgtkcccaagacatattatattactgctgagatctgtagtaaggaggacattttatattctggggaaagaaaggatttttgcttgaattttatttgttgaatggtaatgagggaattgtgtcctttcttatttttaaatgtttgagcaatttaaaaatatacatgtgatgtttagaaacctcccttgcctatccattgctttcaggataaagcctaaactccttagtattcagttggaagcaaacctctcctgtctcattacttaccactccttgtttctccaactttgtccccaaagagccattcttgtccatccacctcta

SEQ ID NO: 921237 - DNA, 601 bp, Homo sapiens
ggagaaagcttccagaaacagaagaaatctcaaaaggttctggaatttgtggctctatatacatctaaaagtggagatacaggtgaagttaaaaacaggagaatcaattaaaattatatttgatgctgtaaaaccctagatttcttccttcacttcggcagaagaataaagacttattctctgttgattgcaaaacagaggctctcttggcatatgaagagaagtatagctgagaagaagaaaaagttgaacccccacccctaaccctaccaccattcagctctcttctctcacttagcctcagaaagggaagccacacttacaaagcttagcaggagtttggaagagcctcctttggggaagctgaccagtccaagaataaacctagaggcactgacatgaagggttcctgcaacataaaactcaacaagagttgcactctaagagcaacccaagttgataagcyttatgctccccatacaaacaccaacagctaccaatgaacattttggtgccccattcttaaaaataattggagagctcagtgtcactactgtcttgtacatttcagctttgataaactttcaacattttgatcagc

SEQ ID NO: 921238 - DNA, 541 bp, Homo sapiens
ctgaggaaattatggcagtgagataaactgacatggctgactccatcttgtctctagcatcacaggttggttgtgttttctcaatcctgggcatgggctaagctaactttgaaacaaatttagtttatagtttaaataatagtccttccccaaaactaaactgttcttgtaaaactaattaaaggccaccaagtcaggatgagaggggcttaggttctaaataaccaccagcctttattctggaggtcataagattttcaacttctcccaattactcttgaagataacatcacttttgaagaacctaagactggccttttgagatatcttttcaagattttgcatttctgacaaccrgatggccccacctggacctgccaaccagtcctgtggcccccacccagggaactaactcagcacaagaggacagcttcgactccctatgatttcatcttctagcaaaacaatcagcactctcgactcactagccccatacccactaaattaaccttaaaaactccagtccccaaattctcaggga

SEQ ID NO: 921239 - DNA, 631 bp, Homo sapiens
cttcaaccaatccagttctcccctgttttagaatgcactgagaatcagtctgggcaacatagcaagaccctgtctctacagaaacttaaaaaaaaaattagccaggcatggtgtgcacacctgtagtctcagctaccttggaggcgaggtgggaggattgcatgagcctgggaggtcaaggctgcagtgagccatcattgcaccacagcactccagtcagggcaacagagtgaggccttatctcaaaaaaaaaaaaaaaatttagaatgtgctgagaatgccacatccttgagatagagaggagctggmcggaatagccagagctctgtcccagtctccctcagaaacaagattccatcagtgcttcagccccacatgtcatgtgaccttagggtataaaacccatggaatgctgctttccagggtccctctgcagtgctgcaaatgaagcgtgtgcagttgaagctctatccaccccaggcagcttccctgagtcttgggggatgggtttacaacaggccctcggcatctcttgccccttgctatctatctgtaagtaataaaccctctttatgtaacctgtgatatgcatgggtgttctgcctcatgagactagacaagctggtaacta

SEQ ID NO: 921240 - DNA, 704 bp, Homo sapiens
actgcagagaagcctaagatttgaagcccaaacatagtctttattcctgactccatggctactttgagcaagcactgcaataggtggagaaagaggcccactccaccgaatgtgtcattcacctaattactaaaagccttctcagagtagatgctctgtggtgagcattcacatggcacacaaattcctcacactttgtgcctattctgaaaggtgcacccacaaacctctttccyggaccacctcatctttccaagttgctgaccattcagcaaaaccatcaataattgcctgtgaatgagtgtagatctatacctttgaccgtctctctcaatccagacaaagtagaccctaggtgcgctgctggaaatttcttgcactgagaaaatttcccttcagtactgtcatcgggggcattccttattgagactgtgatgctggaatagaccacttccagcttgtgccagtatatttaggagaactgtctgtaaatcagttaactggtcttaagaaattccccatgaagttgaagataaggaggcaccaggagtaagtatcaaaggaatctgagctacctgctaaggcaacttgtgctttctggacctgcttaagctcagtctcttacataccatttccatttgatgaggaattcctcttgtgtatgtctggtcttatggattggtagattagattacactcagttc

SEQ ID NO: 921241 - DNA, 704 bp, Homo sapiens
actgcagagaagcctaagatttgaagcccaaacatagtctttattcctgactccatggctactttgagcaagcactgcaataggtggagaaagaggcccactccaccgaatgtgtcattcacctaattactaaaagccttctcagagtagatgctctgtggtgagcattcacatggcacacaaattcctcacactttgtgcctattctgaaaggtgcacccacaaacctctttcccggaccacctcatctttccaagttgctgaccattcagcaaaaccatcaataattgcctgtgaatgagtgtagatctatacctttgaccgtctctctcaatccagacaaagtagaccctaggtgcgctgctggaaatttcttgcactgagaaaatttcccttcagtactgtcatcgggggcattccttattgagactgtgatgctggaatagaccacttccagcttgtgccagtatatttaggagaactgtctgtaaatcagttaactggtcttaagaaattccccatgaagttgargataaggaggcaccaggagtaagtatcaaaggaatctgagctacctgctaaggcaacttgtgctttctggacctgcttaagctcagtctcttacataccatttccatttgatgaggaattcctcttgtgtatgtctggtcttatggattggtagattagattacactcagttc

SEQ ID NO: 921242 - DNA, 635 bp, Homo sapiens
aaggattttcttccaggccccagtttgtaaactgtaattgcacattcaagggagggttctgtggtcagaatgtgccagtgtgatactgcacaggacctaccctcctattgtaacttgaaagttgtagaatccatctttgctgaggatggaggatttaagatgacagcagttttccatcattggagtactgattcaccagcctttcttgttttaacctgacattatttgcttgaattactgacacttgtctcttgagatttgttttgtcctaaaatggcataaatacaatttcttatattttccaataactcctagacagccctacaggagagttttggagggagagggttggagagcctagtcagaatatcaytgccctggaggcatcgtgcccaataaccaggctcactgttacttcttttgagcctcagaatctgccctttcttctaagaaagcaaagtattcccaacataaaaacttgaacaggaaaacaaagagcataaggcaaagtttggaagaacgcaccctcttcacactcatacatgctttataaaaaccaaatgaataagaatgtatgctagcttttacccttctgtgttcattcactaatttatccaacaaaaatttgaagtgta

SEQ ID NO: 921243 - DNA, 633 bp, Homo sapiens
tttagaaactagtattctaaacaagataaagaatatttccgtcactccagaaaggtttcttgtgatctttgccatccacccccaccatctaacatcataatgagctttcatcttttaattcctaatagcatagattagttttaccttttcttggattttataaaaacagaagcatatgacatgtgttattttgtatctggcttttaaactcagcattacgatttagagattcatgcgtattgttgcattttctgtagttgtttctttttactgcggactaatgtttcattatatacttaaccctaagtttgtttattatcattttatccttttatggacatttgggttgtttcaaatcttaggccaccrataaggttttcattagcatgcgaatttaaatcatttcatagacatgtcttagctaaacacgaatgggattatcaggtcataaggtagctgtttgtttacatctacctgaaattacctgaagtttctattaagtttttcagagtggttagccattgtaaattcccaacatcaatgtatgagagttcaagttattccaacaattaattcaccaacatttggtgttgtgttttacttatgccattatattttctgcatttctaatgc

SEQ ID NO: 921244 - DNA, 653 bp, Homo sapiens
ttcattcttgcgtggtcctatgtcacacagaccttctcatccatggaccccaccccattccaggccctcaccctttaaataaaaggacaatctagctggagagaaagaaacataaatcatggataaagaacaagaatagaatctaagcacagttgtgtctgccaaaagatgctgctctaaagcatgctgatgaaagggctttgggggcaaagtagcgcccagaacagaatgcaccaaggaatcttctacggtggaccaggcatgtgagctgagcctaggaacttgtggattccaccaggcagagccctgaaggaaagggagcgatggaggcacaatgcaaggacgaatgcgacaacaagacaaccagtggggccggggcacagtctgtcccactaggtgtggggcagtgtgggcacagagcctaatcatcacagccctgyacacggaggagtctagacttgacccagaatgctggggcttctaaacattttttgatcacgagaatcctttttttaaaaaattaatacatttattttgtagagcagttttaggttctcagcagaattgagcagaaagtacagacagttcccacgtactcccctcctcacccacacacacagcctcccccatcatcaacatcccccaccagaggg

SEQ ID NO: 921245 - DNA, 620 bp, Homo sapiens
atgtggaggcgtgggcgctcccggcctgcatcctgcacctcttacactttggttttcccacagactcctgaagaataggtcagaagaaagggttaaagccttaaaaggggaacaaccattgcggggctcagggaggaggataatgttctttgggctrccgcaccctgatccccggggtcccgaaccctcccgtccctggccaggcctgccagccacagggtgagggcccccttccgccgcaacctgccactctcacaccaatgcgggaccgccttctcttccttccccaccccccaccccaccctgccgtcctttctcccccaatctccgcctctgattggctgagcccccggctccccgctccccctctcctccatccccggtgaaaactgcgggctccgagctgggtgcagcaaccggaggcggcggcgcgtctggaggaggctgcagcagcggaagaccccagtccaggtgggaactggagccggtgggacctggggctcggggaccgccgtcaggcgcccatgcaagacttcccaacactaggcttcgggccacggtccgagggcgcccagggaagaagggcgcagagcttagggaggggcctgctttccaggcag

SEQ ID NO: 921246 - DNA, 571 bp, Homo sapiens
agagttaaacctcgacagactgctcagctattggtgcaaagtactataggtgactccttcttagttatcaccgtccacaccactctaagttcagcccattggctgctttgtccgcacccgttatcaaaccatatggtatcggtgctaggctggactgctacagcagcccaggcagcagyagcaccccggctggacccatctgcataccatgccccatcaggaatgggaaggcgctcttctttaaatggtgatggctcaaggcgtggggtgcctcaggtcccatggccttatcttgcgttaggactgcaggccctaagacctcttgtaactctgttgctaatagacttgtactcagcatactctgctgttctaagtaggcaccccactttgctaatgtggatgcctgtgctgccccagtctggggggttgttacccatgaatgcacccaccctgctattgggttagtcatctgcacagcgactgcaacccttcctgtcaagctctcacaggcctgaacagcagcatatacagcagctaaatgcttctctatcagtgaataccggagctcagc

SEQ ID NO: 921247 - DNA, 550 bp, Homo sapiens
aaacctctttcttttgtaaattgcccagtctcagttatgtctttatcagcagcatgaaaacagactaatacagtaaattggtactgggagtggagtgttgctgaaaagatacccaaaaatgtagaagcaactttggaacggggtaacaggcagaggttggaacagtttggagggctcagaagaggatagaaaaatgtggaaaagtttggaactttctagaaacttgttgaatggctttgaccaaaagcctgatagtgatgtggacaataaggtccaggctgaggtggtctcagatggagttgaggaatttgttgggaactggagcaaatgtggcttttgttatgttttagcaaagaaactggtggcgttttgcccctgccctagagatttgtggaactttgaaygtgagagagatgatttagggtatctggaagaagaaatttctttttttttttttgagatagagtctcactctgtcagccaggctggagtacaatggtgctatctcggctcactacaaactccacctcccaggttcaagtgattctcc

SEQ ID NO: 921248 - DNA, 612 bp, Homo sapiens
ggtgcatgcctgaaattccagctactcaggaggctgagacacgagaatcacttgaacccgggaggtggaggttgcagtgagccaagattgcaccactgcactccagcctcagcaatacagtgagactctgtctcaaaaaaaaataaaaataaaaataaaacactaccaaaagcagcaggaacatatatagcactaactatgtgccaggcgctgtcttaaatgcttcatatgcattagctcatatatcattctcaaacaaccctatgagatgagtactattattgtctccattttatagatgctgaaactgatgcacagagcggtaagacacaaagtcacgccyagctggtaagtagcagaggcgggaatcatccttaggcaatttgattccagagtctgtgatcttgcccaggctttcttccccactcccccaggcccaagcccagctgggactcaggaaggcttctggaacacttgctgcctaaaaggaagaaaacctgcctagaagtcacctctctggccaaggtcatgctgtagctccatggcagagccaggatttgaacccgggcttcctaatgcccaactaccagggcattgttcacttctccacat

SEQ ID NO: 921249 - DNA, 722 bp, Homo sapiens
accttgagaaaattacttcccctttgtgaccctcagtctcttcatccctaacagggataataacagtcgttgatgataggaatataatcatcaacaatattaaatgtcctcaacacgtgaatattaaatgagataaaatgtataagcacccagcaccttacatacatattgctagatcctttcttttctctmtctatctcttttttttttttttttttttgagacggagtcttgctcttgttgcccaggctggagtgcagtggcatgacctcggctcactgcaacttctgcctctcgggctcaagcaattctcctgcctcagcctcctgagtagctgggactacaggcacccgccaccatgcctggctaattttgtgcgtttttggtagagacggggtttcaccatgttggccaggctggtttcgaactcctgacctcaagtgatctgcctaccttggtctcccaaagtgctgggattacaggtcatcccggagctttcctgagtccttgtgggctgcccctcctccctcttctgcatcataacattctctggctgagcttttcctgcaggcctcatcacttgctccctgtgtccagctcggggccagacacaggtggtgtccatctcccactcccatctctgcctgtcctcactacatcatgtccctcctgaaccaaactccttctccaactcactggccaaggaaaataataataatgac

SEQ ID NO: 921250 - DNA, 564 bp, Homo sapiens
taaatctgcgtaagtaatgagaagcagaatgttaatccccaagacagggggaaaatgtctccagggcacatcagaggtcttcacagtagcccctctcatcacaggcctggaggcctaggagaaaatggttttgtggatcaggcccagggtgcccctgctgtgtgcagtctagggacttggtgccctgcatcccagccactccagcgtgactaaaaggggcaaaggtacagcttggactgttgcttcagaaggtggaagctgccaagccttggaagcttccacgtggtgttgagcctgtgggtgcacagaagtcaagaaccaaggtttgggaacctccacctagatttcagacgatgtatagaaatgcctrgatgtccaggcaaaagtttgctgcaggggcggggtcacaatggagaacctctgctgctgggcagtgcagaagggaaatgtggagtcagagcccccagagccccaagacagagtccctactggggtaccacgctgtgagaggagggccaccttcctccagaccccagaaaggtagatccactgacagtttgcact

SEQ ID NO: 921251 - DNA, 601 bp, Homo sapiens
acggaccaatcagctctctgtaaaaccaatctgctgtctgtaaaatggaccaatcagcaggatgtgggtggggccagataagagaataaaagcaggctgcctgagccagaagtggcaacctgctggggtctgtagaagctttgttcttttgttctttgcaataaattttgctactgctcactttttgggtccgcattgcgtttatgagctgtgacactcactgggaaggtctgcagcttcactcctgaagccagcgagatcacgaacccaccagaagaaagaaactcctaacacatccgaacatyagaaggaacaaactcaggacacgcggcctttaagaactataacactcactgcaagggtccttggcttcattctcgaagtcagtgagaccaagaacccaccaattccggacacaatttgactgcagaaaatggatgtccaaccctgtggtttccctgggccacattggaagaagaaaggagttgtcttgggccacacataaaatacacttactatagcagatgagctaaagaaaagaaaaaagtccatgcgtaatctttgtgatatgtgccaccaccaataagcaaaattgttctct

SEQ ID NO: 921252 - DNA, 601 bp, Homo sapiens
acggaccaatcagctctctgtaaaaccaatctgctgtctgtaaaatggaccaatcagcaggatgtgggtggggccagataagagaataaaagcaggctgcctgagccagaagtggcaacctgctggggtctgtagaagctttgttcttttgttctttgcaataaattttgctactgctcactttttgggtccgcattgcgtttatgagctgtgacactcactgggaaggtctgcagcttcactcctgaagccagcgagatcacgaacccaccagaagaaagaaactcctaacacatccgaacatcagaaggaacaaactcaggacacgcggcctttaagaactataacactcactgcaagggtccttggcttcattctcgaagtcagtgagaccaagaacccaccaattcyggacacaatttgactgcagaaaatggatgtccaaccctgtggtttccctgggccacattggaagaagaaaggagttgtcttgggccacacataaaatacacttactatagcagatgagctaaagaaaagaaaaaagtccatgcgtaatctttgtgatatgtgccaccaccaataagcaaaattgttctct

SEQ ID NO: 921253 - DNA, 787 bp, Homo sapiens
cagatcacctgaggtcaggagttccagaccaacttggccaacatggcaaaaccccatttctactaaaaatacaaaaattagctggacctggtggcaggtgcctgtagtcccagctactcaggaggctgaggcaggagaatcgcttgaacccgggaggcagaggttggagtgagccaagatcatgccactgcactccagcctggacaacagagcaggactccgtctcaaaaaataaaaaaacaataaaataataaaaaaaggtttttccttcactgataggaactgaccaaatatatagcagaaaactcaaattcgaatgcaatttttactacacccaacaaaaagtacaaaaagcactaatataatggatgttacagattttgtcactaatatcaaacacttaatattcagttttatatataatatatatgtatgaagttgtaagtrtatgtaactctgtttaatatctttatgtctctttaatgtttatttctgtatgtgtgcagatttgtatttgtttttgaaaactaataactcaagcatttttaaaagaatggctatagaatgcagtgatttaaggtgtttggggtaggttcggaaataatattggaaaagatacctgaaacaaacaaactattttatttttcttattctggctctaccttaaactcatctagctatagatttctggattccagatttgagagtctctcaaatggcccttaaaaagtctggtttctgaaagctttttagatgattttgattcaactggtctaagaattggcat

SEQ ID NO: 921254 - DNA, 478 bp, Homo sapiens
atttaaaattccttcccacttccagtgaaatccactcagctttaggctaaatatagaaatgtaagagtctaccacactcatgtcaaagctggttaaagggggaaaatagaaaaggtaatctatccagcccaaatctctggggaaatgtaacatgcatgtaacagtatgtccctttgggcacaatactgttactgtttcatttattttttactgaaactgttacataaaccrccctggaaaaaaataatccacttttaaatgacttgtgccttatatgtacatttattaaatttaggatagagttacagagaagttcagtttttataactagtcctgtaatataaaaaaatttaaatattatgtaaacatatttgttatgcagtggcttaatataaataatagttcaagatacatatatatgaagccagtgatcataaaatgaacctagagccatttgagggtcatttcaactataata

SEQ ID NO: 921255 - DNA, 553 bp, Homo sapiens
tccttgtgtaaatgaactgtttataaacacagattttttccccatggtttttcctgaaagatagtttgataccaaagaataaacatatatagttcaatagttttgtttttatttcattttgctagtgctaaaaattggacaaaaagctgacagagattaaagtactttcacagggactttggagataaaacctttggtgcattgtaataatcggggtctgttatgctcttttctaatgtactacaggatgagtaagatcttttaccacaactagaagagtatgtgtttgcacgatatgtctgataatttggttatctaccatgtagtggttacagatatttgcaccagtgaaatctcttgrccaattaggtgttaggagggtaggattcaagtgttaccaggcaatgcacaaaatgatttcttctaaaagtcagtggggcaaatggcattctactgtgtttcccgttttaccctaagcctcattttatcaaggaaacttctctgaccctcttttcagcctctccctttctatgttgttcccatttaggtcaag

SEQ ID NO: 921256 - DNA, 669 bp, Homo sapiens
atctcttgtccccatgagcatgaacaaaggaaggacaaggggccagcagcagatgtggggccactggctcatgctgtgaagtccctgttctagaaaatggatttgaatctcccgaggacttatgagctgactcctttgagtgtctgtcattccaatgctagcaacatctcgttttatttttgaagagcaaaccctgtttatctcccttaactcggcaagggtaagagttacttaatgtttattaagaactgggagatattcactcagtaatatggtatcaaaccaatttgacaggtaataatgctgacttggaaagtgttttgatttgagccaagatatcttttatggtggaataaaaataattctactacccatgccagcagaggatgctaatttaaaacwttttttttttcctctggatatgaggttgaccttactttcctcttttaaaaactggacttagagaaatagcactgggagttgggaaaaaactagacttaaaagtaagttttactttggtttgaaattcagttctaccacctaataccactatgaccctgaaacatttgcttcatcttcctgggactcagtttatccacagataaaacagaatgacaatatccatctcatagaactgatgaaaagagtaaataggatctataacaagcc

SEQ ID NO: 921257 - DNA, 645 bp, Homo sapiens
ggcctatggagaaatatatcaaatgtaaattataaagattcagttgtaggggattaacaagaagactgcttagttaagcgagtagtccttttatctagcttattcattaatctatcaaattttaggtgattttagtttatggggaccttgggtatgaagcatactccaaactcttggtattatcctcctgatagacatcagagtagtctccctggtgcgctctattctctccaaagttttaaatgtttgcatgcagccatctctaaaatgtcaaatggtctctcttcaactggagtaacaaaagctgaaaaaaatgtgtaaccacgagagcaccataacctataaataatgygctaaagccagaaactgaaaataatggtaactaagggtggcactaaggccctaaggtttggtcaaactcttacctaagtgagaacccaactagaaaggagaaatttataaacaaaattataggaggccattgttttggagtgagctcatgcactatgccccaacagaccagatcaaagaaaaatggagtcactcatgttaaatgttgcatgatcaaacttagactttaagaaaacacatagatgcaaaaacatattaggttttgtttttctcctgtaaacgggatgtttgagc

SEQ ID NO: 921258 - DNA, 617 bp, Homo sapiens
ttacactttttacttttctgacaaaatattctatttgagctcttatattaaaccaattaattaaagctcttttatattacacacacaacatacataaatacatagacagaataagaaaggagtcattccctaagctgggaattgaaccctgaacctgggctgccattgtgatggtggagaccaagagaaagtactgccacatggttacaaggtgacattcccaaggacatacaagacaagatagaaacctcatccaggtttttttttttttttttttcagggacttgcagcaaagtttktaactgaccagtttgctgggtcatcttgaacagtgggcttatgggagtactaagcccacattctatcctaaggtaccactcttttatgacagaacaacacaaaaaaacacacaaagcacaccatatttattatagtttaagactagcctcacaaatcctttttctcattaatcaaaactttaaagagaaaataaacactgatttttgccattcattcaacaggtttgcacagagagagaaagtaaggggaagggagaaaagcattgcttacagcagaatgggggaagtgaggtgctcagagaggccagagaaagaccc

SEQ ID NO: 921259 - DNA, 619 bp, Homo sapiens
agctgggaattgaaccctgaacctgggctgccattgtgatggtggagaccaagagaaagtactgccacatggttacaaggtgacattcccaaggacatacaagacaagatagaaacctcatccaggtttttttttttttttttttcagggacttgcagcaaagtttgtaactgaccagtttgctgggtcatyttgaacagtgggcttatgggagtactaagcccacattctatcctaaggtaccactcttttatgacagaacaacacaaaaaaacacacaaagcacaccatatttattatagtttaagactagcctcacaaatcctttttctcattaatcaaaactttaaagagaaaataaacactgatttttgccattcattcaacaggtttgcacagagagagaaagtaaggggaagggagaaaagcattgcttacagcagaatgggggaagtgaggtgctcagagaggccagagaaagacccacccattgcagctggcactgaatcaaaagttcaggcagctgcttgtcagtcgagaagggatcttttccagtactccctttggcaatcaagtttccccttttatggaggaaaaagttccccatgtcccatgatcc

SEQ ID NO: 921260 - DNA, 619 bp, Homo sapiens
agctgggaattgaaccctgaacctgggctgccattgtgatggtggagaccaagagaaagtactgccacatggttacaaggtgacattcccaaggacatacaagacaagatagaaacctcatccaggtttttttttttttttttttcagggacttgcagcaaagtttgtaactgaccagtttgctgggtcatcttgaacagtgggcttatgggagtactaagcccacattctatcctaaggtaccactyttttatgacagaacaacacaaaaaaacacacaaagcacaccatatttattatagtttaagactagcctcacaaatcctttttctcattaatcaaaactttaaagagaaaataaacactgatttttgccattcattcaacaggtttgcacagagagagaaagtaaggggaagggagaaaagcattgcttacagcagaatgggggaagtgaggtgctcagagaggccagagaaagacccacccattgcagctggcactgaatcaaaagttcaggcagctgcttgtcagtcgagaagggatcttttccagtactccctttggcaatcaagtttccccttttatggaggaaaaagttccccatgtcccatgatcc

SEQ ID NO: 921261 - DNA, 569 bp, Homo sapiens
tgcctaagaatcaatcaaccattgactcaatcaacagatgaatgtattggtttatgttccatgtacttgtagttaaacacaaccagtcctgaccattcctctggaagacattgcaatatatgacttaaatgactaggctagacctgactcaggaattcaaacacaagttgttattttggttcatgccttggtccagttttttgtttttgtttttttttttgagatggagcctcgcgctgtcacccaggctggagtgcaatggcgtgatctcagctcactgcaacctccacctcccgggttcaagcttttctcctgcctcaccctccagagtagcgtggttcagtttttaacctcagttatttaagcaagaatatctcagtgtgaacatgtgkagttgcaagttttgcctcggggaagtatcaatccatgccactgggaatttaaaccattctatttataggaaataatacattagggattttttgacacaccatccttagatttcttgatgaggaactataaaaattatggctcctcatcaggaaagttaaagatggtgtgtcaaatat

SEQ ID NO: 921262 - DNA, 579 bp, Homo sapiens
gataagagccagaagaattctctggattaccaggcagagactcttgttctcttcccttactttctcccaaacaaatggagtctctctctctctctctctttgtactgagccacctagagctggaggagaggtgacacaagctcccctgtggtcaccacaactgggactgttctcggtcagacccaaaaccagcatagcactgagtttcacccaaggcccacagtaaccactgcctggctaccacttatgtttgatcaaggccccagggctctacaatcaacagatggtgattccagccaggtttgtgtacttcacttcagaccagcaagttcctcagggccccaggtaagtccagagatgccatctaraagccagggactggagtaaaaatcttagaaatctacctggttctctattctacttctgctaagctggcactcaaaccacaagacaaaggtcttcccactcttcctttccctttccacaggcaaaggagcctcttgccacaggccaccactaacaaagagccactgggagtactgcccagctactgctgatgttcacttaaggcccaagggc

SEQ ID NO: 921263 - DNA, 579 bp, Homo sapiens
gataagagccagaagaattctctggattaccaggcagagactcttgttctcttcccttactttctcccaaacaaatggagtctctctctctctctctctttgtactgagccacctagagctggaggagaggtgacacaagctcccctgtggtcaccacaactgggactgttctcggtcagacccaaaaccagcatagcactgagtttcacccaaggcccacagtaaccactgcctggctaccacttatgtttgatcaaggccccagggctctacaatcaacagatggtgattccagccaggtttgtgtacttcacttcagaccagcaagttcctcagggccccaggtaagtccagagatgccatctagaagccagggactggagtaaaaatcttagaaatctayctggttctctattctacttctgctaagctggcactcaaaccacaagacaaaggtcttcccactcttcctttccctttccacaggcaaaggagcctcttgccacaggccaccactaacaaagagccactgggagtactgcccagctactgctgatgttcacttaaggcccaagggc

SEQ ID NO: 921264 - DNA, 622 bp, Homo sapiens
atgtgttgggtcgcacctgaagccaccatgtcttagagtcttatgcaaagcctacagtatactacctgggcatcactgcgaattatttagagcccccaggctcttttgtcagcagatgatgaattctgctaggactgggtccttccattcaaggcactggtttcctttctggcccagtgtttgtctagaaatgtctgggaggtagtgcctgaactgggggcctcatgamtctgacaggtccctatcatcctgtagctgagttggtatctaagatgcaagactaagtcctctttactcttccttctcctcttctcaagcagatgcagtgagtcactttcattgctgtgagctgtgctgcctgaggttggaggggggagtggcacaagcactcccttgactgtcccgctggtgtttcactaggtcatgtgtcctctaagcccactggctgcaagcccagcacagcactaggatttgcctaagacttgaagtccttgtggcctagactagactgtctttcaagtttatttaggaacccagagtacttcagcttagagtggtgaggcttgtagaccctcaagttctgaatgctggaatgggtgattccatctggctaaggctggct

SEQ ID NO: 921265 - DNA, 730 bp, Homo sapiens
ttttggaagccttcctaagcagcctcctgaccctattttggctgaaggtgggtatttctctgtccttatggccccatcactgctggcatcaaccacattcctggttgcctaggacaagcagcttttgaaatttgacatctgcgtccagataggttagtgtcctttattggcccagacagcaggatctgctcctcttaatactggaaattttaaaggaatttctctctacatytgggacaagcccaactgactaagaaagagaagcaccctgactgtttcagtttagacatgccagggagcttgttttctgaggcagcagttacattgtgttttggtgattgtttctgtgtgtgttgatatagtcatgggaaattagaatttaataagctgttactcttttgtaataatgtttagttccaatgttctttggaacctggagtttgctgttgaatgggaaagtgagatggagttctgtgtattcaggcttttattctgctgttctaagcagaattgggtctggttagtaggttccaggtgatgttctgtggtgctgtttggcctccagtgttctctggaatctgggaaggtttgcctttacaaataaaactgccatggaaattgctttacccaaaattttggttcacagctttcattggattacctatcaggacaaagtctggccatctgaaaatgttcatagaccagagagtttgtattgctgtctcatggc

SEQ ID NO: 921266 - DNA, 566 bp, Homo sapiens
aggtatccatttcatctcactgggactggttggagagtgggtgcagcccacagagggtgagctgaagcagggtgggggatcgcctcacccgggaaccacaaggggtcgggggatttctcgttcctagccaagggaagctgtgagagactgtaccgggaggaacagtgcactctggctsagatactgcacttttctcatggtcttcacaacgggcagaccagattacctccagtgcatggctcggcaggtcccacccccacagagcccagcaagctaagatccactggcttgaaattcttgctgctagcacagcattctgagattgacccaggatgctcgagcttggtgaggggaggggcgttcaccattgctgaggcttgagtagggggttttaccttcacagtgtaaacaaagctaccaggaacttggaactcggcagagcccactgtagctcagcaaggcccctgcagccagactgcctctctaggcagggcatcactgaaaaaaaggcagcagccctagtcagggacttataaataaaacccccatctccctgggaaagagca

SEQ ID NO: 921267 - DNA, 570 bp, Homo sapiens
gcctgggagtgctatgggagactggggctcatttcatcccttatctacaaccattaaagacaaatgttcccaaagcggccattttagagacctccccttgggaacgcattctctttctcagggatgttccttgctgagaaaaagaattcagcaatatttctcctatttgcttttgaaagaagagaaatatggctctgttccacccggcccacaggcagccagactttaaagttatctcccttgttcctgaacattgctcttatcctgttsttttttcaaggtgcccagatttcatattgtttaaacaatttgtgcagttaacacaatcatcacaggatcctgaggcgacagtcatcctcagcttatgaagataacgggattaagagattaaagtaaaggtggcataggaaatcacaagagtattcattggggaagtgataagtgtccatgaaatcttcgcaatttatgttcagagattgcagtaaagacaagtgtaagaaattatagaagtattaatttggggaactaataaatgtccatgaaatcttcacaatttatgttcttctgcca

SEQ ID NO: 921268 - DNA, 640 bp, Homo sapiens
tgttgtattttcattttctttcagctcaacatattatttgaatttttttccttgatacttcctctttaacccatagattatttagaaatgtgttatttagtctctaagtgcttgaaggtatgtctgttattttttctgtcatttatttctagtttgattccattgtggtcagagaagacagtctgtattatttcagttctattgtatttgttaagatttattttatggcccagtatatgatctatcttgctgtcttggttcattttgtgttgctataacaaaatatggcagactgggtaatatataataaacagaaatgtattggctaacwgttctggatgctggaaagttcaagattgaggggctggcatgtggtaagagccttcttgctgcatcttaacacgggagaaatcatcacatggcagaagggcaaggaaacagtgagagagagagacaaaaaggggccaaactaacccttttataaaaaacccactcccatgataatagcattaatccaatcacgataatggtgccctcataacccaagtaactcccattaggccccacccccaacactactgcattggagattaagtttatcacacatggactttggggaacacattccaatcacagcgca

SEQ ID NO: 921269 - DNA, 541 bp, Homo sapiens
cttatttaggatatgtgattattatagcaagtctggtgtacatacaagattttgaatgggcacagatgacctttagtaagtgcttggctgtgataagaggcagtcctgactgcagatcaggctgtgtggaccccagccttgcatgtttacagaccttcatgtcttattcttacagggtatcagaagaacacctactggggaaacttataaattagtaaaaggtgggyattctccccgcccatcttctgtctgtctgccaggactagcacagcactttgaagtcattcacatagaatcccaacttaagagggtaaaatcctcctcaacagactgaaaataagtttaaattccctttgctatattaactcccctgaggaaagagtcttagatcaatgtccaacactaaaaacagttttaaatcagcaagtgagaattaaatctgaagcaattgataataatgtttcattcattcctctcctttggccccgtccaccctactgctaaatccaggcatcaaagagaagagggacataattatctc

SEQ ID NO: 921270 - DNA, 781 bp, Homo sapiens
  misc_feature 638: n = A,T,C or G
cttggtggggggggggggggcgggagggatggcggggtgtgtctctccataggctgggcgtgacagggaggctcactgaaggtagcgcactttggaggggcaatgtcaggggttagctttctcttgtttggccacaagactccaaaaggacagcacggtgactgattcccagcgctagaggcgaggcggttggccacatgtaggtgtrtgtgtgtgtgtgtgtgtgtgtgtgtgtgtgtgtatatgtatatgggtatttgtagatatttctagaacagggcaggggcataccacagaggggggcacaagttttcagcaacggtcacacctggatgtgtcagctcaccgcaacaatagacgaagtcacagatgaagggggctgcctttggggctgggggagccactgccaagtcacagaacagccgcccaggcaggcttggaaagggaagtctctgagaagaggaggaatctgtttagaggtcaaaggggggcctggggctctcaggatgggatggacttgcctgagccgattggctggcagttggagagaaagcagagagaagacaggagagagaaaagcgagcatatcatctcacaccagttagaatggcaatcattaaaaagtcaggaaacaacangtgctggagaggatgtggagaaatcggaacacttttacactgttggtgggactgtgaactagttcaaccattgtggaagtcagtgtggcgattcctcagggatctagaactagaaataccatttgacccagccatcccattac

SEQ ID NO: 921271 - DNA, 794 bp, Homo sapiens
tggcaaaacctcagagcttggagtcagaagactgagtctcaaagttccagtattgcctttttcttttttttttctagccatgatatcaatccttctcagtcactaaatgagtgtgacaacaccttgtacagttgttggtgtcattaaatcagatggtgtgtaagtgtattttgtaaaaactgtaaaggaggttgtggctgtaggggctgacggttctcatgaatattactgctcttctttccaacagttaaaagaatattggcagaaaaacagacctagagttccagcaggagtgaacagraacaggaaaacaaatggcagtatccctgagacagccacttccggtggttggccagccaccctggggatgtgagtcttggctgaccaggcttctggggacagggggcctttgttgcaatagagggtaattcttaagattgtggatggactgctgggtactggttaagaattctggctttagccgggtgtggtggcccacgcctgtaatcctagcacattgggaggccaagacaggcggatcatgaggtcaggagatcgagaccatcctggttaacacggtgaaaccctgtctctactaaaaatacaaaaacattagccacgcgtggtggcgtgtgcctgtagtcccagctactcagaaggctgaggcaagagaatggtgtgaacctgggaggtggagcttgcagtggccaagattatgccaccgcactccagcctggtgacagagcaagactctgtctcaaaaaaaaaaaaaggaattctgggtttgaatcctg

SEQ ID NO: 921272 - DNA, 553 bp, Homo sapiens
tgcctcagaaataaaaaggatcataaaggactattgtgaacaatattatgccaacaaattggataccctaagggaaacagacaaactccaagaaaaatttaacctaccaaaattgaattaggaagaaataaaaagcctacacagaccaataacaaataaaaagatcagagtagtaattaaaaatttcataacaagtacgacaacaacaaaaagcccagaatcaaatggttttgcaactaaattccttcaaacattcaatgacaaattaataccaacatttcctaaattcttccaaaaaatasacctagagggaatacttcctaacacattctatgagtgcaggatcaccctgatacctaagccagacagatactgtaagaaaagaaaactacaggccaatatcgctgaaaatattgatgaaaaaaacacaataaaatattagcaaaccaaattcaacaacacatcacaatattatacatcatgatcaagtgaaatttatcactgacatggaccctcatttaacatatactaattaatcaatgtgatacattaa

SEQ ID NO: 921273 - DNA, 741 bp, Homo sapiens
cctcctacaaccaagaaaggggcccaacgcctagtgggcctattcggattttggaaaaaacacattcctcatttaggtgtgttactctggcccatttatcaagtgacctgaaaggcttccagttttgactggggtccagaacagaagaaggctctgcagcaggtccaggctgctgtgtgagctgctctgctacttgggccatatgatccagcagatccaatgggacttgaggtgtcagtgccaaatagggatgttgtttggaacctttggtaggccaccataggtgaatcatagcagatatctctaggattttggataaaggccctgccaccttctgcagataactactctcctctagagagacagctcttggyctgttactgggctttggtagaaactgaatgtttgactatgggtcatcaagtcactgtgtgacctgaactgcctatcatgaactgggtgctttctgacccatctagccataaagtgggttgtgcacagcagcattccattatcaaatggaagtgttatatacgtgattgggctcaagcaggtcctgagggcacaagtaagttacatgacgaagtggctcaaatgcccatggtctccactcctgccatactgccttctcgccctcagcctgcaccaatagcctcagggggagttccctatgatcagttgacagaggaagagaagactagggcctgatttacagatggctctgcatgatatgccggcacc

SEQ ID NO: 921274 - DNA, 741 bp, Homo sapiens
cctcctacaaccaagaaaggggcccaacgcctagtgggcctattcggattttggaaaaaacacattcctcatttaggtgtgttactctggcccatttatcaagtgacctgaaaggcttccagttttgactggggtccagaacagaagaaggctctgcagcaggtccaggctgctgtgtgagctgctctgctacttgggccatatgatccagcagatccaatgggacttgaggtgtcagtgccaaatagggatgttgtttggaacctttggtaggccaccataggtgaatcatagcagatatctctaggattttggataaaggccctgccaccttctgcagataactactctcctctagagagacagctcttggtctgttactgggctttggtagaaactgaatgtttgactatgggtcatcaagtcactgtgtgacctgaactgcctatcatgaactgggtgctttctgacccatctagccataaagtgggttgtgcacagcagcattccattatcaaatggaagtgttatatacgtgattgggctcaagcaggtcctgagggcacaagtaagttacatgaygaagtggctcaaatgcccatggtctccactcctgccatactgccttctcgccctcagcctgcaccaatagcctcagggggagttccctatgatcagttgacagaggaagagaagactagggcctgatttacagatggctctgcatgatatgccggcacc

SEQ ID NO: 921275 - DNA, 595 bp, Homo sapiens
ctgaaattgtaaaactactggaagagaatatagggacaaaactcaataacatttgtttgggtgataattttttggatatgaactcaaaagcataggaaacaaaatcaaaaagagatacatgggattttgttaaattaaaaagcttctgcacagccaaggaaaacatcaatataagcagacaacctacagaatgggaaaaaaatatctgtaaatcatgtatgtgctaaaggggattaatatccaaaatatacaagaaactcaaataattcaacagtaagacaacaacccaattaaacattggtcaaaaaatctgaatagatatttcttaaaatttacaaatggtcaacagcaatctgaaaaaaaaatgctcaatrtaactaataatcagagaaatgcaaatcaaatccacaatgagttagcactatactaatgttagaatggttattatcaaaaagacaaaagataacaagtgttagtgagacatggagaaaagggaacactgaacccagttggtgagagtgtaaattagtatagccattatgaaaaacagaattgaggttcctccaaaaatcaaaaacagaactaccacatgatc

SEQ ID NO: 921276 - DNA, 715 bp, Homo sapiens
aagatgagaactgagactgggcattatattaagcagctcattagttattggtgaccttgacaagagcagtgtctatgaagtattgaagataaaaagcctctttggaatgggttaaaagaatgagagaaaaggacttggatctggcaatacaggcaacttgttcaagttttactctaaaggagaacagagaaatgggacgctagctagaagcagaaatgtggycaagagaggagttgttaacataggaaacttgtcaggttgtttcttcaccaatgggaaggatccaatagagatgggggctatgaacatgtaagagagagacaatttctaaggcaatgcccttgagcaggcgaaaggtcagcctcaggaaattcatccccagcaacagacaggagggcagagactgtgtgtgacacacacacacacacacacacccctacattcggagagagagagggagagagaggtcttttggggtccttttctgattgcttttattttctcagtgaagtaggaagcaagatcatcagttgggaatgaagatggggaaaggtgcctagaggtttgaagagtaaagagaaggtatgaggggtggttcccagggagagtggaagaatagatgcaccagggagatgcggggtgattacccggtagcattaagagatctctggtcatgaatttacagtaagacccatcagcacattgtctttttctc

SEQ ID NO: 921277 - DNA, 598 bp, Homo sapiens
agcgaaagaagtagcccgttttgtggccactgacttgagttctctaagtagggaatacagttacattaaatcactaaacacaagtcttatgactctaggatgcactgagtttcaccaacctctcacctgggccagctgcttactttagctgggggagaacatgaraggctgagcgttggtacattgctagggctaaacacacggctgatttagggagaaagagttagtcctgagccaggttctcagatgcgaagctgcctgctgtttcttcctgttcattctcctccattttaaaacacacaagcacacacatcctctccactcccgagaactagcaatgtacctaataaccaacacacagatgagaaacatagttcaggggaaaaaatatttaggaaaaaaaatacagaaaaaagcaatagggacagccttaacctaggggcttctccaagccttgacttctaccaacatggagcacgaagcacaggcactattttcacggtgctgcagatacacaatcaacctggaatgaatccatgaataaaggatagaaagtcacatgaagagcagtctttttctggtctgacacttcagagtt

SEQ ID NO: 921278 - DNA, 603 bp, Homo sapiens
ttggtatgtttttgcagtggctggtactggtttttcctttccatatttactgcttccttcaggagctcttgtaaggcaggcctggtggtgacaaaatccctcagcatttgcttgtctgtaaaggattttatttcttcttcagttatgaagcttagtttggctggatatgaaattctgggttgaaaattcccttaagaatgttgaatattggccccaccctcttctggcttatagggtttctgctgagagatctactgttagtctgatgggcttccctttgtgggtaaccctacctttctctctggctgcccttaacattttttccttcatttcaaccttggtgaatctgatgatttccttggggttgctcttctcaaggagtatctttgtggtgttctctgtatttcctgaatttgaatgttggcctrtcttgttaggttaggggagttctgctggataatatcctgaagagtgttttccaacttggttctattctccccgtcactttcaggtacaccaatcaaacgtaggtttggtcttttcacatagtcccatatttcttgaaggctttgtttgttctttttcatttttttctctaatctt

SEQ ID NO: 921279 - DNA, 718 bp, Homo sapiens
tgctggaggtccactccagaccctgtttgcctgggtatcagcagcagaggctgcagaacagcgaatattgctgaacagcaaatgttgctgtctgatcattcctctggaggtttcatctcagaggggtacctggccgtgtgacgtgtcagtctgtccctactggggggtccctcccagataggctacttgggggtcagggacccatttgaggaggcagtctgtccgttctcagatctcaaactcygtgctcggagaaccactactctcttcaaggctgtcagacagggacatttaagtctgcagaggtttctgctgcctttggttcagctatgccctgcccccagaggtggagtctacagaggcaggcaggcctccttgagctgtgatgggctccaccaagctcgagcttcctggctgctttgtttacctactcaagtctcagcaatggcaggcacccctcccccagcctcactgccaccttgcagtttgatctgagactgctgtgctagcaatgagcaaggctccatgggcatggcaccctccgagtcatgcgcgggagatgatctcctggtatgccatttgctaagaccattggaaaagtgcagtattagggtgggagtgacccgattttccaggtgccgtctgtcacagctttgcttggctaggaaagggaattccctgaccccttgcacttcccaggtgaggtgatgccttgccc

SEQ ID NO: 921280 - DNA, 630 bp, Homo sapiens
agcttgatccttggcttcctcttgttcttcaagcaagacaagggggcttctttgtatataaccaaggagactctttggctttcacacctgcctttcaattgcctgctacttgtcctgcactgttcattatcttagtgtaggctatcactggcacttagcaatagctatccaatactgttacccttagagctcctgtttcttcatacctttcaaacagcctgacacatcttgtctgctagtatattcctttccactgtacaatacccccaattcaccactgtttaacagttggacctccatcttataccagatgctgtctgtgatcacccaccaacagtgataagctcctcactacagacaggtggtgaataatcctactccaaaacggtatctcattgccgacactctttaaccagccattmctggtaccaaccattccagcttgggttctctggaagcagatggggagacaaaatttaaggtgtaaggtgctcattggggaccaatacctttgaaaggaaggggtgaaagcaggattagcttacaatgcaggtctgattgggctggaaatgttgggcctttatactgccaccttgttaaatcactggatgttggctgttagggaagttg

SEQ ID NO: 921281 - DNA, 617 bp, Homo sapiens
aagtacacgctaccacctatgaaatattctagccaaaaatttaaaactttattgaatcagatttcagcatctaaataacagtgtataggaagcactggaaaccaaggaacatgttaaatgaccccatggggatggaaccagtaaaatccagaccgtgggaaattccacatgaggaacagcaggctttttcaacaaataattagcaaggagaaaaaaaacaaaaacaaaagggagtaaaatctatagattgaaggatacgtaaaagacatacaagccaaatacaataaccagagcttgtttggaatcctgattcaaacaaactgtataaaaattataaaggaattatttttagttgttttagttgcaatgatagaattgctgtttggttaaaaaagagagatgcatatcttttagagatatataytaaagtatttatagatgaaatgtatgatatattttgcttcgaaatattccaggatgatcaaatgctgataatggttgaagctggatgataggtacataaaggctcatcagactcccttctctacttttgtgtatatttgaattttcctgtaattaaaaaaatacatctaaggttttaaattaacctctcagta

SEQ ID NO: 921282 - DNA, 724 bp, Homo sapiens
taaactggcagggactcaagctttggaaacaggctaacaaaaagtaggacctgtaaactcacagggagggttttcaaaatgcaaccaatcatgtacttctgccctgaagacgttaataaaatattccagcatgcaaaaccgccaagaaagacacttgtcgactttcattatgatcaataaaaactgtcagctcattagcatatcattagctgtcctgctgtttccaaagtcttaatgcacagaaatattaatcttcaaatgtgtaagattccccagttctrtgactttgactttctgcatgaaaggaaaaataagaattaaagatgggaggcatccaatatagcttctttttcaatgtgcctataaacatatgtttaccatctgtggaattatgggaagcagctgaggtaaaaacgacagctgtggaatttttaaaaagttgtaatcaatttcacttcccagtgacacctcagctgttagaggagacagtgatgtccaggtaagggaaaggtttcagacccaagttcaccagacagacacagagacagagaaacaaagacaggagagccttggcctctgtgaaaggctttggaatgaagtctccctgaggcctcaactatttagaaactgtcagaacactcaacccctgaagcatccttataacttattttggttcacctcggctcatttttttatttttcaccctctgaaattgtaacagcat

SEQ ID NO: 921283 - DNA, 709 bp, Homo sapiens
agttcagcatggctggggaggcctcaggaaacttatgatcatgatggaaaaagcagcaaacacatccttcttcacatggtggtaggaagaagaagtgcagagcaaagtggggaaagccccttataaaactatcagatcttgtgagaactcactcactatcacaagaacagcatgggggaccacctccattatctaatcacctcccacaaggtccctctccaaacacatgggaattacaattcaagatgagatttgggtggggacatagagccggaccatatcattccacccctggcccctcccaggtttgaaatgtgtttctcacatttcaaaacacaaatatgccttcccaacagttccccaaagtcttaacttatttcagcatttgcccaaaagtccaagtccatattctyatctgagataatgtaagttccttccacctatgagcctgtacaatgaaaagcaagttagttacttcctagatacaatggaggtacaggtattggcttaatacacccattccaaagggagaaattagcaaaaacaaagaggctgcaggcccatgcaagttcgaaatccaatgaggcaataatcaaatcttaaagctccaaaataatctcctttgactccatgtctcacatccaggtcacacagatgcaagaggtggactcccatggccttgggcaactctgcccctgtggcttttcag

SEQ ID NO: 921284 - DNA, 772 bp, Homo sapiens
ccgctactatcattacttctatttcattgatctatatgtttatccatatggaagtgctgtttgattattgcagttttgtagtaagtttggaaattgatgaatcttccaagtttgttcttcttttcaagattgttttggttattctatttcccttggattttcatatgaattttaggaccagcttgtcagtttccgcaaataagtcagttgagattttgatagagattgtattgaatctgtaggtcgtcagtctgaggaagcattgccatcaaaacaatgtcaaataatttgattcctgaacatggggtgtctttctactttctcaggtcgtctttcatttctttcaattttttttgtttgttttcaaaatctaagattttcgtggcttttgttaatttattcctaggtgtatttttttatgctatcatacatggaataattttcttaatttcaatttttggttgctcattgctactgtatagaaaggaaattaatttttgcctattactttgcatcctgcmaccttggtaagcttattgattagttctaatagtttctagtgaattccttaaaatttttccatataagattatgtcctctccaaatggagatcgccctatgtcttcctgtcctacctgctgcctgttagttcatttttataccaaattgccctggccagaacttccagtacaatgttgaatagaaatggtgagcagatatctttgtattgtttctgattttaaagggaaagctttcagttttcaccttgaag

SEQ ID NO: 921285 - DNA, 772 bp, Homo sapiens
ccgctactatcattacttctatttcattgatctatatgtttatccatatggaagtgctgtttgattattgcagttttgtagtaagtttggaaattgatgaatcttccaagtttgttcttcttttcaagattgttttggttattctatttcccttggattttcatatgaattttaggaccagcttgtcagtttccgcaaataagtcagttgagattttgatagagattgtattgaatctgtaggtcgtcagtctgaggaagcattgccatcaaaacaatgtcaaataatttgattcctgaacatggggtgtctttctactttctcaggtcgtctttcatttctttcaattttttttgtttgttttcaaaatctaagattttcgtggcttttgttaatttattcctaggtgtatttttttatgctatcatacatggaataattttcttaatttcaatttttggttgctcattgctactgtatagaaaggaaattaatttttgcctattactttgcatcctgccaccttggtaagcttattgattagttctaatagtttctagtgaattccttaraatttttccatataagattatgtcctctccaaatggagatcgccctatgtcttcctgtcctacctgctgcctgttagttcatttttataccaaattgccctggccagaacttccagtacaatgttgaatagaaatggtgagcagatatctttgtattgtttctgattttaaagggaaagctttcagttttcaccttgaag

SEQ ID NO: 921286 - DNA, 772 bp, Homo sapiens
ccgctactatcattacttctatttcattgatctatatgtttatccatatggaagtgctgtttgattattgcagttttgtagtaagtttggaaattgatgaatcttccaagtttgttcttcttttcaagattgttttggttattctatttcccttggattttcatatgaattttaggaccagcttgtcagtttccgcaaataagtcagttgagattttgatagagattgtattgaatctgtaggtcgtcagtctgaggaagcattgccatcaaaacaatgtcaaataatttgattcctgaacatggggtgtctttctactttctcaggtcgtctttcatttctttcaattttttttgtttgttttcaaaatctaagattttcgtggcttttgttaatttattcctaggtgtatttttttatgctatcatacatggaataattttcttaatttcaatttttggttgctcattgctactgtatagaaaggaaattaatttttgcctattactttgcatcctgccaccttggtaagcttattgattagttctaatagtttctagtgaattccttaaaatttttccatataagattatgtcmtctccaaatggagatcgccctatgtcttcctgtcctacctgctgcctgttagttcatttttataccaaattgccctggccagaacttccagtacaatgttgaatagaaatggtgagcagatatctttgtattgtttctgattttaaagggaaagctttcagttttcaccttgaag

SEQ ID NO: 921287 - DNA, 433 bp, Homo sapiens
acaatgtagtaggggcaggagatgaagtcagaagggcaggaaagagccagatctcacagaaacacagccttggtaaggactttggattttattatgaattagtggagaagaaatttaagagtgctaaccaaaggagtgacatgatattactcatttctttgggaacacatattatggtgtgctgtaactgttgagtgacctgcctctcacaagggtacatctcaatctccccagctyctagcacagcacctagtttataataggtatttaataacattttagagaagaaaagagcagaatgggtgtaaaccggccacaggcctccagagcatacaggactgtctgccttccactaatatttgtcagggaaggattagcctcatacattctgtatatacctgtggttaccttatgtcaggctttcaaaacatca

SEQ ID NO: 921288 - DNA, 594 bp, Homo sapiens
acaacagaagccagtgtcaaaaagcaaagcaatcacagaaaaaaatatcagcaacaacccatctgtcagagttatccaccagggaattttaaataactatcattaacatgttaagctctatgaaaaatgcaaacaaaacgcattaacaacagagacggaatctgtaagaacgtgtcaaatggaaatgttgtacataaaaaacactgtgtgctttcaatgggttcattagtagacttgacacaaccaagaaaggaatcagtaaacttgaagaaaggttgacagaaattacctaactgaaatacaaagagtaagaagagtaggagaaaaraaaagtaaaaagcaacaaataatgttagtacagcttctttggaatacagtttgtctgttatacacttatgacccagcaatcccattcctagatatttaccttaaagtaatggaaacttatgtttacacaaagtttgtgaatatctgtagtacttttatccataattgccaaaatctggaaacaacacagtgtccttcaactggtgaatggaatactattcaataaaaaagaaattaaatactgataaatgcaatgacacagatgaa

SEQ ID NO: 921289 - DNA, 709 bp, Homo sapiens
gagggagccctggagcagagatggccccttggagctgccatgaattgggacaagagaacctgtgcctttgcttgttgccctaaccagcgctggggtgtgggctgccccaggggaggggagatgaggcagtaggatgcgaatctcagtcctggagggggatctgggcgggtacctggatcacctgtacctgctgtgctgcatgggccttgggcagttgcctgtcctctctaggccccatgattcctcatctctaggatgtggataaaagtgatcacttattgtgcctgagggtgacaccatcactaggacaacataaaggacttgatgtcccagatcctgttgatgcttagactccaagaggtcatttgacatagcctctagggagggaagagctatgggaaagatatccaaaagttgctgggttggaaaagaaggtagacagcagcaattgtgttaagaaaccgaaccaggtgagagagggccaaatttcacacacacaaattcaggccaaggtgctgggaccctgtgtttttgttgaaatatctaggaaatcccagggaaaaaagtggtayttccatcctggagaatagctcctcccaggagagcccataaagatctagcaggaagggtccaggtgaggtgtgggggtgagctttccctcctcatacccgaaggccaagtgggaggattgtgatttgcttgggtggct

SEQ ID NO: 921290 - DNA, 575 bp, Homo sapiens
aattactgtatatattatatatgctaagaatgaacaattgggacataaaattttaaatatgattcaaaataacataaaagtataaagtagttttaaatctctcaaaatatattgcagaatcaatatgctgtaccctgtaaaacactgatataagaaatcaaagaagacttaaataagtgaaaaggtgctgtgtttatggataggaagactttaaattgtgaagatacgaattccgcaaagctagtcattcattgcaacttaaatcaaaatctcagtcatttatttttgtttttgttcatgtttttattttgagttactgacaggataatttatttgcaaaaaaaaatctgacaaaaaccgtatagaatacctcaaacctcaaaactcaacaatargaaagcaaacaacactttttaaaagaaattagcaatctatttgaacagatatttcagcaaagaaaactttcaggtgttaaattagtccataaaaatatgctcaacatcaacatcactggtcattagagaaatgcaagttaaaaccacaatgagatacagcatcattactcatcgataaaa

SEQ ID NO: 921291 - DNA, 573 bp, Homo sapiens
tcaaggactcaggaacccctggctggtcgtgttttttgcatatttatattcctagccccagagccttcatcctaagtctctttatctgaagacgctggctgatgcccttttgaggtgtctctgctgagacctctgctctggtggggctgcatggggggaggtggcaagaagagaaaaccttgaagacatgttgccctactctgacttagcccagtacttttccacttctagctctcttccttcccttaccacaggatccataaatttgctgcaaccttttttgggggctccctcagcagtggaacaatccctaggtctgcacygatccacctgacctgcgcacaagtccatgggggaaaatagaacagagaggagtagcacctgctccggttttagcttgttgctcacattatcaccataagtgattaaagacttcactgctaactttcatcatggctcctccttgctctaattgactacccctacacctggcagctcaatgctctctcttaactctacggagcccctgacccacacacttgaagagattaaagaaagaggtaaaaagattta

SEQ ID NO: 921292 - DNA, 544 bp, Homo sapiens
taagattataatggagcagaagaattcctatcacctagtgacagggtagctgtcataatatggtaacacaatgtgttactcacatttttgtggtgatgctgatgttaacacatctaccacgttgccagttgtataaaagcctagcacatacaatcatgtaaaatacagaatacctgataaagattgtaagcgactatgtcattggtttatgtctttactatactatacttttagtcrttattttaaagtatactccttctgtgtgtgtgtgtgtgtgtgtgtgtgtgtgtgtgtgtgtagatttaaaaagttaactgtaaaacagctttagacaggtcctttaggaggtattccagaagaaagaattgctgtcacaggagatgacagctccatgcatgctaattgcccctgaagaccttccaagtgggacaagatatggaggtggaagacagtgatactgatgatcctgaccctgcataggctgaggccaaatgtttgtttgtgtgctagtttttaaataagtagtccaaaaaatttgaaaaag

SEQ ID NO: 921293 - DNA, 730 bp, Homo sapiens
gttttaatcaaaaatggatgctggattttgtcaaatgcttttttgcatctattgagatgatcgtgtaatttttgtttttaattctgtttatgtgatatatttcattcattgacttgagtatgttaaaccatccctgaatccctggtatgaaacctacttgatcatggtggattatcatctttttaatatactgtcagattcggttagctagtattttgttgaggtttgttgaggatttttcatctatgtttatcagggatattggtcgttagttttttttctttcttttttttttgagacggcgtctcactctgtcacccaggctggggtgcagtggctcaatctcggctcactgcaagctccgcctcctgggttcacgccattctcctgcctcagcctcccgagtagctgggactacaggtgcccgccactgtgcccggttaattttttgtatttttagtagagatggggtttcaccatgttagccaggatggtctcaatctcctgamctcgtgatccgcccgcctccacctcccaaagtgctgagattacaggtgtgagccactgcgcccagccagttttctttctttctttcttttttttttttttaaatgccctttcctgtttttggtattagggtgatactgacttcatagaatgatttagggaggagtccctctttctttctcttttggaatagtttcagtaacattgtactaattcttctttg

SEQ ID NO: 921294 - DNA, 697 bp, Homo sapiens
acaccttctaattcatttctaataaggatggttttgtacctactataccatattttgtattttagggaccatttttttttccttttcaacttttattttagaatcaggggtacatgtgcaggtttgttgcaaaagtatttctcacgatgctgaggtttgggttatggctgaacttgtcacccaggtagtgagcatagtacccaataggtaatttttcaacccttgccctccttcctctctccctcctctttttttttttttttttttttttttgagacagagtcttgctctgtcgcccaggctggagtgctgtggcacratcttggctcactgcaacctctgcctcctgggttcatgccattctcctgcctcaacctcctgagtagctgggactgcaggcgcccgccaccacacccagctaattttttgtattttttagtagagacgaggttcaccttgttagccaggatggtctcgatctcctgacttcgtgatccacccgcctcagcctcccaaagtgctgggattacaggcctgagccaccgcgcccggcctcctctctctctcctttagtagaccccagtatctattgtttccatctttatgtccatgtggacctaatgtttagctcccacttacatgcgagaacatatggtatttggttttttgttcctgcattaatttgtttaggataatt

SEQ ID NO: 921295 - DNA, 697 bp, Homo sapiens
acaccttctaattcatttctaataaggatggttttgtacctactataccatattttgtattttagggaccatttttttttccttttcaacttttattttagaatcaggggtacatgtgcaggtttgttgcaaaagtatttctcacgatgctgaggtttgggttatggctgaacttgtcacccaggtagtgagcatagtacccaataggtaatttttcaacccttgccctccttcctctctccctcctctttttttttttttttttttttttttgagacagagtcttgctctgtcgcccaggctggagtgctgtggcacgatcttggctcactgcaacctctgcctcctgggttcaygccattctcctgcctcaacctcctgagtagctgggactgcaggcgcccgccaccacacccagctaattttttgtattttttagtagagacgaggttcaccttgttagccaggatggtctcgatctcctgacttcgtgatccacccgcctcagcctcccaaagtgctgggattacaggcctgagccaccgcgcccggcctcctctctctctcctttagtagaccccagtatctattgtttccatctttatgtccatgtggacctaatgtttagctcccacttacatgcgagaacatatggtatttggttttttgttcctgcattaatttgtttaggataatt

SEQ ID NO: 921296 - DNA, 697 bp, Homo sapiens
acaccttctaattcatttctaataaggatggttttgtacctactataccatattttgtattttagggaccatttttttttccttttcaacttttattttagaatcaggggtacatgtgcaggtttgttgcaaaagtatttctcacgatgctgaggtttgggttatggctgaacttgtcacccaggtagtgagcatagtacccaataggtaatttttcaacccttgccctccttcctctctccctcctctttttttttttttttttttttttttgagacagagtcttgctctgtcgcccaggctggagtgctgtggcacgatcttggctcactgcaacctctgcctcctgggttcatgccattctcctgcctcaacctccygagtagctgggactgcaggcgcccgccaccacacccagctaattttttgtattttttagtagagacgaggttcaccttgttagccaggatggtctcgatctcctgacttcgtgatccacccgcctcagcctcccaaagtgctgggattacaggcctgagccaccgcgcccggcctcctctctctctcctttagtagaccccagtatctattgtttccatctttatgtccatgtggacctaatgtttagctcccacttacatgcgagaacatatggtatttggttttttgttcctgcattaatttgtttaggataatt

SEQ ID NO: 921297 - DNA, 697 bp, Homo sapiens
acaccttctaattcatttctaataaggatggttttgtacctactataccatattttgtattttagggaccatttttttttccttttcaacttttattttagaatcaggggtacatgtgcaggtttgttgcaaaagtatttctcacgatgctgaggtttgggttatggctgaacttgtcacccaggtagtgagcatagtacccaataggtaatttttcaacccttgccctccttcctctctccctcctctttttttttttttttttttttttttgagacagagtcttgctctgtcgcccaggctggagtgctgtggcacgatcttggctcactgcaacctctgcctcctgggttcatgccattctcctgcctcaacctcctgagtagctgggactgcaggcgcccgccaccacacccagctaattttttgtattttttagtagagacgaggttcaccttgttagccaggatggtctcgatctcctgacttcgtgatccacccgcctcagcctcccaaagtgctgggattacaggcstgagccaccgcgcccggcctcctctctctctcctttagtagaccccagtatctattgtttccatctttatgtccatgtggacctaatgtttagctcccacttacatgcgagaacatatggtatttggttttttgttcctgcattaatttgtttaggataatt

SEQ ID NO: 921298 - DNA, 700 bp, Homo sapiens
cgatctcggctcactgcgagctctgcctcctgggttcaagcgattctcttgcctcagcctcctgagtagctggggctacaggcgcctgccaccacacccggctaatttttgtatttttagtagagacagggtttcacyatattggccaggctggtcttgaactcctgaccttgtgatccgcccgcctcagcctcccaaagtgctgggattacaggcgtgagccaccgctcctggcctattcttttcttttcagagacaaggtctcactctctcctctcgccccgcctggagtgcagtggtgtcatcatagctcattgcagcctcaaactcctgggctcaagcaatcctcccacctcagcctcctgagtagctgggatcacaggtgtgtgctacctcacccagctaatttctaatttttttttgtagagactggatctcactgttgccttgaactcctgggctcaagtgatcctcctgcctcagcctcccaagtgctgggattccagaccagccattttttttccttaatcatgcattcctgttgctagtttcacatcagtcccctggtttaataagaaataaaatattttcttcacacttttgaaaagacctttcttctttcataccccttctccctccaaaagggacaaaaattctttaatttcataaggagggtaggtaagtaacttgaggatgtgaa

SEQ ID NO: 921299 - DNA, 602 bp, Homo sapiens
tttgacaaagcagacaaaaacaagcaatgaagaaaggactccctattcagtaaatggtgctgtgaaaactggctagctatatgcaaaagattgaaactggacctctatattttaccatataaaaaatcaattctagatggattaaagacttaaatgtaaacctaaaactataaaaactctataagaaaacctaggcaatactattctggacataggccctggcaaagactccawgatgaagactccaaaagcaactgcaacaaaaacaaaaatagacattgggacataattaaactaaggagcttctccacagcaaaagaaacaatcaatagaataaacagataatccacagaatgagaaaaaatatttgcaaactatccctctgacaaaggtcttagtatccagaatctataagaaacttaaagaaatcaatgagtgaaaaacaaatagtcccatttaaaaaaaatagtcaaaggacatgaacagacatgaacagatacttctcaaaagacaacacacacatggccaacaagcatatgaaaaaattttcagtatcactaatcattagggaaatacaaatcaaaaccacaatgagatacgat

SEQ ID NO: 921300 - DNA, 590 bp, Homo sapiens
ctgggcaacagcacgaaactctgtctcaaaaaataaataaataaaatttaaaggccaaccaaggctgtaattatatatcagtaattaaaccaatcagtacttaccaggatatttgttgaccacactcatgagaaaatggatggttggattaatccatggtaggggattgactagttaagaacagaagattagagaggactggagagtattgttggtgaatgtctcacccatagaaccrgctttcataggctgctgtgaaaggtcagtctaagaaggactgacatttgggagccactgcgctagagcccatctgctttaagttcttagtccattagttgttccttggagctccagcctccctacatgaactgcttcccctaagaaaaggaaaatatccggccaggcgtggtggctcatgcctgtaatctcagcactttgggaggccgaggctggcggatcacgaggtcaggagattgagaccatcctggctaacagggtgaaaccccttctctactaaaaatacaaaaaaaattagccgggtatggtggcgggcgcctatagtcccagctactccagaggctgaggcagga

SEQ ID NO: 921301 - DNA, 633 bp, Homo sapiens
atgaaaagtggctaaggagtagttgaagcttccaggttagtggaactttcactgttttgtctgaatcaagacctccctttcctggaaccaggaccctacccaggaaaacctaggtttgaagagtgtgagaagctgatcctactgttttaattgactttttctttaccctgttggagagagaggaattccccctttaggtgtatggagtggccaaacacaacacccaacgctggacagataaaactgacagcagttcattagtcacgtatactatactcacggcctggggaaggacagcaygctccatgcagggcctcatgaaattacacttgagaacagtgaacaaccagaccacaagggccaaactctgagcaaagtccaaatcctttcttcttccatcaactggttgtagtcccctccccgtgaggccataagtgtgaatttagggacagccactgatgcaaaagaggtaggtgacatgagatttgagtcacctgtatacataatttgtggtatcttctggattaacttgagccaagtcctgaatataccatttccatcaaataatgtttctgcccaactttatgacttataaatctgatcacattgagctcaccatagagaaatattctc

SEQ ID NO: 921302 - DNA, 635 bp, Homo sapiens
ttttttaatcttgagttctaatttaattgcactgtggtctgagagactgtttgttatgatttccattcttttgtatttgctgaggagtgttttacttcccattatgtggtcaattttagaataaggatgatgtggtgctgagaatgtatacactgttgatttggggtggagagttctgtagatgtctattaggtctgctttgtccagagctgagttcaagtcctgaatatccttgttaactttctgtctcgttgatctgtctactattgacagtggggtgctaaattctcccactattattgtgtgggagaacttactttagaacttactttatgaatctgkgtgctcctgtattgggtgcatgtatatttaggatagttggctcttcttgttgaattgatccctttaccattatgtagtggatgtcctttttgttgatgttaatgctattcctttctgtttgttagttttccttctaacagtcaggcccctctgctgcaggtgtgctggagtttgctggaggtccactccagtccctgtttgcctaggtatcaccagtggaggctgcagaacagcagagattgctgcctgttccttcctctggaagcttcatcccagaggggcacctgccagat

SEQ ID NO: 921303 - DNA, 756 bp, Homo sapiens
tttttctgtcccatcagaacagtatttttttttttcaaatgatttaggaagacccaccttccattacttttcctgatgaagtgtgatattgggtttttagccctttgttttctctggtaattttaccctgattccamatgtggtgtaaattccttaacaattcacctctttgatgtaagatctgggtagagagagcatacttgggggcgcagccttcaaataacacatcttgatgagacgtgtgcataaaatgcaaagaagaaataagtggccagagaaaatgatggtgcagaaaatgtgtttcttaaagaagggttgttaattttaatgtttggttctaaaactctttgctgcacccccatttaacagctaaaacataggactcagggagaaaatgaaggtgtcgggaaatttaggctgaaattcctgggttggaaggagcacagtaaatgaagcccagcctttttcgtgttttatattcattaagcatagcaatgtactgataacgttttttaagctgtcattacatctagttgatatttaatctgaattttaatatttaaaaggatactcaggatcttcattagagccataaaaaattcaagcagggctactgtttggaactgtaacaaagcaatttatactcctatcatttcacttaaattagagtgaggaaagaaatttagattttttgaaaagtgcaatcagcctcttaaataaaaaagcaactggtgtcaccattaggtggcaggcaca

SEQ ID NO: 921304 - DNA, 340 bp, Homo sapiens
gttaattttaagttcctaaattcgattcaacagtatttgttgcagctctgattcactaagaactgcagggcataagcagatgtgataagatggtctgtgccctcgaggagttgcaaacttagtcctgggaataagacaaatrcagtgtaattacgactacaaggaagaaagtgataaatggcacaaagcagtggttatcgaccttgactgcaggttggaatcacctggggagctttaaaaacaccagtaccagggtccttctcccagaggttctgatttcattggtctggggtacagcctgggattgggattttagaaaggcttttcaggtgactccaat

SEQ ID NO: 921305 - DNA, 608 bp, Homo sapiens
tatctataaaaccatgagtcacacctgcacttccaattccaatccttcacctccaaagatttcaaaaatgatgagataggttggctagactctctaggctccccatctccataagagtttcccattatcctcaatacatttacttctttgctcactcccccctttggttacttctttgctcactccccctgtttggttctttgctcactcccygtttggttacaatctcctaatcactccaaccatctctcttggcccaactcctttgacccctgaccttgccaccacctccaaaggaaggaaaaagaaaagaagatagaaaggtagagaaagagaaaaatagaatgaattttgctttgttttcccagtctggtttacagagcaccagtctgcgaaggagattgctgtgtcaaaataaggctaatattttgttgtttggggggctgtttttttgtttgtttgttttttagtatttaccttgggccaagcaccgttctatggagttttatctaatttaatcctcataaaagcattccaaattggtactattattttgtccatattctagatgagaaaaccaaatccagagaagtttagtatgtacccaa

SEQ ID NO: 921306 - DNA, 608 bp, Homo sapiens
tatctataaaaccatgagtcacacctgcacttccaattccaatccttcacctccaaagatttcaaaaatgatgagataggttggctagactctctaggctccccatctccataagagtttcccattatcctcaatacatttacttctttgctcactcccccctttggttacttctttgctcactccccctgtttggttctttgctcactccctgtttggttacaatctcctaatcactccaaccatctctcttggcccaactcctttgacccctgaccttgccaccacctccaaaggaaggaaaaagaaaagaagatagaaaggtagagaaagagaaaaatagaatgaattttgctttgttttcccagtctggtttacagagcaccagtctgcgaaggagattgctgtgtcaaaataaggctaatattttgttgtttrgggggctgtttttttgtttgtttgttttttagtatttaccttgggccaagcaccgttctatggagttttatctaatttaatcctcataaaagcattccaaattggtactattattttgtccatattctagatgagaaaaccaaatccagagaagtttagtatgtacccaa

SEQ ID NO: 921307 - DNA, 692 bp, Homo sapiens
tctcaagaggcatttccctctcccccaactctgctgaaaaagtgcttgtcctgtaacccaaaagcaggttagttgctcatcgcatgtacagtttaattaataagaaagaggtctgattttaaaaatttaaaaaatgaatttattcagaagctagtttggaggaaggggcacaaagtatcctgtctttaaatgtgcctcgtcacctttggagcagaaaacagttatttttataagataggggaggaaatgagtaaggacaggggtacctcagttagcttggtgtcttgtctatcggacagttgagctggtgctttcctgggcagaagaaagttttaaaattggccaagcaggtggacaaaagttccgagtcaacccaggaaggatggaagtttccaggcaaaccyctggaggtgaaagttccatggcaggtatgctttgttctgcaaactgactgtcgacagatcaaggagagatctgcaggagtacataattagaaaaacttgccctggaggtaatgtctggtgaaacagaggtgtaaggttatatttgcatttttgaaaagctaaataggaaacagggagctgggaaaatgagaaagtagagagacagagcaaaaaatgattaaactacctctaaaaaaatgaggagacttagttagagtcccagacaccaataatttccatgttgctaac

SEQ ID NO: 921308 - DNA, 396 bp, Homo sapiens
gtttactgagtgtttttcgcatgaaggggtgttgaattctatcaaaggccttttctgcatctattgagataatcatgtggtttttgccattggttctgtttatgtgatggattacatttattgatttgtgtatgttgaaccagtcttgcatcccaggaatgaagctgacttgatcatgrtggataagctttttaatgtgctgctggattcagtttgccagtatttcattgaggattttcatatcaatgttcatcagggatattggcctgaaattttctttttttgttgtgtttctgccaggtttggtatcaggatgatgccgacctcataaaatgagttatggaggagtccctctttttctatcttttggaatcgtttaagaaggaatggtaccac

SEQ ID NO: 921309 - DNA, 584 bp, Homo sapiens
ataacagcaataatcacagtccctacccttaaggagttacattttggttgagagagatagtaatgaaattcataggtaaatacatagtggtccgatggagataaaagccacagaagggctcttttcaggcccttctttccctggcatgcttacatawcaataccctccttccctctgtgacaacacatactttctttggatttactgatactcattacctcgaggacagtaggatagccagcaatcagttcatctcaaaggtgactttgcatatcttttctgttgtgtatttgtttcatgcatggttactcagagatcaatatgcttttctaatttctaaattccttcttagacagtaatggtaattaattatccctggatcttgcaaatgtaatgagagtgggatcaatttcactgagctaagcctttagtcactgtttggggagtttgagtcctttttagccctaggattggtgtccctagatgtccaagttccttgcctaaagaggcctcatactgaacccacaactacttttctcctgattggtatcctactctgaatgacaggggataaccagtgagaa

SEQ ID NO: 921310 - DNA, 582 bp, Homo sapiens
acgcctccccaccgattagctacctctcggggctggtcctcgtgagactccagtcacaggtggtattctttaccatgttttgaaagccgattgtgaaggacacaatcatcttcaggatcttgttcatgtggcctttgtatgcaagacacagctatggacaccaaataagtccttcagttctattagtgcaagaagcagtcattcaaacaatacgtagtgaggagtccacatccctagaaccctgccataggctctgagagagtcagcacagttcctgcccttccagagcttaccagtgtagccagagagacaaataacttaaattgttatttccctacctaaataaagctaaggaaaaatacaataaatactttttctgagaccaaaaaaatgtcatcaaacagagtttttaaatgcttagcactgtgcttggcagtgagrattttagagtatctcacttaagaaaacccctgttctaacccaattacccgtgcaacctcgagcaagtaactcaacctctctgagcctcagttcctcaactctaactccccagcatccttggtttctaactcagttaaaggc

SEQ ID NO: 921311 - DNA, 711 bp, Homo sapiens
gctgcaaacgctggtggatgttctagaagggtgctcatcataaacaactctgtcctcagcttccaggcggcgaccaccagccatggtctccctggtccctaaagctcagcttgctgtctcaagatgagagcctctgttgcaacctgacgcctstgctttccttccagatcatgctgctccacctctggcctcaaccccggggacatcagtggcccacacaagggcctctcttctcgctcttgcacagctctccttttctcttgcatggcttttatgtcttgaaaccttttcctgtgcaaatgttccacatcccacattgtttttcttaagtactgattctgcacttcactgcttgcagcttagtattgaactctgatgtagccttcctgacatatcccatgtgttgactggacctccttgcctctagagagctgataagctggacccagatcccaacccagagccctctatagttcctgtgagttccttgctttcttatacttctctctgtccccaatccatgtctcattcccactctcatctgtcctggatataaagttcaaatccttcacttaaaacaacaactgtattatataatttgtataataaaatgcaccctttttaagtggacagtttgatgcattttggcaaatgtctatacccgtgtaaccactgccatcaagatctggaatatttccagcacccaagaaa

SEQ ID NO: 921312 - DNA, 588 bp, Homo sapiens
gcactcagaggggctgctcagccagcccaccctatgccaaatatgctgcttccatgagcatgctcacagaacacctggcctgggcctgcagggtgtggctgtgcaggacaggctttacctaactgtgcaggtcctgcctgcctgtgggcctcaggtgccctcaggggtgtttgcagaagagccctcaacctggcctgggagaagaccccttttgcatcctccctggggcctgattaggagccgggtgcccgaacaaaagcaacaggggcctacatatccatcagagaccctggggggttcagagaaagcccacctcctcccaccagcctgcccacctactcccactaacctatcattatcactttgcccacytcagttttccatgtccccacactttgttctcttgtgaatttccttccctcgccctcctttcttctttcccctctgcccgtcttctcctccccttcccttggaggaatctccatccttttcgctcagcaccagagccaggctagccacaccactcagcagcttctgtggtcctctctgggcctcggtgtcatcctctgtgacatgagagcaataaca

SEQ ID NO: 921313 - DNA, 531 bp, Homo sapiens
gcctacatcaaaaaggaagaaaaacttcaagtgaataacctgatgatgcatcttaaagaattaaaaaggcaagagtaaaccaaacccaaaattagtagaagaaaagaactaataaagatcacagtagaaataaataaaattggacttctgctccaagatggcctaatagaaacagctccagtctgcagctcccagcatgaytggcacagaagatgggtgatttctgcatttccaactgaggtaccaggttcatctcattgggactggttggacaatggatgcagcccatggagggtgaggtgaagcagggtgaggagtcacctcaccccggaagcacaagtgattgggggatttccctttcctagccaagggaagccgtgacagactgtacctggaaaatcggttcactcccacccaaatactgtgcttttcccatagtcttagcaaccggcagaccaggagattctctcccaagcctagctcatcaggtcccatgcccacggagcctggctcactgctagcacagcaatc

SEQ ID NO: 921314 - DNA, 591 bp, Homo sapiens
agaatggctattattaaaaagtaaaaaaatgacagatgttggcaggatgcagacaaaagggaatgcttacacactgttggtggcagtgtaaattacttccatccctgtggaaagcagtttggagattttgcaaagaactgcaaatagaattaccagttgacccaacaaccccattactgtgtacctacccaaaggaaaagaaattgttttaccaaaaggacataggcacacatatgtttattgcagcactgttcacaatatcaaaatcatgtaatcaacctaggtgcccatcaatagtggcaccagataaagaaaatgtgrtacatgtactccaaggaatactacatagccataaaaaagaatgaaatcgtgttctttgcagcaacatggatgcagcttaggattggcacttaagccataatcttaagtgaattaacccagaaacagaaaatcgaatactgcatgttcttatttataagtgggagctaagcattgtgtacacatgggcataaaagtgggaacaaaagacactggggactccaggaaggggagggagggaggaaagggttgaaaaactgggtattgggtact

SEQ ID NO: 921315 - DNA, 591 bp, Homo sapiens
agaatggctattattaaaaagtaaaaaaatgacagatgttggcaggatgcagacaaaagggaatgcttacacactgttggtggcagtgtaaattacttccatccctgtggaaagcagtttggagattttgcaaagaactgcaaatagaattaccagttgacccaacaaccccattactgtgtacctacccaaaggaaaagaaattgttttaccaaaaggacataggcacacatatgtttattgcagcactgttcacaatatcaaaatcatgtaatcaacctaggtgcccatcaatagtggcaccagataaagaaaatgtgatacatgtactccaaggaatactacatagccayaaaaaagaatgaaatcgtgttctttgcagcaacatggatgcagcttaggattggcacttaagccataatcttaagtgaattaacccagaaacagaaaatcgaatactgcatgttcttatttataagtgggagctaagcattgtgtacacatgggcataaaagtgggaacaaaagacactggggactccaggaaggggagggagggaggaaagggttgaaaaactgggtattgggtact

SEQ ID NO: 921316 - DNA, 591 bp, Homo sapiens
agaatggctattattaaaaagtaaaaaaatgacagatgttggcaggatgcagacaaaagggaatgcttacacactgttggtggcagtgtaaattacttccatccctgtggaaagcagtttggagattttgcaaagaactgcaaatagaattaccagttgacccaacaaccccattactgtgtacctacccaaaggaaaagaaattgttttaccaaaaggacataggcacacatatgtttattgcagcactgttcacaatatcaaaatcatgtaatcaacctaggtgcccatcaatagtggcaccagataaagaaaatgtgatacatgtactccaaggaatactacatagccataaaaaagaakgaaatcgtgttctttgcagcaacatggatgcagcttaggattggcacttaagccataatcttaagtgaattaacccagaaacagaaaatcgaatactgcatgttcttatttataagtgggagctaagcattgtgtacacatgggcataaaagtgggaacaaaagacactggggactccaggaaggggagggagggaggaaagggttgaaaaactgggtattgggtact

SEQ ID NO: 921317 - DNA, 774 bp, Homo sapiens
gtctgttggagtttactggaggtccactccagaccctgtttgcctgggtatcagcagcagaggctgcagaacagtggatattggtgaacagcaaatgttgctgcctgatcattcctctggaagttttgtctgagaggagtacccagccgtgtgaggtgtcagtctgcccctactagggggtgcctcccagttaggctattcgggggtcagggacccacttgaggaggcagtctgcccattctcagatgtcaagctgtgtgctgggagaaccacttctttcttcaaagctgtcagacagggacatttaagtctgcagtggttattgctgtcttttgtttgtctgtgccctgcccctggaggtggagtgtacagaggcatgcaggcctccttgagctgtggtgggctccagccagttcaagcttcccggctgctttgtttacctactcaagcctgggcaatggcgggcacccctcccccagcctcgctgcygccttacagtttggtctcagactgctgtgctagcaaagagtgaggctctgtgggtgtagaaccctccaagctatgtgtgggatataatctcctggtgtgctgtttattaagcccattggaaaagcacaatattagggcaggagtgacccaattttccaggtgccatctgtgaatgctttctttgactaggaaagggaattccctgacctcttgcccttcccaggtgaggtgatccctcaccctgctttgggtcacgcatggtgtgctacacccactgtcctgcaa

SEQ ID NO: 921318 - DNA, 721 bp, Homo sapiens
gaattggtggctatgcctagtctatatttctgccacttggggtgaacattcatacatttcacgttaaaaatattaattatcagatgctacaccagactctgctagactctttcataaaagttcatataggaatagtattatctttataaagttaaaaaaactgsctttccaaacacatcaggccctatagatgttgaataataaattatatatcttctaccaaaaagtatgaaccaaatcccatgaatgatagtgtggtctattaaaataaaactggactaatagtttgaaatttttgggtcaaatccagcttgtaagtaatgagttgggatcttaataaactttacttcactctctggatttcactttccttatcttgatcaaatatccacaaggccacatgagaaatgtagatgaaggaagccgagaaactgtagcttccgggacagcagaggccacagctaactggaaaacatgggccctgtcttttgtcacatgaacatgcatggtccaagtatcctgaaaaatttgatacaaaacagaaccatatttatatgtaaattttttaggattaaaaaaaacctatgcaagctaacaaaacaggtctgtagacaaactgtgatgtacagactgcaatcctcatctgactgatgggctgtaacatcatcttatactgcattcagactcaaattccattccttctgcttttacttgcagctgg

SEQ ID NO: 921319 - DNA, 721 bp, Homo sapiens
gaattggtggctatgcctagtctatatttctgccacttggggtgaacattcatacatttcacgttaaaaatattaattatcagatgctacaccagactctgctagactctttcataaaagttcatataggaatagtattatctttataaagttaaaaaaactgcctttccaaacacatcaggccctatagatgttgaataataaattatatatcttctaccaaaaagtatgaaccaaatcccatgaatgatagtgtggtctattaaaataaaactggactaatagtttgaaatttttgggtcaaatccagcttgtaagtaatgagttgggatcttaataaactttacttcactctctggatttcactttccttatcttgatcaaatatccacaaggccacatgagaaatgtagatgaaggaagcygagaaactgtagcttccgggacagcagaggccacagctaactggaaaacatgggccctgtcttttgtcacatgaacatgcatggtccaagtatcctgaaaaatttgatacaaaacagaaccatatttatatgtaaattttttaggattaaaaaaaacctatgcaagctaacaaaacaggtctgtagacaaactgtgatgtacagactgcaatcctcatctgactgatgggctgtaacatcatcttatactgcattcagactcaaattccattccttctgcttttacttgcagctgg

SEQ ID NO: 921320 - DNA, 561 bp, Homo sapiens
aactcctaataagagaatcagcttgttctttgaagcttggaagccaggcactgacttctgttctccagctttaaaagtcctggtgtcgttttcgtccaatagaaggctgttttgtctatattgaaaatctgttgtttagtgtagycaccttcatcaattatcttaactaggtcttctggataacttgcagcagcttctgcataagcacttgtttctttgctttgccttgtacttttatgttatggagagagctttttcctttaactccatgaactgacctcttccaacttcaaacttttcttctgtggcttcctcactcctcttacccttcatagaattgtggagccttagggccttgttgtgaattaggctttggcttaaggaagagaatgttgtggctgatatgatctatccagatcactaaaactttctttatatgagcaataaagttgttttgcttttttatcatttgtgtattcactgaagtagtatttttaatttccttcaagaacttttccttatacaacttggctaacaggcacaacaggcctacctttcagc

SEQ ID NO: 921321 - DNA, 405 bp, Homo sapiens
agctggcacccatgccggcacctagagttgcctgccctgcagcagtggctggtgtgtctgactgtgcagtggccagaccccatgtttgctcacacatccgtcaccactccacatctgactccagtctcccttggagccatgggatccaggccggcagcatgagctgagcaaagcctgatggaaacaagcccagtgggcctgagcaaacctcaggcaaaggtgccactggccacaggtttccagccagaaaagygacaccccaaagatctcataatattagtctgtgtacaaatggtccatgaatagcaacatggtggaagagatggacattatcaatgagtgcagtatgtggctgcttctcaccaagtcataggtaacaacccctattgcagatacttttgtcag

SEQ ID NO: 921322 - DNA, 609 bp, Homo sapiens
tcatgtacatggaatgttgaatcagttttagtgcctcgcttttaataatgtgaaacactaaagagatagccaataattaatagacattagaagaaagctcactatgtcaggggccatgatcaaacacataaatgaaggaaacaggaaaaaatgactcagaggaagcagagaatgaaaggaaaaagattaaactgtccttaatatcctctgaatgaaaagtcactacatctatgaaacaagatraaatttaaaaaaatcatagaacaagtaaaagaccttacaaattaaaaaaagggattgtagaaataaaaaaagttcaaaataatagttaaaagatgaagtagaaaaaaaatttagacattaaaataaatatacaaacaaaacacaaatatggaaattatctaaaaattgaagatcagtaagagaggtcaaacctttgtctaaggagtttcagaaggaattcacacaacagagaagaggaaattgcataaaaaaaaaatctcagaagtgtaggacatggccaggcacggtagctcacgcctataatcccagcactttgggaggctgaggcaggtggatcacctgaggtcaggagttcgagaccagcct

SEQ ID NO: 921323 - DNA, 609 bp, Homo sapiens
tcatgtacatggaatgttgaatcagttttagtgcctcgcttttaataatgtgaaacactaaagagatagccaataattaatagacattagaagaaagctcactatgtcaggggccatgatcaaacacataaatgaaggaaacaggaaaaaatgactcagaggaagcagagaatgaaaggaaaaagattaaactgtccttaatatcctctgaatgaaaagtcactacatctatgaaacaagatgaaatttwaaaaaatcatagaacaagtaaaagaccttacaaattaaaaaaagggattgtagaaataaaaaaagttcaaaataatagttaaaagatgaagtagaaaaaaaatttagacattaaaataaatatacaaacaaaacacaaatatggaaattatctaaaaattgaagatcagtaagagaggtcaaacctttgtctaaggagtttcagaaggaattcacacaacagagaagaggaaattgcataaaaaaaaaatctcagaagtgtaggacatggccaggcacggtagctcacgcctataatcccagcactttgggaggctgaggcaggtggatcacctgaggtcaggagttcgagaccagcct

SEQ ID NO: 921324 - DNA, 609 bp, Homo sapiens
tcatgtacatggaatgttgaatcagttttagtgcctcgcttttaataatgtgaaacactaaagagatagccaataattaatagacattagaagaaagctcactatgtcaggggccatgatcaaacacataaatgaaggaaacaggaaaaaatgactcagaggaagcagagaatgaaaggaaaaagattaaactgtccttaatatcctctgaatgaaaagtcactacatctatgaaacaagatgaaatttaaaaaaatcatagaacaagtaaaagaccttacaaattaaaaaaagggattgtagaaataaaaaaagttcaaaataatagttaaaagatgaagtagaaaaaaaatttagacattaaaataaatmtacaaacaaaacacaaatatggaaattatctaaaaattgaagatcagtaagagaggtcaaacctttgtctaaggagtttcagaaggaattcacacaacagagaagaggaaattgcataaaaaaaaaatctcagaagtgtaggacatggccaggcacggtagctcacgcctataatcccagcactttgggaggctgaggcaggtggatcacctgaggtcaggagttcgagaccagcct

SEQ ID NO: 921325 - DNA, 869 bp, Homo sapiens
cactgttccaagatggccgaataggaacagctccaatctacagctcccagcgtgattgatgcaaaagatgggtgatttctgcatttccaactgaggtaactggttcatctcactgggactggttggacagtgggtgcagcccatggagggtgagccgaagcgtggcagggcatcacctcacccaggaagtgcaaggggttgggggatttccctttcctagccaagggaagtcacgacagactgtacctggaaaaatgagacactcccgctcaaatactgcacttttgcaaccatcttagcaaatagtacatcaggagattatatcctatgcaaggctcggtgggtcccacacccatggagccttgctcactgctagcgcagtagactgagatcaacctgcgaggcagcagcccagcaggcggaggggtgtccaccattgctgaggcttgagtagataaacaaagcagccgggaagctcgaactgggcagagccaaccacagcacagcaaagcttgctccctctatagactccacctcttgcggcagggcatagctgaacaaaaggcakcagaaacttctgcagacttaaacatcactgtctgacagctctgaagagagcagtggttctcccagcacagtgtttgagctcggagaatggagagaccgcctcctcaagtgggtccctgacccccatgtagcctaactgggagacacctcccagtaggggctgactgacacgtcatacaggtgggagctcctctgggatgaaccttccagaggaaggatcgggcagcaatatttgttgttctgcaacatttccagttctgcagcctccactggtgatacccaggcaaacagggtctggagtg

SEQ ID NO: 921326 - DNA, 602 bp, Homo sapiens
ttctttttcttgcctgattgtcttagccagaacgtctaatactacattgaataggagtggtgagaaagggcatccttctctggtgccagttttcaaagggaatgcttccagcttttgcccattcgatatgatattggctatgggtttatcataaatagctcttattgagatatgtccatcaatacctagtttattgagagtttttaacatgaagggagttgaatattatcaaaggacttttctgcatctattgagataatcatgtggtttttgtctttgattgtgtttatgtgatgaattatgtttattaatttgcatatgttgaaccagccttgcatcccagggataaggccaacttgatcgtggtggataagttttttgatgtgctgctggattcagtttgccagtattttattgaggattcttgcatcactgttcatcagagatattggcctgaagttttstttttttgttgtgtctctgccaggttttggtatcaggatgatgctggcctcatgaaatgagttaggaaggagtccttcctttttaatatttggaatagtttcagaagggacagtaccagctcctctttgtacctctgg

SEQ ID NO: 921327 - DNA, 587 bp, Homo sapiens
gcaacatttgtccatccgtgccttgagcaaggctgctcaccttggcactgctaaataatcagtgttctgcactctcaagtctcaaccctggtactcatcccctaggtaaccacgagaagctacctcgccttgaagagtttcawgtcctgcttggtaagattggcaatggtcagataccaaactcagaggatacaaccagggttcaggctccttctccctgacagacaagctgtctgtgaccttgggtgaatcactgaatagggtctgagttcactgtctcacctgaaatagaaatactgacgcctgccctaccttccagagcgtcacaagggtccatgcgatgatgctggggccagtctttgtgaaccttgaagacacgtttatgaagtgaaggggttgataggtgatgggcaggtctttccagctaagatacgtttggatttgacagtgcaatacagtgaccttagttacaggaggatggccttgcagagtatccagcagccccagggcttctcatggctacttcccattccctgtagctgtagacggagggaaggctgagggttgctcatttgacaggcatcatt

SEQ ID NO: 921328 - DNA, 587 bp, Homo sapiens
gcaacatttgtccatccgtgccttgagcaaggctgctcaccttggcactgctaaataatcagtgttctgcactctcaagtctcaaccctggtactcatcccctaggtaaccacgagaagctacctcgccttgaagagtttcatstcctgcttggtaagattggcaatggtcagataccaaactcagaggatacaaccagggttcaggctccttctccctgacagacaagctgtctgtgaccttgggtgaatcactgaatagggtctgagttcactgtctcacctgaaatagaaatactgacgcctgccctaccttccagagcgtcacaagggtccatgcgatgatgctggggccagtctttgtgaaccttgaagacacgtttatgaagtgaaggggttgataggtgatgggcaggtctttccagctaagatacgtttggatttgacagtgcaatacagtgaccttagttacaggaggatggccttgcagagtatccagcagccccagggcttctcatggctacttcccattccctgtagctgtagacggagggaaggctgagggttgctcatttgacaggcatcatt

SEQ ID NO: 921329 - DNA, 711 bp, Homo sapiens
agttgtcccagcccatttgttgagaagactattctttccacattgaattgtcttggtacccttgttatgatggttaaatattatgtgtcacttggctaggctatggaacccagtcatttgtgaaggtattttgtagatgtggttaacatctacacttgattggctttaagaaaaagagataaccctgcataatgtgagtcatcctcatccaatcggtgaaggccttcagagcaaaaatgraggtttccctgagaagaaggaattttgcctcaagacagttatgcagaaattctgtctgtattttgcctgcttgcctgccctacaattttcacactcaaaactgcaatatcaacttttgcctactttgcatgccttttctttcttttcttgcctaattgccctgaccagaacttcccatacaatgtcaaatacaagtggcaagagtggacatgcctgtcttattcctgatcttagaggaaaagcttttaatctcttaccattacatatgatttagctgtgtttctttttgtaaattctcttcatcaggttgaggaatttccatcctattcctaatttttttagtgtttttataatgaaatgctgttggattttgtcaaatgccctttccacatctattgaaatagtcatgtggtttttgcctcattttactgacttagtgtataagagaggttgatttttatatgttgaacc

SEQ ID NO: 921330 - DNA, 711 bp, Homo sapiens
agttgtcccagcccatttgttgagaagactattctttccacattgaattgtcttggtacccttgttatgatggttaaatattatgtgtcacttggctaggctatggaacccagtcatttgtgaaggtattttgtagatgtggttaacatctacacttgattggctttaagaaaaagagataaccctgcataatgtgagtcatcctcatccaatcggtgaaggccttcagagcaaaaatggaggtttccctgagaagaaggaattttgcctcaagacagttatgcagaaattctgtctgtattttgcctgcttgcctgccctacaattttcacactcaaaactgcaatatcaacttttgcctactttgcatgccttttctttcttttcttgcctaattgccctgaccagaacttcccatacaatgtcaaatacaagtggcaagagtggacatgcctgtcttattcctgatcttagaggaaaagcttttaatctcttaccattacrtatgatttagctgtgtttctttttgtaaattctcttcatcaggttgaggaatttccatcctattcctaatttttttagtgtttttataatgaaatgctgttggattttgtcaaatgccctttccacatctattgaaatagtcatgtggtttttgcctcattttactgacttagtgtataagagaggttgatttttatatgttgaacc

SEQ ID NO: 921331 - DNA, 701 bp, Homo sapiens
atacctcccgagcctgcaagaccctcttcttcagctttcaaggttaagctcaaagcacacttcctccttccagccctccttgagtgtttataggcagaattagcagttaccagccattccactgccccctttcctaatgttataatcatcctggtcgaataactgaccctaactttccctttacactaaagactgacctccaggaggacagaggtcatttgtcttttcagtttatcttctatagctaatagcttattggtagcttttttttttttttttttttttttttgagacggagtctcgctctgtcgcccaggctggagtgcagtggcgggatctcggctcactgcaagctccgcctccckggttcacgccattctcctgcctcagcctcccgagtagctgggactacaggcgcccgccaccacgcccggctaattttttgtatttttagtagagacggggtttcaccgttttagccgggatggtctcgatctcctgacctcgtgatccgcccacctcggcctcccaaagtgctgggattacaggcgtgagccaccgcgcccggccctattggtagcttttaagtgatgtttatattgaagaaggaaggaagggagggggacagaagggaaggagggaaagaaggaaaatggcagaaaagggaagagaaaaggggggaagacacaaaggagaaagaa

SEQ ID NO: 921332 - DNA, 701 bp, Homo sapiens
atacctcccgagcctgcaagaccctcttcttcagctttcaaggttaagctcaaagcacacttcctccttccagccctccttgagtgtttataggcagaattagcagttaccagccattccactgccccctttcctaatgttataatcatcctggtcgaataactgaccctaactttccctttacactaaagactgacctccaggaggacagaggtcatttgtcttttcagtttatcttctatagctaatagcttattggtagcttttttttttttttttttttttttttgagacggagtctcgctctgtcgcccaggctggagtgcagtggcgggatctcggctcactgcaagctccgcctcccgggttcacgccattctcctgcctcagcctcccgagtagctgggactacaggcgcccgccaccacgcccggctaattttttgtatttttagtagagacggggtttcaccgttttagccgggatggtctcgatctcctgacctcgtgatccgcccrcctcggcctcccaaagtgctgggattacaggcgtgagccaccgcgcccggccctattggtagcttttaagtgatgtttatattgaagaaggaaggaagggagggggacagaagggaaggagggaaagaaggaaaatggcagaaaagggaagagaaaaggggggaagacacaaaggagaaagaa

SEQ ID NO: 921333 - DNA, 581 bp, Homo sapiens
ttttttcatattgtaagtcacctgactctccatataatgttaaaattaacttctaaaaagctacaaaagctcacgcctgtaatcccagcactttgggaggctgaggcgggtggatcatgaggtcaggagattgagaccatcctggctaatatcgtgaaaccccgtctctactaaaaatacaaaacaaaattagccaggtgtggtggcgggcatctgtagtcccagctactcaggaggctgaggcaggagaatggtgtgaacccgggaggcggagcttgcagtgagccgggattgcaccactgcactccagcctgggtgacagagggtgactccgtctcaacaaaaaaaaaaaaaaaaaaaaagctayaaaaaattttttgttgagtttttcaaagggattgcatggaatctattgatcaaatttctgtgaatcaacaacttaattataacgagtcttccagtctatgaacatggtgtatatctctatttaatcctatttatttctttcattaatattttgtattttttagcagacagatcctgcatttattttacttttacctattttgttatttttcctg

SEQ ID NO: 921334 - DNA, 738 bp, Homo sapiens
tttatgttgctgctttgttttttgtttgtttttgtgacagagtattgctctgtcacctaggctgctatgcagtggccccatgccctgctcactgtagccttgacctcctgagctcaagtgatcttttctcttcagcctcctgggtagctgcaactacaggtgtgagccaccacacccagctaatttttgaaatatttttagagatggggtctccctgtgtttcccttgaactccctatgttggtcttgaactcctgggctcaaacaattctctctccttagcctcccaaagtgctgggattagaggggggagccactgtgccaggccacatctcaatgttttaagtgagacacatggtgcaggggaaaaaaaatccctgtctctctcccctaattttttttttttttttttgagatggtgtctcactctgtcgctcaggctgacaccatctgggctcactgcaacctctgcctcctgggcccaagtgatcctcccgcctcctacatcagcctcccgagtagctggtactacaggtgcacaccaccacacccagctatatatatatacatatatatatatayacacacacacacacacacacacacacatatttttgtatttttagtagaaacggaaacaggggtctcaccatgttgccaaggcttgtcttgaactcttgagttgaagagatccacccgccttggcctccccaactgctgcaattataggcatgagact

SEQ ID NO: 921335 - DNA, 590 bp, Homo sapiens
atgtgtcatatagaaacctgagttaaacatttttttcatgaagaatgtaatttcagaagctgtttttatagtacttcaaacgcagtaagctcaagaacccgggatgcaagcttagagaaactgtgtaaatggttagattattaaactaatttgagctcacttttctcatccttaaatcagatagtggtaattactatttcacaagagttttataagcatcaaagaatgtattatactrtaaagctattcacagagttagttactgaaattgttattgtttttaaaattagaataatctcataattcatttttaatttttcagttgggtgaccaagtagaatatctgcaataatgcctattataaataaacatgataggccgggcacagtggctcacgcctgtaatcctagcactttgggaggccaaggtgggcgaatcacttgaggtcaggcattcaagaccagcctggccaacatggtgaaaccctgactgtactaaaaaaatagaaaaattagccgggcatggtggaacgtgctggtagtcccagctactgaggagtctgaggcaggaaaatcacttgaacctgggag

SEQ ID NO: 921336 - DNA, 714 bp, Homo sapiens
tatagccacaataaccctacacatctggtgaaggggcccaaagccggtactctaccctcagctctgctggaggggtcctgcccatcagcagagggaaaaaggacttgtgcacatcagagactcagtttagaaccctaaaccattagaactggaaggggccaccctatccccattttacagatgactaaactgaggccaagcctgtacccaaagagctcctcacacagagccctcttcccccacggactccctctctagacagaccctggctcctcctcctctagctcaggtgggcctccacttagacactaccagcccaagaaaggscgtgggagggacctgggactgcgatggtcatatggaggggaggctcctgctctgtctccttcagagggatgatttgctcctgcctgagccattgcctcttcttggatgctatatttatacctcaatctatgaatttatttcaatcaggatttctaacctgggcactgctgacatattgggctgggcagttctttgttggggttggggctggcctgtgcatcgtggggtgtcacagcatccctgacctccatccactagatgccagtagcaccgccccctccccaagttgtgacaatcaaaattatctctagacattgacgaatgtcccctggggacaaaactgtgcccagttgaaaaccactgacttaaatgggcttcagtgagcat

SEQ ID NO: 921337 - DNA, 714 bp, Homo sapiens
tatagccacaataaccctacacatctggtgaaggggcccaaagccggtactctaccctcagctctgctggaggggtcctgcccatcagcagagggaaaaaggacttgtgcacatcagagactcagtttagaaccctaaaccattagaactggaaggggccaccctatccccattttacagatgactaaactgaggccaagcctgtacccaaagagctcctcacacagagccctcttcccccacggactccctctctagacagaccctggctcctcctcctctagctcaggtgggcctccacttagacactaccagcccaagaaaggcygtgggagggacctgggactgcgatggtcatatggaggggaggctcctgctctgtctccttcagagggatgatttgctcctgcctgagccattgcctcttcttggatgctatatttatacctcaatctatgaatttatttcaatcaggatttctaacctgggcactgctgacatattgggctgggcagttctttgttggggttggggctggcctgtgcatcgtggggtgtcacagcatccctgacctccatccactagatgccagtagcaccgccccctccccaagttgtgacaatcaaaattatctctagacattgacgaatgtcccctggggacaaaactgtgcccagttgaaaaccactgacttaaatgggcttcagtgagcat

SEQ ID NO: 921338 - DNA, 597 bp, Homo sapiens
gaatcctcatgtactgttggtgggaatgtaaaatggtgcagtcactgtggaaaacaacatcgagtttcatcagaaattaaaaatagaggattccattccaagatggccaaatatgaacagctctggtctgcagctcccagcgtgattgacacagaagatgggtgatttctgcatttccaaccaaggtacctgcttcatctcattaggactagttggacagtgggtgcagcccatggggggygagccaaagcagggcggggcatcgcctcacccaggaagggcaaggggtctggggatttccctttcctagcaaagggaagctgtgacagaaggtatctggaaacatgggacactcccacccaaatactgtgcttttccaatggtcttagcaaatggcacaccaggagattatatcttgcatctggtttggtggatcccatgcccatggagccttgcttatcgtagcgcagcagtctgaaatcaacctgcaaggcagcagcctggcagggggaggggcatccaccattgctgaggcttgagttagtaaacaaagtggctggggaagctcgaactgggtggaacccaccgcagttcagc

SEQ ID NO: 921339 - DNA, 750 bp, Homo sapiens
agtcattagtctccgactctaaaatattaaagataaaaactgagaatagaaagaatgtataatgggcaaggtgcagctgtcacgcctgtaattccagcactttgggaggcgaaggtgggtggatcacctgaggtcaggagttcgagaccatcctggccaacatggtgaaaccccatctctactaaaaataaaaaaattagccaggtgtgttggtggacacttgtaatcccagctactcgggaggctgaggcatgagaattgcttgaacctgggagacggaggttgcmgtgatccaagttggggccactgcactgcaacctgggcaataagagtaagacttggtctaaaaaaaaaagaaaaagagaaagaaaaaagaatgtataatggaaagtcacagagtttcagcatctttagctgtaggcattacgtttattccataattgttactacaaccctaagtgccaggcactgtgctaattcagagaacattaaagacaccatgtcttttccctaagagatgaagatgtgtgaatggactagacagccggaaaatacaggagcaaacttgtaatgggaatcaatacaaaactaaactctttgcatttcaaaaacacaaaccccttagcatcgtattaattgccttggcatatattgtctcatccaatcctcatgacacactctgagctacgcatcgctgccctactgcactggcaacaaaactgaggatctgagagacttaacacaccacag

SEQ ID NO: 921340 - DNA, 750 bp, Homo sapiens
agtcattagtctccgactctaaaatattaaagataaaaactgagaatagaaagaatgtataatgggcaaggtgcagctgtcacgcctgtaattccagcactttgggaggcgaaggtgggtggatcacctgaggtcaggagttcgagaccatcctggccaacatggtgaaaccccatctctactaaaaataaaaaaattagccaggtgtgttggtggacacttgtaatcccagctactcgggaggctgaggcatgagaattgcttgaacctgggagacggaggttgccgtgatccaagttggggccactgcactgcaacctgggcaataagagtaagacttggtctaaaaaaaaaagaaaaagagaaagaaaaaagaatgtataatggaaagtcacagagtttcagcatctttagctgtaggcattacrtttattccataattgttactacaaccctaagtgccaggcactgtgctaattcagagaacattaaagacaccatgtcttttccctaagagatgaagatgtgtgaatggactagacagccggaaaatacaggagcaaacttgtaatgggaatcaatacaaaactaaactctttgcatttcaaaaacacaaaccccttagcatcgtattaattgccttggcatatattgtctcatccaatcctcatgacacactctgagctacgcatcgctgccctactgcactggcaacaaaactgaggatctgagagacttaacacaccacag

SEQ ID NO: 921341 - DNA, 750 bp, Homo sapiens
agtcattagtctccgactctaaaatattaaagataaaaactgagaatagaaagaatgtataatgggcaaggtgcagctgtcacgcctgtaattccagcactttgggaggcgaaggtgggtggatcacctgaggtcaggagttcgagaccatcctggccaacatggtgaaaccccatctctactaaaaataaaaaaattagccaggtgtgttggtggacacttgtaatcccagctactcgggaggctgaggcatgagaattgcttgaacctgggagacggaggttgccgtgatccaagttggggccactgcactgcaacctgggcaataagagtaagacttggtctaaaaaaaaaagaaaaagagaaagaaaaaagaatgtataatggaaagtcacagagtttcagcatctttagctgtaggcattacgtttattccataattgttactacaaccctaagtgccaggcactgtgctaattcagagaacattaaagacaccatgtcttttccctaagagaygaagatgtgtgaatggactagacagccggaaaatacaggagcaaacttgtaatgggaatcaatacaaaactaaactctttgcatttcaaaaacacaaaccccttagcatcgtattaattgccttggcatatattgtctcatccaatcctcatgacacactctgagctacgcatcgctgccctactgcactggcaacaaaactgaggatctgagagacttaacacaccacag

SEQ ID NO: 921342 - DNA, 603 bp, Homo sapiens
gcttcctgctgaattggggcatagtaggggtcgtgcaattgagatatcctcaggaggggtggctccaatgtcgttaacatcagagcattggctagcaggctgatccaggggtctgcggtagatcttagtcatggaatgcatctggggttccatttgaggaacaatttgtagttttatagctttgattctggaagagacaaacttaacaaggaggttaaagatacagggattgaaatgtatggcctgtagtgtaggggattagttctttggcatacttcatagkccctgtctatctgcttgatagttttgaaaaggcctggtccagtaaataatactttgaccatctgatgggtgctatcaatgcctaagtgaaaggtttggtgaagggttttaagtaatttccattggttagctgcaggcaaaagtacttttccttctttggtggctagccatcctgaggggaggaaactatgtcctcgtaaggttctccattctatttcttatgctgagtactggggcttggcttcctggaggggattaccccatactaggggtccttctataagcatttctaatggagggtcctgcttgcagctctttttg

SEQ ID NO: 921343 - DNA, 582 bp, Homo sapiens
tccagcttctataaggaacttaaactaatttgcaggagaaaaacaaacaaccccattaaaaagtgggcaaaagacatgaacaaatacttttcaaaagaagacatacatgcagccaacaagcatgtgaaaaaaaaagctcaaaatcactgattattacagaatgcaaataaaaaccgcaatgagayaccatctcacaccagtcagaatggatactattaaaacatcaaaaaataacagatgctggcgaggttgtggagaaaagagaacgtttatacactgtttgtgggaatgtaaattagttcaaccaatgtgaaagacagtgtggcgatccctccaagaactaaaagcaggcttaccattcaacccagcaattccattactaggtataaacccagaggaatataaatcattctactataaagacactggcaagcaaatgttcactgtagcactattcataatagcaaagatatggaattaacctaaatgcctatcagtaacagattggataaagaaaatgtggtacatatacaccatggcatactatgcagccataaaaagaatgagatcatgtcttttgca

SEQ ID NO: 921344 - DNA, 542 bp, Homo sapiens
agaatttcatatccagccaaactaagcttcataaaacaaggaaaaataaaatcattttcagacaagcaaatgctaagggaatttgttaccaccatacctgctttacaagaggtccttaagggagtgctaaacatagcaacaaaaaactgttaccagccaccacaaaagyacacttaagtacatagaccattgacactataaagcttgtacacaatcaagtctatacaacaaccagctaacaacatgtcaggatcaaatcttcacatatcgatgttaaccttggacgtaaacaggctaaacgccccacttaaaaagcacgaagtggcaagttggataaagaagcaaggcccaacctgtatgctgtcttcaagagactcatctcacatgtgatgacaaccataggctcaaagtaaagggatggagtaagatctatcaagcaaacagaaaacaaaaaagagcagagactgctattctaattcagacaaaacagaaattaagccaacaatgatcaaaaaggacaaagaagggcattacataatgat

SEQ ID NO: 921345 - DNA, 542 bp, Homo sapiens
agaatttcatatccagccaaactaagcttcataaaacaaggaaaaataaaatcattttcagacaagcaaatgctaagggaatttgttaccaccatacctgctttacaagaggtccttaagggagtgctaaacatagcaacaaaaaactgttaccagccaccacaaaagtacacttaagtacatagaccattgacactataaagcwtgtacacaatcaagtctatacaacaaccagctaacaacatgtcaggatcaaatcttcacatatcgatgttaaccttggacgtaaacaggctaaacgccccacttaaaaagcacgaagtggcaagttggataaagaagcaaggcccaacctgtatgctgtcttcaagagactcatctcacatgtgatgacaaccataggctcaaagtaaagggatggagtaagatctatcaagcaaacagaaaacaaaaaagagcagagactgctattctaattcagacaaaacagaaattaagccaacaatgatcaaaaaggacaaagaagggcattacataatgat

SEQ ID NO: 921346 - DNA, 542 bp, Homo sapiens
agaatttcatatccagccaaactaagcttcataaaacaaggaaaaataaaatcattttcagacaagcaaatgctaagggaatttgttaccaccatacctgctttacaagaggtccttaagggagtgctaaacatagcaacaaaaaactgttaccagccaccacaaaagtacacttaagtacatagaccattgacactataaagcttgtacacaatcaagtctatacaacaaccagctaacaacatgtcaggatcaaatctkcacatatcgatgttaaccttggacgtaaacaggctaaacgccccacttaaaaagcacgaagtggcaagttggataaagaagcaaggcccaacctgtatgctgtcttcaagagactcatctcacatgtgatgacaaccataggctcaaagtaaagggatggagtaagatctatcaagcaaacagaaaacaaaaaagagcagagactgctattctaattcagacaaaacagaaattaagccaacaatgatcaaaaaggacaaagaagggcattacataatgat

SEQ ID NO: 921347 - DNA, 560 bp, Homo sapiens
attcatggaaaaatgaagttaaaagataaaaataaaaattataaactttagttctcaaaataagttcaatcaagttcaagatacttttgtaagtaatgataccaaccattaagtccatccctaaagaactgagaatcttgagaatttaactgtgtcaatgcagtcttttttacattattaactaaagaaaaatgagtgctttatacagatatttttaagattaggaaacaaagcaaagtcaggaaactatcaacagagtgaacagacaacctatagaatgagagaaaatacttgcaaactatatatctgaaaagggtgttttgaatatatgaggttgtgtatatattcaaaatataygaggtatacaaaccatagcaagaatacaaataacccaattaaaaaatggacaaagggcatgaatatacatttctcaaagaagacttataagtgatatattaaaaaaatacttaatatcagtaatcatcagggaaatgcaaattaaaaccaaataacatgcaataaataaaataaaaccaaataaaagcaaataaaatgaaata

SEQ ID NO: 921348 - DNA, 711 bp, Homo sapiens
tctaaggtgaaagataagttgctgcatttggcccctcctacaactatctggatttgggaggcaacacattcctcatttgggtgtgttatgccagcccatttactgagcgacctgaagtgtgccaattttgagtgaggtccagagccaggctgctgtgcaagctgctctgccacttgggccatatgatccagcagatccaatggtgcttgaggtgtcagtggcagatagggatgctgtttggagcctttggaaggcccccataggtgaatcacagcagaggcctctaggatttgggagcaaggccctgccatcttctccagataactactctccttttragagacagctcttggcctgttattaggctttggtagaaactgaacttttgactagtggtcatcaagtcaccatgagacctgaacttcctatcatgaacttggtgctttcttacccatctagccataaagtgggtcatgcacagcagcattcagtcatcaaatggaagtggtatatacgcgatcaggcttgagcaggtcctgaaggcacaagtaagttacgtgaggaagtggctcaaatgcccatggtctccactcttgccaccctgccttctctcccttagactgccccgatggcctcatgtggagctgacagaggaagagaagactaaggcctggttcacagatagttctgcatgacgtgcaggcaccaccc

SEQ ID NO: 921349 - DNA, 550 bp, Homo sapiens
ttcacagtcatctcttcctctggccatagctgggaaagagtctctgtttttaaggaatcatatgggtgggcccacctggataatttaggatcatctcttcatgttttttttttttttttttcttaagagggagtctcgctctgtcacccaggctggagtgcagtggtgcaatctcggctcactrcaggctccgcctcctgggttcacgccattctcctgcctcagcctcccgagtagctgggactacaggcacctgccaccatgcctggctatttttttttgtatttttagtagagatggggtttcaccgtgttaaccaggatggtctcgatctcctgacctcgtgatccgcccgcctcggcctcccaaagtgctgggattacaggcgtgagccaccgtgccccgcccatctcttcatgttaagtgccttaatttaatcaaatctgtaaagtcccttttgccacataagagaacatgtgcacagattgtggggattcagggccattattctgcccctacgtgtggtcattggctgcctggcagatgacct

SEQ ID NO: 921350 - DNA, 550 bp, Homo sapiens
ttcacagtcatctcttcctctggccatagctgggaaagagtctctgtttttaaggaatcatatgggtgggcccacctggataatttaggatcatctcttcatgttttttttttttttttttcttaagagggagtctcgctctgtcacccaggctggagtgcagtggtgcaatctcggctcactgcaggctccgcctcctgggttcacgccattctcctgcctcagcctcccgagtagctgggactacaggcacctgccaccatgcctggctawttttttttgtatttttagtagagatggggtttcaccgtgttaaccaggatggtctcgatctcctgacctcgtgatccgcccgcctcggcctcccaaagtgctgggattacaggcgtgagccaccgtgccccgcccatctcttcatgttaagtgccttaatttaatcaaatctgtaaagtcccttttgccacataagagaacatgtgcacagattgtggggattcagggccattattctgcccctacgtgtggtcattggctgcctggcagatgacct

SEQ ID NO: 921351 - DNA, 733 bp, Homo sapiens
gctagtgtgcgccactctcacaaacagaagaaagtggtaagtagacactacctcttttttttttgttgtttgtttttgagacggagtctcgctctgtcgcctagactggagtgcagtggcgcaatctcggctcactgcaagctccgcctcccgggttcacgccactctcctgcctcggcctccggagtagctgggactacaggcgcccgccaccaygcctggctaatttagctctttaactagatcatccaggtggacactctgggattcagcgaggaaacaacacaacccacggagaacaaagacgagtaagacaggagagcctcccaccaggagtggtacggagccaggagaggcccccaacatggggaaatggtgagtgagtcagagtgcctggggacccacacttctgccaggggacttttgcaacactgggctcaggagaacacccatgacctctcccaaccggggcctgcagactgacagggagagctaggtggagtctgggtggagccgccactcaggcacatgcagagtgctggtggccttggatcccagggcaacccaacaccagcggctgcagttccggcaacagggaaggtcaggctccttcccacaccaccaagatagagaccacacccacggggctgtgcagtggacaaactgcagggctcacctgcactgcacctcctcagacaaggtccactggcctgggaccttagcgtagccaccc

SEQ ID NO: 921352 - DNA, 731 bp, Homo sapiens
gctagtgtgcgccactctcacaaacagaagaaagtggtaagtagacactacctcttttttttttgttgtttgtttttgagacggagtctcgctctgtcgcctagactggagtgcagtggcgcaatctcggctcactgcaagctccgcctcccgggttcacgccactctcctgcctcggcctccggagtagctgggactacaggcgcccgccaccacgcctggctaatttagctctttaactagatcatccaggtggacactctgggattcagcgaggaaacaacacaacccacggagaacaaagaygagtaagacaggagagcctcccaccaggagtggtacggagccaggagaggcccccaacatggggaaatggtgagtgagtcagagtgcctggggacccacacttctgccaggggacttttgcaacactgggctcaggagaacacccatgacctctcccaaccggggcctgcagactgacagggagagctaggtggagtctgggtggagccgccactcaggcacatgcagagtgctggtggccttggatcccagggcaacccaacaccagcggctgcagttccggcaacagggaaggtcaggctccttcccacaccaccaagatagagaccacacccacggggctgtgcagtggacaaactgcagggctcacctgcactgcacctcctcagacaaggtccactggcctgggaccttagcgtagccac

SEQ ID NO: 921353 - DNA, 625 bp, Homo sapiens
cagcatggctaggataaaaggaggcagaggaatgtggaaggactagactggatcagtcttcaggcctttatcttactcctgtgcttcctgccctcaaacattgaactccaagttctacagcttttggattcttggaccagtggtttgccagggattctcaggtgtttggccatagactgaaggctgtactgccggcttccctacttttgaggttttgggactcggactggcctccttgctcctcatcttgcagacagcctatcgtaggacttcatcttgtgatcgtgtgagtcaatactccttaataaactccctctcggctgtgcgcagtggctcacacctgtaatcccagtactttgggaggccaagagttcaagaccagcctgaccagcatggtgaaacyccgtctctactaaaactacaaaaattagccagccgggtgtggtggcacgcgcctgtaatcccagctactcgggaggctgaagcaggagaattgcttgaacccgggaggtggaggttgcagtgagccgagatcgtgccactgcactccagcctgggcgacagagcaagactccgtctcaaaaaaaaccaaaaaaacaaaaaatctctctttcatatatacatc

SEQ ID NO: 921354 - DNA, 815 bp, Homo sapiens
acacagggcaccaagtccccaggctgcacacatcatggggaccctggacctggcccatgaagccactttttcttcctaggcctctgggctgtgatgagagggactgcagtggaggggctgcagtgaaggtctctgacatggcctggagacttttccccatggtctttgggattaacattaggctccttgctacttatgtgaagttgtgtaactggcttgaatttctccccagaaaattggtttttcttttctatcacatagtcaggctgcaaattttccaaacttttatgctctgcttcccttataaaatggaatgcytttaaaagaacccaagtcacctcttggatgctttgctgcttagaaatttcttccaccagataccttaatcatctctctcaacttcaaagttccacaaatctctagggcaggggccaaatgctgccagtctctttgctaaaacataataagagtcacctttgctccagttcccaacaagttcctcgtctccatctgagaccaactcagcctgaattttattgtccatatctctttcagcattttgggcaaagccattcaacaagtctctaggaattccaaactttcccacattttcctgtcttcttctgagccctccaaactcttccatcctctgtcggttacccagttccaaagtcgcttccacatttttgggtatcttttcagcaacaccccactctactggtaccaatttactgtgttagttcattttcatgctgttgatacggacatacccgagactgggaagaaaaagaggtttaattggacttacagttcca

SEQ ID NO: 921355 - DNA, 671 bp, Homo sapiens
aatgacatgctgagactggaaccccaaaatggtggtaactgagattggcactaaggccttaatttttggtcacactttcacctaagtgagaacctgaccaaaaagggggaatttatttaaacacaattatggaaggttattgttttggactgagctcatgcactaggccccaasagacaaaatcaagcaaaaatggaatgttcatgctaaatgtgatgtaatcaaactaagacttttaaggaaaagcataggttctggaacagacatggttttgtttttctcctataaacagtgttttccagcataaggagataacctccactcagtccttgttccaccttgcaaaacccatagttttactatttcccagtgggtttctagaccaaataagtacatttacaatggtgatagtgacatcaatgactaaagtttcggtcaatctcataaaattgagaaaattaccaaatggggaaattgttaaatcaagtttagcctaaagcttccttctgacatatttaagtttggcctaaaggtttttctgtacatcatgaactatatcaagtggaggtctaaagagaccatagcctacacttgtgccaatcaatgatatttggccaattaaatgtagccaattgttcaaaccatgttcaaataaggcaaatgctgagctg

SEQ ID NO: 921356 - DNA, 671 bp, Homo sapiens
aatgacatgctgagactggaaccccaaaatggtggtaactgagattggcactaaggccttaatttttggtcacactttcacctaagtgagaacctgaccaaaaagggggaatttatttaaacacaattatggaaggttattgttttggactgagctcatgcactaggccccaacagacaaaatcaagcaaaaatggaatgttcatgctaaatgtgatgtaatcaaactaagacttttaaggaaaagcataggttctggaacagacatggttttgtttttctcctataaacagtgttttccagcataaggagataacctccactcagtccttgttccaccttgcaaaacccatagttttactatttcccagtgggtttctagaccaaataagtacatttacaatggtgatagtgacatcaatgactaaagtttcggtcaatctcataaaattgagaaaattaccaaatggggaaattgttaaatcaagtttagcctaaagctkccttctgacatatttaagtttggcctaaaggtttttctgtacatcatgaactatatcaagtggaggtctaaagagaccatagcctacacttgtgccaatcaatgatatttggccaattaaatgtagccaattgttcaaaccatgttcaaataaggcaaatgctgagctg

SEQ ID NO: 921357 - DNA, 671 bp, Homo sapiens
aatgacatgctgagactggaaccccaaaatggtggtaactgagattggcactaaggccttaatttttggtcacactttcacctaagtgagaacctgaccaaaaagggggaatttatttaaacacaattatggaaggttattgttttggactgagctcatgcactaggccccaacagacaaaatcaagcaaaaatggaatgttcatgctaaatgtgatgtaatcaaactaagacttttaaggaaaagcataggttctggaacagacatggttttgtttttctcctataaacagtgttttccagcataaggagataacctccactcagtccttgttccaccttgcaaaacccatagttttactatttcccagtgggtttctagaccaaataagtacatttacaatggtgatagtgacatcaatgactaaagtttcggtcaatctcataaaattgagaaaattaccaaatggggaaattgttaaatcaagtttagcctaaagcttccttctgacatattwaagtttggcctaaaggtttttctgtacatcatgaactatatcaagtggaggtctaaagagaccatagcctacacttgtgccaatcaatgatatttggccaattaaatgtagccaattgttcaaaccatgttcaaataaggcaaatgctgagctg

SEQ ID NO: 921358 - DNA, 671 bp, Homo sapiens
aatgacatgctgagactggaaccccaaaatggtggtaactgagattggcactaaggccttaatttttggtcacactttcacctaagtgagaacctgaccaaaaagggggaatttatttaaacacaattatggaaggttattgttttggactgagctcatgcactaggccccaacagacaaaatcaagcaaaaatggaatgttcatgctaaatgtgatgtaatcaaactaagacttttaaggaaaagcataggttctggaacagacatggttttgtttttctcctataaacagtgttttccagcataaggagataacctccactcagtccttgttccaccttgcaaaacccatagttttactatttcccagtgggtttctagaccaaataagtacatttacaatggtgatagtgacatcaatgactaaagtttcggtcaatctcataaaattgagaaaattaccaaatggggaaattgttaaatcaagtttagcctaaagcttccttctgacatatttaagtttggyctaaaggtttttctgtacatcatgaactatatcaagtggaggtctaaagagaccatagcctacacttgtgccaatcaatgatatttggccaattaaatgtagccaattgttcaaaccatgttcaaataaggcaaatgctgagctg

SEQ ID NO: 921359 - DNA, 626 bp, Homo sapiens
gaagcttactatcctctgattatagccatcctgaggactgcaggatgtatccctaagaggtggcccattctatttccacaagagaatattgaggttttatttctatcacggggcactcccagatcagtgggacttcaaatgggtcagagacctggggcccacttgctgctgattaaactgcttggtctgccagcctatttccctcaactatttcatctgtccctctttggyagtctttacaatgtattattgccacttcctgtgggaggaaaactgaggataatagtctattaattttctgattatatttaataggagacccattagctatgaggaagttcctctttccagatagtggtatgggcatcgaggaccaggaaagcatacttagaatcaatataaaagttaacgtttttcctttgcttaattcgagcaccctcgtgagggtgattagttcaactagctgaccatttgtgcccaaggagagaggtgcactctcaacaacatcattcagagtaactattgcataccctgctctgtgagttcctttttctacaaaaaaaacttccgtccataaacggaatccagtctgggttatctaagggggtttccttgaggttctctct

SEQ ID NO: 921360 - DNA, 790 bp, Homo sapiens
ctgaatctaaacaagagatagacagtctgaaagtatataacaaactgatgaagtggaccttccagaagtctgtttacaagagggctgaggagactttgagagaatttttaacaagatggtcctagatatgactagcttatggacttgatagagaaatcctgggctgtcagaggggagaggtcactctgagtacaacatggtgtctgtagcttgggtttgcctcttggtccaagtccttcagacctcatatttaagttctttggaaagtagagtgttattgaatgaagctctgtaaaactctggagcctaagcatctttgtcttagcatccctccaacccaacatctagaaaagggagacttcatttggatcgttttagttgcaataaacagagctgcactgatttagtsgggggtttactgaaatgatcagcacagtgacaaagaagaaagactatctaggaatccaagaacagaaaccaggcctagggtacactgttcattgtgggcaaaggcagttttaggagcttttggagtagaagttcatgtatcttccttttaatatgataccattattaacatgaaccagatactctctgaatgttggcttccttcttcatcctttaatcattttttgatggtaatggtccggttgcttcattcttggcttcctagttcaaattcttatgcttgaataaccaccagtcttgtttggacagtgttttactccaggctaagtcagaggccattagcaagacaataggctgcccatgactctggggcctgccccag

SEQ ID NO: 921361 - DNA, 568 bp, Homo sapiens
cctcacagtgcagagcagtactttttaattctttttttgagacagagtctcacactgtcatccgggctagagtgcagtggtgcgatcttggctcactgcaacctccaccttctgggttcaagtgattctcctgcctcagcctcccaagtagctgggattacaggcacctgccaccacacccggctaattttttgtatttttagtagagatgaggtttcactatgttggccaggctggtctcaaactcctgaccttgtgatctgcccacctcggcctcccaaagtgctgggattacaggcgtgagccaccgtgccyggcctaattcttaaactttaatgtgcatacaaatcacctggagatggtagaatgcaaattccagttcgtgaggtctggggtggagcctgagagtctgcatttctaataagctccctggcaatgccgatgccaccggacggagtcccgcattgagtaatgagggtgcagagtgtgcctcagggtcccccagagggcctgttaaaacccagactgctgggctctgagaacagagtgtctgattcagttaggtcta

SEQ ID NO: 921362 - DNA, 586 bp, Homo sapiens
acatgctggaaaagctttatttccataaagtggcagattctaggaatctcttgtttagggaggactggtggtgagtcactgctgataactacagagagaggcagaactgctgtcttgaatcagaaagcaatcaaagtaacaagatctaacatgtattgagcaaatgctacattacctctaaccatcacaatcgccctgtgtggtgggtgtctttatgcctattttacagataagataatttagagtcacagagagtcactaatttccccaaagccacgaggtagataaatgacagtgacagaatttgaaccaagataggtctgaatgcaaaaccaaccctyttaacacctggcctagaagctagacaaggtcttaagctgattattacacacaactcccagtgcctgacagtgggaaggagtttatgccatgacctcctggagggatgggacaggtcttattaatattggtggccccaagcctatcacagtacttaccatatgataagtgctcccccccaggagggctgacatttggaccctacattcccacaattcaacttggagactctgactatttgggaagg

SEQ ID NO: 921363 - DNA, 487 bp, Homo sapiens
atctgatggctattccaagagctcatcctgtttttcctctttgcagcatgtgaccttaatgaacacttcctcctctttaaattgctctttccccagcctctggcaaagcacaaatctgctggtttccctctactctccagttgctcatcctcagttcattccttcaatcctcacattcacyctataatctcttctcacgctaaactgccccacccaaccccaagcaaattcatccactctccactcccatgccctcaaaacctcattattctgattccttctgagacttcactctcaaccctagagctatatatctactgtgtcctggacatttccacatggatggcccaaaggcacctcaaacccgatgagtcctaaatgcaattcatctgcccctcatcccctccatcctgaaaaccctgttcctccccagcttccccttcacacagatggcctccatctttgatgcagttgttccaacaaaaaa

SEQ ID NO: 921364 - DNA, 596 bp, Homo sapiens
atgaagtttaaaagcatacaaaatacttctataagctacttatgggtcaataaatatggaggaattgtatgagtctgtgagtgtaaataataccaaattagatttggaggtgactccagcaaataggactggagaggggtacaaaaggccccatatgtgtctgcaatgtgcttttatttaaaaaaaaaaaaactcatgtaaaagtggcaaaacctacagtcaagaatgatgaatggtgagttcttgagtacttacatttttatctataactttcttggtgttcgaaatattttattatggttttaaaaaaagaagaaaggggaggaaaaccattggtcactgatagtaatagatcctctgcttttggcaacttggyccactcatcttcctgcttgaccaattctcctccatctctgagcttatccattcatttttcttttcaaactagaacccacatgcagatgactcccaaatctatatccagtccagacaacttctgttatctaacttctggttaggtatctccactaggatgtttctcagacacctcagactcaacacaagcaaaactcaattgataactaccccctccaact

SEQ ID NO: 921365 - DNA, 748 bp, Homo sapiens
aaaaattagctggggccaggcatggtggctcatgcctgtaatcccagcactttgggaggcccaggtgggcagattgccaggtcaagagattgagaccatcctggccaacatggtgaaaccccgtctctactaaaaatacaaaaattagctgggtatggtggcacctgcctgtagtcccagctactcgggaggccgaggcaggagaatcatttgagccctggaggaggaggttgcagtgagccaagatcgcgccattgtattccagcctggtgacagagcgagactctgtctcaaaaaaaaaaaaaaaaaattagctgggtgtggtggtgtgtgcctgtagtctcagcttcttgggaggctgaggtgggaggatrgcttgagcccaggagattgaggctgcagtgagctatgattgtgccactgcactctagcctgtctcaaaaaaaaaaaaaaaaaaacaaattagctgggtttggtggtgtgtgcctgtagtcccagcttcttgggaggctgaggtgggaggatggcttgagcgcaggagattgaggctgcagtgagctgtgatcatgccactgcactctagcctgtctcaaaaaaaaaaaaatctctctttggttaaaaatgcccagatgggctttctacattaaatcctgacaggcacaagaataaactaagccatttctttctcctgcacccccactgcacagcacctagcgtaggtctccctcttcctaagaaagccgcatgt

SEQ ID NO: 921366 - DNA, 717 bp, Homo sapiens
aaaactaaataaccctaaattgtcagtcattctttcaagtaaaactaaagttgcatacaaaaatcttccagctctgttcacaacttaataagacccggtcttgaagaaaaacacacacacacacacacacacatacacacacacacacatatatatatatttttttaaatttctattatagagacagggtcttgctgtgttgcccaggctggtctcaaactcctggcctcaagcaatttgtcagtcattctttcaagtaaaactaatgttgcatgcaaaaatcttctagttctgttcacaacttaacaagacccagtctcaaagaaaaaaaaatatatatatatatacacagacacacacacacatacacatacatatatataaatatgtatgtatatatattttaatttctattatagaaacagggtcttgctgtgttgcccaggctggtctcaaactcctggcctcaagcgagcctcctgcctcagtctcacamattgttgggattacaggtgtgagccaccagcacctggctgaaacattttcatcacctcagaaaaattctgtgtgtaccccacccttagccccagcaatcaatggtctgattcatttcaccatatagaaatgtctttgtgagtcaaataaaccttttttttaataaattacctagcctcaggtattccattcttgaaatgcaaactaatataatttacttag

SEQ ID NO: 921367 - DNA, 605 bp, Homo sapiens
ttaaattcatctactagacagtttaaatttaatgaccaatttctttttaataatcttagcaggcccccctagagtttcagccatttaaacagaacataacagaaatttccaaagaaataaaaggtgatttctttatacagcttctcacattcaaacacatttgcatacatggcccatctgaaaagctagaactaatgaaattatgaatgagattctcatttttctattctcagaatcctctccctcctggcatctttcaaaactctaatctgaaattattccctccaggaagttatccttgattaatcactcccaactctaattatgtatttcttcattatataaacaagagctgtggatacagttccagttaggttcaccttctctcrttcatatatggatttaaagtttcctgagtcttgggatgtgagtgtgttcttgggcagggatgtcttctgtctctgtgtagccattccttccctctaccctcatccccaggactgctttaagcaaagacaaaagaggaacttatttactggtgtaataaaaaatcctgggccctgcaaattgccagaactgaagtgaaatttgagctctgctgatac

SEQ ID NO: 921368 - DNA, 606 bp, Homo sapiens
actgggtcttgcccaaggcctgctataactactccttggctactacctatgtttgtttaaggtcctgggcctctacagttggttggtaaagcagcagacttgtctccttcccttcagggaagcaagatgccctgggtgggtccagaggtactgtccaaaagtcagggactagagtcaaaaaccttagtctacccggtattctaattgtactgcaacctagctggcaccaaaaacagaagatgcagtccttcccacctttctctcccctttccaaaggcagacgagcctcacttcatggctaccaccaccttaggcccgtggaaastgctgtcagaccactaccaaggtctgctttaggacccagggcttttaagtcagcttgtggtgaaagctgcctggcctgggactcgctcttcagggcagtgggctcccctctggcccaggacaggtccagaaatgtcatctccatcaagtcctgaaattggggaccccaagagcctactttgtactctaccccctcccaccatgtctgagctggcacgctttactttaccttctgcttttctcaaatgggagttttgccccatagctaccacagctggtaat

SEQ ID NO: 921369 - DNA, 576 bp, Homo sapiens
gcaccacttagctgttcctaccactccagaggctgccgtgacagctaatcccactgcaggtgcagcagcagtgcctttcaagtcctttaggctcaacctgctggcaacagcaccagcaggaggaattcactggatggtttgccattccccattttagcagtaaagtawttcctaaaatggggagagaaagcatgatgataaatactgcaacttgacccttcagaaattgatgatttcatcagacaagggcgccactgtatagttattccagtgttaaagacaggcatcaccgaaacaacagaaaacacagttaaaagagcaatatgtcttctgttaatgatgggatgactgtttaaaagaggcctcattttatatgcgttcattcattcatcattcactttgatacttgttgagaatttactgactgcttttgcctttttttttttttttaaatggagtctcgctctgtctcccaggccagagtgcagtggcgtgatctctgctcactgaaagctccacctcccaggttcacaccattctcctgcctcagcctcccaagtagctggaactacaggc

SEQ ID NO: 921370 - DNA, 576 bp, Homo sapiens
gcaccacttagctgttcctaccactccagaggctgccgtgacagctaatcccactgcaggtgcagcagcagtgcctttcaagtcctttaggctcaacctgctggcaacagcaccagcaggaggaattcactggatggtttgccattccccattttagcagtaaagtaattcctaaaatggggagagaaagcatgatgataaatactgcaacttgacccttcagaaattgatgatttcatcagacaagggcgccactgtatagttattccagtgttaaagacaggcatcaccgaaacaacagaaaacacagttaaaagagcaatatgtcttctgttaatgatgggatgactgtttaaaagaggcctcattttatatgcrttcattcattcatcattcactttgatacttgttgagaatttactgactgcttttgcctttttttttttttttaaatggagtctcgctctgtctcccaggccagagtgcagtggcgtgatctctgctcactgaaagctccacctcccaggttcacaccattctcctgcctcagcctcccaagtagctggaactacaggc

SEQ ID NO: 921371 - DNA, 649 bp, Homo sapiens
taatgaagtctccatgagtctcaatagtgggggcaggcatgatgtttctaatttgagagtatctggcttgtgcagaaaaaaggcaaaagacctagaaagactaaactgggattcagtcccagctttgccatgcaatagctgtgtggccttgaacaartcacttaacctctctgtacctcatttcctcacctgtaaaatgtggataattctgccttgcagcattgtggttgggatttgagaaaacataggcaaaacacataccacagctccaggtatgtggtaaatgatagctgttaatattggttgtactgggcatgttagttttctattgctgacttaagaagttaccacaaacgtagtggcttaaaacaacacaaatatatacttttatagttctgtggatcataggctgatagctgttctcaaagggctaaattaatcaagatattggtaatgttgttttcctttctggaggctctatgggagaatttctctccttcttactcaggttattggcagtattcaattccttgtggttgtaggatgggggttccccatttctttgaagactgttacctgagggctgttcctagcttctagaggctacccaccttccttggcttgtggccccctgcctccatcttcagtg

SEQ ID NO: 921372 - DNA, 781 bp, Homo sapiens
gcaaagaggtttgactgcacagagaccataataaatcaattgcttgcagattcatatcaaaaccctgtcagtgagtgtcaagtgacaaaagctgcactggtggcaagctttatagtggcaagtgagttgatgtatttcagttgtacagttgcatctgatggcaggctttaaagtcttgcgtggcccgcccattattttatttaccacttccgtccgcgcttccttcccacactgagcacttgcctcagtcacagttttggtaagcccacaasctaactctagccaaaacgagtaaaaaacaaatgtcactggagagcttctttgaaaatggggaaagacccaatgatgagaaaatggaaaactctaagactgctaataaaaggaaagctgcatgtgaaagaaaatacctagagtcctacttaaattgcaggttcactgcaacaggtgattcacattctccaagcctgctttatataatatgtggcaagcggctatccaacaaacccatgaaaccttcaaaactgcttcgccacatggagaccaagcaccctacataaaaagagaagcctttggagtttttcaaaagaaaaaatgtggacacgaagaacagaagcaattattgaaggccgccacttccatcaaatgtgtctgcattgacagtgtcattcttagtggctaacagcattgctaagctaagaagctctttactactggagaattgaacctgcctgctgctaaggacatttgtcatgaacttttaggagatgctgcagttcaaaag

SEQ ID NO: 921373 - DNA, 781 bp, Homo sapiens
gcaaagaggtttgactgcacagagaccataataaatcaattgcttgcagattcatatcaaaaccctgtcagtgagtgtcaagtgacaaaagctgcactggtggcaagctttatagtggcaagtgagttgatgtatttcagttgtacagttgcatctgatggcaggctttaaagtcttgcgtggcccgcccattattttatttaccacttccgtccgcgcttccttcccacactgagcacttgcctcagtcacagttttggtaagcccacaacctaactctagccaaaacgagtaaaaaacaaatgtcactggagagcttctttgaaaatggggaaagacccaatgatgagaaaatggaaaactctaagactgctaataaaaggaaagctgcatgtraaagaaaatacctagagtcctacttaaattgcaggttcactgcaacaggtgattcacattctccaagcctgctttatataatatgtggcaagcggctatccaacaaacccatgaaaccttcaaaactgcttcgccacatggagaccaagcaccctacataaaaagagaagcctttggagtttttcaaaagaaaaaatgtggacacgaagaacagaagcaattattgaaggccgccacttccatcaaatgtgtctgcattgacagtgtcattcttagtggctaacagcattgctaagctaagaagctctttactactggagaattgaacctgcctgctgctaaggacatttgtcatgaacttttaggagatgctgcagttcaaaag

SEQ ID NO: 921374 - DNA, 717 bp, Homo sapiens
aaataacattaccaggagtttggaagaagttgattccaaccctcatggatgactctgaggagtttaagacttcagtgggtgaagtaacagtgaatgtattggcaatagcaggagaattagaagtggaacctgaagatgtgactgaagtcctacaatttcatgttcaaacttgaacagatgaggagwtccttcttctatggataagcaaagaaagtagtttcttgagatgggatctactcctgttgaaaacgctgcaaacattgttattacaacaaagggtaaaacctggttgataaagcagtggcaaggtttgaaaggattgactccagttttgaaagaagttctactatggatataatgctatcaaacagcgtcacatacaacagagaagtcttgtgaaagggaaagtcaatcgatgtggccaacttcattgttgtcttaagaaattgtcatgtgactgggtgaagtggttcacacctttaattccagctacttgggagtctgaggcaggaagatcacttgagaccaggattttgagaccagccctgggcaacatagtgagacccatctctaaaaaacattttaaaagaaattgccacagccacctcaacctgcagcagccatcaccttgatcagtcagtagctatcagcatcaagctaagaccctctaggctcctagaccttcagtctccacttctagttctgatgctgatgttt

SEQ ID NO: 921375 - DNA, 717 bp, Homo sapiens
aaataacattaccaggagtttggaagaagttgattccaaccctcatggatgactctgaggagtttaagacttcagtgggtgaagtaacagtgaatgtattggcaatagcaggagaattagaagtggaacctgaagatgtgactgaagtcctacaatttcatgttcaaacttgaacagatgaggagatccttcttctatggataagcaaagaaagtagtttcttgagatgggatctactcctgttgaaaacgctgcaaacattgttattacaacaaagggtaaaacctggttgataaagcagtgkcaaggtttgaaaggattgactccagttttgaaagaagttctactatggatataatgctatcaaacagcgtcacatacaacagagaagtcttgtgaaagggaaagtcaatcgatgtggccaacttcattgttgtcttaagaaattgtcatgtgactgggtgaagtggttcacacctttaattccagctacttgggagtctgaggcaggaagatcacttgagaccaggattttgagaccagccctgggcaacatagtgagacccatctctaaaaaacattttaaaagaaattgccacagccacctcaacctgcagcagccatcaccttgatcagtcagtagctatcagcatcaagctaagaccctctaggctcctagaccttcagtctccacttctagttctgatgctgatgttt

SEQ ID NO: 921376 - DNA, 717 bp, Homo sapiens
aaataacattaccaggagtttggaagaagttgattccaaccctcatggatgactctgaggagtttaagacttcagtgggtgaagtaacagtgaatgtattggcaatagcaggagaattagaagtggaacctgaagatgtgactgaagtcctacaatttcatgttcaaacttgaacagatgaggagatccttcttctatggataagcaaagaaagtagtttcttgagatgggatctactcctgttgaaaacgctgcaaacattgttattacaacaaagggtaaaacctggttgataaagcagtggcaaggtttgaaaggattgactccagttttgaaagaagttctactatggatataatgctatyaaacagcgtcacatacaacagagaagtcttgtgaaagggaaagtcaatcgatgtggccaacttcattgttgtcttaagaaattgtcatgtgactgggtgaagtggttcacacctttaattccagctacttgggagtctgaggcaggaagatcacttgagaccaggattttgagaccagccctgggcaacatagtgagacccatctctaaaaaacattttaaaagaaattgccacagccacctcaacctgcagcagccatcaccttgatcagtcagtagctatcagcatcaagctaagaccctctaggctcctagaccttcagtctccacttctagttctgatgctgatgttt

SEQ ID NO: 921377 - DNA, 672 bp, Homo sapiens
gaaaattaataatacatgaggattttcaggaattgctagaagcatgatacccactctttccagatttcctggaagaatactgatttctgtctgacaaataagttcattaagcatgtaatgaaaatttaatttgattttcagacctttgcaaatgtatcctattcatcaacccattcgtgagaaaaaagaatcctttgatggaccttgtgtcctgatggtttgtttggaaatgcagggggtgcaacccaatataaagaatgagctgaagacaagaaagcagcctgagaacctccatgctggcctggtctckgctcctcccacctccacccagcccccacctcctggacggcaggcagggcaaacatctatgctccacccaacacacatgcatgaggagcattctttcttcccacaaggcaaatttcgtttttgcagaaaatgcatctgactcactttctcctctgagggttacgagatgtcctgctataggtcacaagttcagctgagtcatgaatgctgaattgccagctgtgctcatccaatcatatttaacattcagaagtgccatgaaaccccaaacccacaaaaacaacttaactgcagggcccagaccaaatcagtagcagaggggggtttcaatgctgttctgtcagctattttcccctgaacccc

SEQ ID NO: 921378 - DNA, 672 bp, Homo sapiens
gaaaattaataatacatgaggattttcaggaattgctagaagcatgatacccactctttccagatttcctggaagaatactgatttctgtctgacaaataagttcattaagcatgtaatgaaaatttaatttgattttcagacctttgcaaatgtatcctattcatcaacccattcgtgagaaaaaagaatcctttgatggaccttgtgtcctgatggtttgtttggaaatgcagggggtgcaacccaatataaagaatgagctgaagacaagaaagcagcctgagaacctccatgctggcctggtctcggctcctcccacctccacccagcccccacctcctggacggcaggcagggcaaacatctatgctccacccaacacacatgcatgaggagcattctttcttcccacaaggcaaatttcgtttttgcagaaaatgcrtctgactcactttctcctctgagggttacgagatgtcctgctataggtcacaagttcagctgagtcatgaatgctgaattgccagctgtgctcatccaatcatatttaacattcagaagtgccatgaaaccccaaacccacaaaaacaacttaactgcagggcccagaccaaatcagtagcagaggggggtttcaatgctgttctgtcagctattttcccctgaacccc

SEQ ID NO: 921379 - DNA, 590 bp, Homo sapiens
taacttaacatttcctttctaaatctcatctgtgtagctttttttttgagatggagtctcgctctgttgcccaggctagagtgcagcagcacaatctcagctcactgcaacctctgcctcccgagttcaagcaattctccctgcctcagcctcccaagtagctgggattacaggtgcccaccagcattcctggctaatttttgtatttttagtagagagggrgtttcaccatgttggtcaggctggtcttgaactcctgacctcaggtgatctgttcgccttggcctcccaaagtgctgggattacaggcatgggccaccacacccagccatctgtagcttttttatttcttcattgatgtattcattgtgaatacaccacaatttattccattgttaatcaacatttggtctgttttcagtttttttttttctccaattacaaacagtgctggtataaacattcttttccatgcctcctagtaaacagtgcaagaattcctctagggaatatacctaggggtgaaatttctgggtcagagagttcagctactttttgtatttactaaatgatgccaacttattttccaa

SEQ ID NO: 921380 - DNA, 646 bp, Homo sapiens
catatcctttgtgaacaagggtgggagcatttgctttttctcacaacttgattcctacaaaatttagaaaccattaatgagtattcttatttttatgtaatgtaagttcagtaaaaaatctgctctctcagccgggcacagtggctcacgcctgtaattccagcattctgggaggccaaggagggtggatcacgaggtcaggagttcacagactagcctggccaacttggtgaaaccccatctctactaaaaaaaaaaatacaaaaaattagccaggcatggtggcacaygcctgtaatcccagttactctggagactgaggcaggagaattgcttaaacctggggggcagaggctgcagtgagtcaagagctcgccactgcactccagcctgggtaagacagcaagaccccgtctcagggaaaaaaaaaaaaatgtgctctctctttataagcaagatgcaatgggaaacattggttatattactaaggtttggactgaaatgtcatatttaagaatgtgaataaaatgcctggcttcaggagttcccagcttttcagggagtgaatgaaaactgtcacttcctggcaggcccaagaaccttaagactgtaagtaaactccaaaaacctgcctcggtttggcttc

SEQ ID NO: 921381 - DNA, 758 bp, Homo sapiens
ccttatcactacagacatcaaccgaactgcaaagataaacaagagaggaaaaaagagaacaaaggaaattcaaaacaatcaaaaaacaatcaataatataacaggagtaagtcctcaatgtatcatcaataatcttgactgttattaaattcccaaattaaagatatagagtgattgaacggatttctttttaaaaatcccaactatattttgcccacaaaaaactcactttacatgtaaagacagacagactgaaaggtataggatgaaaaagattccaagacagacttaaagrtatgggatgcaaaaaagattccatgcaaatggaaataaaaacaaagcaggggtggggcgcagtggctcacacctgtaatcctagcactttaggagcccaggtgggtagatcacctgaggtcaagagttcaagaccagcctggccatcatggtgaaaccctatctctactaaaaatacaaaaattagccaggtgtggtggtgcacacctgtaatcccagctactcaggaggctgagacaggagaaacgcttgaacccgggaggcagaggttgcagtgagccgagatcgctccactgcataccaacctgggcaacaaagaaagactctgtctcaaataaataaataaataacaaagcaggaagaactatacttatataagattaaattgacttttaaaaaaagaccaaaaaggtcattacataatcacgaaggaatcaatgcaggaagaggatataacaattgta

SEQ ID NO: 921382 - DNA, 628 bp, Homo sapiens
tcttcctatttgaataccctttctttctttctcttgcctgattgccttggccagaacttccaatactattttgaataggagtggtaagagaggtcatccttgtcttgtgtcatttttcgaagggaatgcttccagcttttgcccattcagtatgatactggctgtcggtttgtgataaatagctcttattattttgagrtacattccatcaatacttagtttattgagcgtttttagcatgaagtggtgttgaattttatcgaaggcctttttgcatctattgagataatcatgtggtttttgtcattcgttctgtttatgtgatggattatttttattgatttgcatatatttaaccagccttgcatgccagggatgaagccgacttgataatggtggataagcttttttatgtgctgctggattcggtttgccagtattttattgaggatttttgcattgatgttcatcagtgatatgggcctgaaattttctttttttgttttgtctctgccaggttttggtatcaggatgatgctggcctcataaaatgagttagggaggactccctctttttcaattgtttggaataatttcagaaggaatggtacagttcctctttgtacct

SEQ ID NO: 921383 - DNA, 585 bp, Homo sapiens
gaggtatgaagaagagctgctatcaccttctgaaactattccattcaatagaaaaagagggaattcttcctaactcattttatgaggccagcatcatcctgataccaaagcctggtagagacacaacaaaaaaagacaattttaggccaatatccctgatgaacatcgatgcgaaaatcctcaataaaatactggcaaactgaatccagcagcacatcaaaaatcttatccaccaygatcaagtcagcttcatccctgggatgcaagtctggttcaacacacaaaaatcaataaacttaatccatcacataaacagaaccaatgacaaaaaccacatgattatctcaaaagatgcagaaaaggcattcaacaaaattcaacagcctttcatgctaaaaactcaataaactaggtatcgacggaacctatctcaaaataataagagctacttatgacaaacccacagccaatatcatattgaatgggcaaaaactggaagcattccctttgaaaactggcacaagacaaggatgccctctctcaccactcctattcaacatagtatcagaagttctagctagggca

SEQ ID NO: 921384 - DNA, 560 bp, Homo sapiens
atttgccttaggataaatcacacctttaatttcacctctatgtaatttagatgatatttagttgagactggacttagactttaaagtttatcttgaaaaagttaagaaattggggctactagaattaaattaatttactttgcatgtgagaaggacattaattttgagtggccaggggcaaatgctatggtctgaattttgtgtccccccaaattaatatgtggaaatctaagccacaatatgttggtattaagtgacaggacctttagaaagtgactagatgttgaaactaatattctcatgaatgtgattagttcacttatttaaaaaaaaaaaagagatttaggtgagyttgcctttctccttacccttctatcatctaagatacagcaagaaggtgccatttgtgaagcagagagccctcatcagataatgaatcttctggtgacttaatcttgaactttccagcttttagatctgtgagcaataaacttacgttgtgtataaattactgagtttaaagtattttttataacaacctgaatggactaagacacaaa

SEQ ID NO: 921385 - DNA, 562 bp, Homo sapiens
tggggtttcaccatgttggccaggctggtcttgaactcccgaactcaggtgatctgcctgcctcagtctcctaaagtgctgggactataggtatgagtcaccacgcccagcaagtgccagctaccacttttattccaatgactttccaatctacacagtgctttctcctgacttcaggaagacaccccttccagtccatcttctacccaaacaaccagtgatccaattactttttttttttttttgaggtggagtttcgctcttgttgcccaggctggagtgcagtggcgtgatctcggctcactgcaayctccatcccagattcaagtgattctcctgcctcagcctccagagtagctgggattacaggcatgcgccaccatgcctagctaatttttgtattattagtagagatggggttttaccatgttggccaggctggtcttgaaaacctgacctgaggtgatccgcccgccttggcctcccaaagtgctgggattacaggtgtaagccactgtgcccagcccaattactttttttttaaacaaggcctgaaggaaca

SEQ ID NO: 921386 - DNA, 562 bp, Homo sapiens
tggggtttcaccatgttggccaggctggtcttgaactcccgaactcaggtgatctgcctgcctcagtctcctaaagtgctgggactataggtatgagtcaccacgcccagcaagtgccagctaccacttttattccaatgactttccaatctacacagtgctttctcctgacttcaggaagacaccccttccagtccatcttctacccaaacaaccagtgatccaattactttttttttttttttgaggtggagtttcgctcttgttgcccaggctggagtgcagtggcgtgatctcggctcactgcaatctccatcccagattcaagtgattctcctgcctcagcctccagagtagctgggattacaggcatgcgccaccatgcctagctaatttttgtattattagtagagatggrgttttaccatgttggccaggctggtcttgaaaacctgacctgaggtgatccgcccgccttggcctcccaaagtgctgggattacaggtgtaagccactgtgcccagcccaattactttttttttaaacaaggcctgaaggaaca

SEQ ID NO: 921387 - DNA, 562 bp, Homo sapiens
tctcctttggaaaggctgatcagaaactcacaagaatgcaactgttcatctctcacatatctgtgacctggaagcccccttcccgctttgagtcttcctgtccttgcttcaagttgtcccgcctttccagactgaaccaatgttcttcttacatatattgattgatgtctcatgcctccctaaaatgtataaaactaagctgtgccccgaccacctcgggcacatatcatcaggacctcctgaggcagtgtcatggatgcatcctcaaccttggaaaaataaactttctaaattaattgagacctgtctcagatttttgkggttcacgaggtacataaataacaagcatgggcaagaatgtggaaaaactgaaaccctcacacattcctggtgagaatgtaaaatggtgtagccaatttggaaaacaatttagcaatacttaaaaatgttaaacagttaccacatgaaaacttaagtccacacaaaagcttgtacatgaatgttcatagcagcattactcataatagtaaaaaaatgcaaacaacccaaatgtcaatcaact

SEQ ID NO: 921388 - DNA, 596 bp, Homo sapiens
aggctgagacatgagactcacttgaacccgggaggcagagtttgcagtgagccaagagtgtgccacttcactccagcctgggcaacagagtgagactctttctcaaaaaaaaaaaaaaaaaaaaggaatataatgcatctcaaaagcmggatcttagctgattgtttaatacaatcccagagattaatgacaaggaagatgcctagtcctgaaatgtgtccaaggaatttctctttaatgataattccatattttctgcacttagcaagacacatctacacatcaaactggggattattatgacccaggaaagggacctgggattctttgactgtttcctcttgagggcattagtgtcactgattgggagacagtcctctaaattcagctaaatattggtcaccctctataaggacagtgggacagcgggaagcagactaagtgcaaggattgtgtcttagttgttgtatccgtttttttcccttagtgtatcccaacttctaatgtagtacccatgagctcacagtaagagctcagtacatatttggtaaagagtgaataaaatcaagggatgcattttcaagctctttcggaag

SEQ ID NO: 921389 - DNA, 632 bp, Homo sapiens
gccacggggtggagctgcccaaggccatgggagcccaccttttgcatcagcatgacctggatttggagcatggagttaaaaaaatactattttggaactttgagatttaatgactgtcctattggatttcggacttgcatggggcctgcagccccttcattttggccaatttctcccatttggaagaggtctatttacccaatgcctgtacccccattatatctaagaagtaactaacttgcttttgattttacaggctaatagacaaaagggasttgccttgtctcagatgagactttggacttgaacttttgagttaatgctgaaatgagttaagacgttgggggactgttggaagagtgtggtggtgttttgaaatgtggggacatgagatttgggagagaccaggggtggaatgatgcggtttggctgtgtcctcacccaaatttcatcttgaattgtagtttccataatccccacatattgtgggggggacccggtgggaggtaattgaatcatgggggtagttacccccatgctgctgttctcaggagatctgatggttttctaagggtctttttctcggcacttatccttcctgccaccatgtaaagaaggatgtgtttgcttcc

SEQ ID NO: 921390 - DNA, 632 bp, Homo sapiens
gccacggggtggagctgcccaaggccatgggagcccaccttttgcatcagcatgacctggatttggagcatggagttaaaaaaatactattttggaactttgagatttaatgactgtcctattggatttcggacttgcatggggcctgcagccccttcattttggccaatttctcccatttggaagaggtctatttacccaatgcctgtacccccattatatctaagaagtaactaacttgcttttgattttacaggctaatagacaaaagggacttgccttgtctcagatgagactttggacttgaacttttgagttaatgctgaaatgagttaagacgttgggggactgttggaagagtgtgrtggtgttttgaaatgtggggacatgagatttgggagagaccaggggtggaatgatgcggtttggctgtgtcctcacccaaatttcatcttgaattgtagtttccataatccccacatattgtgggggggacccggtgggaggtaattgaatcatgggggtagttacccccatgctgctgttctcaggagatctgatggttttctaagggtctttttctcggcacttatccttcctgccaccatgtaaagaaggatgtgtttgcttcc

SEQ ID NO: 921391 - DNA, 695 bp, Homo sapiens
caaagtctgatctgagacaaggcaagtcctttctgcctatgaacctgtaaaatcaaaaacaagttagttacttccaagatgaaatgaggttacaggcattgggtaaatgttcccaatccacatgggataaattggccaaaacaaaggggccaatacaagtccgaaacccagcagggcattcactaaatcttaaagcttcaaaataagctttgactccatgtctcacatccaggcatrctgatgcaaggggtggtttcacaaggtcttgggcagctttgctcctatggctctgcagggtacagcccccaaggctgctttcatgggccagagttgagtgtctggctttccaagtgcatggtgcaagatgtcagtggctctaccattctgggatctgcaagacgatggccctcttctcacagctccactaggcagtgctccagtgggaatctgttggggctccaaccccacatttctcctctgcattgccctagaagaggttctctatgagggctctgcccctgcatcagacttctgcctggacatccaggcatttccatacatcctctgtaatctaggcagaggttcccaaacctcagcccttgtcttctatgcacccacaggcccatcgccacgtggaagctgccaaagcttggggcttgcaccctctgaagccatggcctgagctatactttggt

SEQ ID NO: 921392 - DNA, 869 bp, Homo sapiens
cagagatgtggaaagaatagatcatggagaatttctcactggccacagtcaactttattaacttagctcgtgtaataactaccaagcagtaccttggtttgcagtggttttccacgttaaacatgagtattgatgtaattagagaaatgtttatatcttcgtttttattttaataagacaactatttcttggtgccacttgtttttcacagtgtgacataggttcatcatttattattcattgattcaagactacttatagagttcatactatttaataggcaacattgtaggtattgtggatggagcaagtttgagaaaaaaaaaagacaaggtccctgcctttatggtatttatattttaatatggaaggtagataataaaaaaatgtaatgtaattccaagtaatgatttatgttatttaaaaatyaagcaggattttggaagggcgaggtgggaggatcacctgaggtcagcagttccagaccagactggccaacatggcaaaaccccatctctactaaaaaacaacaacaacaacaaaattaactgggcatggtggtggacacctgtaatcccacctatttgagaggctgaggcaggagaatcatttgagcctgggaggtggaggttgcagtgagccaagattgcgccactgcactccagcctgggcaatagagtgagactctgtctcaaaaaataaaataaaataaaataaaataaaataaaataaaataaaataaaatcaagcaggcttcatagatgggatataatgagggcatggcttcagagtgactgattgggaaaggcctttctgaagaagggacatttgaacagaggttttgtaagaggtaaagaaaggaaagaaac

SEQ ID NO: 921393 - DNA, 869 bp, Homo sapiens
cagagatgtggaaagaatagatcatggagaatttctcactggccacagtcaactttattaacttagctcgtgtaataactaccaagcagtaccttggtttgcagtggttttccacgttaaacatgagtattgatgtaattagagaaatgtttatatcttcgtttttattttaataagacaactatttcttggtgccacttgtttttcacagtgtgacataggttcatcatttattattcattgattcaagactacttatagagttcatactatttaataggcaacattgtaggtattgtggatggagcaagtttgagaaaaaaaaaagacaaggtccctgcctttatggtatttatattttaatatggaaggtagataataaaaaaatgtaatgtaattccaagtaatgatttatgttatttaaaaattaagcaggattttggaagggcgaggtgggaggatcacctgaggtcagcagttccagaccagactggccaacatggcaaaaccccatctctactaaaaaacaacaacaacaacaaaattaactgggcatggtggtggacacctgtaatcccasctatttgagaggctgaggcaggagaatcatttgagcctgggaggtggaggttgcagtgagccaagattgcgccactgcactccagcctgggcaatagagtgagactctgtctcaaaaaataaaataaaataaaataaaataaaataaaataaaataaaataaaatcaagcaggcttcatagatgggatataatgagggcatggcttcagagtgactgattgggaaaggcctttctgaagaagggacatttgaacagaggttttgtaagaggtaaagaaaggaaagaaac

SEQ ID NO: 921394 - DNA, 585 bp, Homo sapiens
gtggatcacctgaggtcaggagtttgagaccatcctggccaacatagtgaaactccatctctactaaaaacacaaaaaattagctgggcgtggtggcacatgcctgtaatcccagctactcaggaggctgagacgtgagaattgcttgaacccgggaggtggaggttgtaatgagctgagattactcyactgcactccagcctgggcaacagagtgagactctgtctcaaaaacaaaacgaaacaaaaaaacctttaaaacatatttggatatcaaaaaatatatcttcatatattaaaaccagctccgctaaaagggtttccatatcaacttcgatgaagttaggaattacacaggaagggattctattctgtgaatgttcacatccctacctcctttcctttccagacactaaaagaacaaacaccttgctcttcgagatgagacattttgccaagcagttgaccacttagttctcaagaagcaactatctctttcatgtgccttctgaggaagtattcagagggggaatatcaaatgtctttcccttggactctcccagtgagtgaagtatttgtttatgtt

SEQ ID NO: 921395 - DNA, 585 bp, Homo sapiens
gtggatcacctgaggtcaggagtttgagaccatcctggccaacatagtgaaactccatctctactaaaaacacaaaaaattagctgggcgtggtggcacatgcctgtaatcccagctactcaggaggctgagacgtgagaattgcttgaacccgggaggtggaggttgtaatgagctgagattactccastgcactccagcctgggcaacagagtgagactctgtctcaaaaacaaaacgaaacaaaaaaacctttaaaacatatttggatatcaaaaaatatatcttcatatattaaaaccagctccgctaaaagggtttccatatcaacttcgatgaagttaggaattacacaggaagggattctattctgtgaatgttcacatccctacctcctttcctttccagacactaaaagaacaaacaccttgctcttcgagatgagacattttgccaagcagttgaccacttagttctcaagaagcaactatctctttcatgtgccttctgaggaagtattcagagggggaatatcaaatgtctttcccttggactctcccagtgagtgaagtatttgtttatgtt

SEQ ID NO: 921396 - DNA, 585 bp, Homo sapiens
gtggatcacctgaggtcaggagtttgagaccatcctggccaacatagtgaaactccatctctactaaaaacacaaaaaattagctgggcgtggtggcacatgcctgtaatcccagctactcaggaggctgagacgtgagaattgcttgaacccgggaggtggaggttgtaatgagctgagattactccactgcactccagcctgggcaacagagtgagactctgtctcaaaaacaaaacgaaacaaaaaaacctttaaaacatatttggatatcaaaaaatatatcttcatatattaaaaccagctccgctaaaagggtttccatatcaacttcgatgaagttaggaattacacaggaagggattctattcygtgaatgttcacatccctacctcctttcctttccagacactaaaagaacaaacaccttgctcttcgagatgagacattttgccaagcagttgaccacttagttctcaagaagcaactatctctttcatgtgccttctgaggaagtattcagagggggaatatcaaatgtctttcccttggactctcccagtgagtgaagtatttgtttatgtt

SEQ ID NO: 921397 - DNA, 583 bp, Homo sapiens
caaatgcagtctcaagtcctaggttgccacctatacttctgaccaattggctataaatcggggttcccatgccccacacctgaggttggatttgctagcatagctcatggaactcaggacggcactcatattgaccagttcgtgggaaaagattttacaaaggattacagatgagcagccgaataaacacgcacaggygagttgtgtgggaaggtcatggagcttccatgccctctcccgcatgccaccccccagggacctcagatgtgtggaagcttgtcaaatcttgttcaagagttttaccttcccagaggtcagtaggcggggctgaaagttccaaccctctattcactaggtctttctggtgactgaccccatgctgaggctaggtagggcccccacatggtcacctcctcagcataacttcaggtgttatcaaacggactcattatgagatgatcacttgggaaattttttgtttgtttgtttgtttgagacggagtctcgctctgtcacccaggctggagtgcagtggcccgatcttggctcactgcaagctccacctccccggttcacgccattc

SEQ ID NO: 921398 - DNA, 653 bp, Homo sapiens
ccttaatgtccttttcttgtcccaagatcccacccaggatcccacactacatttagttgtcacgtctgcttaggcgcctcttgactgtggcagttctcagacttcccttttttttgaagagcattggtcaggtatttaaagaatgtccccccacccgttaggatttgtctgatgtcatgagaaaaacatcagacaaatcctaagtgggggaccttctgcaaaatacctgatcagtgctccagtattagcttttgggaggaagaccacagaggcaacatgctattctcatcttaccatatcaaaggtcaacatggcttaggactgcagactgctgatgttgaccttgatcacctggctgaggcggtgtttgtcaggattctccactgaagttacacttgcccccttccatgctatgctctttggaaggaagtctccaggaayagcccacgcttaagggtggggagttaactcttccatctccttgagggcaaagcatctacatgaattatctggaaaccttttgcacaggagatttctcttcccctactaattaacgtattccatcatttatatcactgtgatcttacggctattttatactctgggctaccatccaatattgctttttcttgaattgttccagctttgtgtat

SEQ ID NO: 921399 - DNA, 625 bp, Homo sapiens
aggaaaagggggatgcaagattcagcctctgggcctaagccacccttttgcataagcagtttagcaggaggtcctgagattttttattttcccttacaaaacacagtaaatgtgtttccctgagttctgtgtgctgctctagcaaattaattgaacctgaggaaggcaacatgggaaccccagtttatagccagaattactggttaaaacaacctgggacgtgcaactggcatctgaagtgggggtggaggggcagtcttgaggactgagtccccaaactatgggactgatgctgtctccaggtcaacagtgtcagarctgaattaaattagcagaccttcagtggcatctgctgcagaagcaactgcttacttgctgttggggagagatacccagacatttgctgacagaagtgtgttgtgagagtagagtagagtaggagaaactgcatattttttcacttgccctccttatttcattaacagaaattcaggcaatcggaagaaaacatctccatgtgtcccacgtgttacaggggtgagctgtctgggtgcctctctgaggcctgtcctcctccgtggactgaatcccacctctggaaggaacctgctcctataattattcc

SEQ ID NO: 921400 - DNA, 585 bp, Homo sapiens
aattaagtatttttgagacacagtctggctctgtcacccatgctggagtgcagtggtgcagtcttggctcactgcaacttctgcccccaggttcagtcagttctcctgcctcatcctcccaggtagctaggactacaggtgcacgccaccacactgagttaattttttgyatttttagtggagacacgctttcgccgggctttggcacgtgtgtttcaaattcctgactgcgggtgatccgcccacctcggcctcccaaagtgctgggattacaggcatgagccactgtgcccagcccgatcaaattattttttgtaattagtatataataactgaattctgaatgaataaattttaaggtctaagtgtaaaattaataattgacagtcacagttgaattctcttgaaagaggcactctctgggaattatagtgtctttagagtgctttgagaaagtagaggaagaacatccttagagaaaggttaaattctatactaccactttctattcttaccttccacattaatccatttttgttctatatttcagccaggatcatcttttgaaaatgtaaatgataccct

SEQ ID NO: 921401 - DNA, 565 bp, Homo sapiens
gaatggatcaagcagaggaaagaatcagtgagatcaaagacaggctattggaaaatacacaggagaaaaaaataatgaaaagaaaaatcacctacaagacatagaaaattactacctcagaaagccaattctaagaattactggtcttccagaagcagttgagcaagaacaaggggtagaaagcttattcaaaaaataataatagaacgctttctaaaacttaggaaacagataaatatccaggtacaggaagatcagagaataccaaatggattctagccaaataagactaccacaaggtatataataaactctcaaagttcaagaaacaagaaaggatcctgaaagcagcaagagaaaagaagcaaataacayacaaaggagctccaattcatctggcaacagacatctcaatgaaaaccatacaggccaagagggaataataatgacattttcaaaaagtgctgaaagaagaaaaaaagtgccatataaaaatactgtgcccagcaaagctatccctccaacaaaagctgagaaaattcaccaccatgagacccatcttaaa

SEQ ID NO: 921402 - DNA, 772 bp, Homo sapiens
ttggcattccagtgctctcgggactgggaagccctcatgcccctgtaggctcagaagtctctgctcttgctgcctggcctctccctgctcccagtgcctgcaaagttgaggctgagcccaggcactgttgcaacccggctaagtgtgtgtgcttggggcagtgctgacacaccagccccttgcttgccttggccccctccagactttgggcactgacaagcacaggagggaggccaggggtgctgagggcagcttggcaagggcctgcaggcaccccytggcacaaacagcctgggtgccatgggcaccatggagagcaggttgatggtggcaggaagcagacagaatcctgggaaaaaatggacaggtccccggtgaagccctaccttcaagccaatgctggcctgaggcctgaggcctgaggactgggctgccagttccgtggactggagtgagaacttatggtgctttttctggggcgcccatggctgcttatggaccaatcagcatgcacttcctttccttggaaacccataaaaacccccagatacagctagacttgggcagacaatggggtgacctgactgcaggtaggagctactcactctgggtctcctctcctctccactgagggctgcacagacatcgggatgatctgccagtggaaaggagctatggccattgggtctcctgagaactgttctgctgctcaatgaagctcttctccaccgtgcttatcctccaggtgtctgtgtacctcatttttccagga

SEQ ID NO: 921403 - DNA, 740 bp, Homo sapiens
gccccaagccccagctgaggctgcggaccttggcattccagtgctctcgggactgggaagccctcatgcccctgtaggctcagaagtctctgctcttgctgcctggcctctccctgctcccagtgcctgcaaagttgaggctgagcccaggcactgttgcaacccggctaagtgtgtgtgcttggggcagtgctgacacaccagccccttgcttgccttggccccctccagactttgggcactgacaagcacaggagggaggccaggggtgctgagggcagcttggcaagggcctgcaggcaccccctggcacaaacagcctgggtgccatgggcaccatggagagcaggttgatggtggcaggaagcagacagaatcctgggaaaaaatggacaggtccccggtgaagccctaccttcaagccaatgctggcctgaggcctgaggcctgaggactgggctgccagttccgtggactggagtgagaacttatggtgctttttctggggygcccatggctgcttatggaccaatcagcatgcacttcctttccttggaaacccataaaaacccccagatacagctagacttgggcagacaatggggtgacctgactgcaggtaggagctactcactctgggtctcctctcctctccactgagggctgcacagacatcgggatgatctgccagtggaaaggagctatggccattgggtctcctgagaactgttctgctgctc

SEQ ID NO: 921404 - DNA, 433 bp, Homo sapiens
gctaacctacatcaccctctcaaccagcacctaagccttcaaaaagaaaatgaagaaacttggacaaagagccagtagatcccaaacataacacccatcaggaatggtgtccttgtctctggacagggactctgagacacccattttttattttattttattttattattttatttttcagagacagggtctctccctgtggcccgggctggagtataatgggtgatcatagctcactgcagcctcaaactgctgggctyaagcactcctctcactcttagcctcccaagtagctagaattacaggagtgtgccaccatgccaggctaattttggtttcgttttgtctgttgggtttttttttggtagaggtggggtctcattgttgcctgggctggtctcaaacttctagactcaagtgatcctcccacctc

SEQ ID NO: 921405 - DNA, 613 bp, Homo sapiens
tgcctcttctcaaccctgagcagccaggcaaagaccacctcactccatgcaactcccacgagaaatcttgaagttggtccttggaaggaactaaatcattaagcctttggaaaaaacaagcagagctcaggcaaggctgaagcacaggggctgaaaatagaaataataagagacagccattaccccagacatcttgccttgctccaaaaaaaccagcagcctgacagacaagcaaggggattatgattgcaaggaaaccaaataacctcaggtaaaagacttctaatttctgctgtgggagacttcccaacaaaacgggcaacttgctgccagaccaccctatagggaggcttatcagaagaaacactatgcccacccagaggtcctgattgggmctttaatcattgaattcttactggttaacactaaatgtgaataggcaggaaaaaaaatcactagatatgaaaaatggactctcacgtgaaatggagagaccaaatcaagacagcagaactctggaagatataaaagaaacaatcaatttaaaaatagctgtttaaaaatataattaatatcttcagaaagataagagaacataatgtgtactatgaac

SEQ ID NO: 921406 - DNA, 601 bp, Homo sapiens
accccagctactctggaggctgaggtgggagaatcaatggaacctgggaggcgaaagttgcagtgagctgagatcgcaccactgcactccagcctaggagacagagtgagactccgtcaaaaaaaaaaaaaaagaaaaaaaaaagaaaagggaaattagggctgggtctttggtccccgcctctgaatagtgtgatgtctaacctgctttgaagagcacaagaaagcaacctgacataaaacttaccctacactcaaccctsgtcccgcttccttagagccaaggagttccttcctgcctttgacacagccagcctttgccaaaagcttagctcaagttcagtgtttctccagatgttctgtagtgagtgtctcatgtgtgcatagcattttcccaggtaaaatacagatgattattttcttaatagacctccatagacacaaacactcccattcgacagatgagaaaatggagtctcatatgagtccacatttcctctttaactaaaaacaattgtaaatcagtctcaaattttagaaacgttacaaatgcagtaaaaaacttttcttgaagcatttgacagtaggttgttgtcctgata

SEQ ID NO: 921407 - DNA, 601 bp, Homo sapiens
accccagctactctggaggctgaggtgggagaatcaatggaacctgggaggcgaaagttgcagtgagctgagatcgcaccactgcactccagcctaggagacagagtgagactccgtcaaaaaaaaaaaaaaagaaaaaaaaaagaaaagggaaattagggctgggtctttggtccccgcctctgaatagtgtgatgtctaacctgctttgaagagcacaagaaagcaacctgacataaaacttaccctacactcaaccctcstcccgcttccttagagccaaggagttccttcctgcctttgacacagccagcctttgccaaaagcttagctcaagttcagtgtttctccagatgttctgtagtgagtgtctcatgtgtgcatagcattttcccaggtaaaatacagatgattattttcttaatagacctccatagacacaaacactcccattcgacagatgagaaaatggagtctcatatgagtccacatttcctctttaactaaaaacaattgtaaatcagtctcaaattttagaaacgttacaaatgcagtaaaaaacttttcttgaagcatttgacagtaggttgttgtcctgata

SEQ ID NO: 921408 - DNA, 625 bp, Homo sapiens
  misc_feature 39, 41: n = A,T,C or G
acccaagtcaggataatggatccgggcctctgtgtgctncntgtgcctacgaaggccccccatgctcttgtatgctcagaagtgcctgctcccactacctggcttctccccactgtgggcaccagctccgatctcagagaaacgtggagcaggggtgcacacgctgggggcagtgctgacatgccagccccctgccacctcaggccctggactttgggtgcccagaagtgtgggggagggtgagggggtaatctgaggaggtgcttmgggcaggtcagtgatggcctgcaggcgcccatggcatgagcatcctgggcaccagggatggaggcaggaggcagatggctcctggagggaaggggtggggtccccagtgaggccccaccttcaggctaggtagggcctgaaacctgggggacaggtttccagtcccacagaccagagtggggacttgtgttgccttttctgggcccctgcatggctgcccatggaccaatccccatgcacttcctcccctccaagactcataaaagccccaggctgagctagagcagggcagacatcaggaagaccagttgcagagaggagcaacctatcccagggtctcccctctgagaggagcttc

SEQ ID NO: 921409 - DNA, 717 bp, Homo sapiens
ggccaagagctctctctcaaaaggagactagttatctagttatctgcagaagatggcagggccttgctccaaaatcctggaggccttcactgtgattcacctatgagagcctgccaaaggctccaaacagcatccctakttgccactgacacctcaagcaccattggatctgtcgggtcatatggcccaagtggcaaagcagattgcacagcagcctggacctgttgcagagccttctcctgttctggaccccactcaaaattggcagcctttcgggtcacttgataaatgggctggagtaatacacccaaatgaggaatgtgttactttcaaaatccaaatagacccaccaggtgttgtacatctttcttggttttgggaggggccaaatgcagcaacttatccttcactttagaaagaatatcttgacaggccccacaccactggacccctagaaattttactgagatagaaagtccctgaattttagtaagatttatttctcatcctctggcatggaaatgtctcaccaacaagtccagtgcgtttgctacttctggctcactggatccaatgagcacaatataatcaatgtaatggcccagcgcgatatcttgtagaagcgaaaagtgatcaaagtctctctgaataagattatgacataaagctggagagttgatatagccctaaggtgggacagtaaagatatattgctgg

SEQ ID NO: 921410 - DNA, 717 bp, Homo sapiens
ggccaagagctctctctcaaaaggagactagttatctagttatctgcagaagatggcagggccttgctccaaaatcctggaggccttcactgtgattcacctatgagagcctgccaaaggctccaaacagcatccctatttgccactgacacctcaagcaccattggatctgtcgggtcatatggcccaagtggcaaagcagattgcacagcagcctggacctgttgcagagccttctcctgttctggaccccactcaaaattggcagcctttcgggtcacttgataaatgggctggagtaatacacccaaatgaggaatgtgttactttcaaaatccaaatagacccaccaggtgttgtacatctttcttggttttgggaggggccaaatgcagcaacttatccttcactttagaaagaatatcttgacaggccccacaccactggacccctagaaattttactgagrtagaaagtccctgaattttagtaagatttatttctcatcctctggcatggaaatgtctcaccaacaagtccagtgcgtttgctacttctggctcactggatccaatgagcacaatataatcaatgtaatggcccagcgcgatatcttgtagaagcgaaaagtgatcaaagtctctctgaataagattatgacataaagctggagagttgatatagccctaaggtgggacagtaaagatatattgctgg

SEQ ID NO: 921411 - DNA, 636 bp, Homo sapiens
gcattctggcactggggaaatgaccacaggatgagtctggggaccaactggacccactgtaagctggacctgagctaaaactccattaattacctgacctccgtaagcccctactttaactggaggaacacagtgacattttgggtcccctggaatcaacatcagctcagagccagtgtccagtagtccccaaaatgtctaatcatttccctttccccactgcacagttaccctggtaaaaggctggaggtctccttggggaaggatgggagaaagattcactgcataaattgttggcaatgtagtgagtccttcctcaagggcacccagcctccccttcactcaaggggttctggatctgtaaactsactcaagtatggaaattgattgaaaggctgtgattctctgttttataattcaaattagtcttctgtccattcgacctagaagttttctgtttgtaaaatttaagtaggcatgcagtaggcttcctatcaatttaacttctgggaacactgtgattaattagccaatgccagagctctacacaagtcagactattctgattgctgctttgcctctgctgaccattacagtagctacacccaccttgcctttcacagttgagtgctgcca

SEQ ID NO: 921412 - DNA, 603 bp, Homo sapiens
gactgggccattagcagtcctgtctgaattgaattattgtggttttcttcacagaatgtggtagtaataagagatgccctcagggatctcctgtgtttcagacaggctcatccttacctccactgcgtggtatagccmaatttccccttggtaatcaggattcaccaccccaaccaatatagtaacttccttctttgcctgttgattcagaggtctggggagcccaaagtgactggtggcagccttaactcctagttcagtggaatcctttcgtctcctagtggaagaacacctccctttgaaactaagacctctccaccagcacagcataaggttgtggggacatgaagcaaaatttctctggtggattgctaagtgtaataattagtgatgccactctcattttcaccccttgattgttggattcacgaattctggcaataggagatcaagcaccacatattgagcacatacatatttagatttagaacatatacagcctcctagaggatatttctagagcccagcaaaatactgccacctactaggcactataactgagttttcaaaggccattccactgttttctattatgccatctaa

SEQ ID NO: 921413 - DNA, 656 bp, Homo sapiens
ctccaatcatcctaacattctgggggcccaagatgagaataaaagcgaagttcccataccatgtgtcaattattaaaaagttatcaatccggggccgggcatagtggctcatgcctgtaatcctagcactttgggaggccgaggcgggtggactgcctgagttcaggagttcgagaccagcctgggcaacacagtgaaaccccgtctctagtaaaatacaaaaaaaattagccrggcatggcgccgtgcacggcgccgtgcacctgtaatccctgctacttgggaggccgaggcaggagaatcgcttgaacccaggaggtggaggttgcagtgagccaaggtcacgccattgcactccagcttgggtgacagagtaaggctccgtctcaaaaaaaaaaaaggttaccaatccaatcagttgttagaagataaaacccataatttttctaccttggtaaatacatcttcatcatcatgaaggcaaggtttgaatttagaattctgaggagttgactttcgaaaaaaggcagcacagagagccaggctgcagcctacccccttcacgcctcaccccacttggctttttagtgcacacacgtgtgtgtgtgtgtacaggtgtgtatacccactagccccacatatccacgcccccaccc

SEQ ID NO: 921414 - DNA, 610 bp, Homo sapiens
accagaggtagaaagaggagctggtaccatttcttctgaaactattccaaacaattgaaaaggaggaactcctcctaacacattttatgaagccagcatcatcctgataccaaaacctggcagagatataacaaaaaagaaaacttgaggccaatatccctgatgaacatcgatgcaaaaatcctcaataaaatactagcaaaccaaatccagcagcacatcaaaaagcttatccaccatgatcaagtcagcttcatccccaggatgcaaggctgattcaacatacacaaatcaataaatgtacttcatcacataaagagaactaaagacaaaaaccacttaattatctcagtagacacagaaaatgcctttgataaaattcaacatccctycatgttaaaaactctcaataaactaagtattgaaggaacatacctcaaaataataagaaccatttatgacaaactcacacccaatatcacaatgaatgggcaaaagctggaagcatcatccttgaaaactggcctaagacaaaaatgccctctctcaccactcttactcaacatagtattggaagttctggccaggaaaatcaggcaagagaaagaaa

SEQ ID NO: 921415 - DNA, 558 bp, Homo sapiens
agtcatatttgggttttctatggaagcaatcatattagcttttatatgaattgttttgtttcatcttctacaatctcttctgtctttttattgtctggttgtgttgactaataccttgaatacactggtgaatagaaatggtattattgagtatagtctttttcacagtttttagatagaatgtttctaatgcttcaccacagacaacaatgttggcattctattgttattttactaagagattgctttgttatttgaataaatattgcctgttattaaaagtgtattctgcatgttttcagttatatggattttctccattaatcttttaatatgttgagtcacgtttatagattttccaatgctaagccactttgaattcctgggataaaamaaaactggttatgatatacaatcttctttaaacattactgggctgagcatggtggctcacacctgtaatcccagcactttaggaggctgaggtgggtggatcacgaggtcaggagatcaagaccatcctggccaatatggtaaaaccacatctctactaaaaat

SEQ ID NO: 921416 - DNA, 574 bp, Homo sapiens
agttaaataagcaaataattatattgaagataaacgtatctcagcatgagaacattttacttttagttgaatatttaagtactgagttaaatgtttcatattactagtttctggatcatggattgctttgcattggttcttactagaagtgttagcactgtactagtttccagakgttaaaaaactttgatcatatgcatggccttctagagaaaaatgaaggtaaatactatagtttcatgtatttctgaaatatttagagataaagaggaacttctgcggaatatttaagcttgttgtttcccaaaatgcatctccatgaagcctgagaatctgtcagtcttattacgttaggaaaatgtaaactactttaaggatttaaactagaagagatataatatagtgaatgacttataaagtgattaggaaggctgaagaacaaaaaggagaagtaggggatgctagagggatttttttaaaaagggagagaaatgagagtaaaaggtcagaaagcagctagtacccctaactggaacctatgtgttgcacttgatttttgtgctgtgggtagctc

SEQ ID NO: 921417 - DNA, 574 bp, Homo sapiens
agttaaataagcaaataattatattgaagataaacgtatctcagcatgagaacattttacttttagttgaatatttaagtactgagttaaatgtttcatattactagtttctggatcatggattgctttgcattggttcttactagaagtgttagcactgtactagtttccagatgttaaaaaactttgatcatatgcrtggccttctagagaaaaatgaaggtaaatactatagtttcatgtatttctgaaatatttagagataaagaggaacttctgcggaatatttaagcttgttgtttcccaaaatgcatctccatgaagcctgagaatctgtcagtcttattacgttaggaaaatgtaaactactttaaggatttaaactagaagagatataatatagtgaatgacttataaagtgattaggaaggctgaagaacaaaaaggagaagtaggggatgctagagggatttttttaaaaagggagagaaatgagagtaaaaggtcagaaagcagctagtacccctaactggaacctatgtgttgcacttgatttttgtgctgtgggtagctc

SEQ ID NO: 921418 - DNA, 574 bp, Homo sapiens
agttaaataagcaaataattatattgaagataaacgtatctcagcatgagaacattttacttttagttgaatatttaagtactgagttaaatgtttcatattactagtttctggatcatggattgctttgcattggttcttactagaagtgttagcactgtactagtttccagatgttaaaaaactttgatcatatgcatggccttctagagaaaaatgaaggtaaatactatagtttcatgtatttctgaaatatttagagataaagaggaacttytgcggaatatttaagcttgttgtttcccaaaatgcatctccatgaagcctgagaatctgtcagtcttattacgttaggaaaatgtaaactactttaaggatttaaactagaagagatataatatagtgaatgacttataaagtgattaggaaggctgaagaacaaaaaggagaagtaggggatgctagagggatttttttaaaaagggagagaaatgagagtaaaaggtcagaaagcagctagtacccctaactggaacctatgtgttgcacttgatttttgtgctgtgggtagctc

SEQ ID NO: 921419 - DNA, 707 bp, Homo sapiens
gtccaagtcataggcaatcagcaatctcgatagactgatggatcgtggacagaagctctaacgctgtttccattcatttagcaacagcaaatcaatccactttcccagcatcctgcaactttatcgaactcggcatcccattgcaggatacgcccccgaactctccttaattatatatttcgctatttgcaatcaggactcggcgatgcagtcctgacatcagagaatgggcgtcttctcagaaggccgcagtagcggcagcagctttcccgccctactgagcgctcactacaagcgggctctgggctaggcgcgccacccgtgcaagtccccggggagcggcggtgcaccctccgtcccgcgcgctcgcagccattgtagggtgggcgctcgccaggcagggtgccgacacgccctctccgcgctgcgacgggcggccgggggaggagagggtgcgctgtgcgcaccggagggagaggckccggcccagcgccgcctgcccgccagcagaccagcaggctcctctttgcggcgggtgccccacgcgcctctcgggcgcgcgctcccagccccgcccgcgtgcggcggccgcacggccgcgagagcgcgcctccgcttggcgggcacggccgcgagcgcgcgtgcgcccctccgaacgtccccgggagcccagccagagcgagcgccggggccgggcgcgcaggagt

SEQ ID NO: 921420 - DNA, 600 bp, Homo sapiens
tggtttgttcctccacatactttatcttattcattagctgcattttaaaatgaggaaaatgaaattaaccagggggggctaaaactatttttccccagtggaagaacctcccccaagaatccagaaaacaggctgggggcagtggctcatgcctgtaatcacagcactttgggaggcccgaggtgggcggatcatttgaggccaggagtttgagcccagtctggccaacatggcgaaaccctgtctctactaaaatacaaaaattagccgggggtggtagcatgcctgtgatcccagctacttgggaggctgaggcaggagaatcgcttgaacccaggagatggaggttgcagtaagccaagatggygctactgcactccagcctgggtgacagagcaagactgtcccaaaaaaaaaaaaaaaaaaaaaagaaaaaacaaacaaacccagatacaggcaaggttgcagggaaaagggaacccttacatagtgttggtaggagtgcaaattagttcaaacattgtggaaagcagtatggcaattcctcaaagagctaaaagcagaacaaccatttgacccagcaatcctattattactggg

SEQ ID NO: 921421 - DNA, 640 bp, Homo sapiens
gaaacaaaaacacgatctgatgtggggaaatgcatcaaagaagggccagacccctggagaggccagagtgcaggggaaggatgtggaggacctgtgtctgagcacgctgcctgcttcccctccagcttggctagcccagccagccaacaagcctgcctgcccccaagaaacctactcctggctaagacyacacttagggaattctgcccatgcaacaacaatacagcaaaaacttaccacccctaccttatgcgagagagcacttcttccaatgtgctctccccattatcccattcttccctcccacgccccatggggtaaagcaggcagacactgtcctccccccattatcccattcttccctcccacgccccatggggtaaagcaggcagacactctcctcccaccattatcccattcttccctcccacgccccatggggtaaagcaggcagacactctcctccccccattatcccattattccctcccactccccatggggtaaagcaggcagacactgtcctccctttccagacgtggaagcagaggtggagccgtcatacaactggtctagagcagagccaagttcagaggcgtgatgtctctaggcttttctatgagagccttttgtgttataa

SEQ ID NO: 921422 - DNA, 663 bp, Homo sapiens
ggtcttgcctggatccactcacatggatatagttagcggttgggctgatgggctggatgggctaagatggtttcactcacatgtcaggcagttggtggctgtcagcaaggagccatggctctacttcgtgtggtctctccagcaggctagctcagaactgttctcatgacaagtcaaggcatttgattcctagggttagaactcaaacctcacttccatcacgttctattggtgaaaacaagtcagaagtgcagcatagattcagaaggtggagaaatagattctacctcttgatagaagctgtaaggagttcatggtcatttaaaatctcccaaataggctgggcgcagtggctcatgcctgtaatcccagcactttgggaggctgaggtgggtggatcacgaggtcaggagattgagaccatcctggctaacatggtgaaacccagtctctactaaaaatacaaaaaaaaaaaraaattagctgggcgtggtggcaggcacctgtagtcccagctacttgggaggctgaggcaggagaatggcgtgaacccaggaggcggagcttgcagtgagccaagatcgcgccactgcactccacgctgggcgacagagcgagactccatctcaaaaaaaaaaaaaatctgccaaatagaggttactc

SEQ ID NO: 921423 - DNA, 690 bp, Homo sapiens
attatcagtaggaccatgatgcccacctgagccttaaagccagcaagttttattaaggatttcaaaaggggagggggtgcaagaacagggagtaggtcacaaagatcacatgcttcaaagggcaaaaaggaaaacaaagatcacatgcttctaagggaaaaatcagaaactcctcataagggtccaacaaagatcacaaggcaaagggcaaaagcaaagatcacaaggcaaagggcaaaagcagaattactgataagggtctaccttcagtggtgcacatattgtcttgataaacatcttaaacaacagaaaacagggttcgagagcagagaaccagtctgaactcaaatttaccagggtggagtttcccaatcctgagggtactgcaggagaccagggtgtatttcagtccttatctcaactgcataagagagacactcccagagcggccgtttatagacctccccctaggaatgcagttcttttcccagagtrttaatatcaatattccttgctaggaaaagaatttagcgatatcttccctacttgcatgtccgtttataggctgtctgcaagaagaaaaatatggctctttttgcccaaccccgcaggcagtcagaccttatggttgtcttcccttgttccctgaaaatcgctgttattctgttctttttcaaggtgcactgattt

SEQ ID NO: 921424 - DNA, 516 bp, Homo sapiens
ccagggtggagtttcccaatcctgagggtactgcaggagaccagggtgtatttcagtccttatctcaactgcataagagagacactcccagagcggccgtttatagacctccccctaggaatgcagttcttttcccagagtgttaatatcaatattccttgctaggaaaagaatttagcgatatcttccctacttgcatgtccgtttataggctgtctgcaagaagaaaaatatggctctttttgcccaaccccgcaggcagtcagaccttatggttgtcttcccttgttccctgaaaatcrctgttattctgttctttttcaaggtgcactgatttcatattgttcaaacacacatgttttaaaatcaacttgtacagttaacacaattatcgtagtggccgtaaggtgacatacatccccagcttacgaagataacaggattaagagattaaagtaagacaggtgtaagaaattatgaagtattatttgggaactggtaaatgtccatgaaatc

SEQ ID NO: 921425 - DNA, 751 bp, Homo sapiens
tggagggtgagcaaggtgaagaggtgctttattgagcaatagtgcagctctcaggagacctaaagtgggtaactcctttctgcaggcaggttgtcccgatgagtgcagctctcagcagagaggagacctggagtgggtagttcctatccataggcaggttgtcccgatgtctctgtgagtctggttgagtccagggtttttacaggcttcagaagggaggaagtgtgtgctgattgtttcatgggaggccatgggtgggcccggaaaaaacaccattaagttctcgctctgggctgtcgactctacccagaactgacagcctggccctgtgctttaggccgtccatggcttgaatgtggggcttcaccagggacctgcccctttccacccaggagtctatctgcctcctgccaccatctacatgtcatccatggcacccaggctgttccagccgaggcctggcaggccagcaggcccaggctgagccacactcagccccacctcagcctccctcccaggcttgtttgtgcccagagtccggarggggctgaggcggcagggggctggcatatcagcaccatccaagcatgcgcacacctagccgggtcacgagagtacccgggcttggccacaactttgctccgtaattggagcaggcactgggagcaggaagacgccaggcagtgggagcaggcacttcagagcctgcagggcagggggcttcccgggcctctgagagtgcagggatgct

SEQ ID NO: 921426 - DNA, 651 bp, Homo sapiens
aagctggagaaaatgtttgacttcaagtgacaagattcttgcatttcaaaggtaacggagtatgtctttggaaataatcatgttacaacagaaaaccttaaaatgtccaccttttgcttgggcttgatatcaagtgaggaaagctattggaaagtctcaagtctgagtgccacatggaaaaactgtaggagataattaaatatttttcctccctttcaacaccagcatatgattaggtaagggatcctttctctgaatctctgctcagcctgagaatctgacttcaagaaaagagctttataggtacaatctgactgtacaccagagacagacttaaygctctacccccagaaaagttgtggatttctgcaaagtatcctgtcattcatttgaaagcagtaacacttcactgcactttcaactttctacatgtgtaagcaagcttttttttttaacatgcatgaagagcaaaggcagaaattgtctaatttcctgagaaaaagaatccatgtgagcttatcttaaattcaatctaaaattgagtatttgtaaagggaggacaaaaaaaaagaaaacacattttacagtcaagaggtgtatttcatcctttccttttacttcaacaacagcattgtaatgcatatacatagg

SEQ ID NO: 921427 - DNA, 607 bp, Homo sapiens
taagtaacgaggagccgaatgttaatctccaagacaatggggaaaatatatccagagcacgtcagaggttttcacggcagcccatcccatcacagccccagaggcctagcagaaaaagtggtttcatgtgccaggcccagggtccctacgctgtgtgcagcatagggacttagtgccttgcgtcccagccacttcaaccatggctgaaaggagcaacagtagagctcaggctgtggcttcagagggtgcaagcgtcaagccttggcagcttccatgtggtgttgagcctgccagtacacagaagtcaagaattgaggtttgggaacctcctcctagatttcagaggacgtaaggaaacgcctggatgcccaggcagaagttcgctgcaggtgtggggctgtcatggagaacctctgctagggcagtgcagaagggagatggggggtcagagacccsacacacagtccctactggggcactgcctagtggagctgtgcccagaagagggccaccgtcctccagaccccaggatggtagatccaccaatagcttgcgccatgtacctcaaaaagctgcaaacactcaatgccagcctgtgaaaacagcc

SEQ ID NO: 921428 - DNA, 681 bp, Homo sapiens
ttccttctacaactcggtgtctgagaggttttgtctgcggctagtcctgctacatttcttggttccctgactgggaaacgaggtaactgacatatggccgaggcagccccttaggcagcttaggcctgccctgtggaacatccctgcagggaactctggccagcctgagtgacgtgatccaaggagcgctcccaggtagaaaattgccctggtggaacgcctcaccagagcagcgcatagcaggccccccatggaggattaacacagtkgctgaacaccaggaaggaaatggcacttagagtccagacatctgaaacttgataagactagtctttggaacttgccccactccatctgagtggaagcgtggcctgatcacccacggtgtgcctgtattggcacttttgttctggttttgacttggcctgacttggtaagtctagtctttggaacttgccccactccatctgagtggaagcgtggcctgatcacccaccgtgtgcctgcattggcacttttgttctggttttgacttgacttgaattgctggatactttggttttggttttgacttggcttgaattttttggttctaggattttgaatttcatgattttggtttggtataaatggtaaaagtgtgtgtgtgccctctttacccgttctttgtcttgtggtgag

SEQ ID NO: 921429 - DNA, 681 bp, Homo sapiens
ttccttctacaactcggtgtctgagaggttttgtctgcggctagtcctgctacatttcttggttccctgactgggaaacgaggtaactgacatatggccgaggcagccccttaggcagcttaggcctgccctgtggaacatccctgcagggaactctggccagcctgagtgacgtgatccaaggagcgctcccaggtagaaaattgccctggtggaacgcctcaccagagcagcgcatagcaggccccccatggaggattaacacagttgctgaacaccaggaaggaaatggcacttrgagtccagacatctgaaacttgataagactagtctttggaacttgccccactccatctgagtggaagcgtggcctgatcacccacggtgtgcctgtattggcacttttgttctggttttgacttggcctgacttggtaagtctagtctttggaacttgccccactccatctgagtggaagcgtggcctgatcacccaccgtgtgcctgcattggcacttttgttctggttttgacttgacttgaattgctggatactttggttttggttttgacttggcttgaattttttggttctaggattttgaatttcatgattttggtttggtataaatggtaaaagtgtgtgtgtgccctctttacccgttctttgtcttgtggtgag

SEQ ID NO: 921430 - DNA, 520 bp, Homo sapiens
gattatatttcctgtttcagctctaaggggagtagaggcaggataggtgctcaagacagggatgcctggtatactacttatgtctccctatcttagttcattttgcccctgacttctggaattctatccccgtccccgttctgaagcttaaccctgcccccaaccccagattccttcatcaagcaaacttttttaggtccttgattatcagatttagtgttgcctcctcagaagcattctctgacttcaaaggttggaaatctgtatctcttttatgctcccatagtgttctgcacaggattttgtcaatgaataagaactttatactgtaatgacctctccatgtgcctatctcccctagtagcccacaaatgyctcaagagcagaggtagagtcatgttcatctctgaatctccaatgcccaaccgacaaatgacacataaaaagagatcagtaaatgtaagtttaactgaattaaactgtaattatctgagcaataacatgatccgcataatcagaa

SEQ ID NO: 921431 - DNA, 555 bp, Homo sapiens
caagctatagagcaatcacttgctggagagatttgtgtaactaaatggagccaagtgcaaatacccaagaccgtcgaaaaaggcctcaaaggtatttcagaaacctcctaaaaagctcctcctgttgaaatgagagtgttctcttctccccctcrcaggggtgtggctggctttttcagtgctcccctgctcaaacccatagaggggagcatgcagacaggcaggtcatggggagtgtttgggggctctgaccccactgcagtatctagggttgtttacagctcccaaaaccccagtgggcttgtgttacagtgtgctcttttcagcttagctgtctgcaggcagcttgtgttaatcagctcaactagaccctctaccttatcacaagggcagagggctttctgtatcccaggttcttgccctagtgtatcagaaaaatcggatcacatgtgggcttggaggatgggtgcaaggttttatagagtggtggaggtagctctcagtgaaatggatggggagccagaagggggatggaatgggaaggtggtcttcccc

SEQ ID NO: 921432 - DNA, 801 bp, Homo sapiens
  misc_feature 762, 763, 764, 765, 766, 767, 768, 769, 770, 771, 772, 773,774, 775, 776, 777, 778, 779, 780, 781, 782, 783, 784, 785,786, 787, 788, 789, 790, 791, 792, 793, 794, 795, 796, 797,798, 799, 800, 801: n = A,T,C or G
tagaatatttttgttaaactcgaccttttctacttcatcaagtttctctaaagtggggcttttttctagtctatctactatttaaaacacttgaaactgtagtaggataatactggatgacagtaattcatgatggaaaaggaatgagtaaaattcaaaggctgatttgcaatggattggtagagaacatatactattacataaacaatagtgtatacttttcagattaaaataatagtgtatatttttcatctccatgagatagaaaacaaatgatactatataagtgaattatgttgtattattacacatatattacattatgcaccttgagtattatatataattcccatattattagtatacttcatgaaaacccattaattaaatgaaaagagatcaattaatattgcatgtctcagcaaaaatgtgttctaggagtttgaacatactccccacccccttcgtatcattaacctyccctttttcacttgtgtgacatttttcctggagactgtgtagcaagaagccctgtcccagcaagcacagcatctgtttgaaggacatccagggacgaacagccaattgtgccacggccagatttgtgctccactctctcccaagggaattgaagagggagacaggcatgtgtgtgactgcccatctgccagcctcgctgactcgctagctaggtgtctgccatggtgccatgctgaaggttccttgaaccagtgctcagaagataaatgctgtttcttttgnnnnnnnnnnnnnnnnnnnnnnnnnnnnnnnnnnnnnnnn

SEQ ID NO: 921433 - DNA, 609 bp, Homo sapiens
ttaggcagttcctcaaaaagttaaatgttgaattaccataagacccaacaattccacttctaggtatgtaaccaaaagaattgaaaacacatgtttaaaaaaaacttgtatatatgttttcaccatagaaatatttacagtagccaaaaggtggaaacaactcaaatgtccatcaatggatgaatggataaatataatgcrgtatatccatacaatagaatattagtcagtcacaaaaggaatgaagtactgaaccataccacagcatactgaactttgaaaacattatgctaaatgaaacaagccagacacaatgggacacatattgtatgaaatgtccaggataggcaaatccatagaggcagaaggtggattagtggttgtcatagactggagaaggggtaagggagtgactgcttcatgggtagagcatttccgtttgagatgatattcttctccaactagatagtggtgatggttgtacattgtgagtgtactaaaggccactgaactgtactctttaaaatggtttaaatggtgagttttgtgttgtgtgatttttttttaccataattaaaaacaaaaagctgcatgacagcaagtgaggcc

SEQ ID NO: 921434 - DNA, 581 bp, Homo sapiens
agcccccattctaaacataaaataacacagagaaattgaacacttctgatgcactgaatgtaaccatggcaacaacaacagcaaaaaaaaccatacccaacaggagtagctatgtcaatatcagagactttaaaacaagagatatcaccagggataaaggaaaacatgtaatagcaaaaggttaactttccaagaagatataacaatcttaaatgtatatgcacctatcaagagagcttctaaatataagatacaaaatctgatagaactgtaaaaagaaatagacaactctacaattatagtcagacacttttatacttttcactcagtaagtgatagcgcaagtggtcagaaaatcaccaaggctacagaaaagctgaataccactatcaaccaacttggcctaattaacatttggccrgtccagtggctcatgcctgtaatcccagcactttgggatgccaaggcaggcagatcacctgaagtcaggaatttgagaccagtctggccaacatggtgaaaccctgtctctactaaaaattcaaaaattagctgggcatggtggcgcacacctgcaatcc

SEQ ID NO: 921435 - DNA, 632 bp, Homo sapiens
cagagaaatgaaagaacaatagaaattatccaatctaagaaacagaaaaaaaatatattgaaaaaggacgatcaaagcctcaggaatctgtgagattatgaaaaacacttaacatttgtcatttgttaaattctgagtcacaagagtctcagaagaagaagagaaacagggttaatatgaaaaagtagttgagaaaataatggctgaaaaaaatccccaaacttggcaaaagtcatgcatttacagatttaataagctagactaaccttaacaggataagcccctcaaaatacaaaactggatacatcacggtcaaawttctgaaaactaaacaaacatttgaaaacctcaagacagaaatgacaccttgccaacaggagcaagcaaattttgatgaaagcagatttctcattaaaaactatggaggcttgaagaaagtgacatttttcaagtgctgaaagacaagaactgttagctcagaacgttatattcagtgaaaatatccttgagaatgccttgatgaagaaaaactatttttttttgccagcagacctacaataaaaattagctaaagaaagttttataagtagaaaggaatgacaaagtaaactgagaatatcagaaaggaagaa

SEQ ID NO: 921436 - DNA, 630 bp, Homo sapiens
ctcaatggctaatgaagtagaatatcttttcatgtgcttatttttcatctctatattgtctttgttgaaatatcctttatttttagctcacatcttccaatacataaaaacaacgttattccattttagtattgtattttttttgttttactgttgtttttaaagttctttatattgtctagatattagtactttgtcagatatgtggcttgcaaatgtttttcccagtatgaaatttgtgtttttattctctaaacaggaacattcacagaggcaaagattttaattttgatggcagccatcaaaattatcatttttgtcctttaattgattatacttttgrtgtcaactttaaaagctcctttcttagccctaaaccccaaatattttcttctattttttctaaaagttttatatctttacattttgcatttagatccatgatccattttttttgttaatttttgtataaggtatgaaagttaaatgaaagttttattgttgttgtcgttgcctaaggatattcaactgaattggcatcatttgatgaatgactatctcttcttcactaaaatgattttgcgtagatctatttctgggtagtttattctgctccattgatccatgtgt

SEQ ID NO: 921437 - DNA, 625 bp, Homo sapiens
cctatttagcatttatttgaactgaaatttacatgtttggcttcagtccaagaactagcattttgtgagagagcctgaacccagcttattttaagtatataataatgacaactagagggactttttgtctagcatccttcaatttcccagaaagggagaaagggatgtaaacttacctgcttgccccacaaagctattactatcacatgtccagccatctctctcagtgatrtttttcagaaagcaaaggtttaaatgagtagagaggaaaaccttacctgaacaaatgacaattttacaaatgttgagttacatgagttctcaggtgtctgagaagctgggtaaatatgtaccaagcctgaacaatgatatagctgtggtttttccatttgagccagaagatgatggacatctctggatggcactgtatccagtggttgctcccatttcttttcacaaaggaatcacaatgaaaaggcaaaaatggcattttcagtgccttgtttgacagggttagggaggtgggatgggatggccatcctgaccacaggggcatgggaaggagagtggtaaggaggaagaaaacagaattgtacacctgaacacagagtcaggaagcacttgt

SEQ ID NO: 921438 - DNA, 534 bp, Homo sapiens
gaaccactgctctcttcaaagctgtcagacagggacatttaagactgcagaggttactgctgtctttttgtttgtctgtgccctgcccccagaggtggagccaacagaggcaggcaggcctccttgagctgtggtgggctccacccagttcgagcttcccaggtgctttgtttacctaagcaagcctgggcaatggcgggcgcccctcccccagcctcgctgccgccttgmagtttgatctcagactgctgtgctagcaatcagcaagactccatgggcgtaggaccctccgagccatgtgcgggatataatctcctggtgcgccattttttaagcccgtcggaaaagctcagtattagggtgggagtgacccaattttccaggtgccatctgtcacccctttctttgactaggaaaggaaactccctgaccccttgcgcttcccaagggaggcaatgccttgccgtgcttcggctcatgcatggtgcgctgcacccactgtcctgcgcccactgtctggcactccctagtgag

SEQ ID NO: 921439 - DNA, 534 bp, Homo sapiens
gaaccactgctctcttcaaagctgtcagacagggacatttaagactgcagaggttactgctgtctttttgtttgtctgtgccctgcccccagaggtggagccaacagaggcaggcaggcctccttgagctgtggtgggctccacccagttcgagcttcccaggtgctttgtttacctaagcaagcctgggcaatggcgggcgcccctcccccagcctcgctgccgccttgcagtttgatctcagactgctgtgctagcaatcagcaagactccatgggcgtaggaccctccgagccatgtgcgggatataatctcctggtgcgccattttttaagcccrtcggaaaagctcagtattagggtgggagtgacccaattttccaggtgccatctgtcacccctttctttgactaggaaaggaaactccctgaccccttgcgcttcccaagggaggcaatgccttgccgtgcttcggctcatgcatggtgcgctgcacccactgtcctgcgcccactgtctggcactccctagtgag

SEQ ID NO: 921440 - DNA, 728 bp, Homo sapiens
catagggaatcatccatcccagaagtcagaacttgagatcccacaagcctcaccattacagactaacgtgctcttgagtccttaataaacttgaaagacagtgtagtccacaaggactgcaatttctaagcaagtgttagtgctgtcctgggctcaaagccagtggatttgcagggcacatgatctagtgagacagacacaagccggggtgtccaagggggtgcttatgccatgtaattaaatagtggagtaaattgctaggcctgggactcacccttcagggcagtgggctacccagtgggcccagggtaggtccagaaatgccattcaagaactaaggtccagaatcaggaaacctaatggtttgcttggcagtgcagcttacggcaacaaaagggattccttccttgtgtgggaggggaggagagggaagagtaaagaggacttttttctagctttgtggacacccrcttagccacaataggatagggcaccaggcaaagttgtgagacccccttctaggccccagttcccatatgacctttctagacacactctgggcctgaagaaaacccactgctttgaacgaaggacccagtcctggaaggatttatcacctgctgattaaagagcttgcaggccctgaagagccagcagcaatgtgcaggtagaacaggtcagcctggggtgatactttgagatatgttgtcttcaggtggaacccagta

SEQ ID NO: 921441 - DNA, 611 bp, Homo sapiens
cagagctttcaacagaaattttaaacaagtgggatcaagattctaaaggatttcattaaagaactgtaacaggaaatgaaacatggctttaccaatgcaattctgaagacaaagcacaatcaaagcaatggctaccaagaggtggctgtggtccagccaaagcaaaagtagacaggtcaagaacaaatttcttggcaacatttttgggggctgctcaaggcatttggcttgttgactttatgaagggtcaaagaacagtaacttcttcttattataaaggtactttgagaaagttagatgaaagtttaacagaaaaawtcccaagaaagctttcctctttcctagagaatccttctctaccatgacaatattcctgctcattgctttcatcaacaaagggcaatttttcaagagttttgataggaaatcattaggcatccacctcacagtcatgatttggctcctcttccttctttttattttctaatattaaaaaatctgtaaggctgggcatggtggcttacacctgtaatcccagcaacttgggaggctgagacaggaggatcacttgagctcaggaattcgaaaccagcctgggcaacatggcaaga

SEQ ID NO: 921442 - DNA, 643 bp, Homo sapiens
ttttctttctgctctaacaggacagcactgagttcactatctcaccattgctgcgttcttcctccctcagtgcccagagatgctctttatatcatgctgctgctgtgggggataggggaggggtggtcttggtgattcaggactcttttttctatctcttcagtgcttcttccagtgatacaaagtttaaaccaggtactatgagtgctcatctaatttttggttcttatgaaagtgtttttctktgaagataagttgttaacttggtgttaatgcctgaggtgggggggagcaatcaggggagctctctattccatattggtctgcctccccgctaatgcatagtgttaataaagtaggctgacttttagttagttttatcattgctttaccatttgctatatgcactacgtctgtcttattgactacatgtgaggctgacaactttggcagccccagccttggaatgccactcttcttggaaaatctgagttatagggtagagctaaatcatctctaatcaggaactgggaaataggctttatctttatcttaaggttaatattattgttaataatagtaacagtagatctcaaatccctggtattgatactgaatcaggcccattctacttattgttcag

SEQ ID NO: 921443 - DNA, 660 bp, Homo sapiens
ctaattttttgtatttttagtagagatggggtttcactgtgttggccaggctggtctcgaactcctgaccttgtgatccgcctgcctcggcctctgaaagtgcttagattacaggcatgagccaccgtgcccagcctccaaaattaattttatcatgttggttcttctttcagtggaaattgacaacctcttcagtggctcagagcaaatgttgcaggacaaaaaaagaagtccgtatttacttctttgtatttacctttcctatgctcagctatatccaaaaagagtttgaaaagttagctgtgcctggctgttacaggagtgagtggagaaagcagttaagggctttaccaggtctcaagtattacagttgttttctctctgtgatgttagttctctcagtagctaagaggtagaaaaccrgaggctctggaagagctgcccaataattatagagcagctttctttcatggctcacagttccttcttaggcctctataagcgtcacaaggaaaagagaccatgcctttctgtgggcacagcataccttcgttttattacccaaaccaaaaacaacctacacacacacacacacacacacacacacacacacacacacacaaaactgtgggggcagggaggaaggtgttcttgttccat

SEQ ID NO: 921444 - DNA, 589 bp, Homo sapiens
acaaaaagtgaggaacaaactatgagatcttggaaaatcccagctcctctctggagacccacttttttgtcattaaaatgagaagtctggaggagccaattcacgggtttcacttcatcataaaaatgtaatgagtctatgaaacaagacaacacacctgaaagtagttagcacaggtgcacacattcagagtaggctgcaatccaaggcagcgatcatcactatrgttgttctatgagttcccacagcctaggccatgggcttgccaccaccttgcctacatttcaattggaaaaggggtgggaccctggtcctgcaaacaaactactgaaagtctaggacttgggtccaatgctatccctttcctatatggccccagtgcctctcattttctagaataagcagttcagttctaagttagcaggaaaagcaagatggccaagatccagtcatttgggagctggaagtggtccagcagcatgcctcccttcatcctccttggcttaccatcttgttttccacgtacccaccttcagcagacaatcttagcaaacaacccaagaatgaactgattcaggccaactcttct

SEQ ID NO: 921445 - DNA, 742 bp, Homo sapiens
attacagctctcaggctacctggagtgggtagctcctatctgcaggcagtcatcctgatgacatctctccacccctcagcagagcggagacctggagtgggtagcttctacctgtagtcaggtcatcccaacatctgtgcagccctcagtggagaggagacccagagtgggtagctcctatccatgggcaggtcatcttgtcatctttccaaatctggctaagtccagggtttttatgggcttcagaagggaggaagtgcatgctgactggtccatgagcagccatgggtgggcctggaaaaagcaccataagttttcatgcctggctatggaacaggcagcccaggctccaggcttcagaccatccctrgcttgaacatggggtttcactgggggcttgctcctttccacccaggagcctgtctgcctcctgccaccatcaattacatcatccatggtgctcaggctgtactgaggggcatctgcaggcctgcacctagctgccctcagtcccccctcggcctctctcccattcttgtcagtgcccaaagtccagaggatgccaaggcggcagggggctgtcatatcatcactgcttcaagcacacacacaacactcgggctcggcttcaactttgctcctaaatgagagtgggtgctgggagtggggagagatcaggcagcaagagtaggcacttctgaacctgcaggggcagggagggttcccatgaccctgagagcat

SEQ ID NO: 921446 - DNA, 534 bp, Homo sapiens
agtgggccaaaagtccacttctggttactctgcttggtatggtctaggaattcttcaaccatgagacaaataggtcaactttcaccagcaaccccaagtctggtttgcagtattagactctgcgttagacacagatttaggttcaatctgcagcttgattgtkgtcactctctagaaaacaaacccttaccatggacttctagatgagtgatccagttagatcagcatctgagattgtctccagtttgcagcccaaaagacattcagacagtctacagtttccattgtagataaccaaacagatagaatatgtgccattatcccaaaccctgagttctgacctttgagaggagcaaccactcatgtcaggttctgtatggctggcacaggttaaacagccacagcggcccagtggacatcatgaggtttcaccttccctgactcatctatgaaccaggaccagtcatataggaaacactcagtaaattgggggccccacagagacagcatctttgcttcagaggatagaaggag

SEQ ID NO: 921447 - DNA, 534 bp, Homo sapiens
agtgggccaaaagtccacttctggttactctgcttggtatggtctaggaattcttcaaccatgagacaaataggtcaactttcaccagcaaccccaagtctggtttgcagtattagactctgcgttagacacagatttaggttcaatctgcagcttgattgttgtcactctctagaaaacaaacccttaccatggacttctagatgagtgayccagttagatcagcatctgagattgtctccagtttgcagcccaaaagacattcagacagtctacagtttccattgtagataaccaaacagatagaatatgtgccattatcccaaaccctgagttctgacctttgagaggagcaaccactcatgtcaggttctgtatggctggcacaggttaaacagccacagcggcccagtggacatcatgaggtttcaccttccctgactcatctatgaaccaggaccagtcatataggaaacactcagtaaattgggggccccacagagacagcatctttgcttcagaggatagaaggag

SEQ ID NO: 921448 - DNA, 534 bp, Homo sapiens
agtgggccaaaagtccacttctggttactctgcttggtatggtctaggaattcttcaaccatgagacaaataggtcaactttcaccagcaaccccaagtctggtttgcagtattagactctgcgttagacacagatttaggttcaatctgcagcttgattgttgtcactctctagaaaacaaacccttaccatggacttctagatgagtgatccagttagatcagcatctgagattgtctccrgtttgcagcccaaaagacattcagacagtctacagtttccattgtagataaccaaacagatagaatatgtgccattatcccaaaccctgagttctgacctttgagaggagcaaccactcatgtcaggttctgtatggctggcacaggttaaacagccacagcggcccagtggacatcatgaggtttcaccttccctgactcatctatgaaccaggaccagtcatataggaaacactcagtaaattgggggccccacagagacagcatctttgcttcagaggatagaaggag

SEQ ID NO: 921449 - DNA, 534 bp, Homo sapiens
agtgggccaaaagtccacttctggttactctgcttggtatggtctaggaattcttcaaccatgagacaaataggtcaactttcaccagcaaccccaagtctggtttgcagtattagactctgcgttagacacagatttaggttcaatctgcagcttgattgttgtcactctctagaaaacaaacccttaccatggacttctagatgagtgatccagttagatcagcatctgagattgtctccagtttgcagcccaaaagacattcagacagtctacastttccattgtagataaccaaacagatagaatatgtgccattatcccaaaccctgagttctgacctttgagaggagcaaccactcatgtcaggttctgtatggctggcacaggttaaacagccacagcggcccagtggacatcatgaggtttcaccttccctgactcatctatgaaccaggaccagtcatataggaaacactcagtaaattgggggccccacagagacagcatctttgcttcagaggatagaaggag

SEQ ID NO: 921450 - DNA, 688 bp, Homo sapiens
gtgagcaacatggctgtttatttcacctgggtgcacgcgggctgcgtccgaaaagagagtcagcgaagggagataagggtggagccgttttataggatttgggtaggtaaaggaaaattacagtcaaagggggtttgttctctggcgggcaggagtgggggtcgcaagatgctcagtgggggtgctttttgagccaggatgagccaggaaaaggactctcacaagataatgtcatcagttaaggcaaggaccggccatttacacttcttttgtggtggaatgtcatcagttaaggtggggcagggcatattcacttattttgtgattcttcagttacttcaggccatctgggcgtatacgtgcaagtcacgggggatgcgatggcttggcttggtctcagaggcctgacatacactcccagtcttttggtcacagggctgtgggactgaggagggaaattaaagaaaaataaaattaaaaagaaagagaaataaattttcttgtattgggctgacttgtcccagaggcttcaacaggcayagcccagaaccaggaatagtcttgataatattatctaatgtgctctggaggctctcccaacgctcccccaacatcgggaaaagaaaaacaaatttcctttttttacggaatgagtttatagattcttgttctctgtaactagtgactt

SEQ ID NO: 921451 - DNA, 711 bp, Homo sapiens
acactcccagacctctcatcaccgggctgcaggactacaatcccagcatgcacccggctcagggagagtgcgcattactggaggaaaagtctaggctgtggatgcctccttctgcttgctgggagatgtagtttcataaagactcccagaacttgtgtcacagggctgcaggactaccatcccattatgcactggggtcagggacacggcccgtcagtggagaaagaggcgggtctgtgtgcgtctccttcggcttgctgggagatgtattcttataaacactcccagccctttggtcaaagggctacaggactacaatcccaacatgtgccagtctcgggggcgaggtacaggcctggaagaaggggcagagtggtacacgccccacctaatatgctgggagctgtagtctgttaactgctctcagcctgtttgtcggtagrcttcagaactataatcacagcatgtaccgggacccggggtgcatagccctggagggaggggcagagcggtgtggacttcccggtgtccaaagcactgctgagttcttatgctatgccgactctttgccaaggagaatgagtacataggtggacctagaggacaggtctgcgctgagcattgaggagggtattaccctacataggcaccttacctttgcccaaatcgggcgggttgtcctcaactgattggccctatccttctcaagtt

SEQ ID NO: 921452 - DNA, 696 bp, Homo sapiens
gtttggaaggagattgtgatacattggtgggtccaacttctcggtgacattactctgttgactttgctctgcaagcagaaagcactgtgacacattattgggcccaacaccaaggtgagtctcctgcctgaagcctgcctacagcaatttgtaacatatggcattgggacatatctctgagcccatcaactatttgacaagattctccttttttaacaaaggctttgcccataggagagattgtgacataattctgagcccagaaaataggggatatttcttttgttttctgcttgagccccacattgtgatgtatttctcctcccaacaactgagggaagggaaagtcctgsctgggtcttgcctacagggagccttgtgaaatctttccgcgttcatcaccttaaatatgtgaccctcatcttctgccgtggccatgtttacagaagggagagtgggttattcctagacccagcacacaggtcatgtgattctgcaacctggtgtctccagaggggtcattttgacatatctctagactcatcaactagataatgtaatgctcctcttccccctgaaacctatccatagtggagattgtgaaatacagcctggcacagcacctacatgatggtactctcttctcatgcttgggtgctgcccacaggggtgattgaaacttatagctgggtacag

SEQ ID NO: 921453 - DNA, 687 bp, Homo sapiens
cagcagggttgactgcagctccttgttcttcctgagcatcttctccaatggtgacctgagagttgcgggaggcattggggccaggattgaacagaggaaaaaggagcatggaggccaggtgctgaggaccaggccatcttacctggagagttctggccctgagacatccagaccaacatgacgtttaggtgcagacagctggccctgggtggccctgtgctgatcaccggcctcggcccctcaaacagtgggaaatggaagaatggcttggaaatgggycctgtcgactgtgtgtcatctgagcacattctcccaggggcccaagaagggccatcgtgtctccagaaccagaactggaaggtaaactgtcaggggggacaaggaagagggtcctcagttgggtggagggtctcacagcaagacgcctggcttaatcaagcttggccattcctgaagcacgttcagtgactaaaagtgcctaccatgagcagctggaacccactccctgagagctgcaagatccatggggacctcatgtacctgtttgtaattacagccaaggaccagcaggcagcattaccgcatccacatggggcttttgctggacacagtaagtctctgccagcccctcccaggctcctgggatgccacttgttctggatctgtggacagataaccaggatactt

SEQ ID NO: 921454 - DNA, 687 bp, Homo sapiens
cagcagggttgactgcagctccttgttcttcctgagcatcttctccaatggtgacctgagagttgcgggaggcattggggccaggattgaacagaggaaaaaggagcatggaggccaggtgctgaggaccaggccatcttacctggagagttctggccctgagacatccagaccaacatgacgtttaggtgcagacagctggccctgggtggccctgtgctgatcaccggcctcggcccctcaaacagtgggaaatggaagaatggcttggaaatgggtcctgtcgactgtgtgtcatctgagcacattctcccaggggcccaagaagggccatcgtgtctccagaaccagaactggaaggtaaactgtcaggggggacaaggaagagggtcctcagttgggtggagggtctcacagcaagacgcctggcttaatcaagcttggccattcctgaagcacgttcagtgactaaaagtgcstaccatgagcagctggaacccactccctgagagctgcaagatccatggggacctcatgtacctgtttgtaattacagccaaggaccagcaggcagcattaccgcatccacatggggcttttgctggacacagtaagtctctgccagcccctcccaggctcctgggatgccacttgttctggatctgtggacagataaccaggatactt

SEQ ID NO: 921455 - DNA, 664 bp, Homo sapiens
agactctcgggaactgaatcaggccccagcccatgccccccagcccagtccagccaacgtgcccgctgtcttcccacccagccagccgagccctcaggattgttagatggaaccaggctccatcaccacccaggcatggagggaagatgccctggtccttagcaagcaaggcctggtttccaaagtgctctccgaagaggcctcatgtttgtgacatcttagaaggtacctttctgctgttcttgcacccagcatgttggcaagtcaagttcccccactgagttctccacacataaggagggagtcaacaccattgctaagtcggatcagctcaagkgtctccagtatcagttttatcagatcccagggacctgcctgctcccagaggtgacagagaaaaatcaaggaacgatctgtatggtcactgacatggatgaaacccttgtgcatagctccattaagccaatcagcaatgctgactgcctagtgactgtaaagattgaggggaccatgaggccttatatggatgagttcctgagatgactggaggaactgtttaaatgtgttttcttcattgctctcttcattccagactgaacaagtatgcagatcctgttgagaggtgacagcgtgctggcagtcctcacaacccttgctcactctc

SEQ ID NO: 921456 - DNA, 580 bp, Homo sapiens
  misc_feature 134, 472: n = A,T,C or G
gcttggcccatgcctttggcccgggatcaatcaggagctgaagggatgattaatagatgctgcttagcttggcccaagacttatcagaagctaaagtgaaagtttggccaaggagcttggcccgggagcactcnagggctgaagtaaattattcatagaggtcagacttacagtccaaataaacgagagtgtcgaccggaatgcaccagatcccacagtgcccatgccaacaaaaagagaaggaacattttcctgggagcccactgactgtacaaagacaaaagtgcttcttttttttctttttcttgtctttcttttttttgagatgtactttctttttttatttatttttatttttttttgcagttttgctcttgttgcccagcctggagtgcaatggtgcgatctcggctcacagmaacctccgcctcctgggttctagcgattctcctgcctcagcctcccaagtagntgggattataggcatgcagcaccatgcctggctagttttgtatttttagtaaagacagagtttgtccatcttggtcatgctggtctcaaactcccgacctcagatgat

SEQ ID NO: 921457 - DNA, 449 bp, Homo sapiens
agaaagttttaaattatgctactgatgcattgctgcttttcttacacaaaacgataaggctgtaatctagcttttaattgaaaagtcttacatttctaaatatggtaacaatataaatattgtaaatacagtataaaacattgacatataaaataaaaattggaaatarattgtactattagtcaaataaaagttgggaaaactggaagaagatgctaatagtaacattgtgcctagagtcaattaaacatacaagccaaatattttaataaattataaattatataatttatacataatatatacatttgagcatgctattttacaacttctgaaaggaaattacagacaaatgtgacacatgataattcagaaagtgaaaacacagtcatagtaatcttcatattaaagaagacagaatcataaaatactaagtgagaaataaagta

SEQ ID NO: 921458 - DNA, 633 bp, Homo sapiens
atttttctctaattctgaacaagtgctgcaattttaagctcaaaactttcccacagatacaaatgagtgttgtagacacataacccaagattacctgctacacatgctataggcaaattggctttatatctctctgacttttgacaggaagatagcagctctaggtcggatgcttcacatcccctagctctttgtgcttctaacacatagaagctttatgcactttggaaatttcctgaattatcatagaatgtcatcctgaggctgggcacggtgactcacatctgtaatcccagcactttggaaggccaaggtgggcagatcacatgaggtcaggagttcaaggccagcctggccaacatggagaaaccccatctctactaaaaatacgaaaaaaattagccaggcgtggtggcrcgcacctgtagtcccagctactcaggaggctcaggcaggagaatcacttgagcccaggaggtggaggctgcagtgagccgagatcattccattgcactccagcctgggtgacagagcaagactctgtctcaaaaaatataaataaataaataaagtcatcctgttgtgtgctaaatgtttgtgtcccccccaaaattcatatgtttaaacttagtt

SEQ ID NO: 921459 - DNA, 719 bp, Homo sapiens
agttgaagatgcacaaaggtcttgtcatgcatatatcaaaggtctgtagcatttctcctgtgtattttgataatccattaacaggcatttccaaagcctacaactaatcagcatcccattcccaaacactttctttcctacatcactaaatttaaaattgtacttaactgagtgatcctatttctaagaaataaaaaaackgtttatattgcatcatttcatttcaatgacctctgagagttgtactccttggtagggaaaataattattttaaagcaaacatgaagtagtatatgcttattttgtgttatctgtgagacagggaggccatgcctttcccagctatgatccatgctgattgggcctcaatttgaaccttacactaatcttatcagtgtaggtcagatttttttttaacagcaattgaatcagagccagtgcacagcatcctgttaatgaaattcatccattcactcaaaaaacattaatgaaccatttctacccttgcaaaagttataaagagatgacaaagacaagatacaatccttgttctcaaagttcttcatcttatgaaagatataaataatttcctgcatgtaaagtgttcagtaggaggtaatgagtggataaaggctcacctagaatggctcccaactcagactgggaactttgaaagaactttctaggaaagaggttggcaaactatgcctgcaggccaa

SEQ ID NO: 921460 - DNA, 719 bp, Homo sapiens
agttgaagatgcacaaaggtcttgtcatgcatatatcaaaggtctgtagcatttctcctgtgtattttgataatccattaacaggcatttccaaagcctacaactaatcagcatcccattcccaaacactttctttcctacatcactaaatttaaaattgtacttaactgagtgatcctatttctaagaaataaaaaaactgtttatattgcatcatttcatttcaatgacctctgagagttgtactccttggtagggaaaataattattttaaagcaaacatgaagtagtatatgcttattttgtgttatctgtgagacagggaggccatgcctttcccagctatgatccatgctgattgggcctcaatttgaaccttacactaatcttatcagtgtaggtcagatttttttttaacagcaattgaatcagagccagtgcacagcatcctgttaatgaaattcatccattcactcaaaaaacattaatgaaccakttctacccttgcaaaagttataaagagatgacaaagacaagatacaatccttgttctcaaagttcttcatcttatgaaagatataaataatttcctgcatgtaaagtgttcagtaggaggtaatgagtggataaaggctcacctagaatggctcccaactcagactgggaactttgaaagaactttctaggaaagaggttggcaaactatgcctgcaggccaa

SEQ ID NO: 921461 - DNA, 666 bp, Homo sapiens
taaacaagcaatggtttcagaaaggactccctatttaataaatgatactgggagaactggctagccaaagcagaaaactgaaactggaccccttccttacaccatatataagaattaactaaagatggattaaagacttaaatgtaaaactcaaaactgtaaaaaccctagaagaaaatcgaggcaatatcattcaggacataggcatgggcaaagatttcatgatgaaaacatctaaagcaattgcaacagaagcgaaaattgacmaatagaatctaattaaacgaaagagcttcagcacagcagaagaaaccatcatcagagtaaacagacaacctacagaatgggagaaagattttgcaaactacccatctgacaaagttctaatatccagaatctacaaggaacttaaatttccaagaaaagaaacattcttgtcctattttaagaaattgctacagccatcccaaccttcagcaaccaccatcctgatcagccagcagtcatcaacattgaggcaagaccctccaccagtaaaaagattacaactcaccaatggctcagattgttagcattttttagcaataaagtgtttttaaattaaggtatgtacattgttttttagacatattattgcatacataatacactacagtgtagtgtaaa

SEQ ID NO: 921462 - DNA, 629 bp, Homo sapiens
aggcacaagccactgtgcccagcttgtcactcttgaagaaagaggaaatgccattcagttggcatgtgctggagttgtttgtgtgtgatgatgatggatttccattgatccctctgtgctcttccctgtagctcaaggacaaccactaacatttctgaagctgtagttattgatgaagacctagccatggaaaacaacagttattcagccccataattgtcaaactcacgactatagtactgcttttactcttcttaggcacagccaaagacaaggcatgtgctttcttagaatatgaatgaggccgggagcggtggctcacacctgtaatcccagcactttggaaggctgaggcgggcagawcacgaggtcaggagattgagaccattctggctaacacagtgaaaccccgtctctactaaaaatacaaaaaattagccaggcgtggtggcgggtgcctttagtcccagctactcggaggctgaggcaggagaatggcgtgaacccgggaggcggagcttgcagtgagccgagatcacgccactgcactctagcctgggccacagagtgagactccatctcaaaaaaaaaaaaaaaaaaaaggaaggaagcacagatgggaggggtag

SEQ ID NO: 921463 - DNA, 590 bp, Homo sapiens
agggcaccaactccctaggctgcatagagcgtggggactcttggcccagcccacaaaatcaaactgctttttcctcctaggcctccaggtctgtgatgggaggggctgccacaatggtctctgacatgccctggagacatttttcctgtcttcttggggattaacattgggctccttgttacttatgcaaatttctgcagcccgcttgaatttatccccagaaaatgggatttgatttttttttctatcacaatgtcaggctgcaaattttccaaacttttatgctgtttcccttttaaaactaaatgcctttaacagcacccaagtcaacttttgaatgctttgctgcttagaaatttattctgccagataccctaaattatctctctcaagttcagagttccacaaatctctagggcagggggaaaatgctgccagcctctttgctraaacgtaaaaagagtcacctttattccagttctccaaaacttcctaatctccatctgagaatacctcagtgcagatttcattgtccatatcattatcagtattcttgtcaaagcctttcaacaagtctctagggagttcca

SEQ ID NO: 921464 - DNA, 726 bp, Homo sapiens
ctttccggcggtgcctgcatatcatgcagaaccatctgtgaaccaggccctagccttttcttcctctatcaactgatcataggggactccccatgaggccattggtgcaggctatggaagagaaggcagagtggcaggagtggagaccatgggcatttgagccacttcctcatgtaacttacttgtcccttcaggacctgctcaaaaccaatcacatatataccacttccatttgatgatggtaytctgctctgcaccacccatttcatggctagatgggtcagaaacacccagttcatgataggcagttcaggtctcatggtgacttgatgacccatatcaaatgttctgtttccaccaaaacccagtaacaggccaagagctgtctctcaaaaggagagtagttatctgtagaagatggcagggccttgctccaaaatcctagaggactccactgtagttcatgcatgggccttgccataggctccaaacagcatccctatctgccactgacacctcaagcaccattggatctgctgggtcacatggcccaagtggcagagcagcttgcacagcagcctggacctgttgcagagccttctcctgttctggaccccactcaaaactggctacctttctggtcacttgataaatgggctagagtaacacatccaaatcaggaatgtgttgcctccaaaatccaaacagggccactaggccttatgc

SEQ ID NO: 921465 - DNA, 688 bp, Homo sapiens
agagctgtctctcaaaaggagagtagttatctgtagaagatggcagggccttgctccaaaatcctagaggactccactgtagttcatgcatgggccttgccataggctccaaacagcatccctatctgccactgacacctcaagcaccattggatctgctgggtcacatggcccaagtggcagagcagcttgcacagcagcctggacctgttgcagagccttctcctgttctggaccccactcaaaactggctacctttctggtcacttgataaatgggctagagtaacacatccaaatcaggaatgtgttgcctccaaaatccaaacagggccactaggccttatgcctctttctttgattgtaggaggggccaaatgtaacaacttatccttcattttagaaggaatatctcgacaggccccacatcactggatcctcagaaattttgctgaagtagaggtttcctgaattttagttcaatgtatttcccatcctctggcacacaartttctcaccaataagtccagtgtgtttgctacttcttgctcactggacacaatcagcataatgtcatcaatgtaatggaccagtgtgatatcttgaagtgaaagtgatcaaggtctctccaaattagattatgacacaaagctagaaagttgatatattcctaaggtaagacaataaag

SEQ ID NO: 921466 - DNA, 487 bp, Homo sapiens
gtctatgccaattatgcattctggcactggggaaatgaccacaggatgagtccggggacctactggacccagtgtaagttggacctgagctaaaactccattagttacctgatctccataagcccctactttaactggagcaccacartgacgttttggttcctctggaatcaatgtcagctcagagctagtttacggtagtccccaaattgtctgatcatttccccttcctcagtgcacagttaccccagtaaaaggccggaggtctccttggggaagagtgggagaaagattaacagcataaattgtcagcagcatagttgggtccttcctcaagggaaactggcctccctttcattcaaagggttctggttctgtaaactggctcaagtctggaaattgattgagggactgtgattctgtttttataattcaaattagtcttttttccatttaacctagacattttctgcttatataaattaag

SEQ ID NO: 921467 - DNA, 606 bp, Homo sapiens
cacttagggatgtttgcaactgtggtgcagacctgccggctggctcacttgtatcccacgctactagctcctttgcccctagatctccctggtaaaattagcactgccaggaggaaagcattaactgattccctcaagcttcaggagttctcmtgaaagctcctgacacctcaaggccagatcacttctgtttggctgttcatggccaagtctcaagcaatctccttccagagctcctgccctaagcactacctcaatggagcccacgcggtacagcaatctagacacatcaccaaaatgagatgggaaggggaccgtgacatgctccacgaagactcattcaacacatcccaccctgttatactttattacatttcactaggtttagacatattataaagcactgagagataacaatcttgaagaaagagaaagctattgatttaattcagaaaactttgaaatacattctagtgaataattttgctctcaggtcagatatgtttcttgctctgctctttcccacattatttgcctgaaaaaaagtattagaacaggagaaagatccaaaatccttgaggaagcaggctctgggctccgggacag

SEQ ID NO: 921468 - DNA, 530 bp, Homo sapiens
ttcaaatttcccatggctatatggacacacacaaaaacaatcaccaaaacacaatccaactgctgcagcaacaaacaagccccaaaagtgtccaaactgaaagagttagggtgcttcatctcttcattggttgagcttgatcaacctacaaacagaaattccttcagaatttctcagttgagaggagccaatctctctgtctggtacccacaaaagatactcacttgcctggacacacacaaacaacacrattacaaacaagaccccaagaatgtttatactgaaacagccagggtgcttccctcatgtcagttgggcttgttcaacctgcaaatgaaaattactgaaaaaatttcccgaattgagaggaatagaccctgctgcctgggcacacaaagaactctcacctatccagatgtggatgccaaatctcaaaggcagttcttcctgggtaatcaggaatgcaactggggccagcagcagcagcagggccggagagaaacagaaactcacctccagccaaaattggg

SEQ ID NO: 921469 - DNA, 587 bp, Homo sapiens
cactcactgtcacaggaacagctatgaggatatctgcccccatgatccaattgcctcccaccaggtccctcccgcaatggtgagaattagtttgagtgcgatttgggtggggacacagagccaaaccatattcactaacccccaaagctagtagaataaaataactaaaatcagaggagaactgaataaaactgagacccccaaatccataaaataatcaacaaaacaaaaaattggtttttcaaaaggataaacaagagtgatagaccactagctagataaacaaagaaaaaaagagagaagatccaaataagcataatcagaaatgacaaagatgacattacaaccaataccacggaaatacaaaagattctcagagaatattatgaacacctccctgcacccaaactagaaaatagataaattccgggaaacacaaaayctcacaagattaaatcagtaagaaattgaaaccctgaacagaccaatatttagttacaaaattgaatcagtaatttaaaaaaccctaccagctaaaaaggtcctagaccagatggattcacaaccgaattctaccagacatacaa

SEQ ID NO: 921470 - DNA, 697 bp, Homo sapiens
tgtatgaggtgtctgttggcccccactgggaggtgtctcccagtcaggcaatgtgggggtcagggacccgcttggaggaggcagtctgactcttagcagagctcaaacgctgtgctgggagatccactgctctcttaagagccatcaggcaggagtgtttaagtttactgaagttgtgcccacagccgccccttcccccaggtgctctgtctcagggagattggggttttatctctaagcccctgactgggactgctgcctttttttcagagatgccttgcccagagagggggaatctaaagaggcagtctttccacagcagtgttgctccacccagttcgaacttcccggtggctttgtttacactgtgagggtaaaactgcctactcaagtctcagaattgtggacgctcttccccccaccaagtttgagtgtcccggcttgccttctgactgctgtgctggcagtgagaatttcaagccagtggatctgagcttcttgggctccgtgggggtgggacyttccaagccaaccacttggctccctggcttcagccccctttccaggggagtgaacggttttgtctcactggcattccaagcgccactggggtatgaaaaaaaactcccgcagctagcttggtgtctgcccaaacaactgctcagttttgtgcttaaaacccagggccctggtggca

SEQ ID NO: 921471 - DNA, 744 bp, Homo sapiens
ttgctccacccagttcgaacttcccggtggctttgtttacactgtgagggtaaaactgcctactcaagtctcagaattgtggacgctcttccccccaccaagtttgagtgtcccggcttgccttctgactgctgtgctggcagtgagaatttcaagccagtggatctgagcttcttgggctccgtgggggtgggaccttccaagccaaccacttggctccctggcttcagccccctttccaggggagtgaacggttttgtctcactggcattccaagcgccactggggtatgaaaaaaaactcccgcagctagcttggtgtctgcccaaacaactgctcagttttgtgcttaaaacccaggkccctggtggcataggcactggagggaatctcctggtttgcaggttgcaaagaccatggggaaagcacagtatctaggccagagtgcactgttcacagtccctcatggcttcccttggctagggcagggaattcctcgactccttgcacttcctgggtgaggcaataccccaccctgctttggctcaccctccatgggctgcacccactgtccaaccagccccagtaagatgaactgggtacctcagttggaaatgcagaaatcacctgccttctgcgtcgatctcactgggagctatagactggagctgttcctactcaattattttgccagcgatctcattcaccggtttttaagttgtctttaaagcatgcagtttctaa

SEQ ID NO: 921472 - DNA, 850 bp, Homo sapiens
ctctgtctcagggagattggggttttatctctaagcccctgactgggactgctgcctttttttcagagatgccttgcccagagagggggaatctaaagaggcagtctttccacagcagtgttgctccacccagttcgaacttcccggtggctttgtttacactgtgagggtaaaactgcctactcaagtctcagaattgtggacgctcttccccccaccaagtttgagtgtcccggcttgccttctgactgctgtgctggcagtgagaatttcaagccagtggatctgagcttcttgggctccgtgggggtgggaccttccaagccaaccacttggctccctggcttcagccccctttccaggggagtgaacggttttgtctcactggcattccaagcgccactggggtatgaaaaaaaactcccgcagctagcttggtgtctgcccaaacaactgctcagttttgtgcttaaaacccagggccctggtggcataggcactggagggaatctcctggtttgcaggttgcaaagaccatggggaaagcacagtatctaggccagagtgcactgttcacagtccctcayggcttcccttggctagggcagggaattcctcgactccttgcacttcctgggtgaggcaataccccaccctgctttggctcaccctccatgggctgcacccactgtccaaccagccccagtaagatgaactgggtacctcagttggaaatgcagaaatcacctgccttctgcgtcgatctcactgggagctatagactggagctgttcctactcaattattttgccagcgatctcattcaccggtttttaagttgtctttaaag

SEQ ID NO: 921473 - DNA, 740 bp, Homo sapiens
gcaacaaaaataacctcacacatgctctgaaaaggaaattcaagacagtttgcggaaaagaagagaatcaaaagatggcaaaggtcacccaaatatcaatcagatatgctcgtcccctaaggtaggggttgaactctgaacccaggccaccactgtgaaaagagaaagtacggccacrtggttataaggtcaagctcccaaggacaaacaagacaagagagaaacctcatccagttttttttttttttccttttcaggacccttcagcaaagtttataactgaccaatttgctgggccatctttaacagcaggcttatgaggtcctaggcccgcattctatcctacggtacccctctttatgacagaacaaaacagaaagacccacaaagcacatcagattcactacagcttaagactagcctcacaaatccttttttccattaatcaaaactttacagaggagataaatagtgattttttaaaaccattcattcaactggtttgcacagagagagagagaaagagaggaaagcattgcctgatgtaaggtggggaaggtgaagagctcagggaggctagagaaagatgagatagagacagagagagagagagagaagcattgcctgatgtaagatggggaaggtgaagagttcagggaagccagagaaagactcacccattgctcaaaagttcaggcaactgcttgttggtcagagagggatcttttccagcagtctca

SEQ ID NO: 921474 - DNA, 548 bp, Homo sapiens
agattataatggagcagaagaattcctatcacctagtgacagggtagctgtcataatatggtaacacaatgtgttactcacatttttgtggtgatgctgatgttaacacatctaccacgttgccagttgtataaaagcctagcacatacaatcatgtaaaatacagaatacctgataaagattgtaagcgactatgtcattggtttatgtctttactatactatacttttagtcrttattttaaagtatactccttctgtgtgtgtgtgtgtgtgtgtgtgtgtgtgtgtgtgtgtgtgtagatttaaaaagttaactgtaaaacagctttagacaggtcctttaggaggtattccagaagaaagaattgctgtcacaggagatgacagctccatgcatgctaattgcccctgaagaccttccaagtgggacaagatatggaggtggaagacagtgatactgatgatcctgaccctgcataggctgaggccaaatgtttgtttgtgtgctagtttttaaataagtagtccaaaaaatttgaaaaagaa

SEQ ID NO: 921475 - DNA, 741 bp, Homo sapiens
aattgccattcttcctttatttgaacacttagaagctgttttggggttactaattggcctaatttcaatattgttgtgtctcagggaataagaaggcccaaagagaggaagagagatgggggaatggttggtggagcagtcagaacacacacatttgccatttaagttatctgtstcatatagtgatggttcatggcaccccaaaacaataagaatagaaacatcacagatcactgattgtaggtcaccataacagatacagtaataacgaaaaagtttgaaatattctgagagttactaaaatgtggcacagagacacaaagtgagcacatgctgtttaaaaaatggccccaatagacttactcactgcagaattgccacaagccttcaatttatagaaaataaaatatctgcaaagctcaataaagtgaagcaacaaaattaggtatgcctatgcctatgaccacaccttgatgacataccaacaggttagagctagaacaaaggccagaacagcaacaacaaaggattacctgagacattggaggtggctcagtggcctcttctgatctcttttggcttagagttctgtgatggcttttagatcacccatgcatggtgctacacaaaacacttagatcacctcccattcctggtagtgctcaaaggcaagttcctaaaggaagaaggcttggagaaatatcaccattggggaagtcaatgtacacttataagagaaag

SEQ ID NO: 921476 - DNA, 607 bp, Homo sapiens
aacctccgcctcctgggttcaagcgattcttctgcctctgcctcccgagtagctgagactacaggcacccgccactaggcctggctaatttttgtatttttcgtagagacggggtttcaccatattggccaggctggtctctatctcctgaccttgtgatccacccagctmggcctcccaaagtgctgggattataggcgtgagccaccgcaccgggcctggattcttatttttttaatgagaagttagctattaattatttttcttctgaatataagaagtctttttttctcttgttgcttttaagattttttcctttgttgtcagtttttaacaatttgactatgatgtgcttagcatgtgggtctcttagatgtggatttctttgtttatctttttttaaattctttgagcctcatagatatctaatgtttttcatcaaattttggacatttctagtcattatttcatcagatatttttctgcttttttttctctgctgctgctatctccactcagtttttaaaaaatattattattattgttcttattttaaagcatggtttctttggggtttccctggaacagcatagtttagcagtcagct

SEQ ID NO: 921477 - DNA, 607 bp, Homo sapiens
aacctccgcctcctgggttcaagcgattcttctgcctctgcctcccgagtagctgagactacaggcacccgccactaggcctggctaatttttgtatttttcgtagagacggggtttcaccatattggccaggctggtctctatctcctgaccttgtgatccacccagctcggcctcccaaagtgctgggattataggcgtgagccaccgcaccgggcctggattcttatttttttaatgagaagttagctattaattatttttcttctgaatataagaagtctttttttctcttgttgcttttaakattttttcctttgttgtcagtttttaacaatttgactatgatgtgcttagcatgtgggtctcttagatgtggatttctttgtttatctttttttaaattctttgagcctcatagatatctaatgtttttcatcaaattttggacatttctagtcattatttcatcagatatttttctgcttttttttctctgctgctgctatctccactcagtttttaaaaaatattattattattgttcttattttaaagcatggtttctttggggtttccctggaacagcatagtttagcagtcagct

SEQ ID NO: 921478 - DNA, 431 bp, Homo sapiens
aaaaggtatgtgtgtgttgagggggagtccactgagtcttctatctgagctccaaacgctcagctcaccactccaggacctccttccctctcctgcatagacccctccagagtcaccaccttgctctcagccttacaacttaccaaagtgttgtgccaggtattgttggtcctacttgatcttgcccctgctgacctcccatttgactcgccgcccactcagcctcctttcctggcagcctattcstgagccctactgcagtatctgcagttttctgaaagggccctcttaaaagtccaacttaaacaccatcatagaaacccacatatctctgtttaagtatttgtagtagactatcaagaagtcaacaaatatgccaggtgcggtggcttacgcctgtaatcccagcactttgggaggaagaggcgggc

SEQ ID NO: 921479 - DNA, 576 bp, Homo sapiens
gaaatgtcatttttggtggccaaacatgttgggaagagttaatgcaacttcccaaagtacctatttcttctttgggaagcagtgtctccattttgtgttccgacttaaatcaaccatctattttaccagtaacttggatgtggagcttgaggatccaccgcccagygtgatgtgacattttgcttcttgtcatcctggtgtttctcggaagcattgctcacagcatgggtgttcctgtattcaccactagaaacagtcagggttggggtttttgaaaaagagaagaaatgcttgctttcctttattcacttcagaggcagcctgctgaacagagttaataatctcagtgttttccttcgggctatgatgatgaagtctgccaatggtaggcttcaatttattaatggaagtctgccaatggtaggcttcaatttattaatgaactgtggtcagtttggtgctgggacctcagacacagaggcatctcttgaaatgttgattgctttttaaaattaaaacttcacttgattttattcagtaccccccacccaatgcacacactaatgtttttaaatt

SEQ ID NO: 921480 - DNA, 605 bp, Homo sapiens
tttttcatttttctcttttgaacattctaaaatagaattctgggtaatctggtaagtgtatacttaactttataagaaattgccagaaaagtttaccaagtggttttactatttttttttatcctcactggcaattttgccacatgctctccaacacttgatattgtcatagtaaaacaattttagccactgaagtactatctcaccgtaggttaatttacatttccctgatgactagtgacattgaacactttcatgtgcttaatgaccatcttttgtgaattgtctactcaataatttcttgtccatttattactgcattgtttaactttttactattagtctatctgcatttttatatgatctggatgaatttttcggatatatgtattgtagtgggaaatcagcgactggagagaccaagyggtgttcaggagggcatattttaggtgtacactggctcagcggacaggcatcctgaaagtctgagcagcaaacaaagaaaacaaacaccttttatgcaccttgaggcgggaattacatgatgcaggaagctggcttacaaaagcgagaacaaagtagttaattatcaggtgacattctta

SEQ ID NO: 921481 - DNA, 691 bp, Homo sapiens
cattgctgaaaagatacccaaaaatgtggaagcaactttggaactgggtaacaggcagaggttggagcaatttggagggctcagaagaagacaggaaaatgtgggaaagtttggaacttcctagagacttgttgaatggctttgacaaaaatgctgatartgatatgaacaataagttccagactgaggtggcctcagatggagttgaggaatttattgggaactggagtgaaggtgactcttgttacgttttagcaaagagactggtggcattttgcccctgccctagaaatttgtggaactttgaacttgagagagatgatttcgggtatctggcagaagaaatgtctaagcttcaaagcattcaagaggtgacttgggtgttgttaaaagcattcctttttaaaagggaaacagcataaaagttcagaaaatttgcagcctgacgatgtggtagaaaagaaaaacccattttttgaggagaaattcaagctggctgcagaaatttgcataagtggcaaggagcctaatgttaatccccaagacaatggggaaaatttctccaggccatgtcagagaccttcatggcagtccctcccatcacaggcccagaggcccaggaggaaaaagtggtttcatgggccaggcacagggtccccgtgctgtttgcagcctggggacttggtgccat

SEQ ID NO: 921482 - DNA, 650 bp, Homo sapiens
ctgtgcccacccagattgagggtgggtctgtctttccaagtccactgacttaaatgttaaactcctttggcaacatcctcagagacacatccaggaacaatactttgcctctttcaatccaatcaagttaacactcaatattaaccatcactgtaccagaatctctgggatgcagctaaagcagtgttaaaagggaaatttacagcactaaatgcctacatcaaaaagctagaatgatctcaagttaacaacctaacatcacaactaaaaacactagagcccagatgtgatggctcacacctgcaatctcagcacttcgggaggccaaggcgggtggatcatctgaggtcagaagttcgagaccagcctgaccaacatggtgaaagctcatctctagtaaaaatacaaaattagctgggtgtggtggcccatgcctgtaatctcagctacttggggggccraggcaggagaattgcttgaacccacgaggcggaggttgcaatgagctgagatcatgccattgcactccagcctgggcaacaagagcaaaactccatctcaaaaacaaagcaaaacaaaaaaataaaacaaacaaacaaacactagagtaccaagagcaaacaaacctcaaagctagcggaagacaagaa

SEQ ID NO: 921483 - DNA, 556 bp, Homo sapiens
aatcttggtaagttgtatgtttccagaaatttatccatttcctcttgtttctccagtttggtaccatatatttgttcataatggtttctgattatcttttggaattaagggggatctgttgtaaaagcttctttttcatttatgataaggtttactggggtattctcttttcttttcttggttagtctagtgtgggggttcagtcaggatggtgggagaaattgtaaaattataggatatagacacaaaccttcttggaaggccggaaggtatttgcaaaagtctcaagatagggttatggctgaaagcagcgtaatccttaccttgagttaattgcttggggcacagatacaaaggaacatttatctaaatagcttgtttactcatgtggtcgtaagaccaacatttgwtcaactgcagatgcataattgctctctacttgggggggtcggcaaacaggtcaattgccctctagtggtgtgaacaaatgcgagctttgctggttgatcagggccatagatgcaactctttacagcaccttccttggtgtctgtgt

SEQ ID NO: 921484 - DNA, 643 bp, Homo sapiens
gctcagatttgtaatcccagcactttgggaggccaaggcgggcagatcacttgaggtcaggagttcaagaccagcctgcccaacatggcgaaaccccgtctccactaaaactacataaactagctgcgcactaaaaatacaaaaattagctgggcgtggtggcgcatgcctgtaatcctggctacttgggaggctgaggcaggagaatcgcttgaacccgagaagtggaggttgcagtaagccgagatcacgccactgcactccagcctggagtctttaaaaaaaamaaaacaaaaaacaaactaacaaaaaaaaacaaaacacaaaaccacaccaaaaaaccaaaaactactacgccatgaaaaacaagtctagactcattgatttagagcaacaggcaaactatatggcccagagaacaaatctgatcgccacgtgtctttgcaaataaagtctttttggaacacagccatcttcatgtttctagtttatggctactttgagttcactgtcagagtagctgtgaaacaccctgactcccaaagccaggggtcccaacccccagaccagtaccagtccgtggcctgttactgggctacgcaggaggtgaacagccggcatgtgggcatcactgcctgtcaca

SEQ ID NO: 921485 - DNA, 566 bp, Homo sapiens
atattgtgaaaactaagaaatcatgttcaggacagaacaccagtggtgtgtctatgtaaccatcggatgaggaaattagtatggatcaaccatctcagtggaatctgggtgctattcatcaaggcaatgaaagaatgacccaaagacatttcagatcagggctgccactcctatccgaggtgcggaatacaagggcatgagggacagaatgatttcaaaggaggggctgcaggtacttgtggggcttcagcactcactatcatgggccaccttgaggctctgctctccacattccatcacagggctcctaggctaccccaggtatggctccaacagatcctggtttagtgagtgctgtgctctgaaaagctgtgcrggcatggtaacctccacctagacttcaaaggatgctctggaaagccacagtgcgtaggcagaaagccaccatgtgcagggccaccatggagagattgcactgcgcaatgcccagtgaagcagtagggtaaggccacccctgaggccctagaccaattgaaccactggtatacaatttcagcctgggagag

SEQ ID NO: 921486 - DNA, 656 bp, Homo sapiens
ggaagaaatgggcaaaaaacaaagggcgacaggccccatgcaagtccaaaatccagtggtgcagttattaaatcttgcattagtcaggcttctccaaaggtacagaactaataggatagatgaaagtatgaagcagagtttattaaggagtattgactcacatgatcacaaggtaaagtcccccaataggccgtctgtcaaccgaaaagccaggaagccagtccaagtctcaaaacctcaaaggtaaggaagcagagagtgcagccttcagtctgtggccaaaagccccaagagtccctggcaaaccactggtataggtgtaagagtccaaaagatttttagggcaggaagcatccagyatgggagaaagatggaggccagaagactcagccagtctggtccttccatgttcctctgcctgcttttatcctagctggtcttttagatgattagatgatgcccaccctgattgtaggtgggtctgcctctcccagtccactgactcaaatgttaatctcctttggcaacaccctcacagacacacgcaggaacaatactttgcatctttcagtctaatcaagttgacactcaatattaaccatcacaaatcttaaagctcctaaataatcaactttgactctatgtctcacatccag

SEQ ID NO: 921487 - DNA, 670 bp, Homo sapiens
tgtgaagaggtgccttctgccatgactgtaattttcctgaggcttccccagccatgtggaactgtgagtcaattaaacctctttcttttttttttttttttaataaattacttagtcttgagtatttcttcaaagcagcatgagaacagactaatacagtaaattggtactgaggtggtggggcactgctataaagatacttgaaaatgtggaagtgactttggaactggctaacaggcagtgttgaaacagtttagagggctcaaaaaaaaacagaaaaatgtgagaaagcttggaacttcccagagacttggagggctcagaagacagaaaagtgtgggaaagtttggaacttcctagagacttgttgaacggctttgactaaaatgctgatagtgatatagacaatgaagtccaggctaaggtggtctcagatggacctgaggaacttatcgggaactgaagtaaagatcactcttgctgcgctttagccaaaagactggwgactttttgcccctgccctagagatctgtagaactttaaacttgagagagatcatttagggtatctggaggaagaaatttctaagcagcaaagcattcaagaggaagcagagtataaaagtttggaaaatttgcagcctgacgatgagacagaaaagaaaagccca

SEQ ID NO: 921488 - DNA, 670 bp, Homo sapiens
tgtgaagaggtgccttctgccatgactgtaattttcctgaggcttccccagccatgtggaactgtgagtcaattaaacctctttcttttttttttttttttaataaattacttagtcttgagtatttcttcaaagcagcatgagaacagactaatacagtaaattggtactgaggtggtggggcactgctataaagatacttgaaaatgtggaagtgactttggaactggctaacaggcagtgttgaaacagtttagagggctcaaaaaaaaacagaaaaatgtgagaaagcttggaacttcccagagacttggagggctcagaagacagaaaagtgtgggaaagtttggaacttcctagagacttgttgaacggctttgactaaaatgctgatagtgatatagacaatgaagtccaggctaaggtggtctcagatggacctgaggaacttatcgggaactgaagtaaagatcactcttgctgcgctttagccaaaagactggagrctttttgcccctgccctagagatctgtagaactttaaacttgagagagatcatttagggtatctggaggaagaaatttctaagcagcaaagcattcaagaggaagcagagtataaaagtttggaaaatttgcagcctgacgatgagacagaaaagaaaagccca

SEQ ID NO: 921489 - DNA, 765 bp, Homo sapiens
cagcatcccctggaacagtagaatgacaaaggcagacagaaggagtgtgatatggtttggctttgtatccccacccaaatctcatctcaaattgtaatcttcacgtgttgaaggagggacctgtaatccccacgtcgagggagggaggtgattggatcatgagggcagtttctcccatgctattcttgtgatagaaagagagttctcatgagatcygaagcatctggcattacccccgcttgctcttctctctcctgctgcccagtgaagaagctacttgcttctcctttgccttccgccatgattgcaagtttcctgaggcttccccagccatgtggaactgtgagtcaattaaacctctttccttcacaaattacccagtcttgggtatttctttatagcagtgtgaaaatggactaatgcagagtgcatgaacaagcacaagctgatgctcaaagctgctgctggaagtgacatttccactcacgtgtcatcggccacagcaaaacacatggccacaccccagcataatagcacagggaaggatcatctcccttcacgaagaaagaggcctcaaatactgtgaacagctatacaccatctgcagtgcacacctgtctccagaggctttaatgctacaccagccactcactgcctccaccaccctcttctctcatagcggggtcagatttcacacaaatataagatgtgcttgtctgatggatattttaaggcactgatggagttctttgcctgtcacccaga

SEQ ID NO: 921490 - DNA, 765 bp, Homo sapiens
cagcatcccctggaacagtagaatgacaaaggcagacagaaggagtgtgatatggtttggctttgtatccccacccaaatctcatctcaaattgtaatcttcacgtgttgaaggagggacctgtaatccccacgtcgagggagggaggtgattggatcatgagggcagtttctcccatgctattcttgtgatagaaagagagttctcatgagatctgaagcatctggcattacccccgcttgctcttctctctcctgctgcccagtgaagaagctacttgcttctcctttgccttccgccatgattgcaagtttcctgaggcttccccagccatgtggaactgtgagycaattaaacctctttccttcacaaattacccagtcttgggtatttctttatagcagtgtgaaaatggactaatgcagagtgcatgaacaagcacaagctgatgctcaaagctgctgctggaagtgacatttccactcacgtgtcatcggccacagcaaaacacatggccacaccccagcataatagcacagggaaggatcatctcccttcacgaagaaagaggcctcaaatactgtgaacagctatacaccatctgcagtgcacacctgtctccagaggctttaatgctacaccagccactcactgcctccaccaccctcttctctcatagcggggtcagatttcacacaaatataagatgtgcttgtctgatggatattttaaggcactgatggagttctttgcctgtcacccaga

SEQ ID NO: 921491 - DNA, 765 bp, Homo sapiens
cagcatcccctggaacagtagaatgacaaaggcagacagaaggagtgtgatatggtttggctttgtatccccacccaaatctcatctcaaattgtaatcttcacgtgttgaaggagggacctgtaatccccacgtcgagggagggaggtgattggatcatgagggcagtttctcccatgctattcttgtgatagaaagagagttctcatgagatctgaagcatctggcattacccccgcttgctcttctctctcctgctgcccagtgaagaagctacttgcttctcctttgccttccgccatgattgcaagtttcctgaggcttccccagccatgtggaactgtgagtcaattaaacctctttccttcacaaattacccagtcttgggtatttctttatagcagtgtgaaaatggactaatgcasagtgcatgaacaagcacaagctgatgctcaaagctgctgctggaagtgacatttccactcacgtgtcatcggccacagcaaaacacatggccacaccccagcataatagcacagggaaggatcatctcccttcacgaagaaagaggcctcaaatactgtgaacagctatacaccatctgcagtgcacacctgtctccagaggctttaatgctacaccagccactcactgcctccaccaccctcttctctcatagcggggtcagatttcacacaaatataagatgtgcttgtctgatggatattttaaggcactgatggagttctttgcctgtcacccaga

SEQ ID NO: 921492 - DNA, 629 bp, Homo sapiens
atatctcttttgatttcttcttttagccatgattgtttaagaatatgttgttaaattcctacatttctgaatagtccaggtttttctcttatttatttctattttatttcattgttgctaagataccttgaactatttaattttttaattgaatgttttaaaatacaagtattgagatttgtcttgtggcctaacatatcctggggcatgttttctgtgcacttgagaaaaatgcatactctgctgtttgaggtgaagtttttcttatatgtctattaggtctattaggtttgtrgtgtttgaaaagttctttatttcataattattttttatatagttgcttattccagtattcaaagtgaggtattgaagtctgcaactagaactgcaaatttctgtcttcaatgctgccaaggtcccttcatgtagtttagggctctgagatttggtgcatatatgtttgtaagtattatgtcttcttggtgaattgatccttttaccaatatataatgttcttatttgtcttctgtaacaattttagatgtattgtctactttgtataataatcatacaaccatctcacctctcttttggttattgcttacttacacagaatgttttctcatatt

SEQ ID NO: 921493 - DNA, 571 bp, Homo sapiens
ctgtctctgccttgctggagtttcaggtttttataggcacaggatgggggcatggcaggccagggtggtctagggaaatgctacatttgcgcaagacatgcctgtcctcacttaggtccgtgggggtggaccccgagccagggrctacgccctccttactcagcacttccctttccctcccaactccagtatcatttaaagggaccacgctcttcccttcccagtacttctatataaatattactctaagatttacaatacaaattaatatccaattgtttgagagaattgcaataactaaagaatgcttatgatcccacatattttaatctgaaaatacacacatgtgtgcacacaggcacacgcacatgtacatgacttcaaaataaattctcaggtatactatatgactatcaaaattgaaatctctgtaaaacttaaaaattgtgctgtaaaaatagtattaaatactcaagaaaaaataaaactgctaagaattgctgagggtagtttggcaaaaatgagaatacaaaccatgagaatacagagtgatttttcttttttatttacc

SEQ ID NO: 921494 - DNA, 591 bp, Homo sapiens
gttcaagccaccgacatctcttaactggttggagtcacagccttctagcagctttctctgctgttacttttgctccttacattgtattctctgcataactactatactaatctccaaacctaaatggtatattgtgtttctatttataaatttgcagcaattttttattacagtgggaatacagatccagattctttactgtggccagtgaagtcatcgctgatctgcccccacccccggctcccccccttcctgtgatgttccagccacagtgccttccttctatctccctaatatgctgagcagagctccttcccttttcagggcttctgtgtttcttgtttgttgtacttggttggtcttctctggaatatttgcatgcttctgtctcttcattgcagctttggctcaaatgtcatttctgcargaggctttctctggccacctacctaaattgcattccctctctttctctcttctccctctacttctggttatgttctcacgttattattttattcaatgtccatctcaatatctgaaattatgtttaaaatatttgtatctgtcactctgtgccccacctcacat

SEQ ID NO: 921495 - DNA, 578 bp, Homo sapiens
agtgtctttataaaagagacctttgccatgtgaggttacagtgagaagacatctgtctatgaagaaagtgggccctcaccaaacacagtctgctggcactttgcacttcaactccccagcttccagaactgtaaggaatataagtctgttgttggtaagccacccggtctatgatattttkttatagcagcccaaacagactaagacaggtgacaaataaacatgaaaagatgttcaacatcattagccattagggaaatgcagattaaaaccacagcgaaatatcatgatacagttttcagcatggctaaactagaaaatagtgacaccaccaaatgccgacaaggctgtggggaaactgggttgttcagacactgccactggggctgtagcgtactatagccactttcataaacagtttgtcagtttcttaaaaaactaaacctgcaactaccatatgacccagcaattacacccctgggcacctacccaagagaaatgaaaactcaacgtttgcgcaaaaacctgtgtaggaatgttcaagcagctttattcataatatgcccaaacaggaaaca

SEQ ID NO: 921496 - DNA, 731 bp, Homo sapiens
tctgttggagtttgctagaggtccactccagactctgtttgcctgggtatcagcagcggtggctgcagaacagtggattttggtgagccacaaatgctgctgcctgattgttcctccggaagttttgtctcagaggagtacccggccgtgtgaggtgtcagtccgcccctactgggggttgcctcccagttaggctactcgggggtcaaagacccacttgaggaggcagtctgcccgttctcagatctcaagctgcgtgctgggagaaccactactctcttcaaagctgtcagagagggacatttaagtctgcagaggttactgctgtctttttgtttgtctgtgccctgcccccagaggtggagcctacagaggcaggcaagcctccttgagctgtgatgggctccacccagatggagcttcccrgccgctttgtttacctaatcaaacaactaactgggcaatggcgggcgcccctcccccagccttgctgccgccttgcagtttgatctcggactgctgtgctagcaatgagcgagactccatgggcgtaggaccttcggagccatgtgcgggatataatctcctggtgtgctgttttttaagcctgttggaaaagcgcagtattagggtgggagtgacccgattttccagatgctgtctgtcacccctttctttgactacgaaagggaattccctgaccccttgtgcttcctgggtgaggcgatgcc

SEQ ID NO: 921497 - DNA, 584 bp, Homo sapiens
ttatttatttgggagacaggtattgctctctcccccaggctggagtgtagtgacatgctcatagctcactgcagtatcccaggctcaagtgatcctcccacctcagcctcccacatgactgggaccacaggcacacaccaccacgcctggctaatttttgtatttgtagagatgagaccttgctatgttgcccagggtagtcttgaactcctgggctcaagcgatcctcctgcctcggcctcccaaactgctgggattgcaggcaggagcccctgcgcctgcccagctcacttttaattttttttggagagacagggtctcattgcattgcccaggctgatctctcaaacttcctgccctcaaacaatcctcttacctcagctgcttcttttttaagaatagcagttatttacattctacttatatatatatatatatttaaacctmactttagccaatgtgactgccaaaaaacaaacaaacaactaaactaactcactggaagatctttaaagaaaaacccatgcttttttccagcacattttagacatgtcattacatatggactagtcaaaaatcagttt

SEQ ID NO: 921498 - DNA, 550 bp, Homo sapiens
acagaaaaatgttgcaaagtttggaacttcctagagacttggagggctcagaagatagtgatatggacaataagatccaggctgaggtagtctcagatggagatgagaaacttgggaactggagcaatggtaactcttgctatacaaagagattggtggcattttgcccctgccctagagatctgtggggctttgaacttgagagagatgatttaggatatctgaggaaagaaatttctaagtggyaaagcattcaagaggaagcagagcataaaagtttggaaaatttgcagcctgacaatgcaatagaaaataaaaatccattttcgggggagaaattcaagcctgctgcagaaatctgcataagtaacaaggagcccaatgttattcaccaagaaatggggaaactgtctccagagcatgcgagagacattgtggcagcccccctcatcacaggcctgggggccttggaggaaaaaatggttttatgggctgggcccagggcccccctcatgtgtgcagcctatagacttggtaccccatgtctcag

SEQ ID NO: 921499 - DNA, 749 bp, Homo sapiens
accccaagatatctttgccattaactatcttgcttttatgactattttcacatcactcttagtatatcaactttggcgacaaaagacatcgttctacttatagcattctgtttttagtagtggtatttccatttacaaaatatagtaattctcaactgctgaaaatgtcaaatcctagaaaaaggagcattcctacgtgtgatattaacatcgttctcaaacagtcgttggctagagatttatttgacggatccgatttttctgaaatagacgattctgatgattcagatgattctgatgttagttctatttagaaataactccaagaacagtttttatattttcatattgaaagtcagtcagatttgcttcagcatcaaagagcatgtttatataaaattaaatgagtgctggcascgagctgcactttttttttttctaaaagggaaaagggttcaatgtaagacttgaaactatgaaactactaaaagaaaacattgggggaacactacaggacactggtctggacacagattttttgagtacagcctcaaaaacacaggcaacaaaagcaaaatcagacaaatgggattacataaagctaaatggcttctgaacagcaaaggaaacaacagagggaagagacaacttacagaatgggagaaatattcacaaactatacatccaacaagggattaagaaccactatctatctataaggaacccaagcaactcaacagcaaaaaaaa

SEQ ID NO: 921500 - DNA, 623 bp, Homo sapiens
tcccaaagtgctgagattacaaatgtgagccaccatgcccagcctgttttcaaaattttaatgtttagatttcatcatgagtgacataactttccaagtgtcacattaaaacaaatttcgaagaagcagctaattcactcaagtagtctttaactcattattatgccgaagttcaaattaattgttagtttttctgtattctctggttatggagcagactcccaattcctcggcttaccagttttgagaggaattgtgtaaaagagcatattccaagtccctatccccaaaacaagggagaataaaataacatacttaggctcagtacattagtactatttcttttgacaatatcataaattttaaaaaagaaaggcmtgcactaaagaatatttgtaaccaagtacatattctgaatagaaaagatttaatggaatccctatcacttagaaaagcagaaccactatggtaatatggaataatggatttattttcagttttagaccttgaacaattgtgggagctttgcagtcgctttcacgtcacatctggtatggagctaaagtcatcataggttagcagagctggcaactgggaagaaaacctagatttgaagtagagct

SEQ ID NO: 921501 - DNA, 668 bp, Homo sapiens
cattttaagaattctcctacacagtattttttagcacattttccccagttgtctcaataattcacttgaggagcaacagattgttcttctttcctattaattataagataaattataatttcagtgtttcaacagtagctatrtggacactgtgtcatttcagtaggagctgattatttttaccttttccattttaagttaatctctgggttaggatgatcaacctgcagatcttttggcataaaataaatcatccatggtaacacactgacagacttctctgtagggcaatcaagcatcttcccaggagactctgggcaaatctggacttaagaaattttctgtaggtagcatgagaaagacaggtaggaggctgcctttgtgtattagaccattcttgcattgctataaagaaatacctgaggctgggtaatttgtaagaaaagaggtttaattgtctcatggttctgcagatagtacaggaagcctagcagcatctgcttctgagaaggcatcaagaagcttccagtcatggcagaacgcaaagggaggcaggcatctcacctggagggagtaggagcaagaatgggggcagggtgacacacacttttaaacaaccaaatctcacgagaactcactgttgtgaggatagcatgaaaggaatggtg

SEQ ID NO: 921502 - DNA, 599 bp, Homo sapiens
gggaggcgctatgtgttcctctggctccttttttaaaggttgccttaaattagctgtgtcccttgttccacctttctaggcagcctgctaatgtgaccctttccctttccagtttctggtagcctttctcttccctkgtagtttctggtagcctttctcttccctgatctctttagtcctggagctggcttcagttgccactggcagcccagggttcttctaccatcctttggggcctccctatcacccaatctgcacctttattgctagcctttgtgcagagaagtcttcttgaattatccaagtttggctgtgccatctgttctttatgggagaatgcctggtacactgcccatccctgtagatagttctaggcataaatcactgcaagatgtgcctagcaaatgggatctcagatacaccaggccttggagtggcctccataaatcataacgtgcattaatttcttaaggggacaaagaaaaagcaaagaggatacttttcttctgtgactccctttaaactcaggaattcattaaggagcccttgaaaggaggcattcaatacaaatcttaaaatactgtttttcaactgcagcc

SEQ ID NO: 921503 - DNA, 697 bp, Homo sapiens
ctatttttctacctgtaaagtggagtggataggatccttggaatgctgttgtgaggatgaaatcagaccagaccacgggtatataatgccgctagaaatgtcccagtaagcgctagtctctctcttcctctgtctagcagccggattaccaacagsctgtcttctgttttttttttttttttttttccatgcaaagttttttatttataaacaaacataattaaaaacaaaatagtcaatatgaaacgaaagcaattttaaaagacaaattaattattttgatatagagaataatttgtatttcaacattttgatacagatttcagtaaaagcaaaactaaaataacacagataagtataataatataaagtcaagcattgcaaaaaattcaaggccaatactggaaagtgtatagaatatttggcaaaacaatttattaggagagtaacaaattgtttgtaagaactttaaatgctgtcttctggttttgttcagtgcttgccctgcatgatcctggatggtttacatttgggaagcattgagtgccgtcgtgggatggggaaagaatggaggcaacgacctgtgagtccctgcagaatctaaacatctgtctggagtgggcacagagcagacttctggggtggcgcctccaatccgccatctggcacttgaaagcagagtctcaggcctgctgtt

SEQ ID NO: 921504 - DNA, 584 bp, Homo sapiens
catctggctgtagatcaggggttcccacgaccccctcgtcgggttcagttatttcctagaatggctcacagaactcaagaaaaccatctacttgcaaaattaccactttatcctaaaaggatacaactcaggaacagccagatggaagagatgcattgggcagttatagggaaagaggcatggagcttccatttcctctccaggcccactgcccttccaagcacctccgtgtgttcaccaacctggaaactcatcatatcttcttgttgagtttttagacggcttaatatccagcctccttcgaatcccctctaggaggtcagtgggtggggttgataattctagccttctaatcacttggtctttctggtgaccgtgaccagcccaccctgagactatctagggscctacctcaagttagtcaccttattagcataaactcgggtgttaacaaaaggggctcattatgaataaacaaagacactcctattccttagttaattccaggagtttgggaagctctgtgccaccagacacaaagacaaaatatgttttgtattataccacaactggatagctctaat

SEQ ID NO: 921505 - DNA, 775 bp, Homo sapiens
aaacaaaggggcaaatccaaaacccagcagggcagtcattaaatcttaaagctccaaaataatctctaactccatgtctcacatccagtccacactgatgcaaggggtggaatcccagggccttggacatctccgcccctttggctctgcgcggtacagcctcttggctgcttttccaggctcatgttgagtgcctatggcttttccaggcacatggtggaasttgtcagtggatctaccattctgggattggaagaacagtgacctcttctcacagctctactaggcagtgccctagtgggaactctgtatgggggttcaaatgccacactctcctctgcactgccctagttgaggttctccatgagggctccacccctgcagcacacttctgcctgtatatccaggcatttccatacatcctctgaaatctaggttgaggctcccaagcttcagctcttgccttctgaacacccaaaagcttaccaccacgtggaagccaccaaggtttatggcttgcaccctctggaacagtggcctgagatgtatctggggcccttttagccatacctggaactggagtggctgggatgcagggagcagtgtcccaatgttgtgcagggcaacagggccctgagtctggtctgcaaaaccattcttccctcctaggcctccaggcctatgatggaaggggcttccacaaaggtctctgaaatgcctttgaggcattttccctgttgtcttggctattaacattcggcccctctttacttat

SEQ ID NO: 921506 - DNA, 573 bp, Homo sapiens
caaagtcttatctagagatgggttccttccacctatgaggctgtgatatcaaaagcaaattatttactttcaagatgcaatggtagtataggcattgaggatacagtcccatcccaaaagggagaaatcagccaaagaaaggggtaataggcytcaaacaagtctgaaacccagttgggcagtcatttaatcttaaaattctaaaataatctttgactctatatcccacatcctgggcacaattgtgaaaggggtgggctctcaaagctttgggcagctctgtctctgtggctttgcagggtgcagcccatgtggctgttctcatgggttggaattgagtgcttgtggcttttccagacagaggatgcaagctgccaatgaatcaaccattctcaggtatggagggtggtggcctccttcccaccactccactaggcagtcccttggtaggcactctgcatgaagtctccaaccccacgtttctcctttgcaccaccctagtagagtttctctggtgggggctccacctctgcagaaggcttctgcctgggcacccaggcttttccacccatc

SEQ ID NO: 921507 - DNA, 732 bp, Homo sapiens
ttggtctcataatgtgattatcttttatctagactataatatctgtagattggacaccatatctgtttttgctcaccataatatatgcagagcctagtacagctcctagtgctcagttgaagattaaaatatatatttttaataaatgaaataaggactgtttggaataagaaaatggaaagccttttaggcatcataaaaaccagaaaatatatgcaatagagaatagaaacaaaaataaaatcaatgaagccaaaagttggttctttgaaaagaataacaaaatggtagcatctttagctaaaataagcatgaaaaaagggaagagacccaaatactaacctgaggaatgaaagagggaatatcactaccaactttataaagtaaaaaagaattctaagaaattacttgcgttgtatggcaacatatcaatttatgtagatgaaactttacaatttctagaaagacacaaactccaaaattggcttaaataaaaatagaaaatcagaatgcatataacaaaagaatgaattagtaatttagaaacctttctccaaaaagcccaggcccagatgggcttcaatgataarttctagcaaatatttaagaattaaacaaatatgtaaacaactcctgcaaaatataaaagagaaaagagtacttcccaactcttattgttattattgccatagtacttactagacaaagacatttaaaaaagaaaaccgtaga

SEQ ID NO: 921508 - DNA, 715 bp, Homo sapiens
ggattgggtttccgcaccgctatgatctaaatgtgtctacccaaaattcaaatgtggaagcttcatctccgatgttatggtattaataagcggggccttaggtggtgattaggtcatgatgtgttcggaattggtgaggtctcgstctcactgacttcaagaatgaacttgcggaccctcacggtgagtgttacaggtcttaaaggtggtgtgtccggagtttgttccttctgatgttcggacgtgttcagagtttcttccttctggtgggttcgtggtctcactggcttcaagagtgaaattgcagaccttcgcagtgagtgttacagctcttaaggccacatgtctggagttactagatcctcctgtctgggcttgttcattcttcctggtgggttcatggtctcgctggcctcaggaatgaagctgcatacccttggggtgagtgtttcagctcataaaggcagtgtgaacccaaagagtaagcagcagcaatatttatcgcaaagagcgaaagaacaaagcttccacactgtcgaaagagaccggagtggattgccactgttggctcaggcagcctgcttttattcccttatctggctccacccacatcctgctgattggtccattttacagagagctgattggtctggtttgacagggtgctgattggtgtgtttacaatccctgagctagacacagagtcctgattggt

SEQ ID NO: 921509 - DNA, 715 bp, Homo sapiens
ggattgggtttccgcaccgctatgatctaaatgtgtctacccaaaattcaaatgtggaagcttcatctccgatgttatggtattaataagcggggccttaggtggtgattaggtcatgatgtgttcggaattggtgaggtctcggtctcactgacttcaagaatgaasttgcggaccctcacggtgagtgttacaggtcttaaaggtggtgtgtccggagtttgttccttctgatgttcggacgtgttcagagtttcttccttctggtgggttcgtggtctcactggcttcaagagtgaaattgcagaccttcgcagtgagtgttacagctcttaaggccacatgtctggagttactagatcctcctgtctgggcttgttcattcttcctggtgggttcatggtctcgctggcctcaggaatgaagctgcatacccttggggtgagtgtttcagctcataaaggcagtgtgaacccaaagagtaagcagcagcaatatttatcgcaaagagcgaaagaacaaagcttccacactgtcgaaagagaccggagtggattgccactgttggctcaggcagcctgcttttattcccttatctggctccacccacatcctgctgattggtccattttacagagagctgattggtctggtttgacagggtgctgattggtgtgtttacaatccctgagctagacacagagtcctgattggt

SEQ ID NO: 921510 - DNA, 653 bp, Homo sapiens
gtacaggtgttgggtaaatacagtcattccaaatggcagaaattggccagaatgaaggggctacaagtcccctgcaagtccaaaatccagtggggcagtcaaatcttaaagctccaaaatgatctcctttgactccatgtctcacgaccaggtcacattgatggaagagatgggctcccatggtcttgggcagctctgctcctgtggctttgcagggcacagcttccctcctggtttctttcatggggtgtgttgagtgtatgcagcttttccaggtgcacagtacaagctatcagtgaatctaccattcygggatctggaggacgttggccttcttctcacagctccactaggcagggagtaccccagtagggactctgtctgggggctccaaccccacatttcccttccacactgccctggcagaggttctccatgagggccccacccctgcagcaaacttctgcctggacattcaggcatttctatacattctgtaaaatctaggtggaggttcccaaacctcaattcttgacttctgtgtacccacaggcccaacaccacatgtaagcttctaaggctttggacttgcaccctctgaagcaatggcctcagaagtatgttggccccttttagtcatggctagagctgaa

SEQ ID NO: 921511 - DNA, 582 bp, Homo sapiens
catggagggactaagatgactggcaggctttaaacagatctttagaggcaaggaactgagagtggatggaggaaagacacacaaactgggctgaagggagaaagagctgggaaccctgaactacacacaggaactaattttttttttttttttttttttgagacagaatctcattctgtcgccaggctggagagcagtggcttgatctcagctcattgcaacctccacctcctgggttcaagcgattctcctgcctcagcctcctgagtagctgggactacaggtgtgtgccactatgcttggctaatttttgtacttttagtagagacagggtttcaccatgttggccaggatggtctygaactcttgacctcatgtccgcctgccttggcctcccaaagggctgggattacaggcgtgagccactgtggctagcacagaactcattcttgaaccacaacagctctgggggaatggagtcacccactctcactaccagcctctggaactctggcaggaggagaacccttgaccaccatggacaattgaggtggcagggagagctgctttgagaagtggtag

SEQ ID NO: 921512 - DNA, 766 bp, Homo sapiens
agtttccaaataattggagattaaataacacatgggtcagagaaaataccttaagagaaatttgaaaatacattgaactaaatgcaaactaaaagtacaatttatcagagtttctgggatacaacaaaaccagtgcttagaaaaatattcacaacattgaatacatatattagaaaagaagaaagatctaacataaattatctaaacttccaccatagagaaccagaaacagaagagcaaataaattaaagtaagcayaataaaaaataataaaaattagggaagaaataaaattaaaaatagaaaatcaatagagaaaatcaacaaaaccaaaagctgattctttgaaaagatcaataaaattaataagcctttagccaagttaagaaaatatacagaacacaaattactaatataaatgaaagaggaggcatcactataaatcccgtggacattaaaagaataatgaaacaatactatggaaaaactctatatctacaaacttgacaacctagaggaaatgagacaattccttgaaagacacagtctgcaaatcttatacaagaaaaaatattatattagtatctgaatatgtccatattcattaaagaaattaaattaataataaacttcccaaacagaaaacatcaggcaggcccagatgagttcactggtaaattctgtcaaacatttaaggaagaaactataccaattctctataatttcttccagaaaataaaagcagaagcaatactttttaattcat

SEQ ID NO: 921513 - DNA, 607 bp, Homo sapiens
gcttttgccatgctgtgttgatttcccttcagcctgtactttcaggccttgttagcactctcaggggaaaactgcctagtcaagcctcagtaatggcggatgcccctccccccaccaagctagatcgtcccaggttgacttcagagtactgtgctggctgtgagaatttcaagccagtggttcttagcttgcttgtctccatgggagtgggaaccactgagcgagaccacttggctctctggcttcagccccctttccctctttccaggggagtgaayggttctgtcttggtggagttccaggcgccactgggaaacaacaagaaaacaactcttgcagctagcacagtgactgcccaaacagcctcccagttttgtgtttcaaacccaggtccctggtggtgtaggcacaagagggaatctcctgttctttggattgcaaacctgtggggaaagcatagtaaatgggctggatagcccagtctctcagggcttcccttggctagggaacggaggcccccactccttgcacttcccgggtaaggcaatgcccaacactgcttctgctcgccctccatggtctgcacccactgcctaaccagtcccag

SEQ ID NO: 921514 - DNA, 566 bp, Homo sapiens
taaacttatcctttaagattagttagccttcaatagagtcaggtgacagagaggtatgcttcctcaatgcctccctttgtctctccagaaaggaagtaggattttcttcctttcctgtgttatagtagacatcattgaataatttataggcttcttcctagttttccttagtccttctaacacgcaagttagcaaatgtctgtggcaccaatctccatgttctgattctgcatccctctgagggtctacactgggaactgcctggtggcagaattgttctgwggggaactattctctttcctctgttgtcatcctatcattgacctgactgagataccagagattgacaaactctcgggctgcagttatggtggcacttctctcatatggggttagtgtctgatctagcagtaacattatatgtctccatgtcagatcaaaggattgtcctaacccttgtaaaacatcagtatagccatcagggttatctgagaatttacctaggtctattataatttgcttcaagtctgagaggaaaaaggcacatgcactctgactgggccgaa

SEQ ID NO: 921515 - DNA, 634 bp, Homo sapiens
aaagggaccaaagtacagcttgagctgttgcttcagagggtggaagccccaagccttgtcagcttccacgtggtgttgagcctgtgggtgcacagaaatcaagaattgaggtttgggaacatctgcttagatttcagaagatatatcgaaacacctggatgcccatgcaaaagtttgctgcagtgatggggccctcattgacaacctctgctagggcagtgaggaagggaaatgttgggtgggagcccccacacagagtccctaytggggcaccgcctggtggacctgtgggaagagggccaccatcctccagacctcagaatgttagatccaccaacagcaccatgtgcctgggaaagccacagacactcaacaccagcccacaaaagcagccagaaggcaggctatatcccgcaaagccacaggggcagagctgcccaataccatgggaacccacctcttgcatcagcatgatcaggatgtgagacatggagtcaaaggagatcattttggagctttaagatttggctgcccctctggatttctgacttgcatggcgtcaagaaatgaaaagcataaaaattgaaaagtgaaagaaaaaatatttttattcacagaacatatatatgtatat

SEQ ID NO: 921516 - DNA, 372 bp, Homo sapiens
aaagtagtataggttatgcaatatgcttaataaagtatgtttgtctattttcgttatgtaatccaaaacctggccaaccacaaaacttgttttttactcactttctctttcttccctgtttagtgcagcgtaaaattagttattgattttatctcttaacgctcygcctctattagtgaaaggatcttctcttatcatatttccagtccaaagttcagtggaaactttttaccctcttacagtctatttgaaatccttatatcataaacataccagcacttatcacagcactattcacagtagcaaagatactgaatcaacctgagtgtccaccaatagatgatttgataaagaaaatgtgagatggtacca

SEQ ID NO: 921517 - DNA, 603 bp, Homo sapiens
tttgccctagccagaacttccaatactattttgaataggagtggagaggaagggcatccttgtcttgtgctggtcttcaatgggaatgctttcagcttttgcccattcagtataatgttggctgtaggtctgtcatagatggctcttattattttgagatatgttcctttaatacctagtttattgagagtctttaacctgaatgggtgttgaatgtcatcaaaatacttttctgcatctattgagataatcatgtggttttggtctttagtttgtttaygtgatgaatcatatttttgatttgtatatgttgaaccaaccttgcacctcagagataaagcctactggattgtggtgaataagctttttgatgtgttgctggatttgatttgccagtattttgttgagaatttttgcatcgatgttcatcaaggatattggacttaactcttctttttttgttgtatatctgacaggttttagtatcaggatgatgctggcttgttattaatagaatgagttagggaggggtctctctggctcaattttttggtatagtttcaataggaattgtactagcttgtcttcgtacatctgacagaa

SEQ ID NO: 921518 - DNA, 697 bp, Homo sapiens
catttatgttcctgtctaaattggttattctagttagcagttcctgtagccttttttgaaggttcatagcttccttgcattgggttagaacatgctcctttagctcagaggagtttgttattacccagcttctgaagcctacttctgtcaattcttcggtctcattctctgtccagttttgtgcccttgctagagaggagttgcgatcatttgcaggagaagaggccttctggtgtttggaattttcagcatttttgcacttgtttttcctcatctttgtagatttatctacctttgatctttgaggctgatgaactttggatggggtttttgtgtggggggtcctttatattgatgttgttgctttctgtttgttagtttttctcctaacaggcccctcttctgcaggtctgctgcagtttgctggaggtccactccagaccytgttcgcctgggtatcaccagtggaggctgcagaacagcaaagattgctgcctgctccttcctctggaagctccctcccagagcggcactggcctgatgccagccggagctctcctgtagatgtctgttgactcctgttgggaggtttctcccagtcaggaggcccgggggccaggggcccacttaaggaggaagtctgtcccttagcagagctggtgcactgtgctggcagaatgcctcttgtcaggatcag

SEQ ID NO: 921519 - DNA, 697 bp, Homo sapiens
catttatgttcctgtctaaattggttattctagttagcagttcctgtagccttttttgaaggttcatagcttccttgcattgggttagaacatgctcctttagctcagaggagtttgttattacccagcttctgaagcctacttctgtcaattcttcggtctcattctctgtccagttttgtgcccttgctagagaggagttgcgatcatttgcaggagaagaggccttctggtgtttggaattttcagcatttttgcacttgtttttcctcatctttgtagatttatctacctttgatctttgaggctgatgaactttggatggggtttttgtgtggggggtcctttatattgatgttgttgctttctgtttgttagtttttctcctaacaggcccctcttctgcaggtctgctgcagtttgctggaggtccactccagaccttgttcgcctgggtatcaccagtggaggctgcagaacagcaaagattgctgcctgctccttcctctggaagctccctcccagagcggcactggcctgatrccagccggagctctcctgtagatgtctgttgactcctgttgggaggtttctcccagtcaggaggcccgggggccaggggcccacttaaggaggaagtctgtcccttagcagagctggtgcactgtgctggcagaatgcctcttgtcaggatcag

SEQ ID NO: 921520 - DNA, 564 bp, Homo sapiens
tggaatgaagtcaacacaataaaacactctttcaaaaaagttttctacaaagataaatacaggtatgagatgatatctgaaaggaatatactgccagcatatatttttaatggaaactattacaatgtttttaggctgttgagaacaatctaatatatagtgaagcaaatgatgaaggaggggaagagaggaatacacctcrgttggaaagaggggagggcatgtggaatgtatgttgagaggttgtttagatagaagtaacgtggtgccactcaggtaacaagggggaagtggagccattggcatagatgcagataggatagtaggtttgatgttgaaagaatgacagcattcttttttctgatttcttcactttctttggtaactagaaaatgaatgtagtagataaggaagaggaaagaagaaagagtattagagtttagagaagagaagagaaactatgaaataacgtcataaaatgagagaacaaattcagcacgaaaacagagtaaacccacttcttagggttgccttgagataagggtcccagatgttgcaattttt

SEQ ID NO: 921521 - DNA, 667 bp, Homo sapiens
cagactgtaaccgtttgagaagtgacaaaaagtgaggaaagattcaggaatataggccaataactggttcccaactaggcagctttcttgaatacagaaccctgccaggcacagtgcctcacgcctataatcccagtcctttgggtagctgagtcggaaggatcacttgaggccaggagttcaggacacagcaagaccccatctctacaaaaaaaatataaaaattagcagccgggtgtgctggctcatgcctataatcccagcactctgggaggccgaggtgggtggatcacttgaggtcaggagttcaagaccagcctggccaaaatggtgaaaccctgtctctactaaaaataaaaaattagcgaggcgtggtagcacacacctgtaatccaagctgctcggtaggctaaggcaggagaatcacctgaagctgggagacggaggttgcagtgagccgaggtcatgccattgcactccagcatgggcaacagagtgagaaactgtatcaaaawtaaaataaaataaaataaaataaaataaaataaaataaaaaagcctggcatggtggcttgcacctgtagtaccagttgcttgggagaccgaggcaagagtatctcttgagcccagagagctaggggctacagtgagctgtgatcacgccact

SEQ ID NO: 921522 - DNA, 615 bp, Homo sapiens
caacctaccattgaatgcaaacctctgtaattatcaatctacaaagttttaaattataaaagacagcgcttactctgttacaaatcaaaacacgcctagacaatgtacaatttctccctggatgccaaataaaaacacttgcatttgcatattggctccaacaacaacttggggtttgaggtaggttgctcctcctctttgtgcttcagtttcctcagctctaaaatgaagaaatgatactagattctctcttattttttgcattataaaagtgattttccttttatgttagcatggtagggggataagagtggagcagaatcaatgtttgggggcagggtttgggcccacgatttcccaastagggttggcacaaacccagatactatcttgacccataatcaaatcaataatgaaatgaaaggcattcacattaattttgcagatggcatccacatagagtacctcactaacatactagaacagtaagtctcaaccttaactgtatgttgaaatcacccagagagttgtaaaagaatcctgacgcctggggctgacaccctgagagtctcatataattggtctggagtacagcctgggcttcaggatttttgt

SEQ ID NO: 921523 - DNA, 606 bp, Homo sapiens
gaaagtaagtggaaagcaccgaagaggaggcaacagcctgtgatcaagccaaagctgtgaatcagttgtggtgggagaaccactggccattctgagtggaaggtgcaggtacacacagagcagggcagagaggtaggggagagggctggccagctggcggcaccatggtgtgccttataygctctaaccaagcatttggacctgagctttaggccagtggttcaaactgagctccctggaatcctcagagccccactggcacctggaggaaggtgaaccagagggagggaacggacgagatgatgcaggttctgcacccagccccaccccaggtctcagggaagctgcactttcattggttgttcatttagattttcagtgtaagatttcatttgaagggtttgcagcaaatgcattggaaactgctcctgcaagctgggagaagtcttaagccagaagtgacatgaccagcattttatgattcatttgttcttcaaaaaacttggcagaggccgggcacggtgactcatgcctgtaatcccagcactttgggaggctgaagcgggtggatcacctgaggtcaggagtttgagaccagcctggcca

SEQ ID NO: 921524 - DNA, 606 bp, Homo sapiens
gaaagtaagtggaaagcaccgaagaggaggcaacagcctgtgatcaagccaaagctgtgaatcagttgtggtgggagaaccactggccattctgagtggaaggtgcaggtacacacagagcagggcagagaggtaggggagagggctggccagctggcggcaccatggtgtgccttatacgctctaaccaagcatttggacctgagctttaggccagtggttcaaactgagctccctggaatcctcagagccccactggcacctggaggaaggtgaaccagagggagggaacggacgagatgatgcaggttctgcacccagccccaccccaggtctcakggaagctgcactttcattggttgttcatttagattttcagtgtaagatttcatttgaagggtttgcagcaaatgcattggaaactgctcctgcaagctgggagaagtcttaagccagaagtgacatgaccagcattttatgattcatttgttcttcaaaaaacttggcagaggccgggcacggtgactcatgcctgtaatcccagcactttgggaggctgaagcgggtggatcacctgaggtcaggagtttgagaccagcctggcca

SEQ ID NO: 921525 - DNA, 562 bp, Homo sapiens
gggaggggcaggatgctggacaggcactttggcctttaaggaaggtgacgtggggtgtagagtgaaaggggagagccccagctcagggaccagacttaggttacacatattaaatcctggttccttcctctttcatggtgagagcttgggctaggactttacctccttgaacctcagtttctccatctgtaggataggatcgtaatggcccttccttccagggctattggaggttccaggaggcccacagtgggccatcaggaacgggagcctgatctcggtcactattccacagggctttccacagcattaaggaagctggtcaagacaaataactgcctgactggctgggtgtggtggctcacacctgtaatcccagtaytttgggaggccgaggtaggcagatcacctgacgtcaggagtttgagaccaccctggccaacatggcgaaaccctgtctctactaaaaatacaaaaattagccgggcgtggtggcaggtgcctgtaatcccagctactccggaggctaaggcaagagaatcacttgaactcaggaggcata

SEQ ID NO: 921526 - DNA, 564 bp, Homo sapiens
cccaccttatctgcacaatctgagcatctagctgtaacagattcttcaaacgtcaataactcagtttttccatctagcatgtctcatggtcatgaacttttgttctaccatctcaattcccaaaaagttacatcttactttagtgagtgcaattcttcatttatttccaattctcctcctcttaaaaaygacatgaggtgatttacaaactactcatgatacaaaagataagaaaaagtatttgaggaagttagagtgattgtaaaatatgtacaggaagggaatacagaatattgccccaaaataccacatagtgagttgatgaagttggtcactaatttgactgaggtttgggcaaagaaaagaggaaaagctgtcacttcacctacaataaaaatctaacaattgtggccgggcgcagtggctcacgcctgtaatcccagcactttgggaggccgaggcgagcatctgaggtcaggagttcaagatcagcctgaccagaaacctaccaaaaatacaaaattagccgggcatggtggtggatgcctgtaatctcagctactc

SEQ ID NO: 921527 - DNA, 564 bp, Homo sapiens
cccaccttatctgcacaatctgagcatctagctgtaacagattcttcaaacgtcaataactcagtttttccatctagcatgtctcatggtcatgaacttttgttctaccatctcaattcccaaaaagttacatcttactttagtgagtgcaattcttcatttatttccaattctcctcctcttaaaaatgacatgaggtgatttacaaactactcatgatacaaaagataagaaaaagtatttgaggaagttagagtgattgtaaaatatgtacaggaagggaatacagaatattgccccaaaataccacatagtgagttgatgaagttggtcastaatttgactgaggtttgggcaaagaaaagaggaaaagctgtcacttcacctacaataaaaatctaacaattgtggccgggcgcagtggctcacgcctgtaatcccagcactttgggaggccgaggcgagcatctgaggtcaggagttcaagatcagcctgaccagaaacctaccaaaaatacaaaattagccgggcatggtggtggatgcctgtaatctcagctactc

SEQ ID NO: 921528 - DNA, 738 bp, Homo sapiens
ctgttcctgacagagttcctaaaagccttgtcgatgggggcaccaggagaatcttttgttctaatgtttggctttgaccctggttcctaacacagagcttctaatcccttggaatttcctgagtgacagagcatcttttgtcctaatgaagtgtccctgatgggctcctggacagcgtcaggatgggggygctgcctgcaaggggaaccaccatgcaattagaggattgggactttcgaatctgtgcccttaccccctggcgtctggggagaggtgagggactggggttgagttgatcaccaatggctgatgatttaatacatcatgactacgtaacaaagtctccatatagcccccaaaactgggttcagagagcttctgtatagctgaatgtgggaaggcgcctggaggggagcactttggaaaatccctgacctctctcacacgccaccatacgcacctcttccgtccgactgttcatctgcgttctttgtaatatcctttatgctaaatgcataacatacgcaaggtgtttccctgagatctgtggagcactctagcagattaattgaacctgaggagggtgtcatggaaacccccagtttatagctggtcagtcagaagcacaggtgacaacctactacctgtggttggcgtctgaagtggtgggcagtcttgtgagactgagccctccacctgtgggacctgatgctgtctctaggtagatcatgccagaac

SEQ ID NO: 921529 - DNA, 596 bp, Homo sapiens
ttattattttatgggagtctaagtctctttgtaagtgtctaagaactggctttatgaaactgggtgctcctgtgttaagtgcatatatatttaggatatttagatcttcttgttgaattgaaccctttaccattatgtgatgctcttcgtcatctttttggatgtttttggtttaaagcttgttttgtcagaagctaggattgcaatccctactttttcctgttttccatttgcttggtaaatttacctccatctctttattctgagcctatgtgtgtcttcacatgtgagatgggtctcttgaagagagcataccagtagatcttggctctttatccagcttgctattttgtgccttttaattggggcatttacatttaaggttagtatttacatttaaggttaatattgttatgtgtggacttgatcctgtcattatgatgctaactkgtttttttgcaggcttgtttatgtggttgcttcatagtgtcactggtctgtgtacttcagtgtgtttttatagtggctagtaatagtttttcctttaacagtttttccttccaggagctcttgcaagccaggcctagtggtgacaa

SEQ ID NO: 921530 - DNA, 578 bp, Homo sapiens
gggaagaggggctggtgaggagccgctggagttccgacttagagagaattcctgtccaccggtgtggaatgccccgtgccattccttcctccccttggtgcctggcacagggcttgcagatcctctgcttagccccccaacccagtctaccttaactctcctgcctggggatttgcctcttgggatgttggtggaggggatctctatatggtaggaggagggctttgtagtaattcttagccataatgctgtgctattccacaaacctcagccatcttctcccacgcccttacgaggtcctactttatacattcttaccagatgctacataagaaagagcataagagactgagatgtttgactcagagaaggaaagtgaccagctcaaggtcactcagcaagtgtgtagcagaactgggactkgcttcaaccagtttcctgttgggtcattgttcccggcactgaagatagtgcctggcctgaggggctgtcttgtcatttcacatgtacagtgtcttacttttagccctggacttaaagcaacttataagcaaggaccgtgtcttatgcttagtttt

SEQ ID NO: 921531 - DNA, 580 bp, Homo sapiens
tgcagctgagggtcctgactgttagaaggaaaactaactaacagaaaggacatccacaccaaaaaccaatctgtatgtcaccatcatcaaagaccaaaggtagataaaaccacaaagatggggaaaaaacagagcagaaaaaccrgaaactctaaaaatcagagcacctctcctcctccaaaggaacgcagctcttcaccagcaacagaacaaagctggacagagaatgactttgacgagttgagagaggaagccttcagaagatcaaactactccgagctaaaggaggaagttcgaaccaatggcaaagaagttaaaaactttggaaaaaaattagatgaatggataactagaacaaccaatgcagagaagtccttaaaggacctgatggagctgaaaaccatggcacgagaactatgtgacaaatgcacaagcctcagtaactgatgcgatcaactggaagaaagggtatcagcgatggaagatgaaatgaatgaaatatgaatgaaatgaagcgtgaagagaagtttagagaaaaaagaataaaaagaaatgaaaaagcctccaagaaatatgggtc

SEQ ID NO: 921532 - DNA, 612 bp, Homo sapiens
aaattattttttctaaaacaccttcaagaacagtacagattttctatttcaaattaatattcattacattcaaagtgcagagaagggaaacagtgacatagactattcaataaataaataatattgctatggtttgaacgtatgtgtcccaccaaaatttatacattggaacttaaaccccaagatgatgatatgaagaggtggtgctatgggaggtgattaggccatcagagactaatcccacccttattaatgggattaatgccctaacaaaagaggcctcagagagcttcctygcccttctgtcgcttctgctatctgaggacacagcaacaaagcagggggggggaagcatagaatgagccttcaccactaattgaacctatcaatgccttatcttggacttcccagcctccggaattgtggaaaataaatatttttaaagacagggtctcactatgttgcccaggttgatctcaaactcctgggctgaagtaatactcccaccttggcctcccaaagtgccaggattactagtgggtgccactgtgcctagcctgcaaaataaaattctgttgtctacaaagtacccagtctaaagtattttgttat

SEQ ID NO: 921533 - DNA, 612 bp, Homo sapiens
aaattattttttctaaaacaccttcaagaacagtacagattttctatttcaaattaatattcattacattcaaagtgcagagaagggaaacagtgacatagactattcaataaataaataatattgctatggtttgaacgtatgtgtcccaccaaaatttatacattggaacttaaaccccaagatgatgatatgaagaggtggtgctatgggaggtgattaggccatcagagactaatcccacccttattaatgggattaatgccctaacaaaagaggcctcagagagcttccttgcccttctgtcgcttctgctatctgaggacacagcaacaaagcagggggggggaagcatagaatgagccttcaccacyaattgaacctatcaatgccttatcttggacttcccagcctccggaattgtggaaaataaatatttttaaagacagggtctcactatgttgcccaggttgatctcaaactcctgggctgaagtaatactcccaccttggcctcccaaagtgccaggattactagtgggtgccactgtgcctagcctgcaaaataaaattctgttgtctacaaagtacccagtctaaagtattttgttat

SEQ ID NO: 921534 - DNA, 625 bp, Homo sapiens
attctagttgaatgtgaactgtttctgatggccttttctattggggattgaaaagcatgcatttgccaaattggtggttgggtaccataaacccaaggccatatttatctgctcccacaatggcactatgttggacacagcagatatgatcaaggtcattgcttggttgtacttgtggtagtcttcagtcattttctaggatccattcagtttctgaaaggaccagactagggaattcaatggagatatgacagggaccaccatccctgcatccttgcctctttaatctctactattcccccagggtgtaatactgtttttgatttacttatcgtagccagcaatttctgagccctacacttggccttctccattatgacaactcttktctaaaagccaaggacctagtgagggagttacatcaactgccaagtataataataccaataatacatttttggacaggaaaaatgacccctgtatgggcccatggaccagtggactcactataaaccattctttggccaggaatctatttattgcctaacatccatgtcctccgcttctcacaggagcccatgatcatgcttcaggtctttacgtatcaatgatgattcagaccctg

SEQ ID NO: 921535 - DNA, 599 bp, Homo sapiens
aatgggccaatcagcaggatgtgggtggggccaaataagggaataaaagcaggccaaccctagccagcaacgccaacccatttgggtcattttccaccctttgggagctttgttgttttgctgttttcaataaatcttgctgttggtcgctytttgggtccacactattatgagcactcactctgaaggtctgcagtttcactcctgaagccagcgagaccaccagaccccttggaagaacaaacaactcccgacgcgccacgtttaagagctgtaacactcacttctaaggtctccggttttactcttgaagtcagtgagaccgctaacccaccgggaggaatgaacaacttcggaccacctttaagagctgtaacgttcactgcgaaggtctgcagcttcactcctgaagtcagcagcgagaccacgaactcaccagagggaagaaactccagacacatctgaaggaacaaatcccggacacaccatctttaagaactgtaacactcaccgcgagggtcccggcttccttcctgaagtcagccggagcaagaacccagcaggaaccaattccggacacagtggggactttggggagc

SEQ ID NO: 921536 - DNA, 605 bp, Homo sapiens
aatagaatagactaaatcctaaactcttcatttcctccaatttaattttcttccacagaattaacaaaaatgaaaactgctctgtttctgaagccctataagctgaaactagatgcatttttcgaaacaattctcaagcctgatgtccagggtcacacaaatattcacaaacccacccaatgccataaccagagacatcaaactacaaacctggaaaataagttgaagttttcacccattagacagcttttcccaagatgtttcccagcacatgttataatgagactcttaaccatcttagtgcccacttttccacttggcaagctgaaggccctttaatttattcatttggctgcctttcagcctcagttcatatctcaaaacyattataaaactaggactgtcatattactattaatttttcttttcatttttccttttaaaactctgtatctgtaacttttaaagtttttgcagacaccaactcctaagagaataatgctggcccagcactttatgaaactatggaacagatataattgaacttaataacagactcccggtagaattagtctccgagtcactcctttcaatcctcccatgtt

SEQ ID NO: 921537 - DNA, 624 bp, Homo sapiens
tttgaatatgctttatttctttctcttgcctgaatgccctggccagaacttccaataatatgttgaataggagtggtgagagaggacatccttgttttgtgccagttttcaaagggaatacttccagctttttcccattcaatatgatattggctgtgggtttgtcataaatggctcttgttattttgagatacattccagcaatacctagtttattgagtgtttttagcatgaaggggtgttgaattttatcaaaggccttttctgcatctgttgagataawcatgtggtttttgtcattgtttctgtttatgtgatggattatatttattgatttgcacatgttgaaccagccttgcatcccagggataaaaccgacttgatcatggtggataagctttttattgtgctgctggatttggtttgccagtattttattgaggatttttacactgatgttcatcagggatattggcctaaaatttcctttttttgctgtgtctctgccaggttttgggattagggtgatgctggagtcaaaaaatgagttaggaaggagtccctctttttctattgtttgtaatactttcagaaggaatggtttcagctccaatttgtaattct

SEQ ID NO: 921538 - DNA, 624 bp, Homo sapiens
tttgaatatgctttatttctttctcttgcctgaatgccctggccagaacttccaataatatgttgaataggagtggtgagagaggacatccttgttttgtgccagttttcaaagggaatacttccagctttttcccattcaatatgatattggctgtgggtttgtcataaatggctcttgttattttgagatacattccagcaatacctagtttattgagtgtttttagcatgaaggggtgttgaattttatcaaaggccttttctgcatctgttgagataatcatgtggtttttgtcattgtttctgtttatgtgatggattatatttattgatttgcacatgttgaaccagccttgcatcccagggataaaaccgacttgatcatggtggataagctttttaytgtgctgctggatttggtttgccagtattttattgaggatttttacactgatgttcatcagggatattggcctaaaatttcctttttttgctgtgtctctgccaggttttgggattagggtgatgctggagtcaaaaaatgagttaggaaggagtccctctttttctattgtttgtaatactttcagaaggaatggtttcagctccaatttgtaattct

SEQ ID NO: 921539 - DNA, 610 bp, Homo sapiens
ctggattataagaccacaattcatgattttgctgaaaagaaggcaagaaaaataaattttatagaatacatatgtaataatttgtgaattatgtgtgtctttattattcatccaaacattactagcccatcaatagaatatcagacatgggcaataatgattaaattcaactatctttggtatttttttgacttttagtcattatgagtgtgtatttgtcaaagtacttagtttaacagtttgttagtcttcatgtataacttttaaatatttaggtatatttaaaagtttctytgtaacagtcaagaatcccagaaatagccagtttgggctgatctgtagctcaatgctctccttgccagagtcccaccaacatgagggacaggcttgggtttgcaagtacactcttacagtacgtttctcatttacagaagttattctgatgggataactgccccctcaacattgcagccaggatggtgtttatgtgttacaaatctgtccatgcactcccctacttggagccctttggtagctccccttcccacttgggatgagttcatgatatcagccttttcctttctagattcactttatactgctcctcctc

SEQ ID NO: 921540 - DNA, 642 bp, Homo sapiens
tgtctatttgtgactggcttcttaacatatttctgaggttcatccatgtcatagcttctatcagtatttcattttttaaaattgccaaataatagtccattttatgggtatgccaccttttttttaatccacattggttaatgggcatttgagttgtttctactttagggctatatatatatatttctatttctattatttatttttgagacacagtttcgctcttgttgtscaggctggagtgcaatggcacgatctcggcccactgcaacctccacctccggggttcaagcgattctcctgcctcagcctccagagtagctgggattacaggcatgtgccaccacgctggctaattttttgtatttttagtagagacagggtttcaccatgttggtcaggctggtctcgaactcctgacctcaggtgatctgcccacctcttcctcccaaagttctgggattacaggtgtgagccactgcacctggccctactttttggctattatgaatagtgttgctacgaacattcccgaacaagtttttgcagggacaggtattttcatgactcttgggtatatacctaggagtggaattgctgagtcataattatctttaaccttttcaggaaccaccaggtggt

SEQ ID NO: 921541 - DNA, 640 bp, Homo sapiens
agtcttagggtgtgaagttgcatgtctaggctcctacgccattattcccctcctttctctctcttttttttttttttttgagacagagtctcgctctgtcacccaagctggagtgcagtggcgcgatctcagctcactgcaagctctgcctcccaggttcacgccattctcctgcctcagcatcctgagtagctgggactacaggcacctgccaccacgcctggctaattttttgtatttgtagtagagacagggtttcaccatgttagccaggatggtctcgatctcctgagcttgtgatccgcccacctcggcctcccaaagtgctgggattacaggcgtgagccaccgcrccatgctccctttctctttttattctgtccccacggccctccccactgcctttctcctgagctgacccagccccctcctaataggcttcactgcccccagcctctgagctgcccccaggcccactgagcacacgactgcagatccaccaccctgaggcccaggtctgctttcccctggcctcggcaccaggctcaggcacactccccatcacaatggctccacttggcagccaaagccagccactctctgggtgctgctggccttatggaatgaccatcacagcacc

SEQ ID NO: 921542 - DNA, 787 bp, Homo sapiens
acatgattgtcgtagcagagaagacatacgtgaacctgatctatgtcagatgttctgccaccctcgtctcctggaactggaagacaggaggaatctcaatacagatcatgagtttagacctgaaaaacgctttcatggcttttccaccacatgctcctagggggcagggtcggggggaacaaaacacaaacaacctgttagccactctaaaactatataggattatacactctyatacactcatgagtggggacctggcttgtggaaaaggaaagaatggcatgaagaatgtctccaatcggaggactggagacctctctagggaggtgtggagattgctgtgacgtttccataactgacctatgatgaggagggcacaaatccacctccaggttttcagatgctgctgagttattataaggaatataataggttcccttcatccaaggaatgggaaaaaccacagaagaagttttgagtgagatttaggcataagagtgacagcaggtggcacttcagggtgtgcacggttaggttaatagactgacttaccaaatgaacagctccacactctcattttgcaacctaggaagtgggggtgaggaatatgctcaggacgtcccctgaagaccctaacattttctttagtccgaaacttacacacaagtctggatccacccaggaggatggaaattgacaacgaagagacaataggtacacccccacattgccacctattcctggacgcagggtggaggtctggtggccacaggcagggacgcggaaa

SEQ ID NO: 921543 - DNA, 639 bp, Homo sapiens
ccccgtgtttaaaggtgggtgtggtcaccttccccagctaggcttaggaattcttagtcggcctaggaaatccagctagtcctgtctctcagttccccctctcaacaggaaaacccaagagctgttggggaggttggccaatgaccgctgttaacagcttcctgctgaattggggcatagtaggggtcgtgcagttgagatttcctcaggrggggtgccttccatgtcattaatatcagagcatgggctagcaggccagtccaggggtccgcagtagagcttagtcatggactgcatctggggctccatttgaagagccatttgtagttttacagcttcaattctggaagagacaaacttaacaaggaggttaaagatacagggattgaaatgtatggcctgaagtgcaagggcatatgagtgtgggcagtgaaagtggggtttcctttagaaaaactcctatacaatggggcatcaatatttctgggaagccacatttctccatagaagctcttggtaaggggagctactggtagtacagcggcatggaggaggtgcagtgagagtgaaagatttggtgaagcgttttaagtaatttccattggttagctgcaggcaaaactatttttccttcttcgg

SEQ ID NO: 921544 - DNA, 569 bp, Homo sapiens
tcctagaacccttgctcctctgccccccatgacccaggaatccctgcatttccttctgtttcttttgctattcttccatcctctgtgggctcatctttcactactgggccattatgggtttgatttcctccaggcattttggcctcagtgttttcttctataacttgcttcattatctttctctaagcaatcttatctgcctccagacctatgaatgtcacaatgagtcagaagtttatatctctgacaagccccacacccataatccaatgtctgtctgctgtctcccgtgatgtctcragacatctcaaactcaacacatccaacactgaacttagcatctgttttcacacacatgttcctccaccattgttccctgacacttcctcatggggtgcacatagatatcacagaaggtggcctgtcaattttacctcctacatatctcttgaatccattcaccttttggaagtcactgacacctcatccttctcctttaggccagggtatcactatctctctactgaaatatttcactgatatgcatactcttcccccttgccaaccca

SEQ ID NO: 921545 - DNA, 576 bp, Homo sapiens
ttctgttgatttggggtggagagttctgtagatgtctatcaggtctgcctggtccagagctgagtacaagtcccagacatccctgccaattctccgtctcattgatctgtccaatattgacagtggggtgccaaagtctcccattattattgtgygggagtctaagtctctttgtaggtctctaagaacttgcttcatgaccctacctgggtgctcctgtatcggatgcatacatacttagaatatgtagctcttcttgttgagttgatccctttatcattatgtaatggccttccctgtctcttttgatctttgttggttcaaagtctattctatcagagagcaggattgcaacccctgctttcctctgccttccacttgctcggcagatcttcccccatcctttcatcttgagcctatgtgtgtctttgcatgtgagatgggtctcctgaatacagcacaccgatgggtcttgcctctccaacaaacttgccagtctgtgtcttttaattggggcatttagcccactcacatttaaggttaatattgttatgtgtgaatttgatcccgccatca

SEQ ID NO: 921546 - DNA, 576 bp, Homo sapiens
ttctgttgatttggggtggagagttctgtagatgtctatcaggtctgcctggtccagagctgagtacaagtcccagacatccctgccaattctccgtctcattgatctgtccaatattgacagtggggtgccaaagtctcccattattattgtgtgggagtctaagtctctttgtaggtctctaagaacttgcttcatgaccctacctgggtgctcctgtatcggatgcatacatacttagaatatgtagctcttcttgttgagttgatccctttatcattatgtaatggccttccctgtctcttttgatctttgttggttcaaagtctattctatcagagagcaggattgcaacccctgctttcctctgccttccacttgctcggcagatcttcccccatccyttcatcttgagcctatgtgtgtctttgcatgtgagatgggtctcctgaatacagcacaccgatgggtcttgcctctccaacaaacttgccagtctgtgtcttttaattggggcatttagcccactcacatttaaggttaatattgttatgtgtgaatttgatcccgccatca

SEQ ID NO: 921547 - DNA, 605 bp, Homo sapiens
ctcatctttccattgatcctcagagacctcacccactccagctgaccagcacttagtagtaggaatgaataccctgtagtgtcatcccttgagtatcactcaagcagctccccatccttgtacagaggttgtttctagtcttctactattataaacaaagctaagaggaacatcttggcatctagaactttgtgtgtatctgtagggaacactgtataagtcaaattcttgggtcaaagggtgtatccattttaatgaattttaaaggatgagcagaaatgagccaaatgagagggaggtctcctgaacacrggcagcagtgcgaggagcctggggctgccacagggctgtgcatggggcaggagatgccactgttgctgcagaggcacagggcaacggccaggaggggacgtggaggatgccagctgcaggctcaaaagcttggactgcacctcatgggcaataagggtgaagaaggctttcctttttcagtgaaggaggggcagggaagatttgttttttttgtttttttttttttcctgaggcagggccttgctcctggctggaatgcagtggtgtgatcatagcccgctgtaacctcgacc

SEQ ID NO: 921548 - DNA, 597 bp, Homo sapiens
accaagagagaaaaccaaagccaagcacatgcatccaaagagatccttttctctgcctgtatgtgtcataagacatccttttctctcccttgttagagaaggactcaattccacagcttcactttagtattcagcttatgataaggagtccatgcaaccccccaagacacatttttgttccaaactcaattccaagctttgggtcaaagccctaggaaagaaaactggatctgagggatccagaggcagatgataacagcagttaaaaggcacagcacaggtaagcatgactgattcctgctgattaagccaagcttcccatttcatggataaaaacaccctcttatatcacactagtattcatggcataaatgaggtctaggtaattcaaggctrttgacagcaggagaaagagggcatatgtgggtaatagtggatactcctaccccgcaagccccccccccattaacatgggtgaaagcctctttaacacccatgggtggcacccttcatggtcaccaggactcagagatagaaggaggaaggagagaaaaaggaatgcctcattttccctcccttatgtaccctaggtatttg

SEQ ID NO: 921549 - DNA, 634 bp, Homo sapiens
tcaagcgattctcctgcctcagcctcctgagtagctgggattacaggtgtgcaccaccacgcctggctattatttgtatttttagtagatctggggtttcaccatgttggtcaggctggtctcaaactcctgacctcatgatctgcctgcctcggcytcccaaagtgttgggattacaggcgtgagccactgcactcatcccaattaacagatttttaagtgcacaatatagtattgttacctattgttattatgttgtacagcagctctttagaacttattcatcttgtgtaaccgaaatttcatactcattgaacaacgaacttcccatttccctctcctaagcccctggtgagcacctttctattctctgcttctgtgagtttgactattttagatacctcatgaaagtggtatcatgcagtgtttgttcttctgtgactggttcatttcacttagcatactgtcctccaggttcactcatgttattgcatatggcaccgttttcttatttaagaccgaataatattgcattgtatgtatataccacatttccttttcctgtttatccgtcaatggacatttaggttgctatcttctgcttttctgataccatgttgaaactgagtcaagt

SEQ ID NO: 921550 - DNA, 648 bp, Homo sapiens
gtcattttgtaagcctgttttctgcctatcgaattttgggagtccaacaggcttctttccttctatcctctcttgtcctgttcagtgcaagcaggctgtgcttctgctggtgtaacattctcaaaaacctgtgggccattattcagcctgacacagacagcgtggacaggataattaataaagggaagtacacgtgacttctgaaggatggacttgactgtgttataaagcactgtggacacagaacacaatcattcaaagttcttaaatgtgtgtttaaggtacgtcaggtctctaaatctcaagttacctgctaggacatgatattatctgaaagatctttcaactgtgatatatctccttacaggaaaaagttgaatgagtactaaaaagtaaaactgtggtgcccagaggatgctgaagactactaaagaataatcaaagaaaggagggggctgctcaaataacagcmggaggtattagggagaacttcttcataggcaaccaaattagcattagatggtaaatgaagtcatggaacctgcttcctgggagattttttttaacaataaacaaacaaaacaaaacatggtctcactctgtcacccaggcttgagtgcagtggcaaaatcagctcacctgagcctt

SEQ ID NO: 921551 - DNA, 806 bp, Homo sapiens
caggctttctacccctggatatctacccaacaaaaaagaaagcacatgtccacacaaagtctcagacatggatgttcattgaagctctatttgtaatattaaaagctcagaaacagctaaatgtccattgaaagatgagcagataaacaaactgtataatatctatataataaaatatgactcattcattaaaaggaatgaacttttgaaacacaccaagaacatggatgaatctcagaataattacaccaactgaaagaagccaggacaaaaaaagaatatacactatataattccatttatatcaaattctagaaaatgcagctattataacagaaaacagatcaaagaagggacaaggcaaggagagacagaagcaaaggggatcaggatagtacacgagaaaactgtttgaaatgatgaatatattcactatcttgacagtagtgatgattgcrtggtagtatggcatatgtcaaaattagaaaactgtacactttccacatttgtggtgtattgtatgttaattccacctcaatttaaaaagtacatgccctccatttttatggataatggggagaacagattttggtggtcagtcagaagtaacttccacatatggtatctttttgatattttgctattaagttttgtgaaattctggaccagaaaaagagagaccataaaagaaaggttcctgtcaagaaagagcatgatctgtagctgtagccccagcttctggctcctgtgcctctgaaacaccagccacgtctccatctctggtcttgatccatgcagtaaacaca

SEQ ID NO: 921552 - DNA, 827 bp, Homo sapiens
ttgattctcataaacttagctcaggagaactggtggaagtgattttcatcttcctccaacatgtactcaggcatggcctaagaaacagagagtacaaacccacccttcatttagaggccaaattttccttggatggggtgtgtgtgtgtgtgtgtgtgtgtgtgtgtgtgtgtgtgtgtgtgtgaagtgtgctaagcttagccaggctcaatcaatagaaattgtgctaactggagtagatagctgtttatgaatcaagaaaatacatgagagaagaggtgaagcatagaaaatgccagaggttagctaagttgacttacactggaacaatgagacgtgggctgtcctcttgactgaaggccttacctcttgggttcttggagcagaactagcaaaaacaaactgcagaaaagccttttctgcagccagaattcttagtaggcagtcatgtgggggtaattgggcctttgtctggctcctactcccccctcaccctcagaccctctgatttctgcctgaatggaaagaaccgttgctgcagttgggtcttcgtggagtctgtggtgtgggggagragaggtagctccactagcagaggcaccaccattctgacaaaggccctggcgctttacctttccttgagcggagcaaagcatgaaggaagccggtagggattgcttgactagctgtcaggcactgtgctctgggatttctccttcaatatctaacttaacccttcaagggcccaagagatggggaagtgttaatctgattttggacagaataaggaatcaagaagaataatttagggaataatttaacctgag

SEQ ID NO: 921553 - DNA, 553 bp, Homo sapiens
gctagcatgcgtactccttcccattatttgggtgtctacacaaatatccttcctcagagaggagttcctggtctcctcatctaaaatagcagctccccacacacctcttagacatttatttgctccatagcacttataactgaactgtatttaggtatttataggccatcccagaccctccatgtacaatccaagaggtcagagacattktcttacttaccatagagtgaataagaaccacacaaaacacagagaagatactggatagagtattgataaaaggaagaaacgcattatctctttcttttcttttcattttagtttttatgttgttaggtatattagtattatcccccagtaattgtttgtgacaataaaactttattttaacttaaccttagtataactttataaagtaggttaatcatagtatctttttacttatttgtatgtttaaagtggcattgtcctatatcacaaaatgtatctttaatggcctaaaaaatacgaagatattggaatcatattctcatcaatcatagcccaatatgaa

SEQ ID NO: 921554 - DNA, 595 bp, Homo sapiens
tgctccagaaggacagcactgagttcagtgattcacaatttctggcactgtttcccctagagcccagagaagctccctgaactatgctgctgctgccagggggtgtgagagggctagcttcagtgattcaaggttttttttctatcttttcagtgtgtcgttcagtgatacgaagttaaatacaggtactatgagggctcacctgatttttggttcttatgaatgtaattttttttttttttgtcgatagttgatcaattagtgtcattgcagggtaaccagttgattgtcatctagctctgcttctgctttttgctttttttattgtttgatgcccttgatggtttgagtgtgttatccatttggtttagytaattggtttgtttctggaagatctggaagattttatgggtccaaatctcagctcagcacatctgggctgcatgctccagccctgggacatgcagagctttttttctctggccactggaggttaagcacttgcttcactggaggggctaaagtattgccagtccattggtaacaacattcataagggaattgctgacaaatgcacttaaccagggctgtggta

SEQ ID NO: 921555 - DNA, 777 bp, Homo sapiens
aaacagctgcagatcttatgcaacatagaaaaactatacaacagagcagaagtctaccaactgacaaatatgcctagtaccacctactggatcataccccaaagcttcaacaccaaaaatacctcattaatataccccytctgaaaccaaagacaaaaagtcagcttcaaataaacatcttgcacaaagcctcatacctgtgaaaacatccaaaaaaagcagtctattgactgtactcaatctacactgcagttgaaagaacactcacatgcagagatgagaaacaaccaacgcaagaactgcagtaactcaaatggccagagtgttgtgtgtcctccaaatgattgcaccagttctccaacaagagctgttaaccaagctaagcttactgaaatgacagaaattaaattcagaatatggataggaagaaagatcatcaagattcagtagaatggcaaaacctaatttaaggaaaccaagaatcccaataaaatgatacaggagctgaagaatgaaacagtcagtatattaaaaaaaaaaaaaaaacctgatggacatgacagagctgaataatacaatacaaaatctttacaatgctaccataaatattagtagcataatagaccaactagaggaactaatctcagaacttgaaaactggctctctgaaataaaacaatcagacaaaaagaaaaagaaagaaacacacaaaaactctgagaagtatgagattatgtaaatatgtcatatctatgaattactggcatctctgaaagg

SEQ ID NO: 921556 - DNA, 552 bp, Homo sapiens
gtaaagagcaggatctgtaactacaaagatcatgagaaccacgagatcctcaaatccttctcctgcctctttcatggatatatcaatttgggactctgtcttgaagaaacagccacatggaggcatcagaaataggtttttaatcttccagattgtgcattcaaacaacactatacaatatagatagargcaaaatcatagattttttagtcagaaaaacttgaaaagagattacttcttaaagtgtcacacccacccacgcaaccacctacacacacatgtgcacacatatacaagtgataaataataattattgccacttgcagggtttttctgagtatagaaatctagaaatctctgagtacctcacacaatgccatgtatatattatgctcttaacaaccattttctctttccacttctccttttaattcataagttttggtagcctctaccatttattgcattgctctctctctctctctcttttttttttttttttttgttgttgttgttgagttggagtttcgctctcgttgcccaggctggagt

SEQ ID NO: 921557 - DNA, 750 bp, Homo sapiens
atgaggtacagggaaaagtggacagttagcaaggcaaagaggagctttattgagtgacagaacagctcagaggagacctgcattgggtagctcctctccacaggcagggcgtcccgatgagtgttcagttctcaacagagaggagaccctggagtggggagctcctctctgcaggcaggttgtcctgtcatctccttgagtctgtctgagtctggggtttttatggacttcagagaggaagaagtgcctactgattggtccgtgggtggccatgggtgggcctggaaaaagtaccgtaagttcccactctggtctgtggggccggcagcctggccgtcaggcttcaggccttccccagctcgaaggtagagcttcactagggacccactcctttccacccaggagcctgtctgcctcctgctgtcacccaggctattcatgctgagggacacctaaaggcccatgcagagccgcccttagcccccactcaggctccctcccatgcttaccagtgcccaaagtccagaggcagccaaggcagcagggggctggagcgtcagtgctgccccaattgtgcacacacccarccaggttgcaacagctcctgggctcgacctcaactttgctccaagatcagagtaggtgcagggagcagggagaggccaggtagtgggagcaggcacttccaagcctgcaggtgggagggggcctttcccaggcccccaagaggggacgcccaggtccgtagcc

SEQ ID NO: 921558 - DNA, 577 bp, Homo sapiens
ggggaccactaccaccaagacgcagagaccgatagtggccccaaatgcctggctgcgctgttatttattggataataaggggcagagtaaggagtgtgagtcatctccaatgattgataaggtcatgtgagtcacgtgtccactggacagggagcccttctatgttaggtagccaaggcgtagagagagaggatagcttatgtcattatttcttttatgttcttttcagaaagatcaaagactttaatattttaatactttcactaattctgctactsctatctagagggtgcagccaggtatacagagtggaacaggaaagtgaaacaggagtgtgaccactgaagcacagcatcacagggagatggtcaggcctctggataactgcgggcgggcctgacatcactcaggccctccacaggaggcggtggagcagagtcttccctaactcccctggggaaagggagactccctttcctggtctctaggcactgacgcaaccgctagaccaaggtccgctaggcaatgggcgtcttcccagacgctggcgttaccccaagaccaaggggccctctag

SEQ ID NO: 921559 - DNA, 603 bp, Homo sapiens
tcttgtcacatggtaaagagcctccctaaccagacataagctccttcccacagagccagggctgtgggaggtcccagccttcttagtcttcttgcctagctcccagcactggggctggcccctaggaagcccaggaaatctgccatgaaagaaatttaaatgagcactttcagatttttttttttcactagtcaatcatggactcatttatttactcagtaagtatttacaaaggactgattacgtgttagctactggattttaggtgcctgagatctggtaggaaacaaatcagacaaaaattcctctttatagaacttargttttttgggttttttgttttttgtttcttgttttttttttaaagacagggtcttgctctgttacccaggctggagtgcagtggtgctcctgggctcgggatcctcccacctcagcctctcaagtagctggaactacaggcatgtaccaccatgccgggctaatttttgtttactttttgtagagatggggtcctactacattgcccaggtcgagctcctggactcaagtgatcctcccacctcagcctcccagaatgctggaattacatgcatgagccac

SEQ ID NO: 921560 - DNA, 753 bp, Homo sapiens
actgtaaagtcactagttatagaaaatacagattacctgcagcgacgtctctttaatagaaatggcagccatgggttggagtctgttgatacgggttctggagagctaattttgtacccgtcttccaactctgtgctcgctgacctcatgttggtagcttgaaatttgccatgatgtgatcaagtgggtttcatactaggaatgcagggatggcttaacatatgcaagtcaacaaatgtgatatatcacagaaacagaattaaaaacaaaaatcayaggagatgcagaagcatttcacaaaatcccacatccctttatgattaaagccctcaacaaaatcggtatacaagagacatacttcaatgtaataaaagccatctatgacaaacccacagccaacattacactgaacagggaaaagtttaaagcattccccctgagaactgcaataagacaagaatgcccactcttatcacttgtattcaacatagtactggaagtcctagccacagccatcagacaagagaaagaaatgaagggtatccaaaccagtaaagaggaagtcaaactgttagtgttcactgatgatatgattgtacacctagaaaaccctaaagactcatccaaaaagctcctaggtctgatgaatgaattcagtagagtttcaggatacaaaatcaatgtacacaaacagtagcactgctatacaccaacaatgaccaagctgagattcaaatcaagaactcaacccct

SEQ ID NO: 921561 - DNA, 609 bp, Homo sapiens
ttgtttctttttattcttttttctctaaacttctcttctcgcttcatttcattcatttgatattccatcgctgataccctttcttccagttgatcgaattggctactgaagctagtgcattcatcacgtagttctcatgccatgattttcagctccgtcaggtcctttaaggacttctctgcattggtttttctagttagccattcgtctaatcttctttcaaggtttttaacttctttgccatgggtttgaacttccttctttagctcagagaagtttgattgtctgaagacttcttctctcaactcgtcaaagtcattctccrtccagctttgttccattgctggtgaggagctgtgttcctttggaagaggagaggcactctgatttttagagtttccagcttttctgctctgttttttccccatctttgtggttttatctacttttggtctttgatgatggtgatgtacagatgggcttttggtgtggatgtcctttctacttgttagttttccttctgacagcctgcaccctcagctgcaggtctgttggagtttgccagaggtccactccagaccctgtttgcctgggtatcagcagcagaag

SEQ ID NO: 921562 - DNA, 456 bp, Homo sapiens
aatttctagtgcagacaagaaaagtataatatacttctctttagagatgtataataagtgaaacacaaacttcgcaagagtgtttcaacagtagaatgagcaatcaggagaaataatcagtgaacttaaagatagacaatagtatttatgcagtgtgagaaacagaaagaaaaacgatttttttaaaaaatgaactgatcataagagacctgtggaacattacayagaaggccaatgtattcattatgggagtcccagaaggaagactatgagaaaataagttggaaagactattttaagaaataatggctgacaatttcccaaatttaatgaagggcataaaactgcacattaaaaatgttcggcaaatttcaggcaaaatatagtcaaatcattaaaagctaaacacagaaaaaacttaaaaacaacatgagaaaagtaagatacaaaatattt

SEQ ID NO: 921563 - DNA, 575 bp, Homo sapiens
attggaaacaatggaggacagaggcagtgggttgatataaagtactgtaaatagtccagggtttgggtcacaaaactgtcaacccagaattctacatacagcaaaattgtccttcaagtattaaaaaaaaatagctaagggaacttgttactaatagacttatcttacaagaaatgctaaaggaaattcatccagttgaaataaaagagccctagacagtggtttgaagctgtatgaggaaattaagaacattggtgtaggtagctatgtaggtaagtaaaaaagccaacctcattgtatttttgtttgtaactcttcatagttttcytatatgatttaaaagacacatgcataaaatgataactgtaaatatatataatacacatacaattcaaaaagaggtaatttttataagattgttaagagagtggcagaatgtatgaaaaagaaaacattattcatttatatgctgtgtatgaaagaatcactttagatgcaaagacacaacgaaatttaaagtaaaataatgaaaaaatatattctatattaacaattatcacaaaagacttggaatg

SEQ ID NO: 921564 - DNA, 596 bp, Homo sapiens
ctatagaaagtggttgcaccatatgccacttgaatttctatcctgaaaatgatttttccttccctatcacatggtcaagttgtgacttttccaaagttctatactctgcttccctgaaaattttgctgcttagatatttcttctgctagatacgttaggtcatcactgtttaagttcaaacttccacagagtcctggggcatgggcacaattcagccaagttctttgctaaagtgtaacaaatgtgacctttgccctaattcccaataactttctcatttccatctgagacctcatcagcctggtcttcactggcagtattttcattagtattttggtcacaaccatttaacaagtctcatgaagttctgtactttttctcattccctgttgtcttctctgagacctccaaactctgcctgttccccactaccaaagatacttccacgtcttcmgatatttttatagaaattccctactccttggtaccaattttctatattagcttgcttgtattgctataaaaaaatacctgaggctgggtaatttataaagaaaagaggtttatttggctcatgcttctccaggctgtaaaag

SEQ ID NO: 921565 - DNA, 576 bp, Homo sapiens
atgagaaagtttgcaactcctagagacttgttgaatggctttgccaaaaatgctgatagtgatataaacaatgaaatccaggctgaggtgttctcagataaacatgagaaacttgtttggaactggtgcaaaggtgattcttgttatgttttagcaaagagactggcagcattttgcccctgccctagagatttgtggaactttgaacttgagagaggatttagcatatctggtagaagaaatttctaagcarcaaagcattcaagagatgacttaggtgctgtcaaaggcattcagttttataagggaagcaaagcataacattttgagaaattttcagtctgacaatgtgttagaaaagaaaaaccaattttctgagaaattcaagctggctgcataaatttgaggagccaaatctgagtccccaagacaatagggaaaatgtctccagggcatgtcagaagtcttcatggcaacccctcccatcacaggcccagaggcctaagaggaaaaaatggttacttgttctaggcccagggtccccatgctgtgtgcagcctggggacttgatgccct

SEQ ID NO: 921566 - DNA, 573 bp, Homo sapiens
ggatttgaatcccagttccatccctcattatgatttgatggtgaatgtgtttttaactcgtctgaggctcagtctgctgatctataaaagatgtgattgttacgaggcttccataacgtacatgtgtaaaaatcatggcaaaatgcttgtaatttaaaagacaggtttgtcaggagacttctatcaggtaagtatgtaaaaacctggacacaatgcctataattttgtaagtgttcaatatatggagaaggaggattatttttatttcayttaatttttagagcaactttataaaattggtgatactcatatatttgagataatcaaaccaaggatcagaaagactaaataaatcagcatagtcacaaagtggttcacaatacatttactggataatttctagttaaaagtagcaatgatgatcacattgaaaatcttgtattttctggtggttttctcttacataagcttcttggaatttagtaagataagttgcagctcaaaaagcagatccgtcgaatattttgttccagagattgtagtgggggcccaagtattgcatgtgttttgttg

SEQ ID NO: 921567 - DNA, 584 bp, Homo sapiens
tcccagcgtgagcgacgcagaagacgggtgatttctgcatttccatctgaggtactgggttcatctcactagggagtgtcagacagtgggtgcgtgcaccgtgcgtgagcggaagcagggcgaggcattgcctcactcaggaagcacaagggtcagggagttccctttcctagttaaagaaaggggtgactgagggcacctggaaaatacggtgactcmcaccctaatactgcgcttttccgacggacttaaaaaacggcacaccacgagattatatcccacacatggcttggagggtcctacgcccacagagtctcactgattgctagcacagcagtctgagatcaaactgcaaggcagcagcgaggctgggggaggggcgcccaccatggcccaggcttgcttaggtaaacaaagcagccggggaactcgaacagggtggagcccaccacagctcaaggaggcctgcctgcctctgtaggctccacctctgggggcaggggacagacaaacaaaaagacagcagtaacctctgcagacttaaatatccctgtctgacagctttgaagagaacagtggttctc

SEQ ID NO: 921568 - DNA, 584 bp, Homo sapiens
tcccagcgtgagcgacgcagaagacgggtgatttctgcatttccatctgaggtactgggttcatctcactagggagtgtcagacagtgggtgcgtgcaccgtgcgtgagcggaagcagggcgaggcattgcctcactcaggaagcacaagggtcagggagttccctttcctagttaaagaaaggggtgactgagggcacctggaaaatacggtgactcacaccctaatactgcgcttttccgacggacttaaaaaacggcacaccacgagattatatcccacacmtggcttggagggtcctacgcccacagagtctcactgattgctagcacagcagtctgagatcaaactgcaaggcagcagcgaggctgggggaggggcgcccaccatggcccaggcttgcttaggtaaacaaagcagccggggaactcgaacagggtggagcccaccacagctcaaggaggcctgcctgcctctgtaggctccacctctgggggcaggggacagacaaacaaaaagacagcagtaacctctgcagacttaaatatccctgtctgacagctttgaagagaacagtggttctc

SEQ ID NO: 921569 - DNA, 658 bp, Homo sapiens
tacatataagacactattcttcctcttggccagttgaacatccacttgggaagtgagctatggacataaaacggaagcaagttatggacaagtagtattaggaggaagtttcatggaagtttattttttatatttatttatttatttatttatttaattttatttttttgagacagagtctggctctattgcccaggctggagtgcatgcagtagcacaatctcgactcactgcaacctctgcctcccagattcaagtgattctcctgcctcagcctcctgagtagctgggactacgggcgcgtgccaccacgcctggctaattttttgtatttttagtagagacagggtttcatcgtgttagccaggatggtcttgatctcctgaccttgtgatctgcctgcctcagcctccgaaagtgctgggattacaggcgtgaggcaccttgcccagcccatggaagtttaaaatgaggagagaaaaagctggcaaggcaatttggattatgcttcagagragaaaaagttgatctttctgtacccttgtcatctctcctttggttcactgatgcccagggactgtctgcctttgaacatcttgtgaaataagcaatatatagcacccttaaaatttgagccacttttaattggatattttgt

SEQ ID NO: 921570 - DNA, 590 bp, Homo sapiens
tccccagccatggggaactgtaagttcaataaatctctttcttttgtaaattgcccagtctcgggtatgtctttatctgcagcatgaaaacagtctaataaatacagtagagtattgttgaaaagatacctgaaaatgtggaagcgacttactttggaactgggtaacaggcagaagtcagaacactttggagggcagaaacacgtgggaaagtttggaacttcctaaagactcattgaatgaatggctttgacaaaaatgcccatactgatgtgaacaatgaggtccaggctgaggtggtctcagayggagatgaggaacttactgagaactggagtgaaggtaactcttgttatgttttagcaaagagactggtggcattttgcccctactctagatttgtggaactttgaacttgagagagacgatttagggtatctggcagaagaaatttctaagcagcaaaacattcaagaggtgacttaggtattgttaaaggcattgagttttacaagggaagcagagtaaaaaagtttgaaaaatttgcagcctaacaatgtgattgaaaagaaaatcccattttcttaaga

SEQ ID NO: 921571 - DNA, 590 bp, Homo sapiens
tccccagccatggggaactgtaagttcaataaatctctttcttttgtaaattgcccagtctcgggtatgtctttatctgcagcatgaaaacagtctaataaatacagtagagtattgttgaaaagatacctgaaaatgtggaagcgacttactttggaactgggtaacaggcagaagtcagaacactttggagggcagaaacacgtgggaaagtttggaacttcctaaagactcattgaatgaatggctttgacaaaaatgcccatactgatgtgaacaatgaggtccaggctgaggtggtctcagacggagatgaggaacttactgagaactggagtgaaggtaactcttgttatgttttagcaaagagactggtggcattttgcccctactctagatttgtggaactttgaacttgagagagacratttagggtatctggcagaagaaatttctaagcagcaaaacattcaagaggtgacttaggtattgttaaaggcattgagttttacaagggaagcagagtaaaaaagtttgaaaaatttgcagcctaacaatgtgattgaaaagaaaatcccattttcttaaga

SEQ ID NO: 921572 - DNA, 684 bp, Homo sapiens
ctatcagacattcaaaagagaattggtacgaatcccattgacattatttcagaagataaagagggaatcctccctaaatcattctatgaagccagcatcaccctaaaaccaaaaccagaaaagcacataacaaaacacactacagaccaatatccctgatgaatatagatgcaaaaatccctaagaaaatactagctaactgaatccaacagcatatcaaaaagataatccaccatgatcaagtgggtttcataccaaggatacagggatggtttcgcatgcacaagtcaataaatgtgatagttcacataaacagaattaaaaacaaaattcatatgaccatctcaattgatgcacaaaamgcatttgacagaatctagaatcctttatgattaaaatctcagcaaaatcaacatagaagagacacaccttaatgtaataaaatccatctatgacaaacccatagccaatataatactgaatgaggaaaaattgaaagcattctctctgagaactagaataagaaaaggatgcccactctcagcatttctattcaacatagtactggaagtcctaaccagaataatcagacaagagaatgacataaaccatccaaatcagtaaagaggaagtcaaagtgatgctgtttgctgatgatatgattgttatacctagaaaacccta

SEQ ID NO: 921573 - DNA, 684 bp, Homo sapiens
ctatcagacattcaaaagagaattggtacgaatcccattgacattatttcagaagataaagagggaatcctccctaaatcattctatgaagccagcatcaccctaaaaccaaaaccagaaaagcacataacaaaacacactacagaccaatatccctgatgaatatagatgcaaaaatccctaagaaaatactagctaactgaatccaacagcatatcaaaaagataatccaccatgatcaagtgggtttcataccaaggatacagggatggtttcgcatgcacaagtcaataaatgtgatagttcacataaacagaattaaaaacaaaattcatatgaccatctcaattgatgcacaaaacgcatttgacagaatctagaatcctttatgattaaaatctcagcaaaatcaacatagaagagacacaccttaatgtaataaaatccatctatgacaaacccatagccaatataatactgaatgaggaaaaattgaaagcattctctctgagaactagaataagaaaaggatgcccrctctcagcatttctattcaacatagtactggaagtcctaaccagaataatcagacaagagaatgacataaaccatccaaatcagtaaagaggaagtcaaagtgatgctgtttgctgatgatatgattgttatacctagaaaacccta

SEQ ID NO: 921574 - DNA, 648 bp, Homo sapiens
taatacaaccagacaccctgtaaatggctgccttgggtcaggtgatgatattggtctaatcgtcttgtggcaaggattgtggtatcatatagtgaaaagcacgatgatttatttgtccttaacatcttcccttagagctgtgggcttggcttttcagacgggcaggctggctaggggacactggacctgtcctgtccartccagcatgcacaagttctaatgctatgtattctctggaaaaatatttaagtgtatcgtatattgcagcagcacaaaagtcaatctgtacaagttaaaaaatattgcattcccaaattgaggtgatttgaacatggaaaaagcagaacaggaggcctgctccctctgagaatctcaccctgcttccttatcagatttcagccttctgcaaaggcattttcaagtgggctgtaattgcctgccagtatacacttcgtgccctcataaatcttcgctagcacagaaaagtaaactgtgttgtgtttgagaattctttggaaatgtattgcggctggatagtgagaggggataccagtaaggggaaggggctgtgttctcaaggtgaaagtcatcagtctgagcataagcgtcccggggggattgcaaggaaggtggaacctagttcaggag

SEQ ID NO: 921575 - DNA, 737 bp, Homo sapiens
aaaaatacagtaaataaatggaaattctttgtgatttggcaaatatttagaaatacagccttcttaattttcattaaaatatgaaaaataagtgattagcaagtgctgcaacctaaaacaacggatacaaatgactttgagttcctcattttctacaaagttgtaattctcccagaattactttctatcttatcgtatatattattatttttaaaaatatctgactttataatattcctatgagtttaccaaagctgtattcatcaagtattttktctcctcatctactagaatttcaggttggtacttcctttttatttcagtagttctggagtgtgcataaatgtgtgtttgtgtttatgtgtataaatctttttagagattcataggattataactgcattatattattacattcatggtaaccaagagagttgtacatcatgttattatgttccattgtagccaacatgagcacactgatacttaaggtcaaccaggagcaaattatgcttaactttcaggggcttacaggaagtttatttttagtgcaaggtaatgaaaattaaatttttctaaagtttaccacctggtcaagggaatacatttagcttttcattttttttctctgagatggagtctcattctgtcacccaggctggagtgcagtggcatcatctcggctcactgcaacctccgcctcctaggttcaagcgattctcctgcctcagcctccc

SEQ ID NO: 921576 - DNA, 587 bp, Homo sapiens
aattacattttaaatatactaatagtaaaatatttccttgctggttactctcaggcaaaattttatgcctgcctcatatagtgtcaggatgtctcaaaatctaaattaaattaaacaacacacttgctttgacagatcatgtgtttattcagaagtttattcaagccaggagcatgcacaaaatctgacagtattcaaggttataaatttttttaaaccactgtttcagtcaaatgtatctaattaaatgcttttggagatgatgatgttagtaaaccaggtcaactttttgacattatttacagacatgcagacgttacttgcttaacaaatcagcccttgaatcttcttgagtccctgaytgattacgaagggattacaaagaaaataaaatcttgcagaaaaagggaaaccctcctcacctaagaaactgttaaccctgtaggtgatacatgggcacctctgggacaaaatcctgagctacttgttcatttcttactgaaaattacctttctgaaagttccatttctcattatcctttatggtcagttccagtccaacatctttttcaaagtctgctgagtcct

SEQ ID NO: 921577 - DNA, 630 bp, Homo sapiens
aaaggagaataaccactcaatttatcagttgccacttattattttgactgattataagaacatgagtcctatcggttagggtcatgagaagttattgctagcttccacattttcaagcattccatattttgaaattgcttaattctacggccagtgccttctgaataaatataaaaatgataacacttcttattttataagaagagtgtagmcagtatagtaaggaggcttttgagtgttacaatagcaatagaatacatttgaaatgaagtcttaggttccattcggttccataaacagctcagagggtgatgtccctgggtaacgtcctacagcccatcctaccagccctctcctactgctgctggccaaatcggcagagaaattgcagacagggctggatgaactgaattaaagtacattcttctttccctgtccagctcatcccttattgactcctgagctcttttgacccatagcaaccatctgatctcttaacgataaacatggacttgcatgttcacatttgctttttgtaggccactctcactccaagccagactgtggtcaccttgatgcagagaccttcttctatgcctcagtagttccctccatgctagcatggtgcta

SEQ ID NO: 921578 - DNA, 721 bp, Homo sapiens
gtctgagctttttattttgttttacttagaaagatagagacagggtcttgccatgttgcccaggctggtctcgaactcctgggctcaagtgatcctcctgcctcggccttccaaagggctggggttacaggcgtgtgccaccgcactcagccgcggccagtctgttttcaaagatggtctttgggttaatgacaattctctctctgcttactctccaggcagtgtggctttctgaatccaaggaggctgggcatagggagatgggatttgtttgcccggtttggactcagcattttttgtactcgatttaatagactcataaaatgtcaaaggtttaagtgagcttagagttcatctggcccaaacctggctgatcagaatctccaggggaagttttattgaaatgccagatctctgcgttctgagatcctgatttagtaactccagggttggaacctgagttttwtgtttttttgtgtgtgtgtgtgaaggcaaggtcttactctgttgctctggctggagtgcagtggtgtgatcacagctcactgcagccttgaattcctgggcctaagcaaccctcttgcctcagccttccaagtagctgggactccgggggtacaccactgtgcccggctaattttaaatgtttttgtagagatgggatctcactatgttgcccaggccagtctcaaactcttgagctcaagtgatcctcctgcct

SEQ ID NO: 921579 - DNA, 740 bp, Homo sapiens
aagaaccatgtgctgccagtctgagctttttattttgttttacttagaaagatagagacagggtcttgccatgttgcccaggctggtctcgaactcctgggctcaagtgatcctcctgcctcggccttccaaagggctggggttacaggcgtgtgccaccgcactcagccgcggccagtctgttttcaaagatggtctttgggttaatgacaattctctctctgcttactctccaggcagtgtggctttctgaatccaaggaggctgggcatagggagatgggatttgtttgcccggtttggactcagcattttttgtactcgatttaatagactcataaaatgtcaaaggtttaagtgagcttagagttcatctggcccaaacctggctgatcagaatctccaggggaagttttattgaaatgccagatctctgcgttctgagatcctgatttagtaactccagggttggaacctgagttttttgtttttktgtgtgtgtgtgtgaaggcaaggtcttactctgttgctctggctggagtgcagtggtgtgatcacagctcactgcagccttgaattcctgggcctaagcaaccctcttgcctcagccttccaagtagctgggactccgggggtacaccactgtgcccggctaattttaaatgtttttgtagagatgggatctcactatgttgcccaggccagtctcaaactcttgagctcaagtgatcctcctgcctt

SEQ ID NO: 921580 - DNA, 605 bp, Homo sapiens
acatttgttgatttgcacatgttgaaccaaccttacatcccagagataaaacctacttgattgtgatggattagcattttgatgtgctgctggactcagtttgctagtattttgttgaggatttttgcatcaatttttatcaaggataatgacctgaatttttctttttctgttgcatcactgccaggttttgttatcaggatgatcctgacctcatagaatgagttaggaaggagtcctcctcctcaatttttggaatagtttcagtaggaatggtaccagctcttctttatacttctggtagaatttgactgtgaatctatctggccctggcctttttctggttggtaggctttttattactgattcagtttctaaacccaytattggtttattcagggcttgaatttcttcctcattcagtttcgggagggtgtatgtgttctggaatttatctacttctactagattttctagtttgtatgcatagaggtgtttataacagtctctgatggttttttgtatttctgtggagttggtggtaacgtcccctttgtcatttctgattgtgtttatttggaccatctctcttttttacttcatta

SEQ ID NO: 921581 - DNA, 607 bp, Homo sapiens
acaggctggtcatcccaatgtctgttagagtctgactgtatctggaggtttttatgggctcagaagggaggaactgcttgccgattggtccatgggctgaacatgagtgggcatggaaaaggcaccataatttcttacttccagcagcagccttcatcttcaactgacatatcagcccctaggctttagggtgcccctagcttgaagatggggcttcatcagggatctgcctcttaccgcccaggagtctgtctgtctcctgtgccatgaacaagtcatctatggcactcaggctgttaataccgaggggcacctgcaggatggtgctgagccatcctcagtccccatttagctgccttcctgtgttcrtctgtgctcaaagtctggagggggctgaggtgtcatggggctggtgtgtcagccttgccccaagcatgcacatgtccagccacatcacaatagtgcccaggcttggacacaactttgctctaccccagactgggttccgggagtaaggagaagccaggcagcgggagctggcacttctgagctttcaggagcagggggacttcctgaacccccatgaatacagggatgcccaagtctg

SEQ ID NO: 921582 - DNA, 639 bp, Homo sapiens
caaactggacaacgtagaagaaattgatatattcataagaacgtacaacctactaagactgagtcatgaataaatatattttcagaacctaacaataatgaataaggagattgaattagtaatcaaaacttcccaacaaagaaaagccagcaccagatggcttcactaccaaacacttgaaaaataattaatgctttttctttataatcttttccaaaaatctgaaaagaaaaagatactttcaaactcattttatgagagcagcattatactgataacaaacccagacaaacacgcgacagaaatagaataatgagaagaagaagataaaaaacagtccaatattgttaataaacatagatgaaaaattcctcaacagaaaattgggaaacttaattccrcagcatattaagaggttcattcatcatgactaaatgaaatttatccctagaatgaaggattgttgaacatacaaaaatcagcaaatgtgatacacattaacagaatgatgaatgaagaccacacaaacatctcggcagatgcagatagagcatttgacacaactgaacaatagtttatgaataaaaaagaaaaaagtctctcaacaaaatagaaatagaaggaaattaccttaaaata

SEQ ID NO: 921583 - DNA, 693 bp, Homo sapiens
agacaataaaaataaataaaagtatataacacagaaaggaaaatcacctctgtttgaagatgacatgatattatatgtgaaaaaccctaagtactccccaaaatactcttaaaactaataattcagtaaatttgcagaatacaaaatcaacatacaaaaatcagttatctttctgtatactaataaaaaataattagaaaaaggaattaagaaaaagaatcctatacagaaacaagtatatagaaataaacaagtaggtgaaagtgttatcaaaaactacaaaacattgatgaatgcaaattaaaaatacactattttggaaaggtatgttgacagaaaaacaatactgtttaaacattcatgctatctaaagcaattcactaattcaatataattcctattaaaagacccatgacattttttrtaaaattagatattatttttaaattcataatgagccatgactgctcattaaagactcatgaaggagctgaaacaatcttgaggagaaagtccaacaaagctggaggcatcacattttcttatatcaaaatatattaaatgctacaataattaatatagtctgctgttcaaattaagacagatatatagacctatgtcacagaatatagagcccaaaaataaagccacaaatatacagtcaactgatcttcaacaagaatgccaagtaca

SEQ ID NO: 921584 - DNA, 650 bp, Homo sapiens
gataaaatgctcaatataattaatcatcagaaaaatctgaaccgtgatgatatatgaattcacaactcttaggatgtattttttagcacagatgcacacaagcaaacacacacacaattgttggcttggatatggagaaatcaaaactcttgtacactgtaggtgagaatataaaatattgcagacactatggaagcaatgtagaggttcttaagaaattaaaaatagaacttccacatggtgaaccccatctgtactaaaaatacaawaattagacaggcggtaggggcatgcgcctgtagtcccagctactcaggaggctgacgcaggagaattgcttcagcctgggaggcggaggttgcagtgagccgagatcctgccactgcattgccagtctgggtagcagagtgagaccctgtctcaaaaaaaaaaaaaaaaaatagaaattccatatgatctaacaatcctgccatatgtgacaacataaaaaaaccttcagaaaataatattaagtgaaataacacagaggcaaacactgcatgcttccacttctgtaaggcatctaaaccagtcaaactcatagaatcagagagtagcatgttggcttccagtgactaggaaaagagagacttgggagttgctgttcaatg

SEQ ID NO: 921585 - DNA, 650 bp, Homo sapiens
gataaaatgctcaatataattaatcatcagaaaaatctgaaccgtgatgatatatgaattcacaactcttaggatgtattttttagcacagatgcacacaagcaaacacacacacaattgttggcttggatatggagaaatcaaaactcttgtacactgtaggtgagaatataaaatattgcagacactatggaagcaatgtagaggttcttaagaaattaaaaatagaacttccacatggtgaaccccatctgtactaaaaatacaaaaattagacaggcggtaggggcatgcgcctgtagtcccagctactcaggaggctgacgcaggagaatygcttcagcctgggaggcggaggttgcagtgagccgagatcctgccactgcattgccagtctgggtagcagagtgagaccctgtctcaaaaaaaaaaaaaaaaaatagaaattccatatgatctaacaatcctgccatatgtgacaacataaaaaaaccttcagaaaataatattaagtgaaataacacagaggcaaacactgcatgcttccacttctgtaaggcatctaaaccagtcaaactcatagaatcagagagtagcatgttggcttccagtgactaggaaaagagagacttgggagttgctgttcaatg

SEQ ID NO: 921586 - DNA, 656 bp, Homo sapiens
caagctctgagatttttttctttgcttggtctattctgctgttaatacttgtgatttcattatgaaattcatgtggtataatttccagctctatcagattggttacattcttctttatactggttactttgtaaagtagagttctttatactatattttgctcctatgataatttattatcatttttgactttcttgtttttgggttacaatgtacttgtttagcttagtgaactgcatttctatccatattctgaattttacttctgtcatgtcagccatcttagcctcagcctggttytgaacctttgctggagaggtgatgtggtcattggatgagggaaggtactgtggctttttgagttttcagcattcttgcaataattttttacctttgtgggcctgtcatcaatttttgaggttgctgacctttgcttatttttcttttttatcttatttaattaccttgagggttcattgtgatataaggtgaattcagccaattggctttgtttctggaagattttgggggaccaacattctgttcccaactcctggaccacgtgctttaactccagtggacttctattgggtctcaactttgttctctggctcctcaaggttttgagtcttctgagctgcggtggcccaggtgaa

SEQ ID NO: 921587 - DNA, 656 bp, Homo sapiens
caagctctgagatttttttctttgcttggtctattctgctgttaatacttgtgatttcattatgaaattcatgtggtataatttccagctctatcagattggttacattcttctttatactggttactttgtaaagtagagttctttatactatattttgctcctatgataatttattatcatttttgactttcttgtttttgggttacaatgtacttgtttagcttagtgaactgcatttctatccatattctgaattttacttctgtcatgtcagccatcttagcctcagcctggttctgaacctttgctggagaggtgatgtggtcattggatgagggaaggtactgtggctttttgagttttcagcattcttgcaataattttttacctttgtgggcctgtcatcaatttttgaggttgctgacctttgcttatttttcttttttatcttatttaattaccttgagggttcattgtgatataaggtgaattcagccaattggctttgtttytggaagattttgggggaccaacattctgttcccaactcctggaccacgtgctttaactccagtggacttctattgggtctcaactttgttctctggctcctcaaggttttgagtcttctgagctgcggtggcccaggtgaa

SEQ ID NO: 921588 - DNA, 683 bp, Homo sapiens
atgctgggggcccactccagtccctagttgcctcagattttccagtacctgaaggtattaccagtgaaatatgagaaacagcaaagatggcagcctgccctttttccgaatagctctgtaccagggaggtacagacctgttgctggcccaaacacacctctaagaggtgtctgaagaccccagttgggaggtctaacacagtcagaaggactgtgttaatacctcggtgatgggttgatagctgcagcaaaataccatggcacatatttacctatgtaacaaaccttcacatcctggacatgtatcctggaacttaaaataaaacaaatacaatgaacaacaacaaaaataaattattaataaataacaactgaatgaagaaaagaaagaagaaagaaagaaagagaaagaaagaaagaaagaaagaaagaaagaaagaaagaaagaaagaaagaaagaaagaragagaaagaaagaaagaaaagaaggaaggaagggaaagagagacaaggcaggatgatgtcccacccaggagcaatgcagaggcaaatgaacctcccagggaagtgatgagtcaatgtgaagccccaggtaacatgcttctcccacagatctctgcaaccctcgggtcaggaagttccctcatgagcccactccaccagggccttaagtgtgacacacag

SEQ ID NO: 921589 - DNA, 687 bp, Homo sapiens
agggaatacttgcatcacccctccctcagtcccaggaagtacttcctgcagctctggcagagagtctttctgcttgaggaaaggaacgggaagagtgaagaggacattgtctgcaacttggatgctagctcagccacagtaaaacaaagcatcaagcagagtcctgaagccctcattccaggctctagatcccaggtgatatttttagacctgccctgggccagaagggaacccattgccctaaagggrgaggcacaggcttggcaggattcaccacctgctgactaaacagcccttgggccttgaataggtatcagtgttagccagacagtagtcaccatggggatggggcagtggtatccatcgggatagtcaccttctgcttgaataaaaaatagggaaaagtaaagaggtctttgtcttgcaacttgggtaccagctcaaccacagtaaaataaagcaccaagcagtcataaagcaccaagcagagtcctaaagctcctgattccaggtcttagcttatggacaccatttctagacccaccctgggtgagcagagaacttcctgccctgaaggcaaagaccccaggcctgtcaggattcactacctgattactaaaaggctcttatgccttaaataaacatcagcagccaggcaataattgccacaaactttgggtgacaccc

SEQ ID NO: 921590 - DNA, 687 bp, Homo sapiens
agggaatacttgcatcacccctccctcagtcccaggaagtacttcctgcagctctggcagagagtctttctgcttgaggaaaggaacgggaagagtgaagaggacattgtctgcaacttggatgctagctcagccacagtaaaacaaagcatcaagcagagtcctgaagccctcattccaggctctagatcccaggtgatatttttagacctgccctgggccagaagggaacccattgccctaaagggagaggcacaggcttggcaggattcaccacctgctgactaaacagcccttgggccttgaataggtatcagtgttagccagacagtagtcaccatggggatggggcagtggtatccatcgggatagtcaccttctgcttgaataaaaartagggaaaagtaaagaggtctttgtcttgcaacttgggtaccagctcaaccacagtaaaataaagcaccaagcagtcataaagcaccaagcagagtcctaaagctcctgattccaggtcttagcttatggacaccatttctagacccaccctgggtgagcagagaacttcctgccctgaaggcaaagaccccaggcctgtcaggattcactacctgattactaaaaggctcttatgccttaaataaacatcagcagccaggcaataattgccacaaactttgggtgacaccc

SEQ ID NO: 921591 - DNA, 663 bp, Homo sapiens
aaattttaaagctgataagcaacttcagcaaagtctcaggatactaaatcaatgtgcgaaaatcacaaacattcctatacaccaataataaacaaagagccaattcatgagtgaactcccattcacaattgctacaaacagaataaaatacctaggaatacaacttacaagggatgtgaaagacctcttcagggagaactacaaaccactcctcaaggaaataagagaagacacaaacaaatggaaaaacattccatactcatggataggaagaagcaatattgtgaaaatggccatgctgcccaaagtaatatatagattcaatgctattctcatcaagctaccattgattttcttcatagaattagaaaaaaaactactttaaatttcatatgtaatcaaaaagagtccgtatagccaagacaatcccaagcaaaaagaacaaagctggtggcatcgtgytagctaacttcaaactatactacaaggttacagtaaccaaaacagcatggtactggtaccaaaacagatatatagaccaatggaacaaaacagagtcctcagaaataatgccacacatctacaatcatctaatctttgacaaacctgagaaaaacaagcaatgaggaaaggattccctatttaataaatgctgttgggaaa

SEQ ID NO: 921592 - DNA, 796 bp, Homo sapiens
tttttattagagatggggtttcaccattttggccacgctgatcttgaactgctgacctcaggtgatccacccacctcggccttccaaagtgctgggattacaggcgtgagccaccgcgcccagcctagaatttatctttaaaagcaatatacagttgaggcaggaggaagyacatgagaaccacgacagccaccccaaagagatggacaccatgccaaggctggaagcttttgttaataatcagacctgtcctaaaaaagaatgcggggctgcctctgaaggaggtaagctctctcttcttagaggtgcctcggtgcttgcctttttgggatactgagaagagggcttctgcctggggctgcagacaggaacccctgacctctgagatgccttgcagctcagagtctttaatacatttattccagaatccttcgactctgagattttaacatgttaagattccttagctggattcaaagactctttgggggctttgagtggaagtaatctctgattccttgaccctgaatcacagagtctgaagcttttgggatctgagatttcccacagtccttgtactcaaaagactctgagctgcagaagcctacccagacagagaggtttgtcaccaccaccaggcttccccacaaccactaacagagggcagggacccaggtgattgactcatttgctgggtactgggatttttttgctccccaggatccaggcaagcacctagaagaaagaagatactcaatgcattcattcatgactgaatgaatgaagagtccctacc

SEQ ID NO: 921593 - DNA, 796 bp, Homo sapiens
tttttattagagatggggtttcaccattttggccacgctgatcttgaactgctgacctcaggtgatccacccacctcggccttccaaagtgctgggattacaggcgtgagccaccgcgcccagcctagaatttatctttaaaagcaatatacagttgaggcaggaggaagcacatgagaaccacgacagccaccccaaagagatggacaccatgccaaggctggaagcttttgttaataatcagacctgtcctaaaaaagaatgcggggctgcctctgaaggaggtaagctctctcttcttagaggtgcctcggtgcttgcctttttgggatactgagaagagggcttctgcctggggctgcagacaggaacccctgacctctgagatgccttgcagctcagagtctttaatacatttattccagaatccttcgactctgagattttaacatgttaagattccttagctggattcaaagactctttgggggctttgagtggaartaatctctgattccttgaccctgaatcacagagtctgaagcttttgggatctgagatttcccacagtccttgtactcaaaagactctgagctgcagaagcctacccagacagagaggtttgtcaccaccaccaggcttccccacaaccactaacagagggcagggacccaggtgattgactcatttgctgggtactgggatttttttgctccccaggatccaggcaagcacctagaagaaagaagatactcaatgcattcattcatgactgaatgaatgaagagtccctacc

SEQ ID NO: 921594 - DNA, 436 bp, Homo sapiens
cagattctaaagtccctttctttctcctcaatgttatactggtgtctttcaaggatgtgataaaccaggttcattcaggagcatgtgttggaaagataaggactagaactcaacgcctcacacttccaggcttatccttccagctctttagctgttgagtcaataactgaaaagrtgccctgcctgccttctaagaaattggctcctgtaggcaaatgacacagtcttcatttatttcctctgacattatgaattaattgtgaactaagtgaccaaatcatcataatacaattggcctctaaatactaaattgtaaacttgtgtgaatcaggatcatgtgtcctataacatttctttctttcctttttaattgagcttcactctgacattctcagtaaaatctaacaatgggttgctctgtttcaagagttagtca

SEQ ID NO: 921595 - DNA, 479 bp, Homo sapiens
tacatgtgaggaaattagctaatgatgaggaaaaaactatccaaagaagccgagggaacgatgcttaaagctcacataaggctaaaactagtatgtattcaaaccagccagagtggaaaaccttgtaatttcacagagcatttaagtagagtatatggaatggtatggtttcagtagtggggtaaaattagccttaaaggcctctctagttctgcctaacaaaagttgaaagcaagccttgaaaggaacaactgtttctaagtaacttaactgcattctagaacaaagttcaaatatttatagaagaatagataaaactttcagcatccsatatagtaaaattctcaatatatagcatcaaataaaaaattaccaagcatgcaaagaaataggtaaagattagccatcatatagagtaatattaatcaatggaagctgatccagaaatgacacagaactacaaaattagtaaataaaaa

SEQ ID NO: 921596 - DNA, 753 bp, Homo sapiens
tttaaaaaaataaacttattgagatataattcacatactgtacatcatgcccaataaatgtacaagtcaatgctctgtagtgtatgtagagtgttgtgcaaccattaacacaatcaattttagaacattttcaacatgccaaatagaaattccataccttctagctgttaatcatcaatcttgtcatttccccctttctaaccaattactattccagtttctgcctttatatttgtttgtgtcctgaaaattttgcataaattgaatcatacaacatgtgggctgttgtaactgacttctttcacttagcgttacgtttttgaggtgcatctatgttatagcatgtataagaacttcattcctttttcttccctaaaaatatttattgcrctctccctctccctctccccacggtctccctctccctctctttccacagtctccctctgatgccgagccaaagctggactgtactgccgccatctctgctcactgcaacctccctgcctgattctcctgcctcagcctgctgagtgcctgcgattgcaggcgcgcgctgccacgcctgactggttttcatatttttttggtggagacagggtttcactgtgttggccaggctggtctccagctcctaaccgtgagtgatctgccagcctcggcctcccgaggtgccgggattgcagatggagtctcgttcactcagtgctcaatgttgcccaggctggagtgcagtggtgtgatctcggctcg

SEQ ID NO: 921597 - DNA, 551 bp, Homo sapiens
attccacaagtttctaggaagttccaaactttcccacatcttgtctttttctgagctttccaaaatgtttcaccctctgcctgttacccagttccaaagttgcttccacattttctgttattgttgtaagagtgccctactcctggtaccaattttttgtattagtccattttcacactgctatgaagaaatacctgagactstttaatttataaagaaaaaaggtttaattgactcagaattctgcatgactagggaggcctcaggaaatttacattcatggtggaaggtgaaagggaagcaaggcacaacttatatggtggcaaaagagagagagagagagagagagagtgtggggtgggggggaagtaccacacttctaaaccatcagatctgttgagaactcactataattagaacagcattggggaaatctgcccccatgatccaatcacctcccaccacgtccctcccctgacatgtagggattacaatttgacatgagatttggattgggacacagagccaaaccaaatcaataactcttcaaa

SEQ ID NO: 921598 - DNA, 583 bp, Homo sapiens
ttaatgcaccacaaccaagttggatttgcaaggctggttcaataaatcaataaatgtgatttataatcaataaatgtgattcaccacacaaacaaaattaaaaacaaataccatatgatcatctcaatagacgggcaaaaagattttgaaaaaatycaagttgttcatgtccaaacccctcaaaaaatttgatacagtcaaaggtgggcacagtgtaaaaataaataaggaagggtagatatatgtaaaataggtgaaaggtggggatcaaaggaaagcatgcgaaatgggaagacgggtttgcaacctggtctgtgaattttacttgtaacttggcctttagggtttaaactgtctttggcttgaagatgggatttcactgggtacctgcccctgttttaggatttctctgcctcctccctctatcatttccccctctgaagaggtacatgtaactgccgttagaacagggatgatgactgatcttagctgcttcctgctgacaggggcattgttttaggggcaatgacaatcagatttctctcagaggcctatctaagggtcctcagtaaaagggagccat

SEQ ID NO: 921599 - DNA, 615 bp, Homo sapiens
acttaacctctctgtgacttagcttcctcacgtgtaaaacagatatttttaaaaattgttgcaataaaataagagaatatgtgtggaatgcagaataaaatatatgcatcatattaagtatgcagtaaaagttggttgttattagctggtataatttcaacccaatgaaaagctaaggaaaagagatagattaaaagtgaggaaactagaaacctagttcatgtagattgggtgatcaacaccagaaaactaattgcaccgagcctcaatttctcctctgtaacattaagaaactgggtcaggtgtcttaagttattttcagtgctaaaattttacaaaatagggaactacacctataatacaggagaaccatgtagacaaggggccagaatccccacyccaccatgtgccattaggagctacagtaggtattctcatagcctcagaaagaggagagtagtcatgtgtatctcacaacttaaagtataccaaataaatgctttcttttgctttttgtaaacaacttgtttaaaaggttccttctttggcagaaagtccttaaaataattttaatataagaaattatttcaaagccaggcatggtagtgcacatct

SEQ ID NO: 921600 - DNA, 561 bp, Homo sapiens
catgattcaagtatcacctcctccaaatctaccagaacaccaccatctcttaatctgcattagaaccatatggtaatgacagcaacaagaaaaaaaaaatagagcaatgctggttccacccttgatttttctttggaaccaggtacatttcttacctagttataaattaatttaaatattactttytttaaaaagccacatgtttctagttgatagtttaattcacagagtagagttattccaagagatttaaagcacaataatttgagcagaaatctcctttctgttttctgagacaggatcttcctctgtcacccagcctagagtacagtgatgtgatcatagctcacagcagccttgaactcctgggctcaaacaatcctcttgccacagcctcccaagtagctgagattacagggaggtaccaccacagccagctaatttttaaaatttttttgtagatacagagtctctttatgtttcccaggcttgtctggaactcctggcctcaagcaatcctcctacctcaaccacccagtgagtataaatctctaatgtggt

SEQ ID NO: 921601 - DNA, 561 bp, Homo sapiens
catgattcaagtatcacctcctccaaatctaccagaacaccaccatctcttaatctgcattagaaccatatggtaatgacagcaacaagaaaaaaaaaatagagcaatgctggttccacccttgatttttctttggaaccaggtacatttcttacctagttataaattaatttaaatattactttctttwaaaagccacatgtttctagttgatagtttaattcacagagtagagttattccaagagatttaaagcacaataatttgagcagaaatctcctttctgttttctgagacaggatcttcctctgtcacccagcctagagtacagtgatgtgatcatagctcacagcagccttgaactcctgggctcaaacaatcctcttgccacagcctcccaagtagctgagattacagggaggtaccaccacagccagctaatttttaaaatttttttgtagatacagagtctctttatgtttcccaggcttgtctggaactcctggcctcaagcaatcctcctacctcaaccacccagtgagtataaatctctaatgtggt

SEQ ID NO: 921602 - DNA, 561 bp, Homo sapiens
catgattcaagtatcacctcctccaaatctaccagaacaccaccatctcttaatctgcattagaaccatatggtaatgacagcaacaagaaaaaaaaaatagagcaatgctggttccacccttgatttttctttggaaccaggtacatttcttacctagttataaattaatttaaatattactttctttaaaaagccacatgtttctagttgatagtttaattcacagagtagagttattccaagagatttaaagcacaataatttgagcagaaatctccttyctgttttctgagacaggatcttcctctgtcacccagcctagagtacagtgatgtgatcatagctcacagcagccttgaactcctgggctcaaacaatcctcttgccacagcctcccaagtagctgagattacagggaggtaccaccacagccagctaatttttaaaatttttttgtagatacagagtctctttatgtttcccaggcttgtctggaactcctggcctcaagcaatcctcctacctcaaccacccagtgagtataaatctctaatgtggt

SEQ ID NO: 921603 - DNA, 561 bp, Homo sapiens
catgattcaagtatcacctcctccaaatctaccagaacaccaccatctcttaatctgcattagaaccatatggtaatgacagcaacaagaaaaaaaaaatagagcaatgctggttccacccttgatttttctttggaaccaggtacatttcttacctagttataaattaatttaaatattactttctttaaaaagccacatgtttctagttgatagtttaattcacagagtagagttattccaagagatttaaagcacaataatttgagcagaaatctcctttctgttttctgagacaggatcttsctctgtcacccagcctagagtacagtgatgtgatcatagctcacagcagccttgaactcctgggctcaaacaatcctcttgccacagcctcccaagtagctgagattacagggaggtaccaccacagccagctaatttttaaaatttttttgtagatacagagtctctttatgtttcccaggcttgtctggaactcctggcctcaagcaatcctcctacctcaaccacccagtgagtataaatctctaatgtggt

SEQ ID NO: 921604 - DNA, 727 bp, Homo sapiens
caattcacgcaccaagtctgattttttagaagtagctgcctgaagcacagggttgataaggaatcaaaagtctgagtctacactccaaaaatgacactgtgagctgggcacggtggctcacacctgtaatcccagcacattgggaggccgaggtgggaggatcacttgagctcaggagtttgagaccagcctgggcaacatagaccttgtctctactaaaaaatttttttaaattatctaggtgtggtggcatgtgcctgtagtctcagctactcagaaggccgaggtaggaggattgcttgagcccaggagatggaggctgcagtgagctatgagcatgccactgtactccagcctgggggacacagtgagaccttgtctcaaaaaagaaaaacaaaaaaaaaagattttgatctgccttagatggaaagagagagcagtatgccttagatgtagagggrgagatgagtagacccagtgacaaaacctagatcttaactgttaaggaaattatagatgcttcagtgctggtatgtgtggtcattctcagtgaatcttttttttttcctattctaaagctctaagtccaaggagctttaaggtattgttcaagattgttatctgagacagctagacccttgaaaacaattactgttaaaatactggggccaagaaagtgcacagatgagaagcaacatttcttatagtatattccaagcagtttctg

SEQ ID NO: 921605 - DNA, 606 bp, Homo sapiens
tggccaaggtacagctcagtctaccacattggaaactgcaagccataagccttggtggcttccacatggtgttaaacctgttagtggacagaatgcaagagcaaagaatgcttggcagcctccccctagatttcagaggatgcatggaaaaacctgggtgtccaggcagagacctgctgcagaatggagccctcatagagaacctctactagggcaatcccaagaaagaatgtagggttggagaccccatagagagtcgccactgtggcactgcctyggaactgttgaggtgggaaccactgccctccagacactggagtggtagagccaccagcagcttgcaacctcaacgtggaaaagccacagaggctgatctgtccaaggttttgagggctcaaatcttgcagcagtgttccctggatgcagcatacagagtcaaagattattttggagcattaagatttaacgactgtcaacatagtgttggaagttctggccaaggcaatcaggcaggagaaggaaataaagggtattcaattaggaaaagaggaagtcaaattgtccctgtttgcagatgacatgattgtatatctagaaaacccaatt

SEQ ID NO: 921606 - DNA, 612 bp, Homo sapiens
ccctgagggttcttaggatcccttcaagggttccaggaagtcaaatatattttcaaaatatactatgacattatttggctttttctgtatgctgacatggtactgattttatgcaatccatggtagattaaacagcaccaatcaagacagtggcgcagaaatacatacatcattattgtagtcttcacagccaggcacttacagctttttttaaaaaagaaaattttattcaagaatgtctttaatgaggctattaagattataaattttattaaattttgactcaattattgaacttaaaaatatgctgtatgacaaaaggggaaatacaaataaagcacttaggctgggcattaaaaaacagtggttattccaaaaacactgtgcaattgagttgtgatctgawcatcatttttactcaaaggaataactgaaaattgttattcagaattgggagtttggcagacattttctggaaaatgaacaaagtgaccctatcactccaaaaaaacaaattattgatgttatacacaaccaaggataacatttgagctttcacaggaaaatttgaatattgaaaaacttctattttccactgtgagcttgagtgtt

SEQ ID NO: 921607 - DNA, 778 bp, Homo sapiens
aggtgctgacacaggtgctgcctctgtgcaaggctgcagttgaaccaggtgtaccacaagtggcttccgctgagggcactggggaatgaggtggtgcccaaaacttggagatgccaggaaccacagaaccccaaagagggtgttacagtgtgtcacagcccagactcaggaaacccaaggtctggacctgcaaaagggccacagctcttctctccttctcgccacccacagtgtagagcacaagtgggcttatttcakcccgtttgtgttgcagctccttcagtcctgccaccctgctctggccagcagcacctgggctagcccagtcccaccactacatgggctggctcagtccattacgtggagcagccacccagtgccaacagagggcgagagtgctataatgttacagcagttctggcttggggaaccccaaagtctgggcccccagaagggttgccattcttcactcccacagtccaggagtgtgtcactgcctgtagctcagtgagcctgccagaaacgtgttacagctccttttgctcctactgtttgatcttgtcccacgtccaggaagaatgatgttactgacaactgaagggtgagcaaggtggagcggagctttattgagcaacagaacagctctcaggagaactgaagtggatagcttctttctgcaggcaggttgcccccacgagtgtgtcagtctggctaagtcagggatttttatgtgctcagaatggaggaagtccatgctgattggtccatgggtagccat

SEQ ID NO: 921608 - DNA, 778 bp, Homo sapiens
aggtgctgacacaggtgctgcctctgtgcaaggctgcagttgaaccaggtgtaccacaagtggcttccgctgagggcactggggaatgaggtggtgcccaaaacttggagatgccaggaaccacagaaccccaaagagggtgttacagtgtgtcacagcccagactcaggaaacccaaggtctggacctgcaaaagggccacagctcttctctccttctcgccacccacagtgtagagcacaagtgggcttatttcagcccgtttgtgttgcagctccttcaktcctgccaccctgctctggccagcagcacctgggctagcccagtcccaccactacatgggctggctcagtccattacgtggagcagccacccagtgccaacagagggcgagagtgctataatgttacagcagttctggcttggggaaccccaaagtctgggcccccagaagggttgccattcttcactcccacagtccaggagtgtgtcactgcctgtagctcagtgagcctgccagaaacgtgttacagctccttttgctcctactgtttgatcttgtcccacgtccaggaagaatgatgttactgacaactgaagggtgagcaaggtggagcggagctttattgagcaacagaacagctctcaggagaactgaagtggatagcttctttctgcaggcaggttgcccccacgagtgtgtcagtctggctaagtcagggatttttatgtgctcagaatggaggaagtccatgctgattggtccatgggtagccat

SEQ ID NO: 921609 - DNA, 533 bp, Homo sapiens
caccaagtccctaagctgcacacagcacagggacccagggcctggcccacaaaaccattttttcctcctgggcatctgggcttgtgatgggaggagctgctgtgaagacctctgacatgtcccagagacattttccccattgtcttggggattaacaygcggctccttgttacttatgcaaatttttgcagccagcttgaatttctccttagaaaatgggattttcttttctatcacattgtcaggctgcaaattttctgaacttttatgtttagtttaccttttaaaactgaatgcctttaacagcacataagttacctctttactgctttgctgcttagaaatttcttcctgcagataccctaaatcatctctctcaagttgaaagttccacaaatctctagggcaggggcaaaatgccaccagtctctctgataaaacataacaagagtcatcattgctccagttcccaacaagttcctcacctccatctgagactatctcagcctggatttaattgtccatatcattat

SEQ ID NO: 921610 - DNA, 787 bp, Homo sapiens
cccagagactgggtagtttataaaggaaaaaattttaattgactcacagctcagcctgactggggaaacctcaggaaacttacaatcatagcagaaggtgaaggggaagcgaggcaccttcttctcaaggtggcaggaaagagaagtgccaatagaagagggaagagtgccttataaaaccatcagatcttgtgagaactcattcactgttataagaacagaataagagaaaccacccccatgattcaattacctccacctggtctctcccttgacatgtggggattrtgggaattacaattcaagatgagatttgggtggagacacaaagcctaaccatatcattctgcccctggaccctccctaatctcatgcccctttcatatttcaaaaccaaccatggcttcccaacaattctccagtgccttaattcattcctgcattaacccaaagtccaagtccaaagtctcacctgacacaaggcaagtcccttctgcctgtgagcctgtaaaaccaaaagcaaattagttacttccagatacaatggagatacaggcattgggtaaatacaccctctttaaatgggagaaattggccaaaatgaaggggctacaggcccatgcaagtcctaaatccagcaaggcagtcaaatgttaaagctttgaaatgatctgctttgactccatgtctcacatccagtttatactgatgcaagtggtgggttcccacagccttggacaactccacccctgtggcttttcagggtacatcccccatcctggttgct

SEQ ID NO: 921611 - DNA, 693 bp, Homo sapiens
cccagagactgggtagtttataaaggaaaaaattttaattgactcacagctcagcctgactggggaaacctcaggaaacttacaatcatagcagaaggtgaaggggaagcgaggcaccttcttctcaaggtggcaggaaagagaagtgccaatagaagagggaagagtgccttataaaaccatcagatcttgtgagaactcattcactgttataagaacagaataagagaaaccacccccatgattcaattacctccacctggtctctcccttgacatgtggggattgtgggaattacaattcaagatgagatttgggtggagacacaaagcctaaccatatcattctgcccctggaccctccctaatctcatgcccctttcatatttcaaaaccaaccatggcttcccaacaattctccagtgccttaattcattcctgcattaacccaaagtccaagtccaaagtctcacctgacacaaggcaagtcccttctgcctgtgagcctgtaaaaccaaaagcaaattagttacttccagatacaatggagatacagrcattgggtaaatacaccctctttaaatgggagaaattggccaaaatgaaggggctacaggcccatgcaagtcctaaatccagcaaggcagtcaaatgttaaagctttgaaatgatctgctttgactccatgtctcac

SEQ ID NO: 921612 - DNA, 531 bp, Homo sapiens
actcacctatatatatattatttatagaaatgtcatgctagagattatagaatctatatatgtgtgtgtatctaaatctaatatctaaatctctacacacacacacacacacacacatagagagagacagagagagagacagagagagattctataacatggcttttctacatggaattggttaaatcctgagaaatacgtgcttgagtcattgccttcttctgatttctgtgtctcaaaakgtgattctcattctatcttccctgccccatacttgtctaagaattttcaataattaaggaagaggagctttagttttttgtttcttgggttttatttctaactctacccattcctgattcttgttgcatagatattaatccattcctgtaactcatttttgcatgtggtgtttctttgttttgttttgagatggagtttcactcttgttgcccaggcctgagtgcaatggcgcaatctcggctcactgcagcttccacctcccggtttcaagcgattgtcctgcctcag

SEQ ID NO: 921613 - DNA, 716 bp, Homo sapiens
ggaagtgtcacaccattttgcagaagtaaacaaaagagaactgaagcgggtatgctaatatcagacaaaatggactttaaaacaaaaatgttactaaacaaggacattttataatgccatgagagtgtcaacccattaataagatatagcaaggcataaagagaaactaatgcaattttctgaaggaagaaatatagaattaaaaaaaattgtwttacttcaaaccacactttcgtaatgggtaggtaattatacagatcaatgaggaaatagaaaatttgaataacattataaactaacaaccacttattgagcattccacccaaaaataacagaacacacattcttctcacctgtatattaaatactctcacagataggctgtatgctataccataaaacaagtctcaatggatttaaaataattgatattttacaaagtatattttctgatcacaactgaatgagaaatcaataacaaaatttgaaaagtccacaaatacgtgaaaattaaataatactattctaaatagcaaataggacaaagaaaaagttacacaggaaattagaaaattctttgagataaatgaacgtgaagtagtgaaggtagaaaagtactatcttcattcagataaagcaatgcttagaagaaaatttgtagctataaacaacaatattacgaaagatggaaagtctcagatcaatcacctaagctt

SEQ ID NO: 921614 - DNA, 772 bp, Homo sapiens
tgctgtgtctgaaatctctctgcaggcaagaactcaccatttccaaggtcttaaatatcacctacatacaaattgtccccaatattctgtctccggtctgatctttcctttaagctaaagactcgtgtgtttacaaacatctggttaattgttgtcaccagatacttcacgggcatctcaaactgaacaagccccatatcygatctgaatccagttgtcatcatttctgtaaaagattcccccaagggctctaatcagaagcaagaagcttaactccactacatcccaaatccctcttttggccctgtggattctacttttaacctacactttcattcatccacttttctccacgtcatccaccctgtcttcatctgggctgccagtcccccttgccggggcatttgcagaagcttcctacgtattctctccgcttctccttctgccccttactctctattcttcacaaagcagcctggttttcttaaagccaatcagatcatggccttctcctggtataaatccaccccactacacgtggagaaaattcactcgtttccacagacaaaacccagcacaatctagtccctgccgacgtcactttgggccactctcctcggagaatgtaccacacaggccccctttcggccttggaacacaccaggctctctgccacctgagctcctttgcaaacactaaacgcagatgtccagccccatttcttcaagtcgctggctccttccctttcttcaaattttggtataaatattat

SEQ ID NO: 921615 - DNA, 607 bp, Homo sapiens
tctcatctgtttagcatgttttgccctgtctttgtacgactgccttgatctttccagtttacagcctcctcatggccccagccctaaggtgcacgaatgccctgggtgggacacacaccctgtgactcttcttgacctccaagcacatccctttctccctagggttccttctagacggcagctttccccctcctcctttgtgggggagaaggtaactttgacagtcaagatttccaccaaggccgggcgcggtggctcacgcctgtaatcccagcactttgggaggccgaggcgggtggatcatgaggtcaggagattgagaccatcctggctaacaaggtgaaaccccgtctctactaaaaatacaaaaaattagccgggcgcggtggccggcgcctgtagtcccagctactcgggaggctgaggcaggagaatggtgtgaacccgggaggcggagcttgcagtgagccragattgcgccactgcagtccgcagtccggcctgggcgacagagcgagactccgtctcaaaaaaaaaaaaaaaaaaagatttccaccaaaacaccctgagataagaccagataagaccaggcttgtcatgagagaga

SEQ ID NO: 921616 - DNA, 649 bp, Homo sapiens
ctcaagcaaacctcttccatcctaacttcatctcagcactgcttcccggataactcaaccaattccgacgtgatcaattctctacacagagaacttactgaatcctcaaggatctccagtcaaagagaacaaaaggagtcagtgttggtggcttattggtaaagggaaaggcattgcagaaagaaaatggaaactgggcccacggattaacatacatttagaagacagaaaatagaatttcataagattgaaaagcaatgaccatcatagtaacattcccagatactttaagccctcttcttagcctcctaataacttaaacagtattgatctcccttttatagatcctatatgctatatcttaaattgtgatgttaagggctcaataatgaaatgtatcgtcgccagtctgcagttcaagctctgtgcttatactaggcccttttaaratctttagggacccaagacacttgaacctgaggaggaaagatcctacggagagaccaagaatcaagagatgagccgaagaatgggagaggagggaaagacaagaagaaaaaagagacaaaaatgcatgaccaaggaggtaaacagagcccagaaaaatattgaaatttgattataattcaatgtgatgagttgttgaaag

SEQ ID NO: 921617 - DNA, 586 bp, Homo sapiens
acacagacagctgactgaaatcaggaaagtaatatgtgaaccaaaggagaatatcaataaataaaaattctacaaaaaaacccacaaaaattctggagctgaaaaaatacaataacttaagttaaaaattcatcagagtgctttaatatcggctctgaggaagacaaagaatcagaaaactcaaaagcaggtcatttgaaattattcagtcaggggagcaaaaagaaaaaagaataagtagcacgggagaaagtctaagtgaattataraacactatcaagagaaaaatatatattatgaaagtcccaaaagtggaagagagaaaggaaaagaaatcttattttacaaaagaatggctgagaagttcccaatctaaggaatatagatatctagatacatgaaactcaaagacacctagtaagatgaacccaaaaaagtatatactgagacacattgtaatcaaattgttaaatgtcaaagataaagaattttgaaagcagcaaaataaaagtgacttgtcgtgtacaggtgagatccaattagactattcatggctatctcagcagaaatttcgtaggccagaaga

SEQ ID NO: 921618 - DNA, 607 bp, Homo sapiens
tgcccttaatttctttctcttgcctgactgccctgtcgaggccttctaatactatgttgaaaatgagggttagagagggcatgcttgtcttgtgccagttttcaagcttttgtctattaagtataatgttggctgtgggtgtgtcatagatagctcttattattttgaggtatgttccttcaatatctagtttgttgagagtttttaacatgaaggatgttgaattttaataaaagccttttcaacatctgttgagataatcatgtgcttcttgtctttagttctgtttatgtgatgaatcacatttattgatttacgtatgttgaaccaaccttgcatcccagggataaagcctacttgattgtggtagataagtttttctgttctgctggattcrgtttgctagtattttgttgagaatttttgcatcaatgttcgtcaaggacattggcctgaagttttcttttgtgtgtgtgtgtttctgcaggtatggtaactggatgatgctggcctcgtataatgagttatggaagaatcactctacctcaattcttaacacatagtttcagtagaaatggtaaccgctcttctttgtacatctggtgaa

SEQ ID NO: 921619 - DNA, 657 bp, Homo sapiens
actttaggtatagttatgattgaattatgtccacccaaaattcatatgttaaaggcctaacccacagtgccttaaaatgcactaggagttagattctatttaaaaatagaatcattgcgagcttaattagtgaaataaagatgatgccatactgatccctaatctgatatgactggtgttcttattaaaaggtgatatttggacatagacaggcacgcagggaaaattccatatgaaaatgaaggcaggttgaatcatacagtagatgtctaggaaagtcaaagatttccagcaatccacagaacctacggaggagtcctggaacagattatctctcactaccttcrgatggaaccaaccctgctaacatcttgtcttgtacttctacccttcacaactgtgaaagaataaaatttctgctgtgtaaactgcccggttcgtggaactttgttatgctagtcctcgaaactaagacaggtaccgttttctttgagttagtatagactagactatattgatgctggagtcattaacacctccagtatctcttagtgggttaaaacaatacagtgtttttctcactcttattacatgtcaatcacaggcagttgggtgctctgcttcatgacttcttgactcagagacacaggcagccaa

SEQ ID NO: 921620 - DNA, 743 bp, Homo sapiens
tctagatcaagtgaacaaaagtctaactttaattaaacagagtcatggtccctcagtcaattatcagacttaagtcagtttacaaacccagaaccccttggatgaaggggaggtgatcaccttgaggaaagaccccagcgcactgttgaaaatgtatactgttgacatttctcctagctttccacaaagaaacctatggyctttcatcagggtgactgtgcattaaggaaaaggaaataattagacctttttgaaacaagtgggcactggctctaaactgacattgattccaggagacccaaagtatcactgtggccctccagttacagtaggggcttatgaaggtcaggagatcaatggagttttagttcaggtccatctcacagtagttccagggtctctgaacccattttgtggttatttcccctgttccagatgcaaaatagaaatagatgtattcagaagctggcagaaaccctacactggttcctcgacttctggagtgagggctattatggtgggaaaggccaagtggaagctgctagaatcacatcaacctaaaaaaatagtaaatcaaaagcaatactacattcttggagggactggaaagattattgccaccatgaaaaaacatgaaagattcaggggtggcaattctcaccacatcctcatttgtctctatttggcctgtgcaaaagacagatggatcttaaagaatgacagtggaccattgtaagattaat

SEQ ID NO: 921621 - DNA, 590 bp, Homo sapiens
ctattagctgacccatgaagccatcaagttggctgcatgcagcaacactccatcatcaaatgaaggtggcatatacttggggtatatgagcaggccctgaaagcacaaataagttacatgaagaagtggttcaaattttcatggtctccattcttgcttcattaccttctgtctctcagctacacctgtgggctcctggggagttctcaacaatcagttgacagaggaagacaagactcagtcctggtttagagatgattctgcatgatatgcagggcagctgcagcactgcagccaccctctgggacattcctgaaggacattggtgaagggaaattttcccagtgggcagaactttgggcatccatctaattgtccattttgtttggaaggagaagtggctagacatacaattatataccagttgatgtctaatgytttggcctaatggtcagagacttggaaggagcacgattggaaaatgtcacagagaagtttgaggacagtttttccctgaatggagaaaaagtgggaagatatttgtgtctcatgagaatgctcatcaaatggtgaccttagcagaggaggat

SEQ ID NO: 921622 - DNA, 652 bp, Homo sapiens
aacaaacgtgctgatgaggatttgaaacacctaagctgcagaaacccactggatggtttcctaggttccgagttggcattatctttcagaacgatcttctagaagagatcacataacactgttacaaaggatctggagaaagggaccctggcttcatcactctggctctccagtcatgctttacattttcacttcttacactctctttcataggaagtcaatttacaggcytccaccaagcccttaagtgacgtttttgtactatccatgacaagttcttgatgttatgtctgcacttctgacaaattcttagcagttaacttactaggcagttaaggtttttgttcaagcacaatatagctagaatagggtcatacattcaataaaacaaatatttaccaagcatttattgagtggaagataaaaagcacaaagcataattataaaacattctcccctgccaccataaaaatttttttaaagccttacagaatatagcataacataaccaaagcaaaaataggactaaagaggggaggaaggggaaatatcagcatgaattaaatatgacccagaagagccttgatggtcagacacgtaaagacaaattgggtagggttagggggtggctgtcaggggcacattctacagg

SEQ ID NO: 921623 - DNA, 652 bp, Homo sapiens
aacaaacgtgctgatgaggatttgaaacacctaagctgcagaaacccactggatggtttcctaggttccgagttggcattatctttcagaacgatcttctagaagagatcacataacactgttacaaaggatctggagaaagggaccctggcttcatcactctggctctccagtcatgctttacattttcacttcttacactctctttcataggaagtcaatttacaggcttccaccaagcccttaagtgacstttttgtactatccatgacaagttcttgatgttatgtctgcacttctgacaaattcttagcagttaacttactaggcagttaaggtttttgttcaagcacaatatagctagaatagggtcatacattcaataaaacaaatatttaccaagcatttattgagtggaagataaaaagcacaaagcataattataaaacattctcccctgccaccataaaaatttttttaaagccttacagaatatagcataacataaccaaagcaaaaataggactaaagaggggaggaaggggaaatatcagcatgaattaaatatgacccagaagagccttgatggtcagacacgtaaagacaaattgggtagggttagggggtggctgtcaggggcacattctacagg

SEQ ID NO: 921624 - DNA, 644 bp, Homo sapiens
gccaaagcatcattattattttaaaaaggcaccaatccctctgcaaaagcactgaattatatcatgatacaatcatcaattgtaccatgaatcaccatcagcggtggtcttttagggatatgaagaaggggttttcacaatacatcgcatgacacaccatcttccaaatctctaaacatttctctccacagcccagtcctctccatagttgtccaaatccctccctcttttctcttgttgtctccaaaactcaaaaccatgctctgactttctatatcccgccctcctcttcttggaccatctgggaagccccctgcttccccagggtgtcccctcctccccttctgggatcagtcatctttcctcaaatggaccagttcggcctctcttagtttctccaactctgcatctcaacctttctcccttcactacacaataatgtccaggaggcaaagagcccacaamcctgggaacctccctttccagaagggaggttctggaatgactacaaatatttggttatgattttcttccctgccacgcctgttttcatgggcagtgctgagccccggtcctggcagagctcagaaccaggctctcatgagctggggcaagtggggcctagggaacctctgggttgagga

SEQ ID NO: 921625 - DNA, 712 bp, Homo sapiens
taagtgcaaatagcagtgcatcaattacagtggacccctgaacaacacaggtttgaactgcacgagtccacttatccatggattttttcaacaaatatattggaaaattttttagagatctgtgacaatttgaaaaaactcagagatgacctgcatggcctagaaatatggaaacaagaaaaaggtatgtcattaatgcataaaatatatgtaaatactagtctattttatcatttaccaccataaaacatacaaatatctattataaaaagttagtatttatccaaacttacgcaccacagatcatacatgatgctacgaaaagtcaacacaaatgtaaacaaatgataatgtagtattaaatcataactgcataaaattaactgtagtatatcctgtcctttggtaataacatcatagccatctcctgttgctgttggggtgagcttgagtgttacgaaaatctgcttaaaaygctatgtgacactaattgacactaatcatctccatgtgagtagttcacctctccagtaaattgcatatcgcagtaaaaagtgatctcttgtgggtctcacatattttttaccatgtttagtgcaatactgaaaaccttgaataacaccatgggacccatacaaagtgccactggtgatgctaacagtacctctgaaaagcagagaaaattcatgacattacaaggaaaagttgggtt

SEQ ID NO: 921626 - DNA, 555 bp, Homo sapiens
tccagctatctttacatgtggccgactcaccttagaccactaccctcttatactcccctccacttgaatgtgggcagaatgtgtgacttgcttccagctgatagaatacgacaaaagtgaagggattttgcaaatgtaattaaggtgctgaaacagtttgattttgagtcagtctaaaggagattatactggatagcctgaccaaatcaaataagccttttaaaagagggtttaggtcttccctgagctcaaagacttgatgcagtgaaactctcctgggtcttgaagaaactaactgccatgggttctaaagctgatggaaacgaattttaccatcagctgcttaaacttggaagagaactccaagsttcagatgagcttccagtcctggctgacattgtgattgcagccttgtgagactgagaagagggcccgggtaagctgtacccagactcctgacccaaagaaactgtaggataataaatactggatgtgttgtctgggcctctgcatgtgtggttatttaacaattgaaaaccagtatgctataataaa

SEQ ID NO: 921627 - DNA, 621 bp, Homo sapiens
gtgttagccaggatggtcttgatctcctgacctcgtgatctgcccacctcggcctcccaaagtgctgggattataggcatgaagcaccacgcccagccctttaaataattctttataatggatatgtttatgatgggcacaatcagttttccactgttactttcattggcatttccttcactgctagtaaggctgagcataccttcactgcaatggcaattttgagttctttttttgtgaattgtcaattcayagcctttgctcattcttgtattgggttgtctttttaaaggtagttttgttaggaccacttctgtattgtagatactttttttttctgtagaggttcatttgattcaaaaacttatgtaaacattaaaaaggatagttgagaacaaacacagtatatagtgaactatttggactttatactgcttattaaatctctaatataagtacatgataaatgttatggactaaatgtctttgtcccccgaaaattcatatgtggaaacttaactttcagaagccccaggggttccagggatgttacccgaggggccagcaaatgagacagggctgagttcccatgtctgtgtctgcccctctactcttcataac

SEQ ID NO: 921628 - DNA, 621 bp, Homo sapiens
gtgttagccaggatggtcttgatctcctgacctcgtgatctgcccacctcggcctcccaaagtgctgggattataggcatgaagcaccacgcccagccctttaaataattctttataatggatatgtttatgatgggcacaatcagttttccactgttactttcattggcatttccttcactgctagtaaggctgagcataccttcactgcaatggcaattttgagttctttttttgtgaattgtcaattcacagcctttgctcattcttgtattgggttgtctttttaaaggtagttttgttaggaccacttctgtattgtagatactttttttttctgtagaggttcatttgattcaaaaacttatgtaaacattaaaaaggatagttgagaacaaacacagtatatagtgaactatttggactttatactgcttattaaatctctaatataagtacatgatwaatgttatggactaaatgtctttgtcccccgaaaattcatatgtggaaacttaactttcagaagccccaggggttccagggatgttacccgaggggccagcaaatgagacagggctgagttcccatgtctgtgtctgcccctctactcttcataac

SEQ ID NO: 921629 - DNA, 485 bp, Homo sapiens
tgctttgttgtatgttttgaaatcaggaagggtgaggcctccacattttccttcttttccagattgttttagttatttggggtcccttaacaatccatatgaatattaggaattttttttctatttttacaaaaawtgtcattgggatttttatagggattacattgaaattttaggtagctgtgggtagtatagacattttaataatattaaatcttgcaatccatgagcatgagatttacttgtatcttttaaaatttattttagcagtgttttatagttttcagtgtgtaatttatatactcctttggttaaattcattcctaagttctttatcttttttcatgctatagtaaatgggattgttttctttatttctttttaggattgactctcctccgattttttttttttttttttttttttagaacagagtcttgccctgttgcccaggctgtagtacagaggcatgatcaggtggcctt

SEQ ID NO: 921630 - DNA, 584 bp, Homo sapiens
aaaggccccaccctcaagcctggaaacccatggccctaaatgggaacaggcattcctgtttttgcacccaaacatttccttttggcctgctgcatccctgcatcgtgtaccattataaaccccaaaccccaggctcctcgagcagatgagcagataacagataagcagaagagcaaagaagcagaagagtggcacagcagaggagagaagagaaagggcatttaaacrtcaagaagagtttggctgtggatggtcagagaggagatcggccacaggacggccaaactccaggcgaagttcatattcccactccatcccctttctagctccccatccatctgctgagagccacctccacctggaaataagacaccccgcatttaccatccttcaatttgtctgtgtgacctgatacttcctggataccagacaagaacctgggtaccaagagggcactgagctggttaacgctttagctttctgcagatggcagagctaaaggagcattgtgacatgcccactggggcttcaggagtcacagacacccacccctagacgctaccgtgggctggagcccaaaagcg

SEQ ID NO: 921631 - DNA, 643 bp, Homo sapiens
tcttgcacatcagatggggctggtctgacctgtgcaccccttagtctgttggcctcttctggggccccagcctggccacacctgcttagagggcagtcttgggtaccttgggggcccacagcatagcttctgtgccagtgaaccttgcctgactggtggagaagtccagtgaggtgtggcctatacagccatgcacrtgctccctccccatactgcagcttccccggggcccatggcaatgccctacatcactttgctggcacatgtctgcacagataggttttgctttccttgccctgccagcacactggagtgtagtctgcacccacccagcccccagccaccactgcagatggagctttggtgggcataaagccagcaagccctgcccctgccagcaccctgcccttatactaatactgcacagagaacagcggacacccccacaccctcagggatcactcctgcttgcagggcacagagaaggcacccaaacctgccccagccagcaccctgccccaagccaataccatatccagtacaaccacacacataatctccagcaggggccccccactccacccagctatgctgcctctgtcattgtggtgaacacccacagggaggtaggcacccctgcatc

SEQ ID NO: 921632 - DNA, 627 bp, Homo sapiens
agatagaagccatctcaaacttgggtttaccttcctcagcagcctattagaagagggcacgtggcagaaacaacattaaaatccggaggaccaggctgggcacggtggctcacgcctgtaatcctaccactttgggaggccgaggcaggtggatcacgaggtcaggagatcgagaacatcccggctaacacggtgaaacacgtgtgtactaaaaatacaaaaaaatkagccaggcatggtggcgggcacctgtagtcccaactactcgtgaggctgaggcaggagaatggcgtgaacccgggaggtggagcttgcagtgagcggagatcgtgccactgcactccagcctgggggacagagcgagactccatttcaaaaaaaaaaaaaattcctggggaccagcatccagtcacccagagactaccccctttctatctgttttcaaggtgaacagaacctacctgttgcattagacagggccagggattccatggagccccgaggggtctgctctgtgggcgtcatgtcctctgtgtatttcagggaactgatgggatgacgggtccgacactgctgagtggacaagcccccttcctcttcctcttcctcctcatatttggggacttg

SEQ ID NO: 921633 - DNA, 656 bp, Homo sapiens
aatttttgtattttaagtagagtcggggttttgccatattgaccaggctggtctcgaactcctgatgtcaagtgatcctccagcctcagcctcccaaagtgctgggattataggaatgagccaccgcacctggtgcagcttatttcacttagcataaattcttcaacgtttatgttgtagcatgggtcagaagtgccttcctttttatggctgaacagtattccattatatatatacacggcactttttttttcttttaaattcagggggtatatgtgcgggtttgttacgtggatatattgcatagtgttggggtttgggcttctattgaacccagcacccaaatagtgaatatagtaaccgataggaagttttcaactcttgtccctttcctwccttccccctgtttggagtccctggtgtctatcgtttccatcttcatgtccgcatacaccacattgtgtttatccattcatgtgtcgatggacacttgggtcgcttccaccttttggctattttaaatagtgttgctataaacatgggtatgcaaatatctgtttgagtccttgctttcaattcttttgggtatatacccaacagtataattggtggatcatatgggactctatttttaattttttgtgaaactgccgtat

SEQ ID NO: 921634 - DNA, 656 bp, Homo sapiens
aatttttgtattttaagtagagtcggggttttgccatattgaccaggctggtctcgaactcctgatgtcaagtgatcctccagcctcagcctcccaaagtgctgggattataggaatgagccaccgcacctggtgcagcttatttcacttagcataaattcttcaacgtttatgttgtagcatgggtcagaagtgccttcctttttatggctgaacagtattccattatatatatacacggcactttttttttcttttaaattcagggggtatatgtgcgggtttgttacgtggatatattgcatagtgttggggtttgggcttctattgaacccagcacccaaatagtgaatatagtaaccgataggaagttttcaactcttgtccctttccttccttccccctgtttggagtccctggtgtctatcrtttccatcttcatgtccgcatacaccacattgtgtttatccattcatgtgtcgatggacacttgggtcgcttccaccttttggctattttaaatagtgttgctataaacatgggtatgcaaatatctgtttgagtccttgctttcaattcttttgggtatatacccaacagtataattggtggatcatatgggactctatttttaattttttgtgaaactgccgtat

SEQ ID NO: 921635 - DNA, 721 bp, Homo sapiens
ggtttcccccatgctgttcccatgagatctgatggttttaaagtgttgacagttcctccttcactgtctttcttctatttcctgccaccttgtgaagaaggtgcttgcttcccctttgccttctgccatgattgtatgtttcctgaggcctctctagccatgtcaactgtgagtcaattaaacctctttcctttacaaattacacagtctcagggaagttctttacagcagtgtgaaaatgaactagtacagtaaattggtaccaggagtagggtactgctataaagatgcttgaaaggcggaygaaactttggaaccaggtaatgcacagaggttggaaaagtttggagggctcagaagaagacaggaagatgtgggaaagtttggaacttcctagagacttgttgaatggctttgaccaaaatgttgatagtgagatgaacaatgaagtccaggctgaggtggtctcagatggagatgagtaacttactgggaactggagtaatggtcactcttgctatgctttagcaaagagactggtggcattttgcccctgccctagagatctgtggaactttgaacttgagagagatgatttagggtatctggtggaagaaatttctaagtggcaaagcattcaagaaaaaacagagcataaaagtttggaaaatttgcagtctgactacgaggtagaaaagaaaaaccaattttctagggaaaa

SEQ ID NO: 921636 - DNA, 696 bp, Homo sapiens
agttgcttatctccatctaacaaagccagcctgcactgtgcatgagatagtgatctatatggaagattccagacttgcctttatggagacagcaagactgttctgatgaccacctccgtatttatttttcctccaggatgaaatttactctaacttcccagttgtctgccctgtcatccactaatagaaaagatcttgtgttaatcctaccttttccgtccaggaaggaaaaaaagagctcatcccagcctgttgtgcagcaccacctgcccgtttgtccatagccaagcaatgatggatctgtgctagggggatgaatgggaattgtgtttattttatgagctgcagaaagttggctagggaacccagcaggaggcttaactggaaaaaaatgaktttatcttatgctgtgtatctgctgtctagaaaaatatatggcattatcctggcttgaaattgggaaagaaaataaaggaggacggacttttttttttttccaaatactggatttgagggattaacttcaggtaggtctttctctgtttttggggatgacctgctcaaaccaagggccctctgctcaaactgggtggtggcaggaagggagtgtgagccacgcagggacaggggcctggcagagggtccccaggccagtgctcagtgacctggagagagtcccacactatttgcaacctt

SEQ ID NO: 921637 - DNA, 626 bp, Homo sapiens
tgtttatgctttaagctgtgttattacaaaagagtcaagttttaaaaaattaaaacgtttataatgttaggaagttagagtaggctcattttattattgaagaaagaatttttattataaatttagtgtagcctaagtgtatagtgctgataaagtgtacagcagtgtataatcacgtcttaggccttcacattcactcatcagtcattcactgactcacccagagcaacttccagtcttgcaagttcgatttatggtaagtgccctatagaggtgtaccactttcaatctttattttattttattttttgagacagagtttcattcttgttgcccaggctggagtgtaatggtgcaatctcgtctcactgctacctccgcctcccgggttcaggagattstcctgactcagcctcttgagcaactgggattacaggcacccgccaccacgcctggctaatttttgtatttttagtagagacggggtttcaccatgttggccaggctggcctcaaactcctgacctcaggtgatcgacctgccttggcctcccaaagtactgggattacaggtgtgagccatcgcacccagcccatttgaaatctttatagcatatttttattgca

SEQ ID NO: 921638 - DNA, 568 bp, Homo sapiens
gcttacatttgccctctgtttttacacagtgtatactctttacattggagtctttaccattttaatcatggttatttaaattctgtcttataatttcaacgttttcatatctgagttggatcctgatgattgctttatttcttcagattgtatttttgtttcccatttggtatgctttgtaatcttttgttaaaagctgaaaatgttgtgtcaggtaatatggattgaggtaaacaagcctgtatgaggatctggctaggaatttacctgtgttatggcctaaatgtttctgttctcgccaaatgttgaatcctaatccctagtgcaatagtattaasagatggggcttttaggaagtgattaggtcttgaggacggagccctcatgaatgggattggtgcccttataaaagcggcccaatggagttcatttatcccttctgccatgtgaagacgcagtgaaaaggcaccatcttcaaagcaaaaatggttaatacccaagctcttgccagatgctgaatggtgaactccagcctccagagctgtgaacgaaaaaatttccattgtgt

SEQ ID NO: 921639 - DNA, 617 bp, Homo sapiens
cacagctgggagacctgaagatggatcacatcacaggactctttgcagacattcaccagcaccagcctggagcccagtagccctgttgggtggcttgacccagaagggcaataacgatcactgcaatctggcttttaggaagccccgtttctagggaaagggggagagcaccacatcaaggaatcaccctgtgggacaaaagaatctgaacagcagaacttgagtttcagatctttygactgaaacagtctacccaaatgaataagaagagaccaaaaaagtaattctggtaatatgacaaaacagggttctataacacctccagaagatcatcctagctctccagcaatggatccaaaccaagaagaaatctctgaattgccagataaagaattcagaaggttgattattaagctattcaaggaggaaccagagaaaggcgaaaaccaacataaataaattttttaaaaatacagaatattgacgaaaaagtctccaaagaaatagatatcataaagaaaagacaattacaacctctggaaatgaaagacacacttagagaaatgcaaaatacacgagaaagtttcaacaatagactcgaatgagtagaagaagga

SEQ ID NO: 921640 - DNA, 579 bp, Homo sapiens
aaaacttatttgagggagtaatcaaatgaaagttccctggtcttgctagagatatagacatccaaatacaagaagctcaaaaaacaccctgaaattcatcatgaaatgtcatcatctaggcacgtagtcatcagattatctaaagtcaaggcaaaggaaagaatcttaagtgccatgaggcaaaagcatcaggtaacctataaatgaaaacctatcagattaacagcagatttctcagcaggaaccctacaagccagaagggatgggggtcctatctgtagcctccttaaacaaaataattgtcagccaagaattctgtatctagggaaactatgcttcataaatgaaggagagataaagtctttttcagrcaaataaatgttgagagaatttgccactaccaagctagcaccataagaaatgctaaatgaagttctaaattttgaaacaaaatcttgaaatacaccaaaatggaacctccttaaagcataaatctcacagggcctataaaacaataacacaatagaaaaaaaaaaactaaggtatttaggcaacaattagcatgatgaatagaacagt

SEQ ID NO: 921641 - DNA, 655 bp, Homo sapiens
ttgaggagaacgtggcaaaggagaatgacaagtatacatgtacaattaaatagacattcatcttaaaatgtatttaatttaatttttttatttttttttaaagagatgaggtctatgttgcccaagttggtctcaaactcccgagcgcaagtgatcctcccacctcagcctcccaaagtgctaggattacaggcatgaaccaccaagcctggccttaaaatgtattttagcaagtacatactgtgtgtcaggcatcattacaggtgttggaccacagcagagaacaacagaaaagttyaaagaaccctgacaggtttatagtatttacccattgatagggcttatagtatttacccattgttgcaggttaggctctccaaggaaatgggctctgagattgaggtttagtgcacaggatgtttctctttttaaaatttcttttaaaattattattaattttttttggtagagacaaggcctcactatgttgcccaggttggtcttgaacttctgggcttaagctatcctcctgccttggccttccaaagtgctgggattataagcatgagccaccacacccggcctgcagaatgtttcttaggcagtgctcttgggaatatctttggagaggaggggaaagccagattgggcagag

SEQ ID NO: 921642 - DNA, 655 bp, Homo sapiens
ttgaggagaacgtggcaaaggagaatgacaagtatacatgtacaattaaatagacattcatcttaaaatgtatttaatttaatttttttatttttttttaaagagatgaggtctatgttgcccaagttggtctcaaactcccgagcgcaagtgatcctcccacctcagcctcccaaagtgctaggattacaggcatgaaccaccaagcctggccttaaaatgtattttagcaagtacatactgtgtgtcaggcatcattacaggtgttggaccacagcagagaacaacagaaaagttcaaagaaccctgacaggtttatagtatttacccattgatagggcttatagtatttacccattgttgcaggttaggctctccaaggaaatgggctctgagattgrggtttagtgcacaggatgtttctctttttaaaatttcttttaaaattattattaattttttttggtagagacaaggcctcactatgttgcccaggttggtcttgaacttctgggcttaagctatcctcctgccttggccttccaaagtgctgggattataagcatgagccaccacacccggcctgcagaatgtttcttaggcagtgctcttgggaatatctttggagaggaggggaaagccagattgggcagag

SEQ ID NO: 921643 - DNA, 605 bp, Homo sapiens
tcaattccaaaaaagagaaattggccaaaagaaagaggtaataggccccatgcaaatctgaaacccagcagggcaggcattaaatcttaaagatccaacataatccttgactccatgttccatattctggtgtgaggagtgggatcccaaggccttgggcagccctgcccctgtggcttctctgggtgcaacccacatgctgctctctggggttggagttgagtgcctgccagtttttataatcatggatcttccagtggatctaacattctgggatctggagggcaggagccccttcccacagatccactaggcagttccccagtggggactctgygtgggggttccaaccccacatttcttcttggcattgccttagtagagtttctctgtgggggctctgcccctgcagcagacttctgcctgggcacacagacttatctatacatcctctgaaatctaggtggaagctgccaagcttccttcacacttgcactctgagcatctgcagatttaacaccacttgaaaactgccaaggctcatggcttgcaccctccagagctgtgttctaagctgtatctggggccctagttgctgagggtgg

SEQ ID NO: 921644 - DNA, 825 bp, Homo sapiens
gctatgatcctgggacttatctgccccatatctaggagatactcatcacctcccttgtgaattggtaaaccaattgttggactgctcatccaagtactgttggtcagaagaccaaagctattctgattcctgatcctttagaggtgacctactttcagaagttatagggctcttattcgatatcacgacgggaagccactggcaaaggacatggtccctttaaatgatacggaagggggaagggaagggcgtggtccctggctacggctctacttctgggcctgtgcccagggacttaagtgaggacaggcatttttgtttttctgaccaaatgttgcatttcccaagacctccactggcctgccacgcccccatcctgtgcctataaaagcccccgagactctagcaggcacacactcaagcggctggacatcaagaggaacacatcctctgaagaagacacaagtggctggacgtggagaggacgtccaggggagcgcaccagcggaagagcacacagacagacgccggcaggccactgaccakcagaacaatgcagagtttggctggggcagtcagagagagtccaaacgctgacagcccgactctagggaaaaccatcttcttctggctccccatctgctgatagctactcccactcaataaaaccttgcactcattctccaagccccggtgtgatccgattcttccggtacaccgaggcaagaacccagggatacagaaagtcctctgtccttgcggcaaggtagagggtctgattgagctaagttaacacaagtcacctacggacagttaaactaaaag

SEQ ID NO: 921645 - DNA, 611 bp, Homo sapiens
aggaggctgaggtaggaggattgcttgagcctgggaggtccaggctgcagtgagcagtgattgcaccgccgtactcagattaagtgacagggtgagactccatttcaaaagctaaaccaaaaaaagaaaaaaactcaacttcaagatttttatacttctttctctttgttttctatctcattttattttatatttgcatttacttttataattccactctaatcactttgagtttatttgcttgtgctttttccagcttcttaagttgaacacttagttcattttttctcatctcatttacttmttttccaatatcatcattgaaggctataaaattcctcctaagaagcaatttaatgccatcccacattgtgttaaatagcaattttattatcattcagttataagcatttaaaaatttttctttattaattcatctttaattcataagtgattcagaggtttgtttttaaattataaaaatttgtagattttatcatagagtccagggagtcaaattctaactcttaaatttcccctgtcacacctatccctatcatcacaaattgaatccagcatctttcccaccattgccctagccatcttctagg

SEQ ID NO: 921646 - DNA, 573 bp, Homo sapiens
atttgctggttgctctgctctaagttatggttgccaaggtgattgcaaattgattgtttgatgacttgttctagcatctttccaggtactgatgttaagtttagacatagacaaacctaagcaggaataaaagaggcctaccatgatggtaaaagggactctagaaccaagggaacaaggaatgtttaacctgaagaggttttgtttgctaaggagaactttaagggattctcccaaaagctaggacagagaagagacttgttttcrgtggcctcaagggggcagacttaagatccatgggtagaagtgagaaaatggatttcagttcaatactgggatagctagagaaatatgcacctgcaaaaggggctggtaagcttgctctctctaaaaatacctctgagttttggtgggtgcattgtgtaagaagctgactagattgtgagatgcttcattcaaaaaacgctgacatcccatctagctatattactcaatgataatagtaacttacagaatcattcttctttctaaagaaccaagttttgtctgttttttcaattattttttcacagc

SEQ ID NO: 921647 - DNA, 616 bp, Homo sapiens
agacaaaggcagaaataggatgccaagatgtttctctaatagtgtgccaatcaaagtgccagtcgttgagaaaggggacatgggaggaggctgccattctgtggagcaaaatcagttcactttaggacaagctggatttgaatcaccattgtgayatttagttggcaatgcccagtaagaaggcagatataagagtctgaagctcaggagaaggagctgggctagcagtccatctatctaatggttgagccttggaaatggatgaaattcccttgagaaaggtgtgtatgagaagaaaagaaggcttatgatcaaatctgaaaaacaccagcatgtaaagtcgggggaaaaaataagtcaaaacaaacaaacaaacaacaacaacaacaaagaaacaggaaatgagcagctgccaggaaggtagaaaaaaaaatgcctacagaggacaagcgtggtgtcatggaagctgcaaagaaaatttttctggaaggcagaagtggtcagcaagcaaagaaatgttaaaaggatttagaaacaaggaagttgtcagtcacctttgggaagccagcttcagttgcaaagtgagggtagaagccagactggagggtagctgtcc

SEQ ID NO: 921648 - DNA, 556 bp, Homo sapiens
aaaaaaatagaccgggcacagtggctcatgcctgtaatcccagcactttgggaggctgaggtgggcaaatcatctgaggtcaggagtttgagagcagcctggccaacgtggtgaaaccccatctctactaaaaatacaaaaactaactgggtgtggtggtgggcacctgtaatcccagctacttgggaggctgaggcaggagaattgcttgaacccaggaggtggaggtcgcagtgagccaagatcgtgccattgcactccagcctgggcgacaagagcaaaactctgtctcaaaaaaaaaaaaaaaaaaaaaaaaaaagatgcttgagggacgacaycacaaatggaccttcttacttactatcttgcacacctgctatgtggcaaatgtaaaggccctactgggctcagggtggccttccatctgtcagaactcatccttgctccccagtgtgctctctttgctcattctgtgaacacccaggtgccttgcggtggcgggtccctaaacaagccccaagtcttcctgtcctcctgggccttgtgtagtgctctg

SEQ ID NO: 921649 - DNA, 611 bp, Homo sapiens
tcatctcacatcctactgaaatcatcagatgggggaacctgcaggcactttcaccatcacatctatccaccttagctaaagccaatctctccatttatgcactagattctacctcctcacctcctcaagggtctactgattctccttcctctttcytacatctttgttcgttcaccactatatcattccacagcatacacacatggtgttattgctctaatctttattttcaaaaatataccttctttacagatgataatctttatttttttaaaaaaggttgtcttcacctcagttttccagccagatattttccttctttcctgtcccttttccgcaaaatttcaccccaacccaccatacacggaaaccattggtgtcaggggattcaatgatctctgtgttgccaaatcacttcccatcttactggcctctcagcagcagatcacccaacagatcactccttccttcttgatacgtgttcttcacttggcttcctgcatacaatactccctgggttttcctccagcatcaccggttactcatgttcagtctcctttgttgaatcccctcttcccccagacctgctaatgttggagggtctcaaggag

SEQ ID NO: 921650 - DNA, 611 bp, Homo sapiens
tcatctcacatcctactgaaatcatcagatgggggaacctgcaggcactttcaccatcacatctatccaccttagctaaagccaatctctccatttatgcactagattctacctcctcacctcctcaagggtctactgattctccttcctctttcttacatctttgttcgttcaccactatatcattccacagcatacacacatgstgttattgctctaatctttattttcaaaaatataccttctttacagatgataatctttatttttttaaaaaaggttgtcttcacctcagttttccagccagatattttccttctttcctgtcccttttccgcaaaatttcaccccaacccaccatacacggaaaccattggtgtcaggggattcaatgatctctgtgttgccaaatcacttcccatcttactggcctctcagcagcagatcacccaacagatcactccttccttcttgatacgtgttcttcacttggcttcctgcatacaatactccctgggttttcctccagcatcaccggttactcatgttcagtctcctttgttgaatcccctcttcccccagacctgctaatgttggagggtctcaaggag

SEQ ID NO: 921651 - DNA, 587 bp, Homo sapiens
aacaaaaatccctaggacaatacaattttatgagctttagtcctcatattgtatattagatatccacatttgttcatcctacatatctgctattttgtatcctttgacatctatctcctttctaaagccccttttctaaagtggttatctagggaatgataaaaatatgtatgtgkttatatataaccaaaaagctgtcccgcctccatattcttttgtcttacacttctcaactcactgccgcacaagtttgttgctttcccacccccactaaaacatccctccttgagttaattctcatcactcagcccaaaggctgtttccacagaccccattgttccagtatgatgctgccgcagcatctaagatgttggccattcctcacttcttgaaacatcttcttcctctgtacacagagagaaaggcagacacatttacagaaaagaagccaccatggtctgatacacagtagctgcctggctcttagaacccgatttccagccttcctgacttttgggttctgggtcactgtcatgagtccctactgtgaatttccctttggtgcaccttaaaacatcagaaactct

SEQ ID NO: 921652 - DNA, 587 bp, Homo sapiens
aacaaaaatccctaggacaatacaattttatgagctttagtcctcatattgtatattagatatccacatttgttcatcctacatatctgctattttgtatcctttgacatctatctcctttctaaagccccttttctaaagtggttatctagggaatgataaaaatatgtatgtggktatatataaccaaaaagctgtcccgcctccatattcttttgtcttacacttctcaactcactgccgcacaagtttgttgctttcccacccccactaaaacatccctccttgagttaattctcatcactcagcccaaaggctgtttccacagaccccattgttccagtatgatgctgccgcagcatctaagatgttggccattcctcacttcttgaaacatcttcttcctctgtacacagagagaaaggcagacacatttacagaaaagaagccaccatggtctgatacacagtagctgcctggctcttagaacccgatttccagccttcctgacttttgggttctgggtcactgtcatgagtccctactgtgaatttccctttggtgcaccttaaaacatcagaaactct

SEQ ID NO: 921653 - DNA, 600 bp, Homo sapiens
ctctgggtagctgggagtccttgtgagatgttatgttctgggaataatggagtcttgttactacaggctgttaacacacacccttccattgttgagaacaacatccaggcagccacaaagcacatggcttccagtagaatcctaggctcgaggatctcttggggagtttggttctgtgaaaggaacatagaaaccccaggccattacttctaagagctgtttttctcttttttttttttcctgagtaagttgtttaattttatctttatgtttggcagcacaaagagtttaaggtagctggttgtaacaaatcgccaagtacaagygatttcagggaatttgctttgtaatatggttatattatcttctttgaaggaatgataaatatctttatctacacaataggttagatatcttactttctggaattttctatgatatcattctaccttgattctcatggagaataaatatacggaatatgttctaatatgccactatcacctgtgtatgtaggcattgttcttcagtcatgacgttctttcctgctaagccttgatgtggctgccaaaacattgtcaaagaaggttctagggagtc

SEQ ID NO: 921654 - DNA, 612 bp, Homo sapiens
ggaaaatgtgggaaagtttggaacttcctagggacttggagggctcagaagaagacaggaagatgtgggaaagtttggagcttcctagaaatttgttgaattgctttgactaaaatgttgatagtgatatggacaataaagtccaggctgaggtggactcaaatggagatgaggaacttcttgggaactggagtaaaggtcactcttgttatgcaaagagactggcagcattttgcccctgccctagagatatgtggaaccttgaacttgagagagatgatttagggtatctggcagaagaaatttctaagcagcaaagtgttcaagagaaagcagagcataaaattttggaaaatttgcagcctgctgacatgatagaaaagaaaaccccattttctgggragacattcaagcctgctgtagaaatttgcataagtaatgagaagccaaatgttaatcaccaagacaatgtggaaaatgtctccaaggcaagtcagagaccttcacagcagcccctcccatcacaggcctggaggccttggagggaaaaatggtttcataggcctgacccagggctcccctgctgtgtgcagtctggggtatatggtgcct

SEQ ID NO: 921655 - DNA, 705 bp, Homo sapiens
gctgaaattttagtatgtttgtatggttataacaggtaatatcctcaagtcagcatgctgtgtgtgtgtgtgtgtgtgtgtgtgtgtgtgtgtgtgtgtgtttgcagtttacccacctggattcatgtactttttcatgtttctagttctatcacatactgttgtctaacagatttcttttttcctttctgggacagtagcacattattctctgatatcacatgwgacagtgggtagagaatgtgacaatgaggggagagggacatgtgcccctcagtctaccgccctcctctttttatgttgttctactgacaaaacgttatatcaaaatgaagtaatcttcaaaataattgttctgagtgatctctatttgcttatctatatgcgagtaacagaatgcatatatcaggaagagtgtactgtaaggctacagaggtgtgtaaagacagccagcagcctggacactgggcagaactcttcccccactgctgcttttttctcatcacctgcttccctctgctctcttccaaccaatagtctctacttcttagatccacaaagtgacatacggttaacttaaccatcttgcattagcatattaaagtaaaaacctaaatctgactcaaaatgaacacaaatatcgtttgatcttaatttcaaaattcagaacagaagccacatgtggctcaacttgactcaggcttc

SEQ ID NO: 921656 - DNA, 549 bp, Homo sapiens
tatctgctctccattaaatatttggagagttcacataaaagtggatttccagcttctcttgaaaaatctggccacatctggccggcgtgtgtccagcaacaatgagcctgagttgggtagcggccgccccctcttggcgrcatggatgtactacaggtggttggaggcattctaaccgtttcttccatccctgcagtcaacggtgtgtgaggcgccgggattacagtgagtattctgagtataggcagattctgtttgcatcccagagcccgggacactggtattgctctgcctggcaaatgtttctgaaatagccggctaatggaatgctttggaaactgtaaaggatgcatgatgatggtgcctcctgcctgaaatttggtgccagagtactgctagtccctgtactggaatccaggtcccaagccctaagggacaaggtcctcataccctcaccccaaacccaacccgatccctccttgggaggcattagacaattaagactcttttaggtactgcctggaccttccaagacatcggtgggattac

SEQ ID NO: 921657 - DNA, 643 bp, Homo sapiens
ttttttttaaacagacacataaactttgaatagttcaacacgtaatactattgtcagtttattcgggaaaacagagatacgtattcaaaggcttttggctgccatacaattaacatggctgatggggataaattgactgtgcgtgcttttcttaaatgaagcttatrctagaaatgtaagagttactgagggctttggtcgatctcagttataacaatgtcagccagagttctggtaggagaagtgtgttcaaacttcaaaggagcctgagaatgtctaattgtatgagttgagggccactgggcaggtaagattcctcaaattcttcctcattgcctatcatggtacagaagggtccatcattagaatctcttttatttgaaggcttctggatctctcagtaatttttattcagccagactcatactataaacactcctttcactgatgtacaaacacatttccacaaaggtttggaaataacttataagaagtacatacagtaacatagtcacaaaagatataatgggttaagatcagaaaaaaaacataaactataattggaggcaaagatgagggcaagctatagaatataaggggagtccatagcatcccaggagtttgctcttactaaacctggagt

SEQ ID NO: 921658 - DNA, 729 bp, Homo sapiens
ctttattgatttatgtacgttgaatcaaccttgcatcccaggattaagcctacttgatcatggtggacttgctttttgatatactgctgggttttgtttacaagtattttgttgaggatttttacatcaattttcatcaaggatattggcctgaagttttctttttttgttgcctttctgccaggttttggtattaggatgatgctgtcctcatcgaatgagttggggagaagtcccttctccacaattttctagaatagtttcagcaagagtggtaccagctctttgttgtacaacaggtaaaattcacctgtgaatccatctagtcctgggatttttttggtttgtaggctatttattactgattcaattttggagctcattattggtcctggttcagtcttgggagggtgtatgtgtccatttcttctagatgtttagtttgtgtttatagagtgaacayagtactattatattgacatttttctttctgtgcgatcagaggtaacatgcccttcatcatttttaattgtgtttattttgatgttctctctttctttctttattagtctagctaacagcctatctatcttagtgtttaaaaagaaacccaactctcatatttgttgatcttttgaatgttgttttgtatgtcaatttccttcagcacagctctgattttggttatttcttgtcatctgctagcttcagaactgatttgttcttgct

SEQ ID NO: 921659 - DNA, 706 bp, Homo sapiens
attacatgcactatttataggatgtaaggaacaccaaattggctacaatgtgatagaaacaccgttgtgtttctgaccctctgatgtgagcaatttaattaaagaatcatgaaggcctcctaattaattctgatgcagacctacaaattggaattgcagggattccttgtcagccaggagactgtagctgcaattttatgctattcaaggaagcctcatacygctcatgtgagccatgacattgaagccttgcccaggacagagtgaatatggaccatcagtccccatgacagtgtcttgttctgcaatctcaattaatttgtaacactgactgattactgattaatcatattctctatgtaattttcttttaggaaaatcctaatgacctgcggttttggttgggagacatgtacactccaggttttgacactttattgaaaaaggaagagaaacaagagaagcattcaaaattctgtcgtatgggtctgattttacttgtcgttatctccatcttggttaccatagtgactatcattacttttttcacctgaggaaactgcaacaatcagagctactttaaatttcctaaaaatttttctgataaacatttgaaaccccccccaccaaaataacaaaaaaacacatgtacatgcagtgtgaatggattgttgattgtattattaaatgtaattgtcctgaagaa

SEQ ID NO: 921660 - DNA, 779 bp, Homo sapiens
atccttctactaacctcacaagctaactgttcttgctcattcctgcgtataagctaagccaactatgggaggaattcgtttacagtttaactttaagacaagatgataagagtcccttcctgaaactaaccccttccttgctcagggaccaaaactgcctttgtaaacctaataaattgcccacaaggtgagagttatggtaggggcctaaattctgttagaatgtgggcatagttaaattctaaccagtcattgttttataatttgtctttttataactgcttactgcccaggtgtcatgtagctggaggtcatctgtaacttccccaattggtcctatagataacatcactattgtcaaacctaagacaacatttgagatctttttcagacttttgcattctggtgaccaactaactccacttggacctgtgactcataccaagaaacagactcgaaaggtcctgtgtcccccacccagaaatggactcagtgcacaacgacagttttgacattcctatgatttcatccccaaccaatcagcagtacmcattctctagtccctgcccactaaattattcttaaaaaccctagcttccgagttcttgggaaggcagaattgagaaatatctcctgtctttctgctcagcagcctggtgataattaaactctctatcgcaacactttctgtctcagtgtattggtggctttttctgcgttgtgggcaagaagaacctggttgggcaattcaataggtagttactgttcccatgacatca

SEQ ID NO: 921661 - DNA, 597 bp, Homo sapiens
caacttccaggcaggtgaatgagggcgtttgagagccagctccagggctccttccaactgaccacaaatgcatgggtgatctcagataacaaaatgtgaagcaaagacaaactatcccagcaaaaccctgaccaaatagctggcccttgagtcatgactaaataaatagttgttttaaatcacaatgcttttggtgaattgttacatggcaatagataactgaagctgaraccgaggtggtaaagctactttagatgagatggtgaaggagaacatgcatgagtgggtagcatttgagcagaagtttaaacaggaagaagccagccctgcagaggttcgtgagacatgattccaggtagaggcaaatgcaagtgcaagggacctaaggcaggaagatgtgcaagagaaaccgaaagaagaacatgtggctggagtgtgataaacaatgggaaaagtagcactgtaataggagatgaaggaacagaggtaagggaggccttatcaggtagagccttgtagattgtggaaccaggttttgattttattctagacaaaatgagaagttatagcaggttttcaaaagaaaactgatatgat

SEQ ID NO: 921662 - DNA, 597 bp, Homo sapiens
caacttccaggcaggtgaatgagggcgtttgagagccagctccagggctccttccaactgaccacaaatgcatgggtgatctcagataacaaaatgtgaagcaaagacaaactatcccagcaaaaccctgaccaaatagctggcccttgagtcatgactaaataaatagttgttttaaatcacaatgcttttggtgaattgttacatggcaatagataactgaagctgagaccraggtggtaaagctactttagatgagatggtgaaggagaacatgcatgagtgggtagcatttgagcagaagtttaaacaggaagaagccagccctgcagaggttcgtgagacatgattccaggtagaggcaaatgcaagtgcaagggacctaaggcaggaagatgtgcaagagaaaccgaaagaagaacatgtggctggagtgtgataaacaatgggaaaagtagcactgtaataggagatgaaggaacagaggtaagggaggccttatcaggtagagccttgtagattgtggaaccaggttttgattttattctagacaaaatgagaagttatagcaggttttcaaaagaaaactgatatgat

SEQ ID NO: 921663 - DNA, 624 bp, Homo sapiens
tgcatcttacaactgcttatcagtgagagcctcagatgaagccacttacgtcgaacagtggttctcagcgcatggtcctcagaccaacatcaaggtcctctcctggaaatttgtcaacaaattcttttgctcccttgtagacaaactaaatcagaaatcctgggggtggagcttagcaatttgtggtttaattatccctccaagttagtckgatacatgcctaattttgagaaactctgatagagaagaaataatgcttgtcttaagatgaaatagaccatgattctagacaactcttgttaacagggtggctttggatcagatacttcatattagttgctctgtcttttaaaacttaagagtagctaccttacagtgttggtgagtattagataagtcatgtgtattcaaaagcattttgtacacagaaagctttcaaggtatgtgttctcaccacacacaaacaaaataagtatgtgaagtaatgcttatgttaattggatctatttagccattccacaatgtatatatatttaaaacaaaattttatacgcgataaatatatacaatttttatttgtgaattaaaataaaaaaattgtaaaaggctttaagccagtgtaag

SEQ ID NO: 921664 - DNA, 574 bp, Homo sapiens
gatttgctggttgctctgctctaagttatggttgccaaggtgattgcaaattgattgtttgatgacttgttctagcatctttccaggtactgatgttaagtttagacatagacaaacctaagcaggaataaaagaggcctaccatgatggtaaaagggactctagaaccaagggaacaaggaatgtttaacctgaagaggttttgtttgctaaggagaactttaarggattctcccaaaagctaggacagagaagagacttgttttcggtggcctcaagggggcagacttaagatccatgggtagaagtgagaaaatggatttcagttcaatactgggatagctagagaaatatgcacctgcaaaaggggctggtaagcttgctctctctaaaaatacctctgagttttggtgggtgcattgtgtaagaagctgactagattgtgagatgcttcattcaaaaaacgctgacatcccatctagctatattactcaatgataatagtaacttacagaatcattcttctttctaaagaaccaagttttgtctgttttttcaattattttttcacagc

SEQ ID NO: 921665 - DNA, 573 bp, Homo sapiens; identical to SEQ ID NO: 921646

SEQ ID NO: 921666 - DNA, 578 bp, Homo sapiens
gaaagatttgctggttgctctgctctaagttatggttgccaaggtgattgcaaattgattgtttgatgacttgttctagcatctttccaggtactgatgttaagtttagacatagacaaacctaagcaggaataaaagaggcctaccatgatggtaaaagggactctagaaccaagggaacaaggaatgtttaacctgaagaggttttgtttgctaaggagaactttaagggattctcccaaaagctaggacagagaagagacttgttttcggtggcctcaagggggcagacttaagayccatgggtagaagtgagaaaatggatttcagttcaatactgggatagctagagaaatatgcacctgcaaaaggggctggtaagcttgctctctctaaaaatacctctgagttttggtgggtgcattgtgtaagaagctgactagattgtgagatgcttcattcaaaaaacgctgacatcccatctagctatattactcaatgataatagtaacttacagaatcattcttctttctaaagaaccaagttttgtctgttttttcaattattttttcacagc

SEQ ID NO: 921667 - DNA, 578 bp, Homo sapiens
gaaagatttgctggttgctctgctctaagttatggttgccaaggtgattgcaaattgattgtttgatgacttgttctagcatctttccaggtactgatgttaagtttagacatagacaaacctaagcaggaataaaagaggcctaccatgatggtaaaagggactctagaaccaagggaacaaggaatgtttaacctgaagaggttttgtttgctaaggagaactttaagggattctcccaaaagctaggacagagaagagacttgttttcggtggcctcaagggggcagacttaagatccatgggtagaagtgagaaratggatttcagttcaatactgggatagctagagaaatatgcacctgcaaaaggggctggtaagcttgctctctctaaaaatacctctgagttttggtgggtgcattgtgtaagaagctgactagattgtgagatgcttcattcaaaaaacgctgacatcccatctagctatattactcaatgataatagtaacttacagaatcattcttctttctaaagaaccaagttttgtctgttttttcaattattttttcacagc

SEQ ID NO: 921668 - DNA, 750 bp, Homo sapiens
ttggaaaaagaaaagaaggggaattctgatccttttaaagataagaaaaagagagaaagaaaacctctgaactagataaacttcaaattcctttctagctccagtttagatagtttgacgttcaatgtattcactctctgtgggaatcagtcttaagacacataagtgaatgaaagtgcagccatttacatagctacatgcaaagcctcagggcacagggagctaactttccattccaccatcaaggagatgtcatagagcattaggatgtagactctcctctcttaaccccactccttctgattctaggtgtcaccagcaccaataggctgagaacttctgcaggaaatgagtttttcttctttcatagttaaacttcaggtaattctgctttgtaggaattgagataatcctattcttatgatttgggggaagggagcccctgctttgacatttcttatttcctttaaacattattatgtaaaactgtttcctgggccactgggaataaaaatagtatcatggtaataaccacaatacagcatttctctggctctgcccctctgttctctcagttactctcaattctttccagatagttttgagakttcccaaagtatgtcacatgtaatccaaaaactggctctccaggtggccaagtgggatctgccatttttcctgatgggtagttgtcagattgtctctgtccctgctggaggtagttatgctatcaagacagctggggtggaa

SEQ ID NO: 921669 - DNA, 660 bp, Homo sapiens
aggtcattaaactactgaccaaattcctcagtcccaggtcaacttccaccagcttccagttgtatatccacaatcccaaatcctagtcaaacttgtcagctcatcctaagtcctgtcacttccatgaaaccttccagtacattactyagagaaatattgacaaccccctacttagaaacagtagtcttaaaataactccaagacctttcgcaaggcttgtcacttcccctcttggcatttttattttcccatctgtagaatgagatggctttaaaagagtcgataaacaattgattgttgactggggctgggccatgttgtagatgacagaacaacaacaaaaacgaacagatcagcttccaactctcaaatattttattgtttactgcaagagacaagaggagaaatggtgaaatatgaagtattaagtacagttacaaaagtatctgctcaccaagcagtagattcttgatagaaatttgaaataataagtaaaaaaaaaaaaaaagatgtaccatgtgtatgggggttagaaaaattggtattaaaattgtgtcttcttaagaagagaaggaggaaagaagagtaaacagcatgtgcaaaggctcagagataccaaggaatagacaaagtgattaatggtgacaaaaattctatgtg

SEQ ID NO: 921670 - DNA, 660 bp, Homo sapiens
aggtcattaaactactgaccaaattcctcagtcccaggtcaacttccaccagcttccagttgtatatccacaatcccaaatcctagtcaaacttgtcagctcatcctaagtcctgtcacttccatgaaaccttccagtacattacttagagaaatattgacaaccccctacttagaaacagtagtcttaaaataactccaagacctttcgcaaggcttgtcacttcccctcttggcatttttattttcccatctgtagaatgagatggctttaaaagagtcgataaacaattgattgttgactggggctgggccatgttgtagatgacagaacaacaacaaaaacgaacagatcagcttccmactctcaaatattttattgtttactgcaagagacaagaggagaaatggtgaaatatgaagtattaagtacagttacaaaagtatctgctcaccaagcagtagattcttgatagaaatttgaaataataagtaaaaaaaaaaaaaaagatgtaccatgtgtatgggggttagaaaaattggtattaaaattgtgtcttcttaagaagagaaggaggaaagaagagtaaacagcatgtgcaaaggctcagagataccaaggaatagacaaagtgattaatggtgacaaaaattctatgtg

SEQ ID NO: 921671 - DNA, 536 bp, Homo sapiens
aacacaagaaaaactgagtttggagtttgaacttaaccaaagtaatgccttgctgaaacaaaaataataacactcttcaaaggaagataactgaatccagaggctctacaaggtactgttcaaaacctccagtataggccaggagtggtggcttatgcctgtaatcccagcactttgggaggccaaggcaggcagatcatgaggtcaggagatcgagaccatcctggctaacacagtgaaaccccgtctctactaaaaatagaagaagttagtcaggcatggttttgggcrcctgtagtcccagctactcgggaggctgaggcaggagaatggcatgaacccaggaggtggagcttgcagtgagccaagatcgcgccactgtactccagcctgggtgacagagcaagactccgtctcaaaaaaaaaaccctccagtataaaatgaagcattactaggtatacaaagaaatgggaaagtgtgagttgtaatcaagagaagaaaacaggcaatagaaaccatccccaagacaattcaa

SEQ ID NO: 921672 - DNA, 734 bp, Homo sapiens
gcagccactgtgatgacgagaagcaggtgaggccaggccaggtacatgctgctttcctcccatctgggctccttttgccactccagacagactagaagtccctcaaagcccggaatgaatcttggacccaaccgtccctggatcccactctgatggagcacagtttaggggcctaggcacttcttgccggggccatcactgacactgtcttattaaattctcagcactgccagcagaaggtatgttccaggaggactgggctttttgtttagttccctgctgaatccctagtgcctagcatggtgcttggtgccaagtagatgctgaatgaacgaatgaactgataatactcctgaattggagcgctcctggaggattcattctcagggctgaaattcaaaactcatgtgggatttcgtcaaaatggaaaacattaatgcttgctgcacacagcctggtgcatccacaccccatctcttagatgctatcracctcgttcacagagggtaatctgaggcccagaaaggcaaaagggccgtacaactgggacatatcaggatttgaaaacacatccatctgattttagaactccctgaaaccaggttcatctgctatgagaaccctgagcaagggtttattctgaggataagaagaagctgttgacgggttttaagcagagcaatgaatgaatgagctctgctgtctctgttttcaaaagacttgttcactcatta

SEQ ID NO: 921673 - DNA, 767 bp, Homo sapiens
tgaaaccaaattggcaaaatggtaataactgttgaaactttagtcatgggtagaaggcagttcattacattctctgcttttcattattctatagagttgattattctctccacttttgtgtatgtggtcctcctcaaaattgccagtgaggtaaaggtgccacaagctgataggctgtcgtgtgaggaatgaagtgactgtaaatactcccaggcccttggggagaatgaccttgaagagaagatctgaaggagctgggcttgtcctcaattgtcaaaaagttacatcttgatttcaagtggtttacttaattaatctccatcttttaagatttacaagtttgtgtgtgtgcgtatttatacttatttgcagtttaattttgtgataccaaaagaaaaagcctagcatgacccttgttggagaccacaagccctgggaagttggacttcttccctctcagttcagttgtccctgaagccaagacttttttcttttttgagacagggtcttgctctgttgtccaggctggaatgaagtggtgtgaccatggctcactgaagcctggtcctcctggkctcaagcgatcctcccaccttggcctcccaaatagctggggctataggcatgtgccaccatgctcagctaattttttaatttttaggagagactgggtcttgctatgttgcccaggctggtcttgaactctgggctcaagccattctcctgcctctgcctcctaaagtgctgggattacaggcatgagccac

SEQ ID NO: 921674 - DNA, 562 bp, Homo sapiens
cagagcaccacacctggctaatttttgtatttttagtagagatggggtttcatcatgttggccaggctggtcttgaactcctgaccttgtgatccacccgcctcggcctcccaaagtgctgggattataggcatgagccaccgcacccggccaaaagcacttcttgttctaaaatttatttgctctacccctcaaaagtcttaagtaagaagcatacatttcctgatatgaaatataatttgggaagtgtcacctgtttctttctaatgcaacaaatatagcttataatcttgaaggtaaaaaaacagatgacacatgaaaagctgactagtaagacaagatgtcatataaacaacagaaaatgtgaatagtggagrcagcaagtggaatcagagaagatggcatcagtacagatatgttgcaaaagttaggaaaacatctcaaaatggctaaacaggtgaagggaatgattcacatgactcaaaggctcagaggctgatcaagcttcaggcaatatcatttgctatcacatcaagactagatgcgattctctgcaatgctc

SEQ ID NO: 921675 - DNA, 633 bp, Homo sapiens
atggatgtggcggccctgcgtggcacagcagggaaagagtgcaggatccaaggactggtatctccccaggaacacagtcttggcaattttctgggcatgactgtggttgggggtggcaaggtgggggtggggctatagaaagaactaagtaggagaaaaggaaaatggaaagtggacctaggaagcagtagagctyagttctaactctagctctgccactatcgtcctacctgtagatctgcaggatcctggctgcttttcctatgtgggggaggggaagctgaacattttaaaaaagaaacagggagaaggagccaggttcttggattgactctaagataccttttttaaaaaaaaaaacaatgctaagcgaaagattattcctaaaaagtagagatgtttggagctagcatgagactgacacgtagcactctatttgcttttattttatgtcattgcaaagaaagcatgactgctgagctccaaaggccttggctttgagaaacatggggttccagacctgccttggccttggagggaaagaaaaaccatagatgtaaagctctgtgtttccaggaagctccagaagaaagaaggggggcaggtgacacagactggatgtgacagataata

SEQ ID NO: 921676 - DNA, 598 bp, Homo sapiens
atgtgttttaaatggactgttttgatgtggatgtggggaaacactcctgtgttgtagtgggagtataaagtagcacaagctttctgcagagtaatctggcaacatatttaacaattgaaaatgtaagtagcctttgatttagacactctgctaggaatttatgttataggtatacttgaacatgtgtgaaatgatttttgtatatggcattatgcaattatagtattgcttcaggtagtgaaatgctggaaataacctaaatattagtatctatagtggaatagctctacagtggaatatcatgcagatatcrgaaaataaaatttagatctgacaggaaaaccttaaaatatattaataaggaaagactcttacagaagtgaattccctcggttcactgattcaagagaggatcagaagggatactggttttttccatcttccccaagactggagaaccagcaactgcattctaacaacgtgttgaccagcaatgcttttcagtcaaggctggcaaggaagaggcatggggattctggctgaaatattgagatattcaaactcctggactcaagcaatctttctgccccagcctccc

SEQ ID NO: 921677 - DNA, 740 bp, Homo sapiens
tacaaacagaaagagaagtgtgtgtgtcaatatttgactcttttctgtattcttttctctgccatcccaaccttatagaatcattcccattctgcatgctacaaagcaaaccactgaaaacagaaaccaaactgcccaaaatgcaaggggaaaaggagtgggagagagaaaacaaaaggcttatttagaaccrgctattaaagattaaactaaaaatttttacaggccctttaaaacacaacgctccaactatttacactggatggctttcaaaaactcccctctactcccagtacacgagaccaacaaaatcactgtggctaggtctcggcagcatcctactgagcctggattgcccaagtatggcacctaggctactgtgggcggcaagccacccaggtgccgaggcaagagaccaaggacacgagctgttccagtataataaaatataagacaagaatagttataccagatgtagatcttagagatgattatatatgaatatcattaatcattagtttgtagcaattactctttattccaatattataataatcctcgctctataatcataacttaggaaaaaccaggccatacagagataggagctgaggggacatagtgaggtgtgaccagaagacaagagtgtgagccttctgttatgcccggacagggccaccagagggctccttggtctagcggtgatgccagcatctgggaagacgcccgttgccaggtgg

SEQ ID NO: 921678 - DNA, 552 bp, Homo sapiens
agaccttggcaatgaccttgagcagtaggatataaatcccacaagcttagcgttccaataatggaacactaggcataactgtgttaagggttgaaagtagtggtaatgtatttcttttattcccttttcattaactgsgatgcttatagagagatacttccccttatcaccattggtcacttagaggtacaaattgtataggaagggaagggcttagcagttttcagaatagtgagttggtttgagtattattcataggtttaaatatattttctatgtttttaatctattgcagtttttatccttattgatgtttaaaattgtctcatctttggtcaggagaagcctcttgcgctaactttttaggtttttttttgttaaaatcctctgtagcttccctgctttctgctgtgacaagatgttctaggcttatcttgtatatatttcctgtctcagacctagactgagccatttctgcagggggctcttggcacttttgtgggaagtggatagtttgcaactgaattagtcattatttttagacttctttgg

SEQ ID NO: 921679 - DNA, 730 bp, Homo sapiens
caaagcagggcggggcatcacctcacccgggaagcacaaggggttcggggatttccctttcctagccaagggaagccatgacacactgtacctggaaaaacggggtacttccacccaaatattgcacttttcccatggtcttagcaactggcagaccaggagattctctcccgtgcctggcccggcaggtcccatgcccacagagtcttgctcactgctagtgyagcagtctgagatcgacctctgaggctgcagcctggcatggggagaggcgttggacattgctgaggtttgagtacgtaaacaaagtggctgggaagctcaaactgggtggagcccactgcagctcggcaaggcctacagcctctatagactccacctctctaggcagggcatagctgaacaaaaggcagcagaaacttctgcagacttaaacatccttgtctgacacctctgaagagagcagtggttcttccagcatcatctttgagctctgagaatggacggactgcctcctcaagtgggtccctggcccccatgtagcctaactgggagacatctcccagtaggggttgacagacacctcatatagccgagttcccctctgggatgatgcttccaaaggaagggtcaggcagcaatagttgctgttctgcaatatttgctgttctgcagcctctgctggtgatacccaggcaaacagggtctggagtggaactccagcaaactc

SEQ ID NO: 921680 - DNA, 599 bp, Homo sapiens
aaaaacaacctaaatatccaaggaaagaaaatatccaagaaaaaaaataagggttttttttgcagttgttttaaatttatgcttttgaggtatgatgtaatactgtgtaagaaaaatttaaaagttctgtattcagcatgtctcaactttctttaaaataaatactgaaaaacagatcaatagagcagaataaagagtcctaaaccacatccatacagtacagtctcctaatttaacagacaggcaccacgtaattcacaaaagaaaaggtagtctttccaataaatagcactggattaattggwtatccttgtgttgggagaaatgacccttgatctccatgctcatacattaaaaaaatccacaatatatcacagaaaaaaaatcacaacatatcacagacctatgcaaaagctaaaccaatcaagcttttagaagaaagtataccaaatattcatgacttttgcagtatttacattatgacccagaagctcttagatatatatatatagaagtgaaacaagtgtgtaagtccaccaaaagacttttacaagaatgttcaaagcagttttatttataatagtcccaaactgaaagct

SEQ ID NO: 921681 - DNA, 579 bp, Homo sapiens
tattatttaaattgcgctgtacagccagtactgtacaagctaatgaggcgacattcatgtctctgaaagaagggctctgttgtaggctgtgcttgggattaaagaaaaaaaaaaaactctgccctttcttattcacaaaaatgtttaaggcaagtaggattgtggctggagaagcactttgcaatctggactgagctgagtgtgtgaaagagggtgcctctatttgtatttttggtttgtatcctatttttctatttctattgttctatagaaatggcttcaaactgctatcattcctttcactttaaaaatagaaaaaatagggccaggtgcggtggctcakgctcataaacccagcactttgggaggccaaggtgggtgcagcacttgactccaggagttccagatcggcctgggcaatatggcaaaacctgggctctacaaaaaactagctgggtaagctgggtatggtggcatgtgcctgtgatcccagctactcaggaggctgaggtgggaggattgcttgtgcttaggatcacttaagtgagctgtgatcccgccactgcactccagcctggg

SEQ ID NO: 921682 - DNA, 541 bp, Homo sapiens
ccctcctattcctactagagggcttaagataggctctgagcggcacttcccactttctcctctttttctgaagcttcgagccccaaacctcgccctttaaattcaccaagggaccacatgcatcatataagggtgaggaaaagggacctggatgtagacttcctgactatccaaaggaacctacttctctttgctgttctcaagttcaggcgtccggagaaaggcagggarctaggggctctgggtgctagcgtagacgtggcccttagctgagtggcgcgagaggggaggaggttggaagagcgcgtctatgcgttccacctgaacctgcaagctagtcgcttgctgcccaggtgccgattcgcggctgcatgcgccccactgcagcaaagagcagccgcagcctctgcctcggccaccactgctgctgggaaagagtcgtggggctgctgacgcggttgggaggagcctcgcctttaatgcaccagccgcctccagcctcctgcagcagcagcagcagcagcagcagcagcagctgcga

SEQ ID NO: 921683 - DNA, 705 bp, Homo sapiens
atacaaaatgaataatttctgaagatctgatgtacagcaatgtgactatagttaacattattgtattgtagacttgaaatttgctaaaagggcagatattaagtgttcttgccatatatacacagaaaaagaggcaactatgtgaggtgatatatatgttaatttgactgtggctaatattttatgacacatacatcaaatcaagttgtataccttaaatatacacaattttaactgtcaaatatacaataaaactagaaaaagaatagggcccctttataaccttttaagtggagactggagcacagaagatgcccttggatggggaaatcaccatcagtaaatacagttcatgctgagggtgatgggaagatacaggctgtggggtcaggccgcctgcctctgcctcttattggctgtaggaccttaggcacttatgttaaaagactgagctttattcactcacccataaaatggaaatattacaattacctacttaataagggtgctatgagagtgaaagggatgkacaaatgcttagcacagtgcctggtgcagaatccccacttaataaatgctggctattatcataatcccgttaatacattttattaataacaaattataattgcaataacaacttctccagagctaagcccaaattcgaagatgagttagtgctccaagtggccccacttaaccatg

SEQ ID NO: 921684 - DNA, 649 bp, Homo sapiens
acaaaatcacttgctgggattttgattgagactgcattgaacctacagaccaatttgggaagaaatgactgacatcctcacaatagtcttcctacccatgagcatgaaatatctctccccatttatttagttctttgatttctttaatcagttttatagttttcttcacatagatcttataaatattttgttagatttatacctaagtatttcattggtgggggaggtgctaatataaatgttattgtgttttttgagatggagtctcactctgtcacccaggctggagtgcaatggcgcgatctcggctcactgcaacctccgcctcccargttcaagctattgtcctgcctcagcctcctgagtagcaggactataggcgcccaccaccacacccggctaatttttgtatttttagtggagacggagtttcaccatgttggccaggctggtcacaaactcctgacctcagatgatccacccacctcggcctccctaaagtgctgggattataggcgtgagccaccgcgcccagccatgttattgtgtttttaatttcacattccacttgttcattgctgctatatgggtaagcaactgacttaagtatattaaccttgtatccggcaaacttgctataatcatttat

SEQ ID NO: 921685 - DNA, 627 bp, Homo sapiens
tccagctgaaatgcctgttattcaggccataatatcaatcatctaatagaaggtgaagttgaaaattgatactctctacaaatattaattatactgtagagttatactttcattggtgtttaaataaaaagctttttaaaggtggcatttcttctagagtgaaacaaatcatcattaatactttcccccttaaaatgaattttctttagttatgaaatcagtgcattatttttttwaaaaatgcaacaacataggcaagcaaaagaaaaagtataaaattttggctgggcacagtggctcacacctgtaatcccagcactttgggaatccgaggcaggtggatcgcttgagcccaggggcttgagatcagcctgggcagcatagtgagaccctgtctctatttttaaaaatatataaatacataaaataaaaagtgtaagattttactcataattcaacccacttggtgaaaaattcctatgacaatgtgctgagtattcaaaattatttgactgtatgtgtgtaactgatttaaaaaataaaaatggaatcatgtttcatattctatttttaacagctttattgaggtataattgacatataataaatgccacatatttgaagtat

SEQ ID NO: 921686 - DNA, 765 bp, Homo sapiens
catactcaagcctttgggatagacccctaaacttccctcaaattattttttattttttattttttgagacggagtcttgctcagttgcccaggctagagtgcagtggcgtgatctcggctcactgcaagctctgcctcctgggttcacgccattctcctgtctcagcctcctgagtagctgggactacaggtgcccaccaccatgtccggctatttttttttttttgtattttttgtgaagatggggtttcaccatgttagccaggatggtctcaatctcctgacctmgtgatccacccgcctcggcctcccaaagtgctgggattataggcgtgagccaccatgcccggccaactaccctcaaattctgagcctcaccaggcaagagtgaattaggcagaagcaacttggatagaagccgcccagctattccctaccttgggaatcctagtaggatggaaggtaagagtagccctgagggaggttcagcctgtcctgcagagacttgagctagccctctttgggagccatcactccattctgtttgtcagccttcaaggcttgtgtatttctgattaagtgctttgtgtcctcattgttcctgcttaacttagagaatttagtaattaaagaagactccttaagagttcacccagctcctccgtgtcccatacatcacaggcctggcttcctctgagcatgtagttctatcacacctatcctggctgaggaaggcttacgggaacccagagcagggttggaagg

SEQ ID NO: 921687 - DNA, 541 bp, Homo sapiens
aatcctttgcttcccctttcatcaaaacttctcaagagttgtctgtgcttcctgtcttcaatttatcttctgtcagttttctctttttaaaaaaattttgttttcaaaaaatagagatcaggtcttgctctgtcgcccagtctggtcttgaactcctgggctcagtaatcctcctgcctcggcttcccaaagtgttgggattacaggtgtgcgccaccgcatccagtctctcaatctctcttgaacccaattcagtcaagttccttccaaactgctctcatcctgtttactgataacctccacttggctaaagccaatggttaataatcagtcctcatcattctaaacccataagcagcatttgaccaatggatgcctcctttctctttggtaaactttttcaytttgttttcaggataacacattctctttattttcttctgtctcactgcttaatccttcacagtctccttctctggttcctcctcttctctccaagctcttaactgcagtgtcctgggctcagtccctgcacctcttc

SEQ ID NO: 921688 - DNA, 730 bp, Homo sapiens
tatagttggaattacacagtatgtattattttaagattggcttctttcacttagtaatatggatctaagttttttccatgtcttttgatggcttgatagttcatttgtttttagcactgaataatattccattgtctggatataccacagtttatacattcacctactaaaggacatcttagttgcccccaagttttggcaattatgaataaagctgctgtaaacacccatgagcaagttttcaactcctttgataaataccaaggaatgtggttgctggatcttaaggtaagaatacagtatgatcagttttgtaagaaacggccaaactgtcttccaaagtggctataccattttgcatttccaccagcaatgaatgagagttcctgttgctccacattctcaccagcatttgttgttgtcagtactctggatttgggcattctaaaaggtgtgtagtgatatctcattgttcttttcatttgcattttcctgataactgtaataattaaagaaagaggaaagaaacatgaaagmcagcttgacagttaagacaggtttattttggagaaaacaaaccaagaggagcttttggcccagttaggttagaggcacacttttttacagactaagagtttttaaggatttagggtgggagagtttattagaggcatggactgcttttttttttctttgttgtgcttatttgggagggagagttgtgtgtttg

SEQ ID NO: 921689 - DNA, 589 bp, Homo sapiens; identical to SEQ ID NO: 919846

SEQ ID NO: 921690 - DNA, 610 bp, Homo sapiens
aacatgtagaaagatcatatcagttttcttttgaaaacctgctataacttctcattttgtctagaataaaatcaaaacctggttccacaatctacaaggctctacctgataaggcctcccttacctctgttccttcatctcctattacagtgctacttttcccattgtttatcacactccagccacatgttcttctttcggtttctcttgcacatcttcctgccttaggtcccttgcacttgcatttgcctctacctggaatcatgtctcacgaacctctgcagggctggcttcttcctgtttaaacttctgctcaaatgctacccactcatgcatgttctccttcaccatctcatctaaagtagctttaccacctyggtctcagcttcagttatctattgccatgtaacaattcaccaaaagcattgtgatttaaaacaactatttatttagtcatgactcaagggccagctatttggtcagggttttgctgggatagtttgtctttgcttcacattttgttatctgagatcacccatgcatttgtggtcagttggaaggagccctggagctggctctcaaacgccctcattcacctgcctggaagttg

SEQ ID NO: 921691 - DNA, 610 bp, Homo sapiens
aacatgtagaaagatcatatcagttttcttttgaaaacctgctataacttctcattttgtctagaataaaatcaaaacctggttccacaatctacaaggctctacctgataaggcctcccttacctctgttccttcatctcctattacagtgctacttttcccattgtttatcacactccagccacatgttcttctttcggtttctcttgcacatcttcctgccttaggtcccttgcacttgcatttgcctctacctggaatcatgtctcacgaacctctgcagggctggcttcttcctgtttaaacttctgctcaaatgctacccactcatgcatgttctccttcaccatctcatctaaagtagctttaccacctcggtytcagcttcagttatctattgccatgtaacaattcaccaaaagcattgtgatttaaaacaactatttatttagtcatgactcaagggccagctatttggtcagggttttgctgggatagtttgtctttgcttcacattttgttatctgagatcacccatgcatttgtggtcagttggaaggagccctggagctggctctcaaacgccctcattcacctgcctggaagttg

SEQ ID NO: 921692 - DNA, 633 bp, Homo sapiens
caataatcccttacactggcttaaagccttttacaatttttttattttaattcacaaataaaaattgtatatatttatcgcgtataaaattttgttttaaatatatatacattgtggaatggctaaatagatccaattaacataagcattacttcacatacttattttgtttgtgtgtggtgagaacacataccttgaaagctttctgtgtacaaaatgcttttgaatacacatgacttatctaatactcaccaacactgtaaggtagctactcttaagttttaaaagacagagcaactaatatgaagtatctgatccaaagccaccctgttaacaagagttgtctagaatcatggtctatttcatcttaagacaagcattatttcttctctatcagagtttctcaaaattaggcatgtatcmgactaacttggagggataattaaaccacaaattgctaagctccacccccaggatttctgatttagtttgtctacaagggagcaaaagaatttgttgacaaatttccaggagaggaccttgatgttggtctgaggaccatgcgctgagaaccactgttcgacgtaagtggcttcatctgaggctctcactgataagcagttgtaagatgca

SEQ ID NO: 921693 - DNA, 554 bp, Homo sapiens
aaactgcctgtgtctccatcccaccactaacactattgatgcatacatatcccactccagggctcagagagtgcaatgtctggtctgccagtgtctgtgtaccctgccctggggccccaggactggtacacccagactaccaccaccactgctggcacccacatactccacctggggcccaaagactgacccaaccagtgaatgcctctgctgcaattaatgayagcatctaccagctaagggactaaggactggcctgcttagtacccctatgcccatcaaagccacatcacagctttcacaaaccaccgccacttagccactaagaagcttacacacactgctgacactgatgaaaggtagttatatggaatctacactagaatgcctacccagaactaaagccaaaagtactccacttaactgacattatatatacatctatttttccctacgaaagctaatccataaaattagaaatgaccattacaccaaatgtgcagatatcaatgtaagaacaaaagaagcatgaaatagcaaggaaacatatctcc

SEQ ID NO: 921694 - DNA, 724 bp, Homo sapiens
caggagcacgaaccatattgtgaactgtgcatgtgagggatgtaggttgtgtgctctttataagcatctgactaatgcctgatgatctgagggggaacggtttcaccctgaaaccattgctaccccccatactgccaccctactccccmcatccgtggaaaaattgtcttccatgaaaccatccatggagccaaaaaggctggggaccactggtatagcctactacacacctaggctatacagtctagtctatgctcctaggctacaaatctgtacagcgtgttactatactgattactgtaggcaattgtaacacaatggtaagtatttgcgtatctaaacatatctaaacagaggaccgggctcggtggctcacacctgtaatcccagcactttgggagaccaaggcgggcggatcacctgaggtcaggaactcaagaccagcctggccaacatggtgaaaccctgtctctactaaaaatacaaaattagccaggtgtggtggcgcctgcctgtaatcccagttactcggaggctgagacaggaaaatcacctgagcccgggaggcggaggttgcagtgagccgagattacgccacttcactccagtctgggtgacagagcgagactccatctcaaaaaaaaaaaaccaaaaataaaaaaattagccaggcatggtggcacacacctgtaattgcagctactcaggaggctgaggcacaaga

SEQ ID NO: 921695 - DNA, 770 bp, Homo sapiens
acttcagtccaggagttcaagaccagcttgggcaacatagtgagacccctatctctatgaaaaatacaaaaattagctgagcatggtagtgcacaccttcagtcccagctactcaggaggctgaggtgggaggatcgcttacgtccccgaggtggaggttgcagtgaaccgagatcacgccactgcattctagcctggctgacagagtgagatcctgtcaaaaaaaaaaaaaaaaggaaatacctttgaaaggttttcatgatatagagttcatagccctgccaccctgaatgtgtctgatgtctcctgatcttggtagctaagcaggattgacctgttattattcgagaggagaccactagctggcctccaacttctgggctcaagyaatcctcccgcctcagcctcttgaatagtataggtatagcccaactcacttggatcttctaattcaattaaatcctgacattttctacctggagatagcctcagatcccataggttgagagctcagtcccacaagactgttcccctgtgcctcgcctttgggcctgcagaacttctgaccagccagtttcaagttggggttcccatgacaccctctttgggttcaattaattactagagtggctcacagaactcaaggaaatttactaacctttactggcttattataaaggatatcacaaaggatacagatgaagagaggcatagggtgaggtgttagggaagggactctgggcttgcacggtccctgggcttgccacctt

SEQ ID NO: 921696 - DNA, 637 bp, Homo sapiens
cgtggcagaagaacataaattgtgaagatttcatggacatttattagttccccaaattaatacttttataatttcttacgcctgtctttactgcaatctctgaacatacagaacaacaaatgtccatgaagatttcagggacatgtatcacttccccaatcaatattcttctgatttcctatgcctgtctttactttaatctcttaaccccatcatcttcgtaagctgaggatgtakgtcgcctcaggaccctgtgatgattgcgttaactgcacaaattgtttaaacaacatgaaatctgggcaccttgaaaaaagaacaggataacagcaatgttgagggaacaagggagataaccattaggtctggctgcctgagagctgggcggaacagagccatatttctcttctttcaaaagcaaataggagaaatatcgctgaattctttttctcagcaaggaacagccctgagaaagagaatgcattcctagggggaggtatctgaaatggccactctgggaacgtcttgtcttttatggttgtatgtaagggatgaaataagccccagtctcctgtagcactcccaggcttattaggatgaggaaattcctgcctcataaattttggtcagaccgttg

SEQ ID NO: 921697 - DNA, 637 bp, Homo sapiens
cgtggcagaagaacataaattgtgaagatttcatggacatttattagttccccaaattaatacttttataatttcttacgcctgtctttactgcaatctctgaacatacagaacaacaaatgtccatgaagatttcagggacatgtatcacttccccaatcaatattcttctgatttcctatgcctgtctttactttaatctcttaaccccatcatcttcgtaagctgaggatgtatgtcgcctcaggaccctgtgatgattgcgttaactgcacaaattgtttaaacaacatgaaatctgggcaccttgaaaaaagaasaggataacagcaatgttgagggaacaagggagataaccattaggtctggctgcctgagagctgggcggaacagagccatatttctcttctttcaaaagcaaataggagaaatatcgctgaattctttttctcagcaaggaacagccctgagaaagagaatgcattcctagggggaggtatctgaaatggccactctgggaacgtcttgtcttttatggttgtatgtaagggatgaaataagccccagtctcctgtagcactcccaggcttattaggatgaggaaattcctgcctcataaattttggtcagaccgttg

SEQ ID NO: 921698 - DNA, 479 bp, Homo sapiens
ctgctagcacggctagaatataagcaggcaaaaaaatgcgaaaagagagactggcctagcctcccagcctgtatctttctcccatgctggatgcttcctgccctcgaacaccggactccaagttcttcagttttggaactcggactggctctcagcctgcagacggcctattgtgggaccttatgatcacgtgagttaatacgtaataaactyccctttatatgtatatctattccattagttctgtccctctagagaaccctgactaatacagcgaccctaggaaaacaactaggccttcctctgccatgctattattacaatggtgataataacagaatgtgctgctgggggttatcaggaagattaaacagggtcatggacgggaagctcttggctgatgcctggcacacagcggttttcaataaacagtggtaattccattttaggtggaatttgctttctttcttttttttgag

SEQ ID NO: 921699 - DNA, 591 bp, Homo sapiens
ctttaccactgggtaagtgatgtgatttgaagaatagagaactcaatatatcaaagtcagcatatgacaaatatttctcacccacctatgcccacagtgaaaaagccccctgtgattccacccaacccttctgcccagaggctagacccaggattaagtgtccagcttgggcatgcatggcctatgccagcaggggcacagcagaggtctgcacacataggaagatagatcaaaggcccccttccatttctcctctccagagtgttccagtaagaacatccccttctagctatttcacacatggacaaccaagaaatagtcatttacagarcattttgcatttgtacaatttcactcgttatttctcccccagtacctaatgggggctgcagcgtgtactctgttcgtggttaaattctgctgccagaagtttcctccagctcctgatgccccgaacccctccctccagcattcctgtggctcatcttgcaaactgattcaaaggtgctttgttgcaatctgatctttcaggacacatactgctataaagcttttgaaattttagtcagagcaaaaaacaaaagcaaaaat

SEQ ID NO: 921700 - DNA, 830 bp, Homo sapiens
aaactgaatttactatctctcgagtcttcacctaaagactcttctgatccatgagttcatctcagttctgggtgcctctcctggtagaagcaactttacagattgtgggtctttagagagccattttccacacggcaggtcccggaaacgccaacccgccagttcatttggtgtgacaacttaagccctaacgattgcattgactctgaaggcaaacttggcagtgttggactcaatgacagatgtgttcatctccagcatagtgacttcctaagagattttcagaggctattttgaccctctgctattttcayctggtgtagacttcagctctgtgcaaaatacaaatcaaatgaaatggcaagagtactcaatgttgagtcaggtgacttactgtaggctttggtctgtcatataatctctctgggtttgttttcatcattataaaatgaagtcacccaactatgtgatctctaaaacccccttagttctagaattctataaaaatttctgataagaatacatcgcagtcacaaagaatttacaagactccaagataaggcataattacactggctctaaaatatatagttatgctacttaattttatgatgagatttaattaactctccccttccactgtcagaagctgcagtggaacaattgtctttgcaagtcgtacagagcattggtgccttggctgggcactctggatcccaatttgctctcatagcagcaggcaagaaccttggaaagcagcaatgcttgcttcactggtgaagggggacagggcagttgcacaggaaatctacttccactctcccctagca

SEQ ID NO: 921701 - DNA, 604 bp, Homo sapiens
tgggaaagtttggaacttcctagggacttggagggctcagaagaagacaggaagatgtgggaaagtttggagcttcctagaaatttgttgaattgctttgactaaaatgttgatagtgatatggacaataaagtccaggctgaggtggactcaaatggagatgaggaacytcttgggaactggagtaaaggtcactcttgttatgcaaagagactggcagcattttgcccctgccctagagatatgtggaaccttgaacttgagagagatgatttagggtatctggcagaagaaatttctaagcagcaaagtgttcaagagaaagcagagcataaaattttggaaaatttgcagcctgctgacatgatagaaaagaaaaccccattttctggggagacattcaagcctgctgtagaaatttgcataagtaatgagaagccaaatgttaatcaccaagacaatgtggaaaatgtctccaaggcaagtcagagaccttcacagcagcccctcccatcacaggcctggaggccttggagggaaaaatggtttcataggcctgacccagggctctcctgctgtgtgcagtctggggtatatggtgcct

SEQ ID NO: 921702 - DNA, 604 bp, Homo sapiens
tgggaaagtttggaacttcctagggacttggagggctcagaagaagacaggaagatgtgggaaagtttggagcttcctagaaatttgttgaattgctttgactaaaatgttgatagtgatatggacaataaagtccaggctgaggtggactcaaatggagatgaggaacctcttgggaactggagtaaaggtcactcttgttatgcaaagagactggcagcattttgcccctgccctagagatatgtggaaccttgaacttgagagagatgatttagggtatctggcagaagaaatttctaagcagcaaagtgttcaagagaaagcagagcataaaattttggaaaatttgcagcctgctgacatgatagaaaagaaaaccccattttctgggragacattcaagcctgctgtagaaatttgcataagtaatgagaagccaaatgttaatcaccaagacaatgtggaaaatgtctccaaggcaagtcagagaccttcacagcagcccctcccatcacaggcctggaggccttggagggaaaaatggtttcataggcctgacccagggctctcctgctgtgtgcagtctggggtatatggtgcct

SEQ ID NO: 921703 - DNA, 751 bp, Homo sapiens
gggttttcttctataacgttgtccttgtgaaaacttttgtgaaattaaaaaaaaaggagttacaaattttattctgttattggtttgtttatttttatttatattgttctgtttgtggttttatttattttgttttgcttttccccccctcccctttccctctccttttcccttccttcttctcttccttccttcttccactttctaaattgctcagcgcaatgaggctgtgctgctgctatcgctagattccttagagtttgttttggtgttcttgggtgtggggttgggtaatttggggggaacttctctccatctggcttgccttttaatctgcacgtggcctccctgcccaccctggtaccttgctccaagtccgaaagcattttcctatcaagaaacccagcttccttcacttcccccattgccaccccccaatcccagtmcccccatcggtctgttcacatctctgtgttcatcttggcaagacctactcaatcaagtgatgatgccagttgataaacttccctggaaaacatttacagctattccatttggcaaacttgcttctctgtcaatatttcatcctcctttaaaccaggagggttattaatggcaaaagcattggtcttctttatgcttgatcagtatgactcaaattaaaagtgttctgctgtgtatatcaactcagtagcccacacccagttatctgggagctgatggttcagtcactgtattacccaaatctttc

SEQ ID NO: 921704 - DNA, 605 bp, Homo sapiens
ttgcgccaagctctatgacaagagcgacccctactatgagaactgctgcgggggcgccgagctgtcgctggagtcgggcgcagacctgccctacctgccctccaactgggccaacaccgcctcctcacttgtggtggccccgcgctgcgagctcaccgtgtggtcccggcaaggcaaggcgggcaagacgcacaagttctctgccggcacctacccgcgcmtggaggagtaccgccggggcatcttaggagactggtccaacgctatctccgcgctctactgcaggtgcccggccgcccaaagctccgagcccaccccaggcccaggccccagctccgcataagcccccacacccaccacccaagccccgaggctgctccacacccctgagctcccgactgtaacagggagcaccaggcctccctagaaccagtcctggaggcccccatctcagagtcctcacccaaaccaggtcctccttctcctcacccccagcacccggtccccactccacctgcagcccaggcccctgggacggagatttccgccccagctctgagattcagagccaaccctccaccttctggaatcttccgcctacccac

SEQ ID NO: 921705 - DNA, 599 bp, Homo sapiens
gggaccgtaggaagcccgaggaggcatgtggcccagcgtggggagttgaggagggctttctggataagatgacatctgactgatgagaacatatgagcgaggctggaaggaggtggaaagaatgtaacaggtcatgggtacggaagtgccaaggccctgagggtcggaatgacctcggaatggtcgaggatcatcagataggccggtgtaggctatgctgtgcaccctgactgtgtggtagccttgctctgcaargagcagttaaagaaatacataaaatataaaataaataaataaataaaaaagcaaaaaaaagaagccagtgtggctgagcagggggtggggtcagaggcttggaggcggtgttggatacagcagggcctagcagagccaggtggggtgtgtggattccattctgtgcataatgggaagtcatcagaggctttagtgacatctggttttccccttataaagattgctcaggctgctgtgtgggggacggatcgcggggggtggcgacagggaggctgtggggaggctgctgtgacagtccaagcagaagagggtggagaagacgaggggacagtgatggaggagcg

SEQ ID NO: 921706 - DNA, 622 bp, Homo sapiens
tattattatttgagatggagccttgctctgttgcccaggctggagtttagtggcgtgatcttggctcactgcagcctccgcctcccaggttcaagagattctcctgcctcagcctcccgagcatttgggattacaggcacctgccaccacgtccagctagtttttgtatttttagtagagatggggtttcgccatgttggctaggctggtcttgaacttctggcctcaaatgatctgacggtctcggcctcccaaagtgctgggattataggtgtgarccactgtgcctggccagctttctgtgaatttcttctacaaatttacctattctgaatagttcatataaattgaatcatataatgtgtggtcttttgtgcctggcttctttcactcaggatagtgttttctttttcttttatttatttacttatttcattgcttttttttttttttttttttgagatggagtcttgccctgtcacccagactggagtgcactggtgcaatctcagttcactgcagcctccgccacctgggttccagtgattctcctgcctcagcctcctgagtagctgggattacaggcatgagtcaccacatctggctaatttttgtattttta

SEQ ID NO: 921707 - DNA, 603 bp, Homo sapiens
tttacctattctgaatagttcatataaattgaatcatataatgtgtggtcttttgtgcctggcttctttcactcaggatagtgttttctttttcttttatttatttacttatttcattgcttttttttttttttttttttgagatggagtcttgccctgtcacccagactggagtgcactggtgcaatctcagttcactgcagcctccgccacctgggttccagtgattctcctgcctcagcctcctgagtagctgggattacaggcatgagtcaccacatctggctaatttttgtatttttagtaagatgggatttcaccatgttgtctaggctggtctcgaactcctgacctcaggtgatccacccacttcggccttccaaagtgctgggattacagacgtgagtcaccacgcctggcctttcttgctctttttttctwcccccaaatcagaggtcaagcacagagttttcaaggttcacctatgttgtagcatacattagtattttgtttgttttagagtcaggatttcattctgttgctcaggctggagtcagaggcaggatcatagctcattgtggcctgaaactcctggactcaagt

SEQ ID NO: 921708 - DNA, 714 bp, Homo sapiens
acttattgagtattactgtgtgcagggcgctgttctcagtcctcggggatgcacccatggggaaaataggccagaatccctgccctcagggagcagacattccaagtggggaaatgccaatggtagcaaatgactgaatcgtgcaacatccagcaaagagaaagaaagtgtcgtgggggaaagtggagaagaatccagaagataggagtatccagggsaggaggggatgcggtgggaaatgggtagttggggagcctccctgagaaagtgacatgtgagcaaaggcttgaaggaaaaggggagagggagtgagctaagcaatacctggaagggtgttccaggcagaggaaacagccagtgcaaaggctctgaggctggaccgtgcctgggttgtttgggtaacagcaaagaggccagtgtggtggaaaagagcagggaggagacaagggcaaggaggtgacagggcagatccttcagggccatgggagctgcaggaaggactctggctttttccccaagcaagtgggagccatggagggttctaagcaaaggagggataggacctgactcaagtgctcatgggcgccctctggtggctcttgtggaacagtggggttgaaggtaggagcgggagacctgggagaaggtgcctgcagtgagagatgaggacgtgggaccaggctggggctatgacttgggtggaggagtgagaag

SEQ ID NO: 921709 - DNA, 763 bp, Homo sapiens
gcccagatgagtggattttcccccagtgaaacacccccctccaccaaaggacagtcaaagtgcttcattaaatgagttctgcttcctgtgccacccaactggatgagacccttcaacagggattgtcagacaccctatagaggagcaattctactggcatcaggtttgtgcctcttgaggtcagagatcccagaggaaggagcgggcactcttctttgctgttctccaacttccttgagtgacatctccaggcacggcggtgaaccagatgaataggtcctgaagtkagcccctagcaaactgcagcagcgctacagaagatggacctgaccattgaaagaaaaacaaacagaaagcaacaatgcatcaacaagaaaaaaatgtacccacaaaaacctcatccaaagccacacatggtggctcacacctgtaacccaatactttgggaggccgaggcagtgggcagagcacttgaggtcacgagttcgagactagcctggccaacatggtgaaaccttgtctctactaaaaaatacaaaaaaaaatagccaggcgtggtggtgcatgcctgtagtcccagctactaggtagtctgagacatgagaatcacttgaacctgggaggcagaatttgcagtgagctgcgattgtgccactgcactccagcctgagtgacagagagagagactgttaaaaaaaaaaaatccaagtgtcagaagcctcaaagatcgaaactagacaaactcatgaagatgagaaagaat

SEQ ID NO: 921710 - DNA, 818 bp, Homo sapiens
gcacagccctgcttacctgagcccccctgacgagtgggggcatgacgacctgtgagctcgcctgtggccccagcttcgaggacgcctgctgcccacctcggaccaggggcgggggtatgacactgccgggcatccgagctgaagaggtctgccaacgataccaagacccagatttacatggaccggacccccccacactttttttaaagcaagcagttttgctgcttttatgaaagtacatactagtttttttttttttttttttttaagtagcagagaagttaaagaaaattatggatgggcacagtggcacatgcctgtaatcccagcactttgtgaggccgaggtaggcagatcatgaggtcagaagtttgagaccagcctggccaacgtggtgaaaccccatctctactaaaaatacaaaaattagccaggcgtggtggcacrtgcctgtagtcccagctactcagaaggctgaggcaggagaattgcttgaacctgggaggcggaggttgcagtgacccaagatcgcgccactgcactccagcctgggcgacagagcaagactccatctcaaaaagaaaaaaagaaaaaaagaaaaaaaagctggctgggtgtggtggctcacgcctgtaattccaacacattgggaggccaaggcgggtggatatcttgagcccaggggtttgagaacagcctgggtaacagtgaaacctcatctctacaaaaaatggaaaaattacccaggcatggtggtgtgtgcctgtaatcctggctacttgggaggctgaggcaggaggatggcttaagcctagaag

SEQ ID NO: 921711 - DNA, 693 bp, Homo sapiens
aagactgggaatggggttgtcctatgatgggtgacagagaaaggctttttttttttctttcttgagacggagtcttgctctgtcacccaggctggaatgcagtggcacgatctcggctcactgcaacctccacctcccaggttcaagcaattctcccacctcagcctcccaagtagctggaactacaggcacacaccaccacatctggctaagtttttgtatttttggtasagacggggtttctccatgttgcccaggctggtctcaaactcctgacttcaagccatcctcccacctctgcctcccaaagtgctgggattgcaggtgtgagccaccacacccggccaaggaaagctttgtgatatggtcctttttgagcagagccctgattgatgtgaaagagcagcaggtgcgagggccctggggcaggggcacgtgcaggttttcaagggcaaggaggagctagggtgtgcctggaggcagggagggtgggagagaatgagtgcagggaagaaagagccaggccagatcatggcggacctcacgcgtgtgagatgagggctctcgctcctgttctgcgtgagacgggagcccactggagtgagagcaggggactgatgtgatctgacctgcacgaccaggctctgaaggggcagcaggaaaacccgctatgagcagggcaagccacgtgac

SEQ ID NO: 921712 - DNA, 557 bp, Homo sapiens
ttaaaaccctcccagatgaaatgaaacacttttattccctgtggcttaaggaagaaagaccaggggccaggcatggtggctcatgactataatcccatcgctttggtaggccaaggcaggagggtcacttgagaacaggagtccaagaccaacctgggcaacacagcaagaccccatcgctgcagaaatacttaataattagccccgcacgatggcgcgtgactatagtcccagccactggggagactgaggcaggagaatcgcttgagcctggagttcaaggctgcaagtgagccatgatygagccacttcactccagcctgagacaagatgagatcatatcttaaactaaaagaagagaataaagataacacattttagtctaacattctgaggacagtccataaatgctttccctccaaacatgtctgtggtttctctattttttttttttttttgacggattctcactttgtcgcccaggctggagtgcaatggcgtgatattggcttactgcaacctccacctcctgggttcaagccattctcctgcctcat

SEQ ID NO: 921713 - DNA, 557 bp, Homo sapiens
ttaaaaccctcccagatgaaatgaaacacttttattccctgtggcttaaggaagaaagaccaggggccaggcatggtggctcatgactataatcccatcgctttggtaggccaaggcaggagggtcacttgagaacaggagtccaagaccaacctgggcaacacagcaagaccccatcgctgcagaaatacttaataattagccccgcacgatggcgcgtgactatagtcccagccactggggagactgaggcaggagaatcgcttgagcctggagttcaaggctgcaagtgagccatgattgagccacttcactccagcctgagacaagatgagatcatatcttaaactaaaagaagagaataaagatmacacattttagtctaacattctgaggacagtccataaatgctttccctccaaacatgtctgtggtttctctattttttttttttttttgacggattctcactttgtcgcccaggctggagtgcaatggcgtgatattggcttactgcaacctccacctcctgggttcaagccattctcctgcctcat

SEQ ID NO: 921714 - DNA, 569 bp, Homo sapiens
aatgaaaaatgtcacatgacaggccaagtgcagtggctcacgcctgtaataccagcactttgggaggccgaggtgggcggatcatgaggtcaggagatcgagaccatcctggctaacatggtgaaaccctgtctctactaaaaatacaaaaaattagccaggcgtggtggcgggcgcctgtagtcccagctactcaggaggctgaggcaggagaatggcgtgaacccgggaggcrgagcttgcagtgagccgagatcacgccactgcactccagcctgagtgatagagcgagactcagtctcaaaaaaaaaaaaaaaaaaaaaaaaaaaaaaaaagtcatatgacattaccaaatgtccctggaagaggtgggaaatcaccctcggttgagaatcattcattgtgttaaggatattaacaacaatgacaaaagctacagctaacatcatactaaatgatgaaatactgaatactttccccaatactgaaaacagggaagggaaatccctttacaccacttctgttcaacactatagtgaagttcctagccagtgaaagaaggcaagaaa

SEQ ID NO: 921715 - DNA, 569 bp, Homo sapiens
aatgaaaaatgtcacatgacaggccaagtgcagtggctcacgcctgtaataccagcactttgggaggccgaggtgggcggatcatgaggtcaggagatcgagaccatcctggctaacatggtgaaaccctgtctctactaaaaatacaaaaaattagccaggcgtggtggcgggcgcctgtagtcccagctactcaggaggctgaggcaggagaatggcgtgaacccgggaggcagagyttgcagtgagccgagatcacgccactgcactccagcctgagtgatagagcgagactcagtctcaaaaaaaaaaaaaaaaaaaaaaaaaaaaaaaaagtcatatgacattaccaaatgtccctggaagaggtgggaaatcaccctcggttgagaatcattcattgtgttaaggatattaacaacaatgacaaaagctacagctaacatcatactaaatgatgaaatactgaatactttccccaatactgaaaacagggaagggaaatccctttacaccacttctgttcaacactatagtgaagttcctagccagtgaaagaaggcaagaaa

SEQ ID NO: 921716 - DNA, 590 bp, Homo sapiens
tgtgacaatgaaaaatgtcacatgacaggccaagtgcagtggctcacgcctgtaataccagcactttgggaggccgaggtgggcggatcatgaggtcaggagatcgagaccatcctggctaacatggtgaaaccctgtctctactaaaaatacaaaaaattagccaggcgtggtggcgggcgcctgtagtcccagctactcaggaggctgaggcaggagaatggcgtgaacccgggaggcagagcttgcagtgagccgagatcacgccactgcactccagcctgagtgatagagmgagactcagtctcaaaaaaaaaaaaaaaaaaaaaaaaaaaaaaaaagtcatatgacattaccaaatgtccctggaagaggtgggaaatcaccctcggttgagaatcattcattgtgttaaggatattaacaacaatgacaaaagctacagctaacatcatactaaatgatgaaatactgaatactttccccaatactgaaaacagggaagggaaatccctttacaccacttctgttcaacactatagtgaagttcctagccagtgaaagaaggcaagaaaaagatataaaaagca

SEQ ID NO: 921717 - DNA, 751 bp, Homo sapiens
aggtgacagggccaagcagcaaacggaaccctgtgctagttcgtgtactcctctgttgcaggcatgcgtgccatttggccacaatctgtttctgggcattcccagattttggtttctggaaggtgtcctactttcgactaggataaaggctaaggcctcaggatcccgataagagcaatggtggctgagtgtctggagactggcggccacatatagagctagctaactatatattggtcacctaagaatgcacaggctggctgggcgtggcggcttaygcctgtaatcccaacattttgggaggccaaggtgggcggatcacctgaggtcaggagtttgagaccagcctggccaacatggcaaaaccctgtctctactaaaaatacaaaaattaggtgggcgtggtggcgggcacctgtaatcccagctaacctactatggggtactgggtatgtactagcatgggaacccctttggaacatcttccacttgctgtaaggcataacacgtagtgcagaattatagctccctgacactgtaacttcagtccccttccatagctggaaccagaatcctaaaggtacaagtttgtgtccttgcctttgccactggtcccagttggcccccttcttgactaagtggtacagtggcctaaggagttgagccaaatgggaaataaaaggacaccacggccttagaagaactaagaaggtttgcagccactttggtggtgtaggatgtgggtaggcct

SEQ ID NO: 921718 - DNA, 618 bp, Homo sapiens
ataaatttataggtatagaagttataattggttgaatagtcccaggttgtccatcgggccctttacaatgcaaagtataactactttgatatacttcaggggctttatcaactccaactatgttaaattgagcaggctgaattggccatgcagacggccagtgatgtagagatatgattgaaatgtccactcctgtatctaccaaacctttaaatttctttcsctgaatagttttttcacaggtaggatggttatcagtaatttgatttacccagtaggtggctctcccttgtttatttgtactgccaaatccccttgttcttttagtttcactttttcctagtcccacatacggtaaaatcagaagctgccctatacgctctcccggttctgccttttaaggaacagaggtagatataacgatttgaatttccccgttacaatccaaatcaattactcctgtatgaacctgcactccttttaaatttaaactagatcttcccagaagtagtcctaccattcctgctggcagaggtccgcagactcctgttggtaccttctgcagtggctttccaggcaggagactcacagccctggtgcaacacagatctactgagg

SEQ ID NO: 921719 - DNA, 618 bp, Homo sapiens
ataaatttataggtatagaagttataattggttgaatagtcccaggttgtccatcgggccctttacaatgcaaagtataactactttgatatacttcaggggctttatcaactccaactatgttaaattgagcaggctgaattggccatgcagacggccagtgatgtagagatatgattgaaatgtccactcctgtatctaccaaacctttaaatttctttcgctgaatagttwtttcacaggtaggatggttatcagtaatttgatttacccagtaggtggctctcccttgtttatttgtactgccaaatccccttgttcttttagtttcactttttcctagtcccacatacggtaaaatcagaagctgccctatacgctctcccggttctgccttttaaggaacagaggtagatataacgatttgaatttccccgttacaatccaaatcaattactcctgtatgaacctgcactccttttaaatttaaactagatcttcccagaagtagtcctaccattcctgctggcagaggtccgcagactcctgttggtaccttctgcagtggctttccaggcaggagactcacagccctggtgcaacacagatctactgagg

SEQ ID NO: 921720 - DNA, 618 bp, Homo sapiens
ataaatttataggtatagaagttataattggttgaatagtcccaggttgtccatcgggccctttacaatgcaaagtataactactttgatatacttcaggggctttatcaactccaactatgttaaattgagcaggctgaattggccatgcagacggccagtgatgtagagatatgattgaaatgtccactcctgtatctaccaaacctttaaatttctttcgctgaatagttttttcacaggtaggatggttatcagtaatttgatttacccagtaggtggctctcccttgtttatttgtactgccaaatccccttgttcttttagtttcactttttcctagtcccacatacggtaaaatcagaagctgccctatacgctctcccggttctgccttttaaggaacagaggtagatataacgatttgaatttccccrttacaatccaaatcaattactcctgtatgaacctgcactccttttaaatttaaactagatcttcccagaagtagtcctaccattcctgctggcagaggtccgcagactcctgttggtaccttctgcagtggctttccaggcaggagactcacagccctggtgcaacacagatctactgagg

SEQ ID NO: 921721 - DNA, 614 bp, Homo sapiens
cgcaagcaccgtgcgcagcctggttcccgctagtgcctctccctccacacctccgtgaagctgggggagccggatccagccttggccagcccagaaaggggctcccacagtgcagcggtgggctaaagggctccttaagtgccgccaaagtgggagcccaggcagaggaggcgccgagagcgagcgagggctgtgaggactgccagcacrctgtcacctctcactaacattcttaaatatctgctagctgtaataaagaaatcagtgtactttatgttcttagctcccacaatttagcctaaatatttgccctggcatgcttatactggtccaagcaagcattaggtcatagtctgttcctcttccttatctgaaggtgtttttacctttctcagcatcccacaagttacttcctccatcctttgttctcctctgcctttgcctcttttaaaaagtcctaagttgctagccaatcaggacaaatacagaatggaaggtcctgttctagccaatggaaactgataagcctcctctaatctcccccacccagaaagaaacaagcaaagaaatctccaaggtaccacagcccccaccccccccccgccggctatcgg

SEQ ID NO: 921722 - DNA, 612 bp, Homo sapiens
agctaccttgacaagtactccaggagtatgggaaaatgaaaagaacaaactcacacgcctttttaacatacacaaccatttctgtctacccagccaaggcatattcttcccatgtggaacttcaacctatatctgcctccccaccaactggagacgcacctgcaccttagtcttcctaagtcccaacattgacattgccccaggaaatcagaccctatcagtgcccctcaaagctcaagtttgtcagtgcagggccatacaactaatactccwacttatagggttaggaatggccactgctacaggaactggaatagccagtttatctacttcattatcctattaccacacactctcaaaagatttttcaaacagtttgcaagaaataaaatctatcgttactctacaatcccaaatagactctttagtggcagtgactgtccaaaaccgctgaggcctagacctcctcactgctgagaaaggaggactgtacattcttaagggaagagtgttgcttttacactaaccagtaagggatagtatgagatgccgcttatcgtttacaggaaaaggcttctgaaatcagacaacgcctttcaaactcttatacca

SEQ ID NO: 921723 - DNA, 728 bp, Homo sapiens
acaaatttgtcctttttttctgctttgtgataatggagatgggccttataaatatttctcttttacccattaccagtgtagggtgctggaagacaaggaaggaggaagaagcttcctttccaagtttcagtgttgaggtagaatagggtctagaggaagggaacctaaggccaatcacgctgactttctagaactagatcaaaaggaaaccccactttccatgcccaagtaacaaaaggaccagaggctattgcctttgcaatccctcaccttttttgcatggcagatgaaaaattgaaattacttctgattggccgggcatggtggctcacacctgtaatcccagcactttgggaggtcaaggcaggtggatcacctgaggtcaggagttcgagaccagcctgaccaacatggagaaactccatctctactaaaaatacagaattagccgggtgttgtggcacatgcctgtaatcccagctactcgggaggctgaggcaggaggattgtttgaacccaggaggtgaaggttgcaatgagctgagattgcaccactgcactccggcctgggygacagagcgagactgagtcaaaaacaaacaaacaataaaaaaacctactgttatgcgtactgtaggaagcagccctactgggtctgtgggtttttctcttcgtgtgtggagacaagagatcatagaaataaagacacaagacaaagagatagacaa

SEQ ID NO: 921724 - DNA, 657 bp, Homo sapiens
aagaaggcattggaaactgcagtaaaggctgtccttgttataaactggcaaaaaacttggctgaactcgatccatgcctgagggctttgtggaaggcctaatttgagagtgatgaactagggtatgtggcagtagaaatttctaagcaacacataggagttgcatggttacttttggctatttgtgccaagattcagaagcaaaagaacaacttaaaagacagaatttatgttaaaagggaagcaccatggaaaaatctgggaaactcttagcctggccacatagagtgaaaaagtgtgttcaggtggggaaactaaggtcgtaccctagtgatcctttgctgaagagattagcacagaagggagccgggtgcttttactcaaaacaatggaagaaagaccctgaaggcattytggagattttcaaggttgcccctcacattacaggcctagaggcctacgagggcacagtggcttcaggggacagaccagtcattctccatagtttgctgctgagttgccttggaactctgctccctgcacctctgcacagtgctctgtggctgcccagctatagcttaagtgacccaggtgcagctcatgcccttcagaaggtacaggtcataaactttggtggcatccatgtgcagctaattct

SEQ ID NO: 921725 - DNA, 658 bp, Homo sapiens
ttataggggcaattctgaaactgcccctataaactttataaaattaatcaggaaagaagagagagggataaatgaaaaaccaagcttatagcacattcaacattaatgaagtttaatctctgacctacttcttcatagttcactggtgcctattgtcctagaatcatgtagaccctgtgtattagtctgttctcatgctgctaataaggacatactacctgagactaggtaactaataaaggaaagaggtttaatgaactcacagaccctcatggctggagaggcctcacaatcatggcccaagacgaagagcaaagggatatcttacatggtgacaagcaagacagcgtgtgcaggggaactgcccttytataaaatcatacgttcgtgagacttattcactaccatgagaacagcacagaaaaacccacccccgtgattcagttacctcccactgggtccttcccatgacaggtggggattcttacaattcaaggtgagatttgggtaggaacacaggcaaaccatatcaccctgttacaagattaactactctattgataacttgaccattataaaacattaagtttttcctttgagatactctttcacactttttacatgctgatatacctaccatttcaggtggtctgaagga

SEQ ID NO: 921726 - DNA, 658 bp, Homo sapiens
ttataggggcaattctgaaactgcccctataaactttataaaattaatcaggaaagaagagagagggataaatgaaaaaccaagcttatagcacattcaacattaatgaagtttaatctctgacctacttcttcatagttcactggtgcctattgtcctagaatcatgtagaccctgtgtattagtctgttctcatgctgctaataaggacatactacctgagactaggtaactaataaaggaaagaggtttaatgaactcacagaccctcatggctggagaggcctcacaatcatggcccaagacgaagagcaaagggatatcttacatggtgacaagcaagacagcgtgtgcaggggaactgcccttttataaaatcatacgttcgtgagacttattcactaccatgagaacagcacagaaaaacccacccccgtgattcagttacctcccactgggtccttcccatgacaggtggggattmttacaattcaaggtgagatttgggtaggaacacaggcaaaccatatcaccctgttacaagattaactactctattgataacttgaccattataaaacattaagtttttcctttgagatactctttcacactttttacatgctgatatacctaccatttcaggtggtctgaagga

SEQ ID NO: 921727 - DNA, 669 bp, Homo sapiens
catgcgccaccatgcccggctaattttgtatttttagtagagatggggtttctacgtgttggttaggctggtcttgaactcccgacctcaggtgatccgccacctcggcctcccaaagttctgggattacaggcatgagtcactgtgctcggcctatttatttaatttttgaaacagaatctcactctgtcacccaggatggagtacaatggtgtgatttcgtctcactgcaatctccttttcccaggttcaagagattctcttgccgtggcctcccaagtagctgagattacaggtgtccaccactgttcccagccatttttyctaattttagtatagacgaggttttgccttgtttgcccagctagtcttggactcctgacctgaggagatccgcctgtcctggcctctcaaagtgctgggattacaggagtggaccaccgtgtctggcctattttttatgtttttgagatggagtctcactctttttgccgaggcttgagtgcagtggcgtgatctcagctcattgaaagatcagccttccagcttcaagcgactctcctgcctcagcctccagagtagctgggattacaagcatataccaccaccatgctgggctaattttgtatttttagtagagatggggctgcaccatgttggccaggctgg

SEQ ID NO: 921728 - DNA, 734 bp, Homo sapiens
caaacatcaagtccgggtgttagacctttatcctgcaggtgacaaggactggcaaccaatgggaggtggagctgggttttttgtttgcttttttttttgttttagagacaatatctcactctgtcgcccaggctggagggcagtgacgtgatcaaactgcagcctcgactgcctgggctcaagggatmctcccacctcagcctcctgagtagctgggattacaggctatgccaccacgcctggctaattattttatttttgtggagatagtgtcttgctctgttgcccaggctagtctcaaactcctggccttaagcaatcctcccaccttggcctcccaaagcactgagattaaagatgtaagccaccatgcctggctgaacacatattttctaaacaccatttggtacccctattccaagccattcctcctctctcaaccctcagggtgcaagaagtggatgacctttgaccctcatgctccacaggggtttctggtttccatccaatgcaggaagaagaatcctgtgtccagacccacatcgatgcctgaaggtcccatgcaaccaaagcagggtcccacccaggacatgattcaataggaaaagcactgggtgtccactttgtgccagcccactgggatcgtgcatccacaagagggtcttggccatgacaccttcttcgccaccaggcccccagcattaacacagcctgtggtctgccatgggtcctta

SEQ ID NO: 921729 - DNA, 738 bp, Homo sapiens
gaaatgccaattaaattcacaatgagacaccacttcatacccactaccctggctattactcaaactgacgatactgacaggtgtagtcgaggatataaagaaactggaaccctcaggcatcgctggtggggatgtaagatgtacagctaacctggaaaaccattaggcagtttctttaaaagttgaggccaggctcggtggctcatacctgtaatcccagcactttgggagtcctgaggtcaagagttcgagaccagcctggccaacatggtgaaaccctgtctctactaaaaacacaaaaactagccgggtatggtggtaggcgcctgtaatcccagatactcgggaggctraggcaggagaatcacttgaacctgggaggtggaggttgcagtgagccaagactgtaccactgcactctagcctgggcaacagagcaagactctgtctccaaaaaaaaaagttgaacatggctgggtgcagtggctcatgcctgtaatgtcagcactttgggaggccgaggtaggaggatcccctgagtccaggagttccaggctgcagtgagctatgaatgcgccaccaccctccagcttgggagacagaataagagcctgtctctaaaaaaaaaaaaaaattaaaaaaaaagttaaacataaacttatatgaaacctagcaattctacgactagattatctacccaagagaaatgaaaatacaccttctacctccatgcaaact

SEQ ID NO: 921730 - DNA, 587 bp, Homo sapiens
ccctggccagaggctcaccaggcttcaccaggctctgacagtcttcacacttgggcgtcacctcagagaagatcttctctgggtatggggaaggggaagaaagagaaggcagtaagaggatctgggccggagtctggaggtgcagcacccccacccctcttccactgttaacatgaacacacctccatcasttggagtgtgatgggtgtctcctgaggtgtccactctgctcagaaaagacctctcttcttgttgttgcattttttttgtttttttctttctttttttttttgagataaggtctcactctgttgcccgggctggaatgcagtggcacgatcatggcttactgtagcctcaacctcccagcttcaagtgatcctcctgcctcagcctcctgagtagctgggattacaggtgcatgccagcacgcccggctaaattttgtattttttgtagagacagggtttcgccatgttgcccaggctggtctcaaactcctgggctcaagcaaatctgcccactttggcttctcaaagagctgcaattacaggtgtgagccactgcgcccggccttattggtttgt

SEQ ID NO: 921731 - DNA, 721 bp, Homo sapiens
gagaccctaacccagtggcgctagaggaattaaagacacacacccagaaatacagggtgtggagtgggaaatcaggggtctcacagccttcagagctgagagcctcgaacagagatttacacacatatttattgacagcaagccagtgataagcattatttctatagattatagattaactaaaagcatttcttatgggaaataaagggatgtgccaaaataaacggatgggctctggctagttatctgcagcaggaacatgtccttaaggcacagatcgctcatgctattgtttgtggtacaggaacccctttaagccrttttccatcctgggtgagccaggtgttccttgccctcattccagtaaacccacgaccttcagggtgggggtcatggccatcatgaacatgtcacagtgctgcagagattttgtttatggccagttttggggccagtttatggccagattcaggggcctgttcccaacatgtccccttttttgttttgcaaagtgataaaagcaaaggcagctttgtcacggtgagctacttctcacaggagtcaggatccgcatctgcacactatacaaagacaaacaacacagagtaaaagcacaatcatcattgaaatcacagagcctccaagtgtttttatccatttgaatgggttactagctgctaatctgtctgcagctccttcaagcactccagttcctggcatt

SEQ ID NO: 921732 - DNA, 685 bp, Homo sapiens
ggagatgaagaggaagcagccggccagcagcagcccctgtagggtggcctggaagtcactgaacttgactccctccaggtagaggacgctctggctgtaggccaggatgagggcattgagcgccaggatcttgaacatctgtagcgtggtcaccagcgtgcagcggccctgcttgatcacgtggcagactgcagggtggtggggaggcaggtgtgggtgtgggtaggggtgccaaggggggaatgaagggagggggagcgggggcaggcaactcactgcactggatggatgagagcttggaggtgaagggtgctgcgatgctggcatcccccagtttcacaatgggcgtactctcgtcctcgaggtctcgcagcacctggctcaggcggtcctgcagggtagacakcaggctgtcagccctggccaggatggggtgcagcacctcccctcttgggactcaccctctgggaggttggctgctcctcggagggagggagccccgaccgctgcttggctgtcctggaggtggctctgatgccactgttgctcagggttgggctgtcccggggccgccgtcgccgctcgacaacccgctcaggggcattggccaagagcgccacacctggggggcaggagggtgtcagacccggaggagcaggctccacggaggggaagattgctggct

SEQ ID NO: 921733 - DNA, 580 bp, Homo sapiens
ccccttcttccacctccccttctcactgtctcttttgcctaataaatatgaagggctgtgtaaagctcagggcccttgtcccctagaggcaaagcgcccccgatcccttcttccaaatacactcttttgtctcatctttattcccgtgttcaccccmctttgtttagtccacctaggtccgtgcaggttacaaatggcaaccagaacagggactccaagcacgcccaactagcagcatccaaacatgggacttcaaggacgtgaatgaagaaggtctgctggagcagaggaactgaaattgacaaggcgaaaggggaccctgggaagagtctgccggcagcagatataaggtcagtgccctaaagaggtactgggagcagtgctttaaagaagtactgggaagttttctgactcagggtaacaagggaaagaatttgtctattgaagaaaaacattatgtgcagttgcttaaagttctgttgagacagtctgcagctcaggttaattcgcagacactaacctcctgcagaagccacaaaaggttattacacataacccatcgtttccacaggcaggcact

SEQ ID NO: 921734 - DNA, 606 bp, Homo sapiens
taggaagaaagagtttggcttcctcagctaaatataattttcttctgacacaaaagctcagagtaggtaggtgccagggtgaatatggccccagaccattctgcatttttttttttttgcccctaagtgatcctactttgattcctctgaactgcgagggcatggagtgacagtcctggaggtcttccatgtggtacaactgccctgtcaatgtcctgatgaggggacagagaagagaagcaatgctgccaagacggctagcccctgcagcttcatgggatgagaggaatggaggtggagcagattggacttataaatagctggcctttgtccttggaagtgggtagactcagagatggcttctcaggcactttggaattgaggtgctgagaatcaactcagcagtggtttktaagactgcacctccctccacttactccttcgtttggggaagggaagaagagtatctaaaccacaccagcagaaatgcaaatacttggctttcctggaggaaagggaattagctgctggtggctgttgccacagcaaacacagtgaggtcacagcccctgggccagcccagcacttctgtggtcgctgggggct

SEQ ID NO: 921735 - DNA, 606 bp, Homo sapiens
taggaagaaagagtttggcttcctcagctaaatataattttcttctgacacaaaagctcagagtaggtaggtgccagggtgaatatggccccagaccattctgcatttttttttttttgcccctaagtgatcctactttgattcctctgaactgcgagggcatggagtgacagtcctggaggtcttccatgtggtacaactgccctgtcaatgtcctgatgaggggacagagaagagaagcaatgctgccaagacggctagcccctgcagcttcatgggatgagaggaatggaggtggagcagattggacttataaatagctggcctttgtccttggaagtgggtagactcagagatggcttctcaggcactttggaattgaggtgctgagaatcaactcagcagtggttttkaagactgcacctccctccacttactccttcgtttggggaagggaagaagagtatctaaaccacaccagcagaaatgcaaatacttggctttcctggaggaaagggaattagctgctggtggctgttgccacagcaaacacagtgaggtcacagcccctgggccagcccagcacttctgtggtcgctgggggct

SEQ ID NO: 921736 - DNA, 789 bp, Homo sapiens
cggaagctgcatcagaacctccttccagacatgatatttttgaccaggactcgagtctgtctgcacttcctgaggatagatcatcctctgcaatatccatgtgagttgttgagcatcatttttgttgaagccaatcagttaacccaaagtcctttagttaattaatgctttggaaatgagggcaggtggttttgttttttggggtttttttagagacaaggtctcactctgttgcctggmaggagtgtggtgactcgatcatagctcactgcagtcttgaattcctggatcaaccaatccttcagcctcagcctactgagtaactgggactacaggtgcatgccattacactttgcaaatttttaaattttttttgtagacacaggttctcactacgttgcccaggctggtcttacactcctggcctcttgtactcccgcctcagcctcccaaaggacccggattatagatgtgagccacagtgcctggctatataaagcttttaaaatgcaacacaatgccattgttattatttggaagaataatatcaaatataatgaaaggtatagaagaataatatagatcaagtgtgtgtactggttcccctagggaagggaaaaaaaatcaaaaacatgaagcggtggttttgaaatatgcacttttttttttttttttttgagatggaatcttgctctgtcacccaggctggagtgcagtggcatgatctcggctcactgcaacctccgcctcccaggttcaagcgattctcctgtagagacggagtttcac

SEQ ID NO: 921737 - DNA, 802 bp, Homo sapiens
aagattctttggaacaaggcagttactgtcctttgattctgaggacatccgcctttctggccctgagtaccgctaaggggggccaggcaggtctgtcgaggacactggcggcctggcagccgtgtggcctgggtcaggtagaagcgaggggcgggaacagagaattcgagtgggaggagggaagaggagatgaggtggaaagggccaggcagtcggagtccctgtgttgggtcccgtcctggttgaagactctgagctggtaagtttcagaccattttaaggagtattcactcgacttttaaaataggccatccccagccgggcgcggtggctcactcctataatcccagcattttgggagkctgaggcgggtggataacctgaggtcaggagttcgagaccagcctggccaacatggtgaaactctttctctactaaaaatacaaaacttagccgggcgtagtggcgcttgcctgtagtcccagctactcaggaggctgaggcacgagaatcgcttgaacccaggaggcagaggttgcagtgagccaacatcatgccgctgtactccagcctgggcgacaaagcaagactctgtctcaaaaaaaaaaaaaaaaaaaaaaaaagccatcccggtttatattgggccaggaaaacccagcctagacagcaggcccacgtgttggtgggctggggcctttctgagtaatgcagtttttctccccaggggttggccggagacctacgacatgaatacctcggagcccaagacggagcaggaaagcatcactcctgggggccggcc

SEQ ID NO: 921738 - DNA, 802 bp, Homo sapiens
aagattctttggaacaaggcagttactgtcctttgattctgaggacatccgcctttctggccctgagtaccgctaaggggggccaggcaggtctgtcgaggacactggcggcctggcagccgtgtggcctgggtcaggtagaagcgaggggcgggaacagagaattcgagtgggaggagggaagaggagatgaggtggaaagggccaggcagtcggagtccctgtgttgggtcccgtcctggttgaagactctgagctggtaagtttcagaccattttaaggagtattcactcgacttttaaaataggccatccccagccgggcgcggtggctcactcctataatcccagcattttgggaggctgaggcgggtggataacctgaggtcaggagttcgagaccagcctggccaacatggtgaaactctttctctactaaaaatacaaaacttagccgggcgtagtggcgcttgcctgtagtcccagctactcaggaggctgaggcacgagaatcgcttgaacccaggaggcagaggttgcagtgagccaacatcatgccrctgtactccagcctgggcgacaaagcaagactctgtctcaaaaaaaaaaaaaaaaaaaaaaaaagccatcccggtttatattgggccaggaaaacccagcctagacagcaggcccacgtgttggtgggctggggcctttctgagtaatgcagtttttctccccaggggttggccggagacctacgacatgaatacctcggagcccaagacggagcaggaaagcatcactcctgggggccggcc

SEQ ID NO: 921739 - DNA, 762 bp, Homo sapiens
tttttttttttttgagacggagtctcgctctgttgcccaggctgcactatctcggctcactgcagcctccacctcccaggttcaagtgattctcctgcctcaacctcctgagtagctgggactacaggtgcctgccaccacgcctagctaatttttgtatttttcatagagatggggtttcaccatgttagctgagattttaaaatacatttgtatacattttaaagttgcttatgtcatacaagagtaaaatctcactgtttaaaaataactcatgcaatacaaaagactttaaaattctgttattgtgaaatggaacatacatacagacaagcatgtaaaacgtgaatacacagtttaccgaagaattccaaagcaagcactcaggtaacccgggtccagaaagagaacctgctggcagcctggaacccccatgggctctggccaccagaaccctttttttttccttttttttgagacagagtctcactctgtcacccaggctggagtgcagtagtgcaatctccggtcactgcagcctccgcctccaggttcaagcaattctcctgcctcacctcccaagtagctgggattacaggcacctgccacaacacytggctaatttttgtacttttagtagagacgaggttttgccatgttggccaggctggtctcgaacttctgagctcaggtaacccgcccacctcagcctctcagagtgctgggattacaggcatgagccaccgcacgtgaccagaaccc

SEQ ID NO: 921740 - DNA, 582 bp, Homo sapiens
ggggaccactaccaccaagacgcagagaccgatagtggccccaaatgcctggctgcgctgttatttattggataataaggggcagagtaaggagtgtgagtcatctccaatgattgataaggtcatgtgagtcacgtgtccactggacagggagcccttctatgttaggtagccaaggcgtagagagagaggatagcttatgtcattatttcttttatgttcttttcagaaagatcaaagactttaatattttaatactttcactaattctgctactsctatctagagggtgcagccaggtatacagagtggaacaggaaagtgaaacaggagtgtgaccactgaagcacagcatcacagggagatggtcaggcctctggataactgcgggcgggcctgacatcactcaggccctccacaggaggcggtggagcagagtcttccctaactcccccggggaaagggagactccctttcctggtctctaggcactgacgcaaccgctagaccaaggtccgctaggcaatgggcatcttcccagacgctggcgttaccccaagaccaaggggccctctagtggcc

SEQ ID NO: 921741 - DNA, 605 bp, Homo sapiens
tcttgtcacatggtaaagagcctccctaaccagacataagctccttcccacagagccagggctgtgggaggtcccagccttcttagtcttcttgcctagctcccagcactggggctggcccctaggaagcccaggaaatctgccatgaaagaaatttaaatgagcactttcagatttttttttttcactagtcaatcatggactcatttatttactcagtaagtatttacaaaggactgattacgtgttagctactggattttaggtgcctgagatctggtaggaaacaaatcagacaaaaattcctctttatagaacttargttttttgggttttttgttttttgtttcttgtttttttttttaaagacagggtcttgctctgttacccaggctggagtgcagtggtgctcctgggctcgggatcctcccacctcagcctctcaagtagctggaactacaggcatgtaccaccatgccgggctaatttttgtttactttttgtagagatggggtcctactacattgcccaggtcgagctcctggactcaagtgatcctcccacctcagcctcccagaatgctggaattacatgcatgagccacc

SEQ ID NO: 921742 - DNA, 587 bp, Homo sapiens
cagcctagcgaacatggtgaaacctcgtctcttctgaaaatacaaaaaaatcagccaggtgtggtcgtgtacgcctgtaatcccagttacttgggaggctgaggcagaagaatcacttgaagccaggaggcagaggttgcagcgagccgagatcatgccactgcactccagcctgggcaacagagtgagactctgtctcaagaaaaaaggaaaggtcccttcctcccakgtctgattgttaatcgatgtggtgttagcatggcacctggcactttgcgacacccgggactatacgcacctccctctgtcccagctcagctacgcaatcccttttctgtttctcaagtttgtctgcacctcagcgcctttgcacacgctattctctctgcctggaatgctcgtcccctgctgcccactgtgctaacccctccctcattctgcccagatgtctccggccttccctgaccaccctgtgaagcagcaccctcatctcatcctcttcctctactcggctttcttttgttttctgaaagatttttttaacacctaaaattaatgatgtgtttatgtgggggctttttgcccac

SEQ ID NO: 921743 - DNA, 882 bp, Homo sapiens
gcacggtgcccatcattctgcctgttagagacagtgacagagagaggcacagttcagtgcacgtgttaggggagctcctgttccgtgccaagcactgttctttaaatcaattttcttaagatgtaatttccctaaaagttagtgattttcagtgtgcactatgctgtttgatgagttttgaaaagttcatacacccaagtaaccgacaccccaatgaatgtataaaatatttccacattctcatcattctaacatatttccgctgggcgcagtggcccacgcctgtaatcccagcactttgggaggctgaggcgggtggatcacctgaggtcaggagttcaagaccagcctggctgacatggtgaaatcccatctctactaaaaatacaaaaattagctgggtgtggtggcacgcacctgtagtcccagctacttgggaggctgaggcacgagaatcgtttgtacccaggaggcggaggttgcagtgagctgagatcgggccactgtactctagcctgggtgacagtaagactccatctcaaaaaaataaaaataaaaaatcaaatatttccttgtgtccctggccaagcaaggccccctcctctgyccaacaccatgcatccaccagaggcaaccccaggtctgctttttggtcgccacaggttggttttacctgttctagagcttcctgttggtggtataatatggcactagtctcttgcatctggctgcttttgctcattcgttcagcaagtatttactgggcatctgctccgagctaggccccatgctggaggctgggagtgtaacaggcctgccatggtctctgccctcactgagctcacagcccagcagagcaggcagaccttcaccagagagtcc

SEQ ID NO: 921744 - DNA, 673 bp, Homo sapiens
aatagtcaaaggtctctgaaaaatatttctttcctacataccagagtcttctctacattctcaacatcatggcttcttacatgtcatcaagaattctcaccatgaatttatgaactgcaatattaagaatgtttccttcgtggctatggaacatgggaaggtgtagatactcaagattcctattggggaraagctggggtccttaataaagatggagagcatgtaattttgaggttccatctctgttctccattagctgtaaacaaataagattaagaaaatgcttatttaaatgggatggcatttattacgcagaaagtttaaaaataataataattaggagatacttgctctttagggtgtgaaagaaagactacttaaaatcactattaaaatttacagaacatggcagatattggtatctggaactttacataaaaccagtgtttctttatgattaaattcagactataatttacttttggctgggcaatatcatagcagtgatgccgtgtccttctgtgtgcatcagcacatttgtcttcatgcacttgatgttaataactcacttgattaatgaactctgtgacagatttttttctatagagttaattatttttctcttcattactgagtatctttattcagcagatgtgcataaacaatcacattt

SEQ ID NO: 921745 - DNA, 673 bp, Homo sapiens
aatagtcaaaggtctctgaaaaatatttctttcctacataccagagtcttctctacattctcaacatcatggcttcttacatgtcatcaagaattctcaccatgaatttatgaactgcaatattaagaatgtttccttcgtggctatggaacatgggaaggtgtagatactcaagattcctattggggaaaagctggggtccttaataaagatggagagcatgtaattttgaggttccatctctgttctccattagctgtaarcaaataagattaagaaaatgcttatttaaatgggatggcatttattacgcagaaagtttaaaaataataataattaggagatacttgctctttagggtgtgaaagaaagactacttaaaatcactattaaaatttacagaacatggcagatattggtatctggaactttacataaaaccagtgtttctttatgattaaattcagactataatttacttttggctgggcaatatcatagcagtgatgccgtgtccttctgtgtgcatcagcacatttgtcttcatgcacttgatgttaataactcacttgattaatgaactctgtgacagatttttttctatagagttaattatttttctcttcattactgagtatctttattcagcagatgtgcataaacaatcacattt

SEQ ID NO: 921746 - DNA, 673 bp, Homo sapiens
aatagtcaaaggtctctgaaaaatatttctttcctacataccagagtcttctctacattctcaacatcatggcttcttacatgtcatcaagaattctcaccatgaatttatgaactgcaatattaagaatgtttccttcgtggctatggaacatgggaaggtgtagatactcaagattcctattggggaaaagctggggtccttaataaagatggagagcatgtaattttgaggttccatctctgttctccattagctgtaaacaaataagattaagaaaatgcttatttaaatgggatggcatttattacgcaraaagtttaaaaataataataattaggagatacttgctctttagggtgtgaaagaaagactacttaaaatcactattaaaatttacagaacatggcagatattggtatctggaactttacataaaaccagtgtttctttatgattaaattcagactataatttacttttggctgggcaatatcatagcagtgatgccgtgtccttctgtgtgcatcagcacatttgtcttcatgcacttgatgttaataactcacttgattaatgaactctgtgacagatttttttctatagagttaattatttttctcttcattactgagtatctttattcagcagatgtgcataaacaatcacattt

SEQ ID NO: 921747 - DNA, 732 bp, Homo sapiens
agctaagattcagaaacaacctaagtgtccatcaacagacaaatggataaagaaaatgtggtacatatacacaatggagtaccattcagccatgaaaaagaatgagattcagtcatttgcaacgacatggatggaactggagaccattctgttaagtgaaataagccaggcacagaaagacaaacagcatgttctcacttatttgtgggatctaaaaaccaaaacaaytgaactcatggacatagagagtaggaggatggttaccaggggctgggaagggtagtgggagggtggagagcaggggaaggtcaggatggttaaaaccatttatgcctaggattccattattggaatgctaagcacttgggagttatttatatctcactgctcaaggtcatcaccaaactctgattgaaaaaattcaaaaaattgcagcctcgggcataaacgggttaacaggttgaaaaagaataagacctagtatttgctagcacaacagaggaactatagttaataataaattgtacattccaaaataactaaaagtataaatcaattgtttgtaatacaaaggataaatgtttgaagggctagatctcccattctccaagatgtgattattttacattgcatgcctgaaccaaaacatcttacgtaccccataaatatatatgcctactatgtattcacaaaaattaaaataaaaagttagaaaatatccagcttttgcaa

SEQ ID NO: 921748 - DNA, 791 bp, Homo sapiens
cataaagaggggaatggccggatgtgctggctcacccctgtaatcccagcactttgggaggctgaggcatgtggatcacaaggtcaggagattgagaccatcctggctaacacagtgaaaccccgtctctactaaaaatacgaaaaaaaaaagttagccagacatgttggcgggcgcctgtaatgccagctactcgggaggctgaggcaggagaaagtcatgaacgcagaaggtggagcttgcagcgagccaagattgtgccactgcactccagactgggcgacagagcragactccatctcaaaaaaaaacagagagacagagagagagagagagagaacggagcacgttccttgaggtcaaacagatcccgcctggaacccaagctctacggtagagcagtgatccccaacctttttggcaccagggaccggttttgtggaagacaatttttccacacaccggggtggaagggggtggttttgagatgactcaagcacattatgtttattgtgcactttattatgattacattgtaatatataatgaaataatcatacaactcaccataatgtaggatcagtgggagcctgagcttgttttcctacaactagatggtcccatctgggggtgatggagacactgacagatcatcaggcattagattctcataagaagcacgcaacccagatccctcacatgtgcagttcacaatagggctcatgctcctggaagaaccaaatgccacatccgatctgacaggaggcagagctcaggtggtaacatgagtc

SEQ ID NO: 921749 - DNA, 611 bp, Homo sapiens
acatttggacacagacagaggggagaaggccacaagatgatggaagaggcagtgattggagtgacgtggccacaatccagcgaccaccaggggccaccagaagttggaagaggcaaggaaggaaccttccccagagcttttgggggcagcacggctctgttgacaccttgatttcagacttctggcatccagaacagtgaaagaataaattttagggggctgggcgtggtggctgacgcctgtaattccaacactttgggaggccawggcgggcggagcacctgaggtcgggagtttgagaccagcctgaccaacatggcaaaaccctgtctctactaaaaatacaaaaattagccgggcatggtgtcacatgcctataatcccagctactcagaaggctgaggcagaagaatcgcttgagcctgggaggcagtggttgcagtgacctaagatcgccccactgctctccagcctgggcgacagagggagactgtgtctcaaaaaataaaagaataaattcttgttgttttaaaccagcaagctggtgatgatttgttatggcagctcccaaaaatctaacacagacaggaagcagtgggtgggtgatgaca

SEQ ID NO: 921750 - DNA, 611 bp, Homo sapiens
acatttggacacagacagaggggagaaggccacaagatgatggaagaggcagtgattggagtgacgtggccacaatccagcgaccaccaggggccaccagaagttggaagaggcaaggaaggaaccttccccagagcttttgggggcagcacggctctgttgacaccttgatttcagacttctggcatccagaacagtgaaagaataaattttagggggctgggcgtggtggctgacgcctgtaattccaacactttgggaggccaaggcgggcggagcacctgaggtcgggagtttgagaccagcctgaccaacatggcaaaaccctgtctctactaaaaatacaaaaattagccgggcatggtgtcacatgcctataatcccagctactcagaaggctgaggcagaagaatcgcytgagcctgggaggcagtggttgcagtgacctaagatcgccccactgctctccagcctgggcgacagagggagactgtgtctcaaaaaataaaagaataaattcttgttgttttaaaccagcaagctggtgatgatttgttatggcagctcccaaaaatctaacacagacaggaagcagtgggtgggtgatgaca

SEQ ID NO: 921751 - DNA, 611 bp, Homo sapiens
acatttggacacagacagaggggagaaggccacaagatgatggaagaggcagtgattggagtgacgtggccacaatccagcgaccaccaggggccaccagaagttggaagaggcaaggaaggaaccttccccagagcttttgggggcagcacggctctgttgacaccttgatttcagacttctggcatccagaacagtgaaagaataaattttagggggctgggcgtggtggctgacgcctgtaattccaacactttgggaggccaaggcgggcggagcacctgaggtcgggagtttgagaccagcctgaccaacatggcaaaaccctgtctctactaaaaatacaaaaattagccgggcatggtgtcacatgcctataatcccagctactcagaaggctgaggcagaagaatcgcttgagcctgggaggcagtggttgcagtgaccyaagatcgccccactgctctccagcctgggcgacagagggagactgtgtctcaaaaaataaaagaataaattcttgttgttttaaaccagcaagctggtgatgatttgttatggcagctcccaaaaatctaacacagacaggaagcagtgggtgggtgatgaca

SEQ ID NO: 921752 - DNA, 760 bp, Homo sapiens
catgcacagccttttcttctattttactttttattttttgagacacaggatctcgctctgtcacccaggctggagggcagttgacgtgatcatagctcactgcagccttgaactccaggctcaagtgatcctcctcccttagcctcccaaagtgctaggattacaggcatgaagcactacactgaggcttttaaattattagtttattttttagagataaggtcttgctatgttccccaggttggagtgcagtggtgcaatcatagctcagtgtaaccttgaactctcagcctcaagtgatcctcacactttggtctcccaagtacccatgcccagctcatgtacaggtttttttgcttgtttgttgagacagagtcttgctctgtcacccaggctggagtgcagtggcaccatctcagctcactacaacctccgcctctcgggttcaagctattcttgtgcctcagcctcctgagtagctaggactacaggcacccaccaccatgcccagctaatttttctattgttagtagagacagggtttcaccatgttggccaggctggtctcgaactcctggtctcaagagatccacccactgcagcctcccaaartgttgggattacaggtgtgagccaccactcctgaccgtatacaggtttttatgtcaatatccattttcatttctcttaggtcactacccaagagtgggtttgctgggtcatacagggcttgcatggtaagcattttaagaaccaccat

SEQ ID NO: 921753 - DNA, 726 bp, Homo sapiens
tcagaactgccttgtgctcccagcaaccccacagccaaatcgcagaaaaagaggctgccctccagcacagccagctctccaggcttgcacctggacgcgtgcccactctgggcctcagcccctctgtctgtgatggaggccagaggcccctcccactcataacagggctggcaggtaaggggcaacattgccttcctgtggagttgcacagtccccagaagcaggtggtgatttaaacaccctgattcgcctgtaatcccagcactttgggaggccgaggcgggtggatcatgaggtcaggagatcgagaccatcctggctaacaagktgaaaccccgtctctactaaaaatacaaaaaattagccgggcgcggtggcgggcgcctgtagtcccagctactcgggaggctgaggcaggagaatggcgtgaacccgggaagcggagcttgcagtgagccgagattgcgccactgcagtccgcagtccggcctgggcgacagagcgagactccgtctcaaaaaaaaaaaaaacaccccgattcacaacacaggccctgtggggcaccaggcagtggcaggcacaggtggcccctggaagacatgagtgccctggagaaggaaggctgggcctggggcaccctgggctgccctctgcccaagccacaggccccagagactcttcccacccaagccagaagtggtgagtcccatctctggcaagtctcag

SEQ ID NO: 921754 - DNA, 595 bp, Homo sapiens
agctgcccccagcacaggctggaaaccctggagctagtcaggaaggcagccccagcagaactctccccggcccccagtggatgcctccagggaaaccctcccaccagccccacacagcctcacagaggcacagatcctggattgttttagctccatgcagcccagcagggttctrtctaacacttccctgagtaatcataacctgccaaggtgatggggcatgtgcccatcggggtggccgtggcaggcagcgtggtgagctctgtgatgcagagtcagggatctgagctccacctgcccctagtcctgggcagacccctggaccagcctccaagttcatctgaggcctgagtgctgcagaggatggtcccaggggagagagcctcagcaagaaagaaggagtctggccgggcacagtggctcatgcctataatcctggcactttgggaggccaaagcaggtgaatcacttgaggccaggagttcgagaccagcctggccaacatggtgaaacccagtctctacaaaaaacagaaaaattcaccaggcatggtagcacatgcttataatctcagctactcaggaggctgaggcat

SEQ ID NO: 921755 - DNA, 790 bp, Homo sapiens
aggtgtgcagaccttcctctccagatctttatgcttcaggcagtcatccctcctggccctcctgcagcacagctcaggctggtgctctgcctctgggccccttttgtgggaagaatcgtcctgcgtttgtcactgcaaagactccaatctgctctcattctttgctgtcaggcattactgggaaggacgacaggcggatgtgatggacgagctgatggatgcccacgtgcctgggtggagttccctgaggctcgggtgtgtggaaagtggggatccagccaggagagcagggtactgcctcctgggtacttcacccacagccagactggtcccatgggcctcacagatctcctggctctgattaatttaattaattaatcgagatggagttgcgctcttgttgcccgggctggagtgcaatggtgcaatctcagctcactgcaaactccatctcctgggttcaagcaattctcctgcctcagcctcccaagtagctgggattacaggcaccccacaccaagcccagctaattttttgtrtttttagtagacacggggtttcaccatgttggccaggcttgtctcgaactcctgacctcaggtgatccacctgcctcggcctcccaaagtgctgggattacaggtgtgagtcaccacgcctggcctttttaaattttttttatttttatttttttgagatggagtctcactctgtcacccaggttggagcgcagtggtgtgacctcagctcactgcaacctctgcctcccaggttcaagtgattctcctgc

SEQ ID NO: 921756 - DNA, 609 bp, Homo sapiens
tgggctctgggaggcccaatgtccatgtgagaggcggtgtgctcggggagggggctgggacctggcagggtctcatttcagcccactcccagcttctgcccaggtggggttacctggaaaaaaagatgcatgctctgagcccttccagggcaggagctgtgctctggtcatcctcgtacctgcctagtcaccttgcctggcacatggcaggggtcagtgggtgctgggctgcaggaagctgaggccatttcacatcttctggtggggcctcaggcccaagctgttctctcagaggaaccttggtctgtcctggtctcatcctaggtggtggcctctgcactgtgggactgcrgtaggcacagtactggggtttgaggacagtcacaacctccggatttgacatcatctttggcttcagaggtcagttcattcccccactgcagagagcacatgtggcaaatggaccaaccaggtgcagagggatggggtggtcctgggggggctgtggccatctaggccctttctccccttggtgctgacgtggggcctgggcggagctctgtggtactgccgtgaccttcatgcctgacttgtccccttcgagtccct

SEQ ID NO: 921757 - DNA, 623 bp, Homo sapiens
aactaagtcatcctacgcggtgagtgaattcttttccttctctagctatgcaatattgtttaataattgaggcttttaggatcagaaattatcagggtgattcttttgagccaggaattcatcaggtactgtaggtactaattctcaggcttcccatggccattgatctcttattacagcttctccacatacataacatgaagtgacattgagagactgggctacatgcttggctaattgcaaaaacaaatttcttgtttttcctggaatttctggtactggcacatttagttcatcatagaaagtttgaaacactggctcaggagagtctttgtaagcttctcgaaccaagatatttactcraggatccagtctggccccgtcgattcctaaggtcacatgctcctctttttttctagcgaggatcaaggggattggttatgactagctctaaggggttacattgtccctgagtacaggaagggccattttttcctttctgaaggtgggatggatctttttcatttttttttttaatccaagtggcctaaatgacacaagaccagtgttcacatttatttccacacagtgctaatttatgacagttgtatttattttctgcc

SEQ ID NO: 921758 - DNA, 617 bp, Homo sapiens
ttgagtgctgccacttaaatcctgcagtcccgagatccggttataaccaatgcatttagatttttcatttcggtggcaacaatcttcattgtaagttctgtcctacagagaagtgtggtgatcaagctctttggagatactgggactcctctcacaaatgtatgtctcacagttatgatgaatggtgtatctcctggatcttcctcagttgagtatgttttaaaggaaaaatacactttatcattcaaatctttcaaagcttttgaatcactttatagcaaaccaatgaagatccagcatttcattctttcttttcttttttcttttttttttttttttgagacagagtttcactcttgttgcccaggggctggagtgcaatggtgcgatctcggctcaccgaaacctccacctcccggcttcaagtgattctcctgcctcagcctcmtgagtagctgggattacagacatgcaccactacacccagctaattttgtatttttagtagagaaggggtttctccatgttggccaggctggtctcgaactcccaacctcaggtgatcctcccacctcagcctcccaaaatgctgggattacaggtgtgagccaccgcac

SEQ ID NO: 921759 - DNA, 802 bp, Homo sapiens
atctgccctgctttttgaagtcaacactctctttcaagaccaaggacacccccagccacacccaggagctcttggggcctccagagaaccttctgcacttagatgctccccctgcaccttgcaggcagcccttgctcctggccagagtgcctgggagccgaggatccgcacagggtgggacaagagagtgccttgcaagaaggacagccctggctcaggcagggagccatcttggagagcagttgtaccagtgcccagttctgtgaattgcacactctccctctctttgttaagttaataataaacacaaagcaacaaccacaaaatccaaataaatgataaactccaaaaagagcagaattggactgtcatcttttccagatacctgttcaccacagcagaagggctgtgccaacactgcaccatctccaatccacgccatatgcctgtttctttacttagcgttgtttgggatgggaatccttcagagaatggaaagtgcctgaacgtttggcaaaccagacaaggacaccagccgaatgtgcatggggatatggtatgtccctaaacatgcgcgtgtggggcacrcgcatacacacacacacacacacacacacccagctttcttctctcccagcctgtttgtaactttgctcatcggttgttttttctatgtacagtaaccagaattaaaataagctgagtgttagaaaagcagaacaaatggagactgcttttgacagtggtgacacttttggtcaaatcatctagctgagattttggctaagagtttagtcagaca

SEQ ID NO: 921760 - DNA, 525 bp, Homo sapiens
atttatggcattaaatgcccataagagaaagcaggaaagatctaaaattgacaccctaacatcacaattaaaagaactagagaagcaagagcaaacacattcaaaagctagcagaaggcaagaaataactaagatcagagcagaactgaaggagatagagacacaaaaaaccctccaaaaaatcaatgaatccaggagctggttttttaaaaagatcaacaaaattgatagatggctagcaagactaataaagaggaaaagagagaagaatcaaatcgacacaataaaaaatgataaaggagatatcaccaccaatctcacagaaatacaaactaccatcagaaaatactataaacagctctackcaaataaactagaaaatctagaagaaatggataaattcctggacacatgcaccctcccaagactaaaccaggaagaaattgaatccctgaatagaccaataacaggctcttaaattgaggcaataattgatagcataccaataaaaaaaagtccaggacc

SEQ ID NO: 921761 - DNA, 576 bp, Homo sapiens
aactttcaacactaagatgaataggaatggtgagagaggacatccctgtcctgtgccagttttcaaagggaatgcttccagtttttgcccattcagtatgatattggctgtggttctgtcataaacagctcttattattttgagaaacattccttgaatacctaggtgattgagagtttttgcatgaagggctgttgaattttgtcaaaggccttttctgcatctattgagacaatcakgtggtttttgtcgttggttctgtttatatgatggatgacgtttattgatttgcatatgttgaaccagccttgcattccagggatgaagctgacttgattgtcaaggataaacattttgatttgctgctggatttggtttgccagtattttattgaggaattttgcatcaatgttcatcagggatattggtctaaaattctcttttgttgtgtttctgccaagctttggtatcgggatgatgctggcctcataaaatgagttagggaggattctgtctttttttattgattggaatagtatcagaagaaatgttaccacctcctctttgtacctctgg

SEQ ID NO: 921762 - DNA, 658 bp, Homo sapiens
cttgcattcatcaatctccctgatgctttatgacagttcccccataccagaaatcctgaggaagtctttcaagcatggcattaaacttctgatgccagggatgcatttctgggggggacatctcaactcaaagaattgttttataatttttattatggaaaatttcaaacacatgcaaaatagaataacataatgtgtcttcatataccaccatccaacttcgataatgaatgcaaggtccggtgcagtggctcacgcctgtaaccccagcactttgaaaggccgaggcacgaggattgcttgagcccaggcattcaagaccagtctgggcaacayagggagactggtctctacaaaagattaaaaaattagctgggcatggtggcatgcgtctgtggtcccagctactcaggaggctgaggtgggaggatcacttgagcctgagaggttgagactgcaatgagctatgattgtaccactgcactccagcctgggtaacagagtgagaccctatctcaaaaaaaaagttaatgcaaaaccaattattgtttcacctatactcccaccacacacttccctaatgccagaatattttgaagcaatctcagtcaccacaacatctcattcttaaatattttattatgcatttttaaaacag

SEQ ID NO: 921763 - DNA, 569 bp, Homo sapiens
ctggaagcccagacacccacgcccacccctgaattaccattagttctcaactcacctgacatcattccctttcagtgtttcctatgtttcttcttttttttataaagacagggtctcgccatatggcccaggctggtcttgaactcctgggctcaagtgatcctcctgtgtcccgaattggtgggttcctggtctcactgacttcaagaatgaaactgcggaccctcgcggtgagtgttacagctcttaaggtggcgcgtctggagtttgttccttctgatgttcrgatgtgttcggagttttttccttctggtgggttcgtggtgtcgctggctcagaagtgaagctgcagaccttggtggtgagtgttacagctcttaaggcggcgcatctggagttgtttgttcctcccagtgggctcgtggtctcactggcttcaggagtgaagctacagaccttcgcggtgagtatcacagctcataaaagcagtgtggacccaaagaatgaccagtagcaagatttattgcaaagagcaaaagaacaaagccgccacgtcgtggaaggggacc

SEQ ID NO: 921764 - DNA, 644 bp, Homo sapiens
gctggggggctgcaggtaacctactccacagagaggcagcctggatgccatgagagttgggggccttagatgcttcatgtatttggtttttttgagacagggtcttgctatcttgcccgggctggtcttaacctcctgtgctcaggcgatcctcgcaaagtgctgggattacacgtgtgagccactgcccccagccagatgctttatcttttattttattttttgaagtagggtctctgttgctcaggctggaaagcagtggcatgatcatagctcactgcagtctcgacctcctggtctcaagcgatcctccaacttcagcctcctgaatagctgggacttcaggcaccaggcacccatcaccatgtttggttaatttttgtatttttttttttttaagagatggggacttgctatgttgcccaggctggtcttgaccttccaggctcaagcgatcctcctatctcagcctcccaaagtgctggggattacasgtgtgagccactgcccccagccagatgccttattttattttattttattttctgaaatagaacctcactctgttgctcaggctggaatgtggtggcacaatcatacctcactgcagcctccacctcctgggctcaggcaatcctcccacc

SEQ ID NO: 921765 - DNA, 881 bp, Homo sapiens
atttcttgagcccaggacgtggaagctgcagtgagctatgatcacaccactgcactcccacctggacaacagagcaagaccctgtctcaaaaacaatgcaaaaagccacagaattcatatcatctaaaatcatccttgccttcaccttcctgaaatgctcccggccaagagcaatctcaggccaatagttctcacctgggggtgattctgctcccgccaaccagggaacactggacaatgtctggagacatttgtggtcctsacgccttgggaaggggtgagcggaggccagggatgctgctcgacccctgcagtgcccaggacagccccaccccagagaacagtccaaccccaaatatacacagtgtcccagggaagaaacttcttctaagggcagagaatgggctccaatcctaccctgggctgggcatggtggctcacacctgtcatcccagcactttgggaggctgaggcgggcagatcacttgcggtcaggagttcgagaccagtctggccaacatggtgaaaccccatctctactaaaaatacaaaaattagccgggcatgatggtgcacacctgtaatcccagccactcaggaggctgaggcaggagaattgcttgaacctgggaggcagaggttgcggtgagccgagatcacaccactgcactccagcctgggcgacagagccagaccctgtctcaaaaacaaacaaacaaaaaatcctgccccgctcccttgaggtacctatcgtgggcccaggaagggactgagagtccagggcaggcaccaaccatcacacagaggcccccatgttgtcgcgtggctgacacttctctgggccaagtcattcccggagcttgaggaacttggctgagggt

SEQ ID NO: 921766 - DNA, 730 bp, Homo sapiens
ctcctgcctcagcctcccgagtagctgggattacaggcacgtgccaccatgccaggctaatttttgtatttttagtagagacagggtttcactatgttggccaggctggtcttgaactcctgacctcgtgatctgcccgtctcggcctcccaaagtgctgggattacaggtgtgagccactgagcccggccttatttatttattttaattcaatctggaatcagaaagyggtggattctggcacatggtccttgtgccctccccactcacccctggtctggtcccctgttccccatggtcctataccctaagcacgacccccacagactaaggccagccccctgccgtacctgtgcctctccccaaacccctttagatggggagggaaaaggaggagcggggaggggtcctgcccccatgggctttacccttccctgcggtctctctccccaacacatttgttaaaatcaaacctgaataaaactacaagtttaatatggaaaaaaacaataatagtcgaggcagacctgggccttttagtctgtactcttgcctctgtgagccttgactctgaaaaggggatagtaaaaggatgtctcttggggtggctggggggcttctgtggggtccaggcagcacaggacctaaccagcagggtgccaagcagggggatgcctgggctgcaggcattgactcgcctgtgtcccacaacccctcttggagctggagc

SEQ ID NO: 921767 - DNA, 780 bp, Homo sapiens
ctgggagacgggacccttctgcctaggagctggcttggctggggtccagtgagaaatgaggcacaagaaggctgtcctccccagtgtcatgcagcagggggcgcaggcctcacttggcaccagtgctgtgtggcctccctggtctaaggagaggcttgggcccaactgctcccacgagaacccaccagaaccctgtctccagacccattcttctcagttgggacaggggtcattctgatgggcaggggtgggtggggtgaggctatggagtgtgccagagctctgggatgtgggggagctctgggatgtgggggagctctgggatggggtagggtgcacatggaccagaattcacagccctcactccctgagtgcagagctggccctgactctgcaggactgcagacctggctccaccactgtgctacagacgtggtggctcagcctcctgtggctgcggttagatgctcagccgggcggggtcaagagaggggtgtccgtggtgagaccagggctcagagaggagcatgctgacatggatccttggcagcatctaggcggagcactggaaggagctccagactggagcccagggcccttktcagtttcctgagcatggctgtgagccagttccttcccggtgtcagggcaggggcctggaggaggtggtcttgaagtgcatgccacagatcttccttcccagggagggcgagctggcaccatggtgtggcacagaccccgcgtcccttcagattctgccatgccaggctgtttggcctc

SEQ ID NO: 921768 - DNA, 784 bp, Homo sapiens
atttttttaaaaaaatcaaaattaatgcaaataaaatatccagatggcccatcaatgatagactggattaagaaaatgtggtacatatacacacaccatggaatactatgcagccataaaaaggaatgagatcatgtcctttgcatggtcatggatggtgttggaggccattatcctcagcaaactaacacaggaacaaaaaaccaaacactgcacattctcacttaacagtgggagctgaataatgrtgagaatacatggatacagggaggggaacaacacacactggggcctgttggaagagggagggagggagagcattaggaagagtagctaatggatgctgggtttaatacctagcagcaaactaccacggcacatgcttacctatgttgcaaacctgcacctgtatccctgaacttaaaagttgcagaaaagaaaaaagtctgggatgagccgggcacggtggctcacgcctgtaatcccagcactttgggaggctgaggtgggcagatcctgacctgaggtcaggagttcgagaccagcctggccaacatgatgaaacactgtctctactaaaaatgcaaaaattagccaggcgtggtggtggatgcctgtaatcccagctacttgggaagctgatgcaggagaatcgtttgaaccctggaggtggaggttgcagtgagctgagctcatgccactgcactccagcttgggagacagagtaagaccctgtcaaaaaaaaaaaaaaaaaaaaaaaaatccaggatgaacacaacatcaa

SEQ ID NO: 921769 - DNA, 571 bp, Homo sapiens
tgtgcaccaccatgcccggctaatttttgtatttttagtagagacggggtttcaccacattggccaggttggtcttaaactcctgaccttgtgatccacccacctcgataccccaaagtgctgggattacaggcgtgagccaccgcgyccaggccactctgtatttttattgttctccaaagagaaaagtctctggagaaaagtctccaaagtcatctctcggtcaggcaccagcaagatgctgctgagccgtccacttctccctcagctccccaaagtccctccagtccatgccaattcacagagaaggcagagtggtcccagccacctgcagacataaatgttgatggcgggacatcaggccaagtgctggaagcagccaggcacggaacagtccccactcaggctggcaagaatcacccttgccgggaggtgagtggacgccaggtgtggggacctcctccccaggagagttccaagccaaacggtccctgcgtccatcttgtttcatgcacgccaccaccaagtgggagcatgtctgtggcagcactgggaacaaaccccaggtgca

SEQ ID NO: 921770 - DNA, 571 bp, Homo sapiens
tgtgcaccaccatgcccggctaatttttgtatttttagtagagacggggtttcaccacattggccaggttggtcttaaactcctgaccttgtgatccacccacctcgataccccaaagtgctgggattacaggcgtgagccaccgcgtccaggccactctgtatttttattgttctccaaagagaaaagtctctggagaaaagtctccaaagtcatctctcggtcaggcaccagcaagatgctgctgagcygtccacttctccctcagctccccaaagtccctccagtccatgccaattcacagagaaggcagagtggtcccagccacctgcagacataaatgttgatggcgggacatcaggccaagtgctggaagcagccaggcacggaacagtccccactcaggctggcaagaatcacccttgccgggaggtgagtggacgccaggtgtggggacctcctccccaggagagttccaagccaaacggtccctgcgtccatcttgtttcatgcacgccaccaccaagtgggagcatgtctgtggcagcactgggaacaaaccccaggtgca

SEQ ID NO: 921771 - DNA, 578 bp, Homo sapiens
tgacagagtgagagttcatctcaaaaagttttaaaaaagaaaacaattttctttaaaaatttcaataagatgcaaagaacacagataactaaaaaatttttaggaaacaacacagaaacaaaattagaaacaatacataagtaggccaagcatggtggcccacacctataataataaaactttgggatgctgaggcaggagcattacttgggaccaggagttcaagaccaacctggccaacacagcaaaatgacatctcatgttttttatacatatatatatatatatatatatatatakagagagagagagagagagagagagagagaaataaaaaccataaaaatgaccacacaaaaatcctgcagttaaggtaaacaatggcagaactgaagaagtgtagtagaaaattttaacaggagactcaattataaaaaagaaaattcaacaaactcaaaaacttgtcatttgaaagtaatcaatcataaagtgaacaaattgacacattttagaattttcagaagaagacagagaaaaagaataaaggagattgaaagacataatgtctgaaaactttc

SEQ ID NO: 921772 - DNA, 584 bp, Homo sapiens
gttctgatcgcattactctaaattaaataatttatccattggctctagaataaaaattccttgatggtagggtccatgactgcttcacctgttcttctcatggccaaataaaatggaaacaatttgttaacctatcagtttgggcctccagacctcctacttgttctccacccaaatatcaggaaataggagcaactcctatttggacaccaaataaggagataccttctgtgatgggagaaagaagccctggattactcattcttttatgagatgggaggaagattggacttgtcagcctgacccttgtctgcacagtacatccctaaatgtctcaaggactcctaggtgctagtgagagggtctgcagtggccctggrctgatgcttcaacagttattcaaacagaggagactcaggctgactctgtggagccagaataaaaaatagaacaacccctaattctcgatccagatctgatattacctatatatgttgagctaactgttgggttcaaggacaagaatacccttctccagtaacacaattcacatacaggagatgtagttatctttatctctctgg

SEQ ID NO: 921773 - DNA, 565 bp, Homo sapiens
aatttagaaaattaagggtcaataaggcttgtgccaatagtgttccagggtctttacccatactccctcttttttgttttttgagcatatttttaagagtggaatgggcacattctactatggcttgtccttggggattatatgggatgcctgtgaaatgttggatattccacgtgtgrcaaaactgttgaaattgtgagctggcataagctggaccattatcagttttaattgttgtgggccaccccataaacacaaaagttaaaagatgtttaatgacatattgagtggactttccgggaagggcgtgtgcactaattagacctgttgaaggaggggacatgcctgtaagctggcaagctgagcattgcaggataatttgtttagccagcctctgggtaagttgaaattgtttagataagtttttctaattttggtggaagaattgatgtgatttgctggcttggttaagcagtgatgttataacaggaaggtctgcttgataattgccataagttaatgggcaaggcagtgagctgtgggatcgaatgtgtgcccataaaaa

SEQ ID NO: 921774 - DNA, 565 bp, Homo sapiens
aatttagaaaattaagggtcaataaggcttgtgccaatagtgttccagggtctttacccatactccctcttttttgttttttgagcatatttttaagagtggaatgggcacattctactatggcttgtccttggggattatatgggatgcctgtgaaatgttggatattccacgtgtggcaaaactgttgaaattgtgagctggcataagctggaccattatcagttttaattgttgtgggccaccccataaacacaaaagttaaaagatgtttaatgacatattgagtggactttccgggaagggcgtgtgcactaattagacctgttgaaggaggggacatgcctgtaagctggcaakctgagcattgcaggataatttgtttagccagcctctgggtaagttgaaattgtttagataagtttttctaattttggtggaagaattgatgtgatttgctggcttggttaagcagtgatgttataacaggaaggtctgcttgataattgccataagttaatgggcaaggcagtgagctgtgggatcgaatgtgtgcccataaaaa

SEQ ID NO: 921775 - DNA, 565 bp, Homo sapiens
aatttagaaaattaagggtcaataaggcttgtgccaatagtgttccagggtctttacccatactccctcttttttgttttttgagcatatttttaagagtggaatgggcacattctactatggcttgtccttggggattatatgggatgcctgtgaaatgttggatattccacgtgtggcaaaactgttgaaattgtgagctggcataagctggaccattatcagttttaattgttgtgggccaccccataaacacaaaagttaaaagatgtttaatgacatattgagtggactttccgggaagggcgtgtgcactaattagacctgttgaaggaggggacatgcctgtaagctggcaagctgrgcattgcaggataatttgtttagccagcctctgggtaagttgaaattgtttagataagtttttctaattttggtggaagaattgatgtgatttgctggcttggttaagcagtgatgttataacaggaaggtctgcttgataattgccataagttaatgggcaaggcagtgagctgtgggatcgaatgtgtgcccataaaaa

SEQ ID NO: 921776 - DNA, 478 bp, Homo sapiens
aacagcatggtggtaaaggatgtggaaggcatacttggaatcagtatagatattgacagctagtccctttgcaagaatgagggcttaagttaaggcaatgagttctgcttgttgagaggtagtggaagggggcagggctgtagcctcaatgatagatgtggaagacactatagcataacctgcctttgccrgtgattggcaattggacctggaagaactaccatcagtaaaccaagtgtggtctgggtggggaacaggaaagggggaaatagattttgaaagctatgggaactgtagagagtaagtggagcatagcttgtgattttgagggtgcctaaaagtattaaagcagtggcagcttctgcacatagacatgagggctaccccagaattgtgaggtcaagttgttttgatagaaaggcaacaggtcatgggcctggctcctgtgtgaggactccagcagcacagccttgtattt

SEQ ID NO: 921777 - DNA, 391 bp, Homo sapiens
ccttttctcaactctttttttttttttttttttgagacagagtcttgctctgtcaccaggctgggccaggtcgaagtgcaatggtgcaaacttggttcacagcaacttctgcctcccgggttttcaagtgattctcctgcctcagcctcctgagtggctgggattacaggcgtgtgccaccactcccagctaatttttgtatttttagtagagacagggtttcatcatgtyggccaggatggtctcgatcccttgacctcatgttctgcctgccttagcctcccaaaatgctgggattacaggggtgagccaccgtgcctggtctctcaactctttatgtaactggtttcctcattgattttacattactgggcaggctaatagctcccgt

SEQ ID NO: 921778 - DNA, 673 bp, Homo sapiens
ctaatgccttttctcaactctttttttttttttttttttgagacagagtcttgctctgtcaccaggctgggccaggtcgaagtgcaatggtgcaaacttggttcacagcaacttctgcctcccgggttttcaagtgattctcctgcctcagcctcctgagtggctgggattacaggcgtgtgccaccactcccagctaatttttgtatttttagtagagacagggtttcatcatgtcggccaggatggtctcgatcccttgacctcatgttctgcctgcctyagcctcccaaaatgctgggattacaggggtgagccaccgtgcctggtctctcaactctttatgtaactggtttcctcattgattttacattactgggcaggctaatagctcccgttctaatgctacttgcttaagacagggttgcattgctgtagtgtatccctcatcttttttcctatttatttgaggaggaggcttaggtaaaacctctgtttcttctttgttattttggggctgagggagaaggaggtggtaaggcaggtgatgattcctcctttttcccctttttaggctcttctgtgtataatgggaccaaggccaccctcactagagcccataatattaaagatgatactgggatgcgttacccttgcacatggtgttgcttaag

SEQ ID NO: 921779 - DNA, 625 bp, Homo sapiens
tactgggcaggctaatagctcccgttctaatgctacttgcttaagacagggttgcattgctgtagtgtatccctcatcttttttcctatttatttgaggaggaggcttaggtaaaacctctgtttcttctttgttattttggggctgagggagaaggaggtggtaaggcaggtgatgattcctcctttttcccctttttaggctcttctgtgtataatgggaccaaggccaccctcactagagcccataatattaaagatgatactgggatgcgttacccttgcacatggtgttgcttaagatttctccccacttgttcccagagctctatgtccagcatgccttcttttgggaaccgtgggttatgggttgcaacagtttgcattaggtcccttaattgagccttcaaaactgaggctccactagctttaagcagctatttcaatgcttttatatactatttccgctgagctgrtaactgttgtcccatgatgaaacctcagcctgaacaatccccgccaaacttggaaatctcatgtgggcaccaatgacttaccgattactcactgactgtgcagttccttttttaccattgtttgggggtccgtcgtgctccctgcacagc

SEQ ID NO: 921780 - DNA, 712 bp, Homo sapiens
cttttcactatggcttgtccttgagaattatatgagataccagtaatgtgtttaatattccatatagagaaaaatgtagcttgagctttgctctagcttggggcattgtgcattttaactgaagctggaatgcccatgactgtgaagcattgcaggagatgccatttaacataggcagaagattcccttatttggcatgtagcccaaataaagtgagaaaatgtatctacacatacatgtacataagccaatttaccaaaagaaggaacatgagtgacatccatttgccgaagagaattaggtwccaatcttcaaagattaactcctgtaaaagatgtagaatgcaccatttggcaagttggacattgttgaataatggctttatcctctttccaagtaatactgtacctgtgtttgagaccagagtcattaacatgggttaaattgtgaaagtgtctagcattagatattgcagtagcaactaggcaattagccatctgattccctgcagtcaaaggtcctggaagaggtgtatgagctctaatatgagtaatgtaaaaaggatgcattctattcctaactgctgtttgcaattgggtaaatacagtcattagttgttcatctgtatgaaatcataactgagcattttcaattaattgtgtggaatgaaccacatatgaagaatcagaaattacattgacaggcatctcaa

SEQ ID NO: 921781 - DNA, 712 bp, Homo sapiens
cttttcactatggcttgtccttgagaattatatgagataccagtaatgtgtttaatattccatatagagaaaaatgtagcttgagctttgctctagcttggggcattgtgcattttaactgaagctggaatgcccatgactgtgaagcattgcaggagatgccatttaacataggcagaagattcccttatttggcatgtagcccaaataaagtgagaaaatgtatctacacatacatgtacataagccaatttaccaaaagaaggaacatgagtgacatccatttgccgaagagaattaggtaccaatcttcaargattaactcctgtaaaagatgtagaatgcaccatttggcaagttggacattgttgaataatggctttatcctctttccaagtaatactgtacctgtgtttgagaccagagtcattaacatgggttaaattgtgaaagtgtctagcattagatattgcagtagcaactaggcaattagccatctgattccctgcagtcaaaggtcctggaagaggtgtatgagctctaatatgagtaatgtaaaaaggatgcattctattcctaactgctgtttgcaattgggtaaatacagtcattagttgttcatctgtatgaaatcataactgagcattttcaattaattgtgtggaatgaaccacatatgaagaatcagaaattacattgacaggcatctcaa

SEQ ID NO: 921782 - DNA, 553 bp, Homo sapiens
tggagtcccgttcactcagtgctcagtgttgcccaggctggagtgcagtggagtgatctcggctagctacaacctccacctcccagccgcctgccttggcctcccaaagtgccgagattgcagcctctgcccggctgccaccccgtctgggaagtgaggagtgtctctgcctggccacccatcatctgggatgtgaggagcccctctgcccggctgcccrgtctgggaagtgaggagcgcctcctcccagccgccatcccgtctaggaagtgaggagcatctctgcccggccgcccatcatgagatgtggggagtgcttctgccccgccgccccgtctgggaggtgaggagcatctctgcccggccgccccgtctgagaagtgaggagctccttcgcccggcagccgccccatctgagaagtgaggagcccctctgcccggcagccgccccttctgagaagtgaggagcctctccgcctggcagccaccccatctgggaagtaggaagcgtctccgcccggcagccgccccgtccgggagggaggtggggggg

SEQ ID NO: 921783 - DNA, 553 bp, Homo sapiens
tggagtcccgttcactcagtgctcagtgttgcccaggctggagtgcagtggagtgatctcggctagctacaacctccacctcccagccgcctgccttggcctcccaaagtgccgagattgcagcctctgcccggctgccaccccgtctgggaagtgaggagtgtctctgcctggccacccatcatctgggatgtgaggagcccctctgcccggctgcccagtctgggaagtgaggagcgcctcctcccagccgccatcccgtctaggaagtgaggagcatctctgcccggccgcccatcatgagatgtggggagtgcttctgccccgccrccccgtctgggaggtgaggagcatctctgcccggccgccccgtctgagaagtgaggagctccttcgcccggcagccgccccatctgagaagtgaggagcccctctgcccggcagccgccccttctgagaagtgaggagcctctccgcctggcagccaccccatctgggaagtaggaagcgtctccgcccggcagccgccccgtccgggagggaggtggggggg

SEQ ID NO: 921784 - DNA, 553 bp, Homo sapiens
tggagtcccgttcactcagtgctcagtgttgcccaggctggagtgcagtggagtgatctcggctagctacaacctccacctcccagccgcctgccttggcctcccaaagtgccgagattgcagcctctgcccggctgccaccccgtctgggaagtgaggagtgtctctgcctggccacccatcatctgggatgtgaggagcccctctgcccggctgcccagtctgggaagtgaggagcgcctcctcccagccgccatcccgtctaggaagtgaggagcatctctgcccggccgcccatcatgagatgtggggagtgcttctgccccgccgccccgtctgggaggtgaggagcatctctgcccggccgccccgtctgagaagtgaggagcyccttcgcccggcagccgccccatctgagaagtgaggagcccctctgcccggcagccgccccttctgagaagtgaggagcctctccgcctggcagccaccccatctgggaagtaggaagcgtctccgcccggcagccgccccgtccgggagggaggtggggggg

SEQ ID NO: 921785 - DNA, 772 bp, Homo sapiens
aatcagctcaacagcaacagtatataaaagtattgaaacaactgcttaaagctagtgaagcctcggtttcaaaggctcaattaagggccctaatgcaaactgttattttctgtaaccaataattcctagaagaaggcacactagacctagagctctgggaacaagtgggaagaaatcttaaatgacattatgcacaaggacaatgagtcccagtagcatctttaatgttctttaatgttatgggccttaagttaggactgctttggccccactctacacagaagagcataaaatgggaagggaggaagaatcatcacctaccttactatctcctcctctctcagccccgccattaccgagtraaggtgccacagaggagacatagattttccctgagcccctcccccagtaaattgagaaaaagacaagggatacactacagttatgggaccctgtcttaggcaagcagcattagagggggagctcttggcttgcctgatgatggaagatcaacaaggcaatcatgtacatgaacccattgctttcaagacttataaagaaataagaaagagcattagagaaaatggagccactagcccatttatgaaaggattaattgaggccatagcatataacttccacatgaccccatgggactggttagtgctagctaaaacaacttcagaggccagtcaatacctcctctggagggcataacatgatgagttatgagaacaacaagctaaccagaatcaattggccaggcaaaaca

SEQ ID NO: 921786 - DNA, 674 bp, Homo sapiens
ctatgtaaatgtacaacaacaattaaatttttcccccagcctatgcacagagtcagtgcactcacagggcctgggaccaaattctcaaaggtggagttcaacagtgatcttttctaaatgtatgacaagggccccaggagccatttgttgaatttatcaatcatttaacttaggtcatagtgaaacgtgcccattccacccttaagaatacgcttaaaatcaaaaaagggtgaatatgagtagggaccttacaacactactagcacaagccttatttactcttaatttcttaaatttagatgatacatttcaatgagccatagataagcactttgcaaaaacctctcaaaatagaaagccttcagttttatggaaaggtgtaaatagtaatgtacggtgtggtccaaatgatttgctaacgtgggaaaggggatatgcttgtgttcacagccccttaggtcctctttggattccagcatgatgcatcaaacyttaccacggcatgactagggcccaacctgctaccagaaataaaggaaatgacgatgcagaacccacaaccctggatgatgtggcttccttggatgacacaggccccagacattacctggggaatgctgaagaacacaactcaggaggctgaacaaatctgcttcagacacagataccattca

SEQ ID NO: 921787 - DNA, 654 bp, Homo sapiens
ctgtgaaaattcccgcataaccattgaagattgcaacactctgaaccccgccactttgctcccagtatcagagagcgcagttgaacataactgtgtagaggtgttggactcagtttattctagcaggcccaacctccaagaccatccttaaacatcagtagactgggtacatggatgggagcagcttcaccaacccttgcaaagtgattcagaagactacaagccctgatccagtcatacccagaagctgactgatccayacatggccaaagcatgaggaaactcattttgggactcattttccttaaaatttggacttgtacagtaaggacttcaactgaccttcctcagactgaggactgttccctacatatacatcaagtcactgaggtaagacaaaaggttactacagccctattattttatggttattgtaagtgtaccgggactctaagaggaacttatttgtataatgctatacagggtatgtagcccaggaagtgaccagcctgatgtgtgctataacccatctaagccccctatgactaccatttttaaaataagattaaagactggcaacttctgggttctgaaaaacctcaattattagacaatactgtatagcacgggtgaggaaggacttcacccttcctg

SEQ ID NO: 921788 - DNA, 648 bp, Homo sapiens
ctgtgaaaattcccgcataaccattgaagattgcaacactctgaaccccgccactttgctcccagtatcagagagcgcagttgaacataactgtgtagaggtgttggactcagtttattctagcaggcccaacctccaagaccatccttaaacatcagtagactgggtacatggatgggagcagcttcaccaacccttgcaaagtgattcagaagactacaagccctgatccagtcatacccagaagctgactgatccacrcatggccaaagcatgaggaaactcattttgggactcattttccttaaaatttggacttgtacagtaaggacttcaactgaccttcctcagactgaggactgttccctacatatacatcaagtcactgaggtaagacaaaaggttactacagccctattattttatggttattgtaagtgtaccgggactctaagaggaacttatttgtataatgctatacagggtatgtagcccaggaagtgaccagcctgatgtgtgctataacccatctaagccccctatgactaccatttttaaaataagattaaagactggcaacttctgggttctgaaaaacctcaattattagacaatactgtatagcacgggtgaggaaggacttcaccc

SEQ ID NO: 921789 - DNA, 750 bp, Homo sapiens
aagtttaacatgaccaattgctgtctgcacatagatgaccaagggcaaatagttgaagatataattaaaataacaaagctggcacatgttcccatgcaggtgtggcatgggtttaatcctaggtccatgtttggaaaatggtttccagcactaggaggatttaaaactactataataggaattataatagtaatagaaacctgyatgttgcttccctgtgtgctgcctttgctccttcaagtaatgaaaagttttgttactactttagtgcatcaaaatgcttcagcacaagtgtactatatgaatcactatcaatctgtcttgcaagaagacatgggtagtgaggatgaaagtgagaactcccactaatgagtgaggttctcaaagtgggggaataagggaggagaccacccctcatattgtcttatgcccaatttctgcctccaaagaaagaagaagtaaaaactaaaaagcagaaatgaaacccaaaggcaggcagcccagcaccatgccctgtgcctggtagttaaagatcgacccctgacctaaccaattatgttatctatagattccagacattgtatggaaaaacattgtgaaaatccctgtcctgttctgttctgttctaataaccggtacatgcagcccacagtcaggtaccccctgctggctcagtcgatcacgaccctctcacgtggacccctttagagttgtaagcccttaaaaggaacagtaattgctcgctcgggg

SEQ ID NO: 921790 - DNA, 620 bp, Homo sapiens
atcacttgaacccgggagacggaggttgcagagagactagaccccactactgcactccggcctaggtgacacagtaagactccatctcaaaaaaagaaaaaagaaaaaaaaaaactagccaggcatggtggcatgcacctgtagtcccagctactccagagactgagacaacaggataacttgaaccggggaatttgaggctgcagtgagctgtgactgtgccactgcactctagcctgggggaygcagtgagaccctgtctcaaaaaaaacaaacaaggtagcagggcacagtggctcacgcctgtaatcccagcactgtgggaggctgaggcgggcggatcacttgaggtcaagagatcaaggccatcctggccagcatggtgaaaccccatctctactaaaactacgaaaattagctgggtgtggtggcatgcaccttgtagtcccagctactcaggaggctgaggcaggagaatcgcttgtactcgggaagtggaggttgcagtgagctgagattatgccactgcactccagcctgggcgacacagcgaaacaaggtaaacaaggtaaacatgacctggcacagagtggtgtgcctgctctaccacagaactggtg

SEQ ID NO: 921791 - DNA, 500 bp, Homo sapiens
ctagagcctggtttaaagcagggtttcttaagctcaactctactgacgtagggctggagaattcttcctttgcagcggggggaagctgtcctatgcattgtaggatgcttggcaaccatccctggcccctatcccctcgatgccatgagcattctytcccaaagttgcgataacaactgtctccgacattgccaagccaaggaaggggtctgcgccatccccggctgacagcgctgatgggcgcgtgcccctccttcaggagccccgatgcctgtggctctcaactattaaatcaagttccagcaaagaactggaaacctttaagctgtgtatggaaccattgtgtgtagcactggaaactgtcccttttctaagtcactgtaaatggtgtttttttttggagacagggtctggctctgtctcccaggctggagtgcagtgctacaatcagggctccctgcagccctgacctcctcaggtgcaagcgataaaggttcctc

SEQ ID NO: 921792 - DNA, 766 bp, Homo sapiens
cagtgtggtgcttgcttaaggagaggcacatataccaatggaatataatagggagcccagaaataaacactcacatacacattcatgtgagagtccacagtaggccaagaccatctcactgggaaaggacagtcttttcaacacatgatgctgggaaaactggacttacacatgcaaaataatatggttggggcctttatcttataacatatayaaaaattaactcagaatgtatcacagaatacatgtaagacctacaacgataaaattctttgaaaaaaacatagacgcatatcttcatgacatgaaatttggcaatgatttcttggggatgactccaaaagcacaagtaacaaaggaaaaaacagataaactggactccctcaaaactgaaaacttcatcaaaggccattctggaaaaagtaaacagtcaactcacagaatggaagataatttgcagatcagatatctgataagagattattatctagaatagagaccttctacaatccaacaacaatggcacaaatactctcccgatttaacagtgaccaaataacttcaacagacatgtctccagaacagatataaaagtggccaataagcacatgaaaatatactcaacttcagagtcattagggaaatgcagaatcaaagccatagtgagatagcacttcactctccctaggatggctgttattttaagatgcaaaatcacaagtgttgtgaggatgtagagatactgtaacccttgaatgttgctgtt

SEQ ID NO: 921793 - DNA, 754 bp, Homo sapiens
cagtcttcatcttagggcatcgctcttcctcacaccacgaatctgaacatgcctctctcttgcttacaaatgtctaaggtccccactgcctgctggagagaaaacacactcctttgcttagcccacaattctccatttcacttgacccctgcccacctctccaacctaactrgcttacttcctagtctacctgaggctgcaatcacactgaggaactcacaattccaaacatacaagaggctgcctcttaacacagcacttagacacgtgctgttccacctcccttcagactatctttcagccttctgccagcagtaaaacttataaattttttaaataatttcaatgtagttttcccgccttcaaataaacatgtctgccctcatggtttcggtaacgagactcttttcttgcctaaggcttccggtgttatcattaccatgtccacataaccccatctgttctccattgggttctcagccctggactctgagcttctggaagcagaatggagcctgatttgtctctgagactccaatttccatccaaagatacagcacataggaggctccaaggatcgtgaatcacatgaacaagtgatattcttactctctgcagacctggaaagctggcagagtcattccacgatgaaacatttgtagagtcataggccttgttagtctcatctccacggggacacatatcaacatatcatctttcataatataaatatacagtcggtcctccatatctg

SEQ ID NO: 921794 - DNA, 547 bp, Homo sapiens
aaaaatacaaaaattagccaggcatgatggtgcgtgcctgtaatcccagctacttgggagactgaggcaggagaattgcttgaacctgggaggcagaggttgaagtgagctgagatcatactgctgcactccagcctgggcaacaagagcgaaactccatctcaaaaacaacaacaacaacaacaacaacaacaaaaagacagagagagaggtattacaaaaattgcatctgtgatcctttgttaaacctttcgtgcattggtttgagatttatttaattttttaattttcttttcctctaaccagtggtattccttccctcctatstgacactttctctaatgtgctgggtagactgaaggcagacatgtggacagaggtcagcctcaacgctgccatctgttcctccctgctcatctgtgaaatgacagacccctgccagctcctagagactgagatgtccctggaggggacctttggctgcaggcggggaggccctctcttgcctaatgcaccctcagcctgggtgtgctctgggctcccactt

SEQ ID NO: 921795 - DNA, 600 bp, Homo sapiens
aaggggccaaggtacagctcaggccatggcttcagtgagtgcaagccccaagccttagcagcttccatgtggttggtgttgagcctgtgggtacacagaagtcaagaattgaggtttgggaacctctcccttgatttcagaggatgtataaaaacatctggatatccaggcagaagtttgctgtaggggtgaggccctcatagagaacttctgctagggcagtgtggaagagaaatgtggggtcagagcccccagacagagtccctactggggcactgcttagtggggctctgagaagagggccactgtcctccaaaccccagaatggtagatccagtgacagctcacaccattcgcctggaaaagctgcagacactcaacagcagcctgtgaaagccgccaggtgrgaggctgtgccctacaaagctacaaaggaagagctgcctaagaccatgggaacccacctcttgcatcagcatgacctggatgtgagacatggagtcaaaagagatcattttggagctttaagatttgactgccccactagatttcagacttgcatggggcctgagcctttcttttggcaaatttatcccattt

SEQ ID NO: 921796 - DNA, 568 bp, Homo sapiens
cttcctttttctgaaggtgaaccgggtcttttctgtcctttttctaagtagcttaaataacacatggtcaataggcacaattttcacaggcctctaactcatgacccactaatcccctagacccccgttggaaaaaaggagaacgtgtaaccctggagatcgatgggtcagggctaaacccccaagttgcctttttagtttgaggggaggtacacaggcactctcccaaaccagtgtttcaaactttttatgatgagccgaatctgccaacaccagagcttccaaaaaggacaaaagaacttgtttctccagctagcrgaaagtgtagctcatttcctcaatgttactttctgttatgtatgtgagggaaccactatgggagactgatggccttgggaagctagagagttggtgcccactgatccagttcctgacccaattccagttcagaaggcccaaattagcaacttctgggtcctaaaaacttcaattattggacaatactgtgtagctagagaaggaaaagacttcaccattcctgtaggaaagctcgattgtctagggcaca

SEQ ID NO: 921797 - DNA, 588 bp, Homo sapiens
gaagagaagaagagaaaagagaacaggccacagaacccgtctgcggcccgcaaagcttgcaggatttaccatcgggctttctacagaaaagtcagccaacctctactctattttatttacgtatatatttttttgagacagggtcttgctctgttgcccaggctggaatgcagtggcgcgatcacagctcactgcagccttgacctcccagctcaagtgatcctcctgcctcagcctcccgggtagctgggacgacaggcgtgcggcaccatgcccaactaatttttaaattttgtattctgtaaagaagggggtctcgctttgtcgcccaggctggtcttgaactcctggactcaagtgatcctcctgcctcagcctcccaaagtgctgggattacaggcrtgggccactttttcccactggcaacctctactctacagccatcactgccaacccaggacaattctgcccctgatcccagtatgtttagcaatgtctggagactttctgaggtgttacgactgtggggctggaggtgtcactgacatccatcgggaagaggctagggtggcctctgagcatcctata

SEQ ID NO: 921798 - DNA, 606 bp, Homo sapiens
  misc_feature 599, 600, 601, 602, 603, 604, 605, 606: n = A,T,C or G
taggaagaaagagtttggcttcctcagctaaatataattttcttctgacacaaaagctcagagtaggtaggtgccagggtgaatatggccccagaccattctgcatttttttttttttgcccctaagtgatcctactttgattcctctgaactgcgagggcatggagtgacagtcctggaggtcttccatgtggtacaactgccctgtcaatgtcctgatgaggggacagagaagagaagcaatgctgccaagacggctagcccctgcagcttcatgggatgagaggaatggaggtggagcagattggacttataaatagctggcctttgtccttggaagtgggtagactcagagatggcttctcaggcactttggaattgaggtgctgagaatcaactcagcagtggtttktaagactgcacctccctccacttactccttcgtttggggaagggaagaagagtatctaaaccacaccagcagaaatgcaaatacttggctttcctggaggaaagggaattagctgctggtggctgtttccacagcaaacacagtgaggtcacagcccctggccagcccagcacttctgtggtcgctnnnnnnnn

SEQ ID NO: 921799 - DNA, 606 bp, Homo sapiens
  misc_feature 599, 600, 601, 602, 603, 604, 605, 606: n = A,T,C or G
taggaagaaagagtttggcttcctcagctaaatataattttcttctgacacaaaagctcagagtaggtaggtgccagggtgaatatggccccagaccattctgcatttttttttttttgcccctaagtgatcctactttgattcctctgaactgcgagggcatggagtgacagtcctggaggtcttccatgtggtacaactgccctgtcaatgtcctgatgaggggacagagaagagaagcaatgctgccaagacggctagcccctgcagcttcatgggatgagaggaatggaggtggagcagattggacttataaatagctggcctttgtccttggaagtgggtagactcagagatggcttctcaggcactttggaattgaggtgctgagaatcaactcagcagtggttttkaagactgcacctccctccacttactccttcgtttggggaagggaagaagagtatctaaaccacaccagcagaaatgcaaatacttggctttcctggaggaaagggaattagctgctggtggctgtttccacagcaaacacagtgaggtcacagcccctggccagcccagcacttctgtggtcgctnnnnnnnn

SEQ ID NO: 921800 - DNA, 599 bp, Homo sapiens
ctgagcatagttcatcaggttatctctaggcatataatgaaaataataatcatagtaaaaaatagcccacattattgaatgactgctaagagcatggtagaatttcactttgtacatcacatgtattaactatgtagttccccaccaaaaccatgtaaggtagatactagcactatactaagtttatatatgacacaatagcaatgtgggtaactttccctaactcacgaagttaaaaggggcagagctgtgatcaaatctcaggcttcctggctccagagtcttccctgttagttcaactgattgcttcctatgagaggtagaatataataatctctgattgtcaacccaccaaatatccttacaaagaagacatttttattattgcaattttatagaaaagcaaagtgagcctcagagaggcaaagtgacttycccaaggagacagagatagcaaaaggcagatgtaggttttgaaagtactgtgatgtaactccaagcctgttgcttttttttttttttttgagaccgagtcttactctgttgcccaggctggagtgcagtcacgtgatctcagctctctgcaagctctgcttcct

SEQ ID NO: 921801 - DNA, 599 bp, Homo sapiens
ctgagcatagttcatcaggttatctctaggcatataatgaaaataataatcatagtaaaaaatagcccacattattgaatgactgctaagagcatggtagaatttcactttgtacatcacatgtattaactatgtagttccccaccaaaaccatgtaaggtagatactagcactatactaagtttatatatgacacaatagcaatgtgggtaactttccctaactcacgaagttaaaaggggcagagctgtgatcaaatctcaggcttcctggctccagagtcttccctgttagttcaactgattgcttcctatgagaggtagaatataataatctctgattgtcaacccaccaaatatccttacaaagaagacatttttattattgcaattttatagaaaagcaaagtgagcctcagagaggcaaagtgacttccccaaggagacagagatagcaaraggcagatgtaggttttgaaagtactgtgatgtaactccaagcctgttgcttttttttttttttttgagaccgagtcttactctgttgcccaggctggagtgcagtcacgtgatctcagctctctgcaagctctgcttcct

SEQ ID NO: 921802 - DNA, 661 bp, Homo sapiens
ggggaactctgtgaccatctggtgtcaggggaccctggaggctcgggagtaccgtctggataaagaggaaagcccagcaccctgggacagacagaacccactggagcccaagaacaaggccagattctccatcccatccatgacagaggactatgcagggagataccgctgttactatcgcagccctgtaggctggtcacagcccagtgaccccctggagctggtgatgacaggtgagaggacactcaggggtcccagccccaggctctgccctcaggaagggggtcagctctcaggggcatctccctctcacagcccagccctggggatgatgtgggagccccatttaacacggtgcctccttctctcctaggagcctacagtaaacccaccctttcagccctgccgagtcctcttgtgacctcaggaaagagcgtgaccctgctgtgtcagtcacggagcccaatggacactttycttctgatcaaggagcgggcagcccatcccctactgcatctgagatcagagcacggagctcagcagcaccaggctgaattccccatgagtcctgtgacctcagtgcacggggggacctacaggtgcttcagctcacacggcttctcccactacctgctgtcacaccccagtgaccccctggagc

SEQ ID NO: 921803 - DNA, 579 bp, Homo sapiens
aggtcacgtctctgtatctcctggatcggtctctggtgacttatttagttcctttggtgaggtcatgttttcctggatggtcttgatgcttctagatattcatctgtgtccggtcattgaagaattaggtgtttattgtaatcttctcagtctgggtttgtttgtacccatctttcttaggaaggcttccaggtattcagacttaggtggtrtaaaatacgctgtatctgcattagggggcaccccaagcccaataacactgtggttcttgcagactcataaaggtaccaccttgatggtcttagatgacatttaagagaattctctggattaccaggcagagacacttattttttcccccttactttctcagaaacaaacatagttgctctcactctgttctaagcctccaggagttggggaagcactgacacaagcacctctgtggccatcagcactggagctgtgctgggttagacctaaaaccagcagagcactggatcccacacaaaacctcctatgaccactacctggctactgcctaagttcactcaaggccctgggactccgcagtcagca

SEQ ID NO: 921804 - DNA, 575 bp, Homo sapiens
tgtatctcctggatcggtctctggtgacttatttagttcctttggtgaggtcatgttttcctggatggtcttgatgcttctagatattcatctgtgtccggtcattgaagaattaggtgtttattgtaatcttctcagtctgggtttgtttgtacccatctttcttaggaaggcttccaggtattcagacttaggtggtataaaatacgctgtatctgcattagggggcaccccaagcccaataacactgtggttcttgcagactcataaaggtaccaccttgatggtcttrgatgacatttaagagaattctctggattaccaggcagagacacttattttttcccccttactttctcagaaacaaacatagttgctctcactctgttctaagcctccaggagttggggaagcactgacacaagcacctctgtggccatcagcactggagctgtgctgggttagacctaaaaccagcagagcactggatcccacacaaaacctcctatgaccactacctggctactgcctaagttcactcaaggccctgggactccgcagtcagcaggtggtga

SEQ ID NO: 921805 - DNA, 661 bp, Homo sapiens
gtcctggtggctgagggtcaggtgtgtgccgtgtcttccaggatcagtctctggggaactggagaatcaagaggcaggtcttggagggggaggagatcgcctacaagttcacgcccaagtacatcctgcgcgccggccagatggtcacggtaggtggtggggcaggagggcgagggtggccacggatggggtgtgaggtggggtcaggggactggaggcacaggacttggcgggggtgggtggggatgatggtggcaccaggcaccgtctcagagcggctgccgcagtcatagaacctccatgtgctggtgtcaccccactgggcctccctggagcctgagtggtgtgccctgggtctgagtccaggctgctggggctggcaggcrtccccgtgaagtgttaacagtcaggcgcatgggccatggagcctggtgggtgtcagatcccagttcagcccctgcttgccaagagcccttggcctctgtgaaccctggtctcttcttgtgtatcctggggaccatcaccctggataagcctgcgtcgggctggaaggactgaacgcccagggcattgaagggggctttgtggtaggggccactggctggcccacgtccctggaaccagaggtgaccctgatggggccattgttattgggtcctca

SEQ ID NO: 921806 - DNA, 647 bp, Homo sapiens
cctcacttcgctgccacttcgccgctgccccggagacttttcaatcccaccccactcctcatctcaccatttggtcaaattggaagcccagggccaggacccggaggtttagaagatgcttgggcttggagggaggagggccggcgaggctagcgaggggacaggagacggccctgctgcggacggagcgcggaaactgcgtaggaattcagtggtggtgggtttttttaaggctttctacaaaaccaaattcagaatccaggcgtcgacctggtggggcccggggccaagcctgcattctggctgcccagcttcggacagcgggaactcctcaggcagccacgcagcgggtgtgggccagcatggggatggcgtggcccccagggcgggttttcactccgctgcctgggcttccagattcccgttctggcagcgcaccggccgggtttctcggaccgttgactttatttgggggagttttcccgcagttcagttcctgactgtgcarggccaacagggcaggggaggggaagacctggggaaggaagaatgaggacagtcccgtcgtaagacctgtcacaacaataagcagggaggggagatgtggaggggacacatctggttgccttggaggcagaagctgtgag

SEQ ID NO: 921807 - DNA, 566 bp, Homo sapiens
cactgtttttgattggctcctggggtgcattggagacctgcaggtgtctgaactgccaaagtgagtcctacacctgggacaaacgctcttggtctgtccagagctgtcccttccacaaatctgtgtctcttgttgtccctcaggttcacctagracagcctaggtcatgtctcaaggatgttgaatggtaaacaacacagaccccccgggcagtgcaggcctctgagaaccactttcattgcatgcaatgtagggacattatcaggtaagagacgagatgctgcctccagccagaggcagaggatgtcagggacagtgtgtcccgcaagagtgaaactcaggctgcatcctcaagggagggatagtttcaggtggaggaggatattctgggctccgcgggcaaaggaatattgtctgatgagagaataagagctgttttctgaagagcagttcttccctgaaattcagacattcccatgctggcttcacgtgtgttgccatttcatgtcccctctgagcacatatggcctccccaaagcttgctgcagttggggcagacaagagag

SEQ ID NO: 921808 - DNA, 842 bp, Homo sapiens
gtccctctcccctgaggaccatatcctcccacatgcacccctctgccttctgagaactgtctttcttccctacaaggcatgagagcagcaagatgccatcgtgtaagagtctcagtgacatcttgggctccacaggaagacctttgtacaactatcttatctaacccactttcaaattaaaaaactgaaagtcgggctgggmgcggtggctcatgcctgtcatcccagcagtttcagaggccgaggcaggcggatcacctgaggtcaggagttcgagaccagcctggccaacatggcgaaaccccgtcactactaaaactacaaaaattagccgagtatggtggcgcacctgtaatcccagctactcgggaggctgaggcaggagaattgcttgaacccaggaggcagagattgcaatgagccaagatcgtgtcactgcactccagcctgggcaacagagtgagactctgtctcaaaataaaataataaaataaaataaaaaactgaaactcataggccaggcacggtggctcatgtctgtaatcccagcactttgggaggccaaggagggtggatcacatgaggtcaggagttccagaccagcctggccaacatggtgaaaccccatctctactaaaaatataaaaattagctggcatggtggcacaagtcacccacttgggaggctgaggcaggaggatcacttgaacccgggaagcaaaggatgcagtgagaagagatggagccactgcgctccagcctgggtgacagagcaagacgccatctcaaaaaaaaaataattaaataaataaattaattaaataaacctgagactgggttta

SEQ ID NO: 921809 - DNA, 541 bp, Homo sapiens
cggtcctgggcctcgctgtacctgcacggtaggtgctttcacggggcctgcggcaccgtgtgtcggtgcagactcccaccaggaccccaggccggccccaccgtctggaaccacctagaggtgtcccgccatcctcagtcctggggccttctccttacccagccgtctctgggttggtcacctcgtgccacgtgtgccgcctgggcctcgtccccaggtacaagcactgggccgtgttgcccgtgtgtcctggagtgtagtcyaggcaggacgtgcgggtgtgagggcagccccgggtctgacggaggggtctgcaccttgctgccctccctggtcttggcgtgggagggaggagactgatgcaggtccagcccctgctgttctgggggcctgagacagaagcagaggccatgaggccaggtgaaggtcacctgctgggtgggtccaggcgtccccgtgaccctcagggccagagaagagccggaaggctggggtgccccgggccgccccactccgacccactctccccacaggaccattc

SEQ ID NO: 921810 - DNA, 541 bp, Homo sapiens
cggtcctgggcctcgctgtacctgcacggtaggtgctttcacggggcctgcggcaccgtgtgtcggtgcagactcccaccaggaccccaggccggccccaccgtctggaaccacctagaggtgtcccgccatcctcagtcctggggccttctccttacccagccgtctctgggttggtcacctcgtgccacgtgtgccgcctgggcctcgtccccaggtacaagcactgggccgtgttgcccgtgtgtcctggagtgtagtctaggcaggacgtgcgggtgtgagggcagccccgggtctgacggaggggtctgcaccttgctgccctccctggtcttggcgtgggagggaggagactgatgcaggtccagcccctgctgttctgggggcctgagacagaagcagaggccatgaggccagrtgaaggtcacctgctgggtgggtccaggcgtccccgtgaccctcagggccagagaagagccggaaggctggggtgccccgggccgccccactccgacccactctccccacaggaccattc

SEQ ID NO: 921811 - DNA, 787 bp, Homo sapiens
cactccgacccactctccccacaggaccattctcctgagtgtgatctccctcctgaacgagcccaacaccttctcgcccgcaaacgtggacgcctccgtgatgtacaggaagtggaaagagagcaaggggaaggatcgggagtacacagacatcatccggtgagggcgggcgggggcgtcacgggaggagagactcagatccggcctgcaccccggcccctggtcccacggccgcccagccccaccttcctggtgagggtggcggagcttcctggtgcccatttacagggtgccagtcacagatggaggccgggccgagtggcggagggtccagccaggttcaagcccagcttcttgccccttttcctctttttttttgtttgagacagagtctctctctgtcacccaggctggagtgcagtggcgcgatctyggctcactgcaagctccgcctcccgggttcacgccattctcctgcctcagcctcccaagtagctgggactacaggcgcccgtcaccacgcccggctaattttttgtatttttagtagagacggggtttcagcgtgttagccaggatggtctcgatctcctgacctcgtgatccatctgcctcggcctcccaaagtgcagggattacaggcgtgagccaccgcggccggcctttttttttttttttttttttggagacagagttatactctcttgcctaggctgcagtgcagtggtgcgatctcggctcactgcagcctccactactcgggttggagcagttctcccccttcatc

SEQ ID NO: 921812 - DNA, 721 bp, Homo sapiens
accttctcgcccgcaaacgtggacgcctccgtgatgtacaggaagtggaaagagagcaaggggaaggatcgggagtacacagacatcatccggtgagggcgggcgggggcgtcacgggaggagagactcagatccggcctgcaccccggcccctggtcccacggccgcccagccccaccttcctggtgagggtggcggagcttcctggtgcccatttacagggtgccagtcacagatggaggccgggccgagtggcggagggtccagccaggttcaagcccagcttcttgccccttttcctctttttttttgtttgagacagagtctctctctgtcacccaggctggagtgcagtggcgcgatctcggctcactgcaagctccgcctcccgggttcacgccattctcctgcctcagcctcccaagtagctgggactacaggcgcccgtcaccacgcccggctaattttttgtatttttagtagagacggggtttcagcgtgttagccaggatggtctcgatctcctgacctcgtgatccatcygcctcggcctcccaaagtgcagggattacaggcgtgagccaccgcggccggcctttttttttttttttttttttggagacagagttatactctcttgcctaggctgcagtgcagtggtgcgatctcggctcactgcagcctccactactcgggttggagcagttctcccccttcatcc

SEQ ID NO: 921813 - DNA, 625 bp, Homo sapiens
gaaggagggctgctcttatttctgggtctctggcagcctgggtctctaggagtggccccttccccaaacagcccttcccaccaccctgctgggatcgatgcatcggctccctcagccctcctgggctttgtaagcttgtcatggataatcattttacggttagtctgcctttagcacaaaggaatatttcacctgtgttttccctctatggagaacgataaacagacaagccttacaaagatcctgtaggaaaatgtcgacaccagggacatcctatgtggtcctttttggtttggatacagggccagaggaacgtaagacttcatttctagaaggctttattgtagatctgttattttagcaagcaatactattgattgaaaatactactgttactcactggatatactttggagaaacatgagagctttaccgagcattaatccatctaaaagcgaatttccaaatagtctgcatgcacacacacgcrcacacacacacacacacacacacacacacacacacacacgcatctctgaggtgcccaagagcagaggctctcgtttggggagcaaagggaagctgatccctcagatgggtcgttggcatgtacagtagggcagtg

SEQ ID NO: 921814 - DNA, 592 bp, Homo sapiens
tggtacaatctcggctcactgcaacctctgcctcctgggctccagtgattctcctgactcagcctcctgagtggctgggattataggtgcccaccagcatgcttggctgatttttgtatttttagtagagacagggtttcaccatgttggccaggctggtctcgggctcctgacatcaagtgatcagccaaccttggcctcccagagtgttgggattacaggcatgagccatcatgcccagcctgctattttcaagaccagcccctgggagtcscacacagctgacactgaggccccatgggggactgtgtctaagtctcggctgtcaaaggtcccataccggagacctgggccccagaggtctgtacagccaagacccagtacctagagttcccctacctctgagactgaggccctgccatttgctgtgtgagactgagatcctggagtccacgcacctaagaccaaggcaaagaccaaggctctgggtctgtgtttaaggtgcactttccatggtgcccttgcttgagatttcaccctgttcttgtattttaagttttataggaacctcaccgtcttcacttacataggc

SEQ ID NO: 921815 - DNA, 599 bp, Homo sapiens
taggaaaagggactaactgcggacggcgcatgtttaaaatggtgacaccctcttcccatttccttgttaaccacatgtacagtaagaagcaggcaacagggtgctggcaaatgctccatttgcataatagaagattagggtggagcagccagmttccttgtgtgctgtgtaaactttctttattttattttattttattattatacattaacgtttagggtacatgtgcacaatgtgcaggttagttacatatgtatacatgtgccatgctggtgtgctgcacccattaactcgttatttagcattaggtatatctcctaatgctatcccttccccctcccccaagccacaacagtccccagagtttgatgttccccttcttgtgtccatgtgttctcattgttcgatttccacctatgaatgagaacatgtggtgtttggttttttgtccttacgatagtttactgagaatgatgatttccaatttcatccgtgtccctacaaaggacatgaactcatcatttttgatggctgcatagtattccatggtgtatatgtgccacattttcttaatccagtctatcactgttggacatttg

SEQ ID NO: 921816 - DNA, 599 bp, Homo sapiens
taggaaaagggactaactgcggacggcgcatgtttaaaatggtgacaccctcttcccatttccttgttaaccacatgtacagtaagaagcaggcaacagggtgctggcaaatgctccatttgcataatagaagattagggtggagcagccagattccttgtgtgctgtgtaaactttctttattttattttattttattattatacattaacktttagggtacatgtgcacaatgtgcaggttagttacatatgtatacatgtgccatgctggtgtgctgcacccattaactcgttatttagcattaggtatatctcctaatgctatcccttccccctcccccaagccacaacagtccccagagtttgatgttccccttcttgtgtccatgtgttctcattgttcgatttccacctatgaatgagaacatgtggtgtttggttttttgtccttacgatagtttactgagaatgatgatttccaatttcatccgtgtccctacaaaggacatgaactcatcatttttgatggctgcatagtattccatggtgtatatgtgccacattttcttaatccagtctatcactgttggacatttg

SEQ ID NO: 921817 - DNA, 609 bp, Homo sapiens
aaccaataaccaggatggcagcgacagtgtctttttttttttttctttgagacatagttttgctcttgttgcccaggctggagtgcagtggcacaatctcgactcactgcaacctctgccacccaggttcaagcaattctcctgcctcagcctcctgagtagctgggattataggtgcccgccaccacgtccggctaatttttgtacttctagtagagacggggttgccatgttggccaggctggtctcgaactcctgacctcaggtgattcacccgcctcggcctcccaaaatgctaggattatagacgtgagccactgcacccaaycttttatttttttattttttgagatggagtcttgctctgttacccaggctggagtgcaatggaccaatcttggctcactgcaacctccacctcctgggttcaagtgattgtcctgcctcagccttctgagtagctgggatcacaggcatgtgacaccatgcccggctaatttttgtatttttagtagagacggggtttcaccatgttggccaggctggtctcaaactcctgggctcaagtgaccttgaactcctgagctcaagtcatcctcccatctcagc

SEQ ID NO: 921818 - DNA, 831 bp, Homo sapiens
ggtgataaccctgacagtacggatttgaggcccctgaaggaagaaatgtataaatatgagcaaggcagagaagccatccacccactcagatgatatccaatgatcaagaaaactttaatcaggagctgttccaagatggccaaataggaacagctctggtctgcaggtcccagcgtgaatgatgcataagatgggtgatttctgcatttccaactgaggtacctggttcatctcactgggactggtcagaaagtgggtgcagaccatggagggtgagctgaagcagggtggggcattgcctcacccacaaagtgcaagcagttggggatttttgtgacagactgtaatgggaaaattgggacactgccacctaaacaatgcmcttttccaatggtcttagcaaatggcatgccaggagattatataccgcacctggctcagtgggtcccacacccatagagtcttgctcactgctagtccaagatcaaactgccaggtggcaagcctggctgagggaggggcgaccacctttgctgaggcttgagtaggtaaacaaagtggccaggaatctctaactgggtggagcccaccacagctcaacaaggctgcctgcctctgtagaatccacctctgggggcagggcatagctgaacaaaaggcagcagaaacttctgcagacttaaatgtccctgtctgacagctctaaagagagcagtggttctcccagcatggtgtttgagctctgagacagacagactgcctcctcaagtgggtccctgacccccatgtagcctaacttggagacacctccaaataatggccgattgacac

SEQ ID NO: 921819 - DNA, 616 bp, Homo sapiens
agtcgagtggggacttgaagaattgttatgtctagctggaggattgtatatgcaccagtgaacactctgtgtctagctaatctggtggggacttggataacttttatgtctaactagaggattgtaaatgcaccaataagcactctgtgtctagctcaaggtttataaacacaccaatcagtgctctgtgtctagctaatctagtggggacttggagaaattttaagtctagctaaaggtttgtaaatgcaccaatgagcaccctgtgtctagctcaaggtttgcaaatgcaccaatcgcaccaatcagtgttctgtgtctagctaatctagtggggacttggagaacttttgtgtctagctaaagatttgtaaatgcaccaatcagcaccctgygtctagctcagggattgtaaacacaccaatcagcaccctgtcaaaacggaccagtcagctctctgtaaaatggaccaatcagcgctctgtaaaatgggccaatcaggaggatgtgggtggggccagataagggaataaaagcggactgctggagccagcagcggcaaccggcttggggaccttttcacagtgtagaggatttgttttttaattctctgcga

SEQ ID NO: 921820 - DNA, 679 bp, Homo sapiens
agtcagggtcagggttcagccagggatcagggctcagttcaggattggggctcagccagggtcagggctcatcttggagtcagagctgagcctggggtcaggcatcagtctaggttggaggttgggattgggacctgggggtcttggtccaggattggaggctgtgtctgggattagggttcagtctaggatgtggaccaagcckgggatcagcattcagtccagggtagggggctgagcctgggattagggcttagtcttggatgtggactgagcctgggatgagagctcagtccagggattagggctcagtctaggatggggactgggcttgggatgcaggctcagtacagagtggggggctggtcctgggatcaaggctcagtctaggacgggggctgggcctgggactcagcaatcaggactcagtctaggatgagggactaagccttggatcagtgttcagtgcagagtggggggctgggcctaggagcagggctcagtcaagcatagggggcttagcctgggatcagggcttagtccatcatgaggcactcaacctcagaacacacaatgtctctctgtgtaggtgcctgagtcatgtgaggctggactgaggctcacttgtctactcactgggcagggcagtgcctgggcaagacctggctgtttgtttccc

SEQ ID NO: 921821 - DNA, 500 bp, Homo sapiens
acaattcataagggatgggtgatagggatttgaccatatgcattgcataagctggttgagccatctatgtaagggtgatctctctgcatctgctggtacagcctgaagtcagcagggcaggtattgggaagggaagatgggatacaaagtggggaagccagggmagacgaactgagaggatcagtgggaagccatgtagacagacgggaccctcacagtctccaggactccaattttcatgagcggatgtcttccaggagaagtcactgctctttgatttggagttaaatgtgtacctgcaggaggatcctgtgggagctgggagaggtaggggcctggctgctgcctcacatccccagggagagcctcaaggtgcaaacaacgtgcatgacagccacagtgcctgggcctgcacccacctgcccaacacaaaagcatgtggcttctgcttcccttctgccttccacattcatgcacgttgtctcctggggcccatgcta

SEQ ID NO: 921822 - DNA, 581 bp, Homo sapiens
tcatcttgttccctgttgacaagagacccagagccccaggaacaaggtgaaaagactcaggaatatggcaaatgatggtgccaaggtctaaaaactccagaagaccctttccctctccccctaactcctggtccagcatttggagccagatgtactgactggcaggacactgagaagccaccccccaccctgcttcccttggggsctcagagaatgctttgaggagtgggatacacaggactgtttaggtcccaagtacagaaacccaagttagccatgtttaagcaggttagtgaaaaaggaattcattggctcatattactataaagaccagggttggctgggcacggtggctcacgcctgtaatcccaggactttgggaggccgaagtaggcggatcacgaggtcaggagattgagaccatcctggccaacacggtgaaaccccgtctctactaaaaaaaaaaaaaaaaatacaaaaaattagccaggcctggtggcaggcgcctgtagtcccagctactcgggaggctgcgtcaggagaatggcgtgaacccaggaggcggagcttgcagtgagctg

SEQ ID NO: 921823 - DNA, 581 bp, Homo sapiens
tcatcttgttccctgttgacaagagacccagagccccaggaacaaggtgaaaagactcaggaatatggcaaatgatggtgccaaggtctaaaaactccagaagaccctttccctctccccctaactcctggtccagcatttggagccagatgtactgactggcaggacactgagaagccaccccccaccctgcttcccttggggcctcagagaatgctttgaggagtgggatacacaggactgtttaggtcccaagtacagaaacccaagttagccatgtttaagcaggttagtgaaaaaggaattcattggctcatattactataaagaccagggttggctgggcrcggtggctcacgcctgtaatcccaggactttgggaggccgaagtaggcggatcacgaggtcaggagattgagaccatcctggccaacacggtgaaaccccgtctctactaaaaaaaaaaaaaaaaatacaaaaaattagccaggcctggtggcaggcgcctgtagtcccagctactcgggaggctgcgtcaggagaatggcgtgaacccaggaggcggagcttgcagtgagctg

SEQ ID NO: 921824 - DNA, 635 bp, Homo sapiens
cacacccagccctccccgtgtgctgtctgaccacacagccctcggctgtggaaaaagtgactggaggtattccaggcctgcccgcaacaaatcacacacacatgcacacagggacaggccacacacgtgcacacaacacacgcacacatacaaaacacacgtgcacaagacatgcacaagcaggggtgcatgagaacacgcagcacgcacacaacacacacaacggacacgtgcataacggacacaggtgcacaggcaacatgcgggcacacacaacatgcacacaaagtacacgtttgcaygagcacgggtgcaaaggtcatacacatgcacccacaacacaaacacacacaaaatacatgtgtgagcaacacacgcaagcatgggcacatgggcacaggcaacacacacatgagcacacacacaaaatacacacaaccaccaaaatacacacacacaacatacgaggacaggcacacaggcacgggcaacacacaaaatacagacacacataaccgactcatgaacatgggtacacacaggcacacacacaacacaaacacgggtgcacaggcacacacaacacacaaacacggatgcacagacacgcacacaatgtgcacccataaaacaca

SEQ ID NO: 921825 - DNA, 541 bp, Homo sapiens; identical to SEQ ID NO: 921809

SEQ ID NO: 921826 - DNA, 541 bp, Homo sapiens; identical to SEQ ID NO: 921810

SEQ ID NO: 921827 - DNA, 787 bp, Homo sapiens; identical to SEQ ID NO: 921811

SEQ ID NO: 921828 - DNA, 721 bp, Homo sapiens; identical to SEQ ID NO: 921812

SEQ ID NO: 921829 - DNA, 607 bp, Homo sapiens
gaatttaattttggtttaaagttccttctatacccaatttgttgaaattttttattatgaaggcaggttgaaatttattgaatgacatttttatgctttattgaaatgataatatggtttttgaccttgattctgttgctgtgatgtataaaatgtattaatctgtgcatgcataaccattattgcatccctgtgatgaatgccacttgatcatagtgaatgatccttttactgtgttcttgaatttggyttgctagttcttttttttttagagaaattttgcatctatgttcatcagggatattggtcaatagttttcttagctgtatctttgtctagttgtggtaaaaggtaatgttcgccttatagaatgatttagaacaattattttaagctgtctttttatatttgaaaatatttgaacttctataattatttcttaaaatattttagtgaataaaatatgatattaaacttcaaaaacagaacacacacccaaaatcaaatgaaaagtttaatttttggtatagagactttcagaaatacattgtagcgaccaaaggaaaacttccctttcatcctctgaaagtttgctgaaaaattaact

SEQ ID NO: 921830 - DNA, 664 bp, Homo sapiens
ttaagcaaaatacttaaattctctattaataatactcgcatcattggattgctgtgggaattatgtcacactttacttttatcctgaaatacagaaacactcaataaatattagggtggtattctttgtttcttttttttttttaagaaacatcagagttgccgggtgcggtggttcacgcctgtaatcccagcactttggaaggccgaggcgggaggatcacgaggtcaggagacccagaccattctggctaacacggtgaaaccccgtctatactaaaaatacaaaaaattagccgrgcgtggtcgcaggcgcctgtagtcccagctactcgggaggctgaggcaggagaatggcgtgaacccaggaggcggagcttgcagtgagccgagatggcgccactgcactccagcctgggtgacagagcgagactccgtaccaaaataaataaataaataataaataatcatcagagttaatgtatggagcagttaatgtgtcacagcaataaagtgaacccattcaatcaacatctcacaaatgaaatgtgacttcttttttttaatacctctaaagttgttgccttaagactttaactcaactacctaaataggtcaaaatgtttcccaaagccatataaacgaaataggcttatgactttcaa

SEQ ID NO: 921831 - DNA, 614 bp, Homo sapiens
atttggggaacccagaatatagcagttaaactccttgtattttagtgtcctgtttattcttatcaaccttggccatgagctcttagaaggattaatgaactaactattaggggttatttgagaagatggtgttcacttaggttttaagtccttagagtaaaagtactattggatgttcagtagttatattgtgtgcttttcttctagagcagaagtttatgagtacaaatcttgtctgatcagtctcttatatctggtgttgcataaagctagcatttactctgagaggtytaaaaaaggaaaaccctagggactagaggcatagactttaatcatctggctgacaggctatgagtgatactttcaaagctggggaagtaagtggtagttaaaatatgtctagaatagaccttaagtgaccttgttggccatttcttgactaaagactacaaagtatagaattttgatccaataaatggtcgcactgtaaaggcagggagttctgtgtgtaaaaataaagtaaggtttttatttataccttgggaaacttatttaatttaaaaaacgcaagagtggcttgaaaatgtttattgattcctcagtgtagaatcaca

SEQ ID NO: 921832 - DNA, 677 bp, Homo sapiens
actccataataggattgctgggttgaatgatcattctggtttatgttctttcagaaatctacaaactgctttccacagtggctgaactaatttacattcccatcaacagtgtgtaagcattccccttctctgcaggctcacaagcatctgttgctttttgactttttaataatcaccattttgactggtgtgacatggtatctcattgtggttttcattagcatttctctgatgattagtgagattgagcaattttttaatattcttctttagagaagtgtctgttcatgtcttttgctcatttttaaacagagttatttgttttttgcttgttcaattgtaaaaattccttatagggaccttkgtcagatgcataatttgcaaatattttctcccattctgtaggttgtccgtttactctgttgatcatttcttttgctgagcagaagttctttagtttaattaggtcccacttgtcaatttttttgttgttgtcgcaattgtttttgaggacttactcataaattctttcttaaggccaatgtgcagaatggtattttctaggttttcttctaggattcttatagtttgaggtcttacatctaaatctttaatccatcttcagttaacttttgtatatggtgaaatgtaggggtccagtttcattcttctacata

SEQ ID NO: 921833 - DNA, 621 bp, Homo sapiens
acatacgaattaaagagaatagaatcgagagtccagagatacactattacattcaaggtcagtcaatttttgacaaaggtgcctagacaattcaatggggaagaacagtcttttcaaaaaatagttctgggacaactggatagccacaggcaaaagaatcttccttctcttataccatatacaaaaattaactccaaatggatcatagagctaaatgtaagaggtaaaactataagactcctagaagaaaatataggattcagtctttgtgacctggggctatacaaaggcacaaayaacaaaggacaaaaatagataaactttctcaaaatttaccactgtaatgctccaagggagaatatcaagaaagtgaaaagacaacctacaaaatgcaaaaaagtatttacaaatcatatatctgatgtgtgacttgtatttaaattctattttaaaaaactcttacaaccagtaataaaaaaatgaaaagcccactcaatttttctgtatatctaaaactgttcaaaaaataaagtctattcatttttaaaagacaaataactaaattttaaaatagacaaatgatctgcgtagaaacctttccaaagaaaatatacaaatcgc

SEQ ID NO: 921834 - DNA, 621 bp, Homo sapiens
acatacgaattaaagagaatagaatcgagagtccagagatacactattacattcaaggtcagtcaatttttgacaaaggtgcctagacaattcaatggggaagaacagtcttttcaaaaaatagttctgggacaactggatagccacaggcaaaagaatcttccttctcttataccatatacaaaaattaactccaaatggatcatagagctaaatgtaagaggtaaaactataagactcctagaagaaaatataggattcagtctttgtgacctggggctatacaaaggcacaaataacaaaggacaaaaatagataaactttctcaaaatttaccrctgtaatgctccaagggagaatatcaagaaagtgaaaagacaacctacaaaatgcaaaaaagtatttacaaatcatatatctgatgtgtgacttgtatttaaattctattttaaaaaactcttacaaccagtaataaaaaaatgaaaagcccactcaatttttctgtatatctaaaactgttcaaaaaataaagtctattcatttttaaaagacaaataactaaattttaaaatagacaaatgatctgcgtagaaacctttccaaagaaaatatacaaatcgc

SEQ ID NO: 921835 - DNA, 625 bp, Homo sapiens
cagcccccaccaccgggctatcggttatgtacccttcaagctgcagagggaggggaatttggcccaacctgggtacatgtccctttctccctctctgatttacaatagatcaagtcagacctggggaagttttcagatgatcctgataggtacatagatgtcctacagggtctaaggcaaaccttcgatctcacttggagagatgtcatgctattgttagatcaaattctagcctttaatgaaaataatgtggctttagctgcagcccgagagtttggagatacctggtatcttagtcaagtaaatgacagaataacagccgaagaaatggacaaattccctaccagtcagaaagccatccccagtatggatccccactgggacctcgactcagatcatggggacrggagtcataaacatctgttgacctgtgttctagaaggactaagaagaattaggaaaaagtccatgaattattcaatgatgtctacgataactcagggaaaggaagaaaatccttcggccttccttgagcggctatgggagaccttaagaaaatatactcccgtgtcacctgactcactgctaaggtctgtggcttcactcctgaggtcgggaagaccat

SEQ ID NO: 921836 - DNA, 621 bp, Homo sapiens
atcattgccttgccttcctagcctggagaggcttttaagagtcatagctgagattccttcttgaaagtttcagtcaagcagacttaaaaccttatgtgaccaatcactattcttgctgcacttatgtaaataatcaggccaaatttaaagagagtagaactatttttacaaataagttagtttctccgtgataatttttggtaaaaatgggggattatgtagaaagaaaattatgtttcagaaagaaaaagtacagtgtgcttgttatgagattctagtaccctgcttttgagattttattatttaccttcaatctggactggattcttaattttttcagtttcctccaatacctggcagcaactctccaaactaacattttcaatttttctcccattttgytaatttctaatcaccgaagctaaaactgacattatcatgatgccatgcaagctaaagcttgtcaacctgataaataaactccagagaaataacgtcttaaaacctgtcagattgacactacctgcccctactcagattgaagatattttgagcccagaatctagaaatcctttcaactggctaccctctggactcaggaactagtgtgtagactggtcc

SEQ ID NO: 921837 - DNA, 560 bp, Homo sapiens
caattatacctcacatcacacccatatctgggacttagatgatatttagataaaagtaaattttaggctttaaagttgatgctggaacaagttaactgggagctgttggaatcaaataaatgtattttgtgtatttgaagggcataaattttgggggaccaaggacaaaatgttggggtctcaataatcgtgtcctccctaaatttatgtgttgaagcactaaacccatagtatggctgtatgtgggagtgaagtctttaaggaagtaattaaggttaaatgaggtcatctgcgtgaggccctgatcygacagaattggtgtccttgtaggaagagacagaagacagctcatgctctcaatctctctctccctgtaccacacaaggaaaggccatgtgaggacatggagaaggcttcaacccaggagagccctcaccagaaacctaaccaactgcaacctggatcgttctctttcaaaaatgtggaggataaatttttgtttctttaagttgcccactctatagtatttggttatggtagcctgaggtgcctgttaggga

SEQ ID NO: 921838 - DNA, 510 bp, Homo sapiens
tacccatggaggaaacgtttaaaccagccctagctaaagggaaatagcagatctcagtgattgggacttcagtttccagaagtctaacggccgtgggctaaagtgctctggtgtcttaaataaatttgaaaggcagtctaggccacgaagattgcaactcctatgcaagacctaatgcttgaactgggcccagagccagtgcagtgggggatcatgcaacctactgagatgggctaagggagtgctggcatcacccctcccttaaccccaggctgcatagatcagagctctgaaagagacccattctttctgcttgaggagaggagaggaaagagtggggaggacttggtcttgcatcttarataccagctcagccacagcaggatagggcactggtcagaattgtaaggttctctttcctggccttagatcccagaaaaaatgtctagacacaccttgagccagaagggaacttactgccttgaagagaaagatccagccctggcagga

SEQ ID NO: 921839 - DNA, 820 bp, Homo sapiens
acagaaaccttatagggcgggaaagactgggtgaggtattcaaagtgttgaaggaaagaaaaagaaagaaaaaaagaacctataattagcaaagctttcctagagatatgaagaatagacaaatacttttctgttcatcaccactaaacctatcacacaagaaatgctaaagggaattcttcaagctgaaatgaaagaacaatgatgagtaacacaaacacatggtatttcagtgaaaggctgatcaaagactcagaagaacgcaatgtttgtctcttatctccccacaccttttaaaaatttatcccactttcccaatatctgcccttttccccttaaatattgaagccctgcaaattatctttgaaggaaggaatagacctgcctcccaggcactccttaaccttggcaaaaaawcttagtaaatagattgaaaaaaaaaagtgtaaaactcactagtaaaaataagtacacagtcaaattaaaaatactataatagtgtaatgagagtgtgtaaatagcttgtctttttagtacaaaggttaaaagacaaagccagtaaaataatgtttgccacaataacctgttaatgaagatgcaatataaaaagatgtaaattgtgacacaaaaattcaaaatatgggggtggaagtaagataaaagtgtaaatttcttttgttttgtttgattttgcaatcaaagttaagttgtcagtcaaaaataacctattaaaagatgtttctcgtaagactgaaggcaacaacaaaaacaaaagcctatggtagatacacacacacacaaaagcaaatagtcaaaactt

SEQ ID NO: 921840 - DNA, 578 bp, Homo sapiens
ctcgaacacatgtttaccaaggagggattaggtgtagttttgtactggataaaattaaatgtttggtatcaagtggaaggccgcttccccatgggaatctgaacgtgctcttctgtaagatraaagatgcaactagattccaccagctctgatctgtgcatatcaaagcctaagggcaatgccaactggctaaagacaggtgtgcagccctaatcttgcattttgattcattttcattgcctacctattagtgtgtctgaaaataacaagctatcctgcaacacagttggtaatgatttctcttcatggactgagatagtattagagagaccacagtgagaaacagagacttctaacccacatgtactcagtggcgctttccttggactccatacattcgagtgaaaactgacattttacgtggttttaaagtcttgacattaagttttatctgaggagttctgaaatagggcctagtgaaccagggagtatgttttaatactacatgtacagacttgaggcagtttgacttctgaatctgcattttgaaggctgtatataactacctctctctccca

SEQ ID NO: 921841 - DNA, 578 bp, Homo sapiens
ctcgaacacatgtttaccaaggagggattaggtgtagttttgtactggataaaattaaatgtttggtatcaagtggaaggccgcttccccatgggaatctgaacgtgctcttctgtaagataaaagatgcaactagattccaccagctctgatctgtgcatatcaaagcctaagggcaatgccaactggctaaagacaggtrtgcagccctaatcttgcattttgattcattttcattgcctacctattagtgtgtctgaaaataacaagctatcctgcaacacagttggtaatgatttctcttcatggactgagatagtattagagagaccacagtgagaaacagagacttctaacccacatgtactcagtggcgctttccttggactccatacattcgagtgaaaactgacattttacgtggttttaaagtcttgacattaagttttatctgaggagttctgaaatagggcctagtgaaccagggagtatgttttaatactacatgtacagacttgaggcagtttgacttctgaatctgcattttgaaggctgtatataactacctctctctccca

SEQ ID NO: 921842 - DNA, 578 bp, Homo sapiens
ctcgaacacatgtttaccaaggagggattaggtgtagttttgtactggataaaattaaatgtttggtatcaagtggaaggccgcttccccatgggaatctgaacgtgctcttctgtaagataaaagatgcaactagattccaccagctctgatctgtgcatatcaaagcctaagggcaatgccaactggctaaagacaggtgtgcagccctaatcttgcattttgattcattttcattgcctacctattagtgtgtctgaaaataacaagctatcctgcaacacagttggtaatgatttctcttcatggactgagatagtattagagagaccacagtgagaaacagagacttctaacccacatgtactcagtggcgctttccttggactccatacattcgrgtgaaaactgacattttacgtggttttaaagtcttgacattaagttttatctgaggagttctgaaatagggcctagtgaaccagggagtatgttttaatactacatgtacagacttgaggcagtttgacttctgaatctgcattttgaaggctgtatataactacctctctctccca

SEQ ID NO: 921843 - DNA, 578 bp, Homo sapiens
ctcgaacacatgtttaccaaggagggattaggtgtagttttgtactggataaaattaaatgtttggtatcaagtggaaggccgcttccccatgggaatctgaacgtgctcttctgtaagataaaagatgcaactagattccaccagctctgatctgtgcatatcaaagcctaagggcaatgccaactggctaaagacaggtgtgcagccctaatcttgcattttgattcattttcattgcctacctattagtgtgtctgaaaataacaagctatcctgcaacacagttggtaatgatttctcttcatggactgagatagtattagagagaccacagtgagaaacagagacttctaacccacatgtactcagtggcgctttccttggactccatacattcgagtgaaaactgacattttacrtggttttaaagtcttgacattaagttttatctgaggagttctgaaatagggcctagtgaaccagggagtatgttttaatactacatgtacagacttgaggcagtttgacttctgaatctgcattttgaaggctgtatataactacctctctctccca

SEQ ID NO: 921844 - DNA, 600 bp, Homo sapiens
tgcaagtgacacatactctaagatcattaacatgcttggccataaagcaagtctcaaaaaatttaaaaaaatcaaaatcgtaccaaatacactcatggaccacagtgcagtaaaaatagaaataagtaccaagaaaatccatcaaaaccatacaataatgtggaagttgaacaagctacttctgaatgacttttggataaagaatgaaattaagaaagacatcaaacaattctttgaaactaatgaaaacagagacacaatataccagaatctttgggacacaatgaaaccagtgttaaaaggaaagtttatagtgctaaatacccacatcaagaagttagaaagatctcaaattaacagcctaatgtcacacctagagaaactagcagaacaaaagcaaaccaacctctaggttagcagaagaaaatwaaaaaatattggcctgaagtcttctttttttgttgtatctctgccagattttggtgtcaggattatgctggcctcataaaatgaatcagtggagagtccctctttttcattttttggaatagtttcagtagaaatggtaccagctcttctttgtacctctggtagaattca

SEQ ID NO: 921845 - DNA, 577 bp, Homo sapiens
tctgctaagggtctcacagggccacaataaaaatgtcagtcatgctgggctcttacctgaagactctagggaagaatctgcttccgagctcacccagattgttggcagaattctgttccatgtcgttgtagaactgaggttcccatttcctagttggcactaagtcagggrtcattctcagtaattatgggccactcttagctcctttccctaggtgcctttcatcttcagagccaacagtggaatatctgtcatgttaaatccttatttatttatttatttatttatttatttatttattttgagatggagtctcaagctgtctcacaggctggagtgcaatggcacaatctcagctcactgcaacctccgcctcccgggttcaagtgattctcctgcctcagcctcctgagtagctcgggttacagatgcctgccaccatgccaagctaatttttgtatttttagtagagacagggtctcaccatgttggccaggctggtctcgaactcctgacctcagatgatccacctgcctaggcctcccaaagtgctgggattacaggtgtcagccactat

SEQ ID NO: 921846 - DNA, 588 bp, Homo sapiens
ctgttggagtttgctggaggtccactccagaccctgtttgcctgggtatcaccagtggaggctgcagaacagcaattatttcagaacagcaaatattgctgccttatccttcctctggaagcttcgtcccagagggcactcacctatatgtggtgtctgttggcccctactgggaagtgtctccctgttaggctacacagaggtcagggactcacttgaggaggcagtttgttcattctcagagctcagcagctatgctgggagagccactgctctcttcagagctgtcagacagggatgatccaattttccatttttactaaaracaaatcatggtaagacctatttgctttattatacttggctatttgtataaagtacagcaaggtcttcttagcagcctgtaactgttaaagaatttaacagttggcttatttgtataaagcacagcaagaataatcatttttcacataaagttttttttgtttgttttctttctttttttttttttcaggttggctttatggaactttgttctataaaaggaatctcacataagacgtcttttgaagccaagcccagccatgg

SEQ ID NO: 921847 - DNA, 556 bp, Homo sapiens
gcactgccttcagcttcctcccagtgcactattaacacttttaaagcaattacatttttttttttttttttttttttttttgagacggagtctcactctttcgcccaagctggactgcagtggcgctatcccggctcactgcaagctccgcctcttgggttcatgccattctcctgcctcagcctcccgagtagctgggattacaggcgcccaccaccacgcccggctaattttttgtatttttagtagagacagggtttcaccgtgttagccaggatggtctcgatctcctgacctcgtgatccgcccacctcggcctcccaaagtgctgggattacaggcgtgagccaycgcgcccagccgcaattacatttttaagtagtcaaatttttaaggcaatcaagactgcatccctacatcacaggctttagcccaagtgggctgggtgaggtatggcttgcttgggtcttgaagggggcacaccctcagccctctcactgaggctgccatacacgctgggctcccacactgagtcaggagcccagagagggccagg

SEQ ID NO: 921848 - DNA, 701 bp, Homo sapiens
tcctgagttccaccatcttgtctcgggcctaggatggccactaatatccagtgcgcaggcaggggctgggcactcacttcagggcaggagctgggaaagaaggcagagaagagcttccgcaagtccatcttatggagcacaaagggccagcgtccaagttgccagacttggcctgcagggcctcactttacttgctgtgcagaaaagagaccgcaagggggcaatggccaggcaggggccagggaggaactgttgcttggactggggtggtggacaggaaggtgaggacaagaggttggattctagagacattctcaaagtggaactggtagaaatgtctgatcaataaratgaggaggtgagagagaaaagaggagtggaagatgatgcctgggttgctggcctgaacaactggaaaaatggaggttccatccacggtgacagggacacagggatggccagtgggagcaggtttggagggatgatgaggcaaggcagaacggggggactccgactggtcaaacagaacaactgtggcttggctctggctgatggctgctctgtaggaataagggctctgatttttcagatatcagaaatccaggtttttacgtaacagctcttgatttttatatgtttgcaataaattcaaatttacaatgatatgtaggttaatcctatgcaagccaaataaaatacat

SEQ ID NO: 921849 - DNA, 631 bp, Homo sapiens
attgtaaatacaccaatctgcaccctgtgtctagctcagggtttgtgaatgcaccaataggcactctgtatctagttaatctgttggggacttggagaatctttatgtctagctaagggattgtgaatgcaccaatcggcactctgtatctagctcaaggtttgtaaatgcaccaatcagcaccctatcaaaatggaccaatcagctctctgtaaaacagaccaatcggctctctgtaaaatggaccaatcagcaggatgtgggtggggccagataagagaataaaagcaggcttccggagccagcagtgggaactcgcttaaggtccctttgckggttgtggaatgtttgttcttttactttttgcacttaaattatgctgctgcttaatgttggggtccacactgcttttgctgagctgtgagacttaccatgaaggcctgcagcttcactcctcagccagtgagaccaggaacctaccagaagaaagaaactccaaacgcatctgaaggtcggaaggagcaaactctggacacgctgcttttaagaactgtaacaccatgagggtctgcggcttcattcttgaaaccagtgagatcaagaacccaccaattacaaacacaacacctca

SEQ ID NO: 921850 - DNA, 603 bp, Homo sapiens
aaagacattcattagaatttacaaactcagtgtctccagcttcatcagggtcctcccacacatccccattccaagttgcagggtcctattcttttccaatcaatgccctcactttaacagtagacacctgacgaggctgtgcatgcaccttttgttgcaggtcagccactcgcatgataagagcatgtgtctgttttcccacaatttcagctctttctctacaggagatgagactctcactcagggcagtcttaatagatttgaggctcagtatttgcttctaaggtcaggagttagaatccctgagttcatcgtttcctttcatcactttgtccactgaactcaggagcaaccaaccrgcttcattatagtccttggttctccacatatgatcaaaggtattacatatagagtccctaaactccttgcctctcatgagcagtgaatcaggagtgttaaatgcatttatattgcataactctctaaacagttaatgccaagaactatcagtgttctccataatattagaagtagagtccttagcatttttggggtctaatcatatttagcagccaactccagaaaacccaaaatcaacaaagg

SEQ ID NO: 921851 - DNA, 649 bp, Homo sapiens
ttctaaggtcaggagttagaatccctgagttcatcgtttcctttcatcactttgtccactgaactcaggagcaaccaaccagcttcattatagtccttggttctccacatatgatcaaaggtattacatatagagtccctaaactccttgcctctcatgagcagtgaatcaggagtgttaaatgcatttatattgcataactctctaaacagttaatgccaagaactatcagtgttctccataatattagaagtagagtccttagcatttttggggtctaatcatatttagcagccaactccagaaaacccaaaaycaacaaaggaactccatccttaatattctattcctctagaaccactcctggtaccaaaatctgtattagtcagggttctctagagaaatagaactaataggatagatacatatacaaaggggaatttattcagtattaactcacacaatcatatgttctcacaataggtcatctgcaagctgaggagcaaagagagctagtctgagtcccaaaactgaagaacttggattatgatgttcgagggcagaatgtatccagcacagtaaaagatgtaggctgggaggctaagcctatctaatcttttcacatttttctgcctgctttatattctag

SEQ ID NO: 921852 - DNA, 649 bp, Homo sapiens
ttctaaggtcaggagttagaatccctgagttcatcgtttcctttcatcactttgtccactgaactcaggagcaaccaaccagcttcattatagtccttggttctccacatatgatcaaaggtattacatatagagtccctaaactccttgcctctcatgagcagtgaatcaggagtgttaaatgcatttatattgcataactctctaaacagttaatgccaagaactatcagtgttctccataatattagaagtagagtccttagcatttttggggtctaatcatatttagcagccaactccagaaaacccaaaatcaacaaaggaactcyatccttaatattctattcctctagaaccactcctggtaccaaaatctgtattagtcagggttctctagagaaatagaactaataggatagatacatatacaaaggggaatttattcagtattaactcacacaatcatatgttctcacaataggtcatctgcaagctgaggagcaaagagagctagtctgagtcccaaaactgaagaacttggattatgatgttcgagggcagaatgtatccagcacagtaaaagatgtaggctgggaggctaagcctatctaatcttttcacatttttctgcctgctttatattctag

SEQ ID NO: 921853 - DNA, 649 bp, Homo sapiens
ttctaaggtcaggagttagaatccctgagttcatcgtttcctttcatcactttgtccactgaactcaggagcaaccaaccagcttcattatagtccttggttctccacatatgatcaaaggtattacatatagagtccctaaactccttgcctctcatgagcagtgaatcaggagtgttaaatgcatttatattgcataactctctaaacagttaatgccaagaactatcagtgttctccataatattagaagtagagtccttagcatttttggggtctaatcatatttagcagccaactccagaaaacccaaaatcaacaaaggaactccatccttaatattctattcctctagaaccactcctggtaccaaaatctgtattagtcagggttctcyagagaaatagaactaataggatagatacatatacaaaggggaatttattcagtattaactcacacaatcatatgttctcacaataggtcatctgcaagctgaggagcaaagagagctagtctgagtcccaaaactgaagaacttggattatgatgttcgagggcagaatgtatccagcacagtaaaagatgtaggctgggaggctaagcctatctaatcttttcacatttttctgcctgctttatattctag

SEQ ID NO: 921854 - DNA, 627 bp, Homo sapiens
gagttagaatccctgagttcatcgtttcctttcatcactttgtccactgaactcaggagcaaccaaccagcttcattatagtccttggttctccacatatgatcaaaggtattacatatagagtccctaaactccttgcctctcatgagcagtgaatcaggagtgttaaatgcatttatattgcataactctctaaacagttaatgccaagaactatcagtgttctccataatattagaagtagagtccttagcatttttggggtctaatcatatttagcagccaactccagaaaacccaaaatcaacaaaggaactccatccttaatattctattcctctagaaccactcctggtaccaaaatctgtattagtcagggttctctagagaaatagaactaataggatagatacatatacaaaggggaatttaktcagtattaactcacacaatcatatgttctcacaataggtcatctgcaagctgaggagcaaagagagctagtctgagtcccaaaactgaagaacttggattatgatgttcgagggcagaatgtatccagcacagtaaaagatgtaggctgggaggctaagcctatctaatcttttcacatttttctgcctgctt

SEQ ID NO: 921855 - DNA, 545 bp, Homo sapiens
atatgatcaaaggtattacatatagagtccctaaactccttgcctctcatgagcagtgaatcaggagtgttaaatgcatttatattgcataactctctaaacagttaatgccaagaactatcagtgttctccataatattagaagtagagtccttagcatttttggggtctaatcatatttagcagccaactccagaaaacccaaaatcaacaaaggaactccatccttaatattctattcctctagaaccactcctggtaccaaaatctgtattagtcagggttctctagagaaatagaactaataggatagatacatatacaaaggggaatttattcagtattaactcacacaatcatatgttctcmcaataggtcatctgcaagctgaggagcaaagagagctagtctgagtcccaaaactgaagaacttggattatgatgttcgagggcagaatgtatccagcacagtaaaagatgtaggctgggaggctaagcctatctaatcttttcacatttttctgcctgctttatattctagtcat

SEQ ID NO: 921856 - DNA, 593 bp, Homo sapiens
tggttatatggtaattgaggaaagaaatggaaaaacaaagtttcattactcttctattcataggcagaagtatcctgcaagtgacattaagacaactagattatctggaagaaacaaaaagctgctgcaattgtaccttacctcttayagaagcattaatttgtaatttatatattgatcaatatataaatttgatttctgaaactataagtattagaactactcatagtagaatttcttttaattatctaggaagaataaatgtgtttgtaagtatgacccaaatgcctgaaagtataatagaaaaataatggtgaaaggatttatattgctttgtgtatatacccaataataggactgatgggttgaatggtaattctgttttatgttctttgagaaatcgtcagactgctttctacaatgacagaacttatttacattcccactagtagtgtataagcgttcccttttctccactatgtcttcagtatctgttattttttgacccactaaaaatagccattctgacttgtgtgggatggtatctgattgtagttttggtttgtagttctctaataattagtgatgttgaa

SEQ ID NO: 921857 - DNA, 549 bp, Homo sapiens
gctctggttatatggtaattgaggaaagaaatggaaaaacaaagtttcattactcttctattcataggcagaagtatcctgcaagtgacattaagacaactagattatctggaagaaacaaaaagctgctgcaattgtaccttacctcttatagaagcattaatttgtaatttatatattgatcaatatataaatttgatttctgaaactataagtattagaactactcatagtagaatttcttttaattatctaggaagaataaatgtgtttgtaagtatgacccaaatgcctgaaagtataatagaaaaataatggtgaaaggatttatattgctttgtgtatatacccaataataggactgatgggttgaatggtaattctgttttatgttctttgagaaatcgtcagacygctttctacaatgacagaacttatttacattcccactagtagtgtataagcgttcccttttctccactatgtcttcagtatctgttattttttgacccactaaaaatagccattctgacttgtgtgggatggtat

SEQ ID NO: 921858 - DNA, 579 bp, Homo sapiens
caccatttttccaatgtaaatccaatgtaagcggcattggattgagcggctagagtaactttagtgttaattttggctaaatcttccctgtaattattatttctgttataaagatgaaaattaggcagaatattacagcaattagaatttttcatacagaattccacattgtgggtgccacagtgtatagtcctacctactgcaaatagaagagtgagtatagcaatttctgcaaaagttatataataaataattttcrtctaaaattttacttgccaagatatagaatttccctttaagggtgtatggtgttacaaatgtaatcccatgggtaatcaaaatctccctgcaaatatgcatcaaaaggaagttctaataactggcagagaatctctagaggaaaggtagaaatgattgaaagtatctagtaaggtagaggtaggactgagtaggatgagtggccctcactcatttacttaatttttatgatttcagcttaagatctcctatctcttcacattgatatccagaacattcctttgagacatcaggagttgctctgtcagctttccaggtttt

SEQ ID NO: 921859 - DNA, 579 bp, Homo sapiens
caccatttttccaatgtaaatccaatgtaagcggcattggattgagcggctagagtaactttagtgttaattttggctaaatcttccctgtaattattatttctgttataaagatgaaaattaggcagaatattacagcaattagaatttttcatacagaattccacattgtgggtgccacagtgtatagtcctacctactgcaaatagaagagtgagtatagcaatttctgcaaaagttatataataaataattttcatctaaaattttacttgccaagatatagaatttccctttaagggtgtatggtgttacaaatgtaatcccatgggtaatcaaaatctccctgcaaatatgcatcaaaaggaagttctaataactggcagagaatctctagaggaaaggtagaaatgattgaaagtatctagtaaggtagaggtrggactgagtaggatgagtggccctcactcatttacttaatttttatgatttcagcttaagatctcctatctcttcacattgatatccagaacattcctttgagacatcaggagttgctctgtcagctttccaggtttt

SEQ ID NO: 921860 - DNA, 539 bp, Homo sapiens
actagtgtccgtaattggggggttcttggtctcactgacttcaagaataaagccgcagaccctcacggtgagtgttactgttcttaaaggcggcatgtctggagtttgttccttctgatgtttggatgtgttcattcctccccgtgggttcgtggtcccgttggctcaagagtgaagctgcagacctttgcggtgagtgatacagctcataaagacagtgccaacccagagagtgagcagcagcaagattcattgcaaagagcgaaacaacaaagcatccacagcgtggaaggggacccaagcagatttcaatgctggcttgggcagcctgctttcattcccttatctggccccacccacatcgtgctgattggtccmttttacagagagctgattggtccattttgacagggtgctgattggtgcgtttacaatccctgagctagactcaaaagtactccaagtccccactagattagctagacacagagcactgattggtgcattcaaaaaccctgagctagacacagggtgctgac

SEQ ID NO: 921861 - DNA, 665 bp, Homo sapiens
ttagtttgtcactggatactaagagcctaaaaaaatgcttgactgatttgactaataagggctggtcttttatcagactgtatagaggtgggaaggctaaactgaggaattatgtctgacagaagggaagaaatgactgcagtggccttctcagaccctataggaaaggcctctacctatctagtgaaagtgtctacttagacaaagaggtattttagtttttgggactcggggtatgttgagtaaagctaatttgccagtcctgggtgggggcaaatcctcgagcttgttgtgtagggaaggggcctgaataatccttgaggagtagcagatggaatagcagatggaacactaagaagttatttccttgaggatagatttctacgatggaaaggaaatgaaaggttctaagaggcrggctagtggcttgtactatagcatagcctgcctttgctggtgtgtggtgattaggcctggtggaactgccatcaataaatcaagcgtgatcagggtgagaaacagggacgaaggaaatgtggggaaatgggatgaacatcaggtggatcagagagatgcagtcatgagggtcaggtgtggtgtctggaataatgtgggaggctggattgaagtccgggccaggaacaatggtaattgtgggacttaac

SEQ ID NO: 921862 - DNA, 752 bp, Homo sapiens
gtttgcagactcatagacgtaccaccttggtagccttggataagatctggaagaattctctggattaccaggcagagactcttgttcttttccctaactttcccccaaacatatgagtctctctttctgtgctgagtcacctggaactgaagctatggtgattcaagcatgctgttgccacaactgggactgtgcctattcagacccaaagacagcacagcagtgggctttgtgcaaggtccttttctttatggtggtgagtttccccacgctgtgggcgtgtctagcaatgctgtttgggagccaggaattggagtgaaaaaaatcttagtaatttacctgatgttctattcttctgcagcaaaattggaactcaaaccacaatacaaagccctttccactcttttctctcctttccacaggcagaggtgyctcttcctgtggccaccatcaccgctagtctacagggatttctcctaggccacctcccatgtttgcttaaagcccaagagttcttccatcagcttgtggtgaataccgccaagccctaggtctcattcttcaaggcaatgggctcccctctggcccagacaggtccagaaatgctgtccaagagccaggcctggacttggggaccccaagaccctgcttgttggtctatccctctatggctgagctggtcctagaatgcaagatgaaggcctatttacttttccccctgctttcctcaagagaaggagtccttcatcttt

SEQ ID NO: 921863 - DNA, 634 bp, Homo sapiens
aatataatcgttataagtatagttgaccctggaacaacgtgggggttgggagcactggcccatcttgcagttgaaaatctatgtataacttttgactaccccaaaacttaactattaatagcctactgttaaccagaagccttactgataatatcaacagtcatttaacgcataattttgtatgttatatgtattacatactgtattcttacagtaaagtaagcttgaaaatataaaatgttagtaagaaaatcacagggaagagaaaacatatttactattcattaagtggaagtggatcrtcataaaggtctccatcctcattcagttaatgcatattttgtatgctatatgtattatatactgtattcttacagtaaagtaagcttgaaaatataaaatgttgttaagaaaatcacaaggaagagaaaacgtatttactattcattggaagagaaaacatatttactattcattaagtgcaagtggatcgtcataaaagtctccatcctcatcttcccgttgagtagcctgaggaggaggaagaggaggggttggtcttgctgtctcagggctggcaaaggcagaagaaactctgaggataattggccccaaggagttcaaacccgtgttg

SEQ ID NO: 921864 - DNA, 634 bp, Homo sapiens
aatataatcgttataagtatagttgaccctggaacaacgtgggggttgggagcactggcccatcttgcagttgaaaatctatgtataacttttgactaccccaaaacttaactattaatagcctactgttaaccagaagccttactgataatatcaacagtcatttaacgcataattttgtatgttatatgtattacatactgtattcttacagtaaagtaagcttgaaaatataaaatgttagtaagaaaatcacagggaagagaaaacatatttactattcattaagtggaagtggatcgtcataaaggtctccatcctcattcagttaatgcatattttgtatgctatatgtattatatactgtattcttacagtaaagtaagcttgaaaatataaaatgttgttaagaaaatcacaaggaagagaaaacgtatttactattcattggaagagaaaacatatttactattcattaagygcaagtggatcgtcataaaagtctccatcctcatcttcccgttgagtagcctgaggaggaggaagaggaggggttggtcttgctgtctcagggctggcaaaggcagaagaaactctgaggataattggccccaaggagttcaaacccgtgttg

SEQ ID NO: 921865 - DNA, 676 bp, Homo sapiens
tcgggtggtgtctgcacatcatgcagaaccatctgtgaaccatgcccttgtcttctcttcttctgtcaactgatcataggaaataccccatgaggccaccagtgcaggctggggagagaaggtagggtgtcaggagtgcagaccwtgggtgtttgagccacttcctaatgtaacttacttgtgccttcaggacctgctagagtcagatcacgtatatactacttccatttgatgatggaatactgatgtgcataacccactttatggctagatgggtctgaaagcacccagttcatgataggcagttcaggttgcatggtgagttgatgacccgtaggcaaacattcagtttccaccaaagcccagtaacaggcaaagaactgtctctcaaaaggagaatagttatctgcagaagatggcagggccttgctccaaaatcctagaggcttctgctgtaattcacctatgggggcctgccaaaggctccaaccagcacacctatcagccattgacacctcaagcaccattggatctgctaggtcttatggtccaagtggcagagcagcttgcacagaaggctggatctgttgcagagccttctcctattctggaccccactcaaaactggcagccttttgggtcactcgataaatgggccacagtaacccacccaaat

SEQ ID NO: 921866 - DNA, 676 bp, Homo sapiens
tcgggtggtgtctgcacatcatgcagaaccatctgtgaaccatgcccttgtcttctcttcttctgtcaactgatcataggaaataccccatgaggccaccagtgcaggctggggagagaaggtagggtgtcaggagtgcagaccatggktgtttgagccacttcctaatgtaacttacttgtgccttcaggacctgctagagtcagatcacgtatatactacttccatttgatgatggaatactgatgtgcataacccactttatggctagatgggtctgaaagcacccagttcatgataggcagttcaggttgcatggtgagttgatgacccgtaggcaaacattcagtttccaccaaagcccagtaacaggcaaagaactgtctctcaaaaggagaatagttatctgcagaagatggcagggccttgctccaaaatcctagaggcttctgctgtaattcacctatgggggcctgccaaaggctccaaccagcacacctatcagccattgacacctcaagcaccattggatctgctaggtcttatggtccaagtggcagagcagcttgcacagaaggctggatctgttgcagagccttctcctattctggaccccactcaaaactggcagccttttgggtcactcgataaatgggccacagtaacccacccaaat

SEQ ID NO: 921867 - DNA, 730 bp, Homo sapiens
tgttcattcttttaagaggatgacattcttcagctcatctggaaaggatacttcctttaagtctgttattcacagtctccaagggcaggtgtagttgggaaagacatttcatatggaaaaacaaacttgatagggtaaaaaaaaaaaaaatgagatgtaatctggaggcccaagtcattttcttaggagaaactcaaatgtgtttggtgttatctaaccttctgcagtttatcagtctgaaacaaatgcattctattctcatttgaaaatgtctgaacagccaccaattttcaaaatcacccatttaactagagactttaaagcccagaatttgcagttacgtatttcagaatgatttagtaattttgtgagcagctcagaggttaagtctacaatgyctgactacggtgcattattgaaaatatcagtagtgtaaggatcccgtagattggtgataactttgctcttgttatttcaacagttaccaccaacagttggtgacttaacaaattaagagcatagttgccatatgctcatatttggcaaatatgtcaaaatggccatatttgccaatttttaagacaataaattcacagaaaatgcattacagaaaataacttaaaaaaaaaaaaaacaacttttgggccaggcatggtggttcacacctgtaataccaacactctaggaggctgaggtgagaggatcccttgagcccaggagtttgaaacca

SEQ ID NO: 921868 - DNA, 736 bp, Homo sapiens
caggttcctagacatcacggagatgaacatgactgtggttgtggacaagagcaacaacacatatcatataaagggctttattggccaggtgcggtggctcatgcctgtaatcccagcactttaggagatgagacagatggattgcttgagcccaggaatttgagactagcctgagcaacataatgagaccccatctctattaaataaaataaaaattaaaaagagtttttccactcctccaagaaaagattttatttttttcctcctgaggtaatttgtacgagagtaatgcctatatatgtttttctttttctttgcttttattttttgctttgttttgagacaaggtttcactctgctggagtgcagtggcacgagcaccgctcactgaaacctctgcctcccaggctcaagcgatcctcccaaytcagcaaaggtgaaggtgacagaatccttggccacaggtgcctaccaccatatctggctaattttttttttatttttgtagagaccaggtctccctgtgttgcccaggctggttccaaactcctggactcaaggatcctcctactttacctcccaaagtgctgagattacagatgtgagccatgcccagccatatatatttccttacagctcctctgttatgaggggaagtggcgagaatgggttaacctgggcacactacaaaaggctgtgggaggataactgggaggtggtggcattaagtgactcc

SEQ ID NO: 921869 - DNA, 645 bp, Homo sapiens
tctttaactaagggaaataatcaaaataagaatgatgatgacaatggtagctaagatttatcaactgcttaatgtggatcaggcactattctaagtgcctgatttacttacagaaattaacttaatcctgacagcagccctatgtgcaggtacattgattatccccattatacagatgaggaaaccaaagcctggggagttaaatgactggctcatggtcacaccattagcaaggaacaagccaggataaaacagctaaagaggaaagttttggacaggctcatgactacacatcatcatgaacaatacgtagccttttgttaatgttctctgccattaggtgtcaggaaacatacgacctcaaacaatcttcatacmcaatgaagagatataagaagatttggtaatccaggaagtctcgaaagttcttcagaaatgtttaacctatttcaaaaattttcattactctgcgcacactattcctcattacagaaagtgctcaataaacttctgtatgctcctattactattttttgagctctaagtgtattgttcatgtaatcctcacataaatccaatgaggtgggtgccattatgatccccctttacagatgtggaaactaagaaaaggagaggctaaataat

SEQ ID NO: 921870 - DNA, 745 bp, Homo sapiens
gggctcaaatccaagatgtatcaacctgggcaagttattttactgttctcagccccagttgccccaggtggagaatggggacaatccttttccgctctgtaggagtgttcagaagatcaatgagatcacacagctaaaccccagcacagtgactggcacatagtaggtgcacagtacaaattatttgtaagctcttctctggaaccttgtttcattgattatttgcatcttttccctgcttccttcccacagcctaaaaatataatgaaaagagacacagtcttaaaaaataaataagcacaaagttcccttgatcctatttcttcccccrtctataatcaattccgtatctctttctgtcttcataaaaaaacttattaaaagagtagtcagtagccgggcatggtggctcatgcctgtaatcccagcactttgggaggccgaggtgtgtggatcacctgaggtcaggagttcaagaccaggctggccaatggtgagacccccatctctacaaaaatacaagaattaactgggcatgatggcagatgcctgtaatcccagctactcgggaggctgagcgggaagaatcgcttgaacccgggaggcgggggttgtagtgagctgaggttgcgccactgcactccagcctgggcgacagagcaagcctccatctcaaaaaaaaaaaaaaaaaaaaaaagagtattcagtttcagtgcttcctgtctctactttttccacctcccac

SEQ ID NO: 921871 - DNA, 742 bp, Homo sapiens
accctggctgcatattagactcgcctggaagctttcaaaagtccccatgctgaggccaggactcaaaccaatgaaatcagaatctctagaggtgggatcagaggcggggtctggacatcaataagccacaaggtgaatcccgtgagcagctaacatgaaacatcattgatttaccagacttgaggccaccataactgtatagtgaccacaatctttgtcatccaaggaagaaaaggagaaggaaggagtcatttatagcccatgatctttagttcattctgagatcctctctgtgcttttgggggttcatcagatgtagggtcaaactgagaaggtctacactggtgatctcaccctggaacagggccactcttccataccacatctgtgaggayagaggcctatgggctgtacctggaagcaaaaggagacggagcaaacaatccagcccagtactcctagggtggctctcccaagttctcaagatacttttcttttttaaaaaaggagtctgttaccgtatgacccatcaattccaattctgggaaagtaccccaaagaacagaaagcagaggctcaaacaggtatttgtataactgtgttcatggcagtactattcacaatagtcaaaaggtggaaacaacccatgtccatccacggagggatggatggatgaacaaaacatggtatatccgtacaatggaatattattcactcctgaaaaggaaggaaattctgatac

SEQ ID NO: 921872 - DNA, 662 bp, Homo sapiens
ttggaacactgacggagacacagtaatggcacagagaccagggaagggagtgggctgcttctctcccactgaccccgtttcctgcccatagggccacacacactagggaaaacatgtaaattgagaggccagatggagaagagctctctcagttgtctctttctccttctctccactgactttcttgataaaagaaacaagcctgatgtggtgatgtgcagtccttcccttataccttacaaaaactaagggacatgtgaaggtaacagcagcaagcactggcccaaaatgtgtcttgtcacccaaatgcattatcttatcattcataacctgtgctatatagaaaggaaggcaattggagggaggccgaggtgggtggatcacctgtcaggagtttgaaaccagcttggccagcgtgatgaaaccctgtctgtactaaaaatacaaaaattagctggtcgtggtggcgcatgcctgtaatcccagctactcaggaggctgaggcaggagaatcgcttgawcccgggaagcatgggttgcagtgagccaagatcgcgccattgcactccaccctgggcaacaagagtgaaacactgtctcaaaagaagaaggagaaggagaagaagaaggagggggaggggaaggggaaggggaaataataa

SEQ ID NO: 921873 - DNA, 598 bp, Homo sapiens
gactatcctgctatggtttgcatatggctagtttgtccccatcaaagttcatgctgaaatttaatctccaatgctgcagtgttgaaaggtggggcctcatgggaggtgtttgggttgtgggtaggtagattttaaaatcttctgattggcaattggttgaaagaactattatcaatagaaaggaatgtctgggttgtgataaggggttgtagagaccaaattttatcatgcagatgaagcctccaggtagcaggcctyagagagaatagattgtaaatgtttcttaacagaattaaggtctgtgttgatgtgaaaggctttgcggcttttcctgaattccaaaaggaaggagggtataataaggcacatccgacctcccactgccctccacaatctgaaccagtctttcaggttaaatttggagtgtcctggttgagaggagggagtccatttagatggctgaagggcgacctttgcattttacttttggtttgcaaagtagaatgggcatcataatagaagctacctcagaaggctgttgtgagggttacacgggtcaggacttgttctggcacacagtaagtgctgtgagtctgtg

SEQ ID NO: 921874 - DNA, 607 bp, Homo sapiens
tggtgctgaatttcaagagtctcctaattttttctcacgatcgaagaagacctgcatttccaaacatcacatcattacacaagtgagcacaactacaaaaaggagacagttagtgaggtttctcaccattttttttttgagagataatctttcactctattgcccaggctggagtgcagtggcacaatcatagctcactgcagccttagactcttgggttcaaggtcttcccacatcagcctcccaagtagctgagactacaagtgcccgcaaccacaaccagctattttttgtattttttgtagagacgggggtcttactatgttgctcaagctggtctgtgactcttggcctaaagcagyctacctgcctcggcctcccaaagcatcgagcttactggcatctccagccctcagctttttctttttacttctctctttttctaaatatggtatttttttcctggaacagtccccttttatcttattggccacatatgtgtcacaaaactaccaggaatcctaacactagcaaaaggaaatggaaacatcatgattgtcttttaactattcatctcctgggtcaggtgactccttcctttaggaag

SEQ ID NO: 921875 - DNA, 546 bp, Homo sapiens
actagaggtacaaggaggagcgggtaccattccttctgaaactattccaattaatagaaaaagagggaattctccctaactcattttgtgaggacagcatcatcacgataccaaagcctggcagagacacaacaaaaaaagagaattttagaccaatatcccgatgaacattgatgcaaaaatcctcaataaaatactggcaaaccaaatccagcagcacatcaaaaascttatccaccatgatcaagtgggcttcatccctgggatgcaagactggttcaacatacgcaaatcaagaaacataatccagcatataaacagaaccaaagacaaaagccacagaattacctcaatagatgcagaaaaggcctttgacaaaattcaacagcccttcatactaaaaactctcaataaattaggtattgaagggacgtatctgaaaataataagagctatttatgacaaacccacagccaatatcatactgaatgggcaaaaactggaagcattccctttgaaaactggcacaagacagggatgccctct

SEQ ID NO: 921876 - DNA, 651 bp, Homo sapiens
tggcaggcaagagagcatgtgcagggaaattcccctttatacaaaaatcagatctcatgagacttattcaccatcaccagaagagcacgagaaagagaaagacccatccccatgattcaattacctcccacagggcccctcccacgacacctgggaattatgggagctgcaattcaagatgggaattgggtagggacacagtcaagccatatcaaakacaaagtatttcccttattttacaactaaagaccctgtctccaaaaattcccattgctctccatgctccaacctcatcagcaaatatttgcaatgtttctaaagcacaatgtttcaggctccctcctgacacagtggacttttgcaaatgatgttccttctgtctgagaacttctttccttatttttgcttaaccatcccacactcaacctgtctttcagcttaaatgtcaattttgcaggaaagcatcctctgggtcttcagactaaatatgatcgcagttataaattctcaagaacacctggtcagttcttttcctagatagccaaaatgtttgaaatcatggaatttctgcatgattgtttggcctggctatcccattaggctgcaagccccatgacagcagagcagtttaacttcatacctaataaactg

SEQ ID NO: 921877 - DNA, 651 bp, Homo sapiens
tggcaggcaagagagcatgtgcagggaaattcccctttatacaaaaatcagatctcatgagacttattcaccatcaccagaagagcacgagaaagagaaagacccatccccatgattcaattacctcccacagggcccctcccacgacacctgggaattatgggagctgcaattcaagatgggaattgggtagggacacagtcaagccatatcaaagacaaagtatttcccttattttacaactaaagaccctgtctccaaaaattcccattgctctccatgctccaacctcatcagcaaatatttgcaatgtttctaaagcacaatgtttcaggctccctcctgacacagtggacttttgcaaatgatgytccttctgtctgagaacttctttccttatttttgcttaaccatcccacactcaacctgtctttcagcttaaatgtcaattttgcaggaaagcatcctctgggtcttcagactaaatatgatcgcagttataaattctcaagaacacctggtcagttcttttcctagatagccaaaatgtttgaaatcatggaatttctgcatgattgtttggcctggctatcccattaggctgcaagccccatgacagcagagcagtttaacttcatacctaataaactg

SEQ ID NO: 921878 - DNA, 723 bp, Homo sapiens
gagagtatatgggtttggcaccaccatgtggataggcaaaacaatttggttgataaggtgcagatcctgaaataagccgtaagccttgtctggttttaggacaggtaaaatgggggaattgtaaggggagtttataggctttaaaaggccatgctgtagcaggcgagtgataacagactttaatccttttaaagcgtgctgtgggatgggatattggtgttgagcaaggtaagggtgattaggttttaatgggatggtaaggggtgcatgattgatcgctaaggagggagtagagrtgtcctacacttgtgggttaaggtggggagatacaaggggaggatgtgaaagaggctttgaactgggcgaaaaggtggcaatgaggtgtggctgtagcccaggaatagtcagggaagcagataatttagttaaagtgtctcagcctaataagggaactgggcaggtggggataactaaaaacgagtgcttaaaagagtattgtctaagctggcaccagagtggggagttttaagaggtttagaaagctggccgtcaatacccacaacagttatggaggcaagggaaacaggcccttgaaaagaaggtaatatggagtgggtagcctccatattgattaagacagggacagacttaccctccactgtgagagttacccagagcatctgtgatggtcctgcaggcttccgaggcaatcgggcagtgtca

SEQ ID NO: 921879 - DNA, 771 bp, Homo sapiens
agaaagcatgtttgagttccagaacagaataatgggttgtggagggaggtattgaggataggagagtatatgggtttggcaccaccatgtggataggcaaaacaatttggttgataaggtgcagatcctgaaataagccgtaagccttgtctggttttaggacaggtaaaatgggggaattgtaaggggagtttataggctttaaaaggccatgctgtagcaggcgagtgataacagactttaatccttttaaagcgtgctgtgggatgggatattggtgttgagcaaggtaagggtgattaggttttaatgggatggtaaggggtgcatgattgatcgctaaggagggagtagaggtgtcctacacttgtgggttaaggtggggagatacaaggggaggatgtgaaagaggctttgaactgggcgaaaaggtggcaatgaggtgtggctgtagcccaggaatagtcagggaagcagataatttagttaaagtgtctcagcctaataagggaactgggcaggtggggataactaaaaacgagtgcttaaaagagtattgtctaagctggcaccagagtggggagttttaagaggtttagaaagctggccgtcaatacccacaacagttatggagrcaagggaaacaggcccttgaaaagaaggtaatatggagtgggtagcctccatattgattaagacagggacagacttaccctccactgtgagagttacccagagcatctgtgatggtcctgcaggcttccgaggcaa

SEQ ID NO: 921880 - DNA, 579 bp, Homo sapiens
tgcctaaccttggagcctgggcagaatagaagacaagaaaaggtagcacaagatgtggactagggaataagagtttaagaaaacaagagttgccataaagacccacaggactccatggaaatatgggatgcagaaggactgaaggaatcatcctcattttccggttgcctcaataatctgccctgacccttttaagttcttggcacatagcagataatgtactctctctctccatcatttgttgaataaattaataattacacatgttaaacccaggaggttttgaaaataaagcattaacattgtgtatgtgaggaagtaggcaacttttgattgtaaataggacaaacccagagacattgaaaacaggaatgtcttaatgaygtgatccttctgtcctactttcagcatcactcaagaagggaaatcttagcatgtgtaataatcattagcaatgaggcaattaatgaattcccttccctaaaagggattatttttgaatttttgacatttgcaaaacattttttttttttttctgagatggagcctcactctgttgcccaggctggggtgcagtgg

SEQ ID NO: 921881 - DNA, 476 bp, Homo sapiens
cagggtgggctgggagtgaggggccatgtccaaccacagggctttcactgttgtcacggatatggggtttcccaaatgtggtggtgcccttcttccctggtgtggcaggcatgccccagagtctggaggacaagtwtatcaatggccaaaaaaaaaaaaaaaggccagtaatggtaatgggttttcctagctgttttgggaggaaaagaggcacgcatacctttacctttttggttcaggcccgaaagagcagaaatagcactttaaaattacttattttattttttagagataacactttgatggtggtgtattttcttgctgaaattacttggcaactctggttctatgcttttcaaagcaaatagtgtctaactaaattaaaactaaaaattaaaaaaaatgattctaatcttatacaaatgaaaatggagggatagaaagaaaacaaatgcagttcattctgtttgtgaaaa

SEQ ID NO: 921882 - DNA, 760 bp, Homo sapiens
  misc_feature 27: n = A,T,C or G
accctataacaagtggaactatgaagncaatatataataacatgaaaagtgctaacagaaatctgtaaataaaaaattgattttacctatagaaaatgtacgtggaggtgggtgcggtggctcacgcctgtaattccaactctttgggaggccgaggcaggcagatcacgaggtcaggagatcgagaccatcctggcgaacactgtgaaaccccgtctctactaaaaatacaaaaaattagccgggcgtggtggcaggtgcctgtagtcccagctaatcaggaggctgaggcaggagaatggcgtgaccccggcaggtggagcttgcagtgagctgagatcgcgccactgcactccagcctgggtgacagagcgagactccatctcaaaaaaaaaaaaaaatgtatgtggatagggacaaaagatgasagtaaaagcatgtgatgcatctggctagtgcaatatgaatgttttaacatttctaatattctttgctcttataatgttttcaataaaatggagagatattgtaaaaatatttcaaaggctagtcttccttttcttctaacaaattctcttcatcaggtcaattttctcaaaatcttctcaattccagctttctccatgttggaaactgaaaggacagggctgggtggagagtgcgcgtatgtggggggtgaggacatgataggggaggttagagctggcgaagatgatggtataaagggttcctcttccagatctctgccagattgctcaga

SEQ ID NO: 921883 - DNA, 760 bp, Homo sapiens
  misc_feature 27: n = A,T,C or G
accctataacaagtggaactatgaagncaatatataataacatgaaaagtgctaacagaaatctgtaaataaaaaattgattttacctatagaaaatgtacgtggaggtgggtgcggtggctcacgcctgtaattccaactctttgggaggccgaggcaggcagatcacgaggtcaggagatcgagaccatcctggcgaacactgtgaaaccccgtctctactaaaaatacaaaaaattagccgggcgtggtggcaggtgcctgtagtcccagctaatcaggaggctgaggcaggagaatggcgtgaccccggcaggtggagcttgcagtgagctgagatcgcgccactgcactccagcctgggtgacagagcgagactccatctcaaaaaaaaaaaaaaatgtatgtggatagggacaaaagatgagagtaaaagcatgtgatgcatctggctagtgcaatatgaatgttttaacatttctaatattctttgctcttataatgttttcaataawatggagagatattgtaaaaatatttcaaaggctagtcttccttttcttctaacaaattctcttcatcaggtcaattttctcaaaatcttctcaattccagctttctccatgttggaaactgaaaggacagggctgggtggagagtgcgcgtatgtggggggtgaggacatgataggggaggttagagctggcgaagatgatggtataaagggttcctcttccagatctctgccagattgctcaga

SEQ ID NO: 921884 - DNA, 532 bp, Homo sapiens
ctcactagggagtgccagacagtgggcgcaggtcagtgggtgcgcgcaccgtgcgcgagccgaagcagggtgaggcattgcctcactcgggaagtgcaaggggtcagggagttctctttctgagtcaaagaaaggggtgacrgagggcacctggaaaatcgggtcactcccacccaaatactgcgcttttccgacgggcttaaaaagcggcgcaccacgagattatatcccgcacctggctcagagggtcgtacgcccacggagtctcgctgattgctagcacagcagtctgagatcaaactgcaaggcagcagcgaggctggaggaggggtgcccgccattgcccaggcttgcttaggtaaacaaagcagccgggaagctcgaactgggtggagcccaccacagctcaaggaggcctgcctgcctctgtaggctccacctctgggggcagggcacagacaaacaaaaagacagcagtaacctctgcagacttcaatgtccccatctgacagctttgaagagagcagtggtt

SEQ ID NO: 921885 - DNA, 532 bp, Homo sapiens
ctcactagggagtgccagacagtgggcgcaggtcagtgggtgcgcgcaccgtgcgcgagccgaagcagggtgaggcattgcctcactcgggaagtgcaaggggtcagggagttctctttctgagtcaaagaaaggggtgacagagggcacctggaaaatcgggtcactcccacccaaatactgcgcttttccgacgggcttaaaaagcggcgcaccacgagattatatcccgcacctggctcagagggtcgtacgcccacggagtctcgctgattgctagcacagcagtctgagatyaaactgcaaggcagcagcgaggctggaggaggggtgcccgccattgcccaggcttgcttaggtaaacaaagcagccgggaagctcgaactgggtggagcccaccacagctcaaggaggcctgcctgcctctgtaggctccacctctgggggcagggcacagacaaacaaaaagacagcagtaacctctgcagacttcaatgtccccatctgacagctttgaagagagcagtggtt

SEQ ID NO: 921886 - DNA, 618 bp, Homo sapiens
caagtcttccttctatgacaaaatagcgatgtttcctcagcattatagatttgttctggtggcatattttcatcagcatgaccttggcaaactcatcaataaatttatctgctgcttcatgatcagcagatgctttatcaccacaaatctttaaatactgaatgctgtgtttttcttaaattcaagcagcctattgaatattcatagttctttcatttttcagttcattgtgatagatctttgcttgcttcatgatcaatatgtccttaagtggcatgtgtttactgcaacactgatggrtttacccttgtaatacacaatcaagatcttcgtttttagctttaggcagtgtttctccacttttcattaacttctgttcatcccttcagcatggaacttcaacagtttatccttctgtttcttcaggtcatatacggtggtcattctagtaccatactcttatttaagatgtttcacacttaacacttatgtcactgtccagttttaccaacagcttaactttctgtgctgtagataaacataaatgcttcctctttttaaaaaagtactcttgcccataggggtagctgcaggcctttttggcattctcaacaatat

SEQ ID NO: 921887 - DNA, 658 bp, Homo sapiens
ggcaccataatgctgattccctcaaatgccctcaccaagctctgtgggcccagctcctctgggttttcctcttatttctggcccttatctctcagctactgtctcagctccactttctctctgtcccttaggcagtgctattctccaagggtctcatttttacttttcttatgctcacatccactggatgagctgattcccttccatggcttcaactaccawatgggtaccatagctcatacggatacacagctcagtcatacatcttcaatccagaactctcaatcctgttgcctactattgaccttcacttaaatataccacagtcactacaaaaacatctacatagttgatgtttctcaacatctttctccccaaacctgcttccccaggatgccccatttcagtgaaacctcagaattaaaccgttaggaacccagcagctatcctagactcacctcctctcttgggcccatgtccagtcagtccccaagtcctgtcagtcctgccctgtgcacctttctcacatctgcacctgatcgccaccccctgtggcactgctgtagatctgttactcttcctcctggagatcacctcacctgcctcctagctgatccctcttgtctcactctcatcctatccagtctgctgccacttg

SEQ ID NO: 921888 - DNA, 841 bp, Homo sapiens
gagagaaaggaaatctagtggaacaggaaagagagttacaccttgtgggtgtgagtttgggacctgttggcagaagggaatgtcactccctggaaacaggttcagcatgtttgcacttgttattttgtagctttaatgatttttgttttctaatagggcaaatgtctctaagcttggtgtttagagctgcttcatattttaaactagttccattccacagttctagttcaaaccagtttttacagcctcctgggttgggtcgtcttgacccaaactcttgtgttgttacattttgagakgttttcataccagaatgtaccaaaaagtgcacaaggtaaaggtaatttacagccagaaacaaatatacatttgtttcatttcttgactttccctaagcagataagcagaaacttgtttaactcattactttgtttgatgtgtcttacatatttttgactaaaagttatagaatgttattcctctgggggaatcttttacaggtggaggaatggggatagcagtattgcctcagattcaaactggcatcaccataaaccctgtaggccagggtggaatgaagtcagctcctttttatagttgaaatacaattttttattcaccattgtctgcacaaatccttgaaaataaacctttttttccctacagtctttgtcaatttatttgtcacatgctgaatttattgaagtttgttcagtcctcccctgggttcagttcatagcctaccttttagttcacattagtaaataccatcattcctgttatcccattgtgagagcatttgatgtattatatagttaagaatctatgatgggctagtttt

SEQ ID NO: 921889 - DNA, 585 bp, Homo sapiens
gctaagccttagcatgcaacctttaagtcatggagatgcagcatggtacaggaggaagactgcagggcttcaatctaccacctctctgcaagactctgggccttgaccccccctaagcctcagtttccttatctgggatctgaagataatagagccagcatgaggaaaatgggcctctgaaggtgaagtgtcaggcatgggcttggcaccatataggtgctgagcacgtgttaatcccatttccttggcctttgtgtggccaggggtggtccatgacagatggaggtggagttgaatttctgtccagkgagtagcccccaccttggctcctgccccaccctcccatctcctcatagcccacagttgttctcatcagctccatcctatgccagccaatcctggcaaaagttgaaaggccatttgtccacctgctacctggaagaagatcatgctccacatgcctgagctcaggaggcttagccatgagagctggactcctgcaatctagcattccagggctctccccacagaagcatgcctcaagccctagcttcaccgtgccctggagaccctctggcctcagca

SEQ ID NO: 921890 - DNA, 585 bp, Homo sapiens
gctaagccttagcatgcaacctttaagtcatggagatgcagcatggtacaggaggaagactgcagggcttcaatctaccacctctctgcaagactctgggccttgaccccccctaagcctcagtttccttatctgggatctgaagataatagagccagcatgaggaaaatgggcctctgaaggtgaagtgtcaggcatgggcttggcaccatataggtgctgagcacgtgttaatcccatttccttggcctttgtgtggccaggggtggtccatgacagatggaggtggagttgaatttctgtccagggagtagcccccaccttkgctcctgccccaccctcccatctcctcatagcccacagttgttctcatcagctccatcctatgccagccaatcctggcaaaagttgaaaggccatttgtccacctgctacctggaagaagatcatgctccacatgcctgagctcaggaggcttagccatgagagctggactcctgcaatctagcattccagggctctccccacagaagcatgcctcaagccctagcttcaccgtgccctggagaccctctggcctcagca

SEQ ID NO: 921891 - DNA, 585 bp, Homo sapiens
gctaagccttagcatgcaacctttaagtcatggagatgcagcatggtacaggaggaagactgcagggcttcaatctaccacctctctgcaagactctgggccttgaccccccctaagcctcagtttccttatctgggatctgaagataatagagccagcatgaggaaaatgggcctctgaaggtgaagtgtcaggcatgggcttggcaccatataggtgctgagcacgtgttaatcccatttccttggcctttgtgtggccaggggtggtccatgacagatggaggtggagttgaatttctgtccagggagtagcccccaccttggctcctgccccaccctcccatctcctcatagcccacagttgttctcatcakctccatcctatgccagccaatcctggcaaaagttgaaaggccatttgtccacctgctacctggaagaagatcatgctccacatgcctgagctcaggaggcttagccatgagagctggactcctgcaatctagcattccagggctctccccacagaagcatgcctcaagccctagcttcaccgtgccctggagaccctctggcctcagca

SEQ ID NO: 921892 - DNA, 564 bp, Homo sapiens
gtactttcttgattgtgtcctttagagcatagaagttttttattttgttgaagattcatttatcttatttttcttttgttgctcatgcttttggtgtcgtatctaagaattcattgccaaattagaggtcatgatgatatatttgtacatatcttctaagagttgtatagttttagctcttatgcttagatcctcgatccactttgagttaactttttatatggtgtgagataaggacccaattttaccctttcragtggggatatccagtattcctatgaaagactactctttctcctattgaatgatctgggcatctttgttgaaaaccagttgattacagatacatggatttatttctggactctcaattttattccattgatctacatgtttgtacttattctggtaccacactctcttgactactgatgctttgttgtaagttttgaaaccagtaagtgtgaatctttcaactttgtttttatttttcaagattgttttcataattcaagatcccttgaaattccatatgaatttctggataagcttgtcaatttctac

SEQ ID NO: 921893 - DNA, 558 bp, Homo sapiens
aaaatttaaaaaattactcccaagcaaccactaagaaagctatgcaaagtggtatagacaaacaaatctactataaataaattaagatgacattccaaataatcttcaagtaacccacaggaagacataaaaagagaggttggagagagaaagagagggaaacagaggaatgagaagtagaggaagcaaaccaacaaaaaaataaataaaaatayagacttaagccctatcaataattaccttaaatgtaaataatctaaatataccaattaaaagaccatgattggcacattggattaaaaaacatgaaccattaatatgctgcctataagaaactcacttcaaatatatcaccataggtaagttgaaagtaaaagaatggtaaaagttacatcatgcaaacattaatccaaaagatacccctccaaaaaagtcgattggtgtttacagcaaaaacaacaaagtacttttacaacatttgcagaggtaaaacatatgacagcaacaccacaaaggaagagaaaaagtcacttgtgtgccaaagagcctccagcggat

SEQ ID NO: 921894 - DNA, 584 bp, Homo sapiens
atgagaacacagggacaacacaccagaatctctgggatgcagctaaagcagtgttaagagggaaatttatagcactaaacggccacatcagaaagttagaaagatctcaagttaacaacctaacatttcaactaaaagaactagagaactaagtgcaaacaaacctcaaagctagcagaagacaagacttaaccaagatcagtggtgaaatgaagagagagacataaaaaacccttcaaaaaaatcaacgaatctaggagctggcttttgaaaaaattaataaaatagaccactagctaggctaataaagaagaaaagagagaagaatcaagtaaacacaatcaaaaaygacaaggaggatatcaccactgaccccatggaaacacaatcatcagagaatactataaacacctgtatgcacataaactagaaaatctaaaagaagtaggtaaattcctggacacatacaccctctccccagactgaaccaggaagaaattcaatgcctcaatagccaagcaatagttctgaaattgaggcagtaataaatagcctaccaacaacaacaacaacaaaaaccgagg

SEQ ID NO: 921895 - DNA, 434 bp, Homo sapiens
cagatgactggcacactacttacagatcttcagagggaaagcactgagagtggacagaggaaagacacagaaggtgttctaaaggggaaggaagctgggaaccctgcacagggcaaccatgcattgagactgacttctggccccacacaactccaggggatctggtgagttgaactggaaaggagcaacctgttctcacgatgggactctgaaatcycagcagcagatatgttgaccaccatggacacctgagttgacagggaatgctacttagagaagtggtaggggcagcacaccagccgaaggtgagcccagaaggtttggtgtgggagcgtctatagtggagcatgtccagggaagcacaaatctccaagttcgacttgctaccataagagaatttagccctaggggaaaggtcagacctaaattctgca

SEQ ID NO: 921896 - DNA, 598 bp, Homo sapiens
caaggcccataacatactacctaggtattgctgcttgttattcagggcccaagaattctttcatcagcaggtaagggatcctgtcaggactgtgtacttatcttcaagacagaggattcacttttggcccagggtatgtctaggtgtctctacaaatgtctttcaggaactagggtttggaatggggacctcacgactctgactagtgcccctattctactgtggcttgcatccaagatgcaagacaaagtactctttactcttccctctcctctcctcaagcagaaagaaagggtctcttttggagctgcaagttgtgctkcttggggttgggagagcaatggcacaagcattcccttggccaccctggctggtatctcagtaggtgccccctaattccactggctcaaagcccagctcagcacaaggacttgcctaggagttgcagtccttgtggcctagactacctttcaagtttatttagggccccaaagcaattcagctcacagtggcgaggcttgccagaactcaggtttcaaccactgggatgggttattcccctccggctagcgctcatctaaatgcttcctccatgggt

SEQ ID NO: 921897 - DNA, 782 bp, Homo sapiens
tcgaggagtttactgtcttatttgcatttctctgagagttcaaactttgaactctgaaaataaacggtaaatgtccacccatgacaggcaaatgttgtggcttaacaggtagaattttatccacatttttttatgatgagcaagcacaaggccacgtggctggaaaattaacctgaagttgacatgagaaaaataatgtggggctacttatttcaatcacagtcatgcatcacttattgacagggacactttctgagaaatgtgtcattaggtcattttgtcatgcaaacaccatagagtgtactcacaaaaacctagatggtataggctatgacacacctaagctrtattgtatagctactgttcctaggctacaaacctgtgcagcatgttactgtactgaatactgtaggcagccgtaacacaatggtaagtacttttccatctaaacatatctaaacatagacaaggtacagtaaaaatacactataaaagatgaaaaatggtacacctctataggaggcttatcatgcatggagcttgcaggactggaagttgctctgggtgagtcagtgagtgagtggtgagtgcacgtgagggttgaggacataatttcatgctactgtatttataaacgctgtacacttaggctatactaaattcatttaaatttttttctcaacaataaattatctttagcgtaccataactttttttactttatatataataatttttaaatttttttaattttttgacttttttataaaaacacagcttaa

SEQ ID NO: 921898 - DNA, 539 bp, Homo sapiens
gccctagagctttcagaaggaacacagccctgccaacatcttgattttggacttctgacctccagaactgtaagaggatacatttgtgttgttttaggctatccttaccgttatcgtggtaattttttacgccagcaaaagagaactaatacaactcctgtacctgaaaagcctagggcagcaatggcttcaggcttggctgggtctaggagctctaatggggtggccttgatgctgtccctcctcatgccttaactgctttcttttgcaatggccgtattcactgatgggctttcgctgggttgtggccaagctgaaaacagtagcctcaggcttttgcctcaccactggagcaatcccagtagcgcaaaytgcacccctttcctagtaatgtctgcaaatgtcccagggctgacctgcatgggccgagcttgtgccctgaatgatcaccatgattctgattggccaggtctcatcattgtgtctcaaggtaagcggggggatcagccctacctgaacctcagtgactcttaaggtag

SEQ ID NO: 921899 - DNA, 637 bp, Homo sapiens
cctaccagcagtgtagaagtgttcccttttcactgcatccacaccatctattattttttgattttttgatgatggccattcttgtgggaataaggtggtatcacattgtggtttttaacctgcacgtccctgatcattagtgatgttgagcattttttcatatgtttgttgttcatttgtatatcttcttttaagagttgtctattcaggtcattagctcactttttgatgggattgtttagcaagaaacaaaaatgttcatagtsgcatattctggtagaaaaaaagccctttaaacaacccaaatgtccatcaatagaatgaatgagtaaattgtggtgtatcatcaaatagaattccatacagcaataaaaaggaatgaattactgctataataaattatataaataagtttcaaaaaatgatgttacctttttaaaaagcttgacatgaaagaatatacactgtatgggtccatttatattaagtccaaaaacaagcaaaattgatgaatgaagtagaagtcaaaattgtagtgaactgggggaaacaaaagtcagggctactggaaagctagtaacggtttatttcttgatctgagtggtcattacatgggtgcatttaatatgtgataatt

SEQ ID NO: 921900 - DNA, 637 bp, Homo sapiens
cctaccagcagtgtagaagtgttcccttttcactgcatccacaccatctattattttttgattttttgatgatggccattcttgtgggaataaggtggtatcacattgtggtttttaacctgcacgtccctgatcattagtgatgttgagcattttttcatatgtttgttgttcatttgtatatcttcttttaagagttgtctattcaggtcattagctcactttttgatgggattgtttagcaagaaacaaaaatgttcatagtcgcatattctggtagaaaaaaagccctttaaacaacccaaatgtccatcaatagaatgaatgagtaaattgtggtgtatcatcaaatagaattccatacagmaataaaaaggaatgaattactgctataataaattatataaataagtttcaaaaaatgatgttacctttttaaaaagcttgacatgaaagaatatacactgtatgggtccatttatattaagtccaaaaacaagcaaaattgatgaatgaagtagaagtcaaaattgtagtgaactgggggaaacaaaagtcagggctactggaaagctagtaacggtttatttcttgatctgagtggtcattacatgggtgcatttaatatgtgataatt

SEQ ID NO: 921901 - DNA, 528 bp, Homo sapiens
attctttgacctgtggctgcataacttcaatctctgtctccattttcacatggctgtctcctcttccttttctgttttaaatccccgtatgtctttctctaataaagatacttgccattagatttggagcccactcagatattccataacratctcatcttgaaattctttacaattatatctgcaaagatatcttttccctatttgatcacatttacatgttccagggattagttcatggacatactttttgtttttcgcagggttgggcaccatttaacttactacagatcacaatttataaattctcattttagtgtcaagctttttatgaggtctgttaagttaaaacactatctatttggggaaatgggtagttttatgggatccaaatccaatggggagaattgatgctttgtgtatctcaattgactagaatgtattcaaattagaatagagaaagtacttaccaaactgttgttgagtttgcatctctcaaataagtatctcactgtacttattatttga

SEQ ID NO: 921902 - DNA, 537 bp, Homo sapiens
cgggggggttaggatgttattttaggtttacaacagctagaacttcagaaatagttgtgagcatttacattatcttcaacatcttacttttactattgcaaagaaaaaacaatataatttcagatatactttaccaaatggagcggtccaggtggcgggctgggtattaaagacagcttcgcagcgaaatcttttatatgaytgtccacttcaaaatctttacagggctttagaagagccaataaactgaaattcgaaacacaaaactcaaaccgcaaaataaagatgagaacgcagttgtcatcgttagcgtttctaatcacactggaatctccccagcgtctgcagcagcagctccaggacctttcaccaaaagcaaagtcaccaagctgctgggtgacagcagagtggccccaggtctgcggtagtgcctgacaggtggcacaaagggaggtatattttggaaggggaagtcctggtcatgctctgtttcctcatctggttgctagttacatgtgtgtgttcaatttgtgggaa

SEQ ID NO: 921903 - DNA, 537 bp, Homo sapiens
cgggggggttaggatgttattttaggtttacaacagctagaacttcagaaatagttgtgagcatttacattatcttcaacatcttacttttactattgcaaagaaaaaacaatataatttcagatatactttaccaaatggagcggtccaggtggcgggctgggtattaaagacagcttcgcagcgaaatcttttatatgattgtccacttcaaaatctttacagggcttyagaagagccaataaactgaaattcgaaacacaaaactcaaaccgcaaaataaagatgagaacgcagttgtcatcgttagcgtttctaatcacactggaatctccccagcgtctgcagcagcagctccaggacctttcaccaaaagcaaagtcaccaagctgctgggtgacagcagagtggccccaggtctgcggtagtgcctgacaggtggcacaaagggaggtatattttggaaggggaagtcctggtcatgctctgtttcctcatctggttgctagttacatgtgtgtgttcaatttgtgggaa

SEQ ID NO: 921904 - DNA, 524 bp, Homo sapiens
gcgcagtggctcacacctgtaatcccagcactttgggaggccaaggcaggtggatcacctgaggtcaggagttcgaaaccagcctggccaacatggtgaaaccccatctctattaaaagtacaacaattagccaggcatggaggtgggygcctgtaattccagctacttgggaggctgaggcaggagagtcacttgaactcgggaggcagaggttgcagtgagcagagatcgtgccattatactctatcctaggcaacagagtgagactctgtctcaaaatataataataatagataaataaaaatataaatatacataaaataaaatacaaaataaaaagactggagccttgtgttggtcaaagggctggatgtgggagtataccatctctgagttcagaggtgaccaggcatttgtggggcccctcaccccctgctccccactcaactcctgttcaggttcctgacacaggtatgaccccattgctctcacaaccatgatgccatttgagcctcgatgacca

SEQ ID NO: 921905 - DNA, 631 bp, Homo sapiens
  misc_feature 613, 614, 615, 616, 617, 618, 619, 620, 621, 622, 623, 624,625, 626, 627, 628, 629, 630, 631: n = A,T,C or G
tcatatcacatgcccaaaaacaaagcttcaaacacaaaaatcagaaactgactaaataggctggatgcagtggctcacacctgtaatcccagaactttgggaggctgaggtgggtggatcacttgaggtcaggagttcgaaaccagcctggccaacatggtgaaaccctgtctctactaaaattacaaaattagctgggcatggtggattaagtctgtaatcccagctactccagaggctgaggcaagagaatcacttgaaccagggaggctgatgttgcagtgaggccaggttgcatcactgcactccagcctgggtgatagagtgagactttatctctggaaaaaaagaaaaaaawtaaaaaagaactgactaaataacaagaagaaatagacaaatcagcaattacaggtggaaacctagagatttcaatacctctttctcaataactgataaagaggttgacagaaaatcagtaaatgcaaagaaaagtgaataatacacaataaactacttgactaaattgatgtttagagaacattccacctaacaatacaatacaaatgcttttcaagtgaacacagaatatttgccaagataaaccatattctgnnnnnnnnnnnnnnnnnnn

SEQ ID NO: 921906 - DNA, 611 bp, Homo sapiens
tatctgataatattgtgtggacaaaatctgaataatgggtagattttgcctattttcaacatgtcttctctggttttgtatacataagctaatatttagaggcagcagggatgaaacataaataatatgatattagacttaatcaggtatctgtctctgcatgcatttatttttagctaatttattgttcttctgcttatagttccacctctcttctttgttccttacttcctcatctttttttcttctagtcactcctctcaattctgcattgtttaaagtttctttttaaatcaattccatgtgattcttcatgtatttctctyaccacgtgtcataacctcccactctattcaagctaagctacatcatttctttcacatgtaattatctttttgccaccactgtgtctttctacaaggaagacatttcctttgtaaaaatatgtttgaggtatgtggttgtttgtattttcctggaacttaggcaatactgtcatatttgggggatttgggatcaagattataaatccagaatgttaataaagagaggataaaaatcaatttcatatttatctttccaagcagtgttagtcaaaataaagatgagga

SEQ ID NO: 921907 - DNA, 596 bp, Homo sapiens
ctcacaacagaagtaattgtcctcactgccagaaagagagtaagagagtttatttatttttatttttattttttattttgagacggagtctttctctcttgcccaggctggagtgcaatgacacaatctcagctcactgcaacctccrcctcctgggttcaagagaatctcctgcttcagcctcccaggtagctacaggcaagcaccaccatgcctggctaatttttgtatttttagtagagatgggtttttttgccatgttggccaggctggtttttaactccttacctcaggtgatccgcctgcctcggcctcccaaagtgctgggattacaggtgtgagccaccactcctggcagagggattatttcaacagttgtttgtgcatggtctggggattcacacttcctggtgagcccaatcttatgtttcactgtggttcccaccacctatctttgctcacatacaatagcatcacttttccatccctaccagactccagattatcataatctcaggaaatttggattataggccacagcaataacctcacaatagcaaagccattttttttctctcttttctctcaatgggcca

SEQ ID NO: 921908 - DNA, 596 bp, Homo sapiens
ctcacaacagaagtaattgtcctcactgccagaaagagagtaagagagtttatttatttttatttttattttttattttgagacggagtctttctctcttgcccaggctggagtgcaatgacacaatctcagctcactgcaacctccacctcctgggttcaagmgaatctcctgcttcagcctcccaggtagctacaggcaagcaccaccatgcctggctaatttttgtatttttagtagagatgggtttttttgccatgttggccaggctggtttttaactccttacctcaggtgatccgcctgcctcggcctcccaaagtgctgggattacaggtgtgagccaccactcctggcagagggattatttcaacagttgtttgtgcatggtctggggattcacacttcctggtgagcccaatcttatgtttcactgtggttcccaccacctatctttgctcacatacaatagcatcacttttccatccctaccagactccagattatcataatctcaggaaatttggattataggccacagcaataacctcacaatagcaaagccattttttttctctcttttctctcaatgggcca

SEQ ID NO: 921909 - DNA, 596 bp, Homo sapiens
ctcacaacagaagtaattgtcctcactgccagaaagagagtaagagagtttatttatttttatttttattttttattttgagacggagtctttctctcttgcccaggctggagtgcaatgacacaatctcagctcactgcaacctccacctcctgggttcaagagaatctcctgcttcagcctcccaggtagctacaggcaagcaccaccatgcctggctaatttttgtatttttagtagagatgggtttttttgccatgttggccaggctggttttkaactccttacctcaggtgatccgcctgcctcggcctcccaaagtgctgggattacaggtgtgagccaccactcctggcagagggattatttcaacagttgtttgtgcatggtctggggattcacacttcctggtgagcccaatcttatgtttcactgtggttcccaccacctatctttgctcacatacaatagcatcacttttccatccctaccagactccagattatcataatctcaggaaatttggattataggccacagcaataacctcacaatagcaaagccattttttttctctcttttctctcaatgggcca

SEQ ID NO: 921910 - DNA, 487 bp, Homo sapiens
  misc_feature 1, 2, 3, 4, 5, 6, 7: n = A,T,C or G
nnnnnnngaggcgaaacacttaccctctctgagtctcagccatttcttctctgtgaaatgggagtactgatcactgcctttacaggactgtcatgatgcccaggtgaaactggctctgaagtcttcagatagacctgtggggctggctgyagggtccttgctggatccacctctcctaacccctctggcctcttctgccccaaacactgtgctaagggtggggctgtgtattagtccattttcacgctgctgataaagacatacacgagactggataatttacaaaaaaaaaaaaaaaaaggaaaagaaaaagtttaaatggactcacagttccacatggttggggaggcctcacaatcatggcaaaaggtgaaaggcacatctcacctggtggcagacaagagaagagagcttgtgcagggaaactcccctttataaaaccatcagatctcatgagatttgttcactgtcatgagaatagcttggg

SEQ ID NO: 921911 - DNA, 487 bp, Homo sapiens
  misc_feature 1, 2, 3, 4, 5, 6, 7: n = A,T,C or G
nnnnnnngaggcgaaacacttaccctctctgagtctcagccatttcttctctgtgaaatgggagtactgatcactgcctttacaggactgtcatgatgcccaggtgaaactggctctgaagtcttcagatagacctgtggggctggctgtagggtccttgctggatccacctctcctaacccctctggcctcttctgccccaaacactgtgctaagggtggggctgtgtattagtccattttcacgctgctgayaaagacatacacgagactggataatttacaaaaaaaaaaaaaaaaaggaaaagaaaaagtttaaatggactcacagttccacatggttggggaggcctcacaatcatggcaaaaggtgaaaggcacatctcacctggtggcagacaagagaagagagcttgtgcagggaaactcccctttataaaaccatcagatctcatgagatttgttcactgtcatgagaatagcttggg

SEQ ID NO: 921912 - DNA, 487 bp, Homo sapiens
  misc_feature 1, 2, 3, 4, 5, 6, 7: n = A,T,C or G
nnnnnnngaggcgaaacacttaccctctctgagtctcagccatttcttctctgtgaaatgggagtactgatcactgcctttacaggactgtcatgatgcccaggtgaaactggctctgaagtcttcagatagacctgtggggctggctgtagggtccttgctggatccacctctcctaacccctctggcctcttctgccccaaacactgtgctaagggtggggctgtgtattagtccattttcacgctgctgataaagacatacacgagactggataatttacaaaaaaaaaaaaaaaaaggaaaagaaaaagtttaaatggactcacagttccacatggytggggaggcctcacaatcatggcaaaaggtgaaaggcacatctcacctggtggcagacaagagaagagagcttgtgcagggaaactcccctttataaaaccatcagatctcatgagatttgttcactgtcatgagaatagcttggg

SEQ ID NO: 921913 - DNA, 695 bp, Homo sapiens
gtggtggaggggagaggcagagacacacagccatggccccaggcagaggaagaggaagaggggaggtcaggaaggttggggagagacgaagagagaggggagaggataatgggaaagtggaagagaggaaagtgggacagggaaagagagaagtaagggagcagagaaagaggaaaagcaggkgaaaaggatgaggcagaggcacttggaggaggaatgaagccagggcctgggtctcatgagatgaaaaggtcaaccacggcccctctaaagaaaggctgccaacatcctttggcccatgagtagagaagtattttaaaatataagcttaatgagggcagggactttttaaaaattgtttctttttcttttggtgttgtatcttcagctcctagaatcatgcctgcccaggaatttaatagctatttgttgaatgataatattttagcgctggcagtcaactaaccacattttagacaagtagcttctgtgggctccatcctgcactcttgacaatggggagactccagagagagggaccaggctgcctggctgtttttgaggatcacagcttggctgggcaaaacgggctgagagaggggaggtaaagggaatttgcatgacaacgcacagtcagcgggtgattggctggctctggctacaggcagcacaggaggaacagcccagagaagcgg

SEQ ID NO: 921914 - DNA, 695 bp, Homo sapiens
gtggtggaggggagaggcagagacacacagccatggccccaggcagaggaagaggaagaggggaggtcaggaaggttggggagagacgaagagagaggggagaggataatgggaaagtggaagagaggaaagtgggacagggaaagagagaagtaagggagcagagaaagaggaaaagcaggggaaaaggatgaggcagaggcacttggaggaggaatgaagccagggcctgggtctcatgagatgaaaaggtcaaccacggcccctctaaagaaaggctgccaacatcctttggcccatgagtagagaagtattttaaaatataagcttaatgagggcagggactttttaaaaattgtttctttttcttttggtgttgtatcttcagctcctagaatcakgcctgcccaggaatttaatagctatttgttgaatgataatattttagcgctggcagtcaactaaccacattttagacaagtagcttctgtgggctccatcctgcactcttgacaatggggagactccagagagagggaccaggctgcctggctgtttttgaggatcacagcttggctgggcaaaacgggctgagagaggggaggtaaagggaatttgcatgacaacgcacagtcagcgggtgattggctggctctggctacaggcagcacaggaggaacagcccagagaagcgg

SEQ ID NO: 921915 - DNA, 740 bp, Homo sapiens
aggccccagtgcaaaagagccctcggtgggtgggggtggagggcgtctcttcccctcaccgccactagagggcagccgtggactctggttggagcctcgccccaggcagttcggccacctggttgccagaagggggcacctttctgacatgttttttggggaggcgggcaatggctgctggggccagggtccagaatatgggggaggctccagaaatgagcttggttctcttttgcatgaaacagctctaggggtgaagcagtgggggcctgaaaggggagggggaccgtgcagtgccagagaagctggttgtccctgtcagtggctctaactgcactaggacaagtgcctgggcatctcccaaggacaagaatgtgagcsgactctgctcctttacccagagtgggcaagagcccatttctctctgagttggtttttcccttccttccgcctagacctggcagcacctattctttgctctgggtccagagtgagcttgggccgtgcacattgaaccaggtgggcagcaggttttgtgcttgttcttttaattttgttttaattagtaaagcaacatgtgctcactgcaccaaaatcaaacaacagagaagggagtggctgtgttttctaagggagttccccagggctttggcaggttgttcaggccggtgaaagcactgtccctttccgcgcgtgtgtgtgtgtgtgtgtgtgtgtgtgtgtgtgtttgtgtgtgtcac

SEQ ID NO: 921916 - DNA, 698 bp, Homo sapiens
acctgggttctgggtccagcgatatgtcacaattttccctgtgagcaaggcacaggcaggagaaacacatcacctgtttgctgggcccagaaatatgctacagtttttcttgtgagcagggctcaggcagaaatgggggaatcacattttctaggtgataaatgcagagctatgtcacaaggtccccagtagtcagggccttggcagaagattcctattgtctaggcgattggcccagtgatacaacacaatagctaaattatgcagggcccaaggcaaagaggagagttgcatcacctaagtgatgaacaaaaagataygtcataatacccaggtggaaatgggccatgcaggtaagtcacattacctaggtgttggacccagtgatatgtcacaatacacaatatatgcagggcccagccaagaggggagagtcaaatcacccaggtgctgggcccgatgatacattgtaatctgtctttggtcagagccctagcagtagaagaaactcacatcacctccatgctgaggtcagccatatgtcacaataaccctgagaaatgagcccaggaaaagagtcacatcatttaagtgagaggcccatagatatttccaattcctcctgtgggtagtcctcagtaaaaagacagtcacattagttagagtctgtccccagcgatgtgtaagaatcccagctg

SEQ ID NO: 921917 - DNA, 698 bp, Homo sapiens
acctgggttctgggtccagcgatatgtcacaattttccctgtgagcaaggcacaggcaggagaaacacatcacctgtttgctgggcccagaaatatgctacagtttttcttgtgagcagggctcaggcagaaatgggggaatcacattttctaggtgataaatgcagagctatgtcacaaggtccccagtagtcagggccttggcagaagattcctattgtctaggcgattggcccagtgatacaacacaatagctaaattatgcagggcccaaggcaaagaggagagttgcatcacctaagtgatgaacaaaaagatatgtcataatacycaggtggaaatgggccatgcaggtaagtcacattacctaggtgttggacccagtgatatgtcacaatacacaatatatgcagggcccagccaagaggggagagtcaaatcacccaggtgctgggcccgatgatacattgtaatctgtctttggtcagagccctagcagtagaagaaactcacatcacctccatgctgaggtcagccatatgtcacaataaccctgagaaatgagcccaggaaaagagtcacatcatttaagtgagaggcccatagatatttccaattcctcctgtgggtagtcctcagtaaaaagacagtcacattagttagagtctgtccccagcgatgtgtaagaatcccagctg

SEQ ID NO: 921918 - DNA, 698 bp, Homo sapiens
acctgggttctgggtccagcgatatgtcacaattttccctgtgagcaaggcacaggcaggagaaacacatcacctgtttgctgggcccagaaatatgctacagtttttcttgtgagcagggctcaggcagaaatgggggaatcacattttctaggtgataaatgcagagctatgtcacaaggtccccagtagtcagggccttggcagaagattcctattgtctaggcgattggcccagtgatacaacacaatagctaaattatgcagggcccaaggcaaagaggagagttgcatcacctaagtgatgaacaaaaagatatgtcataatacccaggtggaaatgggccatgcaggtragtcacattacctaggtgttggacccagtgatatgtcacaatacacaatatatgcagggcccagccaagaggggagagtcaaatcacccaggtgctgggcccgatgatacattgtaatctgtctttggtcagagccctagcagtagaagaaactcacatcacctccatgctgaggtcagccatatgtcacaataaccctgagaaatgagcccaggaaaagagtcacatcatttaagtgagaggcccatagatatttccaattcctcctgtgggtagtcctcagtaaaaagacagtcacattagttagagtctgtccccagcgatgtgtaagaatcccagctg

SEQ ID NO: 921919 - DNA, 698 bp, Homo sapiens
acctgggttctgggtccagcgatatgtcacaattttccctgtgagcaaggcacaggcaggagaaacacatcacctgtttgctgggcccagaaatatgctacagtttttcttgtgagcagggctcaggcagaaatgggggaatcacattttctaggtgataaatgcagagctatgtcacaaggtccccagtagtcagggccttggcagaagattcctattgtctaggcgattggcccagtgatacaacacaatagctaaattatgcagggcccaaggcaaagaggagagttgcatcacctaagtgatgaacaaaaagatatgtcataatacccaggtggaaatgggccatgcaggtaagtcacattacctaggtgttggacccagtgatatgtcacaatacacaatatatgcagggcccagccaagaggggagagtcaaatcacccaggtgctgggcccgatgatacattgtaatctgtctttggtcagagccctagcagtagaagaaactcacatcacctccatgctgaggtcagccatatgtcacaatamccctgagaaatgagcccaggaaaagagtcacatcatttaagtgagaggcccatagatatttccaattcctcctgtgggtagtcctcagtaaaaagacagtcacattagttagagtctgtccccagcgatgtgtaagaatcccagctg

SEQ ID NO: 921920 - DNA, 614 bp, Homo sapiens
cagattagcttcaagggacacatggtatggctggagtcagatgactgttatgctgaagaagtcaacagtggtgactgatatctcaagaagtgggctaaaagtccacttctggttactctgctaggtatggtctaggaattcttcaaccatgagacarataggtcaactttcaccagcaaccccaagtctggtttgcagtattagactctgggttggacacagatttaggttcaatctgcagcttgattgtggtcactctctggaaaacacttaccatggacttctagatgagtgacccagttagatcagcatctggggttgtttccggtttgcagcccaaaagatattcagacagtctacactttccattgtagataaccaaacagatagaatatgtgccattatcccaaaccctgagttctgacctttgagaggagcaaccactcatgtcaggttctgtatggctggcacaggttaaacagccacagcggcccagtggacatcatgaggtttcaccttccctgactcatctatgaaccaggaccagtcatataggaaacactcagtaaattgggggccccacagagacagcagctttgcttcagaggatagaa

SEQ ID NO: 921921 - DNA, 571 bp, Homo sapiens
gcctccaaaagtgttggaattataagcaggagccactgtatccaatgtgtaatttttgttgtttgtgtatgctttaattactttctctttttctttactatgtttttttttccccagtggttatcatgagacttatgtaaaacmtcttgtattttaatagtctagtttaagatgataacaatttagagtattctgaatttcagtatgtatttaccatttttagtgacatttatactttagtatttttcatattgttagttagcatttcgtcatatcaatgtgaagatttcttccagaccatggctggagaaggaaagaaggtgtgttttgcctgattcagggactatagagagaaccaagttctgcaggcctgtcacctaagtctcagatgagtatgaattctcttgtgtttttcacagatttttgcagtggcaggaccaagttcaaatgagttatagccaagtctacagtaagatgtggcagtattctgttttgaaccgaggaccatgattggcaagcttgccacttggtcaagtgcttaccctctaaagatgtcttccttggtctttgc

SEQ ID NO: 921922 - DNA, 571 bp, Homo sapiens
gcctccaaaagtgttggaattataagcaggagccactgtatccaatgtgtaatttttgttgtttgtgtatgctttaattactttctctttttctttactatgtttttttttccccagtggttatcatgagacttatgtaaaacctcttgtattttaatagtctagtttaagatgataacaatttagagtattctgaatttcagtatgtatttaccatttttagtgacatttatactttagtatttttcatattgttagttagcatttcgtcatatcaatgtgaagatttcttccagaccatggctggagaaggaaagaaggtgtgttttgcctgattcagggactatagagagaaccaagttctgcaggcctgtcamctaagtctcagatgagtatgaattctcttgtgtttttcacagatttttgcagtggcaggaccaagttcaaatgagttatagccaagtctacagtaagatgtggcagtattctgttttgaaccgaggaccatgattggcaagcttgccacttggtcaagtgcttaccctctaaagatgtcttccttggtctttgc

SEQ ID NO: 921923 - DNA, 660 bp, Homo sapiens
agactctcgggaactgaatcaggccccagcccatgccccccagcccagtccagccaacgtgcccgctgtcttcccacccagccagccgagccctcaggattgttagatggaaccaggctccatcaccacccaggcatggagggaagatgtcctggtccttagcaagcaaggcctggtttccaaagtgctctccgaagaggcctcatgtttgtgacatcttagaaggtacctttctgctgttcttgcacccagcatgttggcaagtcaagttcccccactgagttctccacacataaggagggagtcaacaccattgctaagtcggatcagctcaagkgtctccagtatcagttttatcagatcccagggacctgtctgctcccagaggtgacagagaaaaatcaaggaatgatctgtatggtcactgacatggatgaaacccttgtgcatagctccattaagccaatcagcaatgctgactgcctagtgactgtaaagattgaggggaccatgaggccctatatggatgagttcctgagatgactggaggaactgtttaaatgtgttttcttcattgctctcttcattccagactgaacaagtatgcagatcctgttgagaggtgacagcgtgctggcagtcctcacaacccttgctcac

SEQ ID NO: 921924 - DNA, 624 bp, Homo sapiens
aagacaatgacagttgaagcagaacctgagatcctgtttctctccattgacatatgaacttaactacaattgggtgaacaaagccagttgagtttgtagcaccccacatgagaaaaaagccaaccataaccacatttagaagaaaatttggtcacatttgtgcactacagaacagcgcagttagataaaaatctgtccattccatgattctcctttgggaaagaaaaaagagtgaaatgggtatgcaaacttctgacttactgagttataccggggttatctaaagactggaaattgcttcctttaacatgtagtgttgatgagaatagagactgagtttaaatgacagcttgggtcaactgagaataaagataaatgcttcttacaacaasagagactgtagtgcctgtaacagtgacaaagggaagagacgaaaggctcctaagaggaaagagaggtaaaccttattaacaagaaaatacatacagtagtccaaagaagacacattttgacaacagattggagaagctcccggaatgacgagtgtggctgaatattgtcaattttcccatgtataaagctctttcataaaggataaaataggtagtggtttcttaattgatc

SEQ ID NO: 921925 - DNA, 738 bp, Homo sapiens
cagaatgggagagaatttttgcaatctacccatctgacaaagggctaatatcaggaatctacaaatagctaaaacaaatttacaagaaaaaaaaacaaccctatcaaaaagtggggaaaggatataacagacacttttcaaaggaagacatttatgcagccaacagacatatgaaaaattgctcatcattggtcatcagagaaatgcgaatcaaatccacaatgagatatcatctcacgccagttagaatggcgatctttaaaatttcaggaaacaacagatgctggagaggatgtggaaaaatagaaacacttttacactgtgggtaggagtgtaaattagttcaaccattgtggaagacagtgtggtgattcctcagggatctagaaccagaaataccttttgactcatcaatcccattactgggtatatacccaaagagttataaatcatgctactataaagacacacacacrcatatgtttattgcggcattattcacaatagcaaagtcttggaaccaacgcaaatgtccatcaatgatagattggattaagaaattgtggagcatatacagcatggaatactatgcagccataaaaaggatgggttcatgtcctttacagggacatggatgaagatggaaaccatcattctcagcaaactatcacaaggacttcaaaccaaacaccgcatgttctcacttataggttggagttgaacaatgagaacacatgg

SEQ ID NO: 921926 - DNA, 536 bp, Homo sapiens
ccaaaggtacaaagaggagctggtaccattccttctgaaattatttcaaacaatagaaaaagaggtactcctccctaattcattttatgtggccagcatcatcctgaaaccaaaacctggcaaagacacaccataaaaagaaaatttcaggcccrtatccctgatgaatatcgatgcgaaaatcctcaataaaatactggcaaaccgaatccagcagcacatcaaaaagcttatccaccacgatctagtcagcttaatccctgggatacaaagctggttcaacatatgcaaatcaataaataaaatccatcacataaacagaactaatgacaaaaaccacatgattatctcaatagatgcaaaaaaggccttcaataaaattccacacctcttcatggtaaaaactctcaatgaattatgtattgatggaacctatctcaacataataagagttatttatgacaaatgcacagctaatatcatactgaatgggcaaaaactggaagcattccctttgaaaacctgcacagagacaa

SEQ ID NO: 921927 - DNA, 719 bp, Homo sapiens
cttcaggccacaaggagtggacggacactgagcaagtatcctgcttatctgtccacagatccagaacaagtggcatcccaggagcctgggaggggctggcagagacttactggttccagcaaaagcccatgtggatgcagcaatgctgcctgctggtccttggctgtaattacaaacaggtacttgaggtccccatgcatcttgcagctctcagagagtgkgttccagctgctcatggtaggcacttttagtcactgaacgtgcttcaggaatggccaagcttgattaagccaggcgtcttgctgtgagaccctccacccaactgaggaccctcttccttgtcccccctgacagtttaccttccagttctggttctagagacacgatggcccttcttggacccctgggagaatgtgctcagatgacacacagtcgacagggcccatttccaagccattcttccatttcccactgtttgaggggccgaggccggtgatcagcacagggccacccagggccagctgtctgcacctaaacgtcatgttggtctggatgtctcagggccagaactctccaggtaagatggcctggtcctcagcacctggcctccgtgctcctttttcctctgttcaatcctggccccaatgcctcccgcaactctcaggtcaccattggagaagatgctcaggaagaagaagccgctgcagtcaaccctgctg

SEQ ID NO: 921928 - DNA, 719 bp, Homo sapiens
cttcaggccacaaggagtggacggacactgagcaagtatcctgcttatctgtccacagatccagaacaagtggcatcccaggagcctgggaggggctggcagagacttactggttccagcaaaagcccatgtggatgcagcaatgctgcctgctggtccttggctgtaattacaaacaggtacttgaggtccccatgcatcttgcagctctcagagagtgtgttccagctgctcatggtaggcacttttagtcactgaacgtgcttcaggaatggccaagcttgattaagccaggcgtcttgctgtgagaccctccacccaactgaggaccctcttccttgtcccccctgacagtttaccttccagttctggttctagagacacgatggcccttcttggrcccctgggagaatgtgctcagatgacacacagtcgacagggcccatttccaagccattcttccatttcccactgtttgaggggccgaggccggtgatcagcacagggccacccagggccagctgtctgcacctaaacgtcatgttggtctggatgtctcagggccagaactctccaggtaagatggcctggtcctcagcacctggcctccgtgctcctttttcctctgttcaatcctggccccaatgcctcccgcaactctcaggtcaccattggagaagatgctcaggaagaagaagccgctgcagtcaaccctgctg

SEQ ID NO: 921929 - DNA, 552 bp, Homo sapiens
gccaactctggagcccagtctgttgcttcgcagtctggtggtgaatcctccatagtctgatgagtgtaaatatatatatctcttttcccttctctccgtcccattgcaacttgcttattatatcatttgcttattatatctgcattgccatatatgtgggatacagtttgtttacccttaaaggtattgtgtgtgtgtgtgtgtgtgtgtgtgtgtgtgtgtgtgtgtgtttccttctctccttgagcatttcctgcgcagaacatttttggcttcacgaacaggatccgaaagcaaaagcatgccattttttggtgcagggaccagactgggagctcggggactttccatatcttcagatgggaactcccctagttcttccccktggccattcagtggtacaagggagctggcgtttgtgaaaataggcaatctaagttagtgcattttgaatcattggctgtgtgtgaggaggtgcagggaatcccagttggtaaatgggatgctgagggaatttcccggcatggatggtgcttgcttactgcttataag

SEQ ID NO: 921930 - DNA, 552 bp, Homo sapiens
gccaactctggagcccagtctgttgcttcgcagtctggtggtgaatcctccatagtctgatgagtgtaaatatatatatctcttttcccttctctccgtcccattgcaacttgcttattatatcatttgcttattatatctgcattgccatatatgtgggatacagtttgtttacccttaaaggtattgtgtgtgtgtgtgtgtgtgtgtgtgtgtgtgtgtgtgtgtgtttccttctctccttgagcatttcctgcgcagaacatttttggcttcacgaacaggatccgaaagcaaaagcatgccattttttggtgcagggaccagactgggagctcggggactttccatatcttcagatgggaactcccctagttcttccccttggccattcagtggtmcaagggagctggcgtttgtgaaaataggcaatctaagttagtgcattttgaatcattggctgtgtgtgaggaggtgcagggaatcccagttggtaaatgggatgctgagggaatttcccggcatggatggtgcttgcttactgcttataag

SEQ ID NO: 921931 - DNA, 631 bp, Homo sapiens
ccagggtggcagcaagagagaagggatttgcagggattccataaagctattgacttaagatgttagttacattctgagagcagagacaggcacaatggttaaatgactgccattttgaggaaatattgactctgaccagtggattccgtggcttgtttcacaatgcctggacacaatggcctgttacttgcacgtgtgtgtgtgcacatgcacgcacatacacaagcaatcagttaataattaaagccttgcttatgtgtccgcattgaaaaatgcttccggctttcatttcatgtcatactgtctcccacttcaccctcaaatgcatgctttgaaggaggattatttctattttgtatgctctggaaattaactgatagatgtgtgcatttctatcccccgcttctccatttgtgtccctccttaccttttattcttgtctgctctctgctcctcccycctgattttcaccaacttgtttctttgctttaaatctctccctcatctgaggctgcttgtcttccctgccccactgccccctccacttccctttctccttcttctgtattcctttctgactcctttttctcctcgcctctctcttttctcgtctttctctctctctgtcact

SEQ ID NO: 921932 - DNA, 708 bp, Homo sapiens
gttcctctgaaggaggcatgggagcttgctcactaaggagagtgtgctgccgacacttgagccaagatggccgaataggaacagctccggtctacagctcccagggtgagcaatgcagaagacgggtgatttctgcatttccatctgaggtaccgggttcatctcactagggagtgccagacagtgggtgcaggacagtgggtgcagtgcaccgtgcatgagccgaagcagggcgaggcattgcctcactcgggaagcgcaaggggtcagggagttccctttcttagtcaaagaaaggggtgacagacggcacctggaaaatcgggtcactcccacccaaatactgygcttttccgacaggcttaaaaaacggcacaccaggagattatatcccgcacatggctcggagggtcctatgcccacagagtcttgctgattgctagcatggcagtctgagatcaaactgcaatgcggcagcaaggctgggggaggggcgcccgccattgcccaggcttgcttaggtaaacaaagcagccaggaagctcgaactgggtggagcccaccacagctcaaggaggcctgcctgcctctgtaggctccacctctggggacagggcacagacaaacaaaaagacagcagtaacctctgcagacttaagtgtccctgtctgacagcattgaagagagcagtggttctcccagcatgca

SEQ ID NO: 921933 - DNA, 708 bp, Homo sapiens
gttcctctgaaggaggcatgggagcttgctcactaaggagagtgtgctgccgacacttgagccaagatggccgaataggaacagctccggtctacagctcccagggtgagcaatgcagaagacgggtgatttctgcatttccatctgaggtaccgggttcatctcactagggagtgccagacagtgggtgcaggacagtgggtgcagtgcaccgtgcatgagccgaagcagggcgaggcattgcctcactcgggaagcgcaaggggtcagggagttccctttcttagtcaaagaaaggggtgacagacggcacctggaaaatcgggtcactcccacccaaatactgcgcttttccgacaggcttaaaaaacggcrcaccaggagattatatcccgcacatggctcggagggtcctatgcccacagagtcttgctgattgctagcatggcagtctgagatcaaactgcaatgcggcagcaaggctgggggaggggcgcccgccattgcccaggcttgcttaggtaaacaaagcagccaggaagctcgaactgggtggagcccaccacagctcaaggaggcctgcctgcctctgtaggctccacctctggggacagggcacagacaaacaaaaagacagcagtaacctctgcagacttaagtgtccctgtctgacagcattgaagagagcagtggttctcccagcatgca

SEQ ID NO: 921934 - DNA, 708 bp, Homo sapiens
gttcctctgaaggaggcatgggagcttgctcactaaggagagtgtgctgccgacacttgagccaagatggccgaataggaacagctccggtctacagctcccagggtgagcaatgcagaagacgggtgatttctgcatttccatctgaggtaccgggttcatctcactagggagtgccagacagtgggtgcaggacagtgggtgcagtgcaccgtgcatgagccgaagcagggcgaggcattgcctcactcgggaagcgcaaggggtcagggagttccctttcttagtcaaagaaaggggtgacagacggcacctggaaaatcgggtcactcccacccaaatactgcgcttttccgacaggcttaaaaaacggcacaccaggagattatatcccgcacmtggctcggagggtcctatgcccacagagtcttgctgattgctagcatggcagtctgagatcaaactgcaatgcggcagcaaggctgggggaggggcgcccgccattgcccaggcttgcttaggtaaacaaagcagccaggaagctcgaactgggtggagcccaccacagctcaaggaggcctgcctgcctctgtaggctccacctctggggacagggcacagacaaacaaaaagacagcagtaacctctgcagacttaagtgtccctgtctgacagcattgaagagagcagtggttctcccagcatgca

SEQ ID NO: 921935 - DNA, 708 bp, Homo sapiens
gttcctctgaaggaggcatgggagcttgctcactaaggagagtgtgctgccgacacttgagccaagatggccgaataggaacagctccggtctacagctcccagggtgagcaatgcagaagacgggtgatttctgcatttccatctgaggtaccgggttcatctcactagggagtgccagacagtgggtgcaggacagtgggtgcagtgcaccgtgcatgagccgaagcagggcgaggcattgcctcactcgggaagcgcaaggggtcagggagttccctttcttagtcaaagaaaggggtgacagacggcacctggaaaatcgggtcactcccacccaaatactgcgcttttccgacaggcttaaaaaacggcacaccaggagattatatcccgcacatggctcggagggtcctatgcccacagagtcttgctgattgctagcatggcagtctgagatcaaactgcaatgcggcagcaaggctgggggaggggcgcccgccattgcccaggcttgcttaggtaaacaaagcagccaggaagctcgaactggktggagcccaccacagctcaaggaggcctgcctgcctctgtaggctccacctctggggacagggcacagacaaacaaaaagacagcagtaacctctgcagacttaagtgtccctgtctgacagcattgaagagagcagtggttctcccagcatgca

SEQ ID NO: 921936 - DNA, 592 bp, Homo sapiens
atggctaaaagggctccagatatgtctcaggcatctgctccagaaggtgcaagccatgagccttggaggcttccacatagtgttaagcctctgggtgcacagagggcaggagttgaagcttgggaggctctgcctagatttcagaggatgtacggaaatgcttggaaatcaaggcagaagtctgttgcaggaacagagacctcatggagaacctctactagaacagtatggatgggaaatgtgggattggaggccccacacagagtctcaactggggcactgcctagtggagctgtgagaagaaggycaccatcctgcagaccccagaatggtagatccactgacagcttgcaccatgaacctagaaaagctgcaggcactcaacttcataggggtggagatgcccaaggcctttggagcccaccccttgcatcagtgtggcccggatgtgacacatggagtcaaaggagatcattttggagctttaagatttaatgaccgccctgctgggtttctgacttgcatggggtctgtaacccctttgtttgggctaatttctcccgtttagaatgcgtgtatttacccaatgcct

SEQ ID NO: 921937 - DNA, 592 bp, Homo sapiens
atggctaaaagggctccagatatgtctcaggcatctgctccagaaggtgcaagccatgagccttggaggcttccacatagtgttaagcctctgggtgcacagagggcaggagttgaagcttgggaggctctgcctagatttcagaggatgtacggaaatgcttggaaatcaaggcagaagtctgttgcaggaacagagacctcatggagaacctctactagaacagtatggatgggaaatgtgggattggaggccccacacagagtctcaactggggcactgcctagtggagctgtgagaagaaggtcaccatcctgcagaccccagaatggtagatccactgacagcttgcaccatgaacctagaaaagctgcaggcactcaacttcataggggtggagatgcccaaggcctttggagcccaccccttgcatcagtgtggccyggatgtgacacatggagtcaaaggagatcattttggagctttaagatttaatgaccgccctgctgggtttctgacttgcatggggtctgtaacccctttgtttgggctaatttctcccgtttagaatgcgtgtatttacccaatgcct

SEQ ID NO: 921938 - DNA, 496 bp, Homo sapiens
ctaaattaatctcagctcctggtaaggtcaaatccttctcctgtgatctagaccttcaggttccccagtgaggatgtgcatttgggagcagattctcaccctctcacactttgggcactcccagttttttggctgttctcatggcacctgcagtggcaagctgcttccttgaaagggtctgcggattctctggcctttcctggtatgttcctgtggtagttcttggagcagaaaatcacaatgtgagtcttcacatgctgctctgtacatctgagtggaagctgcaagttagttttgtctcctatctgccatttttcccctcaggattattagaatttcraagcttggaggagaggccacaaggagctgagactcagagctctgcagggagtgggaggtgccagttgctgctaggatctctgagagggcacaataaggcagcctctgaagtgtgggaaaagcaaattgcaaactaggaccaactactgacaatgga

SEQ ID NO: 921939 - DNA, 661 bp, Homo sapiens
acaagtagcaggtatgggggaaagaacacggtccaggcgtcggatagaaggcctgccgcacaatctcaggaaggtctcctaacctctctaggcctctgtttcttcctctagtggtgaactagatgatttctagggattcccaatcttgtgtaaattttaacagttctatctctggattcaaaaacaagaaatgctaggccaggtgtggtggctcacttctgtaatccttgcactttgagaggctgaggcgagcagatcacttgaggccaggagttcaagaacagcctggccaacatggtgaaaccttgtctctacttaaaaatatgtatgtgtatatatacatgtgagtgtgtatgtgtatatatatatatatatatatatatatatatatatatatatatatacacacacatacatatacatacatacaagtatatacatacatacacacacacagaaattatctggacatggtggtgcacacctgtaattgtagctacttgggagttggaggttgctgtgagctacgattgcaccactgcactccagcttgggtgaccgagygagaccctgtcaacaaagaaatgaaacattagaaaaaatcccttctctctatagttgcataggcacccacacatccacagagggtagccgcctgtct

SEQ ID NO: 921940 - DNA, 585 bp, Homo sapiens
agaaaataaacataggcattgaacattaaagacaaacactttaaaacaactatcttaaatatgctaaattgggagctgaaagtactagaactgaattgaaaattttactggcgggattcaacagcagatttcgcaggcagcagaaagaattttcaaacttgaagatagataggccaataaaaatagaagaaaatraacaaacagagtctaaaagagttgtgagacaccctcaagtgaaccaacatatacattttgagagtctcagaagaagaaaggagttgaaagattatttgcagaaataatggccaaaaactttccaaatttgatgaaagacatgaatctacaaatccaagaagctaaacaaactctaagttgaaaaagccaaagggacccacactaagattaaaatcagtcttaagaaacaaagagggaatcttgaaagcagcaagaaaagcaactcattgtgtacaagaaattctcaataactttataaactgatttctcagcagaaaccttgcaggacagaaggcagtggaattatgtatttgaagtgcagaaagagggggaggggccaagatggctgat

SEQ ID NO: 921941 - DNA, 606 bp, Homo sapiens
gagataattttatacttttctttccaatttagaagtccttaatttcttttttacttgcctaatttctagcctgattggtctagtactttcattactatattaaatagaaatggcaaaaattagtgtccttttttgtttcatatcttaggggaaaatctttcagtctttcaccattgagtgtgatgctaactgtgaatttttaatatatgacctttattatgtagagctaatttccttttgttcctagtttttgagcatttttaatcatgaaagaatgttgaattttgtcaaatgtttttgctgcagcaatggaaataaacattagtatagtttggatatttgtccccacccaaatattatgtagaaatataatgctcagtgttagaggtggggcctrgtgggaggtgtttggaccaatggggcagattcttcatgacaggcttgtgccattcccttggtgataagcaaggtctcactctgagttcacataagatctcgtcatttaaaagtgtgtggcaccttccctgccacctctctttctcacttgctcttgctttcaacatgtgatgtgcctgtttccttttcacctttcaccttaattgaaag

SEQ ID NO: 921942 - DNA, 615 bp, Homo sapiens
ctggattctagagcaaataatcttatcattgagaccttattataaaatttccttgacctatgtgtcctaaggttggtaggttttatttagaaaccatagaatatacttaacagaaatgtcaaggagattgtaggttattgctaatcattggcagtaatttaaatatagagcaattatgtgtcttgacatagttgataactagattttgaaactgaaatatattcactttctcactctgtacctcctaaagctgaaacccaaggcatgttcaaataaagctttgaataacttttctgccactgaaagaaattacatctatagcctacgstttgaatcatatcagaaggaagacttgcagcccttggtggtattatatgtcttatactagggcattcttcagcaaaagctccagtattctgtgatagctaggggtatcccaggggcactttagggtatctgcatatggatcaacctagaaactttgctgatatactcttctaaatatgttctcttcagagtagaggggctagatagataggtcatctacatatatatagtttctatattaacatatagatatgtgtgtatatatatatgtgtgtatgtgtgttcata

SEQ ID NO: 921943 - DNA, 603 bp, Homo sapiens
ccatcaggtcctggtctttttttggttggtaggctatttgttactgccacaatttcagaacttgttattggtctatttagggattcagcttcttcctggttcagtcttgggagggtggatgtgtccaggaatttgtccatttttactagactttctaatttayttgcatagagctgtttatagtattctctgattattgtatttctgtgaggtcagtggtgatatcccctttatcattttttaaattatctatttgattcttctctattttcttctttattagtctagctagtggtctattttattttttcattgattcattgatttttttgaagggtttttcctgtctctatctccttcagttccactctgatcttggttatttcttgtcttctgctagctttggggtttgtttgctattggttctctagttcttttagtcgtgatgctctgtgtgtcaatttgagatcttgttttttgatgtggacatttagtggtataaattttcgtcttaacactgctttagctgtgtccaaggcattctggtacattgtctctttgttttcacaggtttcaaataactagatttctgccttgatttca

SEQ ID NO: 921944 - DNA, 734 bp, Homo sapiens
ggtgcctggcagcggctaagcagggactgaatgccagacactatggctctctaaggtgggctacagccctggaagcggagggtctttgtcttggcaaaagggtcatatgggcttccctatccaggcccattttgaacaaccagggtctcctaattagtaagagcgaggctcaagrccagggaccaagatcccagactctgagatcaccctcaagtgtttcttccacctgctactgcccactaggcatcatagagtaattataaaaaggatgaaaggccaagaacctatgttcttctttcaaaactgtttgaagagacttcctcagaaatttcttttagataaagcaggcgttttctctacctgatttagccaaatcgtttttgaccacactgtgctaaagacagcgcttgactgctaggctacaagtgtttcactaggattgctcagaatttgcttagccaggggtgtagtaattggactcaattattcattcccaacaaatgagccgagtgactgggagtacatggggtagacttggtgggtcactgcctcagaattgacaggcaagacaactgaaaagattcttggatgtaaggagaaataggagtatttcagggaaggatgtgtggtgtttgttttgaaaccctcatctatctagacttagaggaaaaaagaggaactgggaagagatgagctgagaacattccacatggtatgtctgtttagcacaatga

SEQ ID NO: 921945 - DNA, 687 bp, Homo sapiens
aaatcaagataccctgtggctccttgctgcactgtctgatgcagacagatggttgtatctgaccagtagattgcctacggagggtcagcaccccaagggccgatttcaggtgtattttggagacacctcctgagggcttgtattcagatctatttaggagacagcacatacaggtctggcacataaaaatagtacaaagaaaataaagaaattgtgggagaggggtgcaggtgaatagatgatctgcccttggtgaactgaaccaagttccataaagccaacagactctgcctactagtggtactggtgaatatatggtaggaagaattagatsctttccatcaactttaaaaaaaaatttatttagacggagtctcactctgtcacccaagctggagtgcactggcacaatcttggctcactataacttccacctcctgggttcaagcaattcttgtgcctcagcctcccaagtagctgggactacaggtgctcaccaccatgcctggcttttttttttttttttaattttgtatttttaatagagatggggtttcttcaagttggccaggctggtctctaactcctggcctcaggcaagccacccacctaggcctcccaaaatgttgggattacaggcgtgagccaccctacccagccttcatcaactttttgtgctaggaatga

SEQ ID NO: 921946 - DNA, 684 bp, Homo sapiens
tgaagagtctggacctgctgggtctccccgagtgactgtctgggggtctccatagcatgccctgctgtgtgcgtgacggtcactggttgggtaggggtctctactctaaagctccctctgccggcatcccctcgaactctcccttggtgaagagaggatgtggtttgccccagtgttttatcaaacaactctctccacttccagttttaagaagctgggagtggaagagagcctggggctggccccagctgctgctgtgaaacaggggtcactggacgctgggaccctggccgggctggctggaggcctcaggaagaggcctgctacagcgtcatcctggccaagattcctccctgcagaggaccctggccacgctgccacagggtctgctggggccaccagaarcccatgctcctgcctccatctctcccctctgtgctcacctctcaccaggaggccctcccagagttcagtgtcctgcttttttttttttttttttttttttttgtgacggtgtctcactctgtcaccaggctggagtgcagtggcgcgatctcagcttactgcaacctctgcttcctcggttcaaatgattctcctgcctcagcctcctgagtagctgggactacaggtgccagccaccacgccccgctaatttctgtatttttagtagagacagggttt

SEQ ID NO: 921947 - DNA, 598 bp, Homo sapiens
gattggcaggccgctatcaaggcataggttggtgatgcagtttctgctggatcctcaggagaactggactgcctctgataccctgattgaacaggactggagccaggtcatggggccacttctagttctacagtcaagtcttcagatatcaggcctattaccaagggcatggactggtatagctccctgtgggtcccagattgagctcctgctggtttactaggtaggtccatgggaagacaggactgcctccagaccacagtagagcagggctagagccaagtcacaggacagctttggtgaccacatttgrgttcaagattggtggtcctcttattaggagaatggatggtatgtctttcaccaggtcccaggatgggctggactgtgcccagactgtggcaaagcaagactggaatggagtcacagggctactttagtgtccatagctgagactgagatcagcaggcctgttaccaagggtatgtaaaggcatcactgaattcctgggcaggcatgactgactgtggtagagtggggctgaagccaggtcagggctgctttagtttctgcagtcaggaccatggttagaaggcct

SEQ ID NO: 921948 - DNA, 561 bp, Homo sapiens
tggtgaaaggagtgctaaggaggaaatttatagctataaacacattaaaaaaagaaacacctcaattcaacaacataagtttacacattaagaaactagaaaaagaagaataaaactaaacccaaagttagcagaaggaaggaaacaatagagatcagggcagagataaatggaaaagagaatagaaaaacaataaaaaacaaaaccaaaagttggttcttcaaaaagattaataaaactgacaagactaaggaaaagggaaacaatctaaattacttaaaacagaaatgtatttgagaatatctttatatatttctgtctgtctgtctgtctgtctgcctgtctatgtyttagagacaaggtctagctctattgccctggcaacaatcagatgcaaccagaatcagtggcacaatcggctcactgcagccttgaattcctgggctcgccactatgccagctcttttttttttttttttttttaagagacaggatcttgccatgttatccaggctgatcttgaactcctggcctcaaggaattttcccacctcggcctccc

SEQ ID NO: 921949 - DNA, 561 bp, Homo sapiens
tggtgaaaggagtgctaaggaggaaatttatagctataaacacattaaaaaaagaaacacctcaattcaacaacataagtttacacattaagaaactagaaaaagaagaataaaactaaacccaaagttagcagaaggaaggaaacaatagagatcagggcagagataaatggaaaagagaatagaaaaacaataaaaaacaaaaccaaaagttggttcttcaaaaagattaataaaactgacaagactaaggaaaagggaaacaatctaaattacttaaaacagaaatgtatttgagaatatctttatatatttctgtctgtctgtctgtctgtctgcctgtctatgttttagagacaaggtctagctcyattgccctggcaacaatcagatgcaaccagaatcagtggcacaatcggctcactgcagccttgaattcctgggctcgccactatgccagctcttttttttttttttttttttaagagacaggatcttgccatgttatccaggctgatcttgaactcctggcctcaaggaattttcccacctcggcctccc

SEQ ID NO: 921950 - DNA, 561 bp, Homo sapiens
tggtgaaaggagtgctaaggaggaaatttatagctataaacacattaaaaaaagaaacacctcaattcaacaacataagtttacacattaagaaactagaaaaagaagaataaaactaaacccaaagttagcagaaggaaggaaacaatagagatcagggcagagataaatggaaaagagaatagaaaaacaataaaaaacaaaaccaaaagttggttcttcaaaaagattaataaaactgacaagactaaggaaaagggaaacaatctaaattacttaaaacagaaatgtatttgagaatatctttatatatttctgtctgtctgtctgtctgtctgcctgtctatgttttagagacaaggtctagctctattgccctggcaacaatcagatgcaaccasaatcagtggcacaatcggctcactgcagccttgaattcctgggctcgccactatgccagctcttttttttttttttttttttaagagacaggatcttgccatgttatccaggctgatcttgaactcctggcctcaaggaattttcccacctcggcctccc

SEQ ID NO: 921951 - DNA, 720 bp, Homo sapiens
actgacttttagtatcatatcttttattacaagtccaatgtattcagcatatctatggatctatttcttggtgcttccattttttcccattgtttaacggtgtatcactgagccaaagcaaaccattttaattattataattaaaacacatttaaatattgataggctattattgttcagaataactttggttcttcctttccattgattattttaatatgacttttccaatcaagttctaaaaaaatactggtggtatatttattgaaataactttaataaaattaaatgaaagatcatgtgttttctgaattaattcttagatacrttaatgttttatgttaccatgaatgtgatattataatataatatttttaattggttgctactgtttataagaatttcattttctctttactttgccttcatatctgaaaaccttgctgatttgattagtgcatccacaaattttcttggattttctatgggtaattacaaatctccacacaatgaggttgcagtgagccaagatcacaccactgtactccagcctgggcgacagagtgagacaccatctcacaaaaacacataaacaaacaaacagaaactccacacaatgacaacgtatgtgttttctttttttcttcctctttctataatatttctttgtcctatcttaactgaactggccagaaaccccaggacaatgataaatacgag

SEQ ID NO: 921952 - DNA, 571 bp, Homo sapiens
ttggatcatctgccactgatctctggtcaacatttttatcacccaacacaaaagaagcagagatttatcaagttacttaaacaacctgaccctttcatcttttgctacacatactcttgtaattgatctctccatgaattgttttctgtttaaaatatctagaatgttttctgcttcctgacttgattctaatattgtataggtactagaaatggttctagaaatagatctttatagatgagaatctggaagtggtttgctgacctgtttcagtctgaatgaattcctgaccttgttgtcgggaggagacagaaacctgatcatctgtagtgtacggtggtatcatgattacttaaatcatcaaatgtggttatygggaatgatgtgttttttaaagtggtacatgagaggtaaaattgctattgtagttgactgttgcagttataattttgtcaacatggtctgtaagagtgcaatggattcggcccggtgtggtggctcacgcctgtaatcccaatactttgggaggccaaggtgggccgatcacgaggtcaggagatcgagaccatct

SEQ ID NO: 921953 - DNA, 752 bp, Homo sapiens
caagaatcccagtataattttaccttgacagaaggaggttcaggctcagtctttggcactggttcaagaggtggagacggaggaggaggtggggatggtgactcagcttcataagccccaggagagtctggaaagactgaaataatgaaacggacttagatcagagaactacaagcactatctggtataaagccttctccattggttctctaamttgacatgtccagcaaaggggatttagcaagcagtaattcatgacaaccaagaactctgtagttatatagttatctttaaaatacatattttattaattttatacaaataaaatcagagaatcaagaattattacagccggaagtatcttagctaaatattttcttttatagctagtcaggttatgaagttggtttacaaatatccacttatcgcctttcatatgccatgtatttcactttattcttacaacaactctaagagacagattttcttatttgcacattacagtaaatagaggttcagaggggttcctaaacttgccaaggtcacacagcttataactgagacaggaggttttaagcctaagtcaatccaattctacagccttgctattccaactatcccatgccgccttaccattgaggacaagacattatctctcaagatctatgtggagataatcctcaggttataacaaatgttccatgccagagtctttcactgtgacctaagggttacttttaatcacctgagat

SEQ ID NO: 921954 - DNA, 666 bp, Homo sapiens
gttcggacatgctgggagtttcttccttctagtggggttcgtggtctcgctggctcaggagtgaagctgctgaccctcactgtgagtgttacagctcttaaggcggggcgtctggagttgttcattcttcctggtgggttcgtggtctcactggcttcaggagtgaagctacagaccttcgtggtgagtgttacagctcataaaggcagtgtggacccagtgagcagcagcaagttttattgcaaagagcaaaagaacaaagcttccgcagtgcagaaggggaccccagcgkgttgccactgctggcttgggcagcctgcttttattctcttatctggccccacccacatcctgctgattggtacagccgagtggtctgttttgacagggcgctgattggtgcatttacaatccctgagctagacacaaaggttctccacatccccactagattagctagatacagagtgtggacacaaagattctccacctccccaccagagtagctagatacagtgtcgattggtgcattcacaaaccctgagctagacacagggtgctgattggtgtgtttacaaaccttgagctagatacagagtgccaattggtgtatttacaatcccttagctagacataaaggttctgcaagtctccaccagactcagg

SEQ ID NO: 921955 - DNA, 608 bp, Homo sapiens
tattaggctatgaccctagatccctcacctttcaatgtaccaacttcataagggtcatatgttcaccataatcaaggcaattttacctttattgtcaggatgattaaccaaatactttcttttaaaaattttattttaggttcacgggtacatgtgcaggtttatggtataagtaaattgtgtgtcacaaataatctgtttggtgcacagattatttcattacctaggtaataaagatattacccaacaggtagtttttccatccttaccccctaccttgtgtaggctctagtgtctgttattcccttctttgtgtccatatgtatttgaagtttagcttcaaattatatgtcagaatatgtggtatttggtttttttgttcctgcattagttcacttaggataaaggcctccagctccatccatgttgctggaaaraaaatgacctcattcttttttatggctgtgtagtattccatggtatatacataccacattttctttattcaatctactgttgatgggcatttagatttattccatagctttgctattgtgaatagtgctgcagtgaaaatatgcatgcagctgtctttatggtagagtggc

SEQ ID NO: 921956 - DNA, 564 bp, Homo sapiens
tacctaagcgagcctgggcaatggtgggcgcccctcccccagcctcgctgccgccttgcagtttgatctcagactgctgtgcttgccatcagggagactccatgggcataggaccctccgagccaggtgcgggatataatcttgtggtgcgccgtttcctaagcccatcggaaaagtgcagtattggggtgggagtgacccgattttccaggttctgtctgtcacccctttccttgaccaggaaaaggaactccctgaccccttgcacttcccgagtgaggcaatgcctagccctgcttgggcttgcgcacggcgccctgcacccactgtcctgcgyccactgtctggcactccctagtgagatgaacccagtacctcagatggaaatgcagaaatcacccatcttctgcgtcgctcacacggggagctgtagaccagagctgttcctatttggccatcttctaacaaactccctaattcttaataaaactttatagacaaatttattcaatcttaatcagtttgaccataagataagatacctataaactttttttctcacct

SEQ ID NO: 921957 - DNA, 597 bp, Homo sapiens
agctggagctgaagcagctggaatacagggcaccatgtcccgaggctgcataaagcagggggttttggggcccagcccaggaaactatttttccctcctaggcctctgtgtctgtgatgagaggtctgccatgaaggtctctgacatgccgtggagacattttccctattgtcttggttattaacattcatctcctcgttacttatgcaaatttctgtggccagcttgaatgtctcctcagaaaatgggtttttcttttctattacatcatcatcctgcaaaatttccaaacttttatgctctgctctctcttgaatgctttgctgcttagaaatttcttctgccagataccctaaatcatctctctcaagttcrtctctagggcaggagcaaaatcttaccagtgtctttgctaaagcatagcacgagtgacctttactccagtttccaacaagttcctcacctccatctgaaaccacctcagtctggacttcattgtccctatcactatcagcattttggtcaaagccattcaacaagtttctaggaagtttcaaactttcccacatttcccagttttattctgagccctccaaa

SEQ ID NO: 921958 - DNA, 536 bp, Homo sapiens
cacggagcctcgctcattgctagcacagcagtctgagatcgaactgcaaagtggcagtgaggctgggggaggggtgcccgccattgctgaggcttaggtaggtaaacaaagtggccaggaagctggaactgggtggagcccaccacatctcaatgaggcctgcctgcctttgtagactccacctctkggggcagggcatagctgaacaaaaggcagcagcaaactctgcagtcttaaatgtccctgtctgacagctttgaagacaatagtgcctctcctagcacagagtttgagatctgagaacagaagagtgcctcctcaagtgggtccctgacccccgagtagcctaactgggaggcaccccccagtaggggcagactgacacctcacacgtttgggttcccctctgagacgaagcttccagaggaatgatcaggcagcaacatctgttgttcagcaatatttgctgttctccagcctccgctgctgatactcaggcaaacagggtctggagtggacctccagcaaactccaac

SEQ ID NO: 921959 - DNA, 469 bp, Homo sapiens
tctcataatcgtagcagagggtgaaaggcacttttacatggtggcagcaagagagaatgaggaagaagcaaaaggaaacccctgataaaccaattatatcatctcatgagacttttcactgtcacaagaatagcatgggaaagaccagcccccatgattcaattacctccccctgggtgactcccacaacacatgggaattctgggagatacaattcaagttgagatttgaatgggacacagccaaaccatatcattccccctggccctccaaacctcatgtcctcacatttcaaaaccartcctgccctcccaacagtcccccaaactcttaactcatttcagcattaaccaaaaggtccacaagtcccaagtctcatctgagataaggcaagtcccttccacctgtgagcctgtaaaatcaaaagcaagctagttacttcctagatacaatgagggtacagataatg

SEQ ID NO: 921960 - DNA, 618 bp, Homo sapiens
agccacagtgagataccactgcacacgtatcagaatgctaacatccccaaatatgacaataccaaatgtgtacagagcaacaggaactctcattcattgctggcaaggagtacagaatggtacagctacttcggaagacagtttggcagcgtcttacaaatttaaacatagtctgattgtacaactcagcaattgtgctcctagatatatacccagttgagttgaaaygtacacccatacaaaaagctacacacagatgtttatagcagcttcatttgtaatggccaaaaattggaaacaaccaagatgtccttgagtaggtgaatgggtaaactgtagcacatccagacaatgcaatgttattcagggctaaaaagaagtgagttgtggttgagcatggtggctcacgcctgtagtcccagcactttgggaggctgaggcgggcagatcacgaggtcaggagatcgagaccatcctggctaacacggtgaaaccccgtctctactaaaaaaaacaaaaaaaaatagccgggtatggtggcacgggcctgtagtcccagctactcaggaggctgaggcgggagaattgcttgaactctggaggcggaggttgcagtga

SEQ ID NO: 921961 - DNA, 658 bp, Homo sapiens
ctaacagaatgaagattctcttaattgcttctgtattcaatgtactgcaccacaatatattctgtcagttaaatatatgaagaaaatccagcctcactcagatatgtagttagaaagggaggaatattttaataggtgtttcaggtagttatggatatacctttgatactacaccaaaattccacagtggtggattcttgaaggtttgtggaatctcaaaacatatcggtagtctgtcacattaaaattcaatgctctagcaygcacttttactgatgtatgactgtttaacatcacatgcatcggtcacccgtaaaagactgatttactgagttatacagatcttccaaatgttaacacattacatagtatcaaaaaatcacattcgttaatatgactactgattttatttgaaaaaatattttaagtattgggaggctgtcaagctcacaatggcagagacgtgttttccaaaattctaatttttgcttgaaagctcaaatttcatcatgggcaacaaacactgtacactgaagtatcagtttcactgttcttttgagaaaatgtccaccaaatatccaagtctgaataactatagttcatcagttacttcaaataaaagtgatgttccatgaaaactgcagttgaaactcaaaac

SEQ ID NO: 921962 - DNA, 578 bp, Homo sapiens
gaaaacaaggtcctgggaaccacaggggctccacaacagggctccaatctttagcaggtggtgtaaaaagatctattagtccatttttgcgttgctgtaaataagtacctgagactgggtaatttataaagaaaagagatttaattggctcgcagttctgcaggttgtacaggaagcatggctggggagacctcaggaaacttacaatcatggtgaaaggcaaagaggaagcaggcacatcttcacatggctagagcaggaggaagacagagagmgaagagggaggtgccacacacttttaaacagccagatctcataagaattcactcataatcaaaagaacagcaccaaaggggaaatccaccctcatgatccaatcgcctcccacaaggccccacctccaacatgggggattacaatttgacatgagatttggatggggacagagacccaaaccatatcaaaagagaaaggctgttctcctcttactatggcaccaaagcactcgggagtcaccaaggcaggaagtaaagggctgaccattaacaaaaacatcttgacagttgagttgtaacagt

SEQ ID NO: 921963 - DNA, 578 bp, Homo sapiens
gaaaacaaggtcctgggaaccacaggggctccacaacagggctccaatctttagcaggtggtgtaaaaagatctattagtccatttttgcgttgctgtaaataagtacctgagactgggtaatttataaagaaaagagatttaattggctcgcagttctgcaggttgtacaggaagcatggctggggagacctcaggaaacttacaatcatggtgaaaggcaaagaggaagcaggcacatcttcacatggctagagcaggaggaagacagagagcgaagagggaggtgccacacacttttaaacagccagatctcataagaattmactcataatcaaaagaacagcaccaaaggggaaatccaccctcatgatccaatcgcctcccacaaggccccacctccaacatgggggattacaatttgacatgagatttggatggggacagagacccaaaccatatcaaaagagaaaggctgttctcctcttactatggcaccaaagcactcgggagtcaccaaggcaggaagtaaagggctgaccattaacaaaaacatcttgacagttgagttgtaacagt

SEQ ID NO: 921964 - DNA, 712 bp, Homo sapiens
tacgggatcattctgtggtgcagcaaggccctgccggcctgaccagatgtggtgagcccatcctaagtcactcggagggggccagaatgggatcgcaacaggagtccggggaacacagcaggcgtcctgaagatccccctccctttgtggaagtcggctcaagcaggtcctgaggacaggagctctgggggtttgggactgggacaggaggagacacctgcggccccctctcccacgccgctccaaagaagacccaggatccagcsgccgactcggcggcagcaggagcatcgcggccgccgggcgatggtggcaatatttaaaggggacgcagcctatctgtcaggagtggagcctgagtcggctcagccaatgcgcatgcgcgaagcccgagcggtttctctggtcacagtggttcccacggttgtcttagaaaccagtccccgaggctttgcagagcaggagccctccgtggcagtgcttgggtaccgaggctctgaggctccggtctcacctctccacgggctcgaagggaaactctcctgatgccagcagtcgcaaagggccgactatgaagatgaaaccacagatggagacgggggaagcagcacgggatcccagcctcaggcctgcacagacggtgttggttggggtgagtctcgccaaaagtcgcgccgccgtccgtgatctcgaggacgggtcgggctgcgtg

SEQ ID NO: 921965 - DNA, 579 bp, Homo sapiens
tgattaaacctccttcttttgtaaattgcccagtctcaggtctgtctatcagcagcatgaaaatggaataatacagtaaattggtaccagtagagtgggctctactgaaaagtgcctgaaaatgtggaagcaactttagaactgggtaacaggcagaggttgaaacagcttggaacactcagaaggagataggaaaatgtggcaacgtttagaaccacctagagacttgttgaatggctttgcctaaaatgatgttaatgatacggacaatgaaatccaggttgaggtggtctccaatggagatgaggatcttggggactagaacaaaggtgacttttgttatgttttagcaaagagactggtggmattgtgctccaggcctagagatttgtggaactttgaacttgagaaagatgatttagggtatctcatggaagaaatttctaagcagcaaagcattcaagatgtgacctgggtactgttaaagtcactcagttttataaaggaagtagagcataaaagttcaaaaagtttgtggcttgacaatctgatagaaaagaaaatcccattttctgagga

SEQ ID NO: 921966 - DNA, 579 bp, Homo sapiens
tgattaaacctccttcttttgtaaattgcccagtctcaggtctgtctatcagcagcatgaaaatggaataatacagtaaattggtaccagtagagtgggctctactgaaaagtgcctgaaaatgtggaagcaactttagaactgggtaacaggcagaggttgaaacagcttggaacactcagaaggagataggaaaatgtggcaacgtttagaaccacctagagacttgttgaatggctttgcctaaaatgatgttaatgatacggacaatgaaatccaggttgaggtggtctccaatggagatgaggatcttggggactagaacaaaggtgacttttgttatgttttagcaaagagactggtggcattktgctccaggcctagagatttgtggaactttgaacttgagaaagatgatttagggtatctcatggaagaaatttctaagcagcaaagcattcaagatgtgacctgggtactgttaaagtcactcagttttataaaggaagtagagcataaaagttcaaaaagtttgtggcttgacaatctgatagaaaagaaaatcccattttctgagga

SEQ ID NO: 921967 - DNA, 588 bp, Homo sapiens
attaatgaagagagtgctgtatggcacacttgtaaggcactgtttgtctgagcaaagtgggcagttgatatttacaagtatgaaatataaagatatcaaatatattaactggagtgctgctttatggattggctgactttcagaagcatgagaatgactctcaaaagcctggctactggtgccaaattgtyatggatcatttacaaccattttaaataattacaattattttaaataattctggtatgtgttacttactacagctgaagaaaaatcagtcctttcctagtaggtcagaaactttttattcttagtcaactctgtttgtctgtcccagccaaagctccaggaaatatcatcaggtattgtctagagccctgttgttgaggtgttgattcgaccagaagacaaacatgtcatttgtgaaattctgattttcagtttgtgtattgattagcataattttttctgcttttttctttgaatcatatacagagccatatggcgacgatagctgtacaaaaggccttgtgtaacatatcaaatggatataagtcaagtaacaataattgaaagtattaaaagatt

SEQ ID NO: 921968 - DNA, 581 bp, Homo sapiens
tccagccatgactaaaaggtgccaaggtacagctctggccgttgcttcagagggtgcaagccccaagccttggcagcttccatgtggtgttgagcctgtgggtgctcagaagagttgaggtttaggaacctccacttagatttcaaaggatgtatataaacacctagatgtccaggcagaagtttgctgcaggggcagagcactcatacagaacctccactagggcagtgtggaaggaaaatgtgggaatgtggggtgggcaccctcacacagtgtccccactgggacagtgtccccmctggggcagtgtctagtggagctgtgagaagagggccaccattctcaagaccctagaatggcagatggactgacagcttgcaccttgagcctggaaaagccacagacactcaaagccagcctctgaaactagccaggagggaggctatcccctgcaaagccacagaggcagagctgcccaaaaccatgaggactcacttctgcatcagtgtgacttagatgtgagacataaagtcaaaggaaatcattttggaacattaagatttgactgcccttctggattt

SEQ ID NO: 921969 - DNA, 466 bp, Homo sapiens
ttctccctgattatgctagactccgtgttccacaatattaatgttttgaataagagaaaacaattcagaagggtctcctgaaatattttgcctatctttctaaaatagtttctagaaagttttttttttttttagtttttagcaagttttttttttttttttctgtgactccagagatgyttcaaagtaaattgatcaactttcaggtacactttcatgcctgtagtatctttcactttatactactttacacctaatctgaccaccactcagttttcactgaaacactctgttcatgcattcaaactctattccatgtaccctcctcctgcttagtctgagagtactttcattgacatgttttccctcgaagtattttttctaatatttatgctaatgtcccaatattttatattaaccttccacctctccagtctgtctctgcacctggcttattcattactga

SEQ ID NO: 921970 - DNA, 571 bp, Homo sapiens
cccaacttccgaggaatcaactatttcaggtgtatttgtcttaaagctacaatgacatattttcatagaaatgaaaaattttttattgaactaaaaaggacttcaaatagccaaagcaatcttgagcaaaaagaacaaagctggaaacatcgcaatacctgacttcaaaaggyaccataaatctatgataagcaagacagcctggtactagcataaaaagagacacacagaccagtggaacagaatagaggtcccagaagtaagtttatgcatttactgtccatttattttttttgacaaagatgccaagaatatacaagtgggaaagaacaatctcttgcacaaacggtgttgggaaaactgcatgtctacatacagaagaatagaaatataccccatctcacatcatatataaaatttaactcaacattgattaaatactacaaatataacctacactgtaaagctcctaggagaaaataaaaaggaaaaattttataaaactggtttgggcaataaatttttggacattactgcaaaagcacaagcaacaaaaacaaaatacacaaat

SEQ ID NO: 921971 - DNA, 564 bp, Homo sapiens
ggagcacctcagacccagagcatccaaaacagactctccatttttcccctaaataggactcttctattctcctccattgcaaggaactggcaccatctatcatccaagccagaaacaacatcctccttgagtgctctctttctcacttgctgcacccaattttggccaagttctgctaattctggctccagaacagctctcaaatctctccccgtttcttcatcacgactaccagaccctastccagttcccattgttttgaggctggatcttggaattgcttgctcaacaggggtccctttatctagaccagcttccaacaaaccattttccaaagtaagccatagagatcttccttcaaaattgcatgcagaccaggcacagtggctcacacctgtaatcccagcactctgggaggccgagctgggtggatcatctgaggtcaggagttcgagaccagcctggccaacatggtgaaatcctgtctttactaaaatacaaaaaattagccaggcatggtggcacccgtctgtaatcccagctacttgggaggctgaggcagga

SEQ ID NO: 921972 - DNA, 630 bp, Homo sapiens
ccagcagccactctcagctccagaccatatacgtttccttagagcaccactctcactcccgctgtcttcccccaacatgaaggtgccacttccacctagaatccgtttatctgcacctgtctgctaggtgagctcttcctcatcctgcatctctcttccccagggagagttagaatgcccctgcagcctcaccatctccatcacggcactgaccaagctgggtagtcactgtcctcacagttgccacccccatcagayagatgcttccacgggacagggacacgtgcctggcacagatttggggctaaataaatgcccatggaagagagaaaggaaaagactaatggtctgagagctgagactcacagtgggaggaaggtctgaggtacagagaggccataaggaacagcaaaaaggagaaacagaacggctgtggttcaggtgacaggaatgtcagggcaaagggttcaggtgatgtgaacactggggcaaatgagagcaggtgggaaaatgctctacatacctggatgggtggagacagaggaagaggggctggggggccaggccaagaagtccccagaaacgatggaagacttctggagaaggtatgacctaaagtgataagccagc

SEQ ID NO: 921973 - DNA, 634 bp, Homo sapiens
ccagcatgttcatctccactggagggcacaggagtttgtatatcaaaggctataaaacttatttggagacctggttcaggatggatttggcctaatttttatattatgcaagcagatcaccccgataaactttcatgggtttatgccataggtcaaggtgcttccttctgcttcagattcattgtcttgctttggttagtgttcaaaacagtacctcttatgaatacagcctgacgataccctcccctgtttctctgctaaacaattggagcttatcatttttggcaagacagacctaggggctaacttctgcctatggaatcaacagggtctctatgtaagatgagcttactgtgtcttctacatttttagttacacgaatcttgttgcaatcaccatgaaaggactctcccatggatttttggtccattcatgtctagtaaaactgggttatcaggacttcctctctgtaacaygctttgttggggtgagaatgattgtaaagtgtgctgccaatgcaagtcttttatggtttttgttaatgacttaaaacactcggctgctgatggggaaaagtggaaagcaaatgtcttccaaacgctcaggcaatgaaaaaatgttctggtgattttca

SEQ ID NO: 921974 - DNA, 546 bp, Homo sapiens
ctaaaaaatgtagttatgttcgtccttctgctgtttcagctacatatgcaattcactccaaaagtgtctagaaaagtattagctagaggagtattttgaagacatctagttaatgaaggaaccttcagtataaggaacgagacaagacaagataaagtggatgctactgtgtaaaatggagatgttgaggtaaagtagtttgagttgtcactgaccagcaggcaataattgcttttataggtgccaaaattccatactgtttataataaatagcaaaaaacataaaagccttctttgaagccaaagtaatgcatataagcattcagtttaagcatcagtataagatgcccatttggagtctktttcaacattcagtaagaataacagcatagtgaagtcaactgtgatgatgggtatccaatacaaaatgcagagaaaggaatggacccaatctggtgtgataccaagcataggtatactgcacctggagtctactctttgaacacatcatcagccagattattcagagctttgtgatattgatca

SEQ ID NO: 921975 - DNA, 546 bp, Homo sapiens
ctaaaaaatgtagttatgttcgtccttctgctgtttcagctacatatgcaattcactccaaaagtgtctagaaaagtattagctagaggagtattttgaagacatctagttaatgaaggaaccttcagtataaggaacgagacaagacaagataaagtggatgctactgtgtaaaatggagatgttgaggtaaagtagtttgagttgtcactgaccagcaggcaataattgcttttataggtgccaaaattccatactgtttataataaatagcaaaaaacataaaagccttctttgaagccaaagtaatgcatataagcattcagtttaagcatcagtataagatgcccatttggagtctgtttcaacattcagtaakaataacagcatagtgaagtcaactgtgatgatgggtatccaatacaaaatgcagagaaaggaatggacccaatctggtgtgataccaagcataggtatactgcacctggagtctactctttgaacacatcatcagccagattattcagagctttgtgatattgatca

SEQ ID NO: 921976 - DNA, 630 bp, Homo sapiens
cctgccctctgactagggggaaatggaaaggggatgtggctaatcctattctcataagttcttcacattcgctgtcgcatgataagggtgtcccagagcagaagacacaatggggagtcgcagagcccagcatggaaaggaaagacaaaaccacatcactgtgttgctgatacaccagacaggaccagaaaggaggcattgaatggtcagtctccaagccataggatttccagaagaargtgggagaggagacgctgggctgcagaaatcactgagccaaccagacagagcatggggggcgagcacgttcaggggcccagaacctgggctcaccaaagggtctgactgagaatcttactctactcacgcagggctcttcttcttcagtcccccacacctctacctcccctctgcactgggcttcttgcatcttttaaggacatttctacttgtttacaaatgtggccacatcctcccacctgggaaacatatatatgtatgaaaagaaacccagaaggctcatatatatatgcatgagctttctaggtttcttttcttttctgtttattttgaggcagggtctcactctgttgtccaggctggagtgcagtggtgcaatctcagctcact

SEQ ID NO: 921977 - DNA, 613 bp, Homo sapiens
gtttaccgtgggattctgtaggcgcctgtagaaacagaattccaggccgggcgcggtggctcacgtctgtaatcccagcattttgggaggccgaggtgggcggatcacgaggtcaggagatcgagaccatactggctaacgcggtgaaaccccgtctctactaaaaacacaaaaaattagccgggcgcggtggcgggcacctgtaaacccacctactcgggaggctgasgcaggagaacggctggaacccgggaggcggagcttgcagtgagtggagatcaggccactgtgagaggtgacagcgtgctggcagtcctcgcagccctggctcgctctccgcgcctcctctgcttgggctcccactttggtggcacttgaggggctcttcagcccaccgctgcactgtgggagcccctttctgggctggccaaggccggagctggctccctcagcttgcggggaggtgtggagggagaggcgcgggcgggaaccggggctgcgcgcggtgctgcgggccagagcgagttccgggtaggcgtgggctcggtgggcccagcattcagagtggccggccggccctgccggcgccgggctgtgaggggcttagcacctg

SEQ ID NO: 921978 - DNA, 613 bp, Homo sapiens
gtttaccgtgggattctgtaggcgcctgtagaaacagaattccaggccgggcgcggtggctcacgtctgtaatcccagcattttgggaggccgaggtgggcggatcacgaggtcaggagatcgagaccatactggctaacgcggtgaaaccccgtctctactaaaaacacaaaaaattagccgggcgcggtggcgggcacctgtaaacccacctactcgggaggctgacgcaggagaayggctggaacccgggaggcggagcttgcagtgagtggagatcaggccactgtgagaggtgacagcgtgctggcagtcctcgcagccctggctcgctctccgcgcctcctctgcttgggctcccactttggtggcacttgaggggctcttcagcccaccgctgcactgtgggagcccctttctgggctggccaaggccggagctggctccctcagcttgcggggaggtgtggagggagaggcgcgggcgggaaccggggctgcgcgcggtgctgcgggccagagcgagttccgggtaggcgtgggctcggtgggcccagcattcagagtggccggccggccctgccggcgccgggctgtgaggggcttagcacctg

SEQ ID NO: 921979 - DNA, 661 bp, Homo sapiens
ggcacagtggctcatgcctgtaattccagtgctttgggaggctgaggtgggaggatcacgtgagcccaggggtttgagaccagtgtgggcaacatggtaagaccttgtctctacaaaaagaattttttttttaattagctgggcatggtggtgcatgactgtagtcccagctactcgagaggctgacgtggaaagattgcttgagcccagaagttcggggcttcagtgagttatgatcataccactgcactttaacctgggcaacagagcaagaccctgtctcaaaaagaaacaaacaaacaaaaaagtgccaagataaaagtgacaacagacttttcatcagaaattatgcaagccaaacacaatggagacatttataaagtaccaaaagaaaaacattagccggccaggtgtggtggctcatgtaatcccagcactttgggagtccgcrgtgggcagatcacttgaggtcaggagttcaagaccagcctggccaacatggagaaactctattaaaagtacaaaaattaaccaggtgtggtagtgggtgactgtaattccagctatccaggaggctgagataggagaatcatttgaacccgggaggtggaagtttcagtgagctgagattgtgccactgcactccagcctgggcaaaagg

SEQ ID NO: 921980 - DNA, 632 bp, Homo sapiens
ccggctcagttaagaaaagtctccattcctcctctcgggggaacataagggtcacaatgactcccgctccgggtaactttagcagcaaagagctgtgctctgtcaaagagatagtggctctcagcttgctgagcaagtcctttcccaaaaaggtcaagggacagtcacgcatgtaccaaaactgatgaatgactgaatgtcctcctacagtacaagtccaagacaagcagaaagcttgctttgttgaaaccctcattgctccratgacgtcaatagtctttttggataagggggcgaccggggcggttactagcgaatgttcagcaccgctatctacaagaaagtcaatgtctccacccccgactgtcattctgaccacaggctctttggggacgcttgagcccggtctccctcagtccaagaacccttctgccaggttgagcagggccccttcctccttgtccggggcctcctgctctgagtcaccttgttttcttttgagctgagggcatttgttcttccactgtcctatttctttacaataagcacactggttacgctgcaaactctgacagccaagctgagtttccttcccaggaccccccttcccttgcctctttgggggggcccct

SEQ ID NO: 921981 - DNA, 554 bp, Homo sapiens
caagcgcaaatcctgtaccggcagtagtccttggtcggtggcttggtaacaggcaggaggggagtgttgcatggagactgacaaggaacaataattccaaaagttcttaggtgcttgagacggacctggataccttgaaggscttctctggggatcgggtcctgtttttgcctcaccggctgggccccagtcttaaccggccaatcctggagggttgtcttctgcccgtactcttggccaccgcttagccagagctggtcttctctcttggcccggctcagttaagaaaagtctccattcctcctctcgggggaccttaagcatcataatgactcccgttccgggtaacttgagcagcaaagagccgtgctctgtcaaagagatagtggctctcagcttgctgagcaagtcccttcccaaaaaggtcgagggacagtcacgcatgtaccaaaactgttgaatgactctgtgtcttcctacagtacaagtccgggacaagcagaaagcttgctttcctgaaacccccgtgactccgatgatgtcaatagtctttc

SEQ ID NO: 921982 - DNA, 554 bp, Homo sapiens
caagcgcaaatcctgtaccggcagtagtccttggtcggtggcttggtaacaggcaggaggggagtgttgcatggagactgacaaggaacaataattccaaaagttcttaggtgcttgagacggacctggataccttgaagggcttctctggggatcgggtcctgtttttgcctcaccggctgggccccagtcttaaccggccaatcctggagggttgtcttctgcccgtactcttggccaccgcttagccagagctggtcttctctcttggcccggctcagttaagaaaagtctccattcstcctctcgggggaccttaagcatcataatgactcccgttccgggtaacttgagcagcaaagagccgtgctctgtcaaagagatagtggctctcagcttgctgagcaagtcccttcccaaaaaggtcgagggacagtcacgcatgtaccaaaactgttgaatgactctgtgtcttcctacagtacaagtccgggacaagcagaaagcttgctttcctgaaacccccgtgactccgatgatgtcaatagtctttc

SEQ ID NO: 921983 - DNA, 554 bp, Homo sapiens
caagcgcaaatcctgtaccggcagtagtccttggtcggtggcttggtaacaggcaggaggggagtgttgcatggagactgacaaggaacaataattccaaaagttcttaggtgcttgagacggacctggataccttgaagggcttctctggggatcgggtcctgtttttgcctcaccggctgggccccagtcttaaccggccaatcctggagggttgtcttctgcccgtactcttggccaccgcttagccagagctggtcttctctcttggcccggctcagttaagaaaagtctccattcctcctctcgggggaccttaagcrtcataatgactcccgttccgggtaacttgagcagcaaagagccgtgctctgtcaaagagatagtggctctcagcttgctgagcaagtcccttcccaaaaaggtcgagggacagtcacgcatgtaccaaaactgttgaatgactctgtgtcttcctacagtacaagtccgggacaagcagaaagcttgctttcctgaaacccccgtgactccgatgatgtcaatagtctttc

SEQ ID NO: 921984 - DNA, 554 bp, Homo sapiens
caagcgcaaatcctgtaccggcagtagtccttggtcggtggcttggtaacaggcaggaggggagtgttgcatggagactgacaaggaacaataattccaaaagttcttaggtgcttgagacggacctggataccttgaagggcttctctggggatcgggtcctgtttttgcctcaccggctgggccccagtcttaaccggccaatcctggagggttgtcttctgcccgtactcttggccaccgcttagccagagctggtcttctctcttggcccggctcagttaagaaaagtctccattcctcctctcgggggaccttaagcatcataatgactcccgttcygggtaacttgagcagcaaagagccgtgctctgtcaaagagatagtggctctcagcttgctgagcaagtcccttcccaaaaaggtcgagggacagtcacgcatgtaccaaaactgttgaatgactctgtgtcttcctacagtacaagtccgggacaagcagaaagcttgctttcctgaaacccccgtgactccgatgatgtcaatagtctttc

SEQ ID NO: 921985 - DNA, 755 bp, Homo sapiens
tcagctgcagcacccagttagagccttcttccctggcaatacttgttgtctcagtgattgactttctgtgctgggagcagcaggacccagaccaaacccctggtgtgttgttaacaagtagaatattttaggttgaatggcacttttccctccaaattttaaaggcttgttctagcatcttccagcctccagtgttgctcagagaagactctgatgattcctttatttgtagttgaattattattattattattattattattattttgagacagagtcttgctcagtctcccaggctggagtgcaatggtgcaatcttggctcgctgcaacytccgcctcccaggctcaagtgattcttttgcctcagcctcctgagtagctgggattacaggcgcctgccactgcacccaactaatttttgtattttttagtagagacggggtttcaccatgttggccaagctggtctcaaactcctgacctcaggtgatccacctatctcggcttcccaaagtgctgggattacaggcatgagccaccataccctgccctgtgaattatttttgtgtgaccctttttttttttctggaagctttcagaatcctctctttattctggagattctgaaatttcttgatcatgtgcattggtgtggctgttttgattcactatgtggggcattcagcaggccttttccatatgaaggctcacatccttcagtctggggacttttcctgtaatgttctgggataaa

SEQ ID NO: 921986 - DNA, 755 bp, Homo sapiens
tcagctgcagcacccagttagagccttcttccctggcaatacttgttgtctcagtgattgactttctgtgctgggagcagcaggacccagaccaaacccctggtgtgttgttaacaagtagaatattttaggttgaatggcacttttccctccaaattttaaaggcttgttctagcatcttccagcctccagtgttgctcagagaagactctgatgattcctttatttgtagttgaattattattattattattattattattattttgagacagagtcttgctcagtctcccaggctggagtgcaatggtgcaatcttggctcgctgcaacttccgcctcccaggctcaagtgattcttttgcctcagcctcctgagtagctgggattacaggckcctgccactgcacccaactaatttttgtattttttagtagagacggggtttcaccatgttggccaagctggtctcaaactcctgacctcaggtgatccacctatctcggcttcccaaagtgctgggattacaggcatgagccaccataccctgccctgtgaattatttttgtgtgaccctttttttttttctggaagctttcagaatcctctctttattctggagattctgaaatttcttgatcatgtgcattggtgtggctgttttgattcactatgtggggcattcagcaggccttttccatatgaaggctcacatccttcagtctggggacttttcctgtaatgttctgggataaa

SEQ ID NO: 921987 - DNA, 755 bp, Homo sapiens
tcagctgcagcacccagttagagccttcttccctggcaatacttgttgtctcagtgattgactttctgtgctgggagcagcaggacccagaccaaacccctggtgtgttgttaacaagtagaatattttaggttgaatggcacttttccctccaaattttaaaggcttgttctagcatcttccagcctccagtgttgctcagagaagactctgatgattcctttatttgtagttgaattattattattattattattattattattttgagacagagtcttgctcagtctcccaggctggagtgcaatggtgcaatcttggctcgctgcaacttccgcctcccaggctcaagtgattcttttgcctcagcctcctgagtagctgggattacaggcgcctgccactgcacccaactaatttttgtattttttagtagagacggggtttcaccatgttggccaagctgrtctcaaactcctgacctcaggtgatccacctatctcggcttcccaaagtgctgggattacaggcatgagccaccataccctgccctgtgaattatttttgtgtgaccctttttttttttctggaagctttcagaatcctctctttattctggagattctgaaatttcttgatcatgtgcattggtgtggctgttttgattcactatgtggggcattcagcaggccttttccatatgaaggctcacatccttcagtctggggacttttcctgtaatgttctgggataaa

SEQ ID NO: 921988 - DNA, 511 bp, Homo sapiens
atctatacaaaaagagaaaatgtagttgcctccaaaaacaaatgatgtaccactttcactagtcttattttattgagtattgatgggagtaatagcaatactggtaaggcatgtaaatcatctgcaagaaagactgtgtactctgggagaggagtttggatgccttgactagtgagacaagcatcttaccagatatgtccttgtgaccatgggttgatgttttcctctcaggtactcagcttccaccataccttscttttacctgtatctttctatcaaagtatttctttctgatggacagtttattttattttatttatttatttatttttgagacggaatctcgctttgtcacccaggttggagtgcagtggcgtgatctcagctcactgcaacctctgcctcccggattcaggtaattttccctgcctcagcttctcgggtagctgcaattacaggtgtgcaccaccacaccccactaatctttgtattttagtagagatggggtttt

SEQ ID NO: 921989 - DNA, 652 bp, Homo sapiens
agcaccaccacgcctggcttatgtttgtatttttagtagagatggggttttgccacgttggccggggtggtctcaaactcctgaactcaagcgatcctaccgccttggcctcccaaagtgctgggattacaggcctgagcccccacgcccagccaacagtgttttcaaatcctaagtttttccaacacaaaatgacacttgtcagttggaagatgctcctatttaaaagcacgcaaaagctcagtgagggacacaacggttctgattgtgtttttacaatctaaaaggcaaaaagtatgtaaatgatacaaagcacatcagagactagcctgattttaatacctggcttcaggctttagcttttaactacacatatamttcacttacaccctgccattctgaaaggccccccagtcccagtcatcatgtggtacctaagcagtatcacgtccctctagtctgtaggacagaaacaaagtgagagcccctggaaacaaacagtggtggttacagaaatttggagaaattagagatcactgaaggcaggagtcaaagaagaaaatgactttgaagtgagtcaggaaagaggtataaatctagatgagaaatttaaggtagaaaaaaaatccctaaacaccagaaggcagaattt

SEQ ID NO: 921990 - DNA, 652 bp, Homo sapiens
agcaccaccacgcctggcttatgtttgtatttttagtagagatggggttttgccacgttggccggggtggtctcaaactcctgaactcaagcgatcctaccgccttggcctcccaaagtgctgggattacaggcctgagcccccacgcccagccaacagtgttttcaaatcctaagtttttccaacacaaaatgacacttgtcagttggaagatgctcctatttaaaagcacgcaaaagctcagtgagggacacaacggttctgattgtgtttttacaatctaaaaggcaaaaagtatgtaaatgatacaaagcacatcagagactagcctgattttaatacctggcttcaggctttagcttttaactacacatatacttcacttmcaccctgccattctgaaaggccccccagtcccagtcatcatgtggtacctaagcagtatcacgtccctctagtctgtaggacagaaacaaagtgagagcccctggaaacaaacagtggtggttacagaaatttggagaaattagagatcactgaaggcaggagtcaaagaagaaaatgactttgaagtgagtcaggaaagaggtataaatctagatgagaaatttaaggtagaaaaaaaatccctaaacaccagaaggcagaattt

SEQ ID NO: 921991 - DNA, 652 bp, Homo sapiens
agcaccaccacgcctggcttatgtttgtatttttagtagagatggggttttgccacgttggccggggtggtctcaaactcctgaactcaagcgatcctaccgccttggcctcccaaagtgctgggattacaggcctgagcccccacgcccagccaacagtgttttcaaatcctaagtttttccaacacaaaatgacacttgtcagttggaagatgctcctatttaaaagcacgcaaaagctcagtgagggacacaacggttctgattgtgtttttacaatctaaaaggcaaaaagtatgtaaatgatacaaagcacatcagagactagcctgattttaatacctggcttcaggctttagcttttaactacacatatacttcacttacaccctgccattctgaamggccccccagtcccagtcatcatgtggtacctaagcagtatcacgtccctctagtctgtaggacagaaacaaagtgagagcccctggaaacaaacagtggtggttacagaaatttggagaaattagagatcactgaaggcaggagtcaaagaagaaaatgactttgaagtgagtcaggaaagaggtataaatctagatgagaaatttaaggtagaaaaaaaatccctaaacaccagaaggcagaattt

SEQ ID NO: 921992 - DNA, 682 bp, Homo sapiens
gaagtcagggataaaaggatacgtattctatgactccattaacttaatatattcaaaataggtaaatccataaacacagaaagcagattagaggataccaagagctagggcataggaatggggagtgatggtttagtctgtactgggtctcctttggcagtgatgaaaatattttagaattagataaggtgattattgaataacactgtgattgtcctaaatgccagttaaattgtatactttaaagtggttaattaattttatggaatgttcaaggaagggaaagatatctacaaggagaactacaaaatgctgatgaaagaaattgtagatgacacaaacaaatggaaaaacaccytatgttcatggattaaaagaataaatatcacaaaaatgaccataatgtccaaagcaagctacatattcaatgtattccctatcaaatcaccaacgtcatttttcacagaattagaaaacaagcttaacattcatatggaacccaaaaagagcccaaatagccaaaccaaccttaagcaaaagaacaaagctggaggtgtcacattacctgacttaaaattatactacaaggttatggtacctaaaacagcatggtactggtacaaaaatgaacacatagattaacagagcaggatagagagccctaaaatagaatcacatacct

SEQ ID NO: 921993 - DNA, 584 bp, Homo sapiens
gctgatagccaacaaagcagcaggaacccttgtcccactgccacaaagacctaaattaattcttcagtcagcctgaattagcttgacagcagattcatccccagagcctacataaaaggatatagccctactagcatgctagtttcagcatttttttttctttttgagacggagtcttgctctgtcaccaggccagagcgcagtggcaygatccccactcactgcaacctccacctcctgggttcaagcaattttcttgcctcagcctcccaagtagctgggactacagatgcctgccaccatgcccagctaatttttgtatttttagtagagatggggtttcaccatgttggccaggatggtcttgatgtcttaacctcatgatccacccacctctgcccagtgctgagattacaggcatgagccaccgcgcccagccagtttcagcttttttcacctagagtagagaaaccgttaattcagaataagcctgaacttctcacctacacatctgtgaggtaataaaaagatattgctaaatgtatgcttatttgttatgggaattatagaaaactaataccaac

SEQ ID NO: 921994 - DNA, 571 bp, Homo sapiens
atcggactgaaatgcaccataccaaagctaaagtgagtccttgcatgattcctagagtagagcttcctgggagggtctgggtccaggcccatccttgggaaggtgcagagctcacagactcattgcaaaaagaaagtagtatatgctggtatcttattcattcctttatttttggagatggagtctagctctgtcacctaagctagagtgcagtggcacgatctcagctgactgcaacctctgcctcccaggttcaaatgattattgtgcctcagccttctgagtagctgggattacaagcttgcaccatcatgcctggctaatttttgtatttcttgtagagaaggcatttcgcatgttggccaggcygctcctgaacactggacctcaggtgatctgcccgcctctgcctcctaaagtgctgagattataggcgtgagccactgcatccggccttgatgcatttctttaaggaaagaaatcctatgtaatttgcacactgatttctttcctttttttttttttcttgagatggagtttcactcttgttgtccaggctggagtgtaatgg

SEQ ID NO: 921995 - DNA, 628 bp, Homo sapiens
ctgtacattcacatgaagttgtaagaaatcatacagagagagcccagaggaccctttacccaatttcctcccatggcaacactttgaaaaactataccaaaatcatggtatcagttgacattgatacagtcaaaacacaaagatttctaccaccacatggatcccttacgttgtgctttcatagccacaaccatttccccttctccccatgccctttataactctggcacccattaatctattcccacatttctatcatattctcatttcaagaatgttacataaatggaatcatgtagtatataatcttttggaattgtcttttttctctcagaataattctttggagaatcattcaagttgttgtatgyatgaagcattgtttctctttttaatcaccaaatactattccatgatatggatgtaccacaactttttaatcatttacttattgaaagacatttgggttgttttcagtttggggctttatttatgaataaaactgctgtaaacatttgtgtacaggtttttgtgcgaacataagttttcatttctctgagatcaattcccagggattgcagtgtgctaagttgcatggttagttatttaagaaactgcttaactttcc

SEQ ID NO: 921996 - DNA, 715 bp, Homo sapiens
ggctcacacctgtaatccttgcactttgggaggctgaggtgggtgaatcacctggggtcaggggttcgacaccagcctggccaacatgatgaaaccccgtctctactaaaaatttaaaaaattagctggatgtggtggttcatgcctgtaatcccagctactcaggacgctgacgcaggagaatcgctcgaactagggaggcagaggttgcagtgagccaagatcacgccactgcattccagcctgggcaacagagtgagaccctgtctcaaaaaaacaaaaacaaggccgggcacggtggctcacgcctgtratcccagcactttcggaggccgaggcgggcagatcacaaggtcaggagctcgagatcattctggctaacacagtgaaaccccgtctctactaaaaatacaaaaaattagccgggcgtggtggcgggtgcctgtagtcccagctactcgggagcgtgaggcaggagaatggcatgaacttgggaggcagagtctgcagtgagctgagatcacgccactacactccagcctgggcgacagagcaagactctgtctcaaaaaaaaaaaaaaaaaaaaaattagccgggcccggtagcaggtgcctgtaatcccagctactcaggaggctgaggcaggagaatcacttgaaccaggggggcagaggttgcagtgagccaagatcacgccactgcactccagcctac

SEQ ID NO: 921997 - DNA, 715 bp, Homo sapiens
ggctcacacctgtaatccttgcactttgggaggctgaggtgggtgaatcacctggggtcaggggttcgacaccagcctggccaacatgatgaaaccccgtctctactaaaaatttaaaaaattagctggatgtggtggttcatgcctgtaatcccagctactcaggacgctgacgcaggagaatcgctcgaactagggaggcagaggttgcagtgagccaagatcacgccactgcattccagcctgggcaacagagtgagaccctgtctcaaaaaaacaaaaacaaggccgggcacggtggctcacgcctgtgatcccagcactttcggaggccgaggcgggcagatcacaaggtcaggagctygagatcattctggctaacacagtgaaaccccgtctctactaaaaatacaaaaaattagccgggcgtggtggcgggtgcctgtagtcccagctactcgggagcgtgaggcaggagaatggcatgaacttgggaggcagagtctgcagtgagctgagatcacgccactacactccagcctgggcgacagagcaagactctgtctcaaaaaaaaaaaaaaaaaaaaaattagccgggcccggtagcaggtgcctgtaatcccagctactcaggaggctgaggcaggagaatcacttgaaccaggggggcagaggttgcagtgagccaagatcacgccactgcactccagcctac

SEQ ID NO: 921998 - DNA, 715 bp, Homo sapiens
ggctcacacctgtaatccttgcactttgggaggctgaggtgggtgaatcacctggggtcaggggttcgacaccagcctggccaacatgatgaaaccccgtctctactaaaaatttaaaaaattagctggatgtggtggttcatgcctgtaatcccagctactcaggacgctgacgcaggagaatcgctcgaactagggaggcagaggttgcagtgagccaagatcacgccactgcattccagcctgggcaacagagtgagaccctgtctcaaaaaaacaaaaacaaggccgggcacggtggctcacgcctgtgatcccagcactttcggaggccgaggcgggcagatcacaaggtcaggagctcgagatcattctggctaacacagtgaaaccccgtctctactaaaaatacaaaaaattagccgggcgtggtggcgggtgcctgtagtcccagctactcgggagcgtgaggcaggagaatggcatgaacttgggaggcagagtctgcagtgagcygagatcacgccactacactccagcctgggcgacagagcaagactctgtctcaaaaaaaaaaaaaaaaaaaaaattagccgggcccggtagcaggtgcctgtaatcccagctactcaggaggctgaggcaggagaatcacttgaaccaggggggcagaggttgcagtgagccaagatcacgccactgcactccagcctac

SEQ ID NO: 921999 - DNA, 605 bp, Homo sapiens
aatgtgcccagaattagaatactgatccagatttttacattacttattccttttggttttttttgagcagcagttagagatcactggttggttcacaggaataagcagggtttgctgaaattgcagaaataagcttagaaacaactaatgagactagaatttaataacaagtatagtatagttcttgaaacgtagtatttttcccagttttccattttcactaaagataaattatggtaagactgatttgctttattatacttggcctgattatttgtataaagtgcagtaagaataattattttttacataggctttttaaaaattggctttgatggaactttgtttcatagaaggaattttagataagacttttttaaagctgagccctgccatgagtttgtacctttaaatatttatgagttgggtaaatttytttctttttgaggtcccaagataacttgtggtttctggacctgttagaaagtgatattttttatttggcacaggttagaaaccctgtatagggactgttttaggcaaggtatgtggccagttttctaaagggtttttattggctttacaagttaagtttgataacttaa

SEQ ID NO: 922000 - DNA, 617 bp, Homo sapiens
tgatatagagtactaggaaactaaagaaacgtcttacttgactgcagttgtcacattatcatgcattacagtgcagcagcctgaatcaaagagatatgcaaaattcaccaaggacagcagcaatgcattttttccccctgtatttgtggaaagacatcaggaaaaggaaggcaagtatgaatgcaaaaacatctgctccctaaactcatttaaaaaatatcactgcaaaaaataaatgtgaatcatctatagtgtakagcagatggaagtgcaatatgtttaacttaaggcagaaaggggatgcaactgaagaaccagaggatatggaaataaaataatacttaagcccattttacatactgctgcccgttaggttacactctggtaaaatgtgtagaaaatcatcttttatctatatcacactactttgaaagaattccaaataattacagtagactgtccagtggcacttatattcacactctctagtgacatttatattcacagaagccatttttttttttttttttttagacaaagtctcattatgttgcccaggctggactccaactcttgggctcaagcaatcctcctgtcttagcctcccaagtagctgg

SEQ ID NO: 922001 - DNA, 617 bp, Homo sapiens
tgatatagagtactaggaaactaaagaaacgtcttacttgactgcagttgtcacattatcatgcattacagtgcagcagcctgaatcaaagagatatgcaaaattcaccaaggacagcagcaatgcattttttccccctgtatttgtggaaagacatcaggaaaaggaaggcaagtatgaatgcaaaaacatctgctccctaaactcatttaaaaaatatcactgcaaaaaataaatgtgaatcatctatagtgtagagcagatggaagtgcaatatgtttaacttaaggcagaaaggggatgcaactgaagaaccaraggatatggaaataaaataatacttaagcccattttacatactgctgcccgttaggttacactctggtaaaatgtgtagaaaatcatcttttatctatatcacactactttgaaagaattccaaataattacagtagactgtccagtggcacttatattcacactctctagtgacatttatattcacagaagccatttttttttttttttttttagacaaagtctcattatgttgcccaggctggactccaactcttgggctcaagcaatcctcctgtcttagcctcccaagtagctgg

SEQ ID NO: 922002 - DNA, 776 bp, Homo sapiens
gaatgagggctgaataataagtgcaggttctggaacaggtccagctcaccgtgggtctactagggccatggatgatcattttcttggtccttggtatataattaaagtaagcacaccttattattggaaacaatcccactctggttccttggcctgtgaggtaggggatattgtaaaaagaaatgccaaatggaagcctctgaaattacccttgtactctacagtcaagagagtaaatccaaaataatatcttattctggaaaaatagccacagttagtgccattattaaagacctaaggatccatgggaggtagtcccgatgatatcgccatttattcaccaacataaaaaagtcagatggatctttgagcgtgaaagtgagctactgtaactcaagtaaatttatgccttaattgtagatgctgtgtcatatatgatatcttttctggagcagtggattagttccttcttgcattgctttaaagaaatacctgacactgggtaatttatgagaaaagaagtttaactggttcacasttctgcaggctctacaggaagcatagcgacatctgcttctggagaggccgcaggaagcttccaatcatggcagaaggcaaagggagagaagcctgtcacatgtaagcaagagcaggagaatgagtggggaagtaccgcacactttcaaatgaccagatctcacgagaactcactcactagtaggatttgatcagctcactatgggagtgttacagaaaatagataccatgagcagaga

SEQ ID NO: 922003 - DNA, 546 bp, Homo sapiens
tattaatgttgtcacgaaaaaaatttttaatcacactttttcctccataataaatttgttaattatgcaggggctggggaagagaacagaaaaatgacataaaagtctgaagaactgccactggggtaaaatgagagaggggtacatgggacctctgtactagttttagaacttcctatgatgccatatttcaaaataaaaaggttttttttaggtcaaaggaattggtgtgagaatacattaaggggctatagtgaaactamatttggccacttttgccaacttcagagcacaaccatcaatggcaataataatttgaatggctaacattaaaagtactgtaaccatctgaacctctgacaaaagcaaaagaagtatcctgaagtatttatagaacacttgttcttcaaactagtcattcatccatttgattagcttacagtacagggaaaaacaggcattgaaatgattatgatgtaattttgaaaatggctataataaagatatgtataatacacaaaaaaaagggaggaggctgtaagtgtg

SEQ ID NO: 922004 - DNA, 602 bp, Homo sapiens
ctgagtgtatgggtcaggggtttaaaaacattcaacattcaaacctacggaaacaaggaaaatgaaacaacctgaaatcataaagatttgtgatagatacaatgatgttcccttaagctgcccagctaataaagggatacctaacaaagaagttaatctgtattagtcaggtcctacagagaaacagcaaccaatgggatgtgtgtatgtatgtgtgtgtctacatatatctatatgaagagacttatttttaaaaaatgtgtttgtgtcaattgtgcctctaggtatgagaagagatttgttataaggaattggttcatgtaattatggaggctaagaagtcccaatattctcaaatcagcaagctggagattggggagagccaatgtgtgtttatttgggtggctaggagatgtggtagatagagtttttattataaggaggaaagtcttctgasacacctttttgcacccatatctgattgctaggacttccagcactatattgaagagcagtggtgagagtgagtatccttgtcttgttcccgttcttagagggaatactttaaacttttccccattcagtattatgttggctgtggg

SEQ ID NO: 922005 - DNA, 724 bp, Homo sapiens
gatctcagctcactgcaacctctgcctcctgggttcaagtgattctcctgtctcagactcccaagtagctgggattacaggtgtctgccaccacgcccagctaatttttgtatatttagtagagacggggtttcactatgttgaccaggctggtcttgaactcctgaccccaggtgatccacccgcctcggtctcccaaagtgctaggattgcwggcgtaagccactgcgcctggcctagactctctttttaaagattaactggagatcatcatggcggatgggaggcagaactagactgcagctctgactctgatggacagagcagtgtgtggaggctcacgtcatgaattttagcttcagatcaactgcaataacagaccaccaatcctgagaggacccacagaccctctgagggaagcagactgctcctgcaggaccttggagacaccccaaatattgtgagagccccaattgcggaagtgggaaagcgagatcctcctctcccgaacacacaccccctctggagaaactgaaggactgtttgcaggagaagtttttgatcttacctggagctgattcaatttagacagcccaacaaaatacaggtgtagaggaagcagtaggaaaggccctgggaacttgctgggtccccagcaggccattcctgcctggcaccacagggatctatcaggagagtgggcagaagagtgagggaaaacacc

SEQ ID NO: 922006 - DNA, 754 bp, Homo sapiens
taagaacttgcttatagactgagaatggaagaggccggcacctaggaagaggcacagttgacggcgaagccaccagggatggccacagtgcatgcatctgtgtccatgtgtgctcatgtgtgtgcrcacacacatcctggaagcctcggtttcaggcgtcttctctgtgagcagagaccctgtggggatggatgcatgctattatagattcataaacatctgctcgtgtggcctgggtagtcccttctagaaggaaagcccctttgcttctgtcactcctgacaaaaatacttgcgtacacagcattatgatacataccattctctagcaacttcggaatcagggtcctaatgccacacactgcagatgagctgatagagagcagtgatgagaatcagacctgcttgtgcactttccgaagactttcatccacattctctcacacgagccttagagcgacagcagcctgtgaggcaaacattgctctctgcattgctcatggatcaggacttgcccatcctcagagctaataaatggcaccaacgggacataaagtcaggactttcacgatgcccctccatcccatggacattttgacacaggatatggtttgtcacggcacctccctcacctccctttccagggcccttttcctctgcctctgggttctgtttcctgtgtccttggctcctcagggctctcctctcctatgtcagccacactgatctccactcccagatttctggtccgtgaa

SEQ ID NO: 922007 - DNA, 608 bp, Homo sapiens
actgatgaaataaattgaagaaaataaaaataaattgaaagagatactgtgtttatggatcagaagaatattgttaaaatattcatattactgaacataatatacagattcagtgtaatctctctcaaaattccaatggcattcttcatagaaatagaaaaagcaatcctaaaatttgtataggaccctgcctgccagcaacaacaacaaaaaacytgaatagtcaaagcaatactgtaaaagaaaaacaaagttagaggcatcatacttcctgatttaaaattgtatcataaagctacattaatcgaaacagtatggtactggcataaaaacagaaacatagactaatgaaacagaatagagagcccaagaataaatccaaacataaatagtcaattttcaacaagggtaccaagagaacacagtggtaaaagaatagtgtattcaataaattgtgtggggaaaactgaatctgcacatgcaaaagaataaaatgggacccttatcttacaccatacacaaaaatcaactcaaaaatgaataaaagacctaaatgtaagccctgaaaccataaaaatcctagaaaagtacacaagggaagagttcct

SEQ ID NO: 922008 - DNA, 610 bp, Homo sapiens
agtctcccactctttctcctgcctttcaaaaggcagaggagccacaccctatggccaccaccacaataggcccacagagagtaatgccaaattgccaccaatgtggccttaaggcccaagggctctcaagtaagcttgtgcttaatgctacctggcttgggactcaccctttagggcagtgggctcccttctggcaatgggcaggtccagaaatgccatctaagrgtcaagtcctagaatctaggaccccaacatcctggcttgcttagtggtctatgccactgaggccaagataatacctgaagccagcaagtctcagaggctcacctaaggcccttgacatattacctgggtattacttttgattattcaaggcccaagggtcttcacttagcagatgatgaatgctgtcaggactgggttttttccctttaaggcagtgagttctcttcttgcccagggtgcgtctggaaatatcgtccaggaacttgggcctggaacagggttctcataactctgaccagttctgtatcctgctgtggctgagctggtatccaagaagcaaggcagtcctcctgcactcttccctttcctctcctcaaggggaaag

SEQ ID NO: 922009 - DNA, 661 bp, Homo sapiens
tgcttagtggtctatgccactgaggccaagataatacctgaagccagcaagtctcagaggctcacctaaggcccttgacatattacctgggtattacttttgattattcaaggcccaagggtcttcacttagcagatgatgaatgctgtcaggactgggttttttccctttaaggcagtgagttctcttcttgcccagggtgcgtctggaaatatcgtccaggaacttgggcctggaacagkgttctcataactctgaccagttctgtatcctgctgtggctgagctggtatccaagaagcaaggcagtcctcctgcactcttccctttcctctcctcaaggggaaagaatgggtctcttttggagctgcaagctgcacaacctgggctttagggacgagtgatgccagtacttccttaactgctctggctgttgcctcaataggtggtgtgccctcctcgtccactgtctctgggcccagttcatcactaggactcctgtaaaagttgcagtccttgtcgcctagactgcctttcaagtttactcagagatccatagcactttagcctattgtgtcaaggatcgcaggaactcaagttctgacttctgggattggcaattcccttttggctagggctggtctaaatgttccggtctgtgg

SEQ ID NO: 922010 - DNA, 632 bp, Homo sapiens
atattagcattgcatcaagagaaaacaatgtttgtaaaatattcttaataaaactctgtgaacatagaagacttcctatttacaataactatttgtattaactgcagaatttaaaatctgtttactatttacattcactgcagaactgcttctggtagtgactgaatatgacaaattgtaactcgatcaccaggtaacatattagaaaggatattagactagaatctagagccttgattgcctaggatattccactaattcactatatgattttaggcagtcacttaacctttaggagcctgtgttacagactcacccactgstacctgtacacgtaattgttattatatagatcatatgtttagactctagaactctgaaataaaatatatttattattacaaagaatacaaaatgtttaccaaaatacactgcctcttcttagggacacagctaactatatatgttgtttccctggaagttatgtggtgccatgagattaagttttagaaagtggaacataaacatatgtaaatgtttgcacataaaattctctactttctggctggtgggcatggagatgaccacgacgaccttaaaaaccacaagctaaagactgtgaagtgagccaa

SEQ ID NO: 922011 - DNA, 571 bp, Homo sapiens
atattttgaataggagtggtgagagaaggcattcctgtcttgcgttggttttcaagaggaatgcttccagcttttgcccattcagtatgatattggctctgggtttgtcttatatggctcatagtattttgatgtatgttccttcaatacctagttyattaagagtttttaacatgaagcgatattgagttttattgaaggcattttctgcctctattgaggtaatcttggggtttttgtctttagttgtgtttatgtgatgaattgctttttttgattgccgtatgttgagccaaccttgcatcccagggatgaagccaacttgaccatgatggataagcattttgatgtgctgctggatttggttagccagtattttattgaggacttttgcgttgatgtttatcaaggattttggcctgagtttttctttttttgttgtgtctctgccaggttttggtatcaggatgatgatggcctcataaaatgagttatggaggagttcctccttttcaattgtttggaatagtttcagaagaaatggtaccaccttctctttatactctggtag

SEQ ID NO: 922012 - DNA, 644 bp, Homo sapiens
ttggcatccttgtcaaaaatgagctcaccgtagatgtatgaatttatctctgggttttctatttttgttccactgattgttgtgtctgttctgatgccagtaccatgcctttttggttaccataactctgcagtgcaatttaaagtcaggtaatgttattctcccagttttgttctttttttttgcttgggatagctttggctatcctgggtctttagtgcttccatataaattttaggatttttaaaatttttgtctagtcattggtattttgatagggtttgcattaaatctgtaaattactttggatagtatggactttctaacaattttgattctttaaatccatgaatatgaaatatctcttatatttttgtgtcctcytccatttcttgcatcaatgttctatagttttcattgtagaggtctttcacttcttttgttaatccttatatattttatcttagttgtaactattgtaaataagattactttcttgatttcttcttcaggttttttgttttggcatatagaaatgctactgatttttgcatgttgattttatagccttcaactgtactgaatttgtttatcagttccaatagtttattggtggaggctttaggtttctccaaatatataat

SEQ ID NO: 922013 - DNA, 775 bp, Homo sapiens
ctggggacctgggcatctctgcattcttgggggcccaagaaggtcccttgcccccgcaggctcggaggtgtctgcactcgctgctgacctctccctactcccagagtccactctgatctcggagcaaggttgggacagagctcaggcactgtcaccacccggctgggtatgtgcatgcttggggcagggctgacatgccagcagccccttgctgcttgcccccatccagactttgggcactgacaagcatgggagggaagctgagggggagatgagggcaactcggtgctggcctgcaggcaccccgtgwcatgaacagcctgggtaccatgaagggtgggaggaggcagacaggcgcctaggcagaagtgggcgggtcctcagtgaagccccaccttcaggctgggagggcctgaagcctggggttcaggctgcggattgcacgaccagagtggaagcttatggtgctttttccaggcccgcccatggctgcccatggaccaattggcatgtgcttccttccctctgaggcccatagaagccctggactcaatctgactcaaggagatgatgggactacaagctgcggaaaggagctacccactccaaggtctctgctgagagctgaacactcatcaagacaccctgcctgcagggaggagttacccaatgcaggtctcctctgagctgttccattgctcaataaaactcctctttgccttgctcaccctccacttgtccgtctacctcattcttcctggacacaggacaagaa

SEQ ID NO: 922014 - DNA, 565 bp, Homo sapiens
gccaacaagcatatgaaaaaagctcaacatctctgatcattagagaaatgcaaatcaaaaccacaatgagataccattttacatcagtcagaatagttatttttaaaagtgcaaaaaataacagatgctggcaagattgtggagaaaaaggaatgcttatacactgttggtgggaatgtaaattaattcaaccattgtgggagacagtgtggcaattcctcaaagwcctagagacagaaatactattcaacccaactatcccattacttggtatatacccaaaggaatataaattgttttattatagagacacatgcacatgtatgttcattgcagcactattcacaatagcaaacacatggaatcaacctaaatgctcatcagtgaatgactggataaagaaaatatggtatatgtacaccttggaatattacagagccagaaaaaggaatggtattatgtctttgcaaggacgtggatggagctggaggccattatcctttagcaaactaattcagaaacagaagacaaaatgccatattttctcatattttaatatactttc

SEQ ID NO: 922015 - DNA, 627 bp, Homo sapiens
agttggtctgtttacataatcccatatttctcagatttttttcatttttaaatattcttttgaaatttttgtctgactgagttgatttaaaaaggtaatcttcaagctctgagattcttctcttagcttggtctgttctgctgttaatatttctgattctattacgaaattcttgcagtgactatttccactctacaagttcaggttggttctttcttaaaatggttattttgtctttcatttctgggatgatttcackggattccttgcattgggtttcaactttcttttgaatatcaacgagcttccttgccatccagattctgaattctgtgtaagtcacttcagtcatttcaaattggttaaggaccattgctggggaactagtggaattgtttggaggtcaggggacactctggcttttttaattgccagagttattgtactgttctttctcatccaggagaactggtattcctttaactgtggtgtaagttgaggatagtcagttggcttcatttctgggtgttttcagagggccaaaattctgtccaaattctttacttgtggccgaattcttgctctttgttttccatggggagtatattagcaaagtatttttggtgt

SEQ ID NO: 922016 - DNA, 561 bp, Homo sapiens
tgagggaggaggaacattctgtcattagtcagttacatctcagtctttgaatggatgggcctgtgtctgtgtcctgtgaccttcatgagttattctacttgtgtaactcctaacattaggtgagacaaagtgaatagattaattgagaggagtgtctttacccaaagctctggggaaggctctggtaacatcttttaccctggagaataggcctctgttattaaggaggctctggatgtatttcacagggatgagtcttctacttcccctgccatcaccaggagagtgggggatctttttttgttcttcactatgaaaacttagtccggttcctgaaaggtgayggttgagtaccccctaagactgtggtcctcagggtttctctttctcctgatagtctaccctcagcctccagcaagttgtcaaaattactgtgtaagtgtgcctatgagatttttggctcgatttgcttctgcgtcagaaaagcaggtctccactatgattctctagaatctcctttctctccacattgtagggtggtggcttgcctttcaaactcag

SEQ ID NO: 922017 - DNA, 562 bp, Homo sapiens
gcttcagtgggtggaagccccatgccttggcagcttccatgtggtgttgagcctgcaggtgcacggaagtcaagaattaaggtttgggaacctccacctagatttcagaagatgtatgtaaatgcctggatgaccaggcaaaaatttgttgcatgggtggagccctcatgaaggacctctgctagggcagtgcagaagagaaatgtggggtcagagtccccatagagtccccactggggctccacckggagctgtgagaagagggccacagtcctccagaccccagaatggtagatccactgacagcttgcaccatgcacctggaaaggccacagacacacaacaccagcccatgaaagcagccaagaggagggctataccctgcagtcacacgggtggagctgcccaagaccagaggaacccacatcttgcatcagcatgacctggatgtgagacatagattcaaaggagatcattatggagctttaggatttgactgccctggcaaggtgcggtggctcatgcctgtaatcccagcactttgggaggctgaggagggcgg

SEQ ID NO: 922018 - DNA, 562 bp, Homo sapiens
gcttcagtgggtggaagccccatgccttggcagcttccatgtggtgttgagcctgcaggtgcacggaagtcaagaattaaggtttgggaacctccacctagatttcagaagatgtatgtaaatgcctggatgaccaggcaaaaatttgttgcatgggtggagccctcatgaaggacctctgctagggcagtgcagaagagaaatgtggggtcagagtccccatagagtccccactggggctccaccgggagctgtgagaagagggccacagtcctccagaccccagaatggtagatccactgacagcttgcaccatgcacctggaaaggccacagacacacaacaccagcccatgaaagcagccaagaggagggctataccctgcagtcacasgggtggagctgcccaagaccagaggaacccacatcttgcatcagcatgacctggatgtgagacatagattcaaaggagatcattatggagctttaggatttgactgccctggcaaggtgcggtggctcatgcctgtaatcccagcactttgggaggctgaggagggcgg

SEQ ID NO: 922019 - DNA, 618 bp, Homo sapiens
cgaggagaaaaaggagtcagaaaggaatacagaagaaggagaaagggaagtggagggggcagtggggcagggaagacaagcagcctcagatgagggagagatttaaagcaaagaaacaagttggtgaaaatcaggrgggaggagcagagagcagacaagaataaaaggtaaggagggacacaaatggagaagcgggggatagaaatgcacacatctatcagttaatttccagagcatacaaaatagaaataatcctccttcaaagcatgcatttgagggtgaagtgggagacagtatgacatgaaatgaaagccggaagcatttttcaatgcggacacataagcaaggctttaattattaactgattgcttgtgtatgtgcgtgcatgtgcacacacacgtgcaagtaacaggccattgtgtccaggcattgtgaaacaagccacggaatccactggtcagagtcaatatttcctcaaaatggcagtcatttaaccattgtgcctgtctctgctctcagaatgtaactaacatcttaagtcaatagctttatggaatccctgcaaatcccttctctcttgctgccaccctggagagacacagttgtgtgttttacctg

SEQ ID NO: 922020 - DNA, 744 bp, Homo sapiens
cccccagcatgggcaggaggccaggcaaggataggagtgggagggttccagggagtcctggaggcgaaagtgatggactccagtccctgggcctggatgcaggaagtgaggcagcgctgaggaatgaagaacagcacctggcagagctcctgggggagtagggagggcagggcaggggagaagagaggagaggaggggaggggagagcaggggagaggagaggaggggagggcaggggagaagagaggaggggaggggagggcaggggagtagagaggagagtgcaggggaggggagatgacaccccaggccacagccagggctgccaggaaacatgggagccccaggcaaactggaatttcagataaacaagaagcataagcctgtctcatacagtatcgggaacatgcctcaaaaaccaccgtttctctgagatgcagatttcgcagggcctcctgtcatttgctgcacctggcagccccgtcctcagcagccacatggggttcagcgttccccttggattctgaggggtgatggtacgtagacaggagtctatgcaaatcaagggttcagaaagaggtatggccaagagaggtgtttctggyggcagcagggcctggcctatgtcaaatccttgcttggaggggtgaccggtgagagtgggtagaaacaggcccaggctccttgtgagaggccagagaggacggccagggaggacagagaaggaaacgggccccaggcacc

SEQ ID NO: 922021 - DNA, 644 bp, Homo sapiens
ggtacagagctagaccagcactggtccctccagccccctggtagcctctgctgcacctgaactggcagctcttgccgctgcctttagctctgcatgtatgcgccctgaaggttctgcctctctgttttggaatcgccttcccctcctcatgtttggggacctgcaagggtgtgaggcacgtgagggcatcgccatgcgtattttacaggcctctttctctggactgtccttcaaagggaatgacctttgtctttccaggacctacccagtgagatctgcctgccattttcctatgagtcaaaaatctgaactcactactgctcctttcctggttcataagccagagtagggctggttggcagtcactggcttgtggccctatgtaattatctcagccatcacacactggctctttcacaagggctggtcacacgcctcgagtgattcttsagaaatctgttgaacagcctgacacccagccctaggacgccgtgctggggggattccccagctactgagtggggccagagactctactgcctctgtgaccacatccctttccatactggtatctcgtttgttctaatgagtgtgtccattgcttttaatagtgaattttctgagcaatgagaatttgaccaaat

SEQ ID NO: 922022 - DNA, 583 bp, Homo sapiens
cacaggaggccacagcttccttccgcaaggaagcccctcctgaacccagccagttttcaatacatggagtgtaggcccattgtcactgtattatatatcttaattttccaagaaatctacaatttttaacactatgtccccctctgttaaatgttgactcaaattttctttaagacactgtataaactacagaaaaagcacatctataggttgtccccagatccaggctgtatctagactggatctgtaggctgtatccagacctacataagcaaactctggtttttggtcctgcctctgacatggtacatatcaactacrcctgatggggttgggactaacagcagcaacaatagtaataacaataataacagttaatgtacaagatgcttctcctgcatcatttcgttgagtcctaactccaaccccgtgaaggaactgggatgatgactctcactttatagatgagaagttttctagacatctctccaactcaaccataagatctggggagaccttgatcaccacttctcgaagcacctcacaaagcatatttatttctctttgatctcttctcctctag

SEQ ID NO: 922023 - DNA, 570 bp, Homo sapiens
agctgagcatgaagctgcaagagagcaggaaatagaagtctggaatgtgggccctgtccgcagggagcttctgactgagcataggagactctcctacacaccagaggaaccgtgcaatgacgcaaagcggtgtgtgaccactgtcaagtggacagccagggccttcagtgccctgcagtctctttaaattagagcaaagacaacgtaggcaagagaggacagaaaaggcttcggggaaagccacggtgggtgggaggcttgaaggggtttgtatarcagttcactgagccgtgcacttgagctctgggcagcacgcctgctttccctgccccaacttctccacagcacttagcaccatctgacaggctatacattttatttatccatctcgttgttctcctcaactaaaaatgtcacctccacggggtagagatttgaggctgttttgttcactgatgtgtgctcagagcctgatacatagtaggtgttttatcaatggttgctggatgattgaggaaatagaatttccccagtgtctttctttgcaatcccagatctggtcctcatcat

SEQ ID NO: 922024 - DNA, 759 bp, Homo sapiens
gctgcagcttcccaacttcctggtgctctaaatttatcacgttccacagcagccacccttctgagccgcctgggtgaactcctgggcagagtgacaccagccccggagagacagaagaggagaaaccatgaatgcatacgcatgcaccacacaggcgcggccactgcaggtccagcctgtttccgatgtctgctgtctctgctatgggcttggtgctgggcagaatttccagcctgccacaaagactcctggcgtaagaatgggaagaaataaggccacaactacagaactgccaagaaacaaacccacagctcatttgagacagccagtgagagcacttaatgtacaaaagttagtatggagatgccagcatgggctcattcagsccatgttcattcagcatatccagtcaacatcccctaaatacctgctacctacccagctctgggatgggtagcacagggtgggcaggaaataagaggacgccactcaggcaggcctgagacatagacaaaggagacagagatcttctccagcacctgccaccatgcctgaaattccaccatcaggaatgaaggctatgaccatcgatgcccatgtttgcctatgtgcacatgatagggagatccgcctcctctttatggaattctttccttttataatggttatacatatggacagatgtttagaatgtcagaaatggatgggacttgggagagcttctagtccttccatcttcaaacaaactctaagtcaaca

SEQ ID NO: 922025 - DNA, 759 bp, Homo sapiens
gctgcagcttcccaacttcctggtgctctaaatttatcacgttccacagcagccacccttctgagccgcctgggtgaactcctgggcagagtgacaccagccccggagagacagaagaggagaaaccatgaatgcatacgcatgcaccacacaggcgcggccactgcaggtccagcctgtttccgatgtctgctgtctctgctatgggcttggtgctgggcagaatttccagcctgccacaaagactcctggcgtaagaatgggaagaaataaggccacaactacagaactgccaagaaacaaacccacagctcatttgagacagccagtgagagcacttaatgtacaaaagttagtatggagatgccagcatgggctcattcagcccrtgttcattcagcatatccagtcaacatcccctaaatacctgctacctacccagctctgggatgggtagcacagggtgggcaggaaataagaggacgccactcaggcaggcctgagacatagacaaaggagacagagatcttctccagcacctgccaccatgcctgaaattccaccatcaggaatgaaggctatgaccatcgatgcccatgtttgcctatgtgcacatgatagggagatccgcctcctctttatggaattctttccttttataatggttatacatatggacagatgtttagaatgtcagaaatggatgggacttgggagagcttctagtccttccatcttcaaacaaactctaagtcaaca

SEQ ID NO: 922026 - DNA, 488 bp, Homo sapiens
ttttgtccaagtagcctaagtgacacaagaccagtatccacgttcatttccatacagccctaattcatcacaaatgtacttattttctgccatatagcctctttcctaattaagacaaccacatcctattcctaacttattactattaatgacagcacaggcatcaaatttcaaggtgacttgtttgggcacccctttttcttctgttttggctaacattttactcatatcatgtatgagcccccacaagtcctcagttcttaaccttatttcaaaaactatggtcatgggaggctcagatrggtcataacacacatcaggttggtcatttcctgggctacataccttgtatagaataacattatacaaacaatttctttttagagttccagtacacttataataaccataagataataggaccgtagcaaccttttgtcctacctcagtgacttgatgtatacactgcgaacagtcctcagtctggg

SEQ ID NO: 922027 - DNA, 586 bp, Homo sapiens
tactgtacaagtccaaattttaaggcaaatgagtcccatgatgagttttctcatgcttcagccatgcgtggaccagtcagcttctgggtgtgactggagaagggcttgttgtcttcttcagagtcactgtgcaggggttggcgaagctgctcccrtccacgtaccgctcacagtctactgatgttcaaggatggtctcggagattgggcctactagaataaactgaatccaacacctccacacagttatgttcaactgggctctccaataccaggagcaaggtcgtggggtttagagtgttgcaaacttcaatggttatgcagggattttcacatagcaagctttggtacttggttaatctagcatttgttaaccaatgatgtcctttggtatttatcaaagttaccacagcatgggggtcctgtatattcaggttttgcccaagggttagtttatctgcttcttgtgctaacaaggctattgctgccagggcccttagacatgggggctagcctttggaaaccatgtctagttgttttgagagataggccactggccttggccagagccccacagtctaggttaa

SEQ ID NO: 922028 - DNA, 614 bp, Homo sapiens
acataacaggcaagacatttcatggtaataagcacagagttacattagaagacataagaacggagactaaaaacagcaggtggggaagttacaagatggccgaataggaacagctccagtctatagctcccaccatgagcgacgcagaagatgagtgatttctgcatttccaacttaggtactgggctcacctcactggggcctgtcggacagtgggtgcagcccacacagtgtgagccgaagcagggtggggcatatcgcctcacccggcaagcgcaaggggtcagggaattccctttcctagccaagggaagccatgacacacggtacctggaaaattggaacactcccaccctaatactgcacttttccaacagtcttagcaaacggcacaccaggagattatatcccgcgcatggctccragggtcccacgcccggctcggagggtcccacgcccatggagcctcgctcattgctagcacagcagtctgagattgaactgcaaggcggcagcgaggctgagggaggggcgtccgccactgctgagcttgagtaggtaaacaaagcagccaggaagctcaaactgggtggagcccactgcagctcaaggac

SEQ ID NO: 922029 - DNA, 575 bp, Homo sapiens
attataaatgtaaaacagattctgatgcatgaaggtgtatatcagaagccctaaagaacaagaggtagctccaaatatatattaaaaattatttttaaaattgcaatgttacataaaaatgctttcttaatgcaaaagaaggcaaaataatagaaaaagaaataaaatacacgtgatatgtagaaaacaaataatatagaaaaaataaattcaactatataaataatactaaatataataatattaaggaaaactgaaattgttggaatataaaaatatgatacaartatatgctgtctacagcacaatcgctttggatccgattaaacaaattgtgtaaaaatgaaagaataaaagcttgcaatagcagccataataaagttgaagttgcagttacacaattaaaaaagaatttaggccaggcacagtggctcacgcctgtaatcccagcactttgggaggccaaggtgggcagatcacctgaggttgggagttcgagaccagcttgactaacatggagaaaccccatctctactaaaaatacaaaattagctgggcttggtggtgcatgcctg

SEQ ID NO: 922030 - DNA, 575 bp, Homo sapiens
attataaatgtaaaacagattctgatgcatgaaggtgtatatcagaagccctaaagaacaagaggtagctccaaatatatattaaaaattatttttaaaattgcaatgttacataaaaatgctttcttaatgcaaaagaaggcaaaataatagaaaaagaaataaaatacacgtgatatgtagaaaacaaataatatagaaaaaataaattcaactatataaataatactaaatataataatattaaggaaaactgaaattgttggaatataaaaatatgatacaagtrtatgctgtctacagcacaatcgctttggatccgattaaacaaattgtgtaaaaatgaaagaataaaagcttgcaatagcagccataataaagttgaagttgcagttacacaattaaaaaagaatttaggccaggcacagtggctcacgcctgtaatcccagcactttgggaggccaaggtgggcagatcacctgaggttgggagttcgagaccagcttgactaacatggagaaaccccatctctactaaaaatacaaaattagctgggcttggtggtgcatgcctg

SEQ ID NO: 922031 - DNA, 575 bp, Homo sapiens
attataaatgtaaaacagattctgatgcatgaaggtgtatatcagaagccctaaagaacaagaggtagctccaaatatatattaaaaattatttttaaaattgcaatgttacataaaaatgctttcttaatgcaaaagaaggcaaaataatagaaaaagaaataaaatacacgtgatatgtagaaaacaaataatatagaaaaaataaattcaactatataaataatactaaatataataatattaaggaaaactgaaattgttggaatataaaaatatgatacaagtatatgctgtctacagcacaatcgctttggatccgattaaacaaattgtgtaaaartgaaagaataaaagcttgcaatagcagccataataaagttgaagttgcagttacacaattaaaaaagaatttaggccaggcacagtggctcacgcctgtaatcccagcactttgggaggccaaggtgggcagatcacctgaggttgggagttcgagaccagcttgactaacatggagaaaccccatctctactaaaaatacaaaattagctgggcttggtggtgcatgcctg

SEQ ID NO: 922032 - DNA, 611 bp, Homo sapiens
gtcggctcactgcaaccaccacctcctgggttcaagcgattctcctgcctcaggctaccgagtagctgggactacaggcacgcgctgccacgcccggctaatttttgtatttttagtagagacggggtttcaccgtattggccaggctggtttggaactccggaactcgtgatccgcctgtctcggcctcccaaagtgttgggattacaggcgtgagccaccgcgcacggacgggaattacaatttgagattagatttgggtggagccacggagtcaaaccatatcactgcaaaggatccgcagcaaggaaggtcataaaatcygaaattttaaaataattgtcattatattatttcaatttgtgaataactatattatatatcatttataaatgcatatgacgttatacacaaggttaaatgcaaatatcctctggtgttggcctggctcagatcagggaagaagccctgcctgtaaagggtgcagcttaggctgttatttttgcttcattcagcctagcgtctgatcaaatattccgtcactcagggcgtgaagggtggggcctgaaaccttatcccatcaggggccatatattagaaactgtataatc

SEQ ID NO: 922033 - DNA, 626 bp, Homo sapiens
gattgtacagtttctaatatatggcccctgattggataaggtttcaggacccacccttcacgccctgagtgacgaaaaatgtgatcagacactgggctaaacaaagcaaaaataacaggctaggctgcagcctttacagcyaagccttcttccctgatctgagccaggccaaccttagaggacatttgcatttaaccttgtgtataacgtcatatgcatttataaatggtatataatatagttattcataaactgaaaaaacataatgacaattattttaaaatttcagattttatgaccttccttgctgcgggtcctttgcagtgatatggtttggctctgtggctccacccaaatctcatctcaaattgtaattcatggccaggcgtgggggctcaggcctgtaatcccagcactttgggagggtgaggcgggtggataatgaggtcaggagttggagaccagcctggccaatacggtgaaaccctgtctgtactaaaaatacaaaacttagccagggtgttggcgggcgtctgtagtcccagctactcaggaggctgaggcagaaaaatcgcttgaacccgggagggggagtttgcagtgagccgagatcgtgccactgcact

SEQ ID NO: 922034 - DNA, 579 bp, Homo sapiens
aatcttcttttcagtgaatcacaaaaggatgatgctaaggaaacgcccaacccaaaggaaatagactgaatcgccaattggctaactttttgtaagtgatggcacacctgggtaaagaatgggattgggttaataccccaatttaggggagttagagtgtctcckaagacagataagataaaaggtcccttttaataaaaggcaagaacacttgacgaaactcgtgtttgaggtgcaacttagaaaagttagtctttcctaagatttagggggtgagaggcccctctccgtaaagtccctctcagctaagattagatttggcattatggaactttaaccactattgtctttgtgtttgtttgtttgttttgagacggagtctcgctcttgttgcccaggctggagtgtaatcgtgagatcttggctcactgcaacctctgcctcccaggttcaagcgattctcctgcctcagcctcctgagtacctgggattacaggcacccaccaccacacccagataatttttgtactcttagtagagacaaggtttcaccatgttggccaggctggcctcaaactc

SEQ ID NO: 922035 - DNA, 579 bp, Homo sapiens
aatcttcttttcagtgaatcacaaaaggatgatgctaaggaaacgcccaacccaaaggaaatagactgaatcgccaattggctaactttttgtaagtgatggcacacctgggtaaagaatgggattgggttaataccccaatttaggggagttagagtgtctcctaagacagataagataaaaggtcccttttaataaaaggcaagaacacttgacgaaactcgtgtttgaggtgcaacttagaaaagttagtctttcctaagatttagggggtgagaggcccctctccrtaaagtccctctcagctaagattagatttggcattatggaactttaaccactattgtctttgtgtttgtttgtttgttttgagacggagtctcgctcttgttgcccaggctggagtgtaatcgtgagatcttggctcactgcaacctctgcctcccaggttcaagcgattctcctgcctcagcctcctgagtacctgggattacaggcacccaccaccacacccagataatttttgtactcttagtagagacaaggtttcaccatgttggccaggctggcctcaaactc

SEQ ID NO: 922036 - DNA, 668 bp, Homo sapiens
agaaaacggacttcaggtcagacagacctggttttcaattctaccttttttaatttttcatttttttgagacaaagtcttgctcttttgcccaggctggagggcaatggtgccatcatggctctctgcaatttcaacttacagggctctagcaagcttcctgcctcagcctcccatgtaggtggaaccacaggtacttgccgccaagcccagctaatttttttgtttgaatttttagtagagataaygtctcgctatgtttcccaggctggtctgaactcccaggctcaagtgatcatcccacctgggcctcccaaagtgctagaattacaggcatgagccactgcacctcgccatcaattttactttttcaaaaaaaaattgtgtgaccttacccaagttactcaatttctctaggcctgagcttactcaccgcttaaacagagctctttttttttttttttttgaaatggagtctccctctgtcgcccaggctgaagtgcagtggtgcgatctaggctcactgcaagctccacctcccgggttcacgtcattctcctgcctcggcctcccgagtagctgggactacaggcgcccgccagcacgcctggctaattttttgtatttttagtagagatggggtttcaccgtgttagccaggatggtctc

SEQ ID NO: 922037 - DNA, 665 bp, Homo sapiens
cccttctagtcctatggtgtaaaaggaaatatcttcacataaaaactagacagaagctttctgaggaacttctttgtgatctgtgcattcacctcacagagttgaaactttcttttgattgagcagtttggaaactgtcttattgtagaatccacaaagggacatttgggagccctttgaggcctattttgaaaaaggaattatcttcacataaaagctacaaaaaacagaagatggccaaataggaacagctctggtctacagctcccagtgtgagtgatgcatttccatctgaggtaccaggttcatctcactagggagtgccagtccatgggtgcaggacagtgggtgcagtgcaccgtgcatgagatgagacaaagcagggtgaggcattgyctcactcaggaagtgcaaggggtcagggagttccctttcctagtcaaagaaatgggtgacagatgacaccaggaaaattgggtcactcccactctaatactgtgcttttccatcaagcataaaaagcagcacaccagaagattatatcctgccacctggctcagagagtcctaggcccacggaatctccctgatttctagcacagcactctgagatcaaactgcaaggtggcagcaaggctgggggaggggtgcctgcaactgcccgtg

SEQ ID NO: 922038 - DNA, 418 bp, Homo sapiens
tgtcagaagagggctaccatcctccagaccccataatggtaggtacattgacagcttgcaccgtgcacctggaaaagccacagacactcaatgccagcccctgaaagcaaccaggaggggagctatgccctgcaaagccacagggttgagcttcycaaggccacgggagcccacctcttgcatccatgtgacctggatgtgagacatagagtcaaaggagttcatttttaagctttaaggcttgactgccctgctggattttggacttgagtggggcctgcagcccctttgttttggccaatttctcccatttggaatggctgtagttacccaatgcctgtacccccattgtatctaggaagtaactagcttgcttttgattttacatgctcataggcagaagggacttgccttgtct

SEQ ID NO: 922039 - DNA, 666 bp, Homo sapiens
cctcatggtgcattgattctctctaaggccagcaggagagagatagaagtctctgacttccagatcccatactaaaggatcacctgattaagtcaggcccacctacaacaatctacatttggcttaaagtcaactgattggaaactttaattacatctgcaaaatctatttacctttgctatataacctcacatgaccacgggatgatatcccatcatattcatagaccctctccacacccaggaggagatttttagggtatgtacaccataggctgggaatctgggggatgatttagaattctacctaccacagattggtactattattatccccactttaactcagtgaagttaatgggttaacccaagttacacagcaagcaggtaggtggggccgggatcccaaytcaagtctgagttgggagtacaagctctctccctgcttccaggagctcttaacacttttctgagaggcccccaggcttcataaacagacaagccttccatgctcccaggccccttctaggagaagggccattttcttggttagacctgggcccccagaagccagggccagcatcttggtcccccacaaacaaacacacaataagtgctcagcagatgcttgcttgctgtgggcagcttgcctgtcttttcctttcct

SEQ ID NO: 922040 - DNA, 481 bp, Homo sapiens
ctgcacccttggtggcccaagaagttcctccatcccccgcaggcttggaaatgccagctcctgctgcctgggctctcccaactcctggtgtctgctctggttttggagcaatgttgagccgagcccaggcactatcataactcagatgggtgtgcgcgtgtccaaggcagtgctgacacttcagccccctgctgcctcagccccatctgggctttggacaacaacaagcaggggaagaggctgggagggatggggggttgagggcaacttggcatgggactstaggcgccccgcagcatgaatagcctgggtgcatggacaccatggatggcaggttgatgacggcaaaaggcaggcttctgggtggaaagaagctggtgtctggtgaaaccccaccttcaacccaggaatggcctgaagcctggggactgggatgccagtctcatggaccagaatgagaacttatggtgcttttccctgg

SEQ ID NO: 922041 - DNA, 643 bp, Homo sapiens
  misc_feature 2: n = A,T,C or G
anaatttaatagaggttatagacattggtccccgaattgcattttaggcaacattagttctataaaatattaacagatgtttcatttaaaaaatagtttctgggacaaatgtatttagaaatactgaagcaaacattcttagagatatttaggccttttaagaaagcactgtgaattttcaagagagaatcacatagttgaagcctttctcattttatgcgtaggatcacagtccctgtgcaagtacagtcccctgtgcatgtactgcagagaagtggctcagaaatgaactctggagccacactgactggggagaaatcccatctctgccattgttcagttgtgtgactttgtacaaattgctcaacctctctgtgtctcaatagcccatctgtagttaagaaaaacacacacacacacacaaatgaaacaaacaaaactaccacatgtggttctaattaagactaaaaaaatagtattttgaggctttaaagtagtrtttggcacataggaagtccccatcaattgttggctgttgtcactgactcctcagataatctctgttgagcaggcttccaaaggtgaatgccagtttaggacatttcattaccatcctagtctacattttcaacaatattagctc

SEQ ID NO: 922042 - DNA, 579 bp, Homo sapiens
ctctgtctctgccttgctggagtttcaggtttttataggcacaggatgggggcatggcaggccagggtggtctagggaaatgctacatttgcgcaagacatgcctgtcctcacttaggtccgtgggggtggaccccgagccaggggctacgccctccttactcagcacttccctttccctcccaactccagtatcatttaaagggaccacgctcttcccttcccagtacttctatataaatattactctaagatttacaatacaaattaatatccaattgtttgagagaattgcaataactaaagaatgcttatgatcccacatattttaatctgaaaatacacacrtgtgcacagaggcacacgcacacgtacatgacttcaaaataaattctcaggtatactatatgactatcaaaattgaaatctctgtaaaacttaaaaattgtgctgtaaaaatagtattaaatactcaagaaaaaataaaactgctaagaattgctgagggtagtttggcaaaaatgagaatacaaaccatgagaatacagagtgatttttcttttttatttaccctgaggag

SEQ ID NO: 922043 - DNA, 433 bp, Homo sapiens
gaggctgaaacaggagaatcacttgaacccaggagacagaggttgcagttagccgagattgcgtcactgcactttagcctgggcaacagcgcgagactctgcctcaaaaaaaaaaaaaagggatctttcacagtctcatgttcccattcccttaactgccagaatctccatgatttatgtacatgttatcagtgacctgagaagagatttcttactggctcttattcttctaaaacgtaatctttttttttttttttttttttttttttggcggggatttaggatcttgttkggataaaattgttcccttataccttaaaaatttacctccactgccagtcaataaatacctaatcaaggtctaaaaaggggcggcataaggaataacaaacactgacctaattttgttgaaaatgtaaactaggatggtaat

SEQ ID NO: 922044 - DNA, 433 bp, Homo sapiens
gaggctgaaacaggagaatcacttgaacccaggagacagaggttgcagttagccgagattgcgtcactgcactttagcctgggcaacagcgcgagactctgcctcaaaaaaaaaaaaaagggatctttcacagtctcatgttcccattcccttaactgccagaatctccatgatttatgtacatgttatcagtgacctgagaagagatttcttactggctcttattcttctaaaacgtaatctttttttttttttttttttttttttttggcggggatttaggatcttgttgggataaaattgttcccttataccttaaaratttacctccactgccagtcaataaatacctaatcaaggtctaaaaaggggcggcataaggaataacaaacactgacctaattttgttgaaaatgtaaactaggatggtaat

SEQ ID NO: 922045 - DNA, 433 bp, Homo sapiens
gaggctgaaacaggagaatcacttgaacccaggagacagaggttgcagttagccgagattgcgtcactgcactttagcctgggcaacagcgcgagactctgcctcaaaaaaaaaaaaaagggatctttcacagtctcatgttcccattcccttaactgccagaatctccatgatttatgtacatgttatcagtgacctgagaagagatttcttactggctcttattcttctaaaacgtaatctttttttttttttttttttttttttttggcggggatttaggatcttgttgggataaaattgttcccttataccttaaaaatttacctccactgccagtcaataaatacctaatcaaggtctaaaaaggggcggcataaggaataacaaacactgacctaatwttgttgaaaatgtaaactaggatggtaat

SEQ ID NO: 922046 - DNA, 592 bp, Homo sapiens
tgctcatctctgccagggtgtctgtgcccttcatgtactgccgaccacgagggtgcagagcagagcctggggtccggaggcttcgctgggcctcagggggaggggaatgtgaatgtggcccagcccagaggaccctccatttcgtcgattttggattgggcgacagaggaagcagatgtcggggctgcagacatgctggcctggacaggggtctggggaccccggggctgcctgccgtggtctagaggagatggctggggccacttcccacagggtgggktggcagcggctcggcaaggggaggcctggctaccaggggcttgaacatttgctcactggagcctttgtgcttggcccttagcagcacagctggggctgtggtcccgtgcgaggtgtgctgggggggtgtgtaggtggctggtggtggcagcttgtgccagagtgacacaggcttccgtgggcctggctgggggcagttaaaaagctgaaaaggtacttggtgtgtgagggtaaggcttgggaggcagggccctagaggaggccatgttctctgtcctggttgaggggagcagtatgggggggaaggtggggc

SEQ ID NO: 922047 - DNA, 592 bp, Homo sapiens
tgctcatctctgccagggtgtctgtgcccttcatgtactgccgaccacgagggtgcagagcagagcctggggtccggaggcttcgctgggcctcagggggaggggaatgtgaatgtggcccagcccagaggaccctccatttcgtcgattttggattgggcgacagaggaagcagatgtcggggctgcagacatgctggcctggacaggggtctggggaccccggggctgcctgccgtggtctagaggagatggctggggccacttcccacagggtgggttggcagcggctyggcaaggggaggcctggctaccaggggcttgaacatttgctcactggagcctttgtgcttggcccttagcagcacagctggggctgtggtcccgtgcgaggtgtgctgggggggtgtgtaggtggctggtggtggcagcttgtgccagagtgacacaggcttccgtgggcctggctgggggcagttaaaaagctgaaaaggtacttggtgtgtgagggtaaggcttgggaggcagggccctagaggaggccatgttctctgtcctggttgaggggagcagtatgggggggaaggtggggc

SEQ ID NO: 922048 - DNA, 744 bp, Homo sapiens
aactagaattagaggtggagcctgaagatgtgactgtattgctgcaatctcatgagaaaactggaacttatgaggagttgcctcttacagataagcaaagaaagtggtttcttgagatagaaactagttgtggtgaagacgctgtgaacgctatccaaatgataaccatagatttagaatattacatgaacttagttgataaagcagtggcagggtttgggaggattgactccacttttgaaagatgttctactgtaggaaaaatgctatcaaatagcttcacatgctacagggaaatctttcttcaagggaagagtcaatggatgcagcagacttcattgttgttttaagaaattgccacagcacacacccaccttcagcagtcatcattctgacccgtcaacagccataaacattgaggcaagtccctctaccaacaaaaagatgacaactcgctgaaaaaawttttagtgtttttagcaatattgttttaaattccagcttttatttaagatataggggggtacgggtgtaggattgttacatgggtatgttggatccgggtagtgagcctagtacccagtagatagtttttcatcctgtaccctcccccttccaatagtctgcactgtccaattttcccatgtatttgaccacatgtgctcagtgtttagctcccactctcccacttgagaacatgtggtatttagtattacgttcttgtcttaattcacttaggattac

SEQ ID NO: 922049 - DNA, 407 bp, Homo sapiens
tgtttatccctcacagaggattccagagcactgctacgaaggtctgaatgtttgtccctcacataggattccagagcactgctacaggggtctgaattattctcttcacataggattccagaacactcctgctgttgtctgaatgtttgtccctcacttaggattccagaacactgctgttgggatttgagtgtttgtccctcamgtatgattccagaaccctgctacgtgggtctaaatgtttgtccctcacataggattccagaacactgctacgagggtcctaatgtttgtcctgcacataggattccagaacactcctgctgtgttctgattgtgttttcctcacataggattccagaacaatgctacgagtgtctgaatctttgtcccaaacttggattcca

SEQ ID NO: 922050 - DNA, 597 bp, Homo sapiens
ctgattcctatcttgacacattaacttataagcagtaagcaagcaccatccatgccgggaaattctctcagcatcccatttaccaactgggattccctgcacctcctcacacacagccaatgattcaaaatgcactaacttagattgcctattttcacaaacgtcagctcccttggaccactgaatggccaaggggaagaactargggagttcccatctgaagatatggaaagtccccgagctcccagtctggtccctgcaccaaaaaatggcatgcttttgctttcggatcctgttcgtgaagccaaaaatgttctgcgcaggaaatgctcaaggagagaaggaaacacacacacacacacacacacacacacacacacacacacacaatacctttaagggtaaacaaactgtatcccacgtaaatggcaatgcagatataataagcaaatgatataataagcaagttgcaatgggacggagagaagggaaaagagatatatatatttacactcatcagactatggaggattcaccaccagactgcgaagcaacagactgggctccagagttggccacttgtccgtgaacagatga

SEQ ID NO: 922051 - DNA, 787 bp, Homo sapiens
cagatcactactgctgtggtctgaatgtttgtcctttacataggatttcacaacactgctacgagggtctgaatgtttgtcccttaaataggataccagaaaactcctgctgtgctgtgaatgtttattcctcacataggattccagaacactgctgctttggtctgaaaggttgtccctcacagaggattccaaaactctggtacgaggttctgaatgtgagtycctaacataggattccagaacactgctgctgggttctgagtgtttgtacctgcaataagattccagaacacttctgctggggtctgaatgtttctccctcatgtaggattccaaaacagtcctgctgtcttctgagtgtttgtccctcaaatggggttcgagaacactgctatgagggtctgaattattctccctcacataggattccagaacacggctatgagggtctgaatgtttgtccctcacatatgattcctgaatactcctgctgtggtctgaaagtttccctcaaataggattccagaacagtgctgctgggttctgagtgtttttgcctcacatatgattccagaacactgctacgagtgtcctaatgtttgttcctcacataggattacagaacactgctgctgggttctgtgtatttctcactcacataggattccagaacactgctacgagggtctgaatatttgttcctcacataatattccagaacactgccaagagagtctgaatgtttatccctcagataagattacagaacaatgctacgaggctc

SEQ ID NO: 922052 - DNA, 787 bp, Homo sapiens
cagatcactactgctgtggtctgaatgtttgtcctttacataggatttcacaacactgctacgagggtctgaatgtttgtcccttaaataggataccagaaaactcctgctgtgctgtgaatgtttattcctcacataggattccagaacactgctgctttggtctgaaaggttgtccctcacagaggattccaaaactctggtacgaggttctgaatgtgagttcctaacataggattccagaacactgctgctgggttctgagtgtttgtacctgcaataagattccagaacacttctgctggggtctgaatgtttctccctcatgtaggattccaaaacagtcctgctgtcttctgagtgtttgtccctcaaatggggttcgagaacactgctatgagggtctgaattattctccctcacataggattccagaacacggctatgagggtctgaatgtttgtccctcacatatgattcctgaatactcctgctgtggtctgaaagtttccctcaaataggattccagaacagtgctgctgggttctgagtgtttttscctcacatatgattccagaacactgctacgagtgtcctaatgtttgttcctcacataggattacagaacactgctgctgggttctgtgtatttctcactcacataggattccagaacactgctacgagggtctgaatatttgttcctcacataatattccagaacactgccaagagagtctgaatgtttatccctcagataagattacagaacaatgctacgaggctc

SEQ ID NO: 922053 - DNA, 614 bp, Homo sapiens
actttctatcaaaataccaatgaaactttttgcagaagttttaaaatattctacaatttttatggaatttcaagtgatcacaaacagccaaacaatattgggaaaaaaatataaagacagaggcatcatactttctattttctaaacatactatgaacatatagtaatcaaaacagtttggtactgacataaagacaaatgaatgatgaaacagatgagagagtccagacataagtcctcatgggtatagtaaacatatttttaaaatgtgttccaagaatcacaaaaaggaaagaacagtctcttcaacaaacagtattgggaataataaaaatttacaaggaaaaamtaacaaagttagactttaacttgcaacagataaaaacataaactcaaggctgggtgtggtggctcacacctgtaatcccagcactttgggtgactgagacaagtgaatcacaaggtcaggatatcaagaccatcctggccaacatggggaaacaacgtctctactaaaaatacaaacaaaaattagttggcggtggtggcacatgcctgcagttccagacactcaggcggctgatgcaggagaatctctggaatccgggaggcaa

SEQ ID NO: 922054 - DNA, 614 bp, Homo sapiens
actttctatcaaaataccaatgaaactttttgcagaagttttaaaatattctacaatttttatggaatttcaagtgatcacaaacagccaaacaatattgggaaaaaaatataaagacagaggcatcatactttctattttctaaacatactatgaacatatagtaatcaaaacagtttggtactgacataaagacaaatgaatgatgaaacagatgagagagtccagacataagtcctcatgggtatagtaaacatatttttaaaatgtgttccaagaatcacaaaaaggaaagaacagtctcttcaacaaacagtattgggaataataaaaatttacaaggaaaaactaacaaagttagacyttaacttgcaacagataaaaacataaactcaaggctgggtgtggtggctcacacctgtaatcccagcactttgggtgactgagacaagtgaatcacaaggtcaggatatcaagaccatcctggccaacatggggaaacaacgtctctactaaaaatacaaacaaaaattagttggcggtggtggcacatgcctgcagttccagacactcaggcggctgatgcaggagaatctctggaatccgggaggcaa

SEQ ID NO: 922055 - DNA, 597 bp, Homo sapiens
caaaagaaaggatattactgtgtcaaaaagatatttgcattcccatgttcattacagaactatttataatagcttatatatggaatcaattcaaatgtacagcaacagataaatggataaggaaaatgtactatatatacacagcgaaatactattcagccataagaaagcataaaattctgtcagttaaaagagcatggatgaaccttgagcataccatgttaagtaaaataagccacatagagaaacacaaatactttatgatcttattatctcactcatttgaggaacctgaaaaaaagggttgatagaagcaaagagtacaacaggggttaccagagactgaagcaggaggatgggaaaaggytgcttcacaggtattgtgttatgattagataggggaaataagtttttgttttttattacacagtagaataataataattaatgaaaagttatctcatattacaaaatagctaaaagagaccagtttcggtggcatattcttgcaatccatacattttgggagattgaggtaggagaatcacttgacgtcagaagttcaagatgagcctggacaacatagtgtgaccccgt

SEQ ID NO: 922056 - DNA, 669 bp, Homo sapiens
ctggacatatacatcccccacaagactaaacaaggaagaagttgaatctctgaatagaccaataacaggttctgaaattgaggcaataattaatagcctaccaaccaaaacaagtcgaggaccagacggattcacagctacattctaccagaggtacaaaggggagctggtaccaacccttctgaaactattccaatcaatggaaaaagagggaatcctctctaactcattttatgagaccagcatcatcctgataccaaagtctggcaaagacacaacaaaaagagaaaattttaagccaatattcctcatgaacatcgatgcaaacattctcaataaaatactggcaaaccgaatcaggcagcacttcaaaaagcttaaccaccaagatcaagtgtgcttaatccctgggatgcaggttcaacatatgcatatcagtaaacataatccatcacataaacagaacaaatgacgaaaaccacrtgattatctcaatagatgcagaaaaggccttcgaaaaaattcaacagcctttcatgctaaaaaatgctcaataaactagatattgacagaatgtacctcaaaataataggaactatttatgacaaactcacaaccaatatcatgcagaatgggcaaaaactggaagcactccctttgaaaaccggc

SEQ ID NO: 922057 - DNA, 604 bp, Homo sapiens
tcttgaaaaacgtgtggctcagcttggcccaggcctttggcccgggatcaatcaggagctgaagggatgattgatagatgctgcttagcttggcccaagacttatcagaagctaaggtgaaagtttggccaaggagcttggcccgggagcactcaggggctgaagtaattattcatagaggtcagacttacagtccaaataaacgagagtgtcgaccggaatgcaccagatcccacagtgcccatgccaacaaaaagagaaggaacattttcctgggagcccactgactgtacaaagacaaaagtgcttcttttttttctttttcttgtctttcttttttttgagatgtactttctttttttatttwtttttattttttttttgcagttttgctcttgttgcccagcctggagtgcaatggtgcgatctcggctcacagcaacctccgcctcctgggttctagcgattctcctgcctcagcctcccaagtagctgggattataggcatgcagcaccatgcctggctagttttgtatttttagtaaagacagagtttgtccatcttggtcatgctggtctcaaactcccgacctcagatgatccg

SEQ ID NO: 922058 - DNA, 604 bp, Homo sapiens
tcttgaaaaacgtgtggctcagcttggcccaggcctttggcccgggatcaatcaggagctgaagggatgattgatagatgctgcttagcttggcccaagacttatcagaagctaaggtgaaagtttggccaaggagcttggcccgggagcactcaggggctgaagtaattattcatagaggtcagacttacagtccaaataaacgagagtgtcgaccggaatgcaccagatcccacagtgcccatgccaacaaaaagagaaggaacattttcctgggagcccactgactgtacaaagacaaaagtgcttcttttttttctttttcttgtctttcttttttttgagatgtactttctttttttatttttttttattttttttttgcagttttgctcttgttgcccagcctggagtgcaatggtgcgatctcggctcacagmaacctccgcctcctgggttctagcgattctcctgcctcagcctcccaagtagctgggattataggcatgcagcaccatgcctggctagttttgtatttttagtaaagacagagtttgtccatcttggtcatgctggtctcaaactcccgacctcagatgatccg

SEQ ID NO: 922059 - DNA, 579 bp, Homo sapiens
tcatcagagcagacaacctagagaatgggagaaaaattatgcaacctatccatctcacaaatgtctaatatccagaatctaggaggaatttaacaaaatttacaaaagaaaaaaaaaaggccccattaaaaaagggtcaaagaacatgaacagacatatctcaaaagaggacatacatgtgcccaacaaacatgaaaagctcaacatcactgataactgcataaatacaaatcaaaaccataatgagataccatytcacacaaattataatggctattaataaaaagtaaaaaaaaaaaaaacagatgctggcgaggttgtggagaaaagggaacacttttacactgttggtgggagtgtaaattatttcaagcattgaggaagagagtgtggagattcctcaaagacctagaagcagaactaccatttgacccagcaataccattacacccaaaggaatataaataattctattttaaaaatacatgtatacaaatgctcattgcagcactatttacaatagcaacatcatgtaatcaatctacatgcccatcaatgatacactggataaaggaaatg

SEQ ID NO: 922060 - DNA, 579 bp, Homo sapiens
tcatcagagcagacaacctagagaatgggagaaaaattatgcaacctatccatctcacaaatgtctaatatccagaatctaggaggaatttaacaaaatttacaaaagaaaaaaaaaaggccccattaaaaaagggtcaaagaacatgaacagacatatctcaaaagaggacatacatgtgcccaacaaacatgaaaagctcaacatcactgataactgcataaatacaaatcaaaaccataatgagataccatctcacacaaattataatggctattaataaaaagtaaaaaaaaaaaaaacagatgctggcgaggttgtggagaaaagggaacacttttacactgttggtgggagtgtaaattatttcaagcattgaggaaragagtgtggagattcctcaaagacctagaagcagaactaccatttgacccagcaataccattacacccaaaggaatataaataattctattttaaaaatacatgtatacaaatgctcattgcagcactatttacaatagcaacatcatgtaatcaatctacatgcccatcaatgatacactggataaaggaaatg

SEQ ID NO: 922061 - DNA, 542 bp, Homo sapiens
ggaggcaaagaccaaggaagacattttcagagggtgagcacttgaccaagtggcaagcttgccaatcatggtcccggcttcaaaacagaatactgccacatcttactgtagacttggctataactcatttgaccttggtcctgccactgcaacaatctgtgaaaaacacaagagaattcatactcacctgagacttaggtgacaggcctgcagaacttggttctctctatagtcmctgagtcaggcaaaacacaccttctttccttctccagccatggtctggaagaaatcttcacattgatatgatgaaatgctaactaacaatatgaaaaatactaaagtataaatgtcactaaaatggtaaatacatactgaatttcagaatactataaattgttatcatcttaaactagactattaaaatacaagatgttttacctaagtctcatgataaccactaggaaaaaaaaactgcagtaaagaaaaagagaaagtaattaaagcatacacaaacaacaaaaattacacattggatatggtgt

SEQ ID NO: 922062 - DNA, 627 bp, Homo sapiens
ctcttgagtagctggcattaaaagtgtgcaccaccacgcctggttaatttttgtgtttttcatagagctggggtttcaccatgttggccaggctggtcttgaactcatggcctcaagtaatctgcatgcctcagcctcccagagtgctgagattacaggcatgagccatctctcttrgccattgggtgtcatttttaatttcgattgtggtaaaaatacataacataaaatttagaatctttaacattttttcttatacagttcagtcatgttaatgtatttacattgctttgcaacatatttgaaaacttttttcttttgcaaaactgaaactcagtacacatgaaatgacaactacccattgtccttaccacctggctcatgataaaaatcattctattttctggttctaagtttcaatactttagatattacatataagtagaatcatagagtatctgttttattgtgactaattttacttagcatcatgttctcaagatttctctttattgtggatgctacaagattttctgcctttaaaagctgagtaatattccattacttttgtattacaaattatatttatttattcattctatgaggaaagtttgtgttgctttcacc

SEQ ID NO: 922063 - DNA, 627 bp, Homo sapiens
ctcttgagtagctggcattaaaagtgtgcaccaccacgcctggttaatttttgtgtttttcatagagctggggtttcaccatgttggccaggctggtcttgaactcatggcctcaagtaatctgcatgcctcagcctcccagagtgctgagattacaggcatgagccatctctcttagccattgggtgtcatttttaatttcgattgtggtaaaaatacataacataaaatttagaatctttaacattttttcttatacagttcagtcatgttaatgtatttacattgctttgcaacatatttgaaaacttttttcttttgcaaaactgaaactcagtacacatgaaatgacaactacccattktccttaccacctggctcatgataaaaatcattctattttctggttctaagtttcaatactttagatattacatataagtagaatcatagagtatctgttttattgtgactaattttacttagcatcatgttctcaagatttctctttattgtggatgctacaagattttctgcctttaaaagctgagtaatattccattacttttgtattacaaattatatttatttattcattctatgaggaaagtttgtgttgctttcacc

SEQ ID NO: 922064 - DNA, 741 bp, Homo sapiens
cagaatgggagagaatttttgcaatctacccatctgacaaagggctaatatcaggaatctacaaatagctaaaacaaatttacaagaaaaaaaaacaaccctatcaaaaagtggggaaaggatataacagacacttttcaaaggaagacatttatgcagccaacagacatatgaaaaattgctcatcattggtcatcagagaaatgcgaatcaaatccacaatgagatatcatctcacgccagttagaatggcgatctttaaaatttcaggaaacaacagatgctggagaggatgtggaaaaatagaaacacttttacactgtgggtaggagtgtaaattagttcaaccattgtggaagacagtgtggtgattcctcagggatctagaaccagaaataccttttgactcatcaatcccattactgggtatatacccaaagagttataaatcatgctactataaagacacacacacrcatatgtttattgcggcattattcacaataacaaagtcttggaaccaacgcaaatgtccatcaatgatagattggattaagaaattgtggagcatatacagcatggaatactatgcagccataaaaaggatgggttcatgtcctttacagggacatggatgaagatggaaaccatcattctcagcaaactatcacaaggacttcaaaccaaacaccgcatgttctcacttataggttggagttgaacaatgagaacacatggaca

SEQ ID NO: 922065 - DNA, 564 bp, Homo sapiens
ttccaacaacagtgtacaagggttctaattgctccacgtcctcaccaacacttgtgattttctgttttgttttgtttcttttggtagtaactatgctgatgtgtattaagtgatatatcatttggagttatatttgcattttactaatgattagttttgttgagcaccttttcayggacttattagccatttcacataatttttaaagaaatgtctgtttaagtattttgcccatattttaaacaagtattttgttttattattgctgaattgttctttgtatattctggatagagtcctctttatttttcttttgtttcttgcattttttgtgtcctgttaaaaaaaatcactgcgaaatccagcgttatgacatgttttacctacattttatactaagaattttgtagttttagctcttacatttaggtttttgtcgagttagttaattttttcttatggtataagttaagggaacagtttcactcttttacatgtaggtacccaatttccccagcactaactgttgtaaaggcagttcatttcccataaaaatcatttgac

SEQ ID NO: 922066 - DNA, 615 bp, Homo sapiens
cctccttctatcctctgaagcaaagctgctgtctctgtggggcccccaatttactgagtgtttcctatatgactggtcctggttcatagatgagtcagggaaggtgaaacctcatgatgtccactgggccgctgtggctgtttaacctgtgccagccatacagaacctgacatgagtggttgctcctctcaaaggtcagaactcagggtttgggataatggcacatattctatctgtttggttatctacaatggaaagtgtagactgtctgaatatcttttgggctgcaaaccggaaacaaccccagatgctgatctaactgggtcactcatctagaagtccatggtaagtgttttccagagagtgaccacaatcaagctgcagattgaacctaaatctgtgtccaacccagagtctaatactgcaaaccagacttggggttgctggtgaaagttgacctatytgtctcatggttgaagaattcctagaccatacctagcagagtaaccagaagtggacttttagcccacttcttgagatatcagtcaccactgttgacttcttcagcataacagtcatctgactccagccataccatgtgtcccttgaagctaa

SEQ ID NO: 922067 - DNA, 499 bp, Homo sapiens
ttttaactcttaagtggagatagggatgctatgtagcaagattgctgacctgcatgcatggcttaacacttgccttgcactgccttaaattgtgacaataatttggtattatattgccacagagtcagttttgtcagtcttatgatctctattttaacattagtgctgatgatttgttgtacctaaagagcaaacagaggtacaacagcaaasaggtgtgtaacaaggcctgtctgtctcctcctgttctgtgtgggagatgctgatgggagaagaaaagacacacacacaatacctttaagggtaaacaacttttttatcccatgtaaatggtattgcagatatctatatctatatctatatttttatctatctatatatatgtatgtatgtatctatctatctatatctatatctatgtatatgtactcaccagactatacagcattcatggccagatggggaagcaacagcctaggctccagagttggctactaca

SEQ ID NO: 922068 - DNA, 657 bp, Homo sapiens
agtggagatagggatgctatgtagcaagattgctgacctgcatgcatggcttaacacttgccttgcactgccttaaattgtgacaataatttggtattatattgccacagagtcagttttgtcagtcttatgatctctattttaacattagtgctgatgatttgttgtacctaaagagcaaacagaggtacaacagcaaacaggtgtgtaacwaggcctgtctgtctcctcctgttctgtgtgggagatgctgatgggagaagaaaagacacacacacaatacctttaagggtaaacaacttttttatcccatgtaaatggtattgcagatatctatatctatatctatatttttatctatctatatatatgtatgtatgtatctatctatctatatctatatctatgtatatgtactcaccagactatacagcattcatggccagatggggaagcaacagcctaggctccagagttggctactacacccaccagactatggaggattcacttttcagcttcaagatcaccgctggaagctcagggacttcccatattccaggatagaaactcctccagttctccctcttggcaattgaatggtcggggggaactgaccttagtgaaaattgggtatctaaattagtggaatttgaa

SEQ ID NO: 922069 - DNA, 668 bp, Homo sapiens
gcagaaaatgaggggagtagtaaaattttaaaaacaatgttatgttcccctctgtttttgttattaaaaggaatagcctatcgaatgatggtcagcacctgcttctttgtgtctgaggccaagaatgcatttagcaactgggtagccaccgctgcaaaagaagtcaactgcagttagagctgccttttagtcgaattgccacaggctgcagggaatgggctcccttaaaaaattgtctctgccaacatttccaagtggttacatcactaccaagggggtcaggagaatagcacctgtaatcccacctggacttcttttaaccaaatcaaagagtctatttttgcccaagtctgacaaaaggagaaatccacttttgcaatgcatcaaaggcctttgtatcctacccaatatacttggaaagacatatacagggaacctaccataccggtagctgaactccatatggcaccgcaccccmgctttgtctggaggccttaaatggctcttttaatgttactctggggtttctcccaccagacaattgtcaacacatactccaaatcaacagcattgtccccaatgaaacacaacctctttcctaaatctagatgcttccaaacatcactggttacaaatgcgccagaatccctgatggggtgtaccctata

SEQ ID NO: 922070 - DNA, 668 bp, Homo sapiens
gcagaaaatgaggggagtagtaaaattttaaaaacaatgttatgttcccctctgtttttgttattaaaaggaatagcctatcgaatgatggtcagcacctgcttctttgtgtctgaggccaagaatgcatttagcaactgggtagccaccgctgcaaaagaagtcaactgcagttagagctgccttttagtcgaattgccacaggctgcagggaatgggctcccttaaaaaattgtctctgccaacatttccaagtggttacatcactaccaagggggtcaggagaatagcacctgtaatcccacctggacttcttttaaccaaatcaaagagtctatttttgcccaagtctgacaaaaggagaaatccacttttgcaatgcatcaaaggcctttgtatcctacccaatatacttggaaagacatatacagggaacctaccataccggtagctgaactccatatggcaccgcacccccsctttgtctggaggccttaaatggctcttttaatgttactctggggtttctcccaccagacaattgtcaacacatactccaaatcaacagcattgtccccaatgaaacacaacctctttcctaaatctagatgcttccaaacatcactggttacaaatgcgccagaatccctgatggggtgtaccctata

SEQ ID NO: 922071 - DNA, 570 bp, Homo sapiens
agtgaaggtgtcagaaacagcctcagaagcaaaagtttttctctaaccttctcatgtcctcctgtttctcagtctcattttcccttaagggtagccatagacatgagaatccctcctctctgaggcaggtcatagaaaccagaactctttttccccaaagccagygaagaaacctaaaaatattactctgacattccttccacctttctgcataaaaactgaccataaacaaattacctggcctattttgtttgactatagatcataagacccttattccagacagcaccttgccccacatccagaaagaagaaatgaacactcagaaagaccaaggatctacacaggcaggccttgctaggtcttcctactcactctattagcagtagatcatactgttttgtccaatcatatttctaaaaagctgcccatactttgttgaacctaagcataaaaatggacaatttcccatgtatttttgggtgttcattctgagggttcttatgtcatataaaactatgatcaaataaatttgtatgccttttctcctataaatctgcctcttgtcag

SEQ ID NO: 922072 - DNA, 671 bp, Homo sapiens
gcacataacatggtgagttcccacgagtctcagttgcaatggcgcggcccctccatccagcaattacagcaagttagagatggaaaggaccaaagaggggcctgtgtagaaccttttgtcagaaaagaaaattttatttatgtgattaaaaaaattataaattcttttgctgacattatttggttatggataaagccttttgagtgagtgggctggcattagggtccatttggaagatggatatgggagagtccagaagttaagtgacgtgcccaaggcctcgcaacccaagtctagccttaaaccctcaaggacatgtgtaaggcctatatttgcattttaaaattatgttgaattcaaggccctttgtttacacatccaggtttagaaaccattgctcttactggaactctgaggtgaggcttcaaaacccacagaggagcggaggaaactgtggtttcctgatgaaagaggctgaatttgctcaccttagkgtgtgcaggggcccacagaggcctccacaaggttcctacctgaaggaaatcttgggagggcctcagtatccggggctgaccagtcctgaagccctggagtctagtgccatgggcttgttggccaacgtgttatagactctaagaccatgtcaaccaaaagtagttcaaacacctgta

SEQ ID NO: 922073 - DNA, 730 bp, Homo sapiens
aaatcaacttggtcccccttcaattttgtcaaaagaaaagaaatggaaaccatgagacatgaaaatgtatttgttacccagtcatttgtcattcactgtcttgattctgggaaatacaccaaaaagactgcccccaaacttctcagatgactgctaattatacctgctactcatttacttagagattccttgttaacatggaaaaggttaggaaaattaaaatactagtcattttaacacaactttgccaatacaatttttttttttgcctttcaaattgagatgtaattcacrtaccagaaagatcactcttttaaagtgtgcaatttagtgggttttagtatcttcagaaagttgtgcagccatcaccactgtctaattccaggacatttgcatctccccagcaagaaatttcatacctattagcagctactcttcattccccgctccaccctcacgattttcaatgaagttattttatctcatcatatgctttaagtacattttcatccaaatcatggcattttaggtgcagctcattcagttcatggaaatgcctgccatgtaacctatttggcaaagcagtccattcatcaagacagcagccaagccagatctagcttcagttaggaaaaaactgacttcaatttcaaagcaatgtgttaatatgcatcccttcccaaccatcttacttctgaattctaattctgagatgagagattgatgtaca

SEQ ID NO: 922074 - DNA, 730 bp, Homo sapiens
aaatcaacttggtcccccttcaattttgtcaaaagaaaagaaatggaaaccatgagacatgaaaatgtatttgttacccagtcatttgtcattcactgtcttgattctgggaaatacaccaaaaagactgcccccaaacttctcagatgactgctaattatacctgctactcatttacttagagattccttgttaacatggaaaaggttaggaaaattaaaatactagtcattttaacacaactttgccaatacaatttttttttttgcctttcaaattgagatgtaattcacataccaraaagatcactcttttaaagtgtgcaatttagtgggttttagtatcttcagaaagttgtgcagccatcaccactgtctaattccaggacatttgcatctccccagcaagaaatttcatacctattagcagctactcttcattccccgctccaccctcacgattttcaatgaagttattttatctcatcatatgctttaagtacattttcatccaaatcatggcattttaggtgcagctcattcagttcatggaaatgcctgccatgtaacctatttggcaaagcagtccattcatcaagacagcagccaagccagatctagcttcagttaggaaaaaactgacttcaatttcaaagcaatgtgttaatatgcatcccttcccaaccatcttacttctgaattctaattctgagatgagagattgatgtaca

SEQ ID NO: 922075 - DNA, 697 bp, Homo sapiens
gaattgctggattctaccatagttctactttgggatttttgagacaatcccttaatgtttttcataatggctgtactaatttgtattccaacaacgtatatattagttccgttttctctacatcctctccagcatttggtattgtctttttcatagtagccatcctaacaggtgtgaggtgatatcgyaacttgcttttggtttgcatttctctgataattagtgatgttgaacaccttttcctatatctgttgccatttttatgtcatatttgaataaagatctatttagatcctttgaccttttttccatcagatcatatgttttcttgctattgaattgtatgagctctttataaatcttggatctgtaaattttttttcccaattggtagggtcttttcattttggtgattgtttcctttgctgtgcagaagctttttggttttatgtagtctcatttacttatttttcttttgtagcttgagatttcagtgtgatagtcaagatattactcccaaggccaatgtcaagatttcctcctatgatttcttctaggagttttatggtttcaggtcttacatcaggtcttttatccattttgattttgtttttctgtatggtgaaaggtaaggatccattttcattcttttgcatgtagaaatccaattttcccagcagcatttattgaagagact

SEQ ID NO: 922076 - DNA, 645 bp, Homo sapiens
tgctggattctaccatagttctactttgggatttttgagacaatcccttaatgtttttcataatggctgtactaatttgtattccaacaacgtatatattagttccgttttctctacatcctctccagcatttggtattgtctttttcatagtagccatcctaacaggtgtgaggtgatatcgtaacttgcttttggtttgcatttctctgataattagtgatgttgaacaccttttcctatayctgttgccatttttatgtcatatttgaataaagatctatttagatcctttgaccttttttccatcagatcatatgttttcttgctattgaattgtatgagctctttataaatcttggatctgtaaattttttttcccaattggtagggtcttttcattttggtgattgtttcctttgctgtgcagaagctttttggttttatgtagtctcatttacttatttttcttttgtagcttgagatttcagtgtgatagtcaagatattactcccaaggccaatgtcaagatttcctcctatgatttcttctaggagttttatggtttcaggtcttacatcaggtcttttatccattttgattttgtttttctgtatggtgaaaggtaaggatccattttcattct

SEQ ID NO: 922077 - DNA, 645 bp, Homo sapiens
tgctggattctaccatagttctactttgggatttttgagacaatcccttaatgtttttcataatggctgtactaatttgtattccaacaacgtatatattagttccgttttctctacatcctctccagcatttggtattgtctttttcatagtagccatcctaacaggtgtgaggtgatatcgtaacttgcttttggtttgcatttctctgataattagtgatgttgaacaccttttcctatatctgttgccatttttatgtcatatttgaataaagatctatttagatcctttgaccttttttccatcagatcatatgttttcttgctattgaattgtatgagctctttataaatcttggatctgtaaattttttttcccaattggtagggtcttttcattttggtgattgtttcctttgctgtgcagaagctttttggttttatgyagtctcatttacttatttttcttttgtagcttgagatttcagtgtgatagtcaagatattactcccaaggccaatgtcaagatttcctcctatgatttcttctaggagttttatggtttcaggtcttacatcaggtcttttatccattttgattttgtttttctgtatggtgaaaggtaaggatccattttcattct

SEQ ID NO: 922078 - DNA, 561 bp, Homo sapiens
ctgctctgaatatttgtgtacctgtcttttggggataaatgctcttaattatcttggaataaatacctatgaagggaattgctaggttacacaggtgtatgattagctttagtaggtgtgctaagcagttttacaaagtgttttggtcaatttacattccacggcaatgtttgaaagttctagttgctctatatccctagtattttcagwctttttaatttaattttattttattttattttattttattttttgagaaagagtcttgctctgttgcccaggctggagtgcattggcgcgatctcagctcactgcaacttctacctccgcagttcaaatgattctcctacctcagcctcccaagtagctgggattataggtgtgcaccaccacacctggctaatttttttatttttagtagagatggggtttcaccatgttggccatgctggtctcaaacttctaggctcaaatggtctcaaactcctgggctcaagtgatcctcctgctgcagcctcccaggcgtgagccacagcacccagcctaattttttttttccag

SEQ ID NO: 922079 - DNA, 618 bp, Homo sapiens
gatggggttttgccatgttgcccaggctggtctcgaattcctggcctctcatgatctgcccatcttggcctcccaaaatgttggatttccaggcgtgagccactatacccagcctgcctctagtttcttatataaaggaataataacatagccttgtaggattattgggctgactaaattaattagcaaatataaagtgcttagaatgtctagcatattagtaatctttcaacaagcattagctgttatygctgttgatgatgatgatgatgccactactgctgctgctgttgttatttacaccaaggggtctctcacttgaagaggatgactggtcctggcctgagtgccctgtttgggggtagaggtggaaatgggggtgagagaaaggaagcagttagttgaatctttcccttggctgggaacagcagggttgcgaagggctcctgggttcccaagagcagccacagaaccgagaatagacttcctgctcacacgggggaagaaggctgatttctcggctccaccatgctcctctgctgactaggcttcctttccttaattaaggcctcacctaggcggccagactgatggagcctcctccactgctgtaggact

SEQ ID NO: 922080 - DNA, 590 bp, Homo sapiens
tcaagtcagtacccccttggactggtgctcccagaggaaggatcaggttgccatctttgctgttttgcagccttcactggtgatacctccaggtgcaggagagactgaggtgactagggtccagagtggatgctcaaaaaccacagcagccctagccctagggaagagtggtctgactgttaaaaacaaacagaaagcaacaacaacatcaacaaaawacccataaaaactccgttcaaaagtcaacaacgtcaaagatcaaaggtagataagcccacaaagatgagaaagcatcaacacaaaaacgcagaaaactcaaaaaggcagaaagcctcttctcctctaaatgacaacaacacctccccagcaagggcacagaactgacccaaggctgagatggctgaattgacaaaagtaggctttaggaggtgggtaataacaaacttctctgagctgaaggagcacgttctaacttaatgcaagaagctaaaaatcataaaagaacacagtagctgataaccagaatattcagtttagagagaaacataactgacatgatggatctgaaaaacacaacatgagaacttcac

SEQ ID NO: 922081 - DNA, 612 bp, Homo sapiens
ttctgtgcctctggcttttcaaggtgcaaggtgcaggctgtagctagatctaccattctggggtctggaggacagtgatcccctcctcatagatatactaggccatgacccagtggggatcctgcctggggactgtcaccccacatttcttttctccattgttttagtacaggatctccatgagggctccacccctgcagcatgcttctgcctgcacaccctggctttttcatacatcctttgaaataaaggtggaggctcccaagtctcaactacttgcatttggtaaacccacaggcctaacaccacatgraagctaccaagattatggcttgcacactctgaagcagtgactggagttgtaactggatcaatttgagctacacctagagctgaagcagtggccaggatgcagggagccttgttccaaagctacccaaggcagcaggtcctagtctgatcccagaaactattctcttcttttaggcctcagggcctgtgatggggggctgccttttagatttttaaaatgccttcaattcctctttcccattgccttggctatcaacacttgcttttttttaggttatacaaatatctctaacaagtagt

SEQ ID NO: 922082 - DNA, 607 bp, Homo sapiens
  misc_feature 68: n = A,T,C or G
cagagtttcaaaactcctcaatcaaaagaaaagtttaattctgtgagacgaatgcacacatcacaaanaagtttctcagattgcttctttcttctttttatgtgaagatatttcctttccacagtaggccttaaaatgttccaaatatccacttgcagattctacaaaaagacagtttcaaaactgctcactcaaaagaaagttttaactctgtgagaggaatgcacacatcataaagtagtttctcagattgcttctgtctacaatttatgtgaagatgtttccttttctaccgtaggccccaaagcrctccaaatgtccacttgcagattctacaaaaagagagtttcaaaactgctcaatcaaaagaaaggttaactctgtgagatgaatgcacacatcactaagaggtttctcagattgcttctgtctagattttatgtgagggtatttcattttctaccgcaggccacaaaactctccaaatattcacttgcaaattctacacaaagagagtttcaaaactgctctatcaaaagataggttcaaatctgtgagttgaatgcacacataacaacgaagtttgccgtaatacttctgtgttgtt

SEQ ID NO: 922083 - DNA, 607 bp, Homo sapiens
acactgctttctcaagctcatgtggaacattcaccaagatagaccacattctggactataaacataccttaacaaatctaaaagaatagaaatcatacaaagaatgtcctcagaccacaatacaattaaattagaaatcaacaatggaaagataattgggaaaaccagaaacgtttggagattaaacaacatatttctaaacaacatatgggtcaaagagaagtctcaagagaaattttaaaatattttgaactaaaaaatgcaacttatcaaagtttgtgggatgcagcaaaagcagtgaggtttccatagtattaaaaktaacatgttagaaaagaaaaaaaggtggaaaattattaagcttcaccttaggaaactggagaaagaagagcagtgtaaacccaaaggaagcagaagaaaagaaataataaaaatcagagcagaaatcagtgaaactgaaaactggaaaacaacagagaaagtcaatataaccaaaagctgcttctttgaaaacatcaataaaattgaaatctctatctaggctaagaaaaaaagaaagaagatgcaaattactaacatcagaaatgaaagaatggccatcactact

SEQ ID NO: 922084 - DNA, 480 bp, Homo sapiens
acgtagatttggtcttttcacatagtcccatatttcttggaggctttgtttgtttctttttattcttttttctctaaacttctcttcacacttcatttcattcatttcgtcttctatcactgataccctttcttccagttgatcccgtcagttactgaggcttgtgcattcgtcacgtagttttcacactgtggttttcagctccatcaggtcctttaaggactgctgtgcattggttattctagttatccattcatctaatttttttttcaaggtttttaacttctttgccattggttcgaacttastcctgtagctcatagctcagagtagtttgatcttctgaagccttcctctctcaactcgtcaaagtcattctccatccagctttgttccattgctagtgaggagctgtgttcctttggaggagtagagcgctctgatttttagagtttccagtttttctgctcggttttttcc

SEQ ID NO: 922085 - DNA, 589 bp, Homo sapiens
caaggaatgccaaggactgctggaagacaccaaaggccaaaagaggaaggaggaggcatggcctgacaacatcctgatttccaacttctgaccttcagaactgtggcagaatacatttctgttgttttaagccaccgagcttgtggtaacttgstagggcagcactgggaaatgaacgcatcatttccaatgactcacttgggtaatgtgagcttccaatccctgaaacacttggtctgtgggtttccaaggcacccacagccaagaagatcaatcgccaccttggcaaagctgctccaccctaatcatcagaagcaggtagggctattgttacacaatgggagccagaaggaatacgtttggcacccaggtatctactggggtccctcttagtacttccttgcacaaatttgatgataaatggacaactgcaataatcctggtctgagaagggtagagtaatcagaggatcaagcccctccgggatgaaggtattggtcatgccacagcttagccacagagaccagcagaggttcagacagagggtgaggctaatctacaatgggtagcagaagagggaaagtgagac

SEQ ID NO: 922086 - DNA, 621 bp, Homo sapiens
gtgcattatacagagagctgattggtccattttgacagggtgctgattgttgcgtttacaaaccttgagctagacacagagtgctgattggtgtatttacaatcctctagctagacataaaagttctccaagtccgcactagattagctagacacagagcactgattggtgcctttacaaaccttgagctagacacagagtgttgattggtgcatttacaatcctttagctagacacaaaagttctccaagtccccactagattagctagacacggagcagtgactggtgcatttacaaaccttgagctagacacagagtgctgattggtgcatttagaatcctctagctagacataaaagccctgttgcccaggctggagtgcaatggcacaatctcagctctagatcttggaggcatgcttcattcttttttmtttctttttattttatctcttctgactgtgtattttcaaataacttgtcttcaggctcactaattctttcttctgcttgatccatctgctgttaaaggactttgctgcattcatcagtatgccaattgcattttcagttccagaatttcttcatgattctttgtaattatttcattcattttgtta

SEQ ID NO: 922087 - DNA, 773 bp, Homo sapiens
atgatccagagcaggcagggtccacaatgactcagaaacatcttgaggacctgctcagagaatgacaacacacgggccagtgggaacagcttccaaaccccagcaaaggtgaacagtaagataagtaatgataattccaggttataatccaataaataagatagaaaactacacatccatactgacataaatacaacataaatgaataaattaaacgttgaatgaagagcagagtatttacacagttttaagctagtcctccatgtaatactaattaattacaaaggaagaaaggagtgaagaaaccacagacaccacctccatcaggtcaccagtgtgaacatcgtcagtaaccgggcaaattgcagtcctgccgacctgagwgcacggagtgaggcggtcccagggtcgctcctgggttctcctgccaaggacgctaaacctgaatctgctcatgaggaagcatcaggcagccccgtgctgggggaaatcctgcaatgtaactggcctagagccattagagtgtcaaggccacgaaagtcacagaaagactgaggaacttttccaggtgaatggagcctaataaaacacaacagccaaatgcagcatgtagctctgagatggttccttttgtttttaaggatgtctgggggcaaatatgaacagggtctgagaattaggcattaggaatatatcaacgttgattatctgattctgttaactctactgtggttgtgtaggagcatatttgtgttggtacaaaatacacacta

SEQ ID NO: 922088 - DNA, 606 bp, Homo sapiens
ttggaagggatttgcctagaggtaggataactgcggggggtatgtctatagcaataaaagtgagaaaatatgagatctgaaggagctaacattgtggcagtggcagtgggtataaaggagaagggaggactagaagagatatttaagatgcaaacaatgtaggaactgggtgattatagaactgaaaagtgagtgagagggaggaatccatgagaactcacatatttctggttaggataaaagactgattgactgacatgaagactacaagagaaaaaaacagacttggagttgaaacttcagtttaggacactgaaactgaatgatgtgtcattcaagkggaaaggccattaggcagttagatatgtaggcttagagcacaggagaaaggtcttaaaaccctgggcttatgggacgttaccacggagactgcacagagtgagaagatccattttaaagctgatgatgaataatattttcgttataaggagagaagcaatgttaggggtgtcttcccattgctggagtgggtcatttgcagtatgcagtgcataaactcacaggctgtccttatgatgaccttttgttcattcttacattcagtat

SEQ ID NO: 922089 - DNA, 650 bp, Homo sapiens
ctgagagcttcttccactcaataaaaccttgcactcattctccaagcccacgtgtgatctgattcttccactacaccaaagcaagcaccccaggatacagaaagccctctgtctttgccacaaggtagagggtgtaattaagctagttaacacaagctgcctttggatggctacactaaaagagcaccctgtaacacatgcctactggggcttcaaaagctgtaaacattcacccctagacactgccctggtgttggagccccacagcctgcccrtatgtatgctcccttagaggcctgagcagcagggcactgaagaaacgagccacttccccatcgtacaccctgcgagggggacaaaggaacttttcccatttcacctcctctgtcagtaccaagctggtctgtatgaggacggcagtctttgaaaaacaacatattggccaggcgtggtggctcacacctgtaatcccagcacttcgggaggtcgaggtggacagatcacgaggtcaggagattgagaccatcctggctaacacggtaaaaccccatctctactaaaaatacaaaaaaattagctgggcgtggtggtgggcacctgtagtcccagctactcgggaggctgaggcaggagaatgacatgaacccagg

SEQ ID NO: 922090 - DNA, 623 bp, Homo sapiens
tggtacctacccacattgagggtgggtctgcctttcccgatccactgactcaaatgttaatctcctttggcaacaccctcacagacacccaggaacaatacttttgcatctttcaatccagtcaaattaacagttaatgttaaccattacaggaaggtactggagggttttaagcagagaagtggcataatctgacttaggtattcaatggatcattctcgctgttgtgtttttaaaaagacaggaggagggaaattttaaggagattatataggaagctattgtattaataagaaatggtggctggacatggtggctcatgcctgtaatcccagcacttttsgaggccaagacaggcggatcacgaggtcaggagttcgagaccagcctgaccaacatggtgaaaccccatatctactaaaaatacaaaaaaataaccaggtgtggtggcacccgtctgtaatcccagctattcgggaggctgagtcaggacaattgcttgaacccgggaggcaaaggttgcagtgagccaagatcgcaccactacactccagcctgggtgacagagcaagactccatctcaaagaaaagaaatggtggtatctcagaacagactgctagtg

SEQ ID NO: 922091 - DNA, 608 bp, Homo sapiens
gaggatcttatttctcctttgcttatgaagcttagtttggccagatattaaattctgggttggaaattcttttcttttagaatgttgaatatggcccccaatctcttctggcttgtagggtttccacggagaggtctgctgttggtctgatgggcttttctttctgggttacctagcctttctctctgtctgctctcaacattttttcttttatttttaccctggagaatttaayaattttttgtcttggggttgacattcttgtggagtaacttaattgggttccctgcatttcctgaatgttaatgccggcatgtctagctatgttggggaagttctcctggctgatatcctgaaatatgttttctgacttggttccattctcctcatctctttcaggtatatcaatcagtcatagtttcagtctctgtaaataatctcatatttcttggaggttttgtttattttttttcattcttttttcctctagtcttgtctgcatgtgttgtttcaggaatatagtcttcaagctctgagattctttcctctgcttggtctattctgctactgatacttataattgcattgtgaagtttttgtgttgtatt

SEQ ID NO: 922092 - DNA, 608 bp, Homo sapiens
gaggatcttatttctcctttgcttatgaagcttagtttggccagatattaaattctgggttggaaattcttttcttttagaatgttgaatatggcccccaatctcttctggcttgtagggtttccacggagaggtctgctgttggtctgatgggcttttctttctgggttacctagcctttctctctgtctgctctcaacattttttcttttatttttaccctggagaatttaataattttttgtcttggggttgacattcttgtggagtaacttaattgggttccctgcatttcctgaatgttaatgccrgcatgtctagctatgttggggaagttctcctggctgatatcctgaaatatgttttctgacttggttccattctcctcatctctttcaggtatatcaatcagtcatagtttcagtctctgtaaataatctcatatttcttggaggttttgtttattttttttcattcttttttcctctagtcttgtctgcatgtgttgtttcaggaatatagtcttcaagctctgagattctttcctctgcttggtctattctgctactgatacttataattgcattgtgaagtttttgtgttgtatt

SEQ ID NO: 922093 - DNA, 608 bp, Homo sapiens
gaggatcttatttctcctttgcttatgaagcttagtttggccagatattaaattctgggttggaaattcttttcttttagaatgttgaatatggcccccaatctcttctggcttgtagggtttccacggagaggtctgctgttggtctgatgggcttttctttctgggttacctagcctttctctctgtctgctctcaacattttttcttttatttttaccctggagaatttaataattttttgtcttggggttgacattcttgtggagtaacttaattgggttccctgcatttcctgaatgttaatgccggcatgtctwgctatgttggggaagttctcctggctgatatcctgaaatatgttttctgacttggttccattctcctcatctctttcaggtatatcaatcagtcatagtttcagtctctgtaaataatctcatatttcttggaggttttgtttattttttttcattcttttttcctctagtcttgtctgcatgtgttgtttcaggaatatagtcttcaagctctgagattctttcctctgcttggtctattctgctactgatacttataattgcattgtgaagtttttgtgttgtatt

SEQ ID NO: 922094 - DNA, 559 bp, Homo sapiens
aaagcaggaggttagatcctcgtacataccccccagaaaggggttgaaaccagcaatggtctacaggccctgctcccatagcaccacacaggataaaaccaactggcttgggatcccagccagcaatcagtagcagcattattccttcctgagatggagctcccagagggaagggcgggttgccatctttcctgtcttgcagccctaacctttgctgtctccaggctccaggctgcagagggttcatggggaccaagaactggtccggacccccaacatagagcacccacctcatggaaaagtggtcaggctgttctttacacaggtttcagtccatayttcttactggggagcgctgcctaatctggaactccagcacaaccactgtgcccacaggtgaccacttcaatcagaggcagcgcaccatttctccaaggagggaatcccagagtcaacctacatcccttctgccactgcagttgcagtagtaccaccctaacaaccctagggttgggaaaggaacaaaggacctagtcactacactggtccttcagcacac

SEQ ID NO: 922095 - DNA, 593 bp, Homo sapiens
tctcctttgactccatatccttaaccctgggcatcccggggtgaggattgggccctcaagacttcaggtagtgctacctctatggctttgctggctgagtccatccatcaattctcacaggttaaagtttcatgcctacagcttttttactcccatggttcaactaagcattgctcttgcagggactctctataggggcccaaatcctgcatttctgtttggtactgccttagtaggggttctttgcagtggccctgctgctagaacaagtctctgtcttggcccacaggctgtttgcaaaattctttcaaatgtaggtggagagagccatgtctccacagctcttgcattccatgttcctgcagaattaccaccatgttgatgctgccaagatttrtggcttgtaccttttagaccaatgggttaagctgcatctgggtctgcttcagccatgactaaagtggccaagtgttgttttgttttttgttttttggggttttttttgtttgtttgttttatgatttttttttttgactgtagaatgcagagacctgaagcagttctgggcagagactccatggaagatgtgctag

SEQ ID NO: 922096 - DNA, 631 bp, Homo sapiens
tattgggctgagactatggggttttctaggtatagtttcatgttgtttgcaaacagtttaactatttggatgccctttatttatttctattgtctgatttttttttttttttttttgagatagagtctcgctctgttgcccaggctggagtgcagtggcatgatctcggctcactgcaacctccatctcccagattgaagtgattctcctgcctcagtctcctgagtagctgggattagaggcacataccaccacgcctggctaatttttgtacttttagtagagacagggtttcaccatgttggtcaggctggtcctggcctcatgatccacccacctcaccctcccaaagtgctggcattgcaggtgtgagccaccaygcctggcccaggacttctaatattatgttgaatgggagtggtgagaaagagtatccttgccttgtgtcagttttcaagaggaaggcatctagtttttgcccattcagtagatgttggctgtgggtttgtcatagatgtctcttattattttgaggtatgttccttcaataactagtttattgagagtttttaatgtgaatggatgttgaatgttattgaaagctttgtctgcctctattgaaataatcatg

SEQ ID NO: 922097 - DNA, 608 bp, Homo sapiens
ccattccatccaccttcaaagccaggagtgtagcatagcatgttcagatctctctctgcttccatcatcacagcatcttcagcattcggtgtcaaatctccctctgcctgcctcttttttttttttttttttttttttttttgagatagagtttcactcttgttgcccagctggagtgcaatggtgcaatctcagctcattgcaacctcccttgaacctcccaggttcaagcgattctcctgcctcagcctcccaagtagctggaattacaggcctacaccaccacacccagctaattttttgtatttagtagagatggggctttaccatgttagtcaggctggtctcaaactcctgacctcaggtgatccacctgcctcggcctcccaaagygctgggattacagctgtgcgccaccatgcccggcttctgcctccctcttctaaggacacctgtgatttcacttaccgctcaccaggataatctctctatctccaaatccttcacttaatcacacctgtgaagtctcttttgccacctaaggtgacatttacagattccaggaattagaacctggctgtctttgaggaccattattaggtctataa

SEQ ID NO: 922098 - DNA, 579 bp, Homo sapiens
tgagcatctattctgtttaatgccaggcctttgaaggcacagaaaccaatacatattatgaactttaccattgaacaaaagggtttcttaagccctaaggagccactgatgaactttagaactccatcaagttcaggaaattatttggttggtgcaaaagtaattgtgatttttgctattaaaagtaatggcatacataaagtgttataaattccatatttttctgagaaatggttccatagttctcattaacttttataatgttctatgaccaaaataacataaagaaccatagatataagacaaaaatatactaaaaacttgagcttctaatgactcttatgttaactgactgccatatataagtctgttaaattcttggcatagagatggacagtccaattgtaatatcaaatattckttctaaagacttcttatatttgaaaagtcatataatcttaaagtggcatcccaaattttattgtttacaggttttattggttatatgtttctttttacaaaatgacagcttatcatagtttcaatttttttgaagttgatgtaagaaatagttatatg

SEQ ID NO: 922099 - DNA, 594 bp, Homo sapiens
aagcaatgtcaacaaatgccaacattgacaaatgggatctaattaaactaaagagcttctgcacagcaaaagaaactatcatcagagtgaataggcaacctacagaatgggaggaaattttcgcaatctatccatctacaaagggctaatatccagaatctataagaaacttaaaccaatttacaagaaaagaaaaacaaccccatcaaaaagtgggtgaaggaaatgaatagacagttctcaaaagaagacatttatgcagacaacaaacttatgaaaaaaagctcatcatcactggtcattagagaaatgcaaatcaagaccacaatgagataccatctcaygccagttagaacgatgatgattaaaaagtcagaaaacaacagatgctggagaagatgtggagaaataggaatgctcttacactgttggtgggagtgtaaagtagttcaactattgcggaagactgtggtgattcctcaacgatctagaactagaaataccatttgacccagccatcccattactgggtatatacccaaaggaccataaatcattctactataaagacacatgcacacgtatgtttattgc

SEQ ID NO: 922100 - DNA, 772 bp, Homo sapiens
gtctgttggagtttactggaggtccactccagaccctgtttgcctgggtatcagcagcagaggctgcagaacagtggatattggtgaacagcaaatgttgctgcctgatcattcctctggaagttttgtctgagaggagtacccagccgtgtgaggtgtcagtctgcccctactagggggtgcctcccagttaggctattcgggggtcagggacccacttgaggaggcagtctgcccattctcagatgtcaagctgtgtgctgggagaaccacttctttcttcaaagctgtcagacagggacatttaagtctgcagtggttattgctgtcttttgtttgtctgtgccctgcccctggaggtggagtgtacagaggcatgcaggcctccttgagctgtggtgggctccagccagttcaagcttcccggctgctttgtttacctactcaagcctgggcaatggcgggcacccctcccccagcctcgctgcygccttacagtttggtctcagactgctgtgctagcaaagagtgaggctctgtgggtgtagaaccctccaagctatgtgtgggatataatctcctggtgtgctgtttattaagcccattggaaaagcacaatattagggcaggagtgacccaattttccaggtgccatctgtgaatgctttctttgactaggaaagggaattccctgacctcttgcccttcccaggtgaggtgatccctcaccctgctttgggtcacgcatggtgtgctacacccactgtcctgc

SEQ ID NO: 922101 - DNA, 528 bp, Homo sapiens
tacatcaaaaaggaagaaaaacttcaagtgaataacctgatgatgcatcttaaagaattaaaaaggcaagagtaaaccaaacccaaaattagtagaagaaaagaactaataaagatcacagtagaaataaataaaattggacttctgctccaagatggcctaatagaaacagctccagtctgcagctcccagcatgaytggcacagaagatgggtgatttctgcatttccaactgaggtaccaggttcatctcattgggactggttggacaatggatgcagcccatggagggtgaggtgaagcagggtgaggagtcacctcaccccggaagcacaagtgattgggggatttccctttcctagccaagggaagccgtgacagactgtacctggaaaatcggttcactcccacccaaatactgtgcttttcccatagtcttagcaaccggcagaccaggagattctctcccaagcctagctcatcaggtcccatgcccacggagcctggctcactgctagcacagcaatc

SEQ ID NO: 922102 - DNA, 595 bp, Homo sapiens
ttattctacagtttgccttttaccctgttggttgtgacctttgaggtacagaagtttttaggtttgatatatttttgcttttactgcctgagcttttaatgtcatatcctaaaaattattgacaaattcatcgtcataaagcattttccaaatttgttttccctaggagtttgatagttctagttttacatttaggtttataattcactttgaattaattttracgtggtgtaaggtaagagtccaacttcattgttttgcatgtagatatacaattttcccatcacaatttgttgcagaaactgtccttcaccattgagtggccctggcatccttgtggaagatcatcggaccatatatgccagggttggtttctgaggtctctgttgtgttggtccataagtgtgtcaagagtgtctttatgccatgaccacatttttttttggcttattgcagttttgtaattgttttgagacctttaattttgttctgtttcaagattgatttgcctattcatgggccctggagattccatatgaattttaggataggtttttctgtttatcgaaaatgtcattggaatctgtataaggat

SEQ ID NO: 922103 - DNA, 595 bp, Homo sapiens
ttattctacagtttgccttttaccctgttggttgtgacctttgaggtacagaagtttttaggtttgatatatttttgcttttactgcctgagcttttaatgtcatatcctaaaaattattgacaaattcatcgtcataaagcattttccaaatttgttttccctaggagtttgatagttctagttttacatttaggtttataattcactttgaattaattttgacgtggtgtaaggtaagagtccaacttcattgttttgcatgtagatatacaattttcccatcacaatttgttgmagaaactgtccttcaccattgagtggccctggcatccttgtggaagatcatcggaccatatatgccagggttggtttctgaggtctctgttgtgttggtccataagtgtgtcaagagtgtctttatgccatgaccacatttttttttggcttattgcagttttgtaattgttttgagacctttaattttgttctgtttcaagattgatttgcctattcatgggccctggagattccatatgaattttaggataggtttttctgtttatcgaaaatgtcattggaatctgtataaggat

SEQ ID NO: 922104 - DNA, 579 bp, Homo sapiens
ccagtctactaataagccatcagaggtattcttcagttatttacattttttatgactacattatgttgaaggttcttacgatgtctgtctttctgattaccttacccatctacacttgaatgctgtctacttcattcattaggcccttagcatattctccaggggtttaaaaaaattccaaaatcatacctttgtctgcttctgaagcttgctctgttgacacaaattgtatttttttccttttttggattttagtatgccttgcaattttttccctttattctcatgcatgaagcacccactaaaagtgactgttgttagtatagcttcagtaatgcggtgatgaggtgacagggcaggtgatgctctcttagtctctttaggctactataacaaaatactttagactgagtaatcataaacaacagagattattgctcacagayctggaggctggaaagtccaagactaaagggtcaggatatttggtgtttggtgaaggtcaaacattcagacactcacaacgactatagtgacagcagcagtcttcaggaatcctatgtgagggacaaacactca

SEQ ID NO: 922105 - DNA, 689 bp, Homo sapiens
acaaacattcagaccctcgtagcagtgttctggaatcctatgtgagggaaaaacattcagaccacagcaggagtgctcgggaatcctatgtgagggacaaacattcagaacctcgtagcagtgtgctgtaatcttatgtgagggacagacatttagaccctcgcagcagtgttctgaaatcccatgtgagggacaaacattcagaccctcycagcagtcttctggaattctatgtgagggacagacattcaaaccccagcagcagtgttctggaatcctttttgagggacagacattgagaccccagcagcagtggtctggaatcttatgttagggacaaacattcacaccccagcaacagtgttctgtaatcttatgtgagggacaagcattcagaccccagcagcagtgttctggaatcttatgtgagggacaaacattgagaccctcgtagcagtgttctggaatcctacatgagacacaaacatttgtaccacagcggaagtgttctggaatcctatgtgaaggacaaccattcagaccacagcaggagtgttctggaatcctatgtgagggacaaatattcagaccctcatagtagtgttctggaatcctttgtgagagacaaacattcagaccccagcaggagggttctggaatcctgtgtgagggaccaacattcagaccct

SEQ ID NO: 922106 - DNA, 635 bp, Homo sapiens
cctacaagccagaaaagatattcaacttcttaaagaaaagaaatttcacgtagtatggcagagacagatataccatataataacatggtgttattataaatgatttaaaaaaaaaaaagaaaataaatttcaacccagaatttcatgtccagcaaaattaagcatcataagtgaaggagaaacaagawccttttcagacaagcaaatgctgagagaattcattatcaccagatctaccttacaagagctcctgaatgaagcactaaatatggaaagaaaagaccatcaccagccactacaaaaatgcaccgaagtacacagactagtaatgctaaaaaccaaccacatacacaagtctgcaaaataactagctgacagcatgatgacaggatctaatccacacataccattactaaccttaaatggaaatgggttaaatgctccgattgaaagacacaggggggcaagctggataaagaaccaagacccatttgactatgccgtctccaagaaacccatctcacatgcagtgccatacataggctcaaaatgaaggaatggtgaaaaatctttcaagcaaatggaaaacagaagaaatcaggtgttgcactcctattttcgacaaaacgtatata

SEQ ID NO: 922107 - DNA, 523 bp, Homo sapiens
gaattgtgctgcaataaatgtgcagttgtcttttcgatacagtgacttcttttcctttgggtagatagtagtgggattgctggatcaaacggtagatctacttgtagttctttgagaaatctccatagtgttttccacagaggttgtactaatttacattcccaccagcagtgtataagtgttcccttttcatcacatccatgcattatctattgcttttwgactttttagtaataaccattgtagctggggtaaggtggtatctcattgtggctttaatttgcatttccctaatgaatattttttcatgtttggccgtttgtttatcttctttagagaaatgtctgtcatttgcccactttttaatgggattttttttcttgttgatttgtttgagttccttgtagattctggatattagtcctttgtcagatacatggtttgcaaatattttctcccgttttgtgggttgtctgtttactctgatgatgatttctttgactgtgcggatgcttcttaatct

SEQ ID NO: 922108 - DNA, 523 bp, Homo sapiens
gaattgtgctgcaataaatgtgcagttgtcttttcgatacagtgacttcttttcctttgggtagatagtagtgggattgctggatcaaacggtagatctacttgtagttctttgagaaatctccatagtgttttccacagaggttgtactaatttacattcccaccagcagtgtataagtgttcccttttcatcacatccatgcattatctattgctttttgactttttagtaataaccattgtagctggggtaaggtggtatctcattgtggctttaatttgcatttccctaatgaatattttttcatgtttggccrtttgtttatcttctttagagaaatgtctgtcatttgcccactttttaatgggattttttttcttgttgatttgtttgagttccttgtagattctggatattagtcctttgtcagatacatggtttgcaaatattttctcccgttttgtgggttgtctgtttactctgatgatgatttctttgactgtgcggatgcttcttaatct

SEQ ID NO: 922109 - DNA, 411 bp, Homo sapiens
ctaaagtgggaggatcaattgcttgaacccaggagttgaaggctgcagtgagttatgattgcaaccactgcactccagcctgggtgacagagcaagacgttgtctcaaagaaagaaggaagaaagaaaaaaagaaggaaggaaggaaggaagtgttagatatgrgttctaaatttattttcaaagaatcaatatgtcagtatgttcaattctttaccttctacttttaaacttaacttccttataaagcaacctttttcgattacctgctccaccctgactcatttcaatcacctgctccaccctgactcattctgattacctgctctgtcataaccatttttcctgccaaagcactcaccccgttattagccaatcagaattagtttagcctgtgcggtctaactctacc

SEQ ID NO: 922110 - DNA, 411 bp, Homo sapiens
ctaaagtgggaggatcaattgcttgaacccaggagttgaaggctgcagtgagttatgattgcaaccactgcactccagcctgggtgacagagcaagacgttgtctcaaagaaagaaggaagaaagaaaaaaagaaggaaggaaggaaggaagtgttagatatgagttctaaatttattttcaaagaatcaatatgtcagtatgttcaattctttaccttctacttttaaacttaacttccttataragcaacctttttcgattacctgctccaccctgactcatttcaatcacctgctccaccctgactcattctgattacctgctctgtcataaccatttttcctgccaaagcactcaccccgttattagccaatcagaattagtttagcctgtgcggtctaactctacc

SEQ ID NO: 922111 - DNA, 411 bp, Homo sapiens
ctaaagtgggaggatcaattgcttgaacccaggagttgaaggctgcagtgagttatgattgcaaccactgcactccagcctgggtgacagagcaagacgttgtctcaaagaaagaaggaagaaagaaaaaaagaaggaaggaaggaaggaagtgttagatatgagttctaaatttattttcaaagaatcaatatgtcagtatgttcaattctttaccttctacttttaaacttaacttccttataaagcaacctttttygattacctgctccaccctgactcatttcaatcacctgctccaccctgactcattctgattacctgctctgtcataaccatttttcctgccaaagcactcaccccgttattagccaatcagaattagtttagcctgtgcggtctaactctacc

SEQ ID NO: 922112 - DNA, 583 bp, Homo sapiens
tgttgaattttagaaatgctttttctaaattgatttaattatggtaatttattgaaaagagtatatttgttctgtaagttctgtaacttcaataagtaatgttgaagttactttttttttttttttgccttcaagcatctgtttaacaaagcacatcttgcaccacccttaatccatttaaccctgagtggacacagcacatgtttcagagagcacggggctgggggtaaggttatagattaacagcatcccaaggcagaagaatttttcttagtacagaacaaaatgtagtctcctatgtctacttctttccacacagacagcaacaatccgattcctttatcttttccccacatttcccccttttctattcgacaaaaccgccatcgtcatcatggccygttctcagtgagctgttgggtacacctgccacacggggtggcggccaggcagagggagtcctcacttcccagaaggggcggccgggcagaggcacccccccacctcccagatgggaccgcggccgggcggaggtgccccccacctcccggacggggcggctggccgggcgggggctgccccc

SEQ ID NO: 922113 - DNA, 748 bp, Homo sapiens
ggactcctgtaacagaagacagattaacaagaggaaaaaaccaaaagtttattaacaagtgaaccatatatgtataaaatatatgagaaatacccagagaaaggagtagatctcaaagatattactttgaattccaccttaaatactatgactgctgaaacaaagaaagaggagtgtagggaagtctggttatggaggcaagggggaaggatttagggtttaagagacagtgcaagatggttgaatataagcctccactgatcatcctcctcatagggacaccaaatttgacaactatccacacacaaaagaacaccttcatgaraactaaaaatcaggtgagcaatcacagtacctggttttaacttcatatcactgaaaggggcactgaagagggaaggaaagagtcttcaattgccaaggccaccctacacccatcccttggcagtagccatgtggcacaaagagagaatctgtgggcttagggagggagaactcaagagattttgggactttgcattgaaactcagtgctgcccggtcacaatggaaagcaacaccaggtagaactcagcctgtgcccacagacggagcatttagaccagccctagctagagggaaatcactcataccagctatcagaacctgagttccagcaagccttgcctccatgggctaaatttctcgagggtcataaataaagttgaaaggcagtctaggctacaagaatgacaattcctgggcaagtc

SEQ ID NO: 922114 - DNA, 638 bp, Homo sapiens
cctggctgcttctaaaagcctatcctcatttgcataaacaaagaaatgacttgaaactagaacttatatttaaaaagaaagcagagcataaaagtttggaaaatttgcagcctgaccatgcagcagaaaagaaagccccattttctgaggaggaatttaaggctgcagaaatttgcataagtaaagaagagccaaatgtgaatagccaagacaaggcagaaagcatcccagccactccagctccagccatggctaaaaggggccaaggtgcagctcaggccattgcttcagagggtgtaagccccaagttttggtggcttccatgtggtgttgggcctgtgggtgcacagaaggcaagaatcaaggtttgggagtctctgcatagatttcagaggatgcacggaaatgtctggatgtccaggcagaagtctgctgtggaaatagagccctcattgagaacctctactagggtagtgtggrggggaaatgtggagttggagcccccacacaaagtccccactagagcactgactaatggagctgtaagaaaagggccactgtcctccagatcccagaatgatagatccactgatagcttgcactatgccctggaaaagccacagccattcaacaccagc

SEQ ID NO: 922115 - DNA, 626 bp, Homo sapiens
ggaaggatagcattgatggaggataccatcaataatcaaattctgttggttctatgtccttaatatatcttaaaccctttcaatgcttcctctctccatgtccattcttgctaccttagtttagacatgcatcattatttctttcttataatgtgatatggtttggctctgtgtcccatctcaaactgttagccccacgtgctgagggagggacctggtgggaggtgactggatcatgggggcagttccctccatgctgttctcacgatagtgagggagttctcatgagatctgayggttttaaaagtgtcagtttcccccgcaagctctctctctcctgctgccttgtgaaggtggctgcttccccttcgccttccaccatgattgtaggtttccccaggccggagcacagtggcatgatctctgctcattgcaacctccgcttctgtggttcaagtgatcctcctgaggagctgggactacaggtgtgtgccaccaggcctggctaattttttttttttttttttttgtatttttgtagagacagggtttcaccatgttgcccaggctggtctcaaactcttgagctcaagcaatctgcccacctcaacctcccaaactgctgg

SEQ ID NO: 922116 - DNA, 626 bp, Homo sapiens
ggaaggatagcattgatggaggataccatcaataatcaaattctgttggttctatgtccttaatatatcttaaaccctttcaatgcttcctctctccatgtccattcttgctaccttagtttagacatgcatcattatttctttcttataatgtgatatggtttggctctgtgtcccatctcaaactgttagccccacgtgctgagggagggacctggtgggaggtgactggatcatgggggcagttccctccatgctgttctcacgatagtgagggagttctcatgagatctgacggttttaaaagtgtcagtttcccccgcaagctctctctctcctgcygccttgtgaaggtggctgcttccccttcgccttccaccatgattgtaggtttccccaggccggagcacagtggcatgatctctgctcattgcaacctccgcttctgtggttcaagtgatcctcctgaggagctgggactacaggtgtgtgccaccaggcctggctaattttttttttttttttttttgtatttttgtagagacagggtttcaccatgttgcccaggctggtctcaaactcttgagctcaagcaatctgcccacctcaacctcccaaactgctgg

SEQ ID NO: 922117 - DNA, 626 bp, Homo sapiens
ggaaggatagcattgatggaggataccatcaataatcaaattctgttggttctatgtccttaatatatcttaaaccctttcaatgcttcctctctccatgtccattcttgctaccttagtttagacatgcatcattatttctttcttataatgtgatatggtttggctctgtgtcccatctcaaactgttagccccacgtgctgagggagggacctggtgggaggtgactggatcatgggggcagttccctccatgctgttctcacgatagtgagggagttctcatgagatctgacggttttaaaagtgtcagtttcccccgcaagctctctctctcctgctgccttgtgaaggtgsctgcttccccttcgccttccaccatgattgtaggtttccccaggccggagcacagtggcatgatctctgctcattgcaacctccgcttctgtggttcaagtgatcctcctgaggagctgggactacaggtgtgtgccaccaggcctggctaattttttttttttttttttttgtatttttgtagagacagggtttcaccatgttgcccaggctggtctcaaactcttgagctcaagcaatctgcccacctcaacctcccaaactgctgg

SEQ ID NO: 922118 - DNA, 757 bp, Homo sapiens
gcgtgtcgagtcacgtgccgtgggcgggagggggccggggcgcgggaggcgagggcgcggtgacacgggccggaggggcctgcgcccgcggagggcgcgcgagggggcgtgtggcccccgatggagccctgccgcgcgggtgccccggcgctggctgaggggcttggcgcttctcggcgagcagtgctaggtttgtcgtcgcagcgcttcggggagcctagtccaggagagmggacctgcctgcgctgctcggctcagaactcggaccttacaggtggtgtgtacatcccggtggacgggtagacacttctgtgtgctcctgaaggccggctgcgtgtaataaccaactggagtgctttaagaaggattctaacgccagcccaatcccagaccaattggacccacatccacatagggcctggacagtgtatttttaaccccctcttccccataagtgattttggtgcagtgagaatttatagaagtaaccagcttgatggaatagctacttgtgaaatcacatctatttagggacaaaatagtaaaaatagctaaaatagctaacacgtattcatctgtcactcagtggggtctctgtgtcagatactgcggctccccaaacatggatctactcgtagaagtactgttacccctattttatagttggaggaggagtggaagctcggagttaatcagggaggactactgtgactaggacctagggaggtcgagttcaaaacccctactttcaacagtc

SEQ ID NO: 922119 - DNA, 666 bp, Homo sapiens
agggggattacaaggttgccctacgttggccagggtatttgggtttctcaggttatgggcggggccatagagctcccaagagtttatgtcttttgtcttcagctaccagcaaaggtagagaaagaccatcaggttggggcagcattaggcatatctgagctcagactctcctcgggtgaggcttgctgtggccactgtgggggaatagggggctggttctcaggccagtggagttctgttcccaggggtattatggcttcctctgctgtgtcatacaggttgctagggaagttgggaaagctggcagtcacaagcctcacctagctcccatgcagccagcaaggccagtctcactcctgctgtgccctgccaacagtgcrcagggcagagatctcaccccaggccacaagccttctctctgagaaagcaaacagggctttcaggccttgcccctccccacctgcccacactgttggctgtggcttctgtgcttttatctgcacttcttgtttgcccccaagattctgctcaggaaaattcatgcttctagttgaaattaataagttgagctagaagcttccttaatcctgcccctccctaattccactggcttccttctacaaggacccctgtaggataaagtcaggaatggcttccctgggctca

SEQ ID NO: 922120 - DNA, 469 bp, Homo sapiens
gaaaccagccagaaaatgaaatggaaaaaaaggctactcccagtacgaacaaacatgataaaatatcaagaaattcaacaagaaacactgaaaaacatatgaagaaaagtttaaagcactactgagtgaaacagaagacttaagtggaaagataacggtatttgtggtactcagaactgttcacaaatgtttgctcttctaattctgggcacctggtaggaaggcatttctctatccatttgaacttaggagkggccatgttaatttctctggcgaatgaaatgtgagtatgtgtcatttctggatagaagggggagaaagcacatggctcaccaccttctcttccctgctttctgtcatcatgaaagcgtatgtcaagatcaaacctttatatcagcctgaatctctgagtaacttgacaaggtgagtcccttgatgacctaatggatgtgtagcacaagcaaaaaaa

SEQ ID NO: 922121 - DNA, 747 bp, Homo sapiens
cctggtgctatccccaaaccgcctctcttaactcttaaagtaaataaataatctttgctggcaaggctgtgctgaacctccttaggcactctaattagatgtcctaggtcctcccaattcttagtcctttgatacctgtttttctccttctcttattccatttagtttttcaattcatacaaaaccatatccaggccatcaccagtaattctacacgacaaatgtttcttctagcaaccccacgatatcaccccttaccacaaaatcttccttcagcttaatctctcccactctaggttcccacgccgcccctaatcccgctcgaagcagccctgagaaacatcacccattatctctccataycaccccccaaaattttcgccgccccaacactttaccccatttcattttatttttcttattaatataagaagacaggaaaatcaggcctctgagcccaagctaagccatcatatcccctgtgacctgcacgtataaatccagatggcctgaggtaactgaagaatgacaaaagaagtgaaaatggcctgttcctgccttaactaataacattaccttctgaaattccttttcctggctcatcctggctcaaaagctcccccactgagcaccttgtgacccccacccctgcccaccagagaacaaccccccttggactgtaattttcctttacctacccaaatcttataaaaccccgctctcccttcactgactctctcttcactg

SEQ ID NO: 922122 - DNA, 679 bp, Homo sapiens
ggaggggcccaagaagctccgtgaaggcaggagtagtcaggcagtgctgaccaggccaggccagcctcctgccaccttgaggagggctgtcactccatagcccattctgcactgtgggccttagaactggcaagaaacaccaaccctgtgcactccagggcatggtttaatgtttcatccagatagttccttggggacagggtcagggaagaagccctacccagagggccactggagaggatccaggcccgcagcccccaccccagtcccctgcttcccccatgtcagcccccagccctgcagrcaaccctcgaagatccctgtgggggaagctcatttgatgagtgttcctaactagcttttgggggtgcgtgttcaggtgccacagcattggtgcggcagaagtaggattcttcaggagtgaggaaagaacgggtgttggtgggtcactgcagcaggtcaggaggggagggtggccgggcctagtgcagggtacttggtgcagatgcagaagctcaggctcccagcataggtttgttgtggcaccaggtagaggtgagtgtcgtccttcagatgcatctgtcccaggcagttgtggaggccacgtgactttctctgtgccttgttcatgcactgcagtgacacagtttcttttacagagaaggaacttcatgctggc

SEQ ID NO: 922123 - DNA, 579 bp, Homo sapiens
tgctcttattctggacatattttgaaagtagagtcaatgggatttcctaaacaactgaacaagtctaagatgaagacgggagttaaggatgactccaaggtttctaaggatgaaactgccatgaatggagatggagaaggcagattacatgtagaacaagtttggaaagtgggggaaatcttgtcctggagacattgtctgagaatattcaatatcaaaatgggaagatgtcaagtaggcaactgkatacacgaacctagagtccagagaagaacaggcgagagatgcaaatctgacagtcctcagcacaaaaatagtatttaaagtcatgagacaggatacaataacaaagaaagtgaggacaaagaacaaaggccctgtgttgagctctgggccacacctccacgtacaggtcaggaagaagagaaaagccaggccgggtgcggtggctcatgcctgtaatcccagcactttgggaggccaaggctggcagatcaccctgaggtcaggagttcgagaccagcctggccaacatggcaaaaccccgtctctactaaaaatacaaaaattagctgggtg

SEQ ID NO: 922124 - DNA, 635 bp, Homo sapiens
tttttaacaatcttctttctacgctttgtgaattttggaaattcttccatacagatttgttactccttactttaaaatgttcttctgtggcttactaaacactatggattttttctttgaaatatttgccgtctgagtgatgtaagcttgctggagtcagtctcaccgtgatgtggtgtgtaaagccagcgtcgtgtcatctatgtatcagcccccggcagttcccccttcattccctaaccttttacctattcacgcactcactgagcagattgttttaaacatctgcttccgaaaggcacgtgtcagacactaagaacagtgcacaaagatgtgtggttcttgcccccracacgtgggactctctcagccaaggagtgggagggagcagttatccaacaatttcaggacgaatggctctcctacaaactcgggatcggggcagcttcatccacattcagaaaaggatgctcttctcacccaagttgattctgaagtctttggtgagttatggaatatttgatctcttattgttgtagtttttcaaccaaaaaaagaaagaaaccatgatttgaccaagaaagaactgtggggaaaaagcacctcagtgtaaaataacaatctatgaccaacta

SEQ ID NO: 922125 - DNA, 635 bp, Homo sapiens
tttttaacaatcttctttctacgctttgtgaattttggaaattcttccatacagatttgttactccttactttaaaatgttcttctgtggcttactaaacactatggattttttctttgaaatatttgccgtctgagtgatgtaagcttgctggagtcagtctcaccgtgatgtggtgtgtaaagccagcgtcgtgtcatctatgtatcagcccccggcagttcccccttcattccctaaccttttacctattcacgcactcactgagcagattgttttaaacatctgcttccgaaaggcacgtgtcagacactaagaacagtgcacaaagatgtgtggttcttgcccccaacacgtgggactctctcagccaaggagtgggagggagcagttatccaacaatttcaggacgaatggctctcctacaaactcgggatcggggcagcttcatccacattcagaaaaggawgctcttctcacccaagttgattctgaagtctttggtgagttatggaatatttgatctcttattgttgtagtttttcaaccaaaaaaagaaagaaaccatgatttgaccaagaaagaactgtggggaaaaagcacctcagtgtaaaataacaatctatgaccaacta

SEQ ID NO: 922126 - DNA, 635 bp, Homo sapiens
tttttaacaatcttctttctacgctttgtgaattttggaaattcttccatacagatttgttactccttactttaaaatgttcttctgtggcttactaaacactatggattttttctttgaaatatttgccgtctgagtgatgtaagcttgctggagtcagtctcaccgtgatgtggtgtgtaaagccagcgtcgtgtcatctatgtatcagcccccggcagttcccccttcattccctaaccttttacctattcacgcactcactgagcagattgttttaaacatctgcttccgaaaggcacgtgtcagacactaagaacagtgcacaaagatgtgtggttcttgcccccaacacgtgggactctctcagccaaggagtgggagggagcagttatccaacaatttcaggacgaatggctctcctacaaactcgggatcggggcagcttcatccacattcagaaaaggatgctcttctcaccsaagttgattctgaagtctttggtgagttatggaatatttgatctcttattgttgtagtttttcaaccaaaaaaagaaagaaaccatgatttgaccaagaaagaactgtggggaaaaagcacctcagtgtaaaataacaatctatgaccaacta

SEQ ID NO: 922127 - DNA, 713 bp, Homo sapiens
ccccacgtatggcctgcggtgcacacgggcccgcatctgtggcctcacggtcagggtgaccccacaaaaagagcgccccagatgaggacctgtttgatgttcgtcttttttaaggacttctacttaccagccgagtgtttgatcagtggcgaggcctcatctcttttgcgccaccgtgttcagatagcacctgccccaacactcgcagcaagacgggacccttgcctttttgtttttgactttaaatagctcctcattgtagaagacagtttattatggactcttcaaaatacatttctagggaaacaaatttagttgtccttattaaaaatgtattacatatttcagaatcaaagctcacggctcacgagcatccygcgcccggctgcgccccgcgctggcatcgcagacgtgtcctggaaggaagaactccaagtgcatttgaaattcaaattgtgtttggttttaagatggggatgtcatcaatttcccttagaaaattataaaaaccatgatgcataaagaaatacagttggagaaaacagtgacaccatcttcgttcctgaattggtgactccaaacggcttgcccttggaggtcacttttatagggggttacgcaaataaaactgagtggcgttgttaaaattctccactactggacctttttagccaaagtgggcattttcgggagtcggcaacacagacagaccc

SEQ ID NO: 922128 - DNA, 713 bp, Homo sapiens
ccccacgtatggcctgcggtgcacacgggcccgcatctgtggcctcacggtcagggtgaccccacaaaaagagcgccccagatgaggacctgtttgatgttcgtcttttttaaggacttctacttaccagccgagtgtttgatcagtggcgaggcctcatctcttttgcgccaccgtgttcagatagcacctgccccaacactcgcagcaagacgggacccttgcctttttgtttttgactttaaatagctcctcattgtagaagacagtttattatggactcttcaaaatacatttctagggaaacaaatttagttgtccttattaaaaatgtattacatatttcagaatcaaagctcacggctcacgagcatcccgcgccmggctgcgccccgcgctggcatcgcagacgtgtcctggaaggaagaactccaagtgcatttgaaattcaaattgtgtttggttttaagatggggatgtcatcaatttcccttagaaaattataaaaaccatgatgcataaagaaatacagttggagaaaacagtgacaccatcttcgttcctgaattggtgactccaaacggcttgcccttggaggtcacttttatagggggttacgcaaataaaactgagtggcgttgttaaaattctccactactggacctttttagccaaagtgggcattttcgggagtcggcaacacagacagaccc

SEQ ID NO: 922129 - DNA, 623 bp, Homo sapiens
taggttcatttggtctatagtgttgttcaagtccaatgtttacttattgatttttctacctggatgatctgtttattgttgaaagtgggttattaaagtcttctactattattgtattgctgtttacttctcccttcagttatatcaatttttgctttatatacttagatgcttcaatagatattgtatatctattagcaaatgatgatggccatattaattttaatagtcttgtcttttaacttttatattaaagtcaaacatgatctacacaccaccatcacagtattagaatattctgaatttgattatgttcttatttactgtgagtttaatattttcatgttgttagtttgcttttgttttaacttgaagaagtcactttagcatttttrtaaggcaactatagtgattaactccctcagtctttgtttgggaaagtatctctcatttttgaggaaacctttgctaggtacagtattctcagttgacagttttggatttttttttttttttttttttttttaaccagtacctgactatatcatcccatcatcttctggcatcaaggtttctgctgagaaatcttctgatagtcttattgtggtttccttgtatgttat

SEQ ID NO: 922130 - DNA, 644 bp, Homo sapiens
ttgattatatgcctactctggttttctttagtttattccctgttgattattaataactttatagaaaaaataaacttatatgatgttataacagtgtttttcaaagttaaataatataataatcccttttagaggagcaaaaaattattgcatatctccagtgttaaattatttttattcctttaagtgttcataatcatcaaattacatatacactcagtgtatagtttgtttcaactataaaactgaaattaattttcaagttaagtgcaaacaaaagcataaaactaataaaattcaaggaataatgttttcataaaacaaaaacaatggtatgggttgaatagtggaaagatgcatttggagattttatgcttcattgtgtattgcattgactttgaacacactggaacattatttgagtcacgggcatttttctatttttccttttaaataatgacaatcatttgaaccaattcaytgttttgaagagctgatctgcttcatagcaccctccaagttgcgatagtaataaaatattagaacaattaaaagtcataataaatgcttttccatttggcctatttattacctcacctactaaaggaagtgtcatgtgaagtgtgctacgaggtgactgtctt

SEQ ID NO: 922131 - DNA, 750 bp, Homo sapiens
cgacgagagtgacctctggttgttttcactgccacactctcaccagtgccatgacagtttacagatgccatggcaacatcaggaagttaccctctatggtctaaaatggggaggcatgggaggagccaagatggccgaataggaagagctccggtctacagctcccagcgtgagcgacgcagaagacrgatgatttctgcatttccatctgaggtaccgggttcatcttactagggagtgccagacagtgggcgcaggtcagtgggtgcgtgcacggttcgtgagccgaagcagggcgaggcattgcctcacttgggaagcgcaaggggtcagggagctccctttccgagtcaaagaaaggggtgacggccgcacctggaaaattgggtcactcccacccgaatattgtgcttttcggaccggcttaaaaaacggtgcaccaagagattatatcccgcacctggctcggagggtcctacgcccaaggagtctcgctgactgctagcacagcagtctgagatcaaactgcaaggcggcagcgaggctgggggaggggcgcccgccattgcccaggctcgcttaggtaaacaaagcagccgggaagctcgaactgggtggagcccaccacagctcaaggaggcctgcctgcctctgtaggctccacctctgggggcagggcacagacaaacaaaaagacagcagtaacctctgcagacttaaacgtccctgtctgacagctttgaagagagc

SEQ ID NO: 922132 - DNA, 750 bp, Homo sapiens
cgacgagagtgacctctggttgttttcactgccacactctcaccagtgccatgacagtttacagatgccatggcaacatcaggaagttaccctctatggtctaaaatggggaggcatgggaggagccaagatggccgaataggaagagctccggtctacagctcccagcgtgagcgacgcagaagacagatgatttctgcatttccatctgaggtaccgggttcatcttactagggagtgccagacagtgggcgcaggtcagtgggygcgtgcacggttcgtgagccgaagcagggcgaggcattgcctcacttgggaagcgcaaggggtcagggagctccctttccgagtcaaagaaaggggtgacggccgcacctggaaaattgggtcactcccacccgaatattgtgcttttcggaccggcttaaaaaacggtgcaccaagagattatatcccgcacctggctcggagggtcctacgcccaaggagtctcgctgactgctagcacagcagtctgagatcaaactgcaaggcggcagcgaggctgggggaggggcgcccgccattgcccaggctcgcttaggtaaacaaagcagccgggaagctcgaactgggtggagcccaccacagctcaaggaggcctgcctgcctctgtaggctccacctctgggggcagggcacagacaaacaaaaagacagcagtaacctctgcagacttaaacgtccctgtctgacagctttgaagagagc

SEQ ID NO: 922133 - DNA, 750 bp, Homo sapiens
cgacgagagtgacctctggttgttttcactgccacactctcaccagtgccatgacagtttacagatgccatggcaacatcaggaagttaccctctatggtctaaaatggggaggcatgggaggagccaagatggccgaataggaagagctccggtctacagctcccagcgtgagcgacgcagaagacagatgatttctgcatttccatctgaggtaccgggttcatcttactagggagtgccagacagtgggcgcaggtcagtgggtgcgtgcacggttcgtgagccgaagcagggcgaggcattgcctcacttgggaagcgcaaggggtcagggagctccctttccgagtcaaagaaaggggtgacggccgcacctggaaaattgggtcactcccacccgaatattgtgcttttcggaccggcttaaaaaacggygcaccaagagattatatcccgcacctggctcggagggtcctacgcccaaggagtctcgctgactgctagcacagcagtctgagatcaaactgcaaggcggcagcgaggctgggggaggggcgcccgccattgcccaggctcgcttaggtaaacaaagcagccgggaagctcgaactgggtggagcccaccacagctcaaggaggcctgcctgcctctgtaggctccacctctgggggcagggcacagacaaacaaaaagacagcagtaacctctgcagacttaaacgtccctgtctgacagctttgaagagagc

SEQ ID NO: 922134 - DNA, 750 bp, Homo sapiens
cgacgagagtgacctctggttgttttcactgccacactctcaccagtgccatgacagtttacagatgccatggcaacatcaggaagttaccctctatggtctaaaatggggaggcatgggaggagccaagatggccgaataggaagagctccggtctacagctcccagcgtgagcgacgcagaagacagatgatttctgcatttccatctgaggtaccgggttcatcttactagggagtgccagacagtgggcgcaggtcagtgggtgcgtgcacggttcgtgagccgaagcagggcgaggcattgcctcacttgggaagcgcaaggggtcagggagctccctttccgagtcaaagaaaggggtgacggccgcacctggaaaattgggtcactcccacccgaatattgtgcttttcggaccggcttaaaaaacggtgcaccaagagattatatcccgcacctggctcggagggtcctacgcccaaggagtctcgctgaytgctagcacagcagtctgagatcaaactgcaaggcggcagcgaggctgggggaggggcgcccgccattgcccaggctcgcttaggtaaacaaagcagccgggaagctcgaactgggtggagcccaccacagctcaaggaggcctgcctgcctctgtaggctccacctctgggggcagggcacagacaaacaaaaagacagcagtaacctctgcagacttaaacgtccctgtctgacagctttgaagagagc

SEQ ID NO: 922135 - DNA, 538 bp, Homo sapiens
tgaatccttctgatcctgggctttatctggttgataggctttttattaccaattcaattttgtaacttgttattggtatgttcagatttttaatttcttcctggttcaatcgtgggagattgtatgtttccaggaatttagccacttttagtaggttttctagcttgtgtgcatgraggtgtttgttatactctctgaggtttttgttttttttaaatatttctattgggtcagtagtaatgtccccttgtcatttctgattgtgtttaattggatcttctctctttttctttattagtctatctagcggtctatcaatcttacttattccttcaaatatcgacttctggtttcattgatattttgtatggtttttttgcacctgaatttcatatagttcagctctgattttggttatttcttgtctcttactgactttggatttggtttgctcttgtttttctagttcctcaaggtgtgatattaggttgttaatttgagattctagctttctgatgtgggcagttagtgctataag

SEQ ID NO: 922136 - DNA, 606 bp, Homo sapiens
aagtcctgatttaagactatattccatagctacaataatcaaaacagcatgatactgatatagaagttaaaaaggaattatttaggcagttagtaagggtaaaagaattctcagtggaatttccttttaataaaaagcagcccccacatcatttcttttctaacaaaaatcaacctgaaaaatcaagctgcaagcattgatacacaagctggaagcttgcataggtgaatactggcagccgtgccrataccaaagagatacctggaagccaggtacatccaacatggaggttttctcctcccttctctttgttgccaaatgtgcagatgtcatggtgctggccaggtggagatcccacctgtataataaaagattagggtgggatggccagcctaatcacgggctatgtaaatggcacacctggtccaaccaatcccatgggccctatgaaaatcagacactgcctttctaagcccctctataaagtcaactgcatctcaccccaaacctggaaacccactttggttcccttcctctgcatgaggaagctctgtcttctttctttcactttaattaaagttctgctcttaaacccactccttgtat

SEQ ID NO: 922137 - DNA, 606 bp, Homo sapiens
aagtcctgatttaagactatattccatagctacaataatcaaaacagcatgatactgatatagaagttaaaaaggaattatttaggcagttagtaagggtaaaagaattctcagtggaatttccttttaataaaaagcagcccccacatcatttcttttctaacaaaaatcaacctgaaaaatcaagctgcaagcattgatacacaagctggaagcttgcataggtgaatactggcagccgtgccgataccaaagagatacctggaagccaggtacatccaacatggaggttttctcctcccttctctttgttgccamatgtgcagatgtcatggtgctggccaggtggagatcccacctgtataataaaagattagggtgggatggccagcctaatcacgggctatgtaaatggcacacctggtccaaccaatcccatgggccctatgaaaatcagacactgcctttctaagcccctctataaagtcaactgcatctcaccccaaacctggaaacccactttggttcccttcctctgcatgaggaagctctgtcttctttctttcactttaattaaagttctgctcttaaacccactccttgtat

SEQ ID NO: 922138 - DNA, 822 bp, Homo sapiens
cattagttttagtgtattttatgtgtggcccaagacaattcttcttccagtgcggcctggggaagccaaaagattggacgtccacccatggtctaaacagtcttacagaagaattccttgaaacagttttcttttttttttttgagayggagtcttgctctgttgcccaggctggagtgcagtgatgcgatctccactcactgcaagctacgcctcctgggttcatgctattctcctgcctcagcctcccgattagctgggactacaggcacccgccaccatgcctggctaattttttgtatttttagtacagacagggtttcaccatgttagccaggatggtctcgatctcctgacctcgtgatccgcccgcctcggcctcccaaagtgctgggattacaggcgtgagcctccgtgcccggccgaaacagttttctttacttgttatttccactttttctgcttccattttctcctgagctcacttcagttggcttttgtcatcatcaatctatggaaaccattagtatgattgtcacaaatggcctccttgtggccacatttaatggccaattttcacttgctcttagccaaaaggccaagaagcgatcaatgaccaattttcaatgtacccaacagcctttgacaaagttgattatgccttccttttttgaaacactttcttcactgaacgctacactcactttaactcctacttcattgagtcttcattttccatttcctttgcatttaaattctttcatgttacttccttgttctcatgctcttctacagcagcgattctcaaacatgagtacacat

SEQ ID NO: 922139 - DNA, 822 bp, Homo sapiens
cattagttttagtgtattttatgtgtggcccaagacaattcttcttccagtgcggcctggggaagccaaaagattggacgtccacccatggtctaaacagtcttacagaagaattccttgaaacagttttcttttttttttttgagatggagtcttgctctgttgcccaggctggagtgcagtgatgcgatctccactcactgcaagctacgcctcctgggttcatgytattctcctgcctcagcctcccgattagctgggactacaggcacccgccaccatgcctggctaattttttgtatttttagtacagacagggtttcaccatgttagccaggatggtctcgatctcctgacctcgtgatccgcccgcctcggcctcccaaagtgctgggattacaggcgtgagcctccgtgcccggccgaaacagttttctttacttgttatttccactttttctgcttccattttctcctgagctcacttcagttggcttttgtcatcatcaatctatggaaaccattagtatgattgtcacaaatggcctccttgtggccacatttaatggccaattttcacttgctcttagccaaaaggccaagaagcgatcaatgaccaattttcaatgtacccaacagcctttgacaaagttgattatgccttccttttttgaaacactttcttcactgaacgctacactcactttaactcctacttcattgagtcttcattttccatttcctttgcatttaaattctttcatgttacttccttgttctcatgctcttctacagcagcgattctcaaacatgagtacacat

SEQ ID NO: 922140 - DNA, 611 bp, Homo sapiens
ggcaaaataaactatcagtagagtaaacagacaacctacagaatgggagaaaatatttgcaaactgtgcatctgacacagctctaatattcagaatccataaggattttagacaaattaaagagaaaaaacaaccccattaaaaagtggacaaaggacagcaacaggtatctttcaaaagaagacacacatgtgcctaagaagcatatgaaaaaatgctgaacagcactaatcaccagagaaatgcaaatccaaatctccataagatatcatcttacaccagtcacagtggctattaaaaaatcaaacaataacagatgctggcaaggttgcagagaaaacggaatgcttatgcactgctggtgggagtgtaaattagttcagccattgtggaaarcagtgtggctatttctcacagagcttaaaactgaattaccattcgacccagcaaacccattattgggcatatacccaagaaaatagaaattattctaccattaacacgcaatgcatgtgtatgttcatcacagcaatattcacaatagcaaagacatggaatcaatctaaattatcatctttgatatactggattaaaaaatttagtacatatat

SEQ ID NO: 922141 - DNA, 726 bp, Homo sapiens
gcaaggcaaagaggtgttttattgagcgacagtacagctctcaggaaacctgaagtggttagctcttatctgcaggcaggtcttcctgtcttctctgcagccttcagcagagaagagacatggagtgggtagctccagtctgcaagcaggttattaggtggtctctgcaagtctgsttgagttcaaggtttttatgggcttcagaagggaggaattgtgtgctgattggtccatggcaggcccagaaaaaacaccgttaagttctcactctggcagcttggccccccttctttaggctgttcctgacttgaaagtggggcttcaccagagaccccttgttttccacccaggagcctctctgcctcatgccatcaactgccattcatggcacctaggctatttgtgctgaagggcacctggaagcctgcaccaagccaccctcaaccccctcttgcctccctcctatgcttgttgtgtccaaagtccagagggggccaaggtggcagagggctggtatgttggtgtcacctcaggcacgcacatacctggatgggtcacaacagagcccatggttggcttcaactttgttccagaattggagtggatgccaggagcagggagagaccaggcagtgggagcaggcacttctaatcctgtgggggcaggagggggcttcctgggccaccaagtgaatagggatgtcctgttccaaagtcaatctaggtg

SEQ ID NO: 922142 - DNA, 726 bp, Homo sapiens
gcaaggcaaagaggtgttttattgagcgacagtacagctctcaggaaacctgaagtggttagctcttatctgcaggcaggtcttcctgtcttctctgcagccttcagcagagaagagacatggagtgggtagctccagtctgcaagcaggttattaggtggtctctgcaagtctggttgagttcaaggtttttatgggcttcagaagggaggaattgtgtgctgattggtccatggcaggcccagaaaaaacaccgttaagttctcactctggcagcttggccccccttctttaggctgttcctgacttgaaagtggggcttcaccagagaccccttgttttccacccaggagcctctctgcctcatgccatcaactgccattcatggcacctaggctatttgtgctgaagggcacctggaagcctgcaccaagccaccctcaaccccctcttgcctccctcctatgcttgttgtgtccaaagtccagagggggccaaggtggcagagggctggtatgttggtgtcacctcaggcacgcacatacctggatgggtcacaacagagcccayggttggcttcaactttgttccagaattggagtggatgccaggagcagggagagaccaggcagtgggagcaggcacttctaatcctgtgggggcaggagggggcttcctgggccaccaagtgaatagggatgtcctgttccaaagtcaatctaggtg

SEQ ID NO: 922143 - DNA, 612 bp, Homo sapiens
agattgtgcttgtgtctaaattggagtaaaaattacaggcagccttaggaaaatacatttggagacattccgtcttccccaaaaagatgttaattatttaataactccttatcttacaccttggtattagcaggagcttctcggtgttgtktgtgttcttactttttaaagacacagctatatgtcacttgctgttctacctgtggaatttttttgcatgaggaagctgctttggccaggtatacatcactttttctacacaagtcctctgtgtttgatacagaaatgctaggtaaatgtgctagtgctagaaatgccagaaataatttccaggttccagcaagattgctttggggtcattcccacctttaacactgaaccccccaaatctgagataggtctcagtcaatttaggaagtttattttgccaaagttaagggtacacaccgttgacatagccttaggagatcctgatgacatgggccctgggtggttggagcacagcttggttttatacattttacagaaacataagacttcaaaatatgtaagatggtcaggcgtggtggctcacgcctgtaatcccagcactgtgggaggccgaggcaggca

SEQ ID NO: 922144 - DNA, 497 bp, Homo sapiens
ccagcaatatacctttactgtcctacctcaggggtatgccaactctctggctttgtgtcataatctcattcagagagacgttgatcactttttgcttccacaagatatcacattggtccattacattgatgacattatgctgactggatccagtgagcaagaagtagcaaacacactagacttattggtgagatatttgcgtgccacaggatgggaaataaatccgactaaaattcagggatcttcyacctcagtaaaatttctagcggttcagtggtgtggggcctgtcaatatattccttctaaggtgaaggataagttgctgcctttggcccctcctacagccaagaagaagccacagtgcgtagtgggcctatgtggattttggaggcaacacattcctcatttgggtgtgttactcaggcccatttgtcaagtgacccgaaaggctgccagttttaagtagggtccagaacaggagaaggctctgcaacaag

SEQ ID NO: 922145 - DNA, 497 bp, Homo sapiens
ccagcaatatacctttactgtcctacctcaggggtatgccaactctctggctttgtgtcataatctcattcagagagacgttgatcactttttgcttccacaagatatcacattggtccattacattgatgacattatgctgactggatccagtgagcaagaagtagcaaacacactagacttattggtgagatatttgcgtgccacaggatgggaaataaatccgactaaaattcagggatcttctacctcagtaaaatttctagcggttcagtggtgtgrggcctgtcaatatattccttctaaggtgaaggataagttgctgcctttggcccctcctacagccaagaagaagccacagtgcgtagtgggcctatgtggattttggaggcaacacattcctcatttgggtgtgttactcaggcccatttgtcaagtgacccgaaaggctgccagttttaagtagggtccagaacaggagaaggctctgcaacaag

SEQ ID NO: 922146 - DNA, 763 bp, Homo sapiens
cgttctaccaacaatgtattagagttccaattatcctgaatcctttacaacacttgttattgtcttttttattgtagtcattctagtgggtatgaaatggtatctcattacagtctttttttttttttttttgagatagagtcttgctctgtcacctgggctggagttcagtggcgtaatcttggctcactgcaacctccgcccctggggttcaagcgattctcctgcctcagcctycctagtagctgggactgtaggcatgttctaccacaccggctaattcttgtatttttagtagagaggggtttcgccatgttggccaggctggtctcaaactcctgacctcaagtgatccacccgcctcaacctcccaaaatgctgggattacaggtgagagccatctcacccggcctcattacagtttttatttgcatttacatttccctaatgacaaacggtgttgagcatctttttatgtacttattagccatttatctctctacagcctcgcaagtagctgggactacagatgcccgccaccacgcccagctaatttttttttgcatttttagtagagacggggtttcactatgttggccaggctggtcttgaattcctgaccttgtgatctgcccacctcagcctcccaaagtactggaattacaggcgtgagccaccatgtgctgcctataactggtagtttttgagtgttcacttattgaggtcttcttacatatatttcagcaagttttatagctttata

SEQ ID NO: 922147 - DNA, 758 bp, Homo sapiens
tagatgaacagaatcctcaacaacccttgagtgaagtcatggtgagaacacatatcaagatttatttctggaaaagagcaaagaatgaaactaaaggtgacgctcccaaaggagatattgagctatactcttaggaagtgcagacttcctgctaactgtgcaagcatctgtgcagagcccttctcatgcttggatgatctttccagaacactcataaagtgacagaccatccaactgtctgtcagaagttagctcagcatgcaattctgaccgttcagctagatccagcactgagttagacagagtagaagcttggctgaaccttaaaggaggcggtttctaaaaaagaatagttgtctacatacacatcaaatggtaaagcaattamttcgaggttaacctaactaccagaggatccatccttaatgaaggtttgggatggatgggagaaaactaagagatgtggggagtagggatagttaaggaaaagaacgaggaaggtactagtaaattttatcatatagatattaataactgcaagataatgttatgtccagaatgtcttctctgcatcattaaaaaaatttaaacaaatatagcactgaaactcatgctttttacatttaaatcttttttttgtttaacaaattacctttttatttaaacaaatgtagctctgaaactcatgcctccatgttactattgctttaaaggagtgaagaatataacttggaatttatcaaagacaactcagaatg

SEQ ID NO: 922148 - DNA, 590 bp, Homo sapiens
tctgtcctatgtccttctgagaagactgatgccaagtggtctatgagagtcttatgagtatggatgtaaagttgaaccaaaccaccccccccaaccccctcaagtggacactgcagatacagaatagatgagatataatgtgaaggaccagagggaaagtawtaaattcctagtgcctaggaacacattttctattgagtaaaaaggaaagtaaataaacatttgctatcgataaaatgaaaaagaaacatttcctctctcttttttctgagtctctggtaatagcccctagtctttttttttttttttttttttttttttttcttgagacagaatctcgctctgtcgcccaggctggagtgcagtggcgccatctccgctcactgcaacctccgcctcccgggttcatgccattctcccgcctcagcctcccgagtagctgggactacaggcgcccgccaccacgtccggctaattttttgtatttttagtagagatggggtttcaccgtgttagccaggatggtctccatctcctgacctcgtgatccgcccatctcggcctcctaaagtactgggattacaggcgtg

SEQ ID NO: 922149 - DNA, 611 bp, Homo sapiens
tggtctatgagagtcttatgagtatggatgtaaagttgaaccaaaccaccccccccaaccccctcaagtggacactgcagatacagaatagatgagatataatgtgaaggaccagagggaaagtattaaattcctagtgcctaggaacacattttctattgagtaaaaaggaaagtaaataaacatttgctatcgataaaatgaaaaagaaacatttcctctctcttttttctgagtctctggtwatagcccctagtctttttttttttttttttttttttttttttcttgagacagaatctcgctctgtcgcccaggctggagtgcagtggcgccatctccgctcactgcaacctccgcctcccgggttcatgccattctcccgcctcagcctcccgagtagctgggactacaggcgcccgccaccacgtccggctaattttttgtatttttagtagagatggggtttcaccgtgttagccaggatggtctccatctcctgacctcgtgatccgcccatctcggcctcctaaagtactgggattacaggcgtgagccaccgcgcccagccttttttttttttttttttaacaaaacaagatacctttaaa

SEQ ID NO: 922150 - DNA, 590 bp, Homo sapiens
tctgtcctatgtccttctgagaagactgatgccaagtggtctatgagagtcttatgagtatggatgtaaagttgaaccaaaccaccccccccaaccccctcaagtggacactgcagatacagaatagatgagatataatgtgaaggaccagagggaaagtattaaattcctagtgcctaggaacacattttctattgagtaaaaaggaaagtaaataaacatttgctatcgataaaatgaaaaagaaacatttcctctctcttttttctgagtctctggtaatagcccctagtctttttttttttttttttttttttttttttcttgagacagaatctcgctctgtcgcccaggctggagtgcagtggcgccatctcmgctcactgcaacctccgcctcccgggttcatgccattctcccgcctcagcctcccgagtagctgggactacaggcgcccgccaccacgtccggctaattttttgtatttttagtagagatggggtttcaccgtgttagccaggatggtctccatctcctgacctcgtgatccgcccatctcggcctcctaaagtactgggattacaggcgtg

SEQ ID NO: 922151 - DNA, 558 bp, Homo sapiens
tatttgatgtctgtgcctcatgcccagtgccaagcttggaaacatacctcctcacctcactgcatgacttccattaggatacaagaatctaagaatggtacagctcgttgagaaatttgatggtagagaattagggcaactatttagtaataagggagaagacaaccagccaaaagagagggttgcatagctgcaaatgactgcaggaaagaatgaagctcttgggaacccagttcctctagcagactgctcccaggaatggtgacaagaaattctgaatattttgttctatcccttcctgtgattttttccctgtttttctgtgagaaccctgatggcgcacttccctcatgctacatataaaaggggcrcactcatgcaaggatggtgggtatgtcaactgtaaacaatttatctatcattttgggaaagcagtttaatagtgttcatgcttccgacaccattaattctactcctggatatttactcccgaaagccaaaataaaccaagaaaaccataggcatattatttttttaccattcatgaagaccatatag

SEQ ID NO: 922152 - DNA, 680 bp, Homo sapiens
caaacgactgcaccagttctccaacaagagttcttaaccagactgaactggctggcatgacagaaatagaattcagaacatggataggaaaaaagatcactgagatttaagaggatggcaaaacccaatcccaggaaaatatgaatcacaatgaagcaatacaggagctgaaggatgaaatagccaagataaaaaagaacctaacggttctgacagagctgaataacacaatataagattttcacaatgtagtcacaagtattaacagcagaataaatcaagctgaaggaagactctcacaacctgaagactggttctctgaaatcagacagccaaaaataaagaaaaaagaataaaaaggaatgaacaaaatctcyagaagtatggcattatgtaaaggggccaaatctatgaatcactggtatcccagaaagggagggggagaaagcaaacaacttggaaaacatatttcaggatattgtccatgaaaacttccacaaccttgctaaagaggccaacgatcaaattcagaaaatacagagaactcctgcaggatactacacaagaagatcacccccaagacacataatcatcagattttccaaggtcaaaatgaaagaaagaatgttaaaggcagctagagagaaagggcaggtcacctacaaagggaacctgatcaa

SEQ ID NO: 922153 - DNA, 636 bp, Homo sapiens
tctgtctggtcctggactatttttggttggcaggtttttttattttttattattgtttcaatctcattacttgttatttgtctgttcagtttctatttcttcctgatttaatccaggagggttgcatatttccaggaatttatacatctcctccagattttccagtttgtgcacataaaggtgttcatagtggtcttgaatgatctttcgtatttctgtggggttggtcgtaatacctcccattacatttctaattgagcttattttggatcttctctcttcttgattaatcttgttaatggtctatcaattttgtttgtcttgtcaaaaagtcggctttttgtttcatttatcttttgtatttttttaatacaatttcatttagttctgctctgatctttttttttttttgagttggagtcttgctctgttgccaggctggagtgcactggcgygatctcagctcactgcaacctccacctcctgggttcaagcgattctcctgcctcagcctcccaagtagctgtgattacaggcacctgccaccacgcctggctaattttttgtatttttagtagagacagggtttcactatgttggccaggctggtcttgaattcctgaactcaggtgatcc

SEQ ID NO: 922154 - DNA, 600 bp, Homo sapiens
ttttctttgcaacctagcaaactcttgtcttctgtctttttcataaaagccatctaaacaggtatgagatttcatcatattctggttttaaacttccatttctctgatgattagtgatgttgagcatttttctacagacctgttggctattttttctctcaacttttgggaatgtcttttcagttctatgggatgtttttaaatagagttagttgttttcttgctattgaattgtttcagttccttatattttatggatattaactctttattagtgtgtagtctgtaaatattttctacgattccatatattgtcttttcattctggtgattgttttctttgtggtgcagasctttgtagttttatataattctatttggctaattttgctattatgcttgtgcttttggagccacaaaaaatttgataaggcaattatcaagaatagtttactctaggttttctttgagtagttttatagtttccattcttacaattaagtattttatccattttgagttgctttttatatggtgagagataaaagtccaatttcatttttctgtatgtgtatatccaatttccccaacaccatttat

SEQ ID NO: 922155 - DNA, 618 bp, Homo sapiens
cttatttctctgctgagattatatacatatctatatacatctacatataatatgtattctatacatatctatatacatctacatataatatgtattatatacatatctatatatatgcatatatacatatataaatttattattagcatatttttatgagtatattataatagatgtttaatgctcttttctgcttaattgaacatttcggtcraattatagttactctatatttagttccttttttcttgaaaatagatcatatttcctagttcttcacttgtcaagtaatttttaattgtatcccaggtattttatatattttattccaagtctctggattcttttttattcctttagagaacattgttttttgtttctgtattttcaagctttattggacttaaattgttgtctgtctcttggataaaaactgaaatttcagctcagttattttatacttcattgggatgcttggcctctgagtcgtgcacgtgcagtttaggggtcagtctgatatttaggcttagtttattcacaacatttgtgattaaattctttccattcttcttgactctctactttctgaatgaagtgcctgcttagatttcaattact

SEQ ID NO: 922156 - DNA, 640 bp, Homo sapiens
gcccctggcaaaccactggtgtaagtccaagagtccaaaactgaagatctgtccaatatttgagggcaggaagtatccagcatgggagaaagatggaggccagaagactcatctagtctagtccttcctgttcctctgtctgcttttttttttttttttttcattgagaggaagtctcgatctgttgaccaggctggagtgtattggcaggatmttggctcactgcaaccttcccttcctgagttcaaacaattcttccaccttcacctcctgagtagctgggattacaggtactcgccaccatgcttggctatttttttttatttttagtagagatggggtttcaccatgttgaccaggctgctctttaacttctgacctcaagtgatccacctgccttggcttctcaaagtgctaggattacaggtgtgagccaccgcgccagcccctctgcccacttttatcctagttgcactggcagctgattatgtggtgcccacccagattgagggtgggtctgcctctcccagtccaccaactcaaatgttaatctcctttggcaacacactcacagacacatccaggaacaataccttgtatccttcaatccgatcaagttgacactcagtattaaccatca

SEQ ID NO: 922157 - DNA, 633 bp, Homo sapiens
gaaatctgtatatagaatttgtgttgcagctataaagtcaacagatatcctaattttgaatattggtttggtatacttactgtataactaaggtgacatattccaggcctacaaggtacaaagaaatgagattgcttcacaattctatttatattttgaccgggtgttcccctaagacaattgggagctataaaataaattggacaattatagacataatatgttaagtgagtctctggtttcctaaaacctaggggatattgtagcacaaattgttctattttctaatataaaaatatgaaattatgaaaggagaatgwgtgagcttcttatatttttgctcaaatctaattgcattacaaaatgagcatctagctattgaaagtagggtctgcatacatatagccagacgcttttttccacttggacttttccataatcacctgataatacattatccctctttgcatgatctgtgtcagtaagaaagaaccaaacaataaaatctccatatgatatatctgtctctttttatgctttgaaaaatgctacgttttacaactttaggcggtaaatattattttagagatatcaatgactcatgcatgaaatgctctgtgcatgtactagtgg

SEQ ID NO: 922158 - DNA, 751 bp, Homo sapiens
tcaagcatttcttcatttattcaaaataggaaggcagcgtggtggagtgattacaaattctagagcaggccgggcgtggtggcacacacctgtgatcccagccgaggcgggcggatcacttgaggtcaggagttcaagaccagactggccaacatggtcaaaccctgtctctactaaaaatacaaaaattagctgggcattgtgacgtgcctgtaatcccagctactctggaagctgaggcaggagaatcgcttgaaccccagaggtggaggttgcagtgagccaggatygcaccactgcactccagcctaggcgacagagcgagactgtctcaaaacaaaaacaaactctagagcagcgattaccaacggggtgattttactcctcgcctcagagtctggagacatttttggtggtcacagttggggaggccaggtgatacatctactaggtagagaccagagatgctgctaaatagcctacaatgcacaggacagcccccaccacaaagaactatccagcccaaaatgtcaatcatgccgaggttgagaatccctgctctagagccagactgctcaggttcaaatcccggcttcactgcttactagccatacgaccttaggcaagttacgagaccactctatgcctcagttttcccacctgtgcaatggagacaagcatagtacctgccttgcaaagttgttgtattaaatgagctgctacaggtgaggtgatcagcacgtggcaagtg

SEQ ID NO: 922159 - DNA, 591 bp, Homo sapiens
tatacccactgtccattcctagaacaagatcaataacatcggtactttacatacacacacacacacaaaaaggccgggcagtggctcacacctgtaatcccagcactttgggaggccgaggcgggtggatcacctgaggtcaagagttcaagacagcctggccaatgtggtgaaactccgtctctactaaaaatacaaaaaattagctgggcatggtgacaggtgcctgtaatcccagctactcatgaggctgaggcaggagaatcmcctgaacccctgaggcggaggttgcagtgagccgagctcacaccattgcacactccagcctgggcaacgaaagcaaaactccatctctcaaaaaaaaaaaaaaaaaaaaaaaaaaggcttaactcttaggggtgagaaattaagactctataattgaatgtttctgtgttaaaccatgctaaaaagtgagtcacatgaagtcattttcggtcaacactaaataatgtttccaaagttcagaatatggactggtaaattctgtctttatttcccaatcaagcaacctttatcctttccccttttctagacagaaaacccaactag

SEQ ID NO: 922160 - DNA, 823 bp, Homo sapiens
cttctctaacacatggcagaagcctgaatgagagatcgggaggatttggagccaggcacgcacgcttcatagcagctcaggatggggcatggtggtggctacccctgacccaggctggcagctctatggcacgccaggttcagtgggagtgaacctctcacccgcccgatcgagatataaaacacgttccagcacagaggctgcaatccctgtgggccacctgtctgcatgagtaggaacagcaggtccatggaagggggagactgacttcctgccccggctaggtccaggtatttgtttggaggctgatgggccatgtgtacatggagttgcacagcaggaccccagatgcctatgacagcctgtamctgccaggcaattctccctatgtccaagggagtacaatattaaataacacatggaaaacactatgagaggtcaagagagaggccacaggagaaaagaaaatatgttgtattttctcatacctttaatggcactggtttcctgctttgttttttgtttttttgagacagagtcttgctctgttgcccaagctgcagtgcagtagcgtgatctcagctcactgcaacctccaccttccaggttcaagtgattcttatgcctcagcctccccagtagcggggattacagacgcacaccatcatgcctggctaatttctgtatttttagtagagacggagttttgccacattggccaggctggtcttcaacacccacctcagcctcccaaagtgctgggattacaggcatgagccactgtgcccagcctggtttcctgctttttgaacaaggggccccg

SEQ ID NO: 922161 - DNA, 722 bp, Homo sapiens
agggtccagaagacatacatttgaccaaagccttgtgaaatagatttgtgagggcagcacctgcatctttgaagagccctgtaattgttcttctctgtatgtcagatctaacagagggaatcacagtcactcaactacaaaatttaaatacaatgtgaacaattggatcccgaggtgtcaggggcaaagtggtggcacccaaccatcaaaggcaaggtgtgcttagctacagtaatggacagcagaggcaaaacatcaatcagaatagtctgactcatgtagagctctggcactggctaattactcacagtgtttctagaagtgaaattgataggaagcctaccagattcctacttaaccctacttaatttatataagcagtaaactggacaaaagactaatttgaattataaagacagaaaaatcatggcccctcaatcattttcgagacttgaaccagtttgcrtacccagaaccccttgaatgaaggggaggctgggtccccttgaggaaggaccccactgcactactgacaatttatgctcttaatctttctctcacacttccccaaagggaactccagctttttagtaggataactgtgcactggggagagggaaatgatcagacatttcaggactactggatactggctctgagctgacattgagttcaggggacccaaaatgtcattgtggtcttccacttaaaatagggactta

SEQ ID NO: 922162 - DNA, 586 bp, Homo sapiens
tcagcaccaacaacaagaactggttttgtttgattgcagaagaggcagtcttgtgatacctttacaacagctttctgagaacagagactcattatctcagcattcaaggtatgtggccactctctcaacctgctatggctgcctgattctgcttttaactttagccacaaggagttcattttaactttagccacaaggagttcattttgtctgctggccagaacatactttaacagctaagtccctgtatcatgggaataaattggcagagatmaaaaaatcctagattataaaactccagtgagaatttaaaattcattagcaactttcttcccagacagggaaatctttcaatatttctctgagctcaagattcatttgccctttgtaaagagccttttagataggtaaatttttaattctactttagaaggctatgcatgccaatcaaaaatacataccactgctgacaacaggtctgttaatcaaaaaaatttacacaaataaatttaacagtattttattttagcaaagaataattcataaattaggcagaactcagaaccaaaagaggttcagagaactc

SEQ ID NO: 922163 - DNA, 719 bp, Homo sapiens
agggtccagaagacatacatttgaccaaagccttgtgaaatagatttgtgagggcagcacctgcatctttgaagagccctgtaattgttcttctctgtatgtcagatctaacagagggaatcacagtcactcaactacaaaatttaaatacaatgtgaacaattggatcccgaggtgtcaggggcaaagtggtggcacccaaccatcaaaggcaaggtgtgcttagctacagtaatggacagcagaggcaaaacatcaatcagaatagtctgactcatgtagagctctggcactggctaattactcacagtgtttctagaagtgaaattgataggaagcctaccagattcctacttaaccctacttaatttatataagcagtaaactggacaaaagactaatttgaattataaagacagaaaaatcatggcccctcaatcattttcgagacttgaaccagtttgcrtacccagaaccccttgaatgaaggggaggctgggtccccttgaggaaggaccccactgcactactgacaatttatgctcttaatctttctctcacacttccccaaagggaactccagctttttagtaggataactgtgcactggggagagggaaatgatcagacatttcaggactactggatactggctctgagctgacattgagttcaggggacccaaaatgtcattgtggtcttccacttaaaatagggac

SEQ ID NO: 922164 - DNA, 518 bp, Homo sapiens
tggctagtccacagtgagcaggcaggaggctctgtacggttcagatgcagagattcctgtgaatatcatcacattagtattgatgtactggtttgcatatacttaaaagtagtattggtttaaaactgatagtataaacagcaatctgttcaatatagtgggagaaaacttttctgtatgctgcagagtgctttgtggcatggtagaaaatctcacctgaaaataatttacatcctgggctccgataaatattccaatactaatttataccatctttttaaaccataataataatttatatatcagttstgcttttatctctaaaacaagagtggtgatatttggcactacatgggcttacaaattgcctagagaacagatgctacatatgttgttttaattcatttttgaaagttaaaatttgctcttaccaagtttttatataagattgaggttttggtgctaaaagagctagaagtcctaaaggggtattgatatttcatctacacgaaatacca

SEQ ID NO: 922165 - DNA, 637 bp, Homo sapiens
gtcatctttctcctgaagacctcacagagttccaacagccacctgctagcccttccccttccccacatcccttctggcttcaccctcagatccacacaccatcttctccctatttttagaaaaactctcagaccccaaacagtcctggatgaggggatgaggaggagtggctgggttttcactttctccccagaggatgactccagtgctgtcttctgtctccccactcttactcctggggtgggcagaataattattccccaragatgtccagctcctaatcctcagaacctctgagtatgtcacttcatatggcaaaagggactttgcagatgtaattaagaatcttttggggaggagccaagatggccgaataggaacagctctggtctacagctcccagcctgagcgacacagaagacgggtgatttctgcatttccatctgaggtaccgggttcatctcactagggagtgccagacagtgggcgcaggtcagtgggtgcgcgcaccctgcgccagccgaagcagggcgaggcattgcctcacttgggaagcgcaaggagtcagggagttagttccctttcctaatcaaagaaaggggtgacagacagcaccgggaaaatcaggtcactccca

SEQ ID NO: 922166 - DNA, 637 bp, Homo sapiens
gtcatctttctcctgaagacctcacagagttccaacagccacctgctagcccttccccttccccacatcccttctggcttcaccctcagatccacacaccatcttctccctatttttagaaaaactctcagaccccaaacagtcctggatgaggggatgaggaggagtggctgggttttcactttctccccagaggatgactccagtgctgtcttctgtctccccactcttactcctggggtgggcagaataattattccccagagaygtccagctcctaatcctcagaacctctgagtatgtcacttcatatggcaaaagggactttgcagatgtaattaagaatcttttggggaggagccaagatggccgaataggaacagctctggtctacagctcccagcctgagcgacacagaagacgggtgatttctgcatttccatctgaggtaccgggttcatctcactagggagtgccagacagtgggcgcaggtcagtgggtgcgcgcaccctgcgccagccgaagcagggcgaggcattgcctcacttgggaagcgcaaggagtcagggagttagttccctttcctaatcaaagaaaggggtgacagacagcaccgggaaaatcaggtcactccca

SEQ ID NO: 922167 - DNA, 616 bp, Homo sapiens
tgccatcaataaggaggtaaaaccctccgctaacgaaaagattaccactcactgaaggctcagatgatcattagcatttttaacaataaggtatttttaattaaagtatgtatattgtttgttagacataatgctactgcacatttaatagaatactgtatagtgtcaacataacttttatgtacactgggaaaccaaaaatttgtgtggctcactgtattgagatatccactttattgcagtggtctggaatctaacctgcagtatctttgaggtgtgcctgtataggaaagcaagtgatttttgtatattagcctaatatcctgaaactttgctataattacctgttagttccaagagtttttgtgttgattctttgggactttctatatagacgatcatgtcatttgcaaacagagacaattttatttcttccttcccartctgtatacttcttatttcctttcttgacttactgcattaactagaacttctagtacaatgttgaataggagtggtgggaggggacatacttgctttgttctcagtcttcaggaaaagcatctagtttttcaccattaagtaggttaatgtatcttttcttttcttaaaaagt

SEQ ID NO: 922168 - DNA, 748 bp, Homo sapiens
aactagagcttcattaacaatgttaaacgtttttcctccaggtgcggtggcccgtgactgcagccccagtatttagggaggccaaggtggacttgagcccaggtgtttgagaccaggctgagtatcatggagaaacctatcactacaacaaatagaaaaactagaaaaattagctgggtgtggtggtgcatgcctgtagtcccagctacttgagaggctgaggagggaaaatcacttgaactcaggaggtggaggttgccaggagccaagatcatgccactgcactccagcccctgggtgacaaagygagagcctgtcttaaaaaaaaaaaaaaaaaagtttttcaattatccacttcagcttactgatggactctgaaagtatatatttttgcatatgtaaggaaatcagacatcatttttttccacttgacctccagaattcttaaagtcaccaccttatttgtcatcactgaacacacaggccaaaggttttgccaggcatgcacaactgtctttagtcactgcattctaagccctggcaacagcttatacagcattctttatgccaaatttattttggaaacctcccacatccacacctcagttcaatgctgctggagttcttttcaagatagtgttctcatatttactcttcattgatctaagaataccctgatccacatgactgaattagtaaagccacatttgggagaaagtacacagcataaacgttctttttgatgaga

SEQ ID NO: 922169 - DNA, 676 bp, Homo sapiens
agccccagtatttagggaggccaaggtggacttgagcccaggtgtttgagaccaggctgagtatcatggagaaacctatcactacaacaaatagaaaaactagaaaaattagctgggtgtggtggtgcatgcctgtagtcccagctacttgagaggctgaggagggaaaatcacttgaactcaggaggtggaggttgccaggagccaagatcatgccactgcactccagcccctgggtgacaaagcgagagcctgtcttaaaaaaaaaaaaaaaaaagtttttcaattatccacttcagcttactgatggactctgaaagtatatatttttgcatatgtaaggaaatcagacatcatttttttccacttgacctccagaattcttaaagtcaccaccttatttgtcatcactgaacacacaggccaaaggttttgccaggcatgcacaactgtcttyagtcactgcattctaagccctggcaacagcttatacagcattctttatgccaaatttattttggaaacctcccacatccacacctcagttcaatgctgctggagttcttttcaagatagtgttctcatatttactcttcattgatctaagaataccctgatccacatgactgaattagtaaagccacatttgggagaaagtacacagcataaacgttct

SEQ ID NO: 922170 - DNA, 682 bp, Homo sapiens
agccccagtatttagggaggccaaggtggacttgagcccaggtgtttgagaccaggctgagtatcatggagaaacctatcactacaacaaatagaaaaactagaaaaattagctgggtgtggtggtgcatgcctgtagtcccagctacttgagaggctgaggagggaaaatcacttgaactcaggaggtggaggttgccaggagccaagatcatgccactgcactccagcccctgggtgacaaagcgagagcctgtcttaaaaaaaaaaaaaaaaaagtttttcaattatccacttcagcttactgatggactctgaaagtatatatttttgcatatgtaaggaaatcagacatcatttttttccacttgacctccagaattcttaaagtcaccaccttatttgtcatcactgaacacacaggccaaaggttttgccaggcatgcacaactgtctttagtcactgcattctaagccctggcaacakcttatacagcattctttatgccaaatttattttggaaacctcccacatccacacctcagttcaatgctgctggagttcttttcaagatagtgttctcatatttactcttcattgatctaagaataccctgatccacatgactgaattagtaaagccacatttgggagaaagtacacagcataaacgttctttttga

SEQ ID NO: 922171 - DNA, 596 bp, Homo sapiens
catttattgctacaaaattccttcttagaactgattttactgcattccctaagttttgatatgttgtgtttttgtttccatttgtctccagatttttttaaaatttcttttttatttctactttgattcatttgttctttaggagtgcattctttaattttcacatatttgtgaattttctatttttctcctgttatttatttctagtttcatagcattgtaattataagcgatacttgatatgatttcaatcttcctaaattgttaaaacttgctctgtggcctaacaggtgatatatcctggagaacgttctctgtacacttaaaaagaatgtatattctgcacttgttggataaaatgctttatctatatctactgggtctatttggtctrtagtgttgttcaagtcttccatttccatacttattttccatctaaatgatctgttaattattgaaagtggggtattaatgatccctactatcatattgctgtctgtttctcctttcagttgcattaatatttgttttatatatctagtgctccaatgttgggagcatgtttatgatttttatatcttcttgataaattggcc

SEQ ID NO: 922172 - DNA, 595 bp, Homo sapiens
gacagagtgagactttgtctcaaaaaataaagaaaaagaaaaaaaaactaaataaaaaacttatcagaggcatgaagttaaaattctcacaacttgaaaacaagcactttttaaatattatttttgtagctggataagttaattccagtcacttcctrttagatgagagatttggaatcagaaagattgtaactggctcctgacgcctcattattcactgttaattgaatgaattttgtgacttaacccagggttaggagggaatcaagagctcttaacctgacagtagtggggttgatgcagaaactgcagagctgacttcatgttaacaaccaagatgtgcttttcttatatgagactagaatgtgttatcagatgtaacatcctctttggggaggtatttgaacctaaattatcttcttcaggccagaggctatgctccattagcatttagcaggagaccaagtaatttttctacctttaaaactaatttttctccttgttggtggtgatagtagcttttctttaattcttaagacaaaatttcagaaaagctagaattttaaacatgacagcttcaaaaatggtcatctca

SEQ ID NO: 922173 - DNA, 776 bp, Homo sapiens
tggacaaaggacttgaatagacatttctccaaagaagacattcaaatgaccgacaagtatattaacagatgcttaatacgactaatcattatggaaatgcacatcaaaatcagatatcacctcacaccctcacatatcattaggatgcctactaccccaaaaacagaaatactgtgcattgttgagcacgtggagaaattggaaccctcatgcactgttagtgggaatgcagaatgattaagctgctcttaaaagcagtacggtggttcctcaaaaaattaaacatagaattaccacataatccaacaattccactactggggagatgccccaaagaactgaaagcagagtctcgaagagacatttgcatacccgtkttcacagcagcattatccataatagccaaaaggtggaatcaacccaggtgtccatcaatggatgaatggatgtacaaaatctggtccgtccatgcaaggagcattattcagccttaaaagggaaggaaatcctgaccaaagctacaacatgtataaatctcaaggacattatgttaagtggaataagccacacaccaaaggacaacactgtataattccactaatactcagcaccagagtagtcaaatccatagagacagtaagtagaacaggggtggccaaggactggggagaggtgagtgggagttggcgtttaatgaaaacagagttttagtttgggaagatgaaaaagttctggagatgatggcagtgggggctgcacagcagtgtggttgtact

SEQ ID NO: 922174 - DNA, 795 bp, Homo sapiens
ctgccttgctaaggtctctggtttttataggcccatgatgggggcacggcaggccagggtggtcttggaaaatgctacatttcggcatgaaagcagaagtgcctgtccttacctaggtccgtgggggtggagccctagccagggaccaygtcctcctctacccaacacttcccttctccccttccctatcatttaaagggaccacgctcttcccttcccagcacttccatatcagtttggtacacaggtaaacttgtgtcatggaggtttgttgtacagattgtttcatcatccaggtattaagcctaatgcccatttgttatttttcccgttcttctctctcctcctatcctccaccctaatgtttccctctgtgtgtccgtatgctctcatcgtttagctcccactataagtgagaacatgctgtatttggttttctgttcctgtattagtttgctaaggataatggcctccagctccattaatgtttgcgcaaaggacatgatcttattcttttttatagctgcatagttttccatggtgtatatgtactacattttctttatccagtctatcattgttgggcatttagggtgattccatgtccttgctgttatgaatagtgctgcagtgaacatatgtgtgtatgtggctttataataaaatgatttatgttcttttgggtatatgcccagtaatgggattgctgggctgaatgacatttctgtctttaggtctttgaggaatcatcacactgtcttccaaaatagtagaactaatttacactcccaccaa

SEQ ID NO: 922175 - DNA, 795 bp, Homo sapiens
ctgccttgctaaggtctctggtttttataggcccatgatgggggcacggcaggccagggtggtcttggaaaatgctacatttcggcatgaaagcagaagtgcctgtccttacctaggtccgtgggggtggagccctagccagggaccacgycctcctctacccaacacttcccttctccccttccctatcatttaaagggaccacgctcttcccttcccagcacttccatatcagtttggtacacaggtaaacttgtgtcatggaggtttgttgtacagattgtttcatcatccaggtattaagcctaatgcccatttgttatttttcccgttcttctctctcctcctatcctccaccctaatgtttccctctgtgtgtccgtatgctctcatcgtttagctcccactataagtgagaacatgctgtatttggttttctgttcctgtattagtttgctaaggataatggcctccagctccattaatgtttgcgcaaaggacatgatcttattcttttttatagctgcatagttttccatggtgtatatgtactacattttctttatccagtctatcattgttgggcatttagggtgattccatgtccttgctgttatgaatagtgctgcagtgaacatatgtgtgtatgtggctttataataaaatgatttatgttcttttgggtatatgcccagtaatgggattgctgggctgaatgacatttctgtctttaggtctttgaggaatcatcacactgtcttccaaaatagtagaactaatttacactcccaccaa

SEQ ID NO: 922176 - DNA, 795 bp, Homo sapiens
ctgccttgctaaggtctctggtttttataggcccatgatgggggcacggcaggccagggtggtcttggaaaatgctacatttcggcatgaaagcagaagtgcctgtccttacctaggtccgtgggggtggagccctagccagggaccacgtcctcctctacccaacacttcccttctccccttccctatcatttaaagggaccacgctcttcccttcccagcacttccatatcagtttggtacacaggtaaacttgtgtcatggaggtttgttgtacagattgtttcatcatccaggtattaagcctaatgcccatttgttatttttcccgttcttctctctcctcctatcctccaccctaatgtttccctctgtgtgtccgtatgctctcatcgtttagctcccactataagtgagaacatgcygtatttggttttctgttcctgtattagtttgctaaggataatggcctccagctccattaatgtttgcgcaaaggacatgatcttattcttttttatagctgcatagttttccatggtgtatatgtactacattttctttatccagtctatcattgttgggcatttagggtgattccatgtccttgctgttatgaatagtgctgcagtgaacatatgtgtgtatgtggctttataataaaatgatttatgttcttttgggtatatgcccagtaatgggattgctgggctgaatgacatttctgtctttaggtctttgaggaatcatcacactgtcttccaaaatagtagaactaatttacactcccaccaa

SEQ ID NO: 922177 - DNA, 563 bp, Homo sapiens
gagtagtgagagagggcaaccttgtcttgtgccagtttccaaggggaatgcttccagcttttgcccattaagtatgatattagctgtgggcttatcatatatggtgcttattcttttgaggtatgtktcttcaatacctagtttattgagagtttttaacatgaatgaatgttgaattttattgaaagccttttctgtatcttttgagataatcatatggttttggcctttagttctgtttatgtgatgaataacatttattggtttgtgtaggttgaaccaaccttgtatcccggggatgaagtctacttgaccgtggtggatacgccttttgatctgctgctcaattcggtttgccagtattttgttgaggatttttgcatcaacattcatcaagaatattggcctgaagttttttgttgttgttgttgttgtatatctgccaggttttggtatctggatgatgctggcctcatagaaggagtttgggaggaatccctcctcctcaatttttttgaatagttttggtatgagtaataccagctcttctttgtacatctggt

SEQ ID NO: 922178 - DNA, 645 bp, Homo sapiens
gctgtgatgaaaaggatgaagaagccccagaggaagtgatgccggcaaagacagcaacaaacttcatattaaaggaactcttgtagatattgcatgacgttgacaatgttagatgctgttccgaaaacagcacgacagttcaccaaggcatagaaacactgctggctccttatcataagctatacgacaagagggaggcaagcactgttcaaactgggcttgatayacgtctataaataaataaagcactttaattggctgttgtttaatgttttaaattacagtgtaaaaatgaagtactcccaaccaggcacggtggctcactcctgtaatcccagcactttgggaggctgaggcggataatgaggtcaggagatcaagatcatcctggctaacacagtgaaaccctgtctgtactaaaaatagaaaaaatcagcctggtgtggtggcatgccacaactacttgggaggctgaggcagaagaatcgcttgaacccaagaagtggagcttgcagtgagccgagatcgtgccactgcactccattctgggcgacagagcgagactccatctcaaaaaaaaaaaagtactaatttcactatgtttcatttccttatacatttataaccaacagtaagagattttta

SEQ ID NO: 922179 - DNA, 602 bp, Homo sapiens
tcattctgccccagctcctcccaaatttcatgtcttcacatttgaaaacaaattatgccttcccaacagtccctcaacatcttaactaatttcaatattaactcaaaagtccacagtccaaagtcttatctgagacaaggcaagtcccttcgagctatgaactcataaagttaaaagcaagttagttactttccaaatacaatggaggtacagggagcaggtaaacatacctgttccaaatgggtgaatttggccaaaacaaagaggctacaggccccaagtccaaaatccagcaggcctgtcaaatcttaaagctccaaagtgaactcctttgactccatgtctcacatccaggtcacacttatgcaagaggtgggctcccatggccttgggcagctccacccctgtggctttgcaggaaatagcccccctcttggttgctttcatggactrgcattgtctgtagccttcctgtgtgcatgatcaagcttttggtggctgtacctttctggggtccggaggacagtggccttcttctcacagctccagtaggcagtacctcagtggggactctgtgtgggggcttcaaccccatatttccc

SEQ ID NO: 922180 - DNA, 587 bp, Homo sapiens
gctcctcccaaatttcatgtcttcacatttgaaaacaaattatgccttcccaacagtccctcaacatcttaactaatttcaatattaactcaaaagtccacagtccaaagtcttatctgagacaaggcaagtcccttcgagctatgaactcataaagttaaaagcaagttagttactttccaaatacaatggaggtacagggagcaggtaaacatacctgttccaaatgggtgaatttggccaaaacaaagaggctacaggccccaagtccaaaatccagcaggcctgtcaaatcttaaagctccaaagtgaactcctttgactccatgtctcacatccaggtcacacttatgcaagaggtgggctcccatggccttgggcagctccacccctgtggctttgcaggaaatagcccccctcttggttgctttcatggactggcattgtctgtagccttcctgtgtgcatgatcaagcttttggtggctgtaccwttctggggtccggaggacagtggccttcttctcacagctccagtaggcagtacctcagtggggactctgtgtgggggcttcaaccccatatttc

SEQ ID NO: 922181 - DNA, 596 bp, Homo sapiens
catggactggcattgtctgtagccttcctgtgtgcatgatcaagcttttggtggctgtacctttctggggtccggaggacagtggccttcttctcacagctccagtaggcagtacctcagtggggactctgtgtgggggcttcaaccccatatttcccttctgcactgtcctagcagaggttttccattagggcaccacccttgcagcaaaattctttctggacatctaggagtttccatacatcctctgaaatctaggcagagattcccaaacctcaattcttgacttctgtgcacccacaggcgcaacaccatgtgaaactgccaaggtttggggcttgcaccacctgaatccacagtccaagctgtaccttggacccttttagccatggctagagtagctgggatgcagggyatcaagtcactaggtggcaaacagcagggggcccctgaatccagcccaggaaaccattttttccttttaggcctcttggcctgtaatgggagggactgctgcaaaggtctctgacatgtcctggagatattttccccattgtcttggtgatgaacatttgggtccttgttgcttatgcaaa

SEQ ID NO: 922182 - DNA, 625 bp, Homo sapiens
tggctaaggagtagttgaagcttccaggttagtggaactttcactgttttgtctgaatcaagacctccctttcctggaaccaggaccctacccaggaaaacctaggtttgaagagtgtgagaagctgatcctactgttttaattgactttttctttaccctgttggagagagaggaattccccctttaggtgtatggagtggccaaacacaacacccaacgctggacagataaaactgacagcagttcattagtcacgtatactatactcacggcctggggaaggacagcaygctccatgcagggcctcatgaaattacacttgagaacagtgaacaaccagaccacaagggccaaactctgagcaaagtccaaatccttcttcttccatcaactggttgtagtcccctccccgtgaggccataagtgtgaatttagggacagccactgatgcaaaagaggtaggtgacatgagatttgagtcacctgtatacataatttgtggtatcttctggattaacttgagccaagtcctgaatataccatttccatcaaataatgtttctgcccaactttatgacttataaatctgatcacattgagctcaccatagagaaatattctca

SEQ ID NO: 922183 - DNA, 529 bp, Homo sapiens
caatgtggtttaccgaacatattaagcccaccgtcgagacctactgctcaaaaaaaagagattccgttcaaaatactaatgcacagtgacaatgcacctagtcacccaagatccttgatggaaatgtacaagattaatgttcttttcatgtctactaacacaacaaccgttctgtagcccatggattaaggaataatttagactttcaagtcttatttaagaaatacaacttgtaaagctataagtaccatagatagtgattcatctgayggatcttggcaaagtaaactgaaaaccttctgaaaagaattcaccattctagataccattaagaacatcgatgaggtggtgaaacaagatggatgaagagaaccctccaatgatcatcctccttgcaggaacaccaaaatgaacaattatccacacaagaaattacattcataagaaccacacatcaggtgagcaatcacagtacctggctttgatatcatagcaagcaaagaggcacatagagggtacaaaagacagt

SEQ ID NO: 922184 - DNA, 593 bp, Homo sapiens
aagatcgatgggttctaggataaaatgtggaagagagacaggaagcacagattgcaattccactaacaggagttcaacagagatgtagaaaggtttaaacagagtttttccattatggcactgttgacattttagactaaataattctttgttgtagggggcttttctgtgcattctatgatgttcatcagcatttttattagtgcattagcagtccttctctgcctcctccacccccaccctactagggtgtgaagaccaaaaatgcctccagacattgccaggtgcttcctggggggaaaaaytgctgcacttgagaaacacttgcttaagcttttacatcttgccacacagtattaaaagacgaatcaaattcaggaaatataagagcccctggtcatgctccagccctttccagaccagccgcttggctgtgccatatggtaaacttgctgctgcttttctttaagcacacttctcttcaaagcccattgctgagaatcaagttacaatactacatttggggtttagacagtgatagaaataacttcttcatctacatggatcaaaaatgtcttcatccctagaatatt

SEQ ID NO: 922185 - DNA, 593 bp, Homo sapiens
aagatcgatgggttctaggataaaatgtggaagagagacaggaagcacagattgcaattccactaacaggagttcaacagagatgtagaaaggtttaaacagagtttttccattatggcactgttgacattttagactaaataattctttgttgtagggggcttttctgtgcattctatgatgttcatcagcatttttattagtgcattagcagtccttctctgcctcctccacccccaccctactagggtgtgaagaccaaaaatgcctccagacattgccaggtgcttcctggggggaaaaattgctgcacttgagaaacacttgcttaagcttttacatcttgccacacagtattaaaagaygaatcaaattcaggaaatataagagcccctggtcatgctccagccctttccagaccagccgcttggctgtgccatatggtaaacttgctgctgcttttctttaagcacacttctcttcaaagcccattgctgagaatcaagttacaatactacatttggggtttagacagtgatagaaataacttcttcatctacatggatcaaaaatgtcttcatccctagaatatt

SEQ ID NO: 922186 - DNA, 407 bp, Homo sapiens
gcttggaaaaacagtgtaaaccggcagtgtaaacaagagcaggacatgtatgagtagttgagaacagtgaataggagtatgactagacagaaaatagtagggatgacaagtttttttttgtggagggggggggcacagtctaagttggtctgktgtctggaatgagactggggcctaataaaaaggagcgtctatataggagcttaaatgggctgtaccctgtagcattctgaggacaggcctgaattctgagaagggaaagtggtaaaagtattgtccagtcctttttggtggctgagcttggtgaggtgtgtttttaaaagacctttagtccattctacttttcttgaagacggaggactgtaagggatataaaggtttcactgaatactaagagcctgaaaaac

SEQ ID NO: 922187 - DNA, 407 bp, Homo sapiens
gcttggaaaaacagtgtaaaccggcagtgtaaacaagagcaggacatgtatgagtagttgagaacagtgaataggagtatgactagacagaaaatagtagggatgacaagtttttttttgtggagggggggggcacagtctaagttggtctgttgtctggaatgagactggggcctaataaaaaggagcgtctatayaggagcttaaatgggctgtaccctgtagcattctgaggacaggcctgaattctgagaagggaaagtggtaaaagtattgtccagtcctttttggtggctgagcttggtgaggtgtgtttttaaaagacctttagtccattctacttttcttgaagacggaggactgtaagggatataaaggtttcactgaatactaagagcctgaaaaac

SEQ ID NO: 922188 - DNA, 720 bp, Homo sapiens
tacccaaagcctacccttgtcaaagccagtgtaaaggtaatcttggaagcattgagtcagtgattcacagaaggaaaaggtgtttgtcattgtgaatgtcttaagaagagagaacaaatcgctctggtgttctggtgtgggaacatttgttttctctctctaaatgtgtaacaggaaattaggcagttcacctttgtaaatcgtctgtataccacttatgtatgagccagatggtgcctcttcgttttaacaaattaaaaatgaaaaagaaagactataaggaggagtttatctccatctctccccatgcccttatatgcacattctggaatmtgcactgggcaggcaagcacacgtgtatgcacacacacacacacacacacacacacaggcctggattatctgcacttagtggtgttaggcataagaagccaacaaactcttaggcccaaatgagttcagtaatcagtgatagcagagaggtacaaacctgtccgggggtatcagctcatagagagaatccttcacagtattctcgcgatctgacaaatcagagcattcctccaaggccttagccgatgtatactgaacaaaaaagttttacacaaatcacccaaatgtggacttagctctaggattcatgagcagtatttccatacatgttgaaaccttaagaaagacattttcctgaggtggtcaatgtaaagattctactccttt

SEQ ID NO: 922189 - DNA, 720 bp, Homo sapiens
tacccaaagcctacccttgtcaaagccagtgtaaaggtaatcttggaagcattgagtcagtgattcacagaaggaaaaggtgtttgtcattgtgaatgtcttaagaagagagaacaaatcgctctggtgttctggtgtgggaacatttgttttctctctctaaatgtgtaacaggaaattaggcagttcacctttgtaaatcgtctgtataccacttatgtatgagccagatggtgcctcttcgttttaacaaattaaaaatgaaaaagaaagactataaggaggagtttatctccatctctccccatgcccttatatgcacattctggaatctgcmctgggcaggcaagcacacgtgtatgcacacacacacacacacacacacacacaggcctggattatctgcacttagtggtgttaggcataagaagccaacaaactcttaggcccaaatgagttcagtaatcagtgatagcagagaggtacaaacctgtccgggggtatcagctcatagagagaatccttcacagtattctcgcgatctgacaaatcagagcattcctccaaggccttagccgatgtatactgaacaaaaaagttttacacaaatcacccaaatgtggacttagctctaggattcatgagcagtatttccatacatgttgaaaccttaagaaagacattttcctgaggtggtcaatgtaaagattctactccttt

SEQ ID NO: 922190 - DNA, 645 bp, Homo sapiens
tgttgtcagacttttttccatgcctgtctttgctcctgctacttctcactgggtagggcctcccgacctcggccccagcacagctaccctgctcccacttgaacacttcagacagtggcacctgtgcatttctctgggatagaattcccagtgacaacccacagcccctctgccattacatacagtggtaccacccttgctrcctgatatggtttggctctgtgtccccattcaaatctcatcctgtagatcccacaattcccatgttttgtgggaggtacctggtgggaaatgactgaataatggagatgggtatttcccatgctgttctcgtcatagtggatgggtctcatgagatctaatgattttaaaaacaggagtttcctgacacaagctctctcttagcctgctgccatccatgtaagatgtgacttgctcctacttacctttcaccatgattgtgaggccttcccagccacgtggaactgtaagttgattaaacctccttcttttgtaaattgcccagtctcaggtctgtctatcagcagcatgaaaatggaataatacagtaaattggtaccagtagagtgggctctactgaaaagtgcctgaaaatgtggaagcaactttagaactgggtaacag

SEQ ID NO: 922191 - DNA, 656 bp, Homo sapiens
gttcttctaaagaatgaagaagtcagatttcctggtccttgtgtaggctctcttcctgacagggtttctcaaacttttctgccaaagtccctttgttattagaggcaggagggtaaacttggaccccagcagtctgggggattgccctgaagggccattagcaaggaccaattatttcttttytttttttttttttaaaaaaaagacatgtttaattaaataataggttacttcatcttcattatttgcattatataaaaataggattttttattaataagaaaatagcagattcttttgtggccttaagttttagctctaaaatgatgcaaactttgcattttataacgtagtatattttatacaacttaatataaaaatgatgttttaaaccatctgccatcaaaaaacctctgtggccctcagagaggcttcttatatatccggggacaccctcagcgagcagctactgcagtgtggcctggggaacttgcacccaggtgagaggtgctatggggtgtggtggtttgttaaactagctgccactgtcccaggttgtatctttaatgactaccatttagtgagcactactatgtgccagactctacgccaaatgcttttatatgcttatgccatttaaattctcacaaccacct

SEQ ID NO: 922192 - DNA, 785 bp, Homo sapiens
aattcattgatccatcagccctctgcctccctcctcctttgaaagagcagtggcctgccccactgctaaaggccctggggttccagaaagccgaccacgctttacaccacacctgcaaagaggaaaacaggcgaatccgagggggagaccatgtgaccacgcgtggcactggccaatcccacagcagttggtgtgaatgygtctcaccggaggcatacggggcgacggcgaaacaaagggtggggtccaggcatgtgccagtggaagggggaaacgggtgacctttccatcaatgccaaggaaaatcaaagaacacctgggacccgggggtggggggccgcctgtgcctgacccaagccacgttttcaaatgtctaccggaggagcaaagaggtttctgcaaaattcgcaacacccccaatcctccaccgacctggtagccctgacgcaacttcggctggcacaaacccacagagagtgggaaagaaacacacagagactgagagacagagagagaagagagaatgggagacacacacacacacacgcagagtcatacagcagaggcattgaaacacacacccccaggcaacccctgaggctgcggggttctgctctggaggagaacgaccctcgggtgagagagcagcccaggggcacgcaggccgacccgtcctcgagatcacggacggcggcacgacttttagggagactcaccccaaccaacaccgtccgtgcaggcctgaggctgggatcccgtgctgcttcccccgtctctgcctgggg

SEQ ID NO: 922193 - DNA, 705 bp, Homo sapiens
tgaaaattcattgatccatcagccctctgcctccctcctcctttgaaagagcagtggcctgccccactgctaaaggccctggggttccagaaagccgaccacgctttacaccacacctgcaaagaggaaaacaggcgaatccgagggggagaccatgtgaccacgcgtggcactggccaatcccacagcagttggtgtgaatgcgtctcaccggaggcatacggggcgacggcgaaacaaagggtggggtccaggcatgtgccagtggaagggggaaacgggtgacctttccatcaatgccaaggaaaatcaaagaacacctgggacccgggggtggggggccgcctgtgcctgacccaagccacgttttcaaatgtctaccggaggagcaaagaggtttctgcaaaattcgcaacacccccaatcctccaccgacctggtagccctgacgcaacttcggctggcacaaacscacagagagtgggaaagaaacacacagagactgagagacagagagagaagagagaatgggagacacacacacacacacgcagagtcatacagcagaggcattgaaacacacacccccaggcaacccctgaggctgcggggttctgctctggaggagaacgaccctcgggtgagagagcagcccaggggcacgcaggccgacccgtcctcgagatcacggacggcggcacgact

SEQ ID NO: 922194 - DNA, 559 bp, Homo sapiens
aaataagagatcatacttgattatctggggggggccaatttaatcacaaggatcctttaaatgtggaagagtgtggtagaaaatatttaaagatactacattgctaattgtactggaggaaagaaccaagagacaaggaatggggaaagcggacaagagacaagaaatgaagacagcccctagaagctggaaaaggcaagaacatgtattctcctttagagtccccagaaggaaagcrgtgctgctgacaccttgattttagcctaatgaaaaccatttaagatttctgacctttataattttaaagtggtagatttatgtttctaaactaccaaataaaaatgttttgtctttagtttttaaaagtttaatcaaaatatttcttgaaatgtgtttattccgtgtagggtatcttaggcttcttgaatctatacatttgtgtcttctgcaaatttgaggtttttttgaagcactatttcttcaagtattctttcagcctcattttactttttttctggtacacgtaataaaaatgttggatcttttgttgttgcctcac

SEQ ID NO: 922195 - DNA, 559 bp, Homo sapiens
aaataagagatcatacttgattatctggggggggccaatttaatcacaaggatcctttaaatgtggaagagtgtggtagaaaatatttaaagatactacattgctaattgtactggaggaaagaaccaagagacaaggaatggggaaagcggacaagagacaagaaatgaagacagcccctagaagctggaaaaggcaagaacatgtattctcctttagagtccccagaaggaaagcggtgctgctgrcaccttgattttagcctaatgaaaaccatttaagatttctgacctttataattttaaagtggtagatttatgtttctaaactaccaaataaaaatgttttgtctttagtttttaaaagtttaatcaaaatatttcttgaaatgtgtttattccgtgtagggtatcttaggcttcttgaatctatacatttgtgtcttctgcaaatttgaggtttttttgaagcactatttcttcaagtattctttcagcctcattttactttttttctggtacacgtaataaaaatgttggatcttttgttgttgcctcac

SEQ ID NO: 922196 - DNA, 560 bp, Homo sapiens
ctggagtttggacttgcatgcggcctgtaacccctttattttggccaatttgtcctgtttggaatgggtatagttaccgaatgcctgtacccccatagtatcaagaaagtaactaactttcttttgattttacaggcttataggtrgaagggacttgtcttgtctcagatgagactttggactgtggacttctgagttaatgctgaaatgagttaagacttgaggaactgttgggaaggtatgattggttttgaaacttgaggacacatttagaggggacacaggcaaaataatatggtttggctctgtgtccccacccaaatctcatcttgaattgtagttcccataattgccatgcgttatggaaggacctagtgggagataattgaatcatggaggcagtttcccctatactgtccttgtggtagtcagtaagtctcacacgccctgatggttttataaggggtttctgcttttgcttggtccccattctctctcttgcctgttgccatgtaagacatgacttctgccttcccctatgattgtgaagtctccccagt

SEQ ID NO: 922197 - DNA, 560 bp, Homo sapiens
ctggagtttggacttgcatgcggcctgtaacccctttattttggccaatttgtcctgtttggaatgggtatagttaccgaatgcctgtacccccatagtatcaagaaagtaactaactttcttttgattttacaggcttataggtggaagggacttgtcttgtctcagatgagactttggactgtggacttctgagttaatgctgaaatgagttaagacttgaggaactgttgggaaggtatgattggttttgaaacttgaggacacatttagaggggacacaggcaaaataatatggtttggctctgtgtccccacccaaatctcatcttgaattgtagttcccataattgccatgygttatggaaggacctagtgggagataattgaatcatggaggcagtttcccctatactgtccttgtggtagtcagtaagtctcacacgccctgatggttttataaggggtttctgcttttgcttggtccccattctctctcttgcctgttgccatgtaagacatgacttctgccttcccctatgattgtgaagtctccccagt

SEQ ID NO: 922198 - DNA, 642 bp, Homo sapiens
gaggcacacactagcactgtggcataattaaaaataattttcagtagataagaagactcactatgttatctgggctggtcttgaactcctgagttcaagtgatcctcccacctctgcctctaaagttctatgattacaggcatgagctgtctcacctatcactgattttctttttctttttttctttttctttctttctttctttctttttttttttttgacagagtctcactctgccttgcccaggctgaactgcagtggtgcaatcttggctcactgcagcctccgcctcccgggttcaagtgattctcctgtctcagcctcctgaatagttgggattagaggtgcccaccaccacacctgaccaatttttgtatttttagtagagacagggtttcaccatattggccaggctggtcacgaactcctgatctcaggcgatccacmtgccttggcctccaaaagtgcagtggcaggatcagggcatactgcagccttgacctctggggctgaagggatcctccctcctcagcctcccaagtagctggattataggcatatggcaccatgccaggctaatatttgtaatttttgcacagatggggttttgccatgttgcccagtctggtcttgaactcctga

SEQ ID NO: 922199 - DNA, 765 bp, Homo sapiens
ggagactgctttttctgtcccatcagaacagtatttttttttttcaaatgatttaggaagacccaccttccattacttttcctgatgaagtgtgatattgggtttttagccctttgttttctctggtaattttaccctgattccamatgtggtgtaaattccttaacaattcacctctttgatgtaagatctgggtagagagagcatacttgggggcgcagccttcaaataacacatcttgatgagacgtgtgcataaaatgcaaagaagaaataagtggccagagaaaatgatggtgcagaaaatgtgtttcttaaagaagggttgttaattttaatgtttggttctaaaactctttgctgcacccccatttaacagctaaaacataggactcagggagaaaatgaaggtgtcgggaaatttaggctgaaattcctgggttggaaggagcacagtaaatgaagcccagcctttttcgtgttttatattcattaagcatagcaatgtactgataacgttttttaagctgtcattacatctagttgatatttaatctgaattttaatatttaaaaggatactcaggatcttcattagagccataaaaaattcaagcagggctactgtttggaactgtaacaaagcaatttatactcctatcatttcacttaaattagagtgaggaaagaaatttagattttttgaaaagtgcaatcagcctcttaaataaaaaagcaactggtgtcaccattaggtggcaggcaca

SEQ ID NO: 922200 - DNA, 344 bp, Homo sapiens
cacattggagtcacctgaaaagcctttctaaaatcccaatcccaggctgtaccccagaccaatgaaatcagaacctctgggagaaggaccctggtactggtgtttttaaagctccccaggtgattccaacctgcagtcaaggtcgataaccactgctttgtgccatttatcactttcttccttgtagtcgtaattacactgyatttgtcttattcccaggactaagtttgcaactcctcgagggcacagaccatcttatcacatctgcttatgccctgcagttcttagtgaatcagagctgcaacaaatactgttgaatcgaatttaggaacttaaaattaacc

SEQ ID NO: 922201 - DNA, 644 bp, Homo sapiens
accatgaattttcagtcatcacattccatatggtgatgatgctgtgactgtggtgcaatggactgaatattcatgatcctccagaattcctatgttgaaaccctaactcacaaggtgatggtattaggaggtgggaaatttgggaggtgattagatcatgaaggtaaaacccctactggatgggattagtgccctcattttaaaaggccccaaagatttgctttgcttcttccaccacttgaggacacagtgagaaatcaacatctctgaaccagaaagtgagtcctcaccagacatcatatctgccagtaccttgatcttggacttcttagcctccagaactgtgagaaataaatttctgttgtttataagccactcagtctaaggtattttgttatagcagcccacatggactaaaacacactgttgacataacgatatccaagcctcattttctgtctctctgtgggtgactgtgcacgtgtgtacmcacatgtgtgcacaggaagcatcactgcagaaccgacctctgatgaccatttctggtgccctctgtgtgtctctgtccaggagctgtattctcaatcctatgatgctgttggggtgatgtttgcctccatcccaggatttgcggacttttactc

SEQ ID NO: 922202 - DNA, 578 bp, Homo sapiens
ggggaccactaccaccaagatgaggggaccggtagtggcccagaatggctgggcgcgctgacatttattgcaaacaatacaagggggacaaggtaaggagggtgagtcatccaagtgattgataaggtcaagcaagtcatgtgatcatgggacaggtggcccttcccttctaggtagccaaagcagagagggaaggcagcatacgtcagcattttcttctatgcacttgtaagaaagatcaaaractttaagactttcactatttcttctaccgctatctactacgaacttcaaagagtaaccagaagtatgggaggaacatgaaagtggacaaggaaagtgaccattgaagcacaacaccacagggagggctttaggcctccagatgactgtgggcaggcctggataatatccagcctcccacaagaagctggtggagcagagtgttccctgactcctccaaggaaaggagattccctttcacggtctgctaagtaatgggtgccttcccaggcactggcattactgcttgaccaaggagccctcaagtggcccttatgcaggcatgacagagggct

SEQ ID NO: 922203 - DNA, 644 bp, Homo sapiens
tggccaggatggtggggacagaagggagacaaaggtgagcagtgggtggggtcacatcctccctgacattgaatagacaacatggggaggaaggatgagtgatctttagaacgttcatggaaaatgcatattgggaaaaagaatgcatgaatttcaaattgttttgcaacaaaataaacttgtactaacttgtgaaaacacgtccgaacaggatctagtttgaggccctaagaagtataagacaacagtttgaacagagctcctatcagacacatgaattctgctaaaattgaaaccagaacaaacatgcaattgatggtgaagcttggctggaaacatggtgaaatcattgatgatttattgaaagtttatagggacaatgcctcaaagaaatcagcaatttaagtaagtggataactcattggaagaagagaagagatgatgttggagaggaagtccacagcagcaggccagccacatcagtcygtgaggaaacaattcatcttgtttgtgccctaatttaagaggactgattaatagcagcagaaacaatagccaacgctgtaggtatcccaaggtgttcagcttacacaattctgactgaaattaaagttgagtaaactgtccactcggtgggtgccaaa

SEQ ID NO: 922204 - DNA, 629 bp, Homo sapiens
tgtgttataaagatactgctgaaaatgtcagaagaaataggcctacatcacataaccctatgggttacagtgataagaaaaagggaacatttatgtttagcacaaaaagtcaagcagttggggaaactggacagtggtgtcagtgtgaaacatcctacagatgagtatggggttggaatgaccactatatatggcctgaagaaacagaaggataaactgtgctatgtgagaagtgataagcagatcttaatgaaaaatggaaaaacactgcacaaagccaaaagtgaaggtttcaatcttgtatggaaagagctgatctgtcagtgttgcaatgaatccatgccacttaatggtacgctgatcatgaaacaaacaaggwtctatcacaatgaactgaaaactgaggaaaactgcgtgaatgttcaaaaggctagttgcagaaatttaaggaaagatgtgacattaaatgtttagagattttcagtgatgaagcatctactgattacaaagcagtggagaaattcattgacaagtgtgcaaaggtcattgctgatgaaaatctgacacctgaacaagtctataatgctggtgaagtatcactgtgttggcatattgccccagaaagacac

SEQ ID NO: 922205 - DNA, 512 bp, Homo sapiens
tctggagttattcattcctcccggtgggctcgtggtctcgctggcttcaggagtgaagctttggaccttcgcagcgagtgttacagctcataaaagcagtgtgaacccaaagagtgagcagtggcaggatttattgcaaagagcaaaagaacaaagcttccacagtgtggaaggggacccgagcgggttgccactgctggctggggcagcctgcttttattctcttatctggmcccacccacatcctgctgattggtagagcgcagtggtctgttttgacagggtgctgattggtgcatttacaatccatgagctagacacaaaggttctccacgtccccactagattaactagatacagagtgtggacacaaaggttttccaagaccccaccagagtagctagatacagagcgtccattggtgcattcacaaaccctgagctagacacagggtgctgattggtgtatttacgatccctgagctagacataaaggttctccacgtccccacc

SEQ ID NO: 922206 - DNA, 619 bp, Homo sapiens
atatagggaggatcagatggtgggtggggtcatatagctcccaagggattgttttttgtctttggctaccaaggtggatagagaaagacccatcaggtaggggcaggattgggtatgtcttcgctcagactctccttgggtggagcttgctgtggctgctgtgggggatggggatgggttcctaggaaaataaagttatgttcccagggggagtatagctrctactgctgtgtcatacaggtaaccagggaagttggggaaagccagcagccacaggcctcacgcagctcccgtgcagcccacagcccaaaagtctggtctcactcccacggtgtcccccacaccccagcagcaccaagtttatttccaggcagctaatgagcaggctgggaacttgacccaggctacaagcctccaagctaggaaagcaagccagctcacagttccttggctgtcccacggagcctggagtggcaatccacatccttcagagggtctgtggcttctcttggatctcctggtatgttcctgtgatagttcttggagcaaaagttcacagtttgggtctctacaagctgctctgtttatctgagtgggaactgcaagttaatcctgcctt

SEQ ID NO: 922207 - DNA, 619 bp, Homo sapiens
atatagggaggatcagatggtgggtggggtcatatagctcccaagggattgttttttgtctttggctaccaaggtggatagagaaagacccatcaggtaggggcaggattgggtatgtcttcgctcagactctccttgggtggagcttgctgtggctgctgtgggggatggggatgggttcctaggaaaataaagttatgttcccagggggagtatagctgctactgctgtgtcatacaggtaaccagggaagttggggaaagccagcagccacaggcctcacscagctcccgtgcagcccacagcccaaaagtctggtctcactcccacggtgtcccccacaccccagcagcaccaagtttatttccaggcagctaatgagcaggctgggaacttgacccaggctacaagcctccaagctaggaaagcaagccagctcacagttccttggctgtcccacggagcctggagtggcaatccacatccttcagagggtctgtggcttctcttggatctcctggtatgttcctgtgatagttcttggagcaaaagttcacagtttgggtctctacaagctgctctgtttatctgagtgggaactgcaagttaatcctgcctt

SEQ ID NO: 922208 - DNA, 767 bp, Homo sapiens
aatggaagcaaacaccgtttacaatagcaacaaagacaataaaatacctgagaataaacatagcaaaaatgtgcaaaaaagaaaactttccatctctactggaggacacgaaagagtaactgaataattagaaaggcacaccatgttcttgataggaatacacacttcataaagactgatcaatctggccaatttagtccatcaattaaacatcatcctattaaaaacaccaataaattttttgaggcagataagctgattttaaagttcatatgaaagaaataaacaagcagaaatagccagaaaatttccgatgaagaagaaaaaaaaraaaaaaaggagaaacaagccctaccaaatagcaaaatatagagctataattattttaaaaagagagtatttgtgcattaataaatgtatcagtgaacagaataaaaagtctagaaaaaactcaagtatatacaggaatttaatatgtgctaatggtggcatttcaaaacaggatatgattgattattcaataagtaattttggataactgagtagtgatctgaaacataataaagttggatttcaatccaacttattctaatccatatcttatattaagttacttctataatttagcaaaaaatttagtgaaaaaaatggcccataaaaatgctaaaagaaaacatggaaaaaaattttttaaataattttagagtttcagagtagtttcttctaagcacaacacaaaactcagaagatatttttaaaatttgata

SEQ ID NO: 922209 - DNA, 620 bp, Homo sapiens
gtgttgattttgtatcctgcaactttgctgaattcattcactagttctaaacattttgagcggtggaatcttggggttttctacatataagatcatatcatctgtgaaacagagataatttcatttcttcctttccaattagaatgtttttttttttctttgcctaattgctctggctaggacttccagtactgtgttgaatagaagtggtgggagtgggcatccttaccttgtttctgaccttagaagaaaaacttacagttttagactattgagtatgatgttggctgtgggtttgcctggctttttgattcagtttctccttaaaaaatcctgtcttttaccacctttgtgacygcaaagaccaaagaatattggccaaaataccattctacaacattccgcagtcctttttctccttcatctctcacatacttttttgttgttgttttgttttttgagacggagtctcgctctgttgcccaggctggagtgcagtggcatgatctcagctcactgcaacctccgcctcctgggttcaagcgattctcctgcctcagcctcttgagtagctgggattacaggcatacgccaccacgcctggctaattttttattttt

SEQ ID NO: 922210 - DNA, 658 bp, Homo sapiens
agccaaccccggactcagactctgaggaagagtttgtccctaattcattcttagttaaaagtggctccgccagcctgggggtcgcggcgaacggtaagtccctctctcttcctacttttgagggtttgtttttaaaattgtccttccgttgcggatgcctgcttgggccacttgccgggcggaggggcctggtgcgtggkgggatccgggggagctgggggcctgacgtggctccgcgggctcaggcagccccgctcttgccccgcggcgccgctggagtgtgcaagagttggagggctgcttctgtccccaacccccatgagagacatcggacaggcagatgtaccgacaaagatgcacagacagacatcacgagaaggaaacatcaggtgaaggcccagacaggtaaaggtagagacaaagattgacacagacagaaaaaaaaaaaaaaggttaagacataggcaacaccaaccaactacctactctgtgccagggactgtgccaggcactgtcacaaccatgcccagagactcagtattttagtgtccccattttcactggaaaaactgagaaggattaccccattacccataaaacagcgctggctttaaaagttctccagtttcacagagcctggagacaggcggccctgaag

SEQ ID NO: 922211 - DNA, 658 bp, Homo sapiens
agccaaccccggactcagactctgaggaagagtttgtccctaattcattcttagttaaaagtggctccgccagcctgggggtcgcggcgaacggtaagtccctctctcttcctacttttgagggtttgtttttaaaattgtccttccgttgcggatgcctgcttgggccacttgccgggcggaggggcctggtgcgtggtgggatccgggggagctgggggcctgacgtggctccgcgggctcaggcagccccgctcttgccccgcggcgccgctkgagtgtgcaagagttggagggctgcttctgtccccaacccccatgagagacatcggacaggcagatgtaccgacaaagatgcacagacagacatcacgagaaggaaacatcaggtgaaggcccagacaggtaaaggtagagacaaagattgacacagacagaaaaaaaaaaaaaaggttaagacataggcaacaccaaccaactacctactctgtgccagggactgtgccaggcactgtcacaaccatgcccagagactcagtattttagtgtccccattttcactggaaaaactgagaaggattaccccattacccataaaacagcgctggctttaaaagttctccagtttcacagagcctggagacaggcggccctgaag

SEQ ID NO: 922212 - DNA, 634 bp, Homo sapiens
agaataaataaggtcctccacagtgcctacaagatagaaagtggctataatggtaactactatttttattatttgaatgtagcaccttcacatttatcattttttagatttacattttatttgccctcccttaagcaatttcaaggaataacatgcatgcattacagtgtgtaaagtacacttacatgtacaatgatattttgcaatgtatccttccctgcagccatagcccaaatcaagatataaaacatttttagcaaacgtataagattccttcatgcactcacctaccgtgagacaactactattctcacttctgtaagtattgcttagttttcaaattaagttgtatagaaacagaatcatgtggtgtggactcttgcatctggcttytttcactcaacatgaatgaatctgtgaaaaagaatctgtgagatgcatccatgctgttgcatttatcaatagtttttttttaattgctgtgaagcttctcattgtatgaatatactacaatttatgtatcagttcacctgttgatagacatttggaaagtttccagactattatgaataaagctgctatgaacatcactgttattatatcatcagcaccaccaagtagactgagaatacga

SEQ ID NO: 922213 - DNA, 565 bp, Homo sapiens
aggcttcacaatgaaacacctggtaaagcgtatctttgaatccttaagcttccctttcttctgcatctttacactttggaaatccatgaagctgctgttaggcagagcatttaatggggatcttgcatcacctcaatattcccacttgtatgcctattttgatgcagtcacactackagtctaatatgaaaaataacttttaaaaggcaatgaaaatgtaagtcaacctaaaaggaacatatatactgagactggtagattcagccatgcattatgcttaatatgttttaagttaacgtgaacttgtttgaaaagagatagaaaaatatatatacaaactagcagtgtttcatcccatttaacaagtatttgttaaccacctactaaatgccagacactatggtaggctgtggagctatagctttgaactatacacaaccccagcctccaaacctcttgctctctagaaggaaaggtgaacaagtgaatgagctattttctgtttggtgtgataggtgttttgggaccacagggaagcagtgtagacctcaggtgaaaattatca

SEQ ID NO: 922214 - DNA, 596 bp, Homo sapiens
gtgatctcggctcactgcaacctccgcctcccgggttcaagcaattctgctgcctcaacctcctgagtagctaggattacaggcgctgacccccatgcccggctgatttttttaatatttctagtagagacggagtttcaccaagttggtggtcaggctgctcttgaactcctgacctcaggtaatatgcccgcctyggcctcccaaagtgctgagattataggcgtgagccacagtgcccggcccatggttgttttatatagcctatgttcatcagctagaaagcttttatgcttactttctattttcttctaacagtaactttatttaaaacttttaaaaatagctttattgagataaaattcttctaccatactattcactcatttaaggtgtatgactcacattcatttaaagtgtgttttctaaggtcatgcaaccattatcacaatctaattttagaacattttaatctcccttaaagagaataatcacacccatcagctgccacaccccaccccaaccccacccttttcactcactcccccataccactgagaaatcactaatatactttctatctccataaatttgcc

SEQ ID NO: 922215 - DNA, 723 bp, Homo sapiens
gagaatctgtgagatagggtaaggaagagtgaagtgatcatgggacttagcattggaattcagcgctgcctgattgattcaatgttgccacagtggaaaacaacacaggacagaattcagcgggcacccacaaagagagcatttagaccagtcctagacagaggcaaayaatctatcccagtggtcagaatccgatttccagcaagcccttccaatgcatgctaaagtgctctggtgtcctaaataaatttgaaaggcagtctaggtcacaaaggctgcaattcctgggcacgtcttagtgctgtgcagggttcaaagccagtggacttggtgtgcttggaacctagttagacatcagccaggataagcaaaggactgcttaagtcaagcctttcccaaccctaggcagcacagctctgggggcaattctttccctctacttgaggaaagtagaggggagagtaaaaaggactttgtcttgcaacttggatacaagcttagccacagtggaatggggttccaggcagggtgctgaggctcccccattctagggcctaactcttggacatttctagacacctggggccagaaaggaacccattctcttgaaagaaaggaacaaatactgacatgattcatcacctgctgcttaaagagcccttgggcactgaataatcagcaaatggtagtgaggcagtactcatcatgggccttgggtgagac

SEQ ID NO: 922216 - DNA, 578 bp, Homo sapiens
cttggctcactgaaacctctgcctcctgggttcaagcgattctcctgcatcagccttctgagtagctgggattacaggcgccgccccccaaccacacccagctcatttttgtattttaagtagagatggggtttcaccatgctgtccagactggtctcgaactcctgacctcaartgatccacccacctcagccttccagtgtgctgggattacaggtgtgagccactgcgtctggcccccttcgtcttcctggctccccatagctgatctagtatccaatgcccttcacacttatttcttttctcccgttctatgtttaaaaattcatctttctgagttcttctctatttatccccctaaaaattctgagaacaaaacaacaaaactagattcttaaaacaataccagctcactatttctttgccctaaggccttcaaaaactcttaccgtcaatataaagtcaatctccttactgaattatataaataactccacaaatggcctttaccttccattctactttcatcttccacgcatctcccaatttaaccatcttcattttaacacctctctgtg

SEQ ID NO: 922217 - DNA, 578 bp, Homo sapiens
cttggctcactgaaacctctgcctcctgggttcaagcgattctcctgcatcagccttctgagtagctgggattacaggcgccgccccccaaccacacccagctcatttttgtattttaagtagagatggggtttcaccatgctgtccagactggtctcgaactcctgacctcaaatgatccacccacctcagccttccartgtgctgggattacaggtgtgagccactgcgtctggcccccttcgtcttcctggctccccatagctgatctagtatccaatgcccttcacacttatttcttttctcccgttctatgtttaaaaattcatctttctgagttcttctctatttatccccctaaaaattctgagaacaaaacaacaaaactagattcttaaaacaataccagctcactatttctttgccctaaggccttcaaaaactcttaccgtcaatataaagtcaatctccttactgaattatataaataactccacaaatggcctttaccttccattctactttcatcttccacgcatctcccaatttaaccatcttcattttaacacctctctgtg

SEQ ID NO: 922218 - DNA, 578 bp, Homo sapiens
cttggctcactgaaacctctgcctcctgggttcaagcgattctcctgcatcagccttctgagtagctgggattacaggcgccgccccccaaccacacccagctcatttttgtattttaagtagagatggggtttcaccatgctgtccagactggtctcgaactcctgacctcaaatgatccacccacctcagccttccagtgtgctgggattacaggtgtgagccactgcgtctggcccccttcgtcttcctggctccccatagctgatctagtatccaatgcccttcacacttatttcttttctcccgttctatgtttaaaaattcatctttctgagttctyctctatttatccccctaaaaattctgagaacaaaacaacaaaactagattcttaaaacaataccagctcactatttctttgccctaaggccttcaaaaactcttaccgtcaatataaagtcaatctccttactgaattatataaataactccacaaatggcctttaccttccattctactttcatcttccacgcatctcccaatttaaccatcttcattttaacacctctctgtg

SEQ ID NO: 922219 - DNA, 789 bp, Homo sapiens
gaaagagctctccccagccaaatctgggacaatctgagaacccaaactgtaattataatccaccaaataaaagaaatctacaaacccatactgatatagagaataaacaaagaatgaatggatggaggagaaggaaarctcctccttcaagtagactgccaactaacacacgtagaagggaggattgaattagaaacttaccatttggcaaccaccatagtaatgtttcaagcaagaaaaatcaatggatactaaaactagtgggtgaggcttgatgagaaacaatatatttacatagtctcaggatatctcccacaacataataattaaaaggaaaaatagttcagcggagaaacctggcagataccgccttaatcaagagatcaaagttaacatcaccagtcatgggactaatcaacagcatggtcgtctgatacactgcatcactctgatattcctgccagaagtacagaatctgaatctaatcattagaacacataagacaaaccccaactgagggtcattctatgaaggaaatgacctgtaatcttccaaaacatctaggtcacaaaaaacaagtgaagacttagagaaccatcccagaaggaagaaactaaacaccagaagacaacgaaatgcaacgtgtgatcctgtattggatcctgaatctgtagaggacattattgggacaatctgtggaattccaaaggggaccaagcattagaaagaaatactgtatcagtgttaattgccttcttttgatgactgaatcatggatacatacacagg

SEQ ID NO: 922220 - DNA, 511 bp, Homo sapiens
atcatgtgcctatcattttgacccccacattctcaccacctgtttctctgttggattagcaataaatagtgtgggatcccagagttcggggccttcgcagcctccacaatcgcgatggcctcctggtcccactttacctctcaaactgtctttttctcaatcctttgattctgccagactttgttacccccaygacctggtgttggatctgattaccccaacattcctggctgcccgatgtggggcaacaaagaccctggtgaaggaacactagagcgtgggaaagtggaggatgcatcgtcaaaggacactcgaggacgtctaaaagaaactcagcgggaaagctgagcactcggaagaaccagggtaacaatgagacaaagtgaaagcagactttctgcttatttaaatttcttaaggcatttatcacaaagagggggagtgaaagttagtactcagaatttgttatcactcactctttagtgcagtaaagcagttttgcccatggttc

SEQ ID NO: 922221 - DNA, 496 bp, Homo sapiens
atgtgcctatcattttgacccccacattctcaccacctgtttctctgttggattagcaataaatagtgtgggatcccagagttcggggccttcgcagcctccacaatcgcgatggcctcctggtcccactttacctctcaaactgtctttttctcaatcctttgattctgccagactttgttacccccacgacctggtgttggatctgattaccccaacattcctggctgcccgatgtggggcaacaaagaccctggtgaaggaacactagagcgtgggaaagtggaggatgcatygtcaaaggacactcgaggacgtctaaaagaaactcagcgggaaagctgagcactcggaagaaccagggtaacaatgagacaaagtgaaagcagactttctgcttatttaaatttcttaaggcatttatcacaaagagggggagtgaaagttagtactcagaatttgttatcactcactctttagtgcagtaaagcagttt

SEQ ID NO: 922222 - DNA, 496 bp, Homo sapiens
atgtgcctatcattttgacccccacattctcaccacctgtttctctgttggattagcaataaatagtgtgggatcccagagttcggggccttcgcagcctccacaatcgcgatggcctcctggtcccactttacctctcaaactgtctttttctcaatcctttgattctgccagactttgttacccccacgacctggtgttggatctgattaccccaacattcctggctgcccgatgtggggcaacaaagaccctggtgaaggaacactagagcgtgggaaagtggaggatgcatcgtcaaaggacactcsaggacgtctaaaagaaactcagcgggaaagctgagcactcggaagaaccagggtaacaatgagacaaagtgaaagcagactttctgcttatttaaatttcttaaggcatttatcacaaagagggggagtgaaagttagtactcagaatttgttatcactcactctttagtgcagtaaagcagttt

SEQ ID NO: 922223 - DNA, 604 bp, Homo sapiens
agcactgagaccactgacaactagtagccttcctaacaaaaatccttaacccagtaacccgcggatggcccaaatgcattccatcggtagcggcaactgctttgctaacagaagaaagtagaaaaataacctttagaggtaacctcattgtgagcacacctcaccagttcagagctatcctaagtgaaaaaagcaaaaaggtagcttataaaytcaatcttaaagtatggggctattctgttagaaaaaggtgatttaacattaaccactgaaaattcccttaacccagcaggcttcctaatgagggatttaaatcttaattaccatacaaaggtccaaccagaactgggagagactcccttcaggacaggaggatagatggttcctcctgggtgattgaggggaaaaaaacaaacacacacacacacaatgggtattcagtaattgatagggaaactcttgtagaagcagagttaggaaagttgcctaataattgatctgctcaaacatgcgagctgtttgcactcagccaagccttaaagtactcacagaatcaaaaaactctatctcaatcctgactcaaaaggttacctacaccctctct

SEQ ID NO: 922224 - DNA, 564 bp, Homo sapiens
agatgtattctggagaattcgacccagtcagagtgtgtgtacctttttccctctcagatttgaagcaacttaaaatagacctaggtagattctcagataaccctgatggctatattgatgttttacaagggttaggacaatcctttgatctgacatggaragatataatgttactgctagatcagacactaaccccaaatgagagaaatgccaccataactgcagcccgagagtttggtgatctctggtgtctcagtcaggtcaatgataggatgacaacagagcaaagagaacgattccccacaggccagcaggcagttcccagtgtagaccctcgctgggacacagagtcagaacatggagatgggtgccacagacatttgctaacttgcatgttagaaggactaaggaaaactaagaagaagccgatgaattactcaatgatgtccactataacacagggaaaggaaaaaaatcctaatgcctttctggagagactaaggcaggcattgaggaagcatacctctctgtcacctgactctattgaaggccaactaatcttaa

SEQ ID NO: 922225 - DNA, 613 bp, Homo sapiens
aattcaaagataaaaactatataattattctgataggaaaagcctttgatacaattccatctttgttcctgataaaactccttgtatttattatttagtaaaaacgccaaacacctcaaattaattaaaaaaaaacctcaaaaacttcaaacaatacttcagaagccwtttttaagcctctaaatctaatttccagtttgtaggaaatagaaatgataaagcagtaagttaaatatcacctgggaaaaacaatcagataaattcatttgggaaacatatgaaagtcaatttataaatatacaaatatagacacagagagagcaattatatcaatgtatatgattctcaggtgatcagtgatgacagttttagaaatgagaaaattattgccctagcaccgttgtttttttttttttcccacattttcttgcagatactagccaatccaattaagcaacacacaaaggaagaggcaaaaatgtttaaaacaagaaagaaaaaaaattattttcagacgttatgtgagaggtaacaattaaggctgattacctgcaggatcctagaaaggtctatggaaagcagatatgtctgtggtgatggtcacaggttcact

SEQ ID NO: 922226 - DNA, 621 bp, Homo sapiens
gcaacccctgcttttttctgttttccatttgcttggcagatttttcctctatgcctttattttgagcctatgtgtgttatcagatgtgagatcagtctcttgaagatagcataccaaaaggtcttggttctttatccagtttgccactctgtgtcttttaattgggacatttagacaatttatatttaaggttagtattgatatgtttggatttgatcctgtcatcatgatgttagctggttattttgcagacttatttatgtggttgctttatagaaaatgcctcagcatttgcttgtctgaaaaaracattatttctcttttgcttatgaagcttagtttggctggatatgaatttctgggttagaatttcttttctttaaaagtgttgattattgccccccaatcttattcactgcaaagtgattccattaaaacacaaacctaattaggttacctttctgccttgggagtcttcaatggttctgtatcatctacagcaaataccactgggcatgagtaacgtattagtttgcttgataacaaagtaccacacactgagtgacttaaaaacataaatttattttcatacaattctggaggctagaagtcaaagatcaa

SEQ ID NO: 922227 - DNA, 621 bp, Homo sapiens
gcaacccctgcttttttctgttttccatttgcttggcagatttttcctctatgcctttattttgagcctatgtgtgttatcagatgtgagatcagtctcttgaagatagcataccaaaaggtcttggttctttatccagtttgccactctgtgtcttttaattgggacatttagacaatttatatttaaggttagtattgatatgtttggatttgatcctgtcatcatgatgttagctggttattttgcagacttatttatgtggttgctttatagaaaatgcctcagcatttgcttgtctgaaaaagacattatttytcttttgcttatgaagcttagtttggctggatatgaatttctgggttagaatttcttttctttaaaagtgttgattattgccccccaatcttattcactgcaaagtgattccattaaaacacaaacctaattaggttacctttctgccttgggagtcttcaatggttctgtatcatctacagcaaataccactgggcatgagtaacgtattagtttgcttgataacaaagtaccacacactgagtgacttaaaaacataaatttattttcatacaattctggaggctagaagtcaaagatcaa

SEQ ID NO: 922228 - DNA, 595 bp, Homo sapiens
tggtgggtgcccctctgggatgaaggttccagaagaaggaacaggcagcaaactttgctgttctgcagcctccactggtagtacctagccaaacagggtctggggtggacctgagcaaactccagcagacctgcagcagagggacatgactgttagaaggaaaactaacaaacaggaatggtattaacaccaacaaaaaggacgtccacacagaaaccccatccgaaggtcaccaacatcaaagaccaaaggtagataaatccacgaagatgaggaaaaaccagtgcaaaaaggctgaaaattccaaaaaccggaatgccttttctcctccaaaggatcacaactcctcaccakcaagggaaaaaactagacagagaatgagtttgacaaattaacagaagtaggttacagaaggtgggtaataacaaactcctccaagctaaaagagcatgttctaacccaatgcaaggaagcaaagaaccttgaaaaaagttagaggaatggttaactagaataatcagtttagagaagaacataaatgaactgatggagctgaaaaacacagcacaagaacttcgtgaagcatacacaagtg

SEQ ID NO: 922229 - DNA, 645 bp, Homo sapiens
acaattgacttcctcttttcctaattgaatgccttttatttccttctccagcctgattgccctggccggaacttccaacactatgttgaataggagtggtgagagagggcatccctgtcttgtgcttgttttcaaagggaatgcttccagtttttgtccattcagtatgatattggctgtgggtttgtcatagatagctcttattattttgagatacatcccatcaatacctaatttattgagagtttttagcatgaagggttgttgaattttgtcagaggccttttctgcatctattgagataatcatgtggtttttgtctttggttctgtttatatgctggattacgtttattgattttcgtatgttgaaccagccttgcatcccagggatgaagcccacttgatcatggtggataagctttttgatgtgttgctggattcggtattttattgaggatttttgcatcaatgttcatcaaggatattrgtctaaaattctctttttttgctgtgtctctgccaggctttggtatgaggatgatgctggcctcataaaatgagttagggaggattccctctttttctattgattggaatagtttcagaaggaatggtaccagctcctccttgtacttctggtaga

SEQ ID NO: 922230 - DNA, 659 bp, Homo sapiens
cctgtctcattgccactgctgctgctggcacatgccaacaaggacaggttccactgccaccaccctatgaagtactttggctggccccgcccttcgaagtgttatgaccagtagtccaagagcaactgcccctccagtgcagcaggcttctaatctctagaggccagagataaaagccagggcaataacagtaccccagagttagagcatgcagttcaggagttctgggctgakccaaggccccctaaaatcttccattcacaatgccagtcaactgaacccaccttataccacaaccaaacccccaaagtcatcaaataaaataaaagggaaaaatacccatccaaaggagagtaacttcaaagactgaaggaacatgagaccacaaagatgagaaaggacaagtacaagaactctgaaaattcaaaaggccagagcatgttctttcttccaaatgactgcactagttcttcaacaatggttctcaacagtgttgagatggctgaaatgacagaaatagaattcagaacatgaataggcacaaagatcatccagagtcaggagaacagagaaaccaaattggaggaagctaagaatcacagtaaaatgatacagtagctgacagacaaaatagccagtatagaacagaatatagctga

SEQ ID NO: 922231 - DNA, 814 bp, Homo sapiens
ggcttgtgtattggtctgttctcatgctgctataaagaactgtccatgactggttaatttataaaggagagggatttaattgactcacagttctgcatggctggggaggcctcaggaaacttacaataatggtggaagagaaagcaaatatattcttcttcacaaggtggcaggagagagaaatgccaagcaaagccagaaaagccccttataaaaccatcagatcttgtgagaatccattcactatcacaagaacagcatgggggtaactgcctccatgatttaattacctcccaccaggtccctcccaggacatctggggattatgggaactataattcaagatgagatttggtgggggacacagccaaaccacatcattccactcctagccccttctaaatctcatgacctcacatttcaaaacataatgatgcctttccaacagtcccccaaagtcttagctccttccagcattaacccaaawatccaagtccaaagtctcatccaagacaaggcaagtcccttatgtctatgatcctgaaaaattaaaagcaagttagtcattatacttgctagatacaacggggatacaggcattaggtaaatacaccttttccaagagaagaaattggccaaaaaaaagggacttcaggcccaatgcaagtctgaaatccaatagggcaatcattaaatcttaaatttccaaaatgacctcctttgactccatgtctcacatccaggtcatgctgatgcaagaggtgggctcccacagccttaggcagctctgcccctgtggctttgcaggatacag

SEQ ID NO: 922232 - DNA, 814 bp, Homo sapiens
ggcttgtgtattggtctgttctcatgctgctataaagaactgtccatgactggttaatttataaaggagagggatttaattgactcacagttctgcatggctggggaggcctcaggaaacttacaataatggtggaagagaaagcaaatatattcttcttcacaaggtggcaggagagagaaatgccaagcaaagccagaaaagccccttataaaaccatcagatcttgtgagaatccattcactatcacaagaacagcatgggggtaactgcctccatgatttaattacctcccaccaggtccctcccaggacatctggggattatgggaactataattcaagatgagatttggtgggggacacagccaaaccacatcattccactcctagccccttctaaatctcatgacctcacatttcaaaacataatgatgcctttccaacagtcccccaaagtcttagctccttccagcattaacccaaatatccaagtccaaagtctcatccaagacaaggcaagtcccttatgtctatgatcctgaaaaattaaaagcaagttagtcattatacttgctagatacaacggggatacaggcattaggtaaatacaccttttccaagagaagaaattggccaaaaaaaagggrcttcaggcccaatgcaagtctgaaatccaatagggcaatcattaaatcttaaatttccaaaatgacctcctttgactccatgtctcacatccaggtcatgctgatgcaagaggtgggctcccacagccttaggcagctctgcccctgtggctttgcaggatacag

SEQ ID NO: 922233 - DNA, 579 bp, Homo sapiens
gctgatagccaacaaagcagcaggaacccttgtcccactgccacaaagacctaaattaattcttcagtcagcctgaattagcttgacagcagattcatccccagagcctacataaaaggatatagccctactagcatgctagtttcagcatttttttttctttttgagacggagtcttgctctgtcaccaggccagagcgcagtggcaygatccccactcactgcaacctccacctcctgggttcaagcaattttcttgcctcagcctcccaagtagctgggactacagatgcctgccaccatgcccagctaatttttgtatttttagtagagatggggtttcaccatgttggccaggatggtcttgatgtcttaacctcatgatccacccacctctgcccagtgctgagattacaggcatgagccaccgcgcccagccagtttcagcttttttcacctagagtagagaaaccgttaattcagaataagcctgaacttctcacctacacatctgtgaggtaataaaaagatattgctaaatgtatgcttatttgttatgggaattatagaaaactaata

SEQ ID NO: 922234 - DNA, 619 bp, Homo sapiens
cgtactctttaggaaactggagaaataaaggctatttaattgtaaagcaagcagaaaaagaaacataataatagaatagaaatcaatgaatttaaaaagagaaaaacaatgggaaaaataataaaataaaaaactgatttaaaaggtcaataaaatgtaggcatctttaggcagactaaccatgaataaaataaggtgrtgcaatttagtaatgtcagaaatgaaaaagagatcaagggaagctgaaaaatggcctccctccaaagaccttcttcctggaatttatgaatatgttggtaccttacatggcaaaattgactttgcagatgtgattgcattaagaatcttaagatagggtgattattctggatgcatgagtacaatcacaaggtctttatgagagggaggcagaaagtcagaggggagacaaaagattatgcagctttatttgaagatggctgaaagggccacatgcagcctctaaaagctggaataggcaagaatggattttcttctcgtgcctccagaaggaacgagtcatgccaacatcttgattttagacctgtaaatgtcttgacgacttctgttcttcagtactgaaagaaaataaatgtatgct

SEQ ID NO: 922235 - DNA, 603 bp, Homo sapiens
tgtctggtgagggctccgtctctgcttcaaagatggggccttctcactgcatcctcacatggtggaaggggcaaacaggctccctcagaacctcttttctaagggtgccaatcccattcatgaaggcagagccttcatgatctaaccccctcctaaaggcccacctctgaatactatcacattggggattaggctccaacatataaattttaggaggacaccaacattcaaaccgtagcaaacattaactggataattggtataataaggaattacygttaatgttttttaggtgtgataacggtattgtggtaacttttttttttaaagagaacacctttagagatacacataaaagcatttttggatgaaaggatatacctgggatttgcttcaaataagctaacaaagaaaaaatgtgtgcagagtgtaataaaacaaaatcgcccacatgttgctaatttttttaaatctgggaaatatatatatgggggctcataaaaatattcctttttcttttgtgtatgtttaaatttttccatgataaaagccttaaaaaggagaaaaaagtgaatatggtcctgcacactttggacttagggg

SEQ ID NO: 922236 - DNA, 603 bp, Homo sapiens
tgtctggtgagggctccgtctctgcttcaaagatggggccttctcactgcatcctcacatggtggaaggggcaaacaggctccctcagaacctcttttctaagggtgccaatcccattcatgaaggcagagccttcatgatctaaccccctcctaaaggcccacctctgaatactatcacattggggattaggctccaacatataaattttaggaggacaccaacattcaaaccgtagcaaacattaactggataattggtataataaggaattaccgttaatgttttttaggtgtgataacggtattgtggtaacttttttttttaaagagaacacctttagagatacacataaaagcatttttggatgaaaggatatacytgggatttgcttcaaataagctaacaaagaaaaaatgtgtgcagagtgtaataaaacaaaatcgcccacatgttgctaatttttttaaatctgggaaatatatatatgggggctcataaaaatattcctttttcttttgtgtatgtttaaatttttccatgataaaagccttaaaaaggagaaaaaagtgaatatggtcctgcacactttggacttagggg

SEQ ID NO: 922237 - DNA, 662 bp, Homo sapiens
aggccgaggcaggagaatcacttgagcccaggaggcagagattgcgtgagccgagattgcgccattgcaatccagcctgggcaacagggtgagaagccatctcaaaaaaaaaaaaaaaaaaaagtttaaactagcagaatgtaaaattctcagacatcctcactttcagagttataaatctgtattatcattactttctggtgccatttctagtagtgacaagacacttcctgattttatagaaagttaaggcattcctctaaagttctaaaggacagcactagagacttggcctaaggagactaagcctgcattcacacraaaagcgagatgcgctcctgagcagagcagggttttcatcatgctgggagccaagaaagtcctgcaattatttcaagaacaggttctacctattctcccagaaccacttgagaaagtttgtaaagtccctattacagagcttgtatgttacaacattgtattccaagtgagcacataaaaaataccaaaacttcagtttatagctcatctacctattcacttcaagtatgtatgtatatattttataaggcaaataatatatactgtggtccatgcatgcataaaccacatataagcatataaaaacatgtggtccatgttcttataaatcagtaaggaca

SEQ ID NO: 922238 - DNA, 627 bp, Homo sapiens
tcccacgtgttgtgggagggacccagctggagatagttgagtcacgggggcggttttccccatactgttctcatggtagtgaataagtctcgcgagacctgatggttttataaggggaaatccctttcacttggctctcatcctctgttgctgccaccatgtagacgtgccttttgccttctgttatgattatgaggcctccccagccacgtggaactgtgagtccgttaaacctcgttttctttataaattacccagtctcaggtatgtctttatcagcagtgtgaaaacagactaattcaatgcccctgcgtctgcctgcattcaacaacccagaagcccctcaagcctccttgtttcggtatttttagatggagtttcattgctgagacacggtggattcaatcatcggccgttggtgatygagctcaacctgtagtgtttcttcccttcagggaggatggggctggggtgaaagttctaaccctctaatcaggggcacatgcttgttcgtctggtgatcagcccccttcctgaagccctccaaggccccctcacagtgcgtcaccacattagcctaaactcatgtatgttagagggggttctctgtgaataaccaaagtcact

SEQ ID NO: 922239 - DNA, 565 bp, Homo sapiens
agtgggagtgtgtgtgtgtgtgagtgggagtgactgtgtgtgtgtgtgtgtgggagtgtgtgggagtgggagtgtgtgtgggtgagtgtgtgtgagtgtgtgtgtgttgttcactcctatattcttagtgcctagaacagtctctggggcataaaagaggttcaatcatcatttgttgaataaataacctaggacgatacaggaacacatgttacagacagaggagaggaaaaataggaaggaaaataggaaactcttatgaaagaggccgtgcttgagctgaccctgtgacctggtgaaggcccagcagagcacgtggcattccaggtgcagaagaagcaccaggtggtgacactccaggggacaggatgtgtggctgacatgaggtttccaccaaagccaatgaggaatygtggtgatggctgcaatcaggacacaattcaagcaatatcggtctgcgctgggcatgctccggggtccccgcattctgtcagttccccgtatgtattctcttaccctacaagacaggagtatgaggactgagaagccacctcccagaggcata

SEQ ID NO: 922240 - DNA, 737 bp, Homo sapiens
agttcaaatcccttcatgataaaaaccccccaaaaactgggcatagaaggaacataccttaacataataaaagccatatacgacagacacacagctagtattgtactgaatgaggaaaaactgaaatccttttctcttagatctggaacacgacaaggatgctcattttcaccactgttattcaacataggactagaaatcttagctagagcaatcagataagagaaaaaaataragggcatccaaattggaaaggaagaagtaaaattatccttttttgtggatgctatgatcttatatttggaaaaacctaaagactccagcaaaacctatcagaacggataaattcagtaatcagtaaagttgaaggatacaaaatcaacatataaatgtcagtagcatttttctatatgccaatagtgaacaatgtgaaaaagaaataaaaaaaagtaatcccacatacaataaccacaaataaaattaaacacctaggaattaaccaaagaagtgaaagatctctaaaaactatagaacactattgaaagaaattgaagaggaaacacaaaaaatggaaagatattccatgttcatggatgggaagaatcaatattgttaaatactactcaaagtaatctacatattcagtgcaatccctatcaaaatgccaatgacattctccacagaaatagaaaaaaaaatcctaaaatttacatgaaatcacaaaagacctagaatag

SEQ ID NO: 922241 - DNA, 755 bp, Homo sapiens
gtttctccttaaaaaatgggttttgcttctctactgcatcgtcaggctgcaaattttctgaactttcatgctctgtttctcttttaaaacagaatgcttttaacggcacccaagtcacctcttgaatgctttgctacttagaaatttcttccaccaggtaccctaaatcacctctctcaagttcaaagttccacaaatctctagggcagaggcaaaatgccaccaatctctttgctaaaacataacaagggtcacctttgctcccattcccaaacaagttcttcatttccatctgagaccacctcagcctggcctttattgttcatatcaccatcagcatttttgtcaaggccattcagcaagtcgctaggaggttccaaactttcccacattttcctgtcttcttctgagccctccaaattgttccaacttctgcctgctacccagttccaaagtttttgggtattctttcaacaatgccccactctactggtaccaataaactgtattagtccattttcacactgytgataaagacatatccaagactgggcaatttacaaaagaaagaggtttaattggacttacagttccacgtggctggaggaggtctcacaattatggcagaaggctaaaaacacttcttacatggcagcggcaagagagaatgaggaagaaccaacagctgaaacccctggtaaacccatcaagtatcatgagacttattcaccaccaggagaatagcacaggaaaga

SEQ ID NO: 922242 - DNA, 627 bp, Homo sapiens
aaatcgtggttgaaataataaagagaaaatgcactctggaaattgtggaagacaaataatcaagattaaaaaatatattttggccgcctttcaaactttatattattatattgattaaaagagaacatatgaattgtactttaatcagtgcccagtgaacattaaattgaccttggaatcatggccaatatcggagtgcaggtcttcatcaatttgattcagcaggcacagaagagccaaacrgagaagctatgattgtgcctgaaggctggaatttattatattttcagtaaaaacaattttgaaggaagatgatggttttcctctgaattgtttcattaaaatttgatcagagagaagaatgtttctatttaactccagaaaatgtaattttggcttccacccacagagagaagttttctacagggttgttcttggttgtggagagagcctgtataaattatatttccttgtgaagtgctattccaaaaatatagccatcaggaacaatacaatgtatccctcaaaagtatttgccttagaaaaaaactaccttcttgtggtaaattatactccatttataatatgtgcttgcatgccacttgagatgtcctcaagtatttggtt

SEQ ID NO: 922243 - DNA, 563 bp, Homo sapiens
gccctacctccgggttgctgacttggtctgaatgactgatttcagcaaaggtgtatggttagaaacttggtggggtggctaagttagaggactgtggtcccagaagcccttggggcagaacctgccctgacttgctgaaccagtatggagaaaattcccagagccagggttgggtcaccattagcaactgaagaggagcaaaacagacaaggaccttgaatagataaaggtttgaataatgaagagtccagaaaactattgaataaggttcaacatgaggataagagttgaccagttccttgacaaatcaaacgtgatacttgtgttttcagaatttaccatatcccaagtgtttarcacagtgtccagcatatagcaaatatgcaaatacctaaataaaaaataattggtgctgccactcatttttgcatttactcttttgttgccgtgtttcactttggtgttcttaataaatgcatcactggcatgatgataaggaagataattttgatgataatgatgatggaaggcactatcttttttttttttttttgagacggagt

SEQ ID NO: 922244 - DNA, 579 bp, Homo sapiens
gacttttttgatcaccactctaactggcatgagatggtatctcattgtggttttgatttgcattgttctaattaacagtggtgatgagctttttatcatatgttttttggccacataaatgtcttcttctgagaagcgtctgttcatatcctttgcccactttttgatgggttttttttttcttgtaatttgtctaagttcctttagattctggatactagacttttgtcagatggatagattgcaaaaattttctcccattctctaggctgcctgttcacttggatgatagtttcttttgctgtgcagaagctctttagtttaattagaggccatttgtcaattttgrcttttgttgccattgcttttggtgttttagtcatgaagtctttgcccatgcctatatcctgaatggtattgcctaggttttcctctcaggtttttatggttttaggttttacatttaagtctttagtccatcttgagctaatttttgtataaggtgtaaggaaggggtacagtttctgttttctgtatatggctagccagttttatccctgatgaacatcaatgtgaaaa

SEQ ID NO: 922245 - DNA, 731 bp, Homo sapiens
gccctaagctttccccattatagtcttatgacagtgtgttgtaatcttttgtgtctacgattagactgcaagcccagtagggagagagtctgcatctctcttgtttgctcttgtcgttatgtatatgccaagttcctaggacaatgtcttactcaataattcagtgaaagatgtgccggtgctcagggagaggtcaaagttggtgataggtatttgtagatatctgtttcctacataaagagagtgagaatgggagggcgaggcattgcctcacctgggaagcgcaaggggtcagggagttccctttccgagtcaaagaaaggggtgacggacgcacctggaaaatcgggtcactcccaccygaatattgcgcttttcagaccggcttaagaaacggcgcaccacgagactatatcccacacctggctcagagggtcctacgcccacggaatctcgctgattgctaacacagcagtctgagatcaaactgcaaggcggcaatgaggctgggggaggggcgcccgccattgcccaggcttgcttaggtaaacaaagcagcctggaagctcgaactgggtggagcccaccacaactcaaggaggcctgcctgcctctgtaggctccacctctgggggcagggcacagacaaacaaacagacagcagtaacctctgcagacttaagtgtccctgtctgacagctttgaagagagcagtggttctcccagcacgc

SEQ ID NO: 922246 - DNA, 679 bp, Homo sapiens
caggctggagtgcagtggcgcgatctcggctcactgcaagctccgcctcctgggttcacgccattctcctgcctcagccccccgagtagctgggactacaggcaccagccaccacacccagctaattttttgtacttagtagagacggggtttcaccgtgttagccaggatggtctcaatcaatgtgttattctgacataacatgtattagttatctattgctgttgtaacttagcagcttaaaacaacatttgttatgtcacaatttctgttgattaggaatcaggagcagtttaggtgggtagttctgactcagggcctctctgtaggctgcaatgaagttatcagttgaggctttagtcatctcaagtcttgactggtggagaatccacttccaagttccttcacacagctattggctagtctcaaaaatctgcttctaagctcattcaggtggacctctccacagtgytgctttacatcatggtagctctttccccgaagtaagccatcatgtgtgagagaacacctaagacagaagccatgctctttaatttaattaatttatttatttttgagacggagtcttactctgtcacccagactggagtgcagtggcacgatctcagctcactgcaagctctacctcccaggttcatgccattctcctgcctcagcc

SEQ ID NO: 922247 - DNA, 585 bp, Homo sapiens
tctcaaaagaagacatttatgtggccaacaaacatttgaaaaaaagctcatcatcactggtcattagagaaatgcaaatcaaaaccacaatgagataccatcgcactccagttagaatggcgatcattaaaaagtcaggaaacaacagatgctgcagaggatgtggagaaatagaaacacttttacactgttggtgggagtgtaattagttcaaccattgtggcagacagtgtggcgattcctcaaggatctagaaccagaaatatcatttgacccagcaatttcattactgggtatatacctaaaggattatagtcattctactataaagacccatgcgcrcgcacacacacacacacacacacacacacacacatatattttgataaaaagtaaactttaatgtcgaaaatgcaaacttggggagtgcagaagtatcacacgcaaggctgtcacttcacacttggagagtttcacagcgcccaggcagaggtgctccttacatcccagatgatgcgggggccgggcagagccgctcctcacttcccagagggtgggcgatgggcagaggtgctcctcacttcc

SEQ ID NO: 922248 - DNA, 624 bp, Homo sapiens
gcccggtgaaaattctagtgcagtgccggtgggccggcagtgctgggggcccggcgcacgctctgcagttgctggcccaggtgctaagcccctcactgcccagggccgggagcaccggccggctgctccaagtgtggggccactgagcccacacccacccggaactcgcgctggcctgtgagcacygcacacagccccggtttccacccacgcctctccctccacacctcccacaagcagagggagctggctcccgcctcagccagtccggagaggggctcccacagtgcagcggtaggctgaagggctcctcaatcatggccagagtgggcaccaaggccaaggaggcgccaagagtgagcgagggacgcgagggctgccagcacgctgtcacctctcaaggtcatctaaatatatatggacccaacactggagcaccccgattcataaaacaagctcttagagacctgcaaatagacttagataaccacacagtaatagtgggagatttcaacaccacactgaccatattaggcagattatcaaggtagaaagctaacaaagatatttggaacctaaacttgacaattgaccaaatggacctaacagacatctacagaacac

SEQ ID NO: 922249 - DNA, 634 bp, Homo sapiens
agtacatcctgggccagcgcctggaggagctggactgcatggagaccagaacagctactggggccgtggtgaggggcccccagtgccatctgttggtcccatgcacattgactgagcacctactgtatgccagtgaaagagaataaaagggacaaagaggacttcgtggagttgagcaggcctgcctcccccaccgtgaagcccactcctaggctggcctagtgctcctttccttggtgggcagggggtgggcaaggatgctgtgccctgaggccctgtgccacctcaccagccctccggcccgcaacttcagtacatggtggtgatggtcggctacccagacttccttttcaaactgggtctgtggacaaggagtatgaggtgggactgtgtccctgcctgcccarcctgaccacagcctctctgctaatggcacctgggagggcaggtggcctgcatggcccggttgtggcgctatctgcagccttgccctggtctgcggctgagtgctgcccatgcccctcatagtttaaggtccatgggaagacctattacaagaacatcttgaacagcatctgcttcagcatccagctctcagtcaagaagactgggcaggagatggacaagtccatgt

SEQ ID NO: 922250 - DNA, 670 bp, Homo sapiens
gtgggactgtgtccctgcctgcccagcctgaccacagcctctctgctaatggcacctgggagggcaggtggcctgcatggcccggttgtggcgctatctgcagccttgccctggtctgcggctgagtgctgcccatgcccctcatagtttaaggtccatgggaagacctattacaagaacatcttgaacagcatctgcttcagcatccagctctcagtcaagaagactgggcaggagatggacaagtccatgtgggtgcctggcccagagctggggtgtcagaggagggtcatgaggcagtagccgggaaggtggtggcccagcccagaggtggcacagaagatgcattgtcaggagatgggtgtggctgggctgccaggaatgtcctgcagtccgggctctgtgacctttytacagaggtggttgttcccccgacaggtgctcattgccttctatctacgcagcaagaaccagatgggtttggggtgtgtttctatacctattgggtccatatataggtgggtctcccacttgaccacaccctccctatagtgtaaccacagaatgtcctgcagtccaggctctatgacctgacttcagtgatcaagacataacatactctggccaatgcatgcccggtggcatcctaggtggcaagcttctatcaaga

SEQ ID NO: 922251 - DNA, 715 bp, Homo sapiens
ggtatgtgcgtgctcagagtagcactgacacgccagccccctgccttcttaacgccctccagactttgggcgcagatgagcacgggaggaaggccaacgtggggctgagggtggctcggggcgggcctgcagttgccccttggcacaaacagcctgggtcccatggacaacatgtcgatggcagcaggaggcagacaggcttctgggtggaaaggggcaggcctggggtgaagccccactttcaagccagggatggtctgaagcctgggcccaaggctgtcagttctgggtggagtctgcagcctgcagtgatgacttacgttactttttctgggtrggcccatggccacccatggaccaatcagcacgcacttcgtctctgctgagccataaccccccccccgccaccccccacgccagccgactcacacacagatatggggactattagctgctgaaaggtgctactactcactcctggtctcctcttcactgagagctgaacactcatcaggatgacctgcctgcagaaagaagctacccacttcggtctctgagagctattctgtcactcagtagagctcttctctgccttgcttttgctccggttgtacctcgttcttcctggatgtgagacaagaactcggtgctggccaaacggcaggactgaaggagttgtaacacaaacagggctaaacacctcctcaccccttac

SEQ ID NO: 922252 - DNA, 715 bp, Homo sapiens
ggtatgtgcgtgctcagagtagcactgacacgccagccccctgccttcttaacgccctccagactttgggcgcagatgagcacgggaggaaggccaacgtggggctgagggtggctcggggcgggcctgcagttgccccttggcacaaacagcctgggtcccatggacaacatgtcgatggcagcaggaggcagacaggcttctgggtggaaaggggcaggcctggggtgaagccccactttcaagccagggatggtctgaagcctgggcccaaggctgtcagttctgggtggagtctgcagcctgcagtgatgacttacgttactttttctgggtaggcccatggccacccatggaccaatcagcacgcacttcgtctctgctgagccataaccccccccccgccaccccccacgccagccgactcacacacagatatggggactattagctgctgaaaggtgctactrctcactcctggtctcctcttcactgagagctgaacactcatcaggatgacctgcctgcagaaagaagctacccacttcggtctctgagagctattctgtcactcagtagagctcttctctgccttgcttttgctccggttgtacctcgttcttcctggatgtgagacaagaactcggtgctggccaaacggcaggactgaaggagttgtaacacaaacagggctaaacacctcctcaccccttac

SEQ ID NO: 922253 - DNA, 707 bp, Homo sapiens
ctcctggtctcctcttcactgagagctgaacactcatcaggatgacctgcctgcagaaagaagctacccacttcggtctctgagagctattctgtcactcagtagagctcttctctgccttgcttttgctccggttgtacctcgttcttcctggatgtgagacaagaactcggtgctggccaaayggcaggactgaaggagttgtaacacaaacagggctaaacacctcctcaccccttacaccattacaggcaaagagaaggagaaaagagctgtggcccttcagggagcccagacctagggactccctgagccagggctttgacaccctctttggggctctgcagttaatggcatctccaagcttctgggcaccacagtgttcccctcctctagacaagagtatccacagcagaaactacttgtgatgcatcttatccagccacaggcttgcatggagccagcacttgtgccggcccttggagctgcctgacccagcgcagcagccggcatgcctggctgtgcacagtggctggaccttgtgcttgcttgctcacacaccccttgctgttctgagcctggatcatgcttggcaggcatgggatctgggcagatagtgcaagctgagcacatcctgccaggttgggtggatgtaatgagcccagcaagcccaaacaaaactcaggcaaaggcctcaccagccacaa

SEQ ID NO: 922254 - DNA, 650 bp, Homo sapiens
ccaggcatcacaagccactgggaacaagggtacgggtccagctctttgccctcaaggagctcagagtttagtgatgaaggcagacagcaaacaagcacctaaaaagagccccaaaacacatgaagcaaaacctgacaactgacggagagacatacaacccaataatcatggctgacaggtcaatacgcctctctcaacaatagacaaaaagtgaggatgcagaagactcaacaggatccgtcagctcgacctatgcagcatccacagaacaccccactcaacaagagcagagggcccatccttctcaaatacacatggaacattctccaggtaggctagggcgtatgctgggccataaaatacatttaagtaaatttaaaaggactgaaaccatamaaaatatgttttccaaccacaatgggattagcagaaggataaattagaaatcagcagcaggagatgtgggaaacacacaaatacttggaagttacacgacgcagttttaaataatccatgggtcaaagaagaaatcacaaaggggattattaatagaaagtattgtgagccgcatgaaaatgaaaacacaacataaccagtcacaaatacataaattaggtaatttcaaacagggaaaggtggtgtgaagaaaa

SEQ ID NO: 922255 - DNA, 575 bp, Homo sapiens
agcagactctgtctcaaaagtaaaataaaataatgaaaagataaactacagactggaagaaaatattttccaaacacctcattgataaactacttgtgaccaaatatgcagagaactgttacaatctatagtaagaaactaaacaacccaattaagaaatggacaaaatattttaatagacatcaaagaagttacatggatggcaaataaatatattaaagatgctcaytgttatttttcttattttattcattagaattatcattagtattctaaatttatattttcaattttagtatttttaatatactcatgtgcgggtttgttatatgggtatattacatgatgctgaggtttgggcttctaatgattccatagcccaaatagtgaacacagtgccccacaggtagtttttcaacccttccctgcctctggtcccacctcttggaatctccagtgtttattgttcccatctttgtgtctgtgtatacccaatgcttaaggtccaacttataagtgaaaacatgtggtatttggttttctgttcctgccttagtttgcttagcataatagcc

SEQ ID NO: 922256 - DNA, 575 bp, Homo sapiens
agcagactctgtctcaaaagtaaaataaaataatgaaaagataaactacagactggaagaaaatattttccaaacacctcattgataaactacttgtgaccaaatatgcagagaactgttacaatctatagtaagaaactaaacaacccaattaagaaatggacaaaatattttaatagacatcaaagaagttacatggatggcaaataaatatattaaagatgctcactgttatttttcttattttattcattagaattatcattagtattctaaatttatattttyaattttagtatttttaatatactcatgtgcgggtttgttatatgggtatattacatgatgctgaggtttgggcttctaatgattccatagcccaaatagtgaacacagtgccccacaggtagtttttcaacccttccctgcctctggtcccacctcttggaatctccagtgtttattgttcccatctttgtgtctgtgtatacccaatgcttaaggtccaacttataagtgaaaacatgtggtatttggttttctgttcctgccttagtttgcttagcataatagcc

SEQ ID NO: 922257 - DNA, 680 bp, Homo sapiens
ccttcttcccaatccaaagcctcctttgcgtcctcctcttgtatcccccgaccttaacccacaagtataagatacctctactccccccttggtgactgatcacgcaccccttaccatctcattaaaacctaatcacccttaccccgctcaatgccaagatcccatcccacagcacgctttaaaaggattaaagcctattatcactagcctgctacagcatggtcttttaaagcctataaactctccttacaattcccccattttacctgtcctagaaccagacaagtcttacaggttagttcaggatctgtgccttatcaaccaaattgttttgcctatccaccccatggtgccaaacccatatactgtcctatcatcaatacctccctctacaacccactattccgttctggatctcaaacrtgctttctttactattcctttgcacctgtcatcccagcctttcttcactttcacttagactgaccctgacacccattaggctcagcaaataacctgggccgtactgccgcaaggcttcacagacagcccccattacttcagtcaagctcaaatttcatcctcatctgttacctatctgggcataattctcataaaaacacacgtgctttccctgctgatcgggtccgactaatctcccaaacctcaatcccttacaa

SEQ ID NO: 922258 - DNA, 680 bp, Homo sapiens
ccttcttcccaatccaaagcctcctttgcgtcctcctcttgtatcccccgaccttaacccacaagtataagatacctctactccccccttggtgactgatcacgcaccccttaccatctcattaaaacctaatcacccttaccccgctcaatgccaagatcccatcccacagcacgctttaaaaggattaaagcctattatcactagcctgctacagcatggtcttttaaagcctataaactctccttacaattcccccattttacctgtcctagaaccagacaagtcttacaggttagttcaggatctgtgccttatcaaccaaattgttttgcctatccaccccatggtgccaaacccatatactgtcctatcatcaatacctccctctacaacccactattccgttctggatctcaaacatgctttctttactattcctttgcaccygtcatcccagcctttcttcactttcacttagactgaccctgacacccattaggctcagcaaataacctgggccgtactgccgcaaggcttcacagacagcccccattacttcagtcaagctcaaatttcatcctcatctgttacctatctgggcataattctcataaaaacacacgtgctttccctgctgatcgggtccgactaatctcccaaacctcaatcccttacaa

SEQ ID NO: 922259 - DNA, 596 bp, Homo sapiens
agctaacccatccttcccgcacagacattataatgaagcagcatcctctctgctccatgtccaggcagatctctaggcatttagtgtgaccacttgcttgaatcagcagcctgagctggcccatccttcctttgcatactgtggtaaagtgccgccttccctgccccaagttcaggtgtatttacctgtataaaaataattcaaagcacacatttgcatggatttgcagactgaayaacctcaccctccatgtgtggagattgtggtgcatcagggccctctacactccacacacagacagatctccaggcatctggagcactccctcccctgagttaggagtctaggttgcctccattccccatgcagagaacttgaggccaagagattcctcaactctgtggctaggcacactaccaggtgcttgatggccacctgctagattctgccttggtgctggggcttgtgtctggcattaggggacctctatgcgggcctgctcaatctggccctgcccatcttgctccctgaactgccctgccccccggcagggctgagcaggtaactcagatcactgtgcaatctatggatcagac

SEQ ID NO: 922260 - DNA, 681 bp, Homo sapiens
aaaaagggaatacttacttacaccctgttggtgggaatgtaaattagttcagtcactgctgagagcagtttggagatttctcaaagcacttaaaacagaactaccatttgacccagcaatcccattactggatatatatccaaaagaaaacaatcattctaccaaaaagatacacgcacttatatgttcagcacaacactattaataacagcaaagacatgaartcaatctaagtgcccatccatggtggattggattaagaaaatgtagtacatatataccatggaatactatgcttccataaaaaagaacaaagtaatgtcttttgcagcaacttggatgcagtttgaggactttcttctaagcaaattcacacaggaacagaacaccaaatagtgcatgttcttatgtctaagtgagagctaaacactgtatacttatggacataaaaatggcagcagtagacagtggggaccattagaggagaaagggagggaaggggacagggttgaaaaactaaatattgggtactatgctcactaccttggtgatggcatcaattgtacatactccaaacatcagcctcccacagtaaagctatgtaacaagcctgtgcatgtacctcctgaatataaaataaaagttgaaactactttaaaaataattttattaaagttactt

SEQ ID NO: 922261 - DNA, 631 bp, Homo sapiens
tgttaaaggcattcatttttataacagaagcagcataaagctttggaaaatttgcagcctgacaatgtgatagaaaagaaaatcccagcagggcatggtggctcacgcctgtaatcccagcactttgggaggctgaggtgagcacatcacctgaggtcaggagttcaagaccagcctggccaacatgggaaaaccccgtctctactaaaaaaaaaaatacaaaaaattagccaggcgcagtggcgggtgcctataatcccagctactcgggaarctgaggcagggagaattgcttgaaccggggaggcggaagttgcagtgagctgagattgcaccacttgcactccagcttggacaacagagcgagactccatctcaaaaaaaaagaaaaaagaaaaaaagaaaatcccattttttgagaagaaatcctagacaactacagaaatttgcataagtcatgaggagccgaatgttaatccctaagaaaatggggaaaatgtctccagggcatgccagaggtctttccagcagcccctcccatcaaaggcccagaggcctaggaggtaaaagtggttttatgggctgagcccagggtctccgtgctgtgtgcagcctagggacttggcaacct

SEQ ID NO: 922262 - DNA, 559 bp, Homo sapiens
ccaggcatccctgtgctcttgggggcttgggaagcccccctccactggaaggcttgggagtgcctgctcccactgcctggcctctcccgactcccaatgcccactccaattttggagcaaagtggcggccaagcccaggcactgtcacaatctggctgagtgtgtacatgctcggagcagtactgaaacaccagccccctgccacctcagccccttctggactttgggtgctgatgagcacagcagggaggccaagggacagcagaggacagctcagcatgggcctgcaggcatcccttggcacaaacagcctgggcaccatgggcactatagacagcaggttgatggctggcagcaggaggcagacaggctcctaggtggaaaggggtgtgtcccyggtgaaaccccaccatcaggccagaggtggcctaaagcataggggctgggctaccagtttcgtaaatcagagtgagaacatatggtactttttctggaccctgctgtggccacccatggaccaatcagcatgcacttcctttcctctgatgcccataaaagc

SEQ ID NO: 922263 - DNA, 622 bp, Homo sapiens
cgtttgaagcctagtggttttgtttgtttgtttgtttttgttgttgttgttttgagatggggtctcactctgtcacccaggccggaatgcagtggtacaatctcggctcactgcaacctccaactctcaggttcaaacaattctacctcagcctcccaagtagctgggattacaggtgtgtgccaccacacctggctaatttttgtattttttggtggagatggggtttcgccatgttggcgaggctggtcttgaactcctgatctcaagtgatccrctcaactcggcctcccaaagtgctgggattacaggtgtgagccactacacccagcctgaagcctagttttaacatgaactatttggcacccttaagcaagttactttagcctctttaagcctcagtttcctcatctgtaaaatggagaaaacaatagcacctaactctaagggctatagaaagaagtgaggcactgcagcatctgaagtatttggcacctggtacctaacaagctgtcaaatattaattattgttgcttatattactatactgttacaataattattagtaatcttactgagtaacaaacattacctgttgcataaactaggtaggggcagtgtg

SEQ ID NO: 922264 - DNA, 594 bp, Homo sapiens
agacaagtagaaattgtgaatgttgcatccctcctaagacagagaaaaacttcagattcattttgcagtaacactcattgaccgctccttgagcaaaaataaatccttgtttcctttttggaggatcaggctgaagtaccaaagaaaagtgctcccaaaacccgtcattttgaaaccatcatctaaagtgtcatggtactcgctcttctttgagctattatatataaattgaaagattttaattagaggtcaacattaatttacatctgaaactagcaaagtagttcatgactctttttcacatcacacatacccatactacttctcagagtcaactggyctctcatctcttcattatatactaaataagcaaggtatgtctccaccttgaaggtatagcacctccttataagaagtaagacaggtttctctagaaatgtccacctaaccaccaccattggaatagaggacagagtctgagggcagtggctcaggcctgtaatcccagcactttggaaggctgaggctggtggatcacctaaggttaagagttcgagaccagcctggccaacatggtgaaatcctgtctctact

SEQ ID NO: 922265 - DNA, 594 bp, Homo sapiens
agacaagtagaaattgtgaatgttgcatccctcctaagacagagaaaaacttcagattcattttgcagtaacactcattgaccgctccttgagcaaaaataaatccttgtttcctttttggaggatcaggctgaagtaccaaagaaaagtgctcccaaaacccgtcattttgaaaccatcatctaaagtgtcatggtactcgctcttctttgagctattatatataaattgaaagattttaattagaggtcaacattaatttacatctgaaactagcaaagtagttcatgactctttttcacatcacacatacccatactacttctcagagtcaactggtctctcatctcttcattatatactaaataagcaaggtatgtctccaccttgaaggtatagcacctccttataagaagtaagacaggtttctctagaaatgtccayctaaccaccaccattggaatagaggacagagtctgagggcagtggctcaggcctgtaatcccagcactttggaaggctgaggctggtggatcacctaaggttaagagttcgagaccagcctggccaacatggtgaaatcctgtctctact

SEQ ID NO: 922266 - DNA, 565 bp, Homo sapiens
aaggagacagggtggggcaggggaagacaggaagaacagttgggaagaaacaccaatgttccaagcagaggaaaagggcaggtgcaaggacaggaagtgaaagagctcatcgtcctctcatggaactcttgaaatgatgcccagacttaaacaggaaggtttgatgattctcagggttggttattgactcaacaaagcctgctcccaattttctcctagaaggtagataaagaagacttgatgtgtccaccatctatttttgaaagcctggtatttgtgagcattcccttctgtggatcaaccagaactctcctagtcacccyttctgtgatgactgtcatctcctctaagtgtaaaaggagccagaatttctgcctattattttcagattgcttcctctacaggaaattgtgtcaattcatttggacatttgtggtttcactgtactctcgggccattacatcattatgtggtaactcagaactccagtggcacattatcagagctgactatttctggaagccaggagataacaaacaaagcggtttcatttggcctataagca

SEQ ID NO: 922267 - DNA, 571 bp, Homo sapiens
gagggtggagctctcatgaatgggactagagtcgttactaagagaacccagagagcatgttcgccccttctaccaccatgtggggactcagtgagaaggcagaatctctcaagtaggggggagccctcaccagacactgattcttctggtaccttgaccttccagtctctggaactgggagcagtatgtctctatttataaattacccaggctaaggtgtttsttatagcagccctaatggactatgacaggaagctactgtggggtcctggtgaaatgtctgcgacttggcgcacagccaccgcgtggcagtgaagatagggagaagtgggcagattagagatatcctttggaggtagaaccaatggtatctgtggctgaattgggttgaggacaggaagggaaactgaggaaagaaaggtgactttgatgttttgatatcagacattagttggttagtggtgccatttactgatttggggaagccgcagttaattgggcatttaatttgtaacaatctaagtttaaggcatgtggtgtatggtgtggtatgccacacagatcccccttc

SEQ ID NO: 922268 - DNA, 571 bp, Homo sapiens
ctctaggctgggggagaaaagccctatgaaaatttgagggcacccccctctttttttttttgagacggagtcgcgttctctcccccagcctggagtgcagtggcaccatctcggctcactgcaacctccgcatcccggattcaagcagttcttctgcctcagcctcccaagtagctgggactacaggcgcatgccacyacacccagctaatttttgtatttttagtagagatggggtttcaccatgttggccaggatggtcttgatctcttgatctcctgacctcattatccgcccgccttggcctcccaatgtgctgggattacaggcatgagccaccgtgcccagcccaagggctcattttatcagtgaagttcataggagtccaagtagctgggggcgtgtcagaacatgctctccaaaaggaaggacactttattgaatcatgcctcccctatcattaagaatgaatcacaatatgccaaaagcctctttggcttctggaggcagtccaaggagaatcgttccctggcagtaggactgagcctaatggaattggcaccatgtgccag

SEQ ID NO: 922269 - DNA, 668 bp, Homo sapiens
ggaagtgtctgtgaggctatttctggaagacatgagtgtctgaatccatagactgagtaaagaagatccacctccaccaaggtgggtgggcactgtccaatctgctgagggcccgaatagaacaggaaggctgacgaagggtaaatctgcactctgctggagctggaccatccatcttctccggccccagaactccaggttctccggcctttggactgagactgaattgcagtggcagctttcctgagtctcccgctggcagagagcaggtggcaggacttcttggcctccaatcatcatgtgagccaattcccttaataaatctcatctattctcttggttccatttccctggagaaccctgactaatacaggggatgtgtgtgaatctcctaaaaatggccctaacagtatttcccastccagttgttcttccagaaccctgacaccacccccagcaagaggtggactctttgtcccctccccttaaactcaggtgagcctttgtgcctgccttgctcttagggtatggtgggagtgatgctgtggaacttctgagttgtcacaagaggttgtgcagctcactcttgggatgtttgccaccaaaatcccaccatcccttggagaggccccttgcaggtgtcccggctgatggtcctagcggaagtt

SEQ ID NO: 922270 - DNA, 559 bp, Homo sapiens
  misc_feature 456: n = A,T,C or G
tctaaaattcaggctaggcatggtggctcatgcctgtaatcccagcagtttgggaggctgaggtgggaagatcacttgaagtcagttcaagaccagcctgggcaacaaagagagatcccccccctcaacccatgtatataaaaatagagataataaaattagccagtgcagtggcatgcacctgtaatcacagctcctcaggaggctggggtgggagcccaggagattgactctacagtaagcaatgattgyaccactacactccagcctgggcaacaacggaaagaaaaatcctaaaattcatatggatatgtaagtggcccaaaatagccaaaacaatcttgaaaaagagaaacaaggtgggaggacttgtacttcccagtgtcagtggggttatgttacagtaatcaacacagtgtggttcaggcataaggatacatatatagatgaaggcantaaaattaagagtccagaaataaacctgcacatctatggtcaattaatttttgacaagagtggcaagatcattaagtaggagaaagaatactgttttcaacat

SEQ ID NO: 922271 - DNA, 713 bp, Homo sapiens
gagacttccttctccctgtggtgttcagcctctcctctggcctccctcccgatggatccctgtggtgccaggcaggaatggcctgcttggggacccagggagctcccagggcctttcccgctgcttcctctacttctgtatttcactcgactctgtaaactaactcagctccaggtaaggatggaaacttcccccgaaaacagaccttcattttytccagtgggggtgtatgtttgggagaggatgctctccctttcccacttccacagtttgggcactcacagtatttggagtgtctcctgggtcctgcaggagcagtctgcttccttcagtgggtctgtgagtcctcttggggttgctggcttgttcttgcaggttctagattatcaccatcatcacacagacttcctattatgtcttttttgattatagtcatgctagtaggtgtgaagtggtatttcattatgtgtgtttttttgttgtggtaaaatatacataatgaaatttaccatcaaatccatttgtaagctgtacagttcagtgacattaagtatatttaaattattgtatagacaccaaccccatccatctctaaagcttttcatcttcctacactgaaactcggtgcccactaaacaataactccctatttcctgctctccctagctcctggcaaccaccatgctactttctgtttctgtgaattcactact

SEQ ID NO: 922272 - DNA, 591 bp, Homo sapiens
tctttttactctaatgtcacataactaaaggggtaagaagtttctcacagacatttttaataagagaatgaatagcacttatgagagctctgcccccatggtctattaatctcccaaagccaccacctcctaataccatcaccctgaggataaggatttcagcctatgaattttagggcaacatacatattcagaccatagcacacaatatacaaaaagaatctcaaaattgatcaaaaacatatatagatgctaaaactataaaactgttagaagaaaacataaggtgttttccctaaccttggatttggcagttgattcttagctttaacaccaaaaacacatgccaaaaaggaaataaaaataaattgcactttaaaaatctcaaagctttcrgtcaataaaagccattagcaagattgtgaaaaggaaacatacaggaatggataaaatatctgtaaatcagatatctggtaagggtttagtatccagcatatagaaagagctcttacatttaaacaacaaaagacaaacaacccaatgggcaatcgaattgaataagcacttctccaaagaagatatacagatggc

SEQ ID NO: 922273 - DNA, 517 bp, Homo sapiens
cgtcatcattttgataccaaaacctgacagagacacaagaaaaagaaaacttcaggctaatattcttgatgaacatagatgcaaaaatcattaacaaaatactaaccatccaaatccagtagcacatcaaaaagctaattcaccaaaatcaagtaggctttatcccttggctgcaaggttggttcaatatatgcaatttaataaatgtgtctcatcacataaacaacactaaaaccaaaatcacatgatcacctcaaaagatgcagaaacagcttttgataacattcaacatttcttcatgtcaaaaacactaacaacctaagcactggagatacatacctcaaaataataagagccatstatgacaaatccacagccaacatcatactgaatgggcaaaagctggaagtattccctttgagaaccagaacaagacaaggatgcccactctcaccactgctattacacatagtactgaaagccctagccagagcaatcaggcaagagaaagaaataa

SEQ ID NO: 922274 - DNA, 641 bp, Homo sapiens
tgatcattgcatcttttttgtttcatccatttagcgactcttgtgtttttatttgagagtttagtccatttacatttaatgttattattgataagtagggagctactcctgtcattttgttactgggtttctggttgttttgtggtcttcacttttttctttcattccttcctgtcttccttttagtgaaggtgattttctgtggtggcawaatttaattatttgctttttattttttatttatccattatgtttttcaatttgaggtaggcatgagaattgcaaatataatcttacaacccattatttgaaattgatgacaacactgattgaataagcaaagaaacaaacacaaagaagactaataaaaactctgcactttatcttcatacctctgctttttaatattttacatttctctttgtgtcttattgtaatgtctatgtcttgaaaagtggctgtagactttttttagttagttcaccatttattccttccacttaagaaaagaggagtttacacactgtaattacagtgttataatattctgtatttttccgtgtgcttactattacctgtgagttttgtaacttcaaatgatatcttcttgctcgctaaaattcttttctttcagatgaaat

SEQ ID NO: 922275 - DNA, 595 bp, Homo sapiens
gtgatacccaggcaaacaaggtctggagtggactcccagcaaactccagcagacctgcagcagaggggcctgactgttagaaggaaaactaaaaaacagaaaacaatagcagcaacaacaacaaaaatgatgaccacacaaaaactccatccgaagttcaccaacagcaaaggccaaagatagataaatccatgaagatgagaaaaamaacagtgcaaaaaggctgaaaattccaaaggccagaatgcctctacttctccagaggatcacaattccttgccagcaagaaaactggatggagaatgagtttgatgaattgagagaagtaggcttcagaaggtgggtaataacaaattcctccgagccaaaggagcatgttctaacccaatgcaaggaagctaagaaccttgataaaaagttagaggaattgctaactagaataaccagtttagagaagaccataaatgtcccgatggagctgaaaaacacagcatgagaacttcatgaagcatatgcaaatatcaatagctgaataaattaagcagaagaaaggatatcagagattgaagatcaacttaatgaaataatgcgtgaa

SEQ ID NO: 922276 - DNA, 595 bp, Homo sapiens
gtgatacccaggcaaacaaggtctggagtggactcccagcaaactccagcagacctgcagcagaggggcctgactgttagaaggaaaactaaaaaacagaaaacaatagcagcaacaacaacaaaaatgatgaccacacaaaaactccatccgaagttcaccaacagcaaaggccaaagatagataaatccatgaagatgagaaaaacaacagtgcaaaaaggctgaaaattmcaaaggccagaatgcctctacttctccagaggatcacaattccttgccagcaagaaaactggatggagaatgagtttgatgaattgagagaagtaggcttcagaaggtgggtaataacaaattcctccgagccaaaggagcatgttctaacccaatgcaaggaagctaagaaccttgataaaaagttagaggaattgctaactagaataaccagtttagagaagaccataaatgtcccgatggagctgaaaaacacagcatgagaacttcatgaagcatatgcaaatatcaatagctgaataaattaagcagaagaaaggatatcagagattgaagatcaacttaatgaaataatgcgtgaa

SEQ ID NO: 922277 - DNA, 520 bp, Homo sapiens
gcatttacaaacctttaactagacacagagggctgattggtgtgtttacaaacctttagctagaaacagaatgctaattggtgtgtttacaatcctttagctaaacagaaaagttctccaagtccccacccatcccagaagcccagcaggcttcacttctcattggcactcaccrtgggactttgcagcacctagcccaggcactctggcagcccagagggagctcatcccagacaaccaagaggaaaagaggggaagcaagaaagagacggagacccaccatcatggccaatgatcctgtgaagagggaaaggcagtccccgcatgggattcagcctctgatcaagcccagcaggctccggcaggctgtgcacagtgcagggcttactgagcctgcgctcacctggaacatgcgctggctcgcgagtgctgcacgcagccccggctgccacccgcgcctctctcttcacacttcccagcaactagaaggagccggctccagcctcagacagccccagag

SEQ ID NO: 922278 - DNA, 520 bp, Homo sapiens
gcatttacaaacctttaactagacacagagggctgattggtgtgtttacaaacctttagctagaaacagaatgctaattggtgtgtttacaatcctttagctaaacagaaaagttctccaagtccccacccatcccagaagcccagcaggcttcacttctcattggcactcaccatgggactttgcagcacctagcccaggcactctggcagcccagagggagctcatcccagacaaccaagaggaaaagaggggaagcaagaaagagacggagacccaccatcatggccaatgatcctgygaagagggaaaggcagtccccgcatgggattcagcctctgatcaagcccagcaggctccggcaggctgtgcacagtgcagggcttactgagcctgcgctcacctggaacatgcgctggctcgcgagtgctgcacgcagccccggctgccacccgcgcctctctcttcacacttcccagcaactagaaggagccggctccagcctcagacagccccagag

SEQ ID NO: 922279 - DNA, 590 bp, Homo sapiens
aaaaacaggaatggctgttctcatttaggtccatgggtccctcactagggaccccaccctcctgcctcctgtccatatcaatactattttccatagtgtctgtactaatttacattcccaccaccattatgtaatatttccctttcatcacatcctcaccaacgtttgttttcgtttttttctttttgataatagtaattctaactgaagtgaagtggtatctcattttggtttagatttgcatttgcctgatgattggcgatgttgagcattttttatacaccttttggccatttgcatgtcttctttttaaaaatgtctattaaaatattttgcatatttttcaatcaggctatttttttcttgctattgatttaagttccttatatattctggatattaaccccttatcagatggatagtttgcaaataytttctcccattctgtgggttgtctcttcaatctattaattgttctctttgctgagcagaagtttttactttgatataatcccctttgtatgtttttgtttttgttgcttgtgcttttgagttcctgtctaaaaaattctgtccagttcaatgccatg

SEQ ID NO: 922280 - DNA, 605 bp, Homo sapiens
ggggatcacttgaggccaggaattcaagaccagcctggccatcatggtgaaaacccgtctctattaaaaatataaaaattagccaggcatggtggtaggcacctgtagtctcagctacttgggaagctgtggcaggcagatcacttgagcacatgcgtttgagaccagcctgggcaacatggtaaaacccgtttctaccaaaacaaacaaacccaaaaaattagctaggtgtggtggcacgagcctatagtcccagcaactttagaggctgaggtgggaggatggcttgagccggggagggcaaggctgcagtgaatgagattgtgccactactacattccagcctgggtgacagagtcagcccctatcagmaaaaaaacaaacaaaaaaatcccctcttaacgacatcctgcaaaggactgagagagaaggacagtgtgagagagaagagatcattaaggcttgtcaccagatgccatttcaatgacaatgcacagccctcatgggcaaatacctgtattaaaaaaaaaaaaacaggttgatttatttctgtggaaaatagcaatcattgcttttagcaaacgttgtttaaaaccaagactgtc

SEQ ID NO: 922281 - DNA, 581 bp, Homo sapiens
aagcagactttgcattccttagcttttttcttataaaagatattttagatccattttactgcatgaatcatttctcttccaaatccaatatgttaaacgatttcacagtatagcacttatcaaaacctacatcctggccaagtgcagtagctcacatctgtagtcccagcactttgggaagccgaggtgggcggatcacctgaggtaaggggttcgagaccagcctgaccaacatggtgaaaccccatctctactaaaaatacaaaaattagccggacgtggtggtgcatgcctgtaatcccagctacttgggaggmtaaggcaggagaattgcttgaacccaggaggcggaggttgcagtgagccgagaccatgccactgcattccggcctgggtgacagggtaagactctgtctcaaaaacaaaaaacaaaacaaaacaaaaccctacatcctgtgccaggtcctagaatgattccacaatagtggtggtgtcccctgctgggtttgaccctgttctttatttcagctagtgtccgcagcaatgactctcagcagatgcttgtcacagcggagggcatg

SEQ ID NO: 922282 - DNA, 629 bp, Homo sapiens
caggaagcaggaaagaaaggatggatgtcagcgtttagaaccctggacacttcaccagagagcagggctaggaaaggccttgtcacttgggatatgaacttcattcattataaagccaaattgcgttgtagccagctatagctcagccctggggatatrggggaggaaatgagtctgtgaggactttgcatgtgcctgcctggcctacctcatcctgggaggaggagagaggtcacaaggaactctgttccgaaaagtaccctcatagtcagagcacacatctgccctcagtacttgcggccatgtaaattcccagttggacatgtaccctgggcagtcttatccatgtggaccgaagtgcaggagagtaaaccccttggagaaagtgagttcaaagatgtcctaatctagtccacatgtggtaactgtatgaggactgccaagggtccactttgggcaaattcccacagttccactttctgggtcatcgttttcttctcccagcatcttccttagggattttgagctgcaggatggcagagccttaattcctgggcctcatatttccacgacccctcatctccaggaacctttccaccgataactcaatctctccatcccttgacaga

SEQ ID NO: 922283 - DNA, 765 bp, Homo sapiens
tggcggatgcatggctatgtcctgtgtggctcacttaccaggagcaagctgtctacccaggaatggcctctcccctccaccccgagtggtcagagccggcctctcactgagcccccaaagctgacagggtcccctggatcatcaggccttgactactcaacccagagactgctaccccaaagtggggcttctgggcctacggcccccctcaccaccccaactccgccatggcgggagctgccattagagatttgcagctctatcccctcagggctcccgttcttctaccacagccaccaggagccacgctgaaagccatcrtgtcccgagggtgacctgggctgcatgctctgcctggaccttcccaaaggcataagcctcagagctgaacaaacatggaatcaagatctgaaatgtggctgggcgcggtggctcacgcctgtaatcccagcacgtttggaggctgaggcgggcggatcacctgagggcaggagtttgagaccagcctgaccaacatggtgagaccctgtctctactaaaagtgcaaaaattagctgggtgtggtggtgcgcacctgtaatcccagctactcgggagggtgaggcacaagaatcccttgaacccagcacgtggaggttgcagtgagccgagattgcaccactgcactccagcctgggtgacagagggcgactccacctcaaaaaaaaaaaaaaaaaaaaaaaaagaaagatctgaaatgtaaatgccaccgttttatcagattaa

SEQ ID NO: 922284 - DNA, 653 bp, Homo sapiens
taagcgggacacatgatgcatggtcctaatgcgcatgtttgagggtgacaaggagccttgatgtattagtataccgggacaacacgtataaatcatgactgtccctgggaatctgagattccaacgcaggactgcctgacaccaaaacctatgctattagggttgacagaagggaaaggaagccagagagagcagggagagctctccagggaggggtcccagggaaaggacctggaggaacagttccatgtgaggacactgctgcttttgccttctatgtccccccacccagcctmctcccttccaggcctaacttctggtgagccagacccactggggccaggagagttggtgcaaagatccttcagcggaaggtcaggggttctggagtgagtcttgggtccatgtaagcagagccagccacttcccctacctggcctttgtcaacccttctgcacactgggcataatccccgccctccgtgggatgatgtgggtgatgggctgtgggccctgtgagacacggtagctcttctcgcttggggtctggatgggggctctccttgaatatctcctggagggacaaataagctctcaatcaaatacttcctgttgggcacctattcctgagcacatctctctgggaagaggggg

SEQ ID NO: 922285 - DNA, 638 bp, Homo sapiens
tcaaaacactcactccctctccttctgccgactcccccttacctgtgcctcgacctcctctgaaaagccttctggtgcccttgcaatttctctgtggctttgtcagcaccttctgacagcaagaattctcttctcacttcctgtcttggctgtccttgccaccctcttcccccacccttgctgggctctgcctctgtatgcacttggaccaatggccaaactctagtcctcagctttctcctctcgaatggggactgtagcatcgaccacagagcgtgattttgaagggtcagaaaagagaatgcaggtaaagcacacagtgctgtgctcagggcagtcagtacttgggtgttgtttcttttctaccaaatccctccttccaccaagtcgactggatcaagagacgtgagcaaaatacrtaattggaaattggaggaggctgaaacgctatccctggggcatgggctcaggctcctgttctaatctctcgataagatagttaatttatgagtgtcctatgccattttcttggctggaaaggtataataggtactttagaagggtgattttcaagcttagctcctagagaaaagatatcaagaataatttaaaaaacaaaaaccagagctgggacttaa

SEQ ID NO: 922286 - DNA, 596 bp, Homo sapiens
ttcacaggctgttgttgagtgtctgcagctttttcaggtgcatggtgcaagctgtcagtggatctaccattctggcatctggaggatggaggtcctcttctcacagttccactaggtggtgccccagtagggattctgtgtgtgggctcctactccacatttcctttctgcactgtcctaktagaggttcttcatgaggaccccattcctacagcaaacttctacctgggcatccaggcatttccatacatcttctgacatctaggaggaggttccaaacctcaattgttgacttctgtgcacttgcaggctcaataccacatggaagctgccaagtcttggggcttgcaccctctgaaaccatggctcgagctctacgttggcccttgcagccatggctggagaagctgggatgcagggcaccaagtccctaggctgcacacagcaagggaaccctgggccagacccatgaaacccctttttcctcctaaaccttcaggcctgtgatgggaggggctgcgcaaaggtctctgacatgccctggagacattttccccattgtcttggtgattaacattcacctcctagttacttat

SEQ ID NO: 922287 - DNA, 588 bp, Homo sapiens
ggctgaggcaggagaatggcatgaacccgggagggggagcttgcagtgagcccagatggcgccactgaactccagcctgggtgacagagtgagactccttctcaaaaaaaaaaaaaaaaaaaaaaaagaaaagaaatatgaaaatgttaaatacagcataaggcaatgttttgaaactatgaagagaaaatagtgtgaagactaaagcagatgatatgtaaaatgcttagtgattagtagttgcttagtttaacatttttctaaaaatcgcagttcaaactggaagattgggaaagaagctagagttttctatagtggctccataggaaatctrtggctttggttggcttcaggaggaaagccaactgctaatcatgggacagggtaaggatagttgagggatggggaacagcatgggccgaggcttagtacaagggacccgagagacaggcggacacacctggatgggtggtcacttgttctgttcacaatcagttcttgtcctgagccaatcaccagacttaaaaggtccccacgctgtagtcttttatatcattgcccattcagttcgcaggcattgagagcata

SEQ ID NO: 922288 - DNA, 651 bp, Homo sapiens
gtccagctctcagcagagagcagacccaaagtgggtggctccttcccatagctggtagtcccaacatttgtgtcagtctggctgagtccagggtttttatgggctcagaagggaggaatgcatgctgattggtccatgggcagccatgggcatgtctggaaaaagtaccataagttcacactcccggccacagactccacccagaactggcaacctggcctccagacttcacgtaggccctggcttggaggtgggggtttcactgagacctgccccttgctgmacaggaatgtctgcctcccaccatcagcatgcatccatggtgcatgggctgtttgtgccaggggacacctgtaggcctgtgccaagctgcccttagccatcaccccaccccagcctcactcctgtgttggttggtgcccaaaatcctgaacaggctgaggcagcaggggctggtgtcagcactgcctcgagtgcaggcacacctgtccaggtcgcaacagtgcctaggctcggccacaactttgctctgttctggagcgggtgctgggagcagggagaggccagggaggtggagcaggtacttccgagcctgcaggggaaggggcatcgcaggcccctgagagtgcagggatgcccaggtccagagct

SEQ ID NO: 922289 - DNA, 651 bp, Homo sapiens
gtccagctctcagcagagagcagacccaaagtgggtggctccttcccatagctggtagtcccaacatttgtgtcagtctggctgagtccagggtttttatgggctcagaagggaggaatgcatgctgattggtccatgggcagccatgggcatgtctggaaaaagtaccataagttcacactcccggccacagactccacccagaactggcaacctggcctccagacttcacgtaggccctggcttggaggtgggggtttcactgagacctgccccttgctgcacaggaatgtctgcctcccaccatcagcatgcatccatggtgcatgggctgtttgtgccaggggacacctgtaggcctgtgccaagctgcccttagccatcaccccaccccagcctcactcctgtgttggttggtgcccaaaatcctgaacaggctgaggcagcaggggctggtgtcagcactgccycgagtgcaggcacacctgtccaggtcgcaacagtgcctaggctcggccacaactttgctctgttctggagcgggtgctgggagcagggagaggccagggaggtggagcaggtacttccgagcctgcaggggaaggggcatcgcaggcccctgagagtgcagggatgcccaggtccagagct

SEQ ID NO: 922290 - DNA, 766 bp, Homo sapiens
aagtaccagagtctctgcccctctcctatggccttaggggagataagtgttaagtagttattgcacagtgcctgcacatagacactcaaactctctaccatcatatgattgttggatacaattttgaagatatagaaaagtagaagaggccaccaaaacctcccttaatctgggactttttttgaaaaataatttttaaaaatgaatatggtattataaattagatatgcagttagaaaaactcaggtttgcttcatttttttttcttttttatagagctaaaatgaaaccccttgaaagtggtttagtayactcaccatgttgtgccaccaccacctctagctagttccgcaacatcttcccccaaaagaaaacttgggacccgagcttgatttttatttgtttttattttttttaattaattaattttttttttttgaggcggagtctcgctctgtccccgaggctggagtgcagtggcacgatctcggctcactgcaagctccgccttccgggttcacgccattctcctgcctcagcctcccgtgtagctgggactacaggtgcccgccaccatgcccggcaaatattttgtatttttagtagagacggggtttcaccgtgttagccaggatggtctcgatctcctgacctcgtgatccgcccacctcagcctcccaaagtgctgggattacaggcgtgagccaccgcgcccggctaccgagattgatttttaaaaccagatagaaagggacctggtgagccc

SEQ ID NO: 922291 - DNA, 544 bp, Homo sapiens
tatcagagactaggattgcaacccctgctttttttttgttttccatttgcttggtagatcttcctccatccctttattttgagcctaagtgtgtctctgcacatgagatgggtctcctgaatacagcacactgatgggtcttgactatccagtttgccagtctgtgtcttttaattggagcatttagtctatttacatttaaggttaatattgttatgtgtgaatttgatcctgtcattatgatgttagctggttattttgcccattaattcatgcagtttcttcatagcattgctggtctttacartttggcatgtttttgcagtggctggtaccggttgttcctttccacgtttagtgcttccttcaggagctcttttagggcaggcctggtggtgacaaaatctctcagcatttgcttgtctgtaaaggattttatttctccttcacttatgaagcttagtttggctggatatgaaattctgggatgagaattcttttctttaagaatgttgaacattggcccccactctcttctgacttg

SEQ ID NO: 922292 - DNA, 544 bp, Homo sapiens
tatcagagactaggattgcaacccctgctttttttttgttttccatttgcttggtagatcttcctccatccctttattttgagcctaagtgtgtctctgcacatgagatgggtctcctgaatacagcacactgatgggtcttgactatccagtttgccagtctgtgtcttttaattggagcatttagtctatttacatttaaggttaatattgttatgtgtgaatttgatcctgtcattatgatgttagctggttattttgcccattaattcatgcagtttcttcatagcattgctggtctttacaatttggcatgtttttgcagtggctggtaccggttgttcctttccaygtttagtgcttccttcaggagctcttttagggcaggcctggtggtgacaaaatctctcagcatttgcttgtctgtaaaggattttatttctccttcacttatgaagcttagtttggctggatatgaaattctgggatgagaattcttttctttaagaatgttgaacattggcccccactctcttctgacttg

SEQ ID NO: 922293 - DNA, 552 bp, Homo sapiens
atgggaggatcatttaagcccaggaagttgaggttgcagtgagctgagatcgtgccaccgcactccagcctgggtgacagagtgaaaccctatctcaaaaaaaaaaaaaaaaaaatttctcaatagtttgacatttaggttgttttttcatttttaccattcttccatggttttaacaactcagtctcaaagtgagccggagccaaggggaagaatgagcctatgatactcattgaacaaacatttgtgtacaaagtrtacatattctaggcactgtggaagctactggaggcacagatgagtaagacatcaccttggcctgctgtctattgaggtgtcttcttgtttgcctcaggcctcagtggtaaactgaccagccgaggagtttgtgtctgcatcagtactgcttttgaggggaacctattggattcctattttgtggaccttgtcatacagaaaccactccggatacatcaccattcagtcccagtcttcattcccctggaagagatagctgcaaaatatttacagaccaacatccagcacttcctg

SEQ ID NO: 922294 - DNA, 694 bp, Homo sapiens
tggttataggaacctgggcctccagaagtcagggagtggaaacagatcccggagccctgggccctccactgtctagagaagaggaaagggaaaggtaggaagcctagggaaaaaggggtttcagggaggcgggaagtctcctgggttgtagttgctgagggctcatgtaagagtggagggtcccaggcccctggaatggatggaggagaggccggaagtgaagacagcacagtcgtcaaatacagagggggctttcaatctttgctgtcaagtggagcagagaaatagagcggggctggccgggcgcggtggctcacgcctgtaatcccagcactttgggagactgaggcaggcggatcacaaggtcaggcgattgagaccatcctggctaatgcagygaaaccccgtctctactaaaaaaatagaaaaaattagccgggcgtggtggcgggtgcctgtagtcccagctactctggaggctgaggcaggagaatggcgtgaacccgggaggcggagcttgcagtgagccgagatcgcgccactgcactccagcctgggtgacggagtgagacttcgtctcaaaaaaaaaaaaaaaaagagaaatagagcggggcttcagggggtggtaaagggcagtgtgtgtgtctgtgtgtgtgtgtatgtgtgtatgtgcataaaacagatgggtgccatg

SEQ ID NO: 922295 - DNA, 748 bp, Homo sapiens
cccctaagcaagagagagagagagcaagatggaagctgcattgtcttgtattatctaccctcagtagtcgcagatactgcaatttttacataccgaaggtttgtggcaaccctgcatcaagcaagtctatcagcgccatttttccaacaatgtttacccactttgtgtctgtgtcacattttggtaattcatacaacatttcaaacttttttgtgacgcctgtatggtgattgtgatcagtgatctttgttactattgtaattattttggggcactttgaactgcacccatataaaacagcaaattttataaatgtgtgtgttctgacgactccactcactggctgtttccccrtctctttccctctctttggtcttccctattccttgagacactatattgaaattaggccaactgataatcctacaatggcctgtaagtattccagggaaagaaagagtcacattaaatgactcttaaaagaaagagctcactttaagtcgaaagctagaaatgattaagcttagtgaggaaggcatgtcaaaagccaagataggctgaaaactgggccttttgtaccagttagccacgtggttcattgtcgtgaagccaatgaggaaaagttattgatgggattacaagtgctactccagtggacaggagaatgataacaaagtgaaacaaccttattgctgatatggtgaaaattttagtagtctgtgtagaagatcatagcagccacaacatt

SEQ ID NO: 922296 - DNA, 748 bp, Homo sapiens
cccctaagcaagagagagagagagcaagatggaagctgcattgtcttgtattatctaccctcagtagtcgcagatactgcaatttttacataccgaaggtttgtggcaaccctgcatcaagcaagtctatcagcgccatttttccaacaatgtttacccactttgtgtctgtgtcacattttggtaattcatacaacatttcaaacttttttgtgacgcctgtatggtgattgtgatcagtgatctttgttactattgtaattattttggggcactttgaactgcacccatataaaacagcaaattttataaatgtgtgtgttctgacgactccactcactggctgtttccccatctctttccctctctttggtcttccctattccttgagacactatattgaaattaggccaactgataatcctacaatggcctgtaagtattccagggaaagaaagagtcacattaaatgactcttaaaagaaagagctcactttaartcgaaagctagaaatgattaagcttagtgaggaaggcatgtcaaaagccaagataggctgaaaactgggccttttgtaccagttagccacgtggttcattgtcgtgaagccaatgaggaaaagttattgatgggattacaagtgctactccagtggacaggagaatgataacaaagtgaaacaaccttattgctgatatggtgaaaattttagtagtctgtgtagaagatcatagcagccacaacatt

SEQ ID NO: 922297 - DNA, 551 bp, Homo sapiens
tagatttggtcttttcacatagtcccatatttcttggaggctttgttcatttctttttactcttttttctctaaacttctcttctcacttcatttcatttatttgatcttcaatcactgataccctttcttccacttgatcaaatcggctactgaagcttgtgcatgcatccgtagttctcgtgccttacygtcagatcatttaaggacttctctacactgtttattctagttagccattcatctaatcttttttcaaggtttttagcttctttgtgatgagttcgaacatcctcccttagctcagagaagtttgtttttactgatcgtctgaagccatcttctctcaactcatcaaagtcattctctgtccagctctgttccattgctggcgaggagctgcattcctttggaggacaagaggcgctctgatttttagaattttcagcttttctgctctggtttctccccatctttgtagttttatctacctttggtctttgatgatggtgacgtacagatggggttttggtgtggatgtcctttctgttt

SEQ ID NO: 922298 - DNA, 637 bp, Homo sapiens
ggtacagagctagaccagcactggtccctccagccccctggtagcctctgctgcacctgaactggcagctcttgccgctgcctttagctctgcatgtatgcgccctgaaggttctgcctctctgttttggaatcgccttcccctcctcatgtttggggacctgcaagggtgtgaggcacgtgagggcatcgccatgcgtattttacaggcctctttctctggactgtccttcaaagggaatgacctttgtctttccaggacctacccagtgagatctgcctgccattttcctatgagtcaaaaatctgaactcactactgctcctttcctggttcataagccagagtagggctggttggcagtcactggcttgtggccctatgtaattatctcagccatcacacactggctctttcacaagggctggtcacacgcctcgagtgattcttsagaaatctgttgaacagcctgacacccagccctaggacgccgtgctggggggattccccagctactgagtggggccagagactctactgcctctgtgaccacatccctttccatactggtatctcgtttgttctaatgagtgtgtccattgcttttaatagtgaattttctgagcaatgagaatttg

SEQ ID NO: 922299 - DNA, 591 bp, Homo sapiens
tgagtcgggtggggacttggagaacttttatgtctagctagaagattgtaaatacaccaatcagcactctgtgtctagctaaaagattgtaaatgcaccaatcagcactctgtgtctagctaaaggtttgtaaatgcaccaatcagtgctctgtctagctaatctagtggggacttggaaacctttagtgtctagcaaaaggattgtaaatgcaccaatcagcactctgtgtctagctcaaggttcgtaaatgcaccaatcagcaccctgtcaaaatggaccaatcagctctctgtaaaatgggccaatcagctctctgtaaaatggaccaatcagcaggatgttggtggggtcagataagggaataaaagcaggctgygcaaaccagcagcggcaacgcgctggggtcctcttccacactgtggaagattggttctttcgctctttgcaataaatcttgttgctgctcactctttgggtcggcactgcctttatgaactgtaacactcactgcgaaagtctgcagcttcactcctgaggccagtgagaccacaaacccactgggaggaatgaacaactccagacgggatg

SEQ ID NO: 922300 - DNA, 567 bp, Homo sapiens
caaattagtaataaaaaatcttccagcaaataaaaggccaggaccagacagactcacagccagtttttaaccaaatgtatatagaaaagctgataccaaaataatttcaacaaaattgaagaggagggatccctctataacttattctacaaatccagtatcacctttgtaccaaaaccaggcagtgatacaacaacaacagccaaaaggatagcacagaccaatacccttgatgaacayagatgcaaaatcctcaacaaaatactagcaaattcaatccaacagcatgtcaaataaataatttattattatcaagtgggtttcatccttggaattgtgtgtgtgtgtgtatgtgtgtgtgtgtgtgtgtgtgtgtgtagagagagagattatcaggctcaatctatattcccacttcagcatccttagcagctggaattataggcaagagtcaccatgcctggcctgattagtgattatagcaaggttgcaggatataatgaaagattaatataaaaaacaattactttcctatataccagcaacgaacaagaacaacctgaattt

SEQ ID NO: 922301 - DNA, 567 bp, Homo sapiens
caaattagtaataaaaaatcttccagcaaataaaaggccaggaccagacagactcacagccagtttttaaccaaatgtatatagaaaagctgataccaaaataatttcaacaaaattgaagaggagggatccctctataacttattctacaaatccagtatcacctttgtaccaaaaccaggcagtgatacaacaacaacagccaaaaggatagcacagaccaatacccttgatgaacacagatgcaaaatcctcaacaaaatactagcaaattcaatccaacagcatgtcaaataaataatttattatkatcaagtgggtttcatccttggaattgtgtgtgtgtgtgtatgtgtgtgtgtgtgtgtgtgtgtgtgtagagagagagattatcaggctcaatctatattcccacttcagcatccttagcagctggaattataggcaagagtcaccatgcctggcctgattagtgattatagcaaggttgcaggatataatgaaagattaatataaaaaacaattactttcctatataccagcaacgaacaagaacaacctgaattt

SEQ ID NO: 922302 - DNA, 704 bp, Homo sapiens
gaactactgtagtcattttgaggaaaggaaacactttggcattttgagttgccagttattgtgttggtatttttctcatctgcacttgtgggtgtttctttaactgcagtgtaaattgastagtcagtacactccttttcttggtgttttcagatggttgaagctctgtacatggcctttatcagaaactgaattcttgtctttggtttcaaaggaaggtatgcttagaatgtagttttggtgtttaagttttggtgtgtgatccagtaggtgctgcttaggcataatggttagtaagtaagtgctggttctgttatgtgactcctgtttttctttttctttttttttttttctcttgattgcagctacattctctcttaatgctctgaaaatgtggtctcctctcccatttgagtgctggttacagatctcagcttagcagtttcgggctgcacacccaagccctggaataatctcaggcttcatttttcctccccagcttggaagcagcagggaaagggagcttagcagcagttgtggtcaatgctactccacttgttctggggctccaaccaagagagatgtaaagcttcagtcaatcagtgtgattggctaagaatggggtggctgcactgtgggcccaaactggggtcacttcctggtgataagcagtggagtgtgtgtgatctgtgggagacagcctg

SEQ ID NO: 922303 - DNA, 506 bp, Homo sapiens
gctgagaacccttgctggggaactactgtagtcattttgaggaaaggaaacactttggcattttgagttgccagttattgtgttggtatttttctcatctgcacttgtgggtgtttctttaactgcagtgtaaattgagkagtcagtacactccttttcttggtgttttcagatggttgaagctctgtacatggcctttatcagaaactgaattcttgtctttggtttcaaaggaaggtatgcttagaatgtagttttggtgtttaagttttggtgtgtgatccagtaggtgctgcttaggcataatggttagtaagtaagtgctggttctgttatgtgactcctgtttttctttttctttttttttttttctcttgattgcagctacattctctcttaatgctctgaaaatgtggtctcctctcccatttgagtgctggttacagatctcagcttagcagtttcgggctgcacacccaagccctggaataatctcaggcttcatt

SEQ ID NO: 922304 - DNA, 704 bp, Homo sapiens
gaactactgtagtcattttgaggaaaggaaacactttggcattttgagttgccagttattgtgttggtatttttctcatctgcacttgtgggtgtttctttaactgcagtgtaaattgagtagtcagtacactccttttcttggtgttttcagatggttgargctctgtacatggcctttatcagaaactgaattcttgtctttggtttcaaaggaaggtatgcttagaatgtagttttggtgtttaagttttggtgtgtgatccagtaggtgctgcttaggcataatggttagtaagtaagtgctggttctgttatgtgactcctgtttttctttttctttttttttttttctcttgattgcagctacattctctcttaatgctctgaaaatgtggtctcctctcccatttgagtgctggttacagatctcagcttagcagtttcgggctgcacacccaagccctggaataatctcaggcttcatttttcctccccagcttggaagcagcagggaaagggagcttagcagcagttgtggtcaatgctactccacttgttctggggctccaaccaagagagatgtaaagcttcagtcaatcagtgtgattggctaagaatggggtggctgcactgtgggcccaaactggggtcacttcctggtgataagcagtggagtgtgtgtgatctgtgggagacagcctg

SEQ ID NO: 922305 - DNA, 704 bp, Homo sapiens
gaactactgtagtcattttgaggaaaggaaacactttggcattttgagttgccagttattgtgttggtatttttctcatctgcacttgtgggtgtttctttaactgcagtgtaaattgagtagtcagtacactccttttcttggtgttttcagatggttgaagctctgtacatggcctttatcagaaactgaattcttgtctttggtttcaaaggaaggtatgcttagaatgtagttttggtgtttaagttttggtgtgtgatccagtaggtgctgcttaggcataatggttagtaagtaagtgctggttctgttatgtgactcctgtttttctttttctttttttttttttctcttgattgcagctayattctctcttaatgctctgaaaatgtggtctcctctcccatttgagtgctggttacagatctcagcttagcagtttcgggctgcacacccaagccctggaataatctcaggcttcatttttcctccccagcttggaagcagcagggaaagggagcttagcagcagttgtggtcaatgctactccacttgttctggggctccaaccaagagagatgtaaagcttcagtcaatcagtgtgattggctaagaatggggtggctgcactgtgggcccaaactggggtcacttcctggtgataagcagtggagtgtgtgtgatctgtgggagacagcctg

SEQ ID NO: 922306 - DNA, 741 bp, Homo sapiens
attggctaagaatggggtggctgcactgtgggcccaaactggggtcacttcctggtgataagcagtggagtgtgtgtgatctgtgggagacagcctggcctctccttagggcaactacagcttgcttgaggtatggataaggcactcaggatctttgctgtttccttagtccaagggcagcatgggcagtttcactggagaggcaatggcaaaagggatttctgtcttccctgggagctccacctatgagaaaggcagagccattgctactgggagtattcagccagtgagtccgggtagctttactgctggcctgagctaggggctgtcattgtcagggagaagggwgtctagggcttacagagaagagagacagggttgttctccatatgttggctgagatgtgctgtaagcccaggtgaagccctcaagctctttgtttcttctgccgactgaggtcagatgggacagatccactgctgtggcagtggcagaggggctgtcagttggctctgggagctcctacccacagaaactcagagccactaccagtgggtatgctcagcaatggttggggtggctgttctgcattcctgagccaggggacctacctggtgaagagggggcatgggggcttccagggaagagagactggactcctctatgtatgctggctgcactgtactggaggtgccagtgtaatgactattgtctttgttcttttcccagcttgaaggcaat

SEQ ID NO: 922307 - DNA, 741 bp, Homo sapiens
attggctaagaatggggtggctgcactgtgggcccaaactggggtcacttcctggtgataagcagtggagtgtgtgtgatctgtgggagacagcctggcctctccttagggcaactacagcttgcttgaggtatggataaggcactcaggatctttgctgtttccttagtccaagggcagcatgggcagtttcactggagaggcaatggcaaaagggatttctgtcttccctgggagctccacctatgagaaaggcagagccattgctactgggagtattcagccagtgagtccgggtagctttactgctggcctgagctaggggctgtcattgtcagggagaagggtgtctagggcttacagagaagagagacagggttgttctccatatgttggctgagatgtgctgtaagcccaggtgaagccctcaagctctttgtttcttctgccgactgaggtcagatgggacagatccactgctgtggcagtggcagaggggctgtcagttggctctgggagctcctacccacagmaactcagagccactaccagtgggtatgctcagcaatggttggggtggctgttctgcattcctgagccaggggacctacctggtgaagagggggcatgggggcttccagggaagagagactggactcctctatgtatgctggctgcactgtactggaggtgccagtgtaatgactattgtctttgttcttttcccagcttgaaggcaat

SEQ ID NO: 922308 - DNA, 715 bp, Homo sapiens
tgcactgggggtctgtgccgagctctagtcgccatggattctccagaggctgaaggcaacagtggcaaagtatgtaaataagtaaagatggcaacccactcctccctttggggtctctgtctcagggaggttcagagctgctgatggcccaagaactccagcaaggaatggctggattctcagatctggaggtcctggycagtgaggagaacggggataaaggcctgcattaaaaacagtctggatgcttttttgtaaggcagcttcaatgtgttgggggtcccagaaagaccctagttacctcagaatctccagagtatgaaggtaacagacagaaaagcatgagagctaacaaagatgacatcccacccctccctctgggaactttgtcccagggaagtgtggagctattactggcctcagagttccagtaggaggtggctggagtcccaaattagtggtctttattctctgaagtagagtggaagcaaagccttcagactggcgctgcttagcccttcgggttcagcccctttccccagggtatgtaagagagcctaacctccccctttgctggaactgcagctactaatgctgtgaagcccaggatccaaggctcccaggacactgtgtgtgcttgagtggtggctctatccagactccacgtagctcttcatagcagtctgaaggccctggctgaatgggctcctgagag

SEQ ID NO: 922309 - DNA, 583 bp, Homo sapiens
caaaatttacatctcaaagtacagagagagtcttgtggtgctagagaaagattaaagatagatgccaaatcaaacatgaaattatagaaatataggattgtataaggagacccatttgtttttagatagggactatctatcttttcattggatccctaagctctaggcagagcccacattgaatcctggggctccaaaaagggagaattattatgagggtagaccacatgttgcttttacagtgcactgaaaaaaattattttaaacaaaaacttttaagtgtctaaactacactcttctttaaaaactcaagaatagcttctgttgtaataactattttagtcaaaaatcagctaacacaagcagtttaatatctgagccaaacttgtctgtttacacacttggagtaccataaagaaaaacagaggttacgccccaraagggagtctggcacaatctccccccattttttttttctttaagaaattccaggctattataaactattttaggtccctcatgcagcagagggtggcaagagaaaggagagacagcagaagtaaatggagaaacataattcagt

SEQ ID NO: 922310 - DNA, 627 bp, Homo sapiens
tgcatcatctctctagcaagggttcagaactgggctgaggctgagatggctggaatgatacccaatacaaggagctaaaaaccataataaaacaatgcaagatctgacagacaaaatagccagtctagagaagaaaataactgacctgatagagccaaaaaacacactacaagaatttcttaatgcaatcacaagaattaakagcagaatagaccaagcagaggaaagaatctctgagttcaaagactggatttctgaaataagatcggcaaacaagaatagggaaaaaataaataaaaagaaagaacaagacctccaaggaatatagaattatgtaaaaagaaaataatctgtaactgattggtgtcccagaaaaagatggggaaaatggaaccaacttggaaaacatagtcaggatatcatccatgaggactttccaaaactcgctagaaaggccaacattcaaattcaggaaatgcagagaacccaagtaagatacttcacaaaaagatcatcctcaagacacataatcattagattccccaagggtgaaattaaagaaaaaatgttaaagacagctagaaataatagttaggtcacctacacaggaagctcatcagactaaca

SEQ ID NO: 922311 - DNA, 552 bp, Homo sapiens
aagtaaacctgtctttaactgccaaaaaaaaaaaatcgatatatatagatagatagatagatatagacatatactaacactaatgatggctgatgagcaaaaaaaaaaaaaaaaaaaaaaagaagaagaagaaagctaaagaacagaaaggaaactgcaaaaaaaaaaaaatcatcatattttaaggaagtttacaaatttgtgatgggccayattcaaagccatcctggaccccatgtggcccagggcctgtgagttggacaagtttggtttagatccttatatcatacttaataacaaaacacattttggatgaaaaacatgtaattgtaaaaactcaagacataaagctatctaaagaacatatgggataatatgtacataatttggcttctcagaatctaagcttgatgttaaagaaagaaacagtaacaaagatctatagctgtgtttacataaacagaataaatggacagtagattagaaaaattagatgaaatctcaaagatgaaaatcatttggcaaatacatatttttatagttttatatcat

SEQ ID NO: 922312 - DNA, 552 bp, Homo sapiens
aagtaaacctgtctttaactgccaaaaaaaaaaaatcgatatatatagatagatagatagatatagacatatactaacactaatgatggctgatgagcaaaaaaaaaaaaaaaaaaaaaaagaagaagaagaaagctaaagaacagaaaggaaactgcaaaaaaaaaaaaatcatcatattttaaggaagtttacaaatttgtgatgggccatattcaaagccatcctggaccccatgtggcccagggcctgtgagttggacaagtttggtttagatccttatatcatacttaataacaaaacacattttggatgaaaaacatgtaattgtaaaaactcaagacataaagctatctaaagaacatatgggwtaatatgtacataatttggcttctcagaatctaagcttgatgttaaagaaagaaacagtaacaaagatctatagctgtgtttacataaacagaataaatggacagtagattagaaaaattagatgaaatctcaaagatgaaaatcatttggcaaatacatatttttatagttttatatcat

SEQ ID NO: 922313 - DNA, 684 bp, Homo sapiens
caaaagcaccaagttttatagtccagtttgaggacgtggtgtctgatttacgtagggctcacagattggtaagatcaggtatttcctttacatagcgtgtggggaaggctggtcaccccaccctaatcttcttatgcaaatgggctttctagttgatcagcaccatcttgtctgcttgttataatacacgtggctgacagagaagggaagatggagccaccattttgaaaatgtctagtccttagtttctgccggcattcatccatgcaagctcccagcttgcaggctgctctttgttagaaaatgatttggggctgcttttcattaacaaaaaaaaaaaaaagccttatcaaggactcccatgcccttgctatctgcctaagtaattccttcttaactcctatatcagtgggaggtgattaaatcatgtgggcagtttgccccatgctgttctcatgatagtgagtgagttctcatgagatctgatgggtttaaagtgttgcacttctcttctccccctttgctctctttttctctctcctgctgccacataagacatgccttgcttcccctttktcttctgacatgattgtaagtttcctgaggtctgccaagcctgctgaactgtgagtcaagaaaagaggtttaaacctcttttctttataaattacccagtcttaggta

SEQ ID NO: 922314 - DNA, 703 bp, Homo sapiens
tgttgcacttctcttctccccctttgctctctttttctctctcctgctgccacataagacatgccttgcttcccctttttcttctgacatgattgtaagtttcctgaggtctgccaagcctgctgaactgtgagtcaagaaaagaggtttaaacctcttttctttataaattacccagtcttaggtagttctttacagcagtgtgaaaatggactaatgcagaaaattggtactaggaatggggcactgctataaagatacctgaaaatgtggaagtgactttggaactgggtaatgggcagaggtttggagggctcagaagaatacagaaagaygttgtggaaagtttggaacttcctagagacttgttgaatggatttggccaaaatgctgatagtgatatggacaatgaagtccatgctgaggtggtcttagatggagatgaggaacttattgggaactggattaaaggtcactcttgctatgccttagcaaagagactgatggcattttgcctgtgccctagggatctgtgcaactttgaacttgagagagataatttaggatatctggaagaagaaatttttaagcagcaaagcattcaagatgtaacctggctgtttctgaaagcatataggcatatgtgttcacaaagtggtctgaaagtggaacttatttttaaaagggaagcagagcatacaag

SEQ ID NO: 922315 - DNA, 703 bp, Homo sapiens
tgttgcacttctcttctccccctttgctctctttttctctctcctgctgccacataagacatgccttgcttcccctttttcttctgacatgattgtaagtttcctgaggtctgccaagcctgctgaactgtgagtcaagaaaagaggtttaaacctcttttctttataaattacccagtcttaggtagttctttacagcagtgtgaaaatggactaatgcagaaaattggtactaggaatggggcactgctataaagatacctgaaaatgtggaagtgactttggaactgggtaatgggcagaggtttggagggctcagaagaatacagaaagatgttktggaaagtttggaacttcctagagacttgttgaatggatttggccaaaatgctgatagtgatatggacaatgaagtccatgctgaggtggtcttagatggagatgaggaacttattgggaactggattaaaggtcactcttgctatgccttagcaaagagactgatggcattttgcctgtgccctagggatctgtgcaactttgaacttgagagagataatttaggatatctggaagaagaaatttttaagcagcaaagcattcaagatgtaacctggctgtttctgaaagcatataggcatatgtgttcacaaagtggtctgaaagtggaacttatttttaaaagggaagcagagcatacaag

SEQ ID NO: 922316 - DNA, 627 bp, Homo sapiens
ccagggtggcagcaagagagaagggatttgcagggattccataaagctattgacttaagatgttagttacattctgagagcagagacaggcacaatggttaaatgactgccattttgaggaaatattgactctgaccagtggattccgtggcttgtttcacaatgcctggacacaatggcctgttacttgcacgtgtgtgtgtgcacatgcacgcacatacacaagcaatcagttaataattaaagccttgcttatgtgtccgcattgaaaaatgcttccggctttcatttcatgtcatactgtctcccacttcaccctcaaatgcatgctttgaaggaggattatttctattttgtatgctctggaaattaactgatagatgtgtgcatttctatcccccgcttctccatttgtgtccctccttaccttttattcttgtctgctctctgctcctcccycctgattttcaccaacttgtttctttgctttaaatctctccctcatctgaggctgcttgtcttccctgccccactgccccctccacttccctttctccttcttctgtattcctttctgactcctttttctcctcgcctctctcttttctcgtctttctctctctctgt

SEQ ID NO: 922317 - DNA, 731 bp, Homo sapiens
aagcccctacagacactgcagggtttactgcttcaaacttaggcttctggtcagcctcatttaaggcttctctggaatccaggccaaatataaatggtgacccggcagaagtggcgtgaccaggcaaagtgtgatacttcctttgagaccatgagccagccccttcccttccctggctcagtttcctccattgtaacatgggctggtgggccagatggtccccatgttccttccatccttagggatctagaaatagaagaggctcctccccagcatccccaccacctggctcctgaagagcacacacccgctctgcagaaaagtgacagtgagcccagtccgtcagggatccctggaaacagaagttggaagtgaaatagcccagggcatttggaatgttcattcattattacaggttgaattctgtctccccaaaagatacwtgggaatcttgacccccaggacctgtgtatgtgaccttatctagaaatagggtctttgaagatgtcatcaagttaggataaggtcctgaggatatgccctcatccaatatgtttggtgtccttataagaatggacaaggctgggcacggtgggctcacgcctgtaatcccagcactttgggaggccgaggcgggtggatctcctgaggtcaggagtttaagaccagcctggccaacactgtgaaaccccatctctactaaaaatacagaagttagctgggcatggtgg

SEQ ID NO: 922318 - DNA, 564 bp, Homo sapiens
gcacattctaactgttttttcacttaaagataccatcccacttaacaagatatcatctagtccctgttccagtggttctcatccagaggccatcttccttcaggaaacatttgataatatttgaagacatttttggtttacacaactaggggcaaatgtactactggcatctagtgggtagaagatggggattctggtaaacattccacaatgcacaagaaagtctccaacaacacaaaataagtatccattcaaaagtcaatagtgtcaaggctgacaaatcctcttgtgttccataaagtttccctatctttgcaggtataaaaacaggtagaaatccttccaggatccctaaaatcccaacttatcccacawatactgccaagaatgtcaccttctcccaacctaagaacgagaatttgcagggatactgatggtcgaaagcagcaaagaccccaaaatatcatatcacatgcttacttagctgattagtgcctggattcatggaaggaccaaaaggtctgtgacttctgagatgtcctcaaatgtaaattttgcatagaa

SEQ ID NO: 922319 - DNA, 839 bp, Homo sapiens
actgcccgatcacctcggaagcctataggaccatcacaggtgctctgggtaactctcacggtggaaggtaagtctgtccccttcttaatcaatacggaggctacccactccatattaccttcttttcaagggcctgtttcccttgcctccataactgttgtgggtattgacagccaggcttctaaacctcttaaaactccccatctctggtgccaacttagacratactcttttaagcaatccttttagttatccccacctgcccagctcccttattaggccaagatattttaactaaattatctgcttccctgactatttctgggctagagccacacctcattgccacctttccccctagttcaaagcctccttcacatcctccccttgtatctccccaccttaccccacaagtataagatacctctactccctccttggcgaccaatcatgcaccccttaccatctcattaaaacctaatcacccttaccgcactcaacgccaatatcccatcctgcaatgcgctttaaaaagattaaagcctattatcactcgcctgctacagcaaggcttttaaagcctataaactctccttacaattcccccattttacctgtcctaaaaccagacaagccttacaagttagttcaggatctatgccttatcaaccaaattgttttgcctatccaccccgtggtgccaaacccatacactctcctatcctcaatatctccctccacaacccattattctgttctggatctcacacatgctttctttactattcctttgcacccttcatcccagcctttcttcgctttcacttggactgtccctg

SEQ ID NO: 922320 - DNA, 668 bp, Homo sapiens
tgacactgcccgatcacctcggaagcctataggaccatcacaggtgctctgggtaactctcacggtggaaggtaagtctgtccccttcttaatcaatacggaggctacccactccatattaccttcttttcaagggcctgtttcccttgcctccataactgttgtgggtattgacagccaggcttctaaacctcttaaaactccccatctctggtgccaacttagacaatactcttttaagcaatccttttagttatccccacctgcccagctcccttattaggccaagatattttaactaaattatctgcttccctgactatttctgggctasagccacacctcattgccacctttccccctagttcaaagcctccttcacatcctccccttgtatctccccaccttaccccacaagtataagatacctctactccctccttggcgaccaatcatgcaccccttaccatctcattaaaacctaatcacccttaccgcactcaacgccaatatcccatcctgcaatgcgctttaaaaagattaaagcctattatcactcgcctgctacagcaaggcttttaaagcctataaactctccttacaattcccccattttacctgtcctaaaaccagacaagccttacaagttagttcaggatctatgcctt

SEQ ID NO: 922321 - DNA, 839 bp, Homo sapiens
actgcccgatcacctcggaagcctataggaccatcacaggtgctctgggtaactctcacggtggaaggtaagtctgtccccttcttaatcaatacggaggctacccactccatattaccttcttttcaagggcctgtttcccttgcctccataactgttgtgggtattgacagccaggcttctaaacctcttaaaactccccatctctggtgccaacttagacaatactcttttaagcaatccttttagttatccccacctgcccagctcccttattaggccaagatattttaactaaattatctgcttccctgactatttctgggctagagccacacctcattgccacctttccccctagttcaaagcctccttcacatcctccccttgtatctccccaccttaccccacaagtataagatacctctactccctccttggcgaccaatcatgcaccccttaccatctcattaaaacctaatcacccttaccgcactcaacgccaatatcccatcctgcartgcgctttaaaaagattaaagcctattatcactcgcctgctacagcaaggcttttaaagcctataaactctccttacaattcccccattttacctgtcctaaaaccagacaagccttacaagttagttcaggatctatgccttatcaaccaaattgttttgcctatccaccccgtggtgccaaacccatacactctcctatcctcaatatctccctccacaacccattattctgttctggatctcacacatgctttctttactattcctttgcacccttcatcccagcctttcttcgctttcacttggactgtccctg

SEQ ID NO: 922322 - DNA, 717 bp, Homo sapiens
caatcatgcaccccttaccatctcattaaaacctaatcacccttaccgcactcaacgccaatatcccatcctgcaatgcgctttaaaaagattaaagcctattatcactcgcctgctacagcaaggcttttaaagcctataaactctccttacaattcccccattttacctgtcctaaaaccagacaagccttacaagttagttcaggatctatgccttatcaaccaaattgttttgcctatccaccccgtggtgccaaacccatacactctcctatcctcaatatctccctccacaacccattattctgttctggatctcamacatgctttctttactattcctttgcacccttcatcccagcctttcttcgctttcacttggactgtccctgacacccattaggctcagcaaattacctaggctgtcctgccacaaggcttcacagacagctcctattacttcagtcaagcccaaatttcttcctcatctgttacctatctcggcataattctcataaaaacacaggtgctctccctgctgatcgtgtccgactgatctctcaaatcccaacaccttctacaaaacaactcctttccttcctaggcatggttagtgcggtcagaattcttacacaagagccgggactgcaccctgtagcctttctgtccaaacaacttgaccttactgttttagcctagccctcatgtctgcatg

SEQ ID NO: 922323 - DNA, 717 bp, Homo sapiens
caatcatgcaccccttaccatctcattaaaacctaatcacccttaccgcactcaacgccaatatcccatcctgcaatgcgctttaaaaagattaaagcctattatcactcgcctgctacagcaaggcttttaaagcctataaactctccttacaattcccccattttacctgtcctaaaaccagacaagccttacaagttagttcaggatctatgccttatcaaccaaattgttttgcctatccaccccgtggtgccaaacccatacactctcctatcctcaatatctccctccacaacccattattctgttctggatctcacacatgctttctttactattcctttgcacccttcatcccagcctttcttcgctttcacttggactgtccctgacrcccattaggctcagcaaattacctaggctgtcctgccacaaggcttcacagacagctcctattacttcagtcaagcccaaatttcttcctcatctgttacctatctcggcataattctcataaaaacacaggtgctctccctgctgatcgtgtccgactgatctctcaaatcccaacaccttctacaaaacaactcctttccttcctaggcatggttagtgcggtcagaattcttacacaagagccgggactgcaccctgtagcctttctgtccaaacaacttgaccttactgttttagcctagccctcatgtctgcatg

SEQ ID NO: 922324 - DNA, 717 bp, Homo sapiens
caatcatgcaccccttaccatctcattaaaacctaatcacccttaccgcactcaacgccaatatcccatcctgcaatgcgctttaaaaagattaaagcctattatcactcgcctgctacagcaaggcttttaaagcctataaactctccttacaattcccccattttacctgtcctaaaaccagacaagccttacaagttagttcaggatctatgccttatcaaccaaattgttttgcctatccaccccgtggtgccaaacccatacactctcctatcctcaatatctccctccacaacccattattctgttctggatctcacacatgctttctttactattcctttgcacccttcatcccagcctttcttcgctttcacttggactgtccctgacacccattaggctcagcaaattacctaggctgtcctgccacaaggcttcacagacagctcctattacttcagtcaagcccaaatttcttcctcatctgttacctatctcggcataattctcataaaaacacasgtgctctccctgctgatcgtgtccgactgatctctcaaatcccaacaccttctacaaaacaactcctttccttcctaggcatggttagtgcggtcagaattcttacacaagagccgggactgcaccctgtagcctttctgtccaaacaacttgaccttactgttttagcctagccctcatgtctgcatg

SEQ ID NO: 922325 - DNA, 674 bp, Homo sapiens
gtgctgggtagagaaggaagggaggaggaggaaagtagttgttggcactgggggttcagagccgccccagctccttgagatgaagggatgaaaataaatcctctgtattactgaagcatgtgaatgccatgaagtagtgggacctgaatcaatacattgcatttacagcagagcaaaagaaagaatagggttttcagagtttatttatcctgcttctctgaaaaatacccgtgtgaactattgggctgagagtgttgagtccattgaatttgactctttcactgccatatctttggagagaatgccttcccaaagagtcatatccaaatgtaatgtccctcccttctcttatgagtgacttacttttggtattccactgggtggaaaaaagcttttcttacaggatatatgaactaataatagttatacgactgcttcggatttgtcgcgctccccttggataagtttaatatgattttgtacacattaattaattmtcttaataacagacaaaatagaaggaagccactaccgtcctttccagtgcatcagatgaatcaaaatgaatcaaagggctgggcatggtggcccacacttgcaatcccattactttgggaggctgacaccagtaaatcacttgaggccaagagttcaaaaccagcctcagcaatata

SEQ ID NO: 922326 - DNA, 570 bp, Homo sapiens
ccacacaggccttgtccacttctacttttcttgtggggcccttacaagatgaaatggtgctagctgatcacagggctgtccacacacatgcctcccgtctgagcactagggctggctgggcgtctcactgactggtgaaagccttgttcgctccttacaaagcttcccacagcttctctgaaccctgctctttccggaaggatatcgcattactggaccatcatctattttcccaaaaggcactttagagccctgggtgtgatgcctgttcatgtgatttgatgtttttctaccatttttgacttgggtgaactacaaataaagagcatgtagaagcacagcactgaatgttctggaaaattaaagagttcacacatggccagcgtttggagtyttaaatcatccgagtttcaagtgttcctttttattttggggaggagggtgtgcaaagggtttgggagagtgaacaccacggatggattatctcatttcatttatcctgactcttcgtctatcaaaccatgcaattaacagtagcacaaacggagccttactcaatcaaaacaaagc

SEQ ID NO: 922327 - DNA, 619 bp, Homo sapiens
actacagagtccaacaaagatcatttaagtcaacccaaaccagaaaggacacaaagtcaaatctcagggaaaaaactattactttaagctgctaattttaggctggcttgttacacggtatcagctaaatgatacagaattcaacatcaaactgaattayaaaattctactccactatttaaataaagaagtcacttgaacaagactgccccatacagtcaggcaaaccctttttgattagcttctgcagccaaatccagcctcgcaaaccctcctctttatccccttaaactaccctccatccgccaccctcatgagtaaacaaaactctgcctgaaaccaaacctcctttcctttttttttttttttttttgagatagagtcttgctttgtcgcccaggctggagtgcagtggagtgctttcagctcactgcaatctccgcctcccaggttcacgccattctcctgcttcagcctcccgagtagctgggactacaggcgcccgccaccacacctggctaattttttgtatttttagtagagatggggtttcacggtgttggtctcaatctcctgacctcgtgatctgcccgcttcggcctcccaaagtgctgggatt

SEQ ID NO: 922328 - DNA, 619 bp, Homo sapiens
actacagagtccaacaaagatcatttaagtcaacccaaaccagaaaggacacaaagtcaaatctcagggaaaaaactattactttaagctgctaattttaggctggcttgttacacggtatcagctaaatgatacagaattcaacatcaaactgaattacaaaattctactccactatttaaataaagaagtcacttgaacaagactgccccatacagtcaggcaaaccctttttgattagcttctgcagccaaatccagcctcgcaaaccctcctctttatccccttaaactaccctccatcygccaccctcatgagtaaacaaaactctgcctgaaaccaaacctcctttcctttttttttttttttttttgagatagagtcttgctttgtcgcccaggctggagtgcagtggagtgctttcagctcactgcaatctccgcctcccaggttcacgccattctcctgcttcagcctcccgagtagctgggactacaggcgcccgccaccacacctggctaattttttgtatttttagtagagatggggtttcacggtgttggtctcaatctcctgacctcgtgatctgcccgcttcggcctcccaaagtgctgggatt

SEQ ID NO: 922329 - DNA, 735 bp, Homo sapiens
gtcaccagccctgaggtcctctaaggtgggtgtcttatgtcagaggtggaagcaagctgaggcaaaggccctttagagaaggtgggttattcagagcccctcatcacatactacttttgccttgatgaggacttccggagcctactcatggaacctgcttcattaatgactgaccttgacctgtctataacatgcaatcacttgccctacaaagaaccccaaatacaaagtgtggcaggtgagcctcaacattgatctgtctttccgtcaacaataactgcccttggttttctaattaagccgtttagagtacgagtgacttagctgcctttctttatgaagtggaaaatagatttgtaagttatattccctgaagttgttgttttgcatcccatatggaaccttggttccccactgtcacttcctcaggaaacatacattactgagggccccactgggagttgagtgcatttttctacatacacaaaactgaaaatggggttaattttcaatgaarctatgctttatttagtatgttacttctggctcatcgtgagttagctaggctttgtggccttgccttggaacacaccaagcgcaaggctatttccatgtggaagtatactccagctccaaattactgccttaacacactaaccggttaattgcacaacctgtttctatgttagactctgcctacgtggtgagagagtactaacgcgcttgcagaacact

SEQ ID NO: 922330 - DNA, 604 bp, Homo sapiens
taaatttcatgtgaaaccgaaaaagaggctgtagagtcaagacaatcctaagcaaaaagaacaaagctggaggcatcatgctacctgatttcaaactatactacatgctacagtaaccaaaacagcatggtattcataccaaaacagatatatagaccaatggaacagaacagaggcctcagaaataacactacacatctacaaccatctgatctttgacaaawctgacaaaaacaagcaatggagaaaggactccctatttaataaattgtgttgggaaaactggctagccatatgcagaaaactgaaactggacccattccttacaccttatataaaaattaactcaagacggattaaagacttaaacgtaaggcctaaaaccataaaaaccctaaaagaaaactaggcaaagctattcaggacatagacatggacaaagactttatgattaaaacaccagaagcaatggcaacaaaagccaaaattgacaaatggcattaatttaaccaaaggacttctacacagcaaagaaactgccatcagagtgaagaggcaacctacagaatgggagaaaatttctgcaatctgtccatctgacaaa

SEQ ID NO: 922331 - DNA, 732 bp, Homo sapiens
agctaagattcagaaacaacctaagtgtccatcaacagacaaatggataaagaaaatgtggtacatatacacaatggagtaccattcagccatgaaaaagaatgagattcagtcatttgcaacgacatggatggaactggagaccattctgttaagtgaaataaggcaggcacagaaagacaaacagcatgttctcacttatttgtgggatctaaaaaccaaaacaactgaactcatggacatagagagtaggaggatggttaccaggggctgggaagggtagtgggagggtggagagcaggggaaggtcaggatggttaaaaccatttatgcctaggattccattattggaatgctaagcacttgggagttatttatatctcactgctcaaggtcatcaccaaactctgattgaaaaaattcaaaaaattgcagcctcgggcataaacgggttaacaggytgaaaaagaataagacctagtatttgctagcacaacagaggaactatagttaataataaattgtacattccaaaataactaaaagtataaatcaattgtttataatacaaaggataaatgtttgaagggctagatctcccattctccaagatgtgattattttacattgcatgcctgaaccaaaacatcttacgtaccccataaatatatatgcctactatgtattcacaaaaattaaaataaaaagttagaaaatatccagcttttgcaa

SEQ ID NO: 922332 - DNA, 530 bp, Homo sapiens
ggcttttagtatattcagagttgtgcaatcattctcacaatcaattttaggacactttcaccactccaaaattaagccgcatacctcttagccaacacctctcaggccccccaacacttgctgggcccttgaaaccaccaatctactttctgtctctataggtttgcctattctggctattccatataaatgcactgataaatatgtggtctattgtgagtgacgtaatgttttcaaggttcgtctgtattgtagcatgtatctgtacttcattcatttttatggctaagttatactctgtcatattatggaaataccrcagttcatttatccactcatcctctgacagacatttgggttatttctactttttggctattattatcatgtggttatgaacattcctttacaactctttgtgtggacacaggttttcctttctcttgggtaaatacctagaagtggaattgttaggtcatatgagaattttatgtgtaggcttttgtggaagtgctagactgtttttcaaa

SEQ ID NO: 922333 - DNA, 479 bp, Homo sapiens
cccagttattcaatcaaacactagtctaggtgaaaatttcttatagatgtgattaaagtcaataattagtttttttttttttttgagatagagtctcactctgtcacccaggctagagtgcagtggcaccaccttggctcactgyaaactccgcctcctgggttcaagtgattctcctgtctcagcctcccaagtagagcaggtgtgcgccaccaaacccagctaatttttttttttttttgtatttttattagagacagggttttaccatgttggctaggctggtctcgaactcctggcctcaagtgatctgctcgcttccacctcccaatgtgctgggattacaggcatgagccaccacgcccagccagtcagtcgggtttttaaaagggcaactatcctagatagtctgattgatttcatcaattgaaaggccttgagagtggagctgaggtttcccaggagtagaaattccagct

SEQ ID NO: 922334 - DNA, 756 bp, Homo sapiens
tttggaggacttgttttaataccgattcactcatgttccaataaagtgaacttgaaggcaagtaaaagaaatacaatacaaccaatgtagctgggctgaaataatgatctaagattaagacaaatgatctatagtgatagcagaattatataaaaagtagtcactactaggcttgagacagtctctgctggacacctgtctccatatttagcaagtatgaatgtgttttagttcctggctattattctcattctataaaaatgaaatcggccgggcgcggtggctcacgcctgtaatcccagcactttgggaggccgaggcgggcggatcacgaggtcaggagatcgagaccatcctggctaacacrgtgaaaccccgtctctactaaaaatacaaaaaaaaattagccgggcgaggtggcgggcgcctgtagtcccagctactcgggaggctgaggcaggagaatggcgggaaccccagggggcggagcctgcagtgagccgagatcgcgccactgcactccagcctgggcgacagcgagactccgtctcaaaaaaaaaaaaaaaaaaaaaatgaaatcatagctacaagccagaagtgccaacctattaaagaacctcagtaggcacaaatcttaataacctttctggtctagcttggctgttgagctattcctagaaaagatatagaattcaaaagcatcattcatctgagatagatattatttctgtccttcactgtaggtcaaagatatac

SEQ ID NO: 922335 - DNA, 653 bp, Homo sapiens
tggggtttcaccaagttgctcaggctggtctcaaactcctgacctcaggccatctacccgccccggcctcccatagtgctgggattacaggcgtgagccatcgcgtccagactgttgaaatttttattgagtcaattgtacattcacaggcagttctgatcagaaactatgtacactttacccagtttctcccagtgtcaacattttgcaaaactatggtacaatatcttaagatatcgaatcattccattactgtaagtgtccctttcatacccacattcacctccctctcacccctgcctcctgtcacgtgttaccactgattcgttrtctgtatctaaaatgttgtcattcctaaaatgttatatacatagaatcacatagtaggcagtcttttaggatgggctttttttcacttagcataattccctgaagattcccccaagttgtgtgtatcaatatttcactccctttcattgctgaatagtgtcccatggtatgaatatacacagttgcactgttcacttgttgaaggacatgtgggttgtttgggggtactgtgagtgaagttgctgtaacattggtgtcagggtgttgtgtgaatataaagttgtaatttctttagacagatgccgaacgtacaactgccggat

SEQ ID NO: 922336 - DNA, 653 bp, Homo sapiens
tggggtttcaccaagttgctcaggctggtctcaaactcctgacctcaggccatctacccgccccggcctcccatagtgctgggattacaggcgtgagccatcgcgtccagactgttgaaatttttattgagtcaattgtacattcacaggcagttctgatcagaaactatgtacactttacccagtttctcccagtgtcaacattttgcaaaactatggtacaatatcttaagatatcgaatcattccattactgtaagtgtccctttcatacccacattcacctccctctcacccctgcctcctgtcacgtgttaccactgattcgttgtstgtatctaaaatgttgtcattcctaaaatgttatatacatagaatcacatagtaggcagtcttttaggatgggctttttttcacttagcataattccctgaagattcccccaagttgtgtgtatcaatatttcactccctttcattgctgaatagtgtcccatggtatgaatatacacagttgcactgttcacttgttgaaggacatgtgggttgtttgggggtactgtgagtgaagttgctgtaacattggtgtcagggtgttgtgtgaatataaagttgtaatttctttagacagatgccgaacgtacaactgccggat

SEQ ID NO: 922337 - DNA, 640 bp, Homo sapiens
cttttgattttactggctcgtaggcaggagggacttgccttgtctcagatgagactttggactgtggacttttgagttaatgctgaaataagctaagacttttggggactgttgggaaggcatgattggttttgaaatgtgaggacatgagatttgggagggaccaggrgtggaatgttatggtttggctgtgtccccacctaaatctcatcttgaattcccacatgttgtgggagggacccggtgagaggtaattgaatcacaggggcaggcctttcctgtgcttttctagtgatagtgaataagtctcacgagatctgatggttttataaaggggagtttccctgcacaatctctcttctcttgtctgctgccatgtgagatgtgcctttcaccttccgccatgattgtggggcctccccagccacatggaactgtaagtccaataaacctttttcttttgtaaattgctcagtctctggtatgtctttatcagcagtgtaaaaatgaactaatacagaagtcctgactagagcaatcaggcaagagaaagaaacaaagagcatccaaagaggaagagaggaagtcaaactatccctgtttgcagacaacgtgattctatatcttgaaaaccccatag

SEQ ID NO: 922338 - DNA, 606 bp, Homo sapiens
agcccctatcggcttcaaggctgccaatgccaaaatcttggcgggtacctggggccagatggcccttgcagtctcttgtgtccccaggatgccatcctctctgggtgaggccactcctgcatccagtgtccctgccagcctgggaaggcctgcacgtgacctaccatacctgcctggtaatgtcatcgtcccactctgccagcccctcccaaaggcattgggcctgggaacattctagcttggcagaggggtggggagccaatgcccttggctctgaagggcaggacctaccccattctgcgctgctcaaagcagggcccactgaaaccccaacatagccatccatggtgcgatcctggcaagttcacrtactgttgacccatccccacaccaggagaacccctgaacccggccctgacctcatgggctgtgggctaaggggccaggctcctaagcttgctgtgggccacagcacctgctcagggactgcagtgattgccccacaccctggggccacaaagctcccaggcacaggagcctccagcttggccacctcctccccttcactggcacgctcttcctgcccgccctgcagggttctcatgg

SEQ ID NO: 922339 - DNA, 615 bp, Homo sapiens
aagttggcagtcaccctaagctcttttgtgggaggaagcatagggaatataggtcagtgttggggcagcattttctgatcctgacttggagaaggtgttaaaatcttgacattcccgactcctcctttgtgagagcccgtgccctgcaggtctcacagggttgttgtgagggtcacctgtggtgatgggtttggaagtgatttgtgaatgacacagtgggccttcctattcctgtcattggcctttcaaccttcaatactaattgcctggggatctccaggcctcaaggtctaatcccggaagggtataaggtgtccctagtggartattctacacctcctgggaggtccctcacttccaccttcacctgacataacccctgctcctgttccctcagcctggagagcttgcccagtagagcacagggtagtactggactgacctctttggaaagggtgattacatcctcatttcagctctccctcttcctagctttccacatagaattccagggctccatgcagcatttgctggacatgagagggaaaacttttagggcagggatctgccctgggtggggacagaggagtatcgtggagtctgggtgtcaggagt

SEQ ID NO: 922340 - DNA, 826 bp, Homo sapiens
atctgatgaccactggggcccaggtatccacctgggatatcaggcttcaagtgtacgcccaggctccacatggacaccaggccaggagaacgccagcccttatctgagcatcaggtcctagatggatgcccaggccccatatgtacatcaggccccgggtatacactggactccaggtggacaccagcactcagttggatacacacactcaaggtggacaccaggccccacgtgaattcctacactccaggtaaacatcaggtcccaagtggatacctggaccccaggtggataccagtctctaaattaataccaggcctcagatggtccttaggagccatgtgtgcattagtcatcaggaagttacctaggcccaaagtggacatcaggccccatgttgacacaagagctagttggaagtcaggccccaggtggacacccaggccctaggtaaatacttaggtcccaagttgatggcaggccctatgtgaacactcagaactcaggtggacatgaggcctcaggtggacatcygagttcatctggaacctcgtgttacaggccccatgtaaacaccaggccttaggtggatacccaatctctaggtggacatcagagctcagattgacacaaagaccccagtagacataatgtaccaatgaatatccaggccccttgttaataccccggccccaaattgacaccagggtctatgtggacacacaggccccagttagaaaacaggcccaaggtggacactggactggacatcaggtcctaggttgacaaccatgcttcaagttgacaccagaccccaagtgaacat

SEQ ID NO: 922341 - DNA, 576 bp, Homo sapiens
atgggggcagccagctcaagcagccaagacagcagggcggagagtgtgagagtaagctgctaataagaaagccagtgtgagagtaagctgctaatgagaaagctgcagaataaaaccatattcatctgcctacagacccccaaatgttctttctgcttatccacccactccccttggacttcagcatgggctggacccagacccgggaactgacagtcatgttgcccaggctggtctctattaccatctgagctctgccttctgtcagatcagtaccagtattagattctaacaggagcacaaaccctattgtgaactgcacatgcaagggatctaggttgtgcgctccttatgagaatctgatgcctgatgatctgtcactgtctcccatcacccrcaaatgggaccgtctagttgcaggaaagcaaactcagggctcccactaattctacatcacagtgagctgtataattttttctttttttttttttttattatactttaagttctagggtacatgtgcacaacgtgcaggtttattacttaagtatacatgtgccatgttggtttgctgca

SEQ ID NO: 922342 - DNA, 779 bp, Homo sapiens
gtgttctccactgattcctccctgtctcacttctccatcccctaccactttccctgggatcacctcccacaccagctatttgctctcaaatccttatcaggggagaaaagttctagaaatgcaagtggtagtgctggcacaacactgtgaatgtactttatgccactgaattgtgtgtrtgtgtatatatatatatatatatatatatatatatattttttttttttttttttttttttttttttttttgagacagagtctcgcactgtcgcccacgctggagtgcagtggtgcgatcttggctcactgcagcctccgcctcccaggttcaagcgattctcctgcctcagcctcctgagtagctgggactagaggcgcatgccaccacacccagctaatttttgtatttttggtagagacaaggttttgccatgttggccaggctgctctcgaactcctggcctcaagtgatcctcccacttcagcctcccaaagtgccgggattacaggtgtgagccactgcacccagcctgaattatgcacttaaaaatggttcaaatggtaaattttatgttaggcatattttattacaataagtaccacaaacaaggaggcccttggggctgtcaggcagaacgttctcccatatagattgcttgccgtccccggtcattcttgttttgtatcaaattatatacagtttaatctctcaatagttatgacattgattaaagcccctgatataagaagtacaaatacttaacacccctctcccgaaa

SEQ ID NO: 922343 - DNA, 779 bp, Homo sapiens
gtgttctccactgattcctccctgtctcacttctccatcccctaccactttccctgggatcacctcccacaccagctatttgctctcaaatccttatcaggggagaaaagttctagaaatgcaagtggtagtgctggcacaacactgtgaatgtactttatgccactgaattgtgtgtgtgtrtatatatatatatatatatatatatatatatattttttttttttttttttttttttttttttttttgagacagagtctcgcactgtcgcccacgctggagtgcagtggtgcgatcttggctcactgcagcctccgcctcccaggttcaagcgattctcctgcctcagcctcctgagtagctgggactagaggcgcatgccaccacacccagctaatttttgtatttttggtagagacaaggttttgccatgttggccaggctgctctcgaactcctggcctcaagtgatcctcccacttcagcctcccaaagtgccgggattacaggtgtgagccactgcacccagcctgaattatgcacttaaaaatggttcaaatggtaaattttatgttaggcatattttattacaataagtaccacaaacaaggaggcccttggggctgtcaggcagaacgttctcccatatagattgcttgccgtccccggtcattcttgttttgtatcaaattatatacagtttaatctctcaatagttatgacattgattaaagcccctgatataagaagtacaaatacttaacacccctctcccgaaa

SEQ ID NO: 922344 - DNA, 571 bp, Homo sapiens
ggtcaagatacagctcatgcagttgtttcagagggtgcaagctccaagccttgacagcttccatgtggtgttgagcctgcgggtgcacagaagtcaagaactgagctttgggaacctctgcctagatttcagaggatgtatggaaactcctggatgtccaggcagaagtttgctacaggggtggagccctcatggagacactctgctagggcagtgtaraaagaaaatgtggggttggagcccccagaaagagtctccactgggccactgcctagtggagctgtgagaagagggccactatcctccagaacccagaatggtagaaccaccagcagtttgcaccatgcacctggaaaagccacagacactcaatgccagcccatgaaagcagccaggataggggctataccctgcaaagccacagaggtggagctgtgcaaggtcttgggggctcacctcttgcatcagtgtgacctggatgcaagacatggaaccaaaggagatcattttggaacttttaggtttaaaatctaaactcttagattttaactattagattttgaacttgcat

SEQ ID NO: 922345 - DNA, 777 bp, Homo sapiens
tttgtctaaacaaatgggaaatgcaatttcataatgataacttaactctgttcagaaattggcaactcctcctttgtttcaaagtttgtctgaccatgctttctttcgctcagtaattctcaatatgtgcttaatatatcctcagtgtgtggctcaatatattctcaatccacagttgctcactgcaatggcagtcagatagggcctgaggggaagcactacagtaggggacattgaagggaaaatcttcgtgagaatcttaaatgttcctgcctccatcgccagtcattcttaacataagatatatgatgtgagcaattatttctagtaaaatattaaatttaaaatgtttkcctttcagtttaaaaatgcagatttttaggcactttgtgggaggatatttcctttaaaaaacaagaataagacattagagaacttcatggcagataaaaacattcaaacttacattctgatggtaaagagctgaatggagtagaggaatggaatattaaagcagaaaacttaaaagacaatttatgtaaaatacaggaattatttgaaaaggaagaattttatgcaataatctaataattacttaaattattggataaattgtgtaaggaggagagccactgatttaggaaacagaatagctcactttctcatctgcattttttcctatcacagatttcaatcaggattggtctaaattttgaatgaggaaataagtgttaagagagaaaagggaaaaactatagatgattctcaacttatgat

SEQ ID NO: 922346 - DNA, 778 bp, Homo sapiens
ctggtcaatacagaaaagtgatttctagaattatgtctttcaaattggactacgcaattaaattcatttacagacgtactgtgctacatagtatataaatagtgcaattatctgaagtggaacttggtggatctttttatggtaataagatgattttcgggcttgtcatggagcaaaaggcaaggaagtaagctgatcaagattgttctcaagtgccttttttttttaaaagctttatataaaacgtatacrtatagattttggatgtatcttatcctgagcccccacattgacaaagaacataactgccaatacaccagatccttgtcccagagaagaattcagcataaatgatgtcaacccatccaacctcacttgaaggcaaccagagctggggggaagtctggtaacaggcctccaagtaaggacagcatcaaagcaaacctctagggcactcagtgcagggttttccaaactgcaggttgcaaacaaaattgtgaaatcaatttaggaggccacaaccagaattttaaaaattgaaattcagcgccatagaaaatatcagagttgtctatcaccatagtaaaggtgttttatgacacttttttttttttgccaggtgttttatgtgtttactgggtcatgatattgtaacatgtatacttctaattatggatcttggtcaataaaactttgaaagccacatatctaaggagtactaagtacatataattttctaagcactacatttaataaaacaggattcctcataacaagc

SEQ ID NO: 922347 - DNA, 697 bp, Homo sapiens
tgcttgggcatgggggtgggtggatccaggctaagcacacctgttctcaggcccccagtggtgtgtgtggtaatgggctatggtaggcagaggcagggcaatcaccaggctcttggaggaatgcttaggttggagtggcaacagttgtgctgtggctctgctcctggggaggagagggttgctttcagtggcagtagaagaagcataaacaggcarctaaggagcacactctttggccacagttggcagccatataaacagagtaggctttcctcagggcatttttaaatgcatggtggccctgctactgggggtggtggggttgctgcctatggctcatactttggccctggcagtgccagacagcagcagctccctgctgtgtgtgtgggatgtcagtggggctccagggatgtgaagatgcaggagatgttgggctccagggcattctggtggagactgcgctctcaaaatagtgctttgctatagctgcttagtactgggggtgggcatgggacctggtgtgagcttcctttctggagcaattccttcaagaaatctctaggtagctccctatgttagtctcagggcctgtgtgggttgaaggactctcctgtggcaagaattgcaggagtctgtggtgggaatgtgaactgctgagagtcactcactttctctttcaccgcaattgggagat

SEQ ID NO: 922348 - DNA, 697 bp, Homo sapiens
tgcttgggcatgggggtgggtggatccaggctaagcacacctgttctcaggcccccagtggtgtgtgtggtaatgggctatggtaggcagaggcagggcaatcaccaggctcttggaggaatgcttaggttggagtggcaacagttgtgctgtggctctgctcctggggaggagagggttgctttcagtggcagtagaagaagcataaacaggcaactaaggagcacactctttggccacagttggcagccatataaacagagtaggctttcctcagggcatttttaaatgcatggtggccctgctactgggggtggtggggttgctgcytatggctcatactttggccctggcagtgccagacagcagcagctccctgctgtgtgtgtgggatgtcagtggggctccagggatgtgaagatgcaggagatgttgggctccagggcattctggtggagactgcgctctcaaaatagtgctttgctatagctgcttagtactgggggtgggcatgggacctggtgtgagcttcctttctggagcaattccttcaagaaatctctaggtagctccctatgttagtctcagggcctgtgtgggttgaaggactctcctgtggcaagaattgcaggagtctgtggtgggaatgtgaactgctgagagtcactcactttctctttcaccgcaattgggagat

SEQ ID NO: 922349 - DNA, 697 bp, Homo sapiens
tgcttgggcatgggggtgggtggatccaggctaagcacacctgttctcaggcccccagtggtgtgtgtggtaatgggctatggtaggcagaggcagggcaatcaccaggctcttggaggaatgcttaggttggagtggcaacagttgtgctgtggctctgctcctggggaggagagggttgctttcagtggcagtagaagaagcataaacaggcaactaaggagcacactctttggccacagttggcagccatataaacagagtaggctttcctcagggcatttttaaatgcatggtggccctgctactgggggtggtggggttgctgcctatggctcatactttggccctggcagtgccagacagcagcagctccctgctgtgtgtgtgggatgtcagtggggctccagggatgtgaagatgcaggagatgttgggctccagggcattctggtggagactgygctctcaaaatagtgctttgctatagctgcttagtactgggggtgggcatgggacctggtgtgagcttcctttctggagcaattccttcaagaaatctctaggtagctccctatgttagtctcagggcctgtgtgggttgaaggactctcctgtggcaagaattgcaggagtctgtggtgggaatgtgaactgctgagagtcactcactttctctttcaccgcaattgggagat

SEQ ID NO: 922350 - DNA, 627 bp, Homo sapiens
atatttttgttgtcattgttttgagacagagtcttgctctgtcacccaggctgcagtgcagtggtgcaacctcagctcactgcaacctccacctcccaggctcaagtaatcctcccacttcagcctcttaagtagctgagactacaggcatgcacccccatgcctgtctaatttttgtatttttgtagacacagggtttctccttgttgcccagactggtcttgaactcctgggctcaagtgatccacacgcctccgcctcccaaagtgctagggttacagccgtgaaccaccatggctgkccaacaaatttttaatcttacaattctgaaggtcggaaatccaaaatgggcttcactggctaaaatgaaggtgtcagcagggctgggttccctttgaaagctctaggggagaattcattcccttgctttgcttggtacaagctctagaagccacccacattcattggctcatggccccaattccttcacctcaaagctggcaactctcaacctagtcatccttacactgccatttctatagttctcccttctcattcctcttccagctttaaggactcttgtaatcacattgggtccatctgcataatccaggatcaattcactct

SEQ ID NO: 922351 - DNA, 587 bp, Homo sapiens
gtgtgtaggtaccacattttctttatccacttggtggacatttaaaattcatgctgaatgtggaaaaattcttaagagtacggggcagctctctgtctataggctctctggcatccccagtcttcacacaatgcaaaaaaaactgtgaatgaaatacacacatcccactagacagaaactaaatgagtcctcagctcaactccccctaaccagtccctagataggggcttacttgagaagtataatgcaggggatagcaaagtacaaaaagaaagcactcgtaactatttaaattaaaatactatactttttcraattgtagacatacgaccatgtacacagtttgctagcacccctcccaggtcttggaaggggtctgcacagtgagtggctcagaagcttgagacttcctaacttccctctcaatccacttatctttttacctaatttggccaaaaggaagcactggcaagagatggaagagctcctgggtttttggataagaccatttacttctccagcctaggatgcatagtgcttcctgcctctgttaatctttttttgagacagagtcttgctctgtcgcc

SEQ ID NO: 922352 - DNA, 773 bp, Homo sapiens
taaaatttttaaatgaaagctataagatctttgtgtgtatatgtgtttatgtgtgtttagacacatatgcatgtgttatgttgtatgttgtatatacataatacaatctggcatagttggccagaaatcctttaaggaattcttttcaagttggcttagagataagatatgcaaatgacacttaaaagtgtaaaaaaaaaaaaamcccaaatgccttttagctcatgggattcatatgaatctttgataaataaattggttttaaatttgttggtaaaataaaaatttgtttcagaattgttagcttacattttgttgcctgggtttgctggttagacaggattacattgatctctgttagatgttttacagtcataaaactataaattcagcttaggccaggtgcagttgctcatgcctgtaatcctagcactttgggaggccaaggtgggtggatcacctgaggtcaagagttcgagaccagcctgaccaacatggtgaaaacctgtctctactaaaaatacaaaaattagccaagcatggtggtggcctcctataatcccagctacttgggaggctgtgtcaggagaatcactggaagccagggggcagaggttgcagtgagctgagatcatgccacttcactctagcctgggtgaaagagtgaaactccatctcaaaaaataggtaaaataaaataaaatatattcagcttaatagcaaaatagattttgtttgtgtagctctttaaaaaagatgactaatattgttgg

SEQ ID NO: 922353 - DNA, 607 bp, Homo sapiens
ctccatgctgctctaatccttcaacaggtccatcacacatttttcctatgttgtctacaggcactttttctgcagtgttaataaagtcatttttatcattgctattattacgatcatctagattcaaaagcatattggctatgtcaccatcagtgaatgaatgaacaactgaagtctcattatcaatgttaaacaagttcttcaatattcacttcttccagcttactgatggactctgaaggtgtattttgtgcttttgtaaggaggttagacatcagtttttttcgtcacgtgatgtatggaattcttcaaagttactacctcgttcatcatcactgaacatagtcacaaggcagaggttgtgccagacrtgcacaactgtgtcctcagtcactgtgttccaagcactggcaatggtatatgtggcatccttcatgctaaagtccttttgaaaaccttccagacccatgtctctgttcactgctgctagcgtggtattcaagaaaatacttttatgtttacttttcattgatctaaggagatcctggtcacatgacttaatagtcacgtttgaggaaaagtatatgacataaacatttgttttaat

SEQ ID NO: 922354 - DNA, 625 bp, Homo sapiens
gcttgttacatagctttactgtgggaggctgatgtttggagtatgtacaattgatgccatcaccaaggtagtgagcatagtacccaatatttagtttttcaaccctgtccccttccctccctttctcctctaatggtccccactgtctactgctgccatttttatgtccataagtatacagtgtttagctctcacttagacataagaacatgcactatttggtgttctgttcctgtgtgaatttgcttagaagaaagtcctcaaactgcatccaagttgctgcaaaagacattactttgttcttttttatggaagcatagtattccatggtatatatgtactacattttcttaatccaatccaccatggatgggcacttagattgayttcatgtctttgctgttattaatagtgttgtgctgaacatataagtgcgtgtatctttttggtagaatgattgttttcttttggatatatatccagtaatgggattgctgggtcaaatggtagttctgttttaagtgctttgagaaatctccaaactgctctcagcagtgactgaactaatttacattcccaccaacagggtgtaagtaagtattcccttttttccacagccttgcca

SEQ ID NO: 922355 - DNA, 599 bp, Homo sapiens
agctaacccatccttcccgcacagacattataatgaagcagcatcctctctgctccatgtccaggcagatctctaggcatttagtgtgaccacttgcttgaatcagcagcctgagctggcccatccttcctttgcatactgtggtaaagtgccgccttccctgccccaagttcaggtgtatttacctgtataaaaataattcaaagcacacatttgcatggatttgcagactgaayaacctcaccctccatgtgtggagattgtggtgcatcagggccctctacactccacacacagacagatctccaggcatctggagcactccctcccctgagttaggagtctaggttgcctccattccccatgcagagaacttgaggccaagagattcctcaactctgtggctaggcacactaccaggtgcttgatggccacctgctagattctgccttggtgctggggcttgtgtctggcattaggggacctctatgcgggcctgctcaatctggccctgcccatcttgctccctgaactgccctgccccccggcagggctgagcaggtaactcagatcactgtgcaatctatggatcagactgg

SEQ ID NO: 922356 - DNA, 798 bp, Homo sapiens
tctaggtatagattttttttttttttggtgtgttttggtatttatcttgattggtgttatctgaggatctatacttcgcttgcttctattaattttggaaaattctcgggcattatttcttcaaatatttcctctatttttttcttccccttctagtattctcattgtgcatatgttacaccttttgtaatcatctcgcagttcttgaatattaagctctatttttctctttaatttatttttagtttgctaagtttccattgacataaactcaaactcactgaatcttttccttggctgtgttcaatctatggatcaaaattaaaggcattcttcatttctgtagcattgcttttgattttttttcttaaaagtttctaccaatatgcttacccaagtgttcttacaggctgtccacttttcccattagaaccttcagcatattaattatagttattttaattccaagtctgattatttccacagtctgtactatatctgaatccggttatggtgtttgctccatytcttcagactgtgttatttgcctgttagcatgccttgcaagacttttgaatgtcagacatgatgtattggggaaaagggctactgagtgaggtttacttttatctggccactagttagactacatttagtagttagacaggtgtattgttattatacctgtagatgttagaatctaaaatttcctctgtgtccttgcttttgcctcccctgttacctttatgttttcctagagactttctctgaactggagcctgagtttctgcttttctt

SEQ ID NO: 922357 - DNA, 765 bp, Homo sapiens
cctgttattatccagaagccttgttaatggggtagtgcagtgtggggaggaaagccactccatattcctgtaatcaggcattggttttttagtgggctgtacctcttcaaggtgcttctcacatctcttcctccccttccctgcttaagtgtaataggaatgtccaaaggtcctggagttaggcatttccatttttctgtgtcagtwaggctctagctcatggttgttggctctagtagtatttttttctatgacacaagcctttgctaattgagaatataatgctctggatgtatttcaaatggtaaattttcccctcctcctgccaaaaacaagaggggatttttgtgcagtcatcatcctgagaagctggtgagggcttttagaggtaaaactcatgaaaatgtgggacttttagaagtaatactcacaaaaaagtgtggaggttcccctaaggatgaccccccatgagattttctctatcaattagtccatacctattgtttagcaataagtcaattaagctttgtgtgttcctgccagaagagagctatagtttttgcttctggtaaattttatccttattttcttgtctttcctatttttgaattgatagtttgtcttgtgatctcaactttccatggatcttagaagaagtgtgatttgccagtttgttcaaggacaggagagatgacttatgagctgtttacatgtttaactagaaacctaaagtcagacacttgcttttcatgagtctttttagtc

SEQ ID NO: 922358 - DNA, 765 bp, Homo sapiens
cctgttattatccagaagccttgttaatggggtagtgcagtgtggggaggaaagccactccatattcctgtaatcaggcattggttttttagtgggctgtacctcttcaaggtgcttctcacatctcttcctccccttccctgcttaagtgtaataggaatgtccaaaggtcctggagttaggcatttccatttttctgtgtcagttaggctctagctcatggttgttggctctagtagtatttttttctatgacacaagcctttgctaattgagaatataatgctctggatgtatttcaaatggtaaattttcccctcctcctgccaaaaacaagaggggatttttgtgcagtcatcatcctgagaagctggtgagggcttttaraggtaaaactcatgaaaatgtgggacttttagaagtaatactcacaaaaaagtgtggaggttcccctaaggatgaccccccatgagattttctctatcaattagtccatacctattgtttagcaataagtcaattaagctttgtgtgttcctgccagaagagagctatagtttttgcttctggtaaattttatccttattttcttgtctttcctatttttgaattgatagtttgtcttgtgatctcaactttccatggatcttagaagaagtgtgatttgccagtttgttcaaggacaggagagatgacttatgagctgtttacatgtttaactagaaacctaaagtcagacacttgcttttcatgagtctttttagtc

SEQ ID NO: 922359 - DNA, 629 bp, Homo sapiens
ttaaaggcattcatttttataacagaagcagcataaagctttggaaaatttgcagcctgacaatgtgatagaaaagaaaatcccagcagggcatggtggctcacgcctgtaatcccagcactttgggaggctgaggtgagcacatcacctgaggtcaggagttcaagaccagcctggccaacatgggaaaaccccgtctctactaaaaaaaaaaatacaaaaaattagccaggcgcagtggcgggtgcctataatcccagctactcgggaarctgaggcagggagaattgcttgaaccggggaggcggaagttgcagtgagctgagattgcaccacttgcactccagcttggacaacagagcgagactccatctcaaaaaaaaagaaaaaagaaaaaaagaaaatcccattttttgagaagaaatcctagacaactacagaaatttgcataagtcatgaggagccgaatgttaatccctaagaaaatggggaaaatgtctccagggcatgccagaggtctttccagcagcccctcccatcaaaggcccagaggcctaggaggtaaaagtggttttatgggctgagcccagggtctccgtgctgtgtgcagcctagggacttggcaacct

SEQ ID NO: 922360 - DNA, 608 bp, Homo sapiens
tgaaaactacttttctgcctttccatctggctccctattaggccatgactattgggggttctagaggaagactcaaggctggaagagaagaaaggacattctccttcttttctgctccttgttgccttccagcaggattcatgtctgctccctgctcctaacacgctctttatcagcattgccccagccttgcttctccacccagcagtggcaaataagttcattcctatggcagctcaggaatctagctcacattctttttaattcttgcagactcagccttattgtgcmtctctcagagatatcagcattagtcagtgttccatcctcagggatctgggtcacaaccccatgggctcatcctctctgagctcagagaaccagcacaagctgaatgatgttgtcccctgagaagtctaagttgcagctccaatttcagacctctgctccaagctactaatttttaaaatttccaacctcttttttttgttgttgtttcctcagctctacgggtcatagccatttcctatagttgcagccttcacaatattttaatgctctctttttgcctttttagttacccagcaaacaaatgcatccttaagtta

SEQ ID NO: 922361 - DNA, 593 bp, Homo sapiens
aacctccgctccccgcaggctcaagtgctcctcctgcctcagcctcccaagtagctgggactactggtgcatactaccatgcttggctaatttttgtagagacagggtctcactatgttgcccaggcttgtctcgaactcctgggcttaagtgatctgcctgcctcagcctcccaaaatgcttraattacaggcatgagccaccatgcctgggcctcttctcagctttttaaactgatctgacaatctctgtcttttaattggtatatttagaatatttacatttttgttgtcatacattttacttttatataaactgtaattcaatatatattgctacaatttcttctttcagtagtcatttaacgtttagagtaattaaaaataagaaaaaatcttttatagttacctccatttcaatcatttctggagatctttatttctttgtgtagacacaagtttctgtctggtatcacattctttccacctaaggaatgtccctgagcatttcttgcagtacaggtctgctagtaatgaattccctctttttggttgtctgaaaaatgtctttcttttttcttcatttttgaaaga

SEQ ID NO: 922362 - DNA, 552 bp, Homo sapiens
ctcagcctcccaaaatgttatgattacaggcatgagccaacatgctcagcctgaaatggtacattttttttttacaaaaggaaaacagatattaatattatgggagattatattttccttaaatgactgcaataatatctctacttaatctctcattccacatgctcttcttataatgtgactaacactcctcccaattagtgtcccctttacttaaatgtggtgtttttgtagctgcttcaacaagtagagtacagtggaagtgacgctgtacaacctctgagattaggtcataaaaatcaatgcaagctggtctgagtctgagtgcagtggtgttkacaactaattgatcacaactactttacagatttctttgttccttctccactcccactgcttcacttggctaacctaaaaagaaagagagaaaaaaaaacgtcagtgcagcttctgccttgtcctcttgggactcttgtctctcttgggatgctcacttttggagcatagctgccaggctgtggggaagccaaacagccacatggagaggccaca

SEQ ID NO: 922363 - DNA, 822 bp, Homo sapiens
gtttcctcatctcgtttttttttttgttgttttttttttgacggagtctctctctgtcgcccaagctggagtgcagcggtgccatctcagctcactgcaacctctgccccctggattccagtgattctccagcctcagcttcctgagtagctggaatcacagccaccatgcctggcttatttttgtatttttagtagagatggagtttcaccatgttggccaggctggtcttgaactcctgacctcaggtgatccgcctgcctcggcctcccaaaatgctgrgattacaggtgagccaccgcgccctgcctcctccttatctctctctctctctttttttttttttttttaagtgagacaggatcttgctgctgcttaggctggagtgcagtggcacaaacctggcttactgcagcttctacctcctgggctcaagtgatcttcctgcctcagcctcctgagtagccaggactacagacccgcgccaccaagtctggctaactttttaatttttttggtagagacagagtttcactatgtgcccagagtgatctcaaagtcctgggctcaagcgatcttcctgcctaggcctcccaaagtgctgggattacaagtgtgagccaccatgcctggccagtttcctcatctctaaaacagggataacatacctcacaggcgtgtatgaggattacgtgtaaagcatgaggccagtgcctggcaaggtaccccagcagcattccccggtgggtcaggcctgcgtaacgtggccttgatgggttctgccatcaatcagagcaaggtgaggcgggcagcctgtgctga

SEQ ID NO: 922364 - DNA, 561 bp, Homo sapiens
aatcttttccactgaagttagggatgactgtgattttcagaacacgtccagaatttttcatcaagaaggtagcttgagcctgaaatgcaaaacccatggaggaattctgaagccattgtctccttgagtaccaacagggtcagggaagactgggcctcctgaatttattattgttctttaagaattacaggttgaggtagttgatggtggtaaacattctctcaggagacaataactccagtgatgttcttcaaagattttagcaaaaacagagtaaatagcattctctatcaatatataaatttaaaaaactatctttttgcttacagttttaaatyctgaacaattctctcttatatgtgtattgctaatcattaaggtattattttttccacatataaagctttgtctttttgttgttgttgttgtttttaagatggagtttccctctgttgccaggctagagtgcagtggcatgatctcggcttactgcaacctttgcctcccaggttcaagcgattcttctgcctcagcctcccgagtagctgggaccacaggtgc

SEQ ID NO: 922365 - DNA, 613 bp, Homo sapiens
gggcttggggatcacactgcccctgcctgccacagccagaacctgtacgcactactaggggacttgaggactggccttcttagtctagctccaccccctccccaagtacccaagcatgatactagaaaactaacaaagaaacattagatgttcctaccactgatgccagcaaatackgccctggggcccaaggacaggtaggctcagtctgctgctgccaccactgggctcaaggactggcctacctaatgtcctcatccctggcaaaacttcatcacagcctctgctaacaactgcatcctaagcaaccaaagaaatcataaatgctactgacactgcatatagccaaagaaatcatatggagactacaatactgcatacacccagaatcaaagccaaagttccttgtccaatcaacaccatagaaacaccttcaagaaaaattccttctctatgaaagcaaatgttaaaaattggaagaggtgatggttacaccagatgtgcaggtgtcagtgtaaggatataaaaaatttgaaaaagcaaggaaaaatgacacctccaaaggaatacagtcattatcaagcaacagatgccaatgaacaaaaaatttatg

SEQ ID NO: 922366 - DNA, 470 bp, Homo sapiens
gaggttgctggaggtccactccagaccctatttgcctgggtatcaccaacagaggctgcagaacagcacatgttgctgcttgatccttcccctggaagcttcatccctgaagggcacctgcctgtatgagctgtcagtcagcccctactgartggtgtctcagagttaggctacacgggggtcagggaccacttgaggaggcagtctgtccattctcagagctcaaacaccatgccgggagaaccactgctctcttcagagctgtcagacagggacgtttaagtctgcagaagtttctgctgccttttgttcagctatgccctgcccccagaggtggagtctacaaaggcaggtgggcctagttgagctgtggtgggctctgcccaattcgagctttcccagccgctttgtttacctactcaagcctcagcaatggtggacacccctccccctgccaggctgctgccctg

SEQ ID NO: 922367 - DNA, 470 bp, Homo sapiens
gaggttgctggaggtccactccagaccctatttgcctgggtatcaccaacagaggctgcagaacagcacatgttgctgcttgatccttcccctggaagcttcatccctgaagggcacctgcctgtatgagctgtcagtcagcccctactgaawggtgtctcagagttaggctacacgggggtcagggaccacttgaggaggcagtctgtccattctcagagctcaaacaccatgccgggagaaccactgctctcttcagagctgtcagacagggacgtttaagtctgcagaagtttctgctgccttttgttcagctatgccctgcccccagaggtggagtctacaaaggcaggtgggcctagttgagctgtggtgggctctgcccaattcgagctttcccagccgctttgtttacctactcaagcctcagcaatggtggacacccctccccctgccaggctgctgccctg

SEQ ID NO: 922368 - DNA, 442 bp, Homo sapiens
agttgtacatatttttggggtacatgtgttatcccgatgcctctataaaatgtgtaatgatcaaatcagggtaattgggatatctgtcacctcaaacatttatcttttgtgttgggaacattacagttctctcctacttattttgaaatatacaataagttattaaccataatttccctactgcatcaaatactagaactcattccttctrtctctctgtatttttgtaccatttaaccaacttctcttcaccctgccccccactctcttcccaggctctagtaaccaccattctactctctatctccttgagatccattattttagctcccacatatgaatgagaagatgtaatattagtctttttgagcttggcttatttctcttaacataatcacataatgacccgcagttctatccatgttgctgcaaataacaggat

SEQ ID NO: 922369 - DNA, 487 bp, Homo sapiens
gacttcctgggtcgagtggggacttggagaacttttctgtctagctagaggattggaaacgcaccaatcagtgctctgtgtctagctaaaggattgtaaatgcaccaatcagcactctgtaaaaacgcaccaaatcagtgctctgtgtctagctaaaggattgtaaacacatcaatcagcactctgtaaaatggaccaatcagcactctgtaaaatggaccaatcaaygctctgtaaaatggatcaatcagcaggacatgggaggggacaaataagggaagaaaagcttgccaccccagccagcagcagcaacccacttgggtccccttccacgctgtgaaagttttgttcttttgctcttcacagtaaatcttgctgttgctcactctttgggtccacaccacctttaagagctgtgacactcatcacgaacgtccacggcttcattcttgaagtcagcgagaccacaaacccaccaaaaggaaga

SEQ ID NO: 922370 - DNA, 577 bp, Homo sapiens
tttcataacttataaaatatttaatatatacatacacactcttcttttttctctgtacaaagtggttttaatatcagctttcaaaactgatcttataaaatgtaaatctaaattgtaaaatagttaagttttaacagtccctcccaaactttgkgttgattattcacttgctaaagagatgtgaggaatcagccttcagttttttggcagtagtatattttggaagtgaagaaattggaacacctgtttctaatttggtcttcatcattagagacaaaaccaaaacactccaggcagtactgtttatagtgctgagccaggtagcacacagacatagtagcctaaaggctcacataattcgcatgctcaggccagggcagggtaaaaatagccttctgcttctttcaacccagtatcaggaagcactaccccagtgttattatttgttttgtcaaggtaagtctaaataaacaagaaaaacttcttcggaaggcatggcgaagggagtattttaaatgaaaatgattacagaatttgaattagcatgcatctctttgtgtgcaacagtaatccaaga

SEQ ID NO: 922371 - DNA, 577 bp, Homo sapiens
tttcataacttataaaatatttaatatatacatacacactcttcttttttctctgtacaaagtggttttaatatcagctttcaaaactgatcttataaaatgtaaatctaaattgtaaaatagttaagttttaacagtccctcccaaactttgtgttgattattcacttgctaaagagatgtgaggaatcagccttcagttttttggcagtagtatattttggaagtgaagaaattggaacacctgtttctaatttggtcttcatcattagagacaaaaccaaaacactccaggcagtactgtttatagtgctgagccaggtagcacacagacatagtagcctaaaggctcacataattcgcatgctcaggccagggcagggtaaaaatagccttctgcttctttcaacccagtatcaggaagcactaccccagkgttattatttgttttgtcaaggtaagtctaaataaacaagaaaaacttcttcggaaggcatggcgaagggagtattttaaatgaaaatgattacagaatttgaattagcatgcatctctttgtgtgcaacagtaatccaaga

SEQ ID NO: 922372 - DNA, 581 bp, Homo sapiens
aaaatggtaaaaaaaaaaaaaaaagcaaacaaaacaccccattagaccagaagcttttgtattatgcaatcttgggttatgatccctaagaggcgggtcataatatatcctgtactttgtagatacagacaattctcatcctaaaaatggcctttgtcccaaaggtaatttacacttcagtggcttggaacatgaaatggatttttcccctgtagaatcaattttgcacaggtggtctaattcctttacaaatctctaagtaactcaagaaaaaacattcayatgtctatgaagaaaaatgctaataaatctgaaggtcttagcacatattagccatgtttcagtggaagaaaagtatttctaggttccagtatggaatgctaggacaacacctccctctctatattgccataatcaagatgggcaagggaggtcatctcttttctctctctctcactgatggcaataggaacgtttccaagacctccagcttccttgaggtgatgctttccgaccagagcagatagctcaagaatcagggcggagaatctggaatagtatgagagaataagaggtaggac

SEQ ID NO: 922373 - DNA, 581 bp, Homo sapiens
aaaatggtaaaaaaaaaaaaaaaagcaaacaaaacaccccattagaccagaagcttttgtattatgcaatcttgggttatgatccctaagaggcgggtcataatatatcctgtactttgtagatacagacaattctcatcctaaaaatggcctttgtcccaaaggtaatttacacttcagtggcttggaacatgaaatggatttttcccctgtagaatcaattttgcacaggtggtctaattcctttacaaatctctaagtaactcaagaaaaaacattcacatgtctatgaagaaaaatgctaataaatctgaaggtcttagcacatattagccatgtttcagtggaagaaaagtatttctaggttccagtatggaakgctaggacaacacctccctctctatattgccataatcaagatgggcaagggaggtcatctcttttctctctctctcactgatggcaataggaacgtttccaagacctccagcttccttgaggtgatgctttccgaccagagcagatagctcaagaatcagggcggagaatctggaatagtatgagagaataagaggtaggac

SEQ ID NO: 922374 - DNA, 745 bp, Homo sapiens
ctggtaaagcataatttctgggtatgtctggggatgtttctggaagagacttgcatttgaatcagtaagctgagtaaggaacatccacccttactcagtgtgcagggagcaccatccacttggctgaaggccaggacagacaaaaaggcttgggagggctcaatttgctygctctctttctcctggaactgggacatccttcttctcctgcccttgaacatcacaactctaggttctctgacctttggactctgagacttgcaccagcagatccccgtttctcaggcctctggctcctactgaaagttaccccattggccccctggttctcagacctttgtgcctggactgagtcacgctaccagcttccctgcttctcctgtttgcagatggcatattgcagggcttctcaacttttgattacctgagccagttcccctaataacgctcctctcatatctatctatctatctatcatctatctatctatttttatccatctatccctctatatatattatgtacacatctatcatctatctatatcccattggttctgtttctctggaaaatcctgattaatatagacatagacatagacgcagacatagacactgacacagacacagatagacacagacacagacacagacagacacagacacagacatagacacagacacagacctagatgcagacgcagatgcagacaaacgcagacgcagacacagacacagacgcagac

SEQ ID NO: 922375 - DNA, 745 bp, Homo sapiens
ctggtaaagcataatttctgggtatgtctggggatgtttctggaagagacttgcatttgaatcagtaagctgagtaaggaacatccacccttactcagtgtgcagggagcaccatccacttggctgaaggccaggacagacaaaaaggcttgggagggctcaatttgctcgctctctttctcctggaactgggacatccttcttctcctgcccttgaacatcacaactctaggttctctgacctttggactctgagacttgcaccagcagatcccygtttctcaggcctctggctcctactgaaagttaccccattggccccctggttctcagacctttgtgcctggactgagtcacgctaccagcttccctgcttctcctgtttgcagatggcatattgcagggcttctcaacttttgattacctgagccagttcccctaataacgctcctctcatatctatctatctatctatcatctatctatctatttttatccatctatccctctatatatattatgtacacatctatcatctatctatatcccattggttctgtttctctggaaaatcctgattaatatagacatagacatagacgcagacatagacactgacacagacacagatagacacagacacagacacagacagacacagacacagacatagacacagacacagacctagatgcagacgcagatgcagacaaacgcagacgcagacacagacacagacgcagac

SEQ ID NO: 922376 - DNA, 622 bp, Homo sapiens
gctcactgcaacttccgcctcccaggttcaagtgattttcctgcctcagcctctggagtagctgggattacaggtgcgcatcaccacgcccggctaatttttgtatttttagtagagacgggtttttgccatgttggccaggctgatcccagactcctgacctcaagtgatccacctgcttcagcctcccaaagtgctgggattacaggtgtgagccactgcgcccagcctgcattcacctgcattttgaccatcttagcccagaagtgacccacatttattccattcacatcccactgctgagaactggtgacaaggcagaaggtggggagggacgcagttcctggctaggctgctgctatcaggccacatctcaacactggaatggggaagcgtgggtgctggggggcagttggycatctctgctgtgggggctcacacaattgtgttatgaagccttgttttcaagcagaggggttattacaactcacttgtatgctgatggatcgcatgttagaaagggaaaccttgatgttgttggcaggagggatatttgagcagagtccttgagactgtgagaggggacggaacccagagcacagtggccccaggagttcattgc

SEQ ID NO: 922377 - DNA, 604 bp, Homo sapiens
ttcctggctgatgtggaaaaatgaaagaaagaaaaataaaggaaaaacagaacctagcacagtcttttgaaatgaatttgtagcaactagcagattctgtgggagaaactaaactaactagagtaataacaatcccaattctaagaaaattaagtcctagtttgttttttgtttatttatttatttatttttgaactactgtctcgctctgtagcactctccagcattgaatcaaatccgcaggaacctcatttttctcatttaaaaatgaaaccatttggacatggtgaagatcaaaatcccatggttttcaatgactctgagattctctaccctataatcctttccattggaataacttacatcatraaaattcctaaactatggaaatttaatactcagatcatattaaaggctctcagtctcttccatgacactcatgaataagaataataaattataaatcatactatatacccaactaaggatacatgttagaattatttattttccattttcttcatgtgtaaataaacttgcttaacaagtattgtgcatagcctatgaaatattatacagtcataaaaaagaacaaaatcatgtc

SEQ ID NO: 922378 - DNA, 661 bp, Homo sapiens
aaaatttttgtccaaaaataacaaaaaaagtatcaaaccacagatctaagaagctgagagagctttaaggtcaataaatacttgtccccccaaaaatgcacctaaacacatcctatgcaaacacctggaaaccaaatgtaaagaaggataccatggaaaaattgataaaactctagctaagacaaccaagaaaaaggagaaacaacactaattaccaacctcagtcacgaaagaggggacataaacacaaatctaattttatttaataaggggattttatgaaatttaataaggaatattactaaaaagttatgctgataaatgtgacaacacagattaaatgaactatatataggtatatgtgtatgacctcaataattccatacatttaaagatatcaaatttatagttgaaaattgtcaaacaacaacatcaatactckaggcccgtatgacttacttcgcaaagtctaacaaacatttaaagatgaaatgaaaccaattttatacaaactctttcggaaaattaaagaaggaacacatcccaactcctgtaataagagaaaaattataatgtcaaaacaaaacagaaaaaaaagagaccaccagaaaaaaaacctgcagtccaaaatacatattcagcaaacacgcagaagtcctca

SEQ ID NO: 922379 - DNA, 577 bp, Homo sapiens
ccaataacgagatacagatgaactgggaaagaagggaaaggcctggaaattatcgccagaccaattcaaaattacaaagttttccagagcttatataccttctaagctatatgtctacatgtaaatgcattcatctaaagacgtaagtgattaacttcttttaatctataactaagattagatcaggacctaaggaaggtcctgaaaaccttcttctggggcctcagtaaatttactcaatctaaatgggtccaggtcctggggtgattacccttatcttgcctcctgctaaatcacggaggtttrgggagttccttcagactgccaataaacttgtttgtggcggcctgaggagtttcttcagacccccagtaaaacttgtttaattctaaacaggtcctgttaagaattccttcattatcttgtcatgcttcaaggcccaggaaaggcctaggcaaaactcttggtgggtttttgttacatcccagcctttgtgaaaggacactggctctatcagcttttaatatttaacataaccactcagtcagtaccggaacagttgttatggaggcctgtc

SEQ ID NO: 922380 - DNA, 567 bp, Homo sapiens
tacagatgaactgggaaagaagggaaaggcctggaaattatcgccagaccaattcaaaattacaaagttttccagagcttatataccttctaagctatatgtctacatgtaaatgcattcatctaaagacgtaagtgattaacttcttttaatctataactaagattagatcaggacctaaggaaggtcctgaaaaccttcttctggggcctcagtaaatttactcaatctaaatgggtccaggtcctggggtgattacccttatcttgcctcctgctaaatcacggaggtttggggagttccttcagactgccaataaacttgtttgtggcggcctgrggagtttcttcagacccccagtaaaacttgtttaattctaaacaggtcctgttaagaattccttcattatcttgtcatgcttcaaggcccaggaaaggcctaggcaaaactcttggtgggtttttgttacatcccagcctttgtgaaaggacactggctctatcagcttttaatatttaacataaccactcagtcagtaccggaacagttgttatggaggcctgtctg

SEQ ID NO: 922381 - DNA, 612 bp, Homo sapiens
gaagtgtggcctgaaacccgggggcagcacggctccgtagctggagaggctgcccttgtagacacagaactcctcgcagtggccctggcgacagcgccgcagcagcagggcgtacaccagcggggcgccagcatcctccgcgtcatgccagcctgagggacggtccccacggcatcacgggagggctccgtgacgtcacagagtcgggggatcccgctgctccccccamgcaggcctgcactcacccgtgcattcgaagtgcaccttggtggtgagggcgtgcacagcgcccagtgggaagaggcggcaagagccccccagcggcgggcggttgggggacaggcggatggaggcgcagccctcctcctcgccagagcggcccagcaccgtgagcgtgaaggtgtatccctcgccgtcccgcagcacgccccgccgcagcaccagtcgcatgcctgcactgcccgtggatgtggtggtctcatccagcaccagcgtcttgttgctgaacgtacgtgcagcccaccgctgcaggcagaaggggtggtgagggggcgcaaccctctgccctgtcagccccacttctgcctgcaggccccgtcccctcggccatgg

SEQ ID NO: 922382 - DNA, 612 bp, Homo sapiens
gaagtgtggcctgaaacccgggggcagcacggctccgtagctggagaggctgcccttgtagacacagaactcctcgcagtggccctggcgacagcgccgcagcagcagggcgtacaccagcggggcgccagcatcctccgcgtcatgccagcctgagggacggtccccacggcatcacgggagggctccgtgacgtcacagagtcgggggatcccgctgctccccccacgcaggcctgyactcacccgtgcattcgaagtgcaccttggtggtgagggcgtgcacagcgcccagtgggaagaggcggcaagagccccccagcggcgggcggttgggggacaggcggatggaggcgcagccctcctcctcgccagagcggcccagcaccgtgagcgtgaaggtgtatccctcgccgtcccgcagcacgccccgccgcagcaccagtcgcatgcctgcactgcccgtggatgtggtggtctcatccagcaccagcgtcttgttgctgaacgtacgtgcagcccaccgctgcaggcagaaggggtggtgagggggcgcaaccctctgccctgtcagccccacttctgcctgcaggccccgtcccctcggccatgg

SEQ ID NO: 922383 - DNA, 479 bp, Homo sapiens
cagctgtagtcagtatctttctggagcaataacatcaaaacagtgatgtttcatcagcattatagacttgttctggtgtcagattttcttttctttttttttttttttttccttttgagacagagtctcgctctgtcacccaagctagagtgcagtggcacaatctcagctcactgcaacctccacctcctgggttcaacaatcctcccacctcagcctcctaagtaactgggattacaggcacacaccaccacaccttgctaacttttttgtatttttcagtagagacggggttttgccatgtaggtcaggctgttatcaaatcttggcttcaagtgatccrcccactttgacctcccaaagtgctgggattacaggtgtgagtcatttcacccagtctggtgtcagattttaatcagcgatgactttggcaaactcataaatgaatttcagtactattttatggtcagttgacactt

SEQ ID NO: 922384 - DNA, 761 bp, Homo sapiens
tccatgtctgacagtccagtatctgaggctcattcctctcgggcacctcagcaccattgtcaccttgtctgggagcacgcctggcagggtcagatgcctactctgggctcctgaagcaaccgtggggccccctcgatcatagctcttcatgaaaatgccacatcctcccccatgaccaggatggcatcggtcccctctgtgtccccagcacaaggcatggatcccggcacatttgggacacatagtatttgtgggagggaaggaggaaggtgagcagaaaacccaaagccaggggccgggcgcagtggctcacacctgcaatcccagcactctgggaggccgaggcaggcggatcacttaatgtcaggagttcgagactagcctggccaacatggggaaacccagtctctaatacgaatacaaaaattagctgggcatggyggcaggcacctgtaatcccatctacttgaaggctgaggcatgagaattgcttgaacctgggaggcggaggttccagtgagctgagatcgcaccactgcactccagcctgggctacagagcaagactgtctcaaaaaagaaaactcaaagccagggagattttaatgccaaccacctagatccaaactcagccactccacggaccctccctgacgctgctgggagccagacaccacagggaagcaggggcaaaaactgaccctcacgcagtgtccgcctccagggaactgtggaacacatcgcagagagctcaagcgccac

SEQ ID NO: 922385 - DNA, 679 bp, Homo sapiens
gaggtcaggaattcaagaccagcttggccaagatggtgaaaccctatctctactaaaaatacaaaaattacccaggcatggaggtgggtgcctgtaatcccagtaatcctaactacttgggaggctgaggtaggagaatcacttgaaccttggaggcggaggttgcagtgagccaagatcgtgccactgcactccagcctgggcgacagagtgaggcactgtcttaaaaaaaaaaaaaaaagaatttagtgaatttagtaagaaaatgcacaggaagctggtgactcatggtggaggcccagtagtagcatctttgatgaaagaagagagtggagaaaaggaggargagaagagggcacccccctcttaaagtccattcttaacacagtgggaaagaataatggggaaaggtgtagggaaaggaaggtaacttctattacagcatgttttatgggctttattatctctgggctctgcgcgattattcgaccagtgttcactgagtgtgccaaccatctcatctattcctcacaaccccccaaggaggaagattttcttcccccaactgggtagatggaggaatgaaggctcaggtgggtgaccaggtgtacctgtgggtgcacagccagtgagctgtggagctgagacccaaccctgtcccaaggaacagcaagaccct

SEQ ID NO: 922386 - DNA, 562 bp, Homo sapiens
gtttgctggaggtccattccagaccctgtttgcctgggtatcagcagcagaggctgcagaacagcgaatatttctgaacagcaaatgttgctgcccgatcattcctttggaagcttcgtctcagaggggcacccgactgcatgagatgtcagtctgcccctactgtgggggtgcctcccagttaggctactcgggggtcaggaacgtacttgaggaggcagwctgtccattctcagatgtcaaactccatgctgggagaactagtactctcttcaaagctgtcagacagggacatttaagtctgcagaggtttctgctaccttttgtttggctatgccgtgcccccagaggtggagtctacagaggcaggcaggcctccttgagctgtggtgggctccacacagttggagcttcccatctgctttgtttacctactcaagcctcagcaatggcaggcgcccctcccccagcctcgctgccgtcttgcagttcgatctcagacggctgtgctagcaatgagtgaggctttgtgggcgtgggaccctctgagccaggcatggga

SEQ ID NO: 922387 - DNA, 562 bp, Homo sapiens
gtttgctggaggtccattccagaccctgtttgcctgggtatcagcagcagaggctgcagaacagcgaatatttctgaacagcaaatgttgctgcccgatcattcctttggaagcttcgtctcagaggggcacccgactgcatgagatgtcagtctgcccctactgtgggggtgcctcccagttaggctactcgggggtcaggaacgtacttgaggaggcagactgtccattctcagatgtcaaactccatgctgggagaactagtastctcttcaaagctgtcagacagggacatttaagtctgcagaggtttctgctaccttttgtttggctatgccgtgcccccagaggtggagtctacagaggcaggcaggcctccttgagctgtggtgggctccacacagttggagcttcccatctgctttgtttacctactcaagcctcagcaatggcaggcgcccctcccccagcctcgctgccgtcttgcagttcgatctcagacggctgtgctagcaatgagtgaggctttgtgggcgtgggaccctctgagccaggcatggga

SEQ ID NO: 922388 - DNA, 562 bp, Homo sapiens
gtttgctggaggtccattccagaccctgtttgcctgggtatcagcagcagaggctgcagaacagcgaatatttctgaacagcaaatgttgctgcccgatcattcctttggaagcttcgtctcagaggggcacccgactgcatgagatgtcagtctgcccctactgtgggggtgcctcccagttaggctactcgggggtcaggaacgtacttgaggaggcagactgtccattctcagatgtcaaactccatgctgggagaactagtactctcttcaaagctgtcagacagggacrtttaagtctgcagaggtttctgctaccttttgtttggctatgccgtgcccccagaggtggagtctacagaggcaggcaggcctccttgagctgtggtgggctccacacagttggagcttcccatctgctttgtttacctactcaagcctcagcaatggcaggcgcccctcccccagcctcgctgccgtcttgcagttcgatctcagacggctgtgctagcaatgagtgaggctttgtgggcgtgggaccctctgagccaggcatggga

SEQ ID NO: 922389 - DNA, 634 bp, Homo sapiens
gatgcctcattttggaacagtctgcatacttaattactagaaatagcagaaaaagggcattgattagggttcacatgagattgtctagtgagtatggttaggaagtaagaccatttgtttgtaaaccagaatttctagattctagtatttctacttctattaatatattatatgatttaktaaggtatttaagtttctatatttttatttgcccaatgagaagtaagattagcgattcttcattgcctaaattttggtcagccaagaacatgtgtacccataattggtccttttcttagcccccttgcagagacacagcctgctggccagcttattgtactctcttttcatttcccttactcctttaatcagaaatagagacgtgacaatgttgagtctcctgtggactaaagtggactgggaaacactgggctacaccataaaaggcctgtctggcaaatgctaataatccatattacatattcagtccttgtaacgtaaaaacagaaatctacagaacaaaataattgtacatataacccagtgcccagatgagtatttaaaagccttttttaaagcactttaaggaatctccacactgttttctccatagaagttgtactagtttacattt

SEQ ID NO: 922390 - DNA, 604 bp, Homo sapiens
gtcggagggggctgcttccttcaagagtttgctgatagctccttttcccttctggctagagaccccagtctaatgacaccttcaggtgtttgtagcagtcacccagggacccgccctattgtgcctctagcccaggctccccaccccctgtcatctcgacccctttctgcggcctcacctggaagactttggcagcagagacaaggcaggccagggcagaggagagggtggccccgaagatgccagccgtgatcaggggcgcgaagcctgacaccatgctcatggtctgtggggatttggggctcagggactccacggtgggggctgagccagragcccccatctgtggcacttcattccctactgcgggcaggggctgggtcctgagcctccacctgagtccacaacccacccctggagatcccagtgtccacccacaagtcgggactggacagacctgggctctgaacccctctctcctaagcctaggcctcaacccccaaaactatgtccccccaacaaacttccaggcctgcaaggggccctgcagcctccacccagcccccactgtgtctggtgggtcagctctcctggcagtacctgg

SEQ ID NO: 922391 - DNA, 762 bp, Homo sapiens
ctccagcctgggtaacagtaagactccatctaaaaaaaaaaatcattactgacacttgtttgaatttgggggggaaaggaaagaaaaaaatgtaagactgacaaaacactgtggcagtaagatactaaattataaacaaggcctaagtccattgcaaggtaggggttaagtcacaccttacaaaccatgaaaccttcatttaaatgggttttttattaactcgggataatgtggcttactttccaacctgactctcataaggcatcgcatgactgacagcagaccacctcccaccttatcagaacttaagcattcctttctactaacttcaagtctttagacgaagcttaactctttcaagcaactaccaactaaagcatccctaaaacccacctatgacttgtaagccgcagctctgaaacgtcccgccttttcaggccaaaccaatgtataccttccatgtattgatgtgattttatctgcaattcttgcctccctaaaacatataaaaaccaaactgtgggccaggcatggtggttcatcccagcactttgggaggccaaggtgggcrgatcgcttgagcccaggagttcaagaccagcctgggcaacatggtgaaattgcatctctacaaaaatacaaaagctagccgggcatggtggtgcacatctacagtcccagctacttgagaggctgagatgggaggatcacctgagcctgggaagtcgaggctgcagtgagccgtggtcacatcactgcact

SEQ ID NO: 922392 - DNA, 558 bp, Homo sapiens
tagaacaccaggtagatttctccaggcctaagggctctttagtcagtaagtgatggatccttctaggactgggtccttcccttcaaggcagcaggttccctctggccctagatatgtctagaaatgtcatctgggagctagggcctggaatggggtcttcattactctgcctggtgccctatcctrctgtggctgagctggtatctatgatgcaagacgaagacctctttgtccctcttctcttctcaagcagaaggaaggggtccattttagaaccacaagctgtgctgcctggggctgtgggaggagtggcacaagcactcccttagctgccccagcttgtgtctcagtaaattgtatggccctccaagttcactgtctccaagcccaactcagcaccagcacttgcctaggagttgcagtactccttaaaaggcctaaactgcgttttaagtttatttagggacccagagcgctttagcccatggtggtgaggcttgccgaaactcaagttccaactgttggagtgggcagttctcctctggctagggctggtgt

SEQ ID NO: 922393 - DNA, 545 bp, Homo sapiens
aattgaatcatagaatcagtgtcccttatgctgttctcatgatagtgggtgagttctcatgagagctgacggttttttaaggggctcttccctggcacttctctttcctgctgccttgtaaagaagtgccttgcttcccatttgccttccaccatgaytgtaagtttcctgaggcctcccgagccatgctgaactgtgagtcaattaaacctttttcctctataaattacccagtcccaggcagttctttatagaagtaaattgggactggagagagtggggtgttgctataaagatgcccaaaaatgtggaagtgactttggaagtgtgtaacaggcagaggttggaacagaagacagaaagatgtgggaaagtttgcaacttcctagagacttgttgaatggctttgaccaaaatgctgatagtaatatgacaatgatgtccagactgaggtgatctcagatggagatgaggaactttttgggaattggaataaaggtgactcttactatgctttaacaaagagactggtgaaattttgcccc

SEQ ID NO: 922394 - DNA, 621 bp, Homo sapiens
ctaaccaaaagaggacgaaaagggcacctagcaaggcagaaaacttttagataataacagcacaactccagtcaaacattaatggaaatgcataacgcagtctccctcccaaccccatcagcaaaggctagacgggagcttggactccaccctcattagatggaaatatggtacccaaattcccccacatgataatatcagagaaggtggagtaagaaaccaagaccttcattcctgtcccaaggtaactcctgtcacaccttcgtagtgtcagtggagaccatgcaggcaatcaatctacatgctgacctggctgttacaagacacccagttccctccttgccatgttagtgtctgtattagtcagggttctctagaggcacaraacgaataggatgaatatataaaagagagtttattaaggagtattaactcacatgatcacaaggttccacaataggccatctgcaagcaaagaggccagtctgagtcccaaagctgaagaacttggattctgatgtttgaggacaggaagcattcaacacaggagaaagatgtaggctgggaggctaagccagtctagtctctccacgttcttctgcccactttctattctggccg

SEQ ID NO: 922395 - DNA, 600 bp, Homo sapiens
ttatataacaatgaatatttaaaaatgaaatttaaaacccataccacttacgataacatcaaaaacatcaaattcctaagagcaaatataacaaaaatttttaagacctctaccgtggaaactataaaatattattaaggaaattaaagactttaataaatgatagtayattaccatgtttggggattaaaagactcaaaattgtttagatggtagttctcctcaatttgctctacttatttaaggcagtccatgctaaagtcacagagttttgttgtttatttttgttctttttttttttatggaaatccacaagctagttataaaatctatatggaaaggcacagaacctggaacagcaaaagaaacatcaagtaagaagataaaaagctaaaaaatttacattaccagagattaagacttactctacatctacagtaattaaaaccacatgtatttcacaagtatagaccaactgaccagtgggacagaatgaagatgtgagaaacagagccacatatgtacaatcaactgatttctaagaaactatttattaatatgtatttcagggaaaatatttataataaattgtgccaagtc

SEQ ID NO: 922396 - DNA, 600 bp, Homo sapiens
ttatataacaatgaatatttaaaaatgaaatttaaaacccataccacttacgataacatcaaaaacatcaaattcctaagagcaaatataacaaaaatttttaagacctctaccgtggaaactataaaatattattaaggaaattaaagactttaataaatgatagtatattaccatgtttggggattaaaagactcaaaattgtttagatggtagttctcctcaatttgctctacttatttaaggcagtccatgctaaagtcacagagttttgttgtwtatttttgttctttttttttttatggaaatccacaagctagttataaaatctatatggaaaggcacagaacctggaacagcaaaagaaacatcaagtaagaagataaaaagctaaaaaatttacattaccagagattaagacttactctacatctacagtaattaaaaccacatgtatttcacaagtatagaccaactgaccagtgggacagaatgaagatgtgagaaacagagccacatatgtacaatcaactgatttctaagaaactatttattaatatgtatttcagggaaaatatttataataaattgtgccaagtc

SEQ ID NO: 922397 - DNA, 600 bp, Homo sapiens
ttatataacaatgaatatttaaaaatgaaatttaaaacccataccacttacgataacatcaaaaacatcaaattcctaagagcaaatataacaaaaatttttaagacctctaccgtggaaactataaaatattattaaggaaattaaagactttaataaatgatagtatattaccatgtttggggattaaaagactcaaaattgtttagatggtagttctcctcaatttgctctacttatttaaggcagtccatgctaaagtcacagagttttgttgtttatttttgttctttttttttttatggaaatccacaagctagttataaaatctatatggaaaggcacagaacctggaacagcaaaagaarcatcaagtaagaagataaaaagctaaaaaatttacattaccagagattaagacttactctacatctacagtaattaaaaccacatgtatttcacaagtatagaccaactgaccagtgggacagaatgaagatgtgagaaacagagccacatatgtacaatcaactgatttctaagaaactatttattaatatgtatttcagggaaaatatttataataaattgtgccaagtc

SEQ ID NO: 922398 - DNA, 603 bp, Homo sapiens
acagtgggctccctgccaagggcaagtccagaaatgctatccaagagtcaagccctggaatcagggactctaagaacccacttggtcctctaccccccatggtagtgctggtacctaaggtgcaagacaaagtcccttttacttttccccctgcttttctcaagcagaaggaattttgccctctagccaccacacctggtaatgtgctgagtctcacctgaagccagtaagtctcagaggctcacccaaggccctcaatgtagtatctgggtatcgctgctggttattcagggcccaggggctcttcagttagcaagtaatgaatgctgccaggactgggtcctttccttcaaggcagcagcttccattatggtccagggtgtgtctagaaatgtcatctgggagcaagggcccagaatggggaactcacaattctgattggtgccttatcctrctgtggctgagctggtatctaagatgcaagacaaagtccttcccactattctctcttttcctcaagtgaaggaagggggtctcttttggatccatgggctgtgcagcctagggcaaaagagtggtgatgccagcaccctcttggctgct

SEQ ID NO: 922399 - DNA, 560 bp, Homo sapiens
aagccctagtctgagtccagagtcccaagaaccaggagtgctgatattcaagaacagagaccatgaatgtcccagcttaagcagagagaaaattcactctcctccgcatgtttttctattcagaccctcaacaaattggatgatactcacctacattgtgaaggcaatcttcgttacttagtgtactgattccaatgctaatcttttctgaarccaccttcacagacccacagaaataatgttaccagctatctgggcatctcttagcccagtcaagttgacacatgaaattaatcatcaggctgggcgtggtggctcacacctgtaatcccagtgctttgggaggccagggtggacagattgcttgagttcagcctgggcaacatggcaaaaccccatctctaccaaaaatacaaaaaagttagccaggtgtggtggtgcatacctgtggtctcagctactcaggaggctgaggtgggaggattacttgagcctgggaggcagaggttgcagtaagctgagatggcaccactgcactccaacctgagtgacagagtgag

SEQ ID NO: 922400 - DNA, 621 bp, Homo sapiens
gactggcaaattagctttactcaacatgccccgagtcacaaaaactaaaatacctcttagtctaagtagacactttcactagataggtagaggcctttcccacagggtctgagaaggccaccgcagttatttcttcccttctgtcagatataattcctcagtttagccttcccacctctatacagtctgataacagatcagcctttattagtyaaatcagccaagcagtttttcatgctcttagtattcagtgaaacctttatatcccttacagtcctcagtcttcaggaaaagtagagcagactaaaggtcttttaaaaacacacctcgccaagctcagccacacacttaaaaaggaatagacaatacttttaccactttcccttctcagaagtcagacctgtcctcagaatgctacaaggtacagcccatttgagctcctgtatagacgttcctttttattaggccctagtctcattccagacaccagaccaacttagtctgtgccccaaaaaaacttgtcatccctactatcttctgtctagtcatactcctattcactgttctcaactactcatacatgccctgctcttgtttacactgccggtttacactgtttct

SEQ ID NO: 922401 - DNA, 601 bp, Homo sapiens
  misc_feature 1, 2, 3, 4, 5, 6, 7, 8, 9, 10, 11, 12, 13, 14, 15, 16, 17,18, 19, 20, 21, 22, 23, 24, 25, 26, 27, 28, 29, 30, 31,32, 33, 34, 35, 36, 37, 38, 39, 40, 41, 42, 43, 44, 45: n = A,T,C or G
nnnnnnnnnnnnnnnnnnnnnnnnnnnnnnnnnnnnnnnnnnnnngaaaaggaatgacatgttccctgctcagtacttatcttccctacctgtctgtagctctgtaaagtaaatgtatgtagcccagcatcatctaatgtgaatgtttggctctttcagtttccatgctcaagttgcctcagttaaygaggacttatttaaagtaccaaagggaaataagaacaggaaaccctcttagcagtcaaatcattggcctgtgcagtcactcaggataccatggtagacctggtagtccaccagtctgagtctgggccatccagtcatctctgctctgttgcctcccctattcccctcccctctgcctactttttcatcctttattattgcttggtctacctcttctgctgccaccagttaccatttaaaaatatatgattaaatcatttttcacagtttaatgcatttcatttctgttagtcttggtataggccactagttggtctctctctcactgccttggcctcagggagcatctgtggatagggtgagatcaaggccgccaagctgcagcacatggagatctggacataaagaactacct

SEQ ID NO: 922402 - DNA, 601 bp, Homo sapiens
  misc_feature 1, 2, 3, 4, 5, 6, 7, 8, 9, 10, 11, 12, 13, 14, 15, 16, 17,18, 19, 20, 21, 22, 23, 24, 25, 26, 27, 28, 29, 30, 31,32, 33, 34, 35, 36, 37, 38, 39, 40, 41, 42, 43, 44, 45: n = A,T,C or G
nnnnnnnnnnnnnnnnnnnnnnnnnnnnnnnnnnnnnnnnnnnnngaaaaggaatgacatgttccctgctcagtacttatcttccctacctgtctgtagctctgtaaagtaaatgtatgtagcccagcatcatctaatgtgaatgtttggctctttcagtttccatgctcaagttgcctcagttaatgaggacttatttaaagtaccaaagggaaataagaacaggaarccctcttagcagtcaaatcattggcctgtgcagtcactcaggataccatggtagacctggtagtccaccagtctgagtctgggccatccagtcatctctgctctgttgcctcccctattcccctcccctctgcctactttttcatcctttattattgcttggtctacctcttctgctgccaccagttaccatttaaaaatatatgattaaatcatttttcacagtttaatgcatttcatttctgttagtcttggtataggccactagttggtctctctctcactgccttggcctcagggagcatctgtggatagggtgagatcaaggccgccaagctgcagcacatggagatctggacataaagaactacct

SEQ ID NO: 922403 - DNA, 565 bp, Homo sapiens
atatacccaaaggattacaaatcattctgctataaagacacatgcaaaagtatgtttattgctgcactattcacaatagcaaagacttggaaccaacccaaatgcccatcaatggcagactggataaagaaaatgtggcacatatacaccatggaatattatgcagtcataaaaaaggatgagttcatgtcctttgcagggacgtggatgaagctggaaatcatcatactcagcaaactaacacagaacggaaaaccaaacaccacatgttctacccataagtgggagttgaacaatgagaacacatggatacagcgaggggaacatcacacactggctcctgtcgggaggtggggggctaggggagggattaggagaaatacctaatgtagatgacaggttgatgggtgcagcaamtcaccatggcacatgtatacctatgtaacaaacctgcacattctgcacctgtatcccagaacttaaagtataataataaaaaaaagtcattacagtataaaatatggttcagctatcaataaattttgcattgttaaaaaaaagaatt

SEQ ID NO: 922404 - DNA, 633 bp, Homo sapiens
gggtcactcccaacctaatactgtgattttccaatggtcttagcaaatggcacagcaggagattatatcctgcacctggctcggatggccctatgcccacggagccttgctcattgccaggacagcagtctgagattgaactgcaaggtggcagcgaggctgggggcagggcacccaccaatgctgaggcttgggtaggtaaacaaagtggccaggaagctcgaactgggtggaycccaccgcagctcaaggaggcctgccagcctctgtagactccacctctgggggcagaccatagccaaacaaaaggcagcagaaacctctgcagacttaaatgtccctgtctgacagctttgaagagagtagtggttctcccagccccctttgagatctgagaacggacagactgcctcctcaagtgggtccctgaaccccgagtagcctatcttggaggcaccccccagtaggggcagactgacacctcacacggccgggtacccctctgaacgaaacatgcagaggaacgatcagatagcaacatttgctgttcagcaatatctgctgttctgcagcctccgctgctgatacccaggcaaacagggtctggagtggacctccagcaaactccaacag

SEQ ID NO: 922405 - DNA, 729 bp, Homo sapiens
ctcagccttcagtgagttgcaatctttttgctggtggaggatcttgcctcatgatggctgctgactgatcaggttggtggttgctgaaggttggggtggctgtggcaattttttaaaataagataacaatggagtttaccacatcgattgactcttgctttgagggaagatttctctgtagcttgtggtggtgtttgatagcattttactcacggtagaactttgtttgaaactggagtcgatcctttccatccctgctgctgctttatcaactaagtttatgtaatataccaaatcctttgttgtcatttcacaatattgacagcatcttcaccaggagtagattccatctcaaggaaycacttttttaaaatttttaatttttagtggtacctagtagatatatatttatggggtacatgagacattttgatacaggcataccacatgtaataatcacattagggtaaatggggcatccgtcacctcaagcatgtatttctttgtgtcacgaacattccaattatactcttttagttatttttaaaagtactataaattattgttaattgtagtaactctgttgtgctatcgaatactagattttattcattccttctatgttttgtgcccattaaccatccccactctccccccactccccactactgattccagcctctggtagccaacattctactgcctatctccatgagttcagttgtttaa

SEQ ID NO: 922406 - DNA, 764 bp, Homo sapiens
atagcttaatttaaaaatactttattgctaaaaaattctgacaatcatctcagccttcagtgagttgcaatctttttgctggtggaggatcttgcctcatgatggctgctgactgatcaggttggtggttgctgaaggttggggtggctgtggcaattttttaaaataagataacaatggagtttaccacatcgattgactcttgctttgagggaagatttctctgtagcttgtggtggtgtttgatagcattttactcacggtagaactttgtttgaaactggagtcgatcctttccatccctgctgctgctttatcaactaagtttatgtaatataccaaatcctttgttgtcatttcacaatattgacagcatcttcaccaggagtagattccatctcaaggaaccactttttwaaaatttttaatttttagtggtacctagtagatatatatttatggggtacatgagacattttgatacaggcataccacatgtaataatcacattagggtaaatggggcatccgtcacctcaagcatgtatttctttgtgtcacgaacattccaattatactcttttagttatttttaaaagtactataaattattgttaattgtagtaactctgttgtgctatcgaatactagattttattcattccttctatgttttgtgcccattaaccatccccactctccccccactccccactactgattccagcctctggtagccaacattctactgcctatctccatgag

SEQ ID NO: 922407 - DNA, 613 bp, Homo sapiens
catccaacctaagggctttaaatatcatcgggacactgacaagccccaaatttatggtaccagcctgcacttctctgacttctcgactgtctggccaacgtcggctgtctactgaacctctccatttaaatgtttaataggtaactcaaacttagcatttataacactgaactcytgattctccctccagttttgctatgccaagttttccccataccagtaatggccaactccattcttccagttgcatagccaaaattttggaatcatccataacatttttctttctcttgtactctacacccaaaacatcagaaaatccttttgactctgacatcaaaagacatccagaatatgacccatttttacaattcctcttgctacatagctggctcaagccacaatcatcttagagctagattaagagcctaggtattataacagattattgttataataggtcattgtgatagatctccttgcttctgccctggttccctataggtttacactcaacatagcagttaagagcttttccttgaatatattaggtcatgtcactctaaataaaagccctgaatggtttcccagcttcctcagagtgaaagtcaaa

SEQ ID NO: 922408 - DNA, 506 bp, Homo sapiens
tatctcctgccaagaaaatcagcctgtcctttgaagcttttaagccaggcactgtcatctctacaacaatgaaagtcttggatggcaactttttaaaatagaatgctgttttgtcaacactgaaaatttgttgcttactgtagccaccttcatcggttatcttagctaggtcttctggataactggaaacatatatagtaactgtgtatctctatatgcattatcaacattaccaggagtttggaagaaatttatttcamccctcatgaatgacactgacgggtttaaaacttcattggaggaagtaattgcagatgtggtggaaataacaagagaagtagaattacaagtggaggctgatgatgtgactgaattgctgcaatctcattaaaaaaattaaacagatgaggagttgcttcttatggatgagcaaagaaagtggttcctcgagatgaaatctactcctagtgaaggtgctgtgaacatgcttgctgtctcaccttgct

SEQ ID NO: 922409 - DNA, 606 bp, Homo sapiens
tggtacagggcaaagatgcccactctagccgcttctattcagcatagtactgagagtcctagccagaacaaattagagatgaaaaagaaataaaattcatccaaataaagaaggaagtaaaattatctgtttgcagatgatatgatcatatgtgcagaaaaccttaaagactcaacaatacatcaaaatattagaacaaatgaattcattgaagttttaggatacaaaaatmaacatacaaaaatcagtgatatttctatatactaacaacgagccatctgaaaacaaaattaagaaaacaatcccatttacaacagcaacaaaacgaatgaaatatttagaagttaaagacatgtatactgaaaactaaaacattgatgcacgaaactgaagatgacacagataaatgaaaaaacatcatgtgttcatagattagaagaattaatctgggagtgatggcttgtgcctgtaatcccagctattcaggaggctaaagcagcaagatgcttgaggccaggagttctgggtaagcttgggcaacatagcaagatcccatctcaataacactaaattaaaaaattagctggtcattgtggcgtttgcctt

SEQ ID NO: 922410 - DNA, 769 bp, Homo sapiens
gtgaccgtggggacatcgctaaccctgctaagctccagattcctcattaggaaaatgggaagtgttagaccagaaccccagaggtttacgtggggcagtgcagggcctggcgtgatcatgagagcactgtctccgtttagtgaggccttgttctctgcaagctctgcacgaagccttttgtatgctttcatctttatgggaagaaattattctccccatctttgaggcaatgaaactggggtgtacaatgcatcttcacaaatagcccatgagacacacctattctccagatatgtgtggcattctccacatcttacagatgaagaaactgaggttctgcaaggctaaggtacaccctgtggtcgcaaaggagggatggagtgagggaagctgtctttacggggcagcctgttgcagatacgggctgggggcaggaatgcggtgtgtgactgaacagcatgacatgtcatgtgtgtggctggtgccactgaggactccttctcgggacctctcagaggtgacagagaggagggagcaagyaggataaaagaagagaggaaggaaggaggagggagctgctggagagggcggagccaaggcccccagactgccatggaccggccaggacaccatgctgtggacctgggcccagcccaccagtcccttcatcccagccagggaggcccaggcagagaggcttggagggtccgccggggggctggggggtctgtgtgcatgcaagcatgcagacatgtggcggcgtggtcct

SEQ ID NO: 922411 - DNA, 497 bp, Homo sapiens
tggtatattctagatccttgtttacaaggagaagcttttggttgctgcagacaaggggctgatctgtggagtgcacagtggtctgagctccttgctcagccctgggtgagggagtgggggcaaggctataatgagtggggccagactgggcagatcctctccacctagagttcaycaggtggcaaacgagcaccagcactaagggagaatccagtgggtggccaccaggtgcccaaaggtgtgcctaggcatggagcttgaaaacccccattggccctaaattatctgcatgggaatatggggttggcctgaactcctaatccagaagagtagttgctcaagagacctggagatctacctagggatcagagaggggcctctgccccaagatctctgcacaggagggtagggtgactcaggctgctgaacccagcaagcaggttctctgaatgcctggaaatctgcctgggtgtgtagcagagagcccccccaccacc

SEQ ID NO: 922412 - DNA, 591 bp, Homo sapiens
ccgcccctaggcagccccgcgcccggccgggcagacacgcctccccgccggcgcccatcgcgggaggaacaaatggcgccctccagaaaccgctcccctccatgccgggggccaaggctgtcaccacataaaagctccggcagagaagtgctcgctgtgtccccgccgcggggggtacaagcagccgctccgcgccgcgactacccggcccgccgcccscggacgtcatgcgtcagcgcgccccgctccagtttccgcccctcctcccaccggcccaggggacacgcccactggcgcgcgcagggcccgggaccgggcacgcccctctaacggctcggattggcctggccgtgcactcacggaccaatggcgtctgtcccggccctcggtcacgcccccttgcccaggcgcgggcacgcgaccgctccgttccgccggtgcgcgctctggggtccccgccccctccgcgcgcgcagctccccgcagccgccgccgcctgtaacctgcgccgccaggatgtggctgggggctgacgtcgggtccagatgtggccccggccccgcccacccccggggccgggccgcccacacg

SEQ ID NO: 922413 - DNA, 632 bp, Homo sapiens
gctacaataaagcaggcaggagaagatggaagagcagacttgctgagtcttctggccttcatctttctcctgtgctggatgctttctgccctcaaacatcagactccgtgttcttcagctttcggactcttggactcatgccagtgatttgcccaaggctcttgggccttcgacaacagactgaaggctgcgctgtcggcttccctacttttgagattttaggacttggactggctttcttgctcctcagcttgcagacrgcctattttgggacttcgcttgtgattgtgtgagtcaatactccttaattaactccacttcatatatacatctaccctattagttctgtccctctagataaccctgactaatacagccacttaaaagaaaaatacacaaagcactagcagacactctcctgttctgttgtccttgaagaagcaaactacctgttacagagtgggctgcatggcaggaaattctaggtccccctaggagctgacagcctcaatcttacaaccacaaggaactgaaatttgccaacaatctgaataagcttagaagagaatctgagctccaaagagagtgcaagttggcagacatcttgattttgacttaataagacagtgagc

SEQ ID NO: 922414 - DNA, 632 bp, Homo sapiens
gctacaataaagcaggcaggagaagatggaagagcagacttgctgagtcttctggccttcatctttctcctgtgctggatgctttctgccctcaaacatcagactccgtgttcttcagctttcggactcttggactcatgccagtgatttgcccaaggctcttgggccttcgacaacagactgaaggctgcgctgtcggcttccctacttttgagattttaggacttggactggctttcttgctcctcagcttgcagacggcctattttgggacttcgcttgtgattgtgtgagtcaatactccttaattaactccacttcatatatacayctaccctattagttctgtccctctagataaccctgactaatacagccacttaaaagaaaaatacacaaagcactagcagacactctcctgttctgttgtccttgaagaagcaaactacctgttacagagtgggctgcatggcaggaaattctaggtccccctaggagctgacagcctcaatcttacaaccacaaggaactgaaatttgccaacaatctgaataagcttagaagagaatctgagctccaaagagagtgcaagttggcagacatcttgattttgacttaataagacagtgagc

SEQ ID NO: 922415 - DNA, 613 bp, Homo sapiens
ggcttttgcagcttaagaaaatgagacccaaaagaaccctgattaaggacagacttggctgagtatggtggctcatgcctataatcccaacactgggaggccgaggcaggaggatcacttgagcctggaagggcgaggctgcagtgtgcggtgttcacatcattgcactccagcctgtgtgactgaccaagaccctgtctcaaaaaaaaaaaaaaaaaaaaaaaaaaaaaagggatagacccggttacagattaaagcactggacttggggccaggatgtttgtgtaaatgtccctgtgtgacctttagtgagtcacttaaccttttgtaaaccccagccacagtatgactgcattaccagctcctctgaaccccctgtgctcagtctgctggaagaatccaccgtgcagggcgcttggtactttttgcaagccaytgggccccagcttaatgctttgtcttgtcttccttgagcccctttcctctcctgtcctcaagggctgttccaaactctcatcattgccgagccttccacatttctcctctctacgcctcccctttgcaaccatcagcctcaatttgttttataagaaacaatctgaattttgctcag

SEQ ID NO: 922416 - DNA, 593 bp, Homo sapiens
tgcacattaaatgagttaatatatgtaaagtagttgaaacaatgcctgcatatagttactacaatataagcttgctcttattatgcactgaatttatattaaaagtaaactccttccctaactaattcaaatagctttgatatacaacacagttataaaagtagaaagatttaaatacatttgaaaatgttattttccagtactaccaaaaacttcaaattatgtatcatgaaatactagctttattcttttcaactgaccctttgtaaatctctctgagtatgctaayaacattaggccaattcaaattaagattccttcattaaaaatgttctactttggcataaagcaaaaggcttattaatatgaatatttctgagaagagaaaaaaggcagcaacttgaacttacagttcaacacaatgcagcagcaccctcagagaaggaccaagatatttgtataggccaaaatcagctttatgttatcaaattattgatttgagccaatgttatgtcaaggatcaagtacacacataactgcaagtcaaggtctttgtttatatgagatcaaaacaatgtgtacaagtaaacata

SEQ ID NO: 922417 - DNA, 593 bp, Homo sapiens
tgcacattaaatgagttaatatatgtaaagtagttgaaacaatgcctgcatatagttactacaatataagcttgctcttattatgcactgaatttatattaaaagtaaactccttccctaactaattcaaatagctttgatatacaacacagttataaaagtagaaagatttaaatacatttgaaaatgttattttccagtactaccaaaaacttcaaattatgtatcatgaaatactagctttattcttttcaactgaccctttgtaaatctctctgagtatgctaataacattaggccaattcaaattaagattccttcattaaaaatgttctactttggcataaagcaaaaggcttattaatatgaatatttctgagaagagaaaaaaggcagcaacttgaacttacagttcaacacaatgcagcagcaccctcagrgaaggaccaagatatttgtataggccaaaatcagctttatgttatcaaattattgatttgagccaatgttatgtcaaggatcaagtacacacataactgcaagtcaaggtctttgtttatatgagatcaaaacaatgtgtacaagtaaacata

SEQ ID NO: 922418 - DNA, 820 bp, Homo sapiens
ttaaatcagtgtcctggggtagataactgtgctagggttatataagagaatggccttgctctttttttttttttttttcgagacggagtctcgctgcgtcgcccaggctggagtgcagtggcacgatcgcggctcgctgcaagctccatcccccgggttcacgccattctcctgcctcagcctcccgagtagctggaactacaggcgcccgccaccacgtctggctaattttttgtgttttttagtagagacagggtttcaccgtgttagccaggatggtctcgatytcctgacctcgtgatctgcccaccttggcctcccaaagtgctgggatcccaggcgtgagccacggcgcccggcctggccttgctcttatgaaaggcctgaaggattgaggtgaaggggcatcatgcctgcaatttactccccaatgattcagcaaaaatggaagaatgttcacgtgactgtttttatttaacatattagtgagaaagagatgaagcgaatgtggcaaatgttacccatgggaaaatctcaacgaagggcataatgcgaggccactgtaatactcttgcaactttagcaaaggttttccattttacttgtttatttataattttatttatattatttttaatttttgctgagatggggctcattatgttgcccacgctggtctcgagctcctggcctcaagcaatcctcctgccttggcctcccaaagtgcagggattggaggcgtgagccactgtgcccttgacaacatcgtgaaaccccgttactccaaaaaatacaaaaataagctgggcacggcggcacg

SEQ ID NO: 922419 - DNA, 546 bp, Homo sapiens
cattggcaccagcaggaccataactctcactgctaagcgataatgcattttgcattaatgcctaacattgagaaatcctgacatgccacaccaagggagtttgaagtcaagtaagtagattccctttgaattgaagtcctgtgggccacagtgggtgcagaaagcccaagctgaaagatcagggggcagggacttgatttaagggaaggaaactcatcaccgtagataggttaagaggcctactgsatatggctccaaactctgtgcactcagggtttccacttaacagaggggaagagcattggcctagagaacttgcaacttagaagtccttcacagtgatttgggaattccttgaacacagagggcatagccttttactgctttccttatcctctatcccagcagctattagtatggtttaccaaaagttagcacttgacgggtgactgaaaattaagattttgcagactgttagctccactcggctatttctctcactataggagagcctgactcccaccacgccccttccagggaacaagc

SEQ ID NO: 922420 - DNA, 623 bp, Homo sapiens
ttagatgaggtcataaggatgggacttccaacatgagattagtgcccttataagaaaagacccctttctctgcctctcttgccgaccctgtctgcaatgtgaagatgcagtgagaatgcagctatctgcaagccaggatgaaacctctcaccagaatcaggccattctggcaccctgatcttgcattttagccttcaggacagttagaaaataaatttctactgtttaagccacccagtctacgagtattttctgatggcagcccaaagagaccaaaacagattttggtaccagaagyggggttcccaaaatggtacccttccctggcatgataagccaactaccctggtggcagttagataacactggactgcttccattgtagaaggagaagtgttttgttcttactgaaacagacacttattttggatatggatttgctttccctgtatgcagtgcttctgccaaaactaccatccttggacttacatagtgcctaatccactgtcatggtattccacaatgtgctgcttctgaccaataaactcactttatagccaaagaagtgtggcagtgggctcatgctcatgggattcactggtcctaccatgtgaaccctccaa

SEQ ID NO: 922421 - DNA, 800 bp, Homo sapiens
ctgtttttcctctgctctcactctacgacaatcaacacagaatacttctgtaaccaaatggaggtgggatggggttccccacaaaccaaacaagcaatcatttctgcagtggatgcaggctggatgtcctccagtgcaattcaactctgattatctacctgaagttagcatcaggtcccgtaggttgagggctcagtctcacaagactgcctcccaccgcagatgccaatcacaagaccctggttgttttacctttacttctgaccaactggctgtaaagcaagattcccaggaccccctcccccagatttgattaatttgctaatgtggctcataggactcagggaaatacttacatttactggtttattataaagaatattacaaaggataccaatgaacaccagatgaagagatggagaggccaaggtatggaggaagaggcatggagtttccacatcctctttgagcatatcagtctccaggaacctccrtgtgttctgctatctggaagctccttgagcccagtctttctgagtttttatagaatcttcattacataggcatgattaattaaatcataggccagtggtgatcaactcaaccttcagcccctctctcctccagagtttgcgggttgacactgaaaatcccaactctttaatcatggcttggtcttcccagtaaccaaccccggtcttgaagatatttagggatggcaagccaacagtcaacccattagcattcataagatgtgtatcactttggagattccaaggatttcagcagccgtatgtcag

SEQ ID NO: 922422 - DNA, 618 bp, Homo sapiens
aaaaggggccaaggtatagttcaggccattgcttcacagggtgcaagccccaagccttggtggcttccacatggtgttgggcctgtgggcacacagaagtcaagaactgaggtttgggaacacccatctagattttagaggatgtatgggacygcctggatgtctaggcagaaatttgctgcaggggtggaggcctcatggagaacctctgttagggcagtggggaaaggaaatgtggggttggagcctttacacagagtccccactggggcactgcctagtgagtttaggagaagagggctactgtcctccaggccccagaatggtagatccattgacagcttgcaccatgtgtctgaaaaagctgcaggcactcaatgccagcatacgaaggagctgcccaaggctgtgggagcgcactcttacgaatgtgagacatggagtcaaaggagatcattttgaagcttttaagatttaatgattgccctgctggattttagacatgcacggggtctgtagcccctttgttttggccaatttctcccatttggaatgaatgtatttacccaatgcctgtacccccattgtatcttggaaggaactgacttgtttttgatt

SEQ ID NO: 922423 - DNA, 683 bp, Homo sapiens
gggtctgtagcccctttgttttggccaatttctcccatttggaatgaatgtatttacccaatgcctgtacccccattgtatcttggaaggaactgacttgtttttgattttactggttgataggtggaagggacttgccttgtctcagatgagactttggactgtggattttttgattaatactgaaatgagttaagactttgggggactgttgggaaggcaasattgtgtgttgaaatatgaggatgtgagatttgggaagggccaggggcagaataatatggtttggctctgtgtccctactcaactcttatctcaaatggtaaccccataatctgcacctgttgagggaaggaccaggtgggaggtgattggatcatgggggaggtttccccgcatgctgttctcgtgatagtgagttctcatgagatctgatggttttataatgcagtttcctctactcttgctcactctctcttgcctgctgccatgtaagatgtgcctgcttccccttcctccatgattgtgaattttgcctccccagccatgcagagctgtgggtcaattaaacctccgttgtttataaatcacccagcctcaggtagtatctttacagcagtgtgaaaacagaccctgtctctacaaaaaaattaaaaacttagccaggcatggtggtagctatc

SEQ ID NO: 922424 - DNA, 683 bp, Homo sapiens
gggtctgtagcccctttgttttggccaatttctcccatttggaatgaatgtatttacccaatgcctgtacccccattgtatcttggaaggaactgacttgtttttgattttactggttgataggtggaagggacttgccttgtctcagatgagactttggactgtggattttttgattaatactgaaatgagttaagactttgggggactgttgggaaggcaagattgtgtgttgaaatatgaggatgtgagatttgggaagggccargggcagaataatatggtttggctctgtgtccctactcaactcttatctcaaatggtaaccccataatctgcacctgttgagggaaggaccaggtgggaggtgattggatcatgggggaggtttccccgcatgctgttctcgtgatagtgagttctcatgagatctgatggttttataatgcagtttcctctactcttgctcactctctcttgcctgctgccatgtaagatgtgcctgcttccccttcctccatgattgtgaattttgcctccccagccatgcagagctgtgggtcaattaaacctccgttgtttataaatcacccagcctcaggtagtatctttacagcagtgtgaaaacagaccctgtctctacaaaaaaattaaaaacttagccaggcatggtggtagctatc

SEQ ID NO: 922425 - DNA, 683 bp, Homo sapiens
gggtctgtagcccctttgttttggccaatttctcccatttggaatgaatgtatttacccaatgcctgtacccccattgtatcttggaaggaactgacttgtttttgattttactggttgataggtggaagggacttgccttgtctcagatgagactttggactgtggattttttgattaatactgaaatgagttaagactttgggggactgttgggaaggcaagattgtgtgttgaaatatgaggatgtgagatttgggaagggccaggggcagaataatatggtttggctctgtgtccctactcaactcttatctcaaatggtaaccccataatctgcacctgttgagggaaggaccaggtgggaggtgattggatcatgggggaggtttccccgcatgctgttctcrtgatagtgagttctcatgagatctgatggttttataatgcagtttcctctactcttgctcactctctcttgcctgctgccatgtaagatgtgcctgcttccccttcctccatgattgtgaattttgcctccccagccatgcagagctgtgggtcaattaaacctccgttgtttataaatcacccagcctcaggtagtatctttacagcagtgtgaaaacagaccctgtctctacaaaaaaattaaaaacttagccaggcatggtggtagctatc

SEQ ID NO: 922426 - DNA, 612 bp, Homo sapiens
aatagccagccaaagcaatcctggtcaaaaagaacaaggctggaggtatcagactatggtacctcaaaatatactacaaagctatagtaacccaaacatcatggtaccggcataaaaacagatacatagacccatgaaacaatagagaacccagaaattaatctacatatctttagccaactgatttttgacaaaggtgccaagaacactcattggataatctcttcaatatatagtgctggaaaaactgagtcactataggcagaagaatgaaactacgttccaacctctcaccttgtaaaaaattcaattcaaaatagatgaaagacctaaatgtaagaccccaaacaataaaactaccagaaagaaacatagagaaaatkcttcaggatgttggtaagggaaaagatttaatgaataagacctcaagggtacaggcaacaaaagcaaaaatcaataaatgggattatacagcaaactgaaaagcttctgcacagcaaaggaaacaaccaacagagtgaaaggacaacctacagaatgggagaaaatacttgcaaactattcatccaacaagagattaataaccagaatacacaaggagctcaaacaatc

SEQ ID NO: 922427 - DNA, 557 bp, Homo sapiens
tgggagtcagagggtagggaaatgcagatgaaggtatccttgaggtccagaacagtgaaccattctgcttcctctggtttttgagagagcagggtataggagttgcgtacaactggatatagagaaattactgcctcattgattagtctgagatcttgcactagtttccactgaccattyggtttttgtactcctagaattggggtgttgcagggactgttgcattttcttactaatccttgagtttttaaatgtctgacaatatcctgtaaccctgtatgagcttaaggccttaagggatattgcctttgataaggaaaattggcggggtcttttagcctgatttgaactgggcgggcattttttgcccttctgaattgtccttccaatgcccagaattcagagttgattccctcctcaagtaggggacaacaaatgggtaatttgtcccccatattcatatagataatagctccagctttggctaatatgtccctccctaataagggtgtgggactttcaggcataacaagaaagtcatgtgaaaatagcaaagt

SEQ ID NO: 922428 - DNA, 596 bp, Homo sapiens
taccaagttgcctcatcactctctggtgtttataaagcatgaaaggttggggctgggaagaaacttggagtcttctcatcctcgttctccatcaacccccactggacaagattggggagggtggagtcagtggttttcccaaggtcagtggcagcggggctggcctccaggactccttgtacatgcttctgcctccacaccaggtggctttccaacayggttggctgtgttgggtgcaggcggatgaggcagcatctgcttaatcagtagagtattcttcctgataacaatcttccctcatcaccttccccaatcccatctctcctcgatgtagtttccacgcaagccaccctctgcatagagcccttataagttcctcaggaggcccagatgtggaagggcaggcgtgtctaggaacctgtggagtccctgagagagtttaggaatcttcacgatttcattttcacctttttcctattatatagaagggatacttctagggggagtagaaggagtgtgaccgcagtcagagcacgagagtggattggagtaggggaagtgatgggaaagaagccgaggggaaaggataagggggt

SEQ ID NO: 922429 - DNA, 645 bp, Homo sapiens
gtctgacgactggggctgcaggatctgcttccaagatgctcacttaacacatatgctgagttcatggctggttgttgacagaaggcctcagttcctcaccatgggactcctccaccaggctgcttgagtgtcctcccaacatggtggctggcttcccctagagcaatgatccaagagagatccaatcccttgcatgacctgttctcagaagtcacacatcatcacttctgtcacattctgttcgttagtgagtcatgaagtctgacctacagacttaatgaatcagcctctaccttgtgaaggagggaatatcaaataataygtggcaatatatttttaattttgacaacatattttgtttaatcaaaaatattcaaaatattgctgtttcaatatgtagtcaatataaaattattaatgttgtagtttacactattttttaaaatcttttttaagggcagttttagattcatagcaaaatttaaaggaatgcacagaggtttcccatgtatgccctgcacggtctccccgattatcaacatccacaccagagggtacatttgctacaactgattaatctacggtgacacatcattgccacccagagtccagtatacattcaggttcccttttagttttgtacat

SEQ ID NO: 922430 - DNA, 762 bp, Homo sapiens
atgcccttcaaagccacccctatttggtcctaacaataacccttggaggcactatggagatttaacacaaaagtcatttgggtcttgtaaaaattaaattattcatccaagatgaaatggctagaaaattagagccaggatcagaaccctaggacctgactccaaactccagctcttggtcttcgtacttyaacacagaaacagcccctaaaggataagaaatgattggcaggagccagatgatggcagggacttaaaacaaccccttcctcccctctggcatctccaccaagtacagcccacatagagctgcaaaagcaccagctttcgcaggacacctttggaacagtgtccttttcctttatgatatttggtgactggaggtcaacctcgtgtggcaccagttcccagaccaaatctgccccagagatcaggaacaacctaaccgtgatctacactgcaccaatcccaggtgacctaacaagcaatccccggtggattagcgatggcagatgggaagtaggggagatgacgactctgcccactggtgcaaataaggggagggtctgagattaatgtacagtcgcaggacgcataaccatgaggatgtgctgagaaatgcatcattaggcaatttcgacattatgcaaacgtcgcagagtgcacttacacacatctagaggggacagcccgctatacatgtgaggctgttcggtgtagcctcgtggtcctaggctgcacacctgtgaaggctgttactgt

SEQ ID NO: 922431 - DNA, 676 bp, Homo sapiens
ttccaagaagatacatgtggatttatccatgttatctttagtatttcaaagagactattggcttcttcagcttagatcctcagaccttctcttgctccttctcagaagcttgcctcttcagattttcctttgctttagttaacctagttggcttttgttttattttgttttgttttgactaataagaatcaattagtgccacttgcaaccataaaaccttaattcacagaaagtaagtaatgttggacaataataagataaagaagtgatatttagtgttatggagaaatacagcagagcctcagatttttcctcccttccttctacatttctgccagaaccagaactatgtcatatccatatacataaggaagaaacactaattacttccaaagaatgtagagtgtccctatagaagagcctccctgcrgaggctcccttcagttgatcaagctgaggctctatctgcttgactttgcttatgttctcccgtttgactggagtctttctcagttctttttgccctgtttctaccttccatgttctcctcatacactacctcctataactaagtcttctgatattaaaattaacctttttcctcttcttcactgagtcttattcattttgtggaccccatagcacataaccaaaagccttgcatcttgtttctatg

SEQ ID NO: 922432 - DNA, 630 bp, Homo sapiens
gtgccaacacgcccagctaatttttgtatttttactggggatggggtttcaccatattggccagaatggtctcgatctcttgaccttgtgatccacctgcctcgacctcccaaagtgctgggattacaggtgtgagccacygcgcctgaccccgactttgttttttttttttttttttccaagattgttgtgcctattcaggtttccttgcaattacatacgaattttagaatcagcatgtccatttctgcaaaagatgtcattgggttgtttttgttgttgttgttttttgagacagagtctctctctgttgctcccaggctggagtgcagtggcacgatctcggcttactgcaacctctgcctcttgggttcaagtggttctcttgcctcattctcccagatagccgggattacaggcgtctgccaccatggtcagctaatgttttgtatttttagtagagatggggtttcaccatgttggccaggctggtgttgaactcttgaactcaggtgatccacccatcttggcctcccaaagtgctgggattacaggcgtgagccaccatgcctggtttgtcattgggattttgatagcgattgcattttatttgtagaccacgttggaatg

SEQ ID NO: 922433 - DNA, 630 bp, Homo sapiens
gtgccaacacgcccagctaatttttgtatttttactggggatggggtttcaccatattggccagaatggtctcgatctcttgaccttgtgatccacctgcctcgacctcccaaagtgctgggattacaggtgtgagccactgcgcctgaccccgactttgtttkttttttttttttttccaagattgttgtgcctattcaggtttccttgcaattacatacgaattttagaatcagcatgtccatttctgcaaaagatgtcattgggttgtttttgttgttgttgttttttgagacagagtctctctctgttgctcccaggctggagtgcagtggcacgatctcggcttactgcaacctctgcctcttgggttcaagtggttctcttgcctcattctcccagatagccgggattacaggcgtctgccaccatggtcagctaatgttttgtatttttagtagagatggggtttcaccatgttggccaggctggtgttgaactcttgaactcaggtgatccacccatcttggcctcccaaagtgctgggattacaggcgtgagccaccatgcctggtttgtcattgggattttgatagcgattgcattttatttgtagaccacgttggaatg

SEQ ID NO: 922434 - DNA, 738 bp, Homo sapiens
agagagagaagggacccaggggccaacgcctttactgggtacagggcattatccaaacagatttcctgcagggagttttaattggtgggtttaaagcaagcaggtactagttccaggaggtcacgctgtgactgaaaggtggtcactttgagttcgagggccaatgtctgaatggtctgtcatttgcaggaacatgaatagaactggaaatcattatgttaagtgaaataagccaggcacagaatgacaaatattgcatgttctcacttatatgtgggagctaaaatagttgatctcatggaggtagagagtagaatgatggttcccagaagctgggaagggggtgcatgtggggaacagggtagagaaataaagaaagattggttaatgggtacaaacatacagttagatggaaggaatgagttctggcrttcaataccacagtagggtaacaatggtatattgtatatttcaaaatagcgagaaaatagagaatgtggaatatttgaaatattcaatagagaatatttgaaatacatgtatacaatgtgtgaatatttgaaatacatgtatacaatgaatcatcacacattgtatacctgtattaaaatattacatgtattccataaaatgtataatattatgtaccagtaaaaaacagaatgaatgtttcgtttaaagaaagcagtgtgaaggctgggagcccagcttgctgggtgagagattcttccagttttt

SEQ ID NO: 922435 - DNA, 768 bp, Homo sapiens
atggaaaacagtatggggatttctcaaagaaccaaaaatagaactaccattctacccagaaatcccactactggatatctgcccaaaggaaaataaagcattatattaaaaaaggcacctgcatttgtatatttattgcaactctatacacaatagcaaagtcatcaaactaagtgtccaccaatgatggactagaagaaaatgtgatgcatataccatgggatactatgcatccataaaaaagaatgaaatcatggcctttgtgcaacatggttggagctggaggccattatcctaagggaactaactcagaagcagatcaaatatcgcatgttctcacctgtaagaggcagtgaaacaatggatacacgtggacatgaacatggagataatagacactgggaactccaaaagsggggagggtgggagaggagtgagtgttgaaaaatttcctgttgggtacagtgttcaacatttgggtgatgggttcactagaggcccagtcctcatttcacgagcaattcccatgtaacaaacaagcacacgtacccccggaattgaaaataaaacattgaaagaaagaaattatctgacctactctgtttgactgtaggtggtaagactgtaattccagagagggtcctgccacatacccagaaggaaggaatgctgctcagagaggccaagaagaatccggacagacaggccctgctgagtccccactcagcctatcagcattagatcacatcctttttgtccaaacttatc

SEQ ID NO: 922436 - DNA, 738 bp, Homo sapiens
gcagaatcatctgtgaaccaggacctagtattctattcctctgtcaacttttagggaactccccatgaggtcactggtgcaggctgagagagagaaggcagggtggcaggagaagagatcatgggcatttgagccacttcctcatgtaacttacttgtgccttcaggagctgcttgaccccagccacgtatatactacttgcatttgataatgaaatcctgctgtgcataccccactttatggctagaagggtcagaaagcacccagktcatgataggcagttcaggtcacatggagacttgatgacccatagtcaaatgttcagtttctagtttctaccaaagctcagtaacaggccaggagctgtctctcaaaaggagagtagttatctgcagataatggcagggtctaggtccacaatcctagaggtctcctctgtgacctatggaggcctgccaaaggccccaaacagcatccctatctgccactgacacctcaaacatcattcgatccactggatcatatggcccaagtggcagagaagctttcacagcagcctggacctgtttcagagcctcctccagttctggaccccactcaaaactggcagcctttcaggtcactcaataaatgggccagagtaacacactcaaatgagaaatgtgttgcctcccaaatccaaataggcccactaggcattgtgcctctctcttggttgtaagaggggcctaatgcagt

SEQ ID NO: 922437 - DNA, 737 bp, Homo sapiens
ggcctgccaaaggccccaaacagcatccctatctgccactgacacctcaaacatcattcgatccactggatcatatggcccaagtggcagagaagctttcacagcagcctggacctgtttcagagcctcctccagttctggaccccactcaaaactggcagcctttcaggtcactcaataaatgggccagagtaacacactcaaatgagaaatgtgttgcctcccaaatccaaataggcccactaggcattgtgcctctctcttggttgtaagaggggcctaatgcagtaacttatgcttcaccttagaaggaatatcttgacaaaccccacaccactggaccccctagaaattttactgaggtagaaggtccctgaattttagttggayttatttcccatcctctggcatgcaaatgtctcaccaataagtccagtgtgtttgctacttcttgctcactggatccaatcagcacaatgtcatcaatgtaatggaccagtgtgatatcttgcagaagtgaaaagcgaccaaggtctctccaaataagattatgacacaaagtcagagagttgatatacccttgaggtaggacagtaacagtatattgctggccttgccagctaaaggcaaattgcttctggtgggcctaatggacaggagtggagaaaaaggcatttgccaagtcaatggctgcataccaggtaacaggggatatgttaatttgctcaagcaatgaa

SEQ ID NO: 922438 - DNA, 844 bp, Homo sapiens
tctttgcagaaattcacaagatgattctaaaagtcacacttattacaaaggacttttatgttgttttagttgcaatcctgatacagaaaaatatagtaggagaaattacactgctgtatttcaaaatttactgcaaaacaacaayatcaaaacattatattactggcataagaatagaaatatagactaacggaataactttgaaaattcagaattaaatccatacatctatggtcaactcatttccaacaagggtgtcaggccattcattgagggaaagaaatggtggtgaaataactggatatttgcatgcaaaagaatgaaatgagacccttacttcatactatataaagaaattaacttaaaatgggtcaaagacctaaatttaagagctaaaactgtaaaactcttagaagaaaacatagggataacatttgcatgaactcggctttggcaaaaaaaacttacctatgacactaaaaggatgaccaaccaaaaaaattagataaattggacttcataaaaatcaggccaggtgtggtggctcatgcctgtaatcccagcactttgggaggccgaggaggacagatcacttgaatttgggagttcgagaccagcctggccaatatggtgaaacctcgtctctactaaaaatacaaaaaattagctaggcgtggtggtgggcacctgtaaatccagctacttgaaagactgaggtgggagaatcacttgaacctgggagacagaggttgcagtgagccaagattgtaccactaaactctagcctgggcatgacagagtgagacttcatcaaaaaaaaaaaaaaaaaattaaaagcctttat

SEQ ID NO: 922439 - DNA, 844 bp, Homo sapiens
tctttgcagaaattcacaagatgattctaaaagtcacacttattacaaaggacttttatgttgttttagttgcaatcctgatacagaaaaatatagtaggagaaattacactgctgtatttcaaaatttactgcaaaacaacaacatcaaaacattatattactggcataagaatagaaatatagactaacggaataactttgaaaattcagaattaaatccatacatctatggtcaactcatttccaacaagggtgtcaggccattcattgagggaaagaaatggtggtgaaataactggatatttgcatgcaaaagaatgaaatgagacccttacttcatacyatataaagaaattaacttaaaatgggtcaaagacctaaatttaagagctaaaactgtaaaactcttagaagaaaacatagggataacatttgcatgaactcggctttggcaaaaaaaacttacctatgacactaaaaggatgaccaaccaaaaaaattagataaattggacttcataaaaatcaggccaggtgtggtggctcatgcctgtaatcccagcactttgggaggccgaggaggacagatcacttgaatttgggagttcgagaccagcctggccaatatggtgaaacctcgtctctactaaaaatacaaaaaattagctaggcgtggtggtgggcacctgtaaatccagctacttgaaagactgaggtgggagaatcacttgaacctgggagacagaggttgcagtgagccaagattgtaccactaaactctagcctgggcatgacagagtgagacttcatcaaaaaaaaaaaaaaaaaattaaaagcctttat

SEQ ID NO: 922440 - DNA, 628 bp, Homo sapiens
cttccttttcctgttttaagctacagcctgtatcatggtctgttgccacttgcaatgggtttgctgtaatttagaatcactgatgatggtaacctttctgttaccctgctccccaccaaatactgaatagtcctcctatacccaggtggataaaaataaaaacagctaaggcaaagtatctttctaattccccaccttctcataatacctttaaaatcattctatcgtagttacttggtaaacggcattctgctcccacgtcattcacattaatatttaatgtttgatcaatttaaatgcatagagttgcaaagtgcactcacaaattcttggtagtttccatttgaaaatagaaggatgactcaccaggctctccttttcctgtaaacaagcttagtgcaaaacacttgarccctgtgtgtttttaatgtccctaacttctgaatgttcctgcgtgataggggcggattaacggctcaagccatataacagtaggttgagaacaagccttccaactgcaagcggtgttgtgtttcctgtagacaggtggaagccgcctcggcttcgggctcagggatgcgccctctcctggctctgggccttctgcgcctttgttcaagggcttcgg

SEQ ID NO: 922441 - DNA, 628 bp, Homo sapiens
cttccttttcctgttttaagctacagcctgtatcatggtctgttgccacttgcaatgggtttgctgtaatttagaatcactgatgatggtaacctttctgttaccctgctccccaccaaatactgaatagtcctcctatacccaggtggataaaaataaaaacagctaaggcaaagtatctttctaattccccaccttctcataatacctttaaaatcattctatcgtagttacttggtaaacggcattctgctcccacgtcattcacattaatatttaatgtttgatcaatttaaatgcatagagttgcaaagtgcactcacaaattcttggtagtttccatttgaaaatagaaggatgactcaccaggctctccttttcctgtaaacaagcttagtgcaaaacacttgagccctgtgtgtttttaatgtccctaacttctgaatgttcctgygtgataggggcggattaacggctcaagccatataacagtaggttgagaacaagccttccaactgcaagcggtgttgtgtttcctgtagacaggtggaagccgcctcggcttcgggctcagggatgcgccctctcctggctctgggccttctgcgcctttgttcaagggcttcgg

SEQ ID NO: 922442 - DNA, 662 bp, Homo sapiens
atgcagggcaccacgttctaaggctgcacacagcaggagggtcctgagcctggcccatgaaaccatttttccctcctcggcctctaggcatgtgatgagaggggctgcattgaggttctctgatatgcccaggagatattttccccatggccttggtaattaacattcagctccttgttacttatgcaaatttctgcagaagaccttgaatttctccccagaaatggggttttctttcctatcaaatcttcaggctacaaattttccaaacttttatgctctgcttcctcttgaatgctttgccgcttagaaatttattccaccagacaccctaaatcatctttctcaaattcaaagttccacacatctctctggtagggrcaaaatgccagtctttttgcatagcaagactcatctttactccagttcccaacaagttcccttctccatctgacatcacctcagcctggacttcattgtccatcttactatcagcatttcagtcaaagccattcaagaagtctctagcaagttccaaactttcccacatcttcctgtcttctgagccctgcaagtctttaggaagctccaaactttcctacattttcttgtcttcttctgagccctccaagctgttccaagctctgttatccagttccaaa

SEQ ID NO: 922443 - DNA, 662 bp, Homo sapiens
atgcagggcaccacgttctaaggctgcacacagcaggagggtcctgagcctggcccatgaaaccatttttccctcctcggcctctaggcatgtgatgagaggggctgcattgaggttctctgatatgcccaggagatattttccccatggccttggtaattaacattcagctccttgttacttatgcaaatttctgcagaagaccttgaatttctccccagaaatggggttttctttcctatcaaatcttcaggctacaaattttccaaacttttatgctctgcttcctcttgaatgctttgccgcttagaaatttattccaccagacaccctaaatcatctttctcaaattcaaagttccacacatctctctggtaggggcaaaatgccagtctttttgcatagcaagactcatctttactccagttcccaacaagttcccttctccatctgacatcacctcagcctggacttcattgtccatcttactatcagcatttcagtcaaagccattcaagaagtctctagcaagttycaaactttcccacatcttcctgtcttctgagccctgcaagtctttaggaagctccaaactttcctacattttcttgtcttcttctgagccctccaagctgttccaagctctgttatccagttccaaa

SEQ ID NO: 922444 - DNA, 639 bp, Homo sapiens
gaataaagcaggcaggagaagatggaagagcagacttgctgagtcttctggccttcatctttctcccatgctggatacttcctgcccttgaacatcagactccaagttcttcagcttttggactcttggacttataccagtggtttgccaggggctcttgggcctttgaccacagaatgaaggctgcactatcggtttccttacttttaaagttttgggattcraactgatccaccaccggtttccttaatctttaacttgcagatggccagtggtgggacttcaccttgtgatcatgtgagtcaattctccttaataagctccctttcgtatatacatatattctattcattctcttcctctagagaaccctaatacgagccctgaaaaagacagtgtttggcttttattttttacactttaactttttaaaattaagttttatatagaaaagtgcacagatcttgcttttagaagttgaataattatcccaaagtgaacacactttttatccattacctgatctacatataaagtatcgccagcaccccagagtcccctcagaccctctaaatcactatttctaccttcttccccaaaggtaaccaaaaggtaccaaaaggtaaacaaagatgctaa

SEQ ID NO: 922445 - DNA, 652 bp, Homo sapiens
tttcaagctaagtgttataacaaaagagtcaaaaagttataaaaactctttaaaagtaaaaaagttatagtaagctaaagttaatttattattaaagaaagaaaaatattttaaacaaaccagcgtacgctaaatgtacagtgtttataaattagtgtagcctaaacatacagtgtttataaagtctacggtggcaaacaggaaggtccattcactcactgcccactcactggctcactcagagcaacttccagtcctatagatccatataccgcaagtgccctatacaggggtaccgtttttaatctttcatamtgtatttttactgtagtttttctatgtttagatacacaaatatttgccattgttttccaattgcctacagttatcagtacaatccctttctgtacacgtttgtagactaggagcaataggccacaccatatagcctaggtgtacagaaggctctaccatctgggattgtgtatgtataatctgtgatgtttgcacctggaccaaattgcctgaggacctgtcattaatggatgcatgactgtcttgtgttataataagaaatatatttgtctttggtttctgtcacacagcacctaaagctctcagaatctctggagtgataggagtgtcattttgt

SEQ ID NO: 922446 - DNA, 631 bp, Homo sapiens
ctaggagcaataggccacaccatatagcctaggtgtacagaaggctctaccatctgggattgtgtatgtataatctgtgatgtttgcacctggaccaaattgcctgaggacctgtcattaatggatgcatgactgtcttgtgttataataagaaatatatttgtctttggtttctgtcacacagcacctaaagctctcagaatctctggagtgataggagtgtcattttgtattcataaggagacaacccctccccccacctccctgaaactcctgcactcaggattctcctggacctcaccctctgtacctctccatctagcggttcatttgtaccctttataattaatgggtagatgtaattaaagtggctttgtgagtgctgttagccattctagccaattacrggagcctgaggaaggggtcatgagaacccctgatttatactcactaggtcagaagtatggaggcctgggacttgtgactagcttctgagtggagggcagtcttatgggactgaactcgtaagctgtggggtttgcaccaactccatggagttagtgccagaatcgaattgttgaacatccagttgatatgagaggaatcagagaattggttgttggtgttggaa

SEQ ID NO: 922447 - DNA, 631 bp, Homo sapiens
ctaggagcaataggccacaccatatagcctaggtgtacagaaggctctaccatctgggattgtgtatgtataatctgtgatgtttgcacctggaccaaattgcctgaggacctgtcattaatggatgcatgactgtcttgtgttataataagaaatatatttgtctttggtttctgtcacacagcacctaaagctctcagaatctctggagtgataggagtgtcattttgtattcataaggagacaacccctccccccacctccctgaaactcctgcactcaggattctcctggacctcaccctctgtacctctccatctagcggttcatttgtaccctttataattaatgggtagatgtaattaaagtggctttgtgagtgctgttagccattctagccaattacaggagcctgaggaaggggtcatgrgaacccctgatttatactcactaggtcagaagtatggaggcctgggacttgtgactagcttctgagtggagggcagtcttatgggactgaactcgtaagctgtggggtttgcaccaactccatggagttagtgccagaatcgaattgttgaacatccagttgatatgagaggaatcagagaattggttgttggtgttggaa

SEQ ID NO: 922448 - DNA, 607 bp, Homo sapiens
ctgagttttcattcccatttggaggccaggagatggtaggagtcagtgcctctctttcactgggaaggtgtcagtggggccaaatggggagctgagcttcctcccacccaccccactgcagtgaggcagtatgagtcagcastccctttttgccaggatggtgtcaggaagctaaacatacacatctacctagtcttcaatatctcaacagggggctgcctgctaataaaagaagattaaatatgatccagaatataatataaaaactgtcaggatacaattgaaaatcgcaacatgaatgagaaaagacaattgacagataccaacaacaagatgaattagatgctggaattatctgacaagaattttaaagcaaccatcataaaaatacttcaataagcaatcacaaattctcttgaaacaaatgcgaaaaatactgagaaaatctcagcaaagaaatagaagttataaaaaagaaccaaatggaaattatagaagtgaaaaatacaataagctaaataaaatacttaatggatgggctcaataatacagtggagatgacagaggatagaatcagtgaacttgaggacaggtcaacagattttac

SEQ ID NO: 922449 - DNA, 632 bp, Homo sapiens
ttggcacctactattccctctgcctggaatgctcctccccaaaagagccacgtgactcactccttcactttcttcaggctgttgttcaaatcactttcctattggtcgccctgtttaatatgaccccctgcacttcctatcccatgtaatgcttttttttttmctccaaggtccctcactttgtatgttttaatttttgttattgtgtcactccaagttccaagagggcagggatttttgtctcctttgttcactgctatatcccgtttgcctggcacacagtaggtacactggaaggaaggaacaacttaattgttgtaattccagttctcctcccctttttgatgaatgggctaacctgatacaatgccctcaagacccaaagatgggtcagcaccaatacttcatggcattaagacatgcagatgggtcaggagccaatacttatctatcaactgctagtctgttctaagcattttgtattttgactcttatcattttgtctatccagtaccatcaccattccatcccaaccatttcttggagacttccatcccttcttctgagaacttctccttgccaactccatccacacagccaccataagagctctgtgttaacacagagtggct

SEQ ID NO: 922450 - DNA, 628 bp, Homo sapiens
attctcctggctcagcctcccgagtaactggcattacggacacctgccaccacgcctggctaatttttgtatttttagtagagacagggtttctccatggtggccaagctggtctcaaactcctgacctcaagtcatctacctgccttggcctcccaaagtgctgggattcagatgtgagccactgtgcccggcctacattgacagttttaaaaggtatagtcaggtgttttgtggaatgtccctcaatttgggtttttgcaagatgttttcctcgtattagactgagcttattgattttggggaggaagatgtcagaagggaagtgtgcttctcattagcctatcagaggtccagsctgtcaatggtaatgttggccttgatcatataggattatattgagaattcagtgacatcacccaagtaaggtgcttagggcacacagcaaacccatggttagacaaatgggttgagtgagtggttattgaggattttgactttgtcaggtaatgtgtcgatttcagacaaagaagaatcagacctgattcctgtcctcaaggacccttcggcctgaggtgtcgatgcatccttcatctcccatccagtgaccttgatcacctttgctttgt

SEQ ID NO: 922451 - DNA, 601 bp, Homo sapiens
aaaaatcatagagactaaacgaagtcacagactcagaatcaaagccaaagtgctctagccaacgaacaccatagatatatcttcaggaaaaagtgctcccctgtgaaagcaaattttaaacattggaataagtgactattataccagatatgcagataacaacataagaacacaggaaacatgaaaaagcaaggaaacatgacacctccagaggaacacaataattctccagcaccagagtataatccaaacaaaatttctgaaatctcaaataaagaattcaaaatattgctactaaagaagctcagtgaaggattcctgggcaagatggctgaataagaacagctccagtctgcagcttccaccaagaccaatgcagaaggcaggtgatttcttcatttccaactgagatacctggcttatctcactgggactggtyagacagtgggtgcagcccacggagggcaagtcaaagcagggtggggcatcaccttacccgggaagcacaaggggtcagggaactccctcccctagccaagggaagccgtgaaggactgtgccatgagggatggtgctatccagcccagatactatgcttttc

SEQ ID NO: 922452 - DNA, 789 bp, Homo sapiens
ttatttaagttccttatagatgctgggtattagaccttcatcagatgcatagtttgcatatattttcttccactctttaggttgtctgtttactttgttgttagtttcttttgctgtgcagaagctcttaagtttaatgagatcccacttgaatagagagccttttccccattgcttgtttttgtcagctttgtcgaagatcagatggttgtagatgtgaggcttatttctgggctctctattctgttccattagtctatgtgcctgtttttgtactagtaacatgctgttttggttaccgtagcctagtagcatagtttgaagtygggtaatgtgatgcctccagctttgttctttttgcttaggattgctttggctatttgggctcttttttggttccatataagttttaaaatagcctttctttaaaatagttctgtgaagaatggacttgtttgataggaaagtactgaatctataaattgctttgggcagtatagccattttaataatactgattcttcatatccatgagcatgggatttttcattttttgtgtcttctctgatttctttggtcagtgttttgtaattctcatggtagagctctttcacctctatggttagctgtattcctaggtttatttttgtttgtttgttttgcaggcgtgtgtgtatgtggcaattgtgaatgggattgccttcctgatttggctcttggtttggcttgttggtgtacaggaatgccagtgatttttatacattgattttatatcctgcaactttgctg

SEQ ID NO: 922453 - DNA, 574 bp, Homo sapiens
  misc_feature 567: n = A,T,C or G
tgagaagcttatctttgagaagatgagaatgctttttcccttgaaatcagagtgggacaaagagagaatgaaggggaagagagaccctttagaggaagggaatgagggcagaatttttctcagtagttacagtctcagtaaagcaagaagcaacactgacaaagacagtgtcaggawgtgttctttgacatgaagagtcaaaaatgtgggaaatagatgttttaggaaatgtaaaagtagttaatcacatagaaataaaagcattcctgaaggaagtatggaaaacccaaaagacagtcaaccatgtacattaagctggggtagttcgtagaaggactaagcttagtttggtgttcaatttcttcacttagtgtaattcactaccagttacatcataaattcagtttatggagtttctacttctgtctcaggtattttgttagaatagaatatccaatatgttgctggaataaatttttagaaacaaaggatctaaaagataggggggtccagcccctctctaaaaaattgatgcttaataggatggatagatgcccccctcccaanctcatgc

SEQ ID NO: 922454 - DNA, 574 bp, Homo sapiens
  misc_feature 567: n = A,T,C or G
tgagaagcttatctttgagaagatgagaatgctttttcccttgaaatcagagtgggacaaagagagaatgaaggggaagagagaccctttagaggaagggaatgagggcagaatttttctcagtagttacagtctcagtaaagcaagaagcaacactgacaaagacagtgtcaggatgtgttctttgacatgaagagtcaaaaatgtgggaaatagatgttttaggaaatgtaaaagtagttaatcacatagaaataaaagcattcctgaaggaagtatggaaaacccaaaagacagtcaaccatgtacattaagctggggtagttcgtagaaggactaagcttagtttggtgttcaatttcttcacttagtgtaattcactaccagttacatcataaattcagtttatggagtttctacttctgtctcaggtaytttgttagaatagaatatccaatatgttgctggaataaatttttagaaacaaaggatctaaaagataggggggtccagcccctctctaaaaaattgatgcttaataggatggatagatgcccccctcccaanctcatgc

SEQ ID NO: 922455 - DNA, 645 bp, Homo sapiens
ttgtaagtctgggattttaatttttctttgctattaataaaacctcattcagtctatattaacttagaattggtatagatggctccttcctgattctgtaagtactttaaggtttagctgattccagacagcttgcatgtttgagcagacaattattaggcaattttcctaactctgcttctgtaagagtttccttatcacttactgaatatccattgtgtctttttccttaatcgcctgggaggaaccatctatcatcctgtcctgaagggagctcctcctatgtctggttggaccttaagatttaggtcccttgttaggaaacctgcttggttaaggatttttgataggaaggctactggttgtcagtggcctcagtgctttcgggctatgcccttgtttacactgtcaacaaggtggtattggagtgttacagggtcacagagaagaccttcagttatcaattataggttttaaacttacsatggcttttaaaggaataggatacacggtgtttttctttactacttccatctctctttctctttgacttcttctttgtctctctctttctgactccctctttgtctctgtctcttcctctctctgtctgactttctctttctctctttcctttctgctggt

SEQ ID NO: 922456 - DNA, 610 bp, Homo sapiens
attgtatccctccatttacttaggtcttctttaatttaatttctctcaataatgtttagtagatttcagcatagaagttttattctgatattttcctgtggattttctgaatacataatcatgttatctatgaataatgacagatttattttttcctttccattttgtttacttgccttattgcactgaccaggacctccagtacagtgggtaagaatttaaaagaagcagagaaagtagacaacctcgtctcatccataattgcaggcagaaaacttttaatatccatcattaaacatgatatatgctatacatgtcttatacataacctttgtcatattaaatacgtttctgtcgattcctagtttgctaagagctttttaaaattgtaaataggtgttgatttttatcaattgctttttctgcatttgttgaratgattacacaattttagcctttattctgttagtgtgggaaattacacccttcttttttttttaaagccagccttgcattccttgaataaactcaagttggtggtgatgcattgttctgtgtttctggattcagttcactaataatttattcaggagtatatgtctgtgaaaga

SEQ ID NO: 922457 - DNA, 587 bp, Homo sapiens
ctcactcttgatgttctccattctatgggtttggacaagtatagaaggacacatgtctgctactatagtaccatacacaacagtttccctgccctaaaatcccctgtgctccaattcacacctccattgtctcaaacccctggcaaccgctgatcttttatttttatttatttatttatttatttatttatttagagatggggtttcactcttgttgcccaggctggagtgcaatggcacgatctcagctcaccacaacctccacttcccgggttcgagccattctcctgcctcaccctcccgagtagctgggattacagacatgcaccaccacrcccaactaatttttgtatttttagtagagacggggtttctccatgttggtcaggctggtctcgaactcccgacctcagatgatccacccgccttggcctcccaaagtgctgggattacaggcatgagccaccatgcccggccgatcttttaattgtggtaaaattaaaagattttaatttttaaagttttaaatttaaagtcttaatacaatttacatcttcaccgtttttaagtgtatcattcaatggcat

SEQ ID NO: 922458 - DNA, 612 bp, Homo sapiens
acacctaagtgtttatatacaaacatgtaatctttgtatatatatatatatatatgtgtgtgtgtaatatgatctctcaagtttaaatgacagttttatcaatatgtcccatgaggttgacagagacctattaaaaaatctgggaaccattaagcattacttatctgtgtrgtaaggatttcctgatactgagtagccaaaacaataaaacaacatcaacaacatgttactaaagatgataaaaaatttaactgtcatctaatgtcaacatttcttttttatttctaattgataaattataactgtatatatttctggggtataatatgatgttttgatatatgtttgcaatgtagaatggttaaaccaggctagttaacaattccatcatctcctatactttttaaatagtaaagtttcatttttaagagagtcttttatttatctcttacttatactattttgggttataattggcaaactttataaatttcaagtaaaatgaatttatattagtaaaatttgtatttgttttgtaaatactgggatccaggacaaaatttaatttgaaagaagagatgtcttctactaaaaatgtttgcagtcccctgg

SEQ ID NO: 922459 - DNA, 624 bp, Homo sapiens
agaatttattctacacaataaattctctcatttttatttttatatggggatggctttagtcttatttttgacagagaggtttttaaatgtagaatatttaattgatattttttcccttttagcactttgaatatgtcatgccactaccttcaggcctacgtaattttaatgccaaatcagtagttggtgtttgtgacaataccaatgtaataagttatttttcttgtgttgttcttcaaattctctttgcattggctttttgacagtttagccatggtggatatattgtagatttcttctaattaaamtttagtgagcttcttagatgtggatcaatatttccatcaagttgaaaagtttcagctattatttctgcaaatatttttttccttttcctttcaccttattttccgaaattcctgttatacatatgctggtgtatttaatggtgcccatagctctctaaatttttataaaatttccttattttttttcattctgtttctcaaactgggtagtctcaattgacctatttctatgtacaaggttgcagattatcttcttctgacactcagatctactgttgagccactctagtaacttttgtaaattttggttattgta

SEQ ID NO: 922460 - DNA, 806 bp, Homo sapiens
atctactgttgagccactctagtaacttttgtaaattttggttattgtattcttcatctacaaaatttaaatttaaattaatttatatatcttttctcatgttattttgtgagatattaccatacttttctttaattctttgaatatattttctttttgttatttgaaaatattcttattagctgagttaaagtttctgggccctgaatagatagtttctatttattggttttatatatgtgtatgggtyatagtttactattcctttctgttttataatttcttcttcaaaactaaacattttagatgacagaatatgacaattttaaaataagatatccttttctcttctggttagattttgttgatgtttttattatttctttaaattatggttttggctttttttatttaataaattttctggactaattcggtaaagtttatttcctatagtacatggtcattaaatgttctccccgaatgtcttagtagtcagctagtaattagtcagagatttcctgaaatgccttgaactaataaaccttcaatcatttgctaaggaacttcatgtatatgtgaagggattccttcaatgcttaagattacaactctacttcaaggtctgtcagaagtgagtgattgaggctctcttatgtcatgtctttattttggtaggtacctaatcatgcacatgtgcatagttttctaaatttttatgtgtatttcagagcaattccaaactcatgatcaacacctgattatccagatatttattttaaatttttgtcaaggcacttatgtgc

SEQ ID NO: 922461 - DNA, 613 bp, Homo sapiens
agtggaacaatcttggctcaatgcaacatccacctcctggatacaagtgattctcctgccacagcctcctcaatagctgggattacagacgcacaccaccatgcctggttaatttttgtgtttttagtagagatggggcttcaccatgttagccaggctggtctcgacctcctgagctcaagtgatccgcctgccttggcctcccaaagtgctgggattacaggcatgagcaacctcmcctggccttcatcataaagttttgattaatttcctgatcatgcagaatgttaaattaatcagtgtcccactcttaacatattccaatcaattgatcagctaaaatttcaaggctcttcttggatacataaaaacgtctcccttctcttttcccttcctacttctctcttttctctgttacataaacttggatctctgtaaagatttgagatatcttgtggtttctttccatgaaaatcttgctgtcttaccaaagttatggaaacaatgtaattatcagtatgtatttttggacatactccctattttctcttatttcataagctgttgattctggttttgcttaggcccaagtgataaagattttttttccatc

SEQ ID NO: 922462 - DNA, 613 bp, Homo sapiens
agtggaacaatcttggctcaatgcaacatccacctcctggatacaagtgattctcctgccacagcctcctcaatagctgggattacagacgcacaccaccatgcctggttaatttttgtgtttttagtagagatggggcttcaccatgttagccaggctggtctcgacctcctgagctcaagtgatccgcctgccttggcctcccaaagtgctgggattacaggcatgagcaacctcacctggccttcatcataaagttttgattaatttcctgatcatgcagaatgttaaattaatcagtgtcccactcttaacatattccaatcaattgakcagctaaaatttcaaggctcttcttggatacataaaaacgtctcccttctcttttcccttcctacttctctcttttctctgttacataaacttggatctctgtaaagatttgagatatcttgtggtttctttccatgaaaatcttgctgtcttaccaaagttatggaaacaatgtaattatcagtatgtatttttggacatactccctattttctcttatttcataagctgttgattctggttttgcttaggcccaagtgataaagattttttttccatc

SEQ ID NO: 922463 - DNA, 617 bp, Homo sapiens
ttctatgcctaatttcttgagggtgtttttatcaagaagagatgccggattttatcaaatgccttttttgcatctactaagatgcttatatggtttttgtctttaattctgtttatttggtaaatcacatttattgatttacaaatgctgaaacatccttgaatccctggaatagaacccacttgattactgtgtattattactattattattattattattattattattattgagatggagtctcactctgtcttccaggctggagtgcaatggcgcaatctctgctcactgcaacctcctcctcccagattcaagcgattttcctgcctcagactcccgagtagctgggactacaggcaagcgccaccacgcccagctaatttttgtatttttagtagagacgggggrgttttaccattttggccaggatggtttcgatctcttgacctcatgatttgcccacctcagccttccaaagtgatgggattacaggtgtgaaccactgcgcctggccatctttttgatgtgccggtaaatttgatttgctagtattttgttgaagatttttgcatttatgtaaatcagggatattggcctgtaggtttacatttttg

SEQ ID NO: 922464 - DNA, 672 bp, Homo sapiens
agacatagcaagttatattgttatcttaaaatttttaagaaaactgtgatttccataagactgaataactgcaattaaaactattcatgaaaataatttgatgtacggtgaagtgctcatgttccaaacctacctctaattttttatctatatgtttgaggccctaccacctgagaatgattgctctaggtattctggatgtgttggtgaacaagtgacacaaagtcactggcctcatgaagcttgcattccaggggagacagtcaagaaatgtataaaccaatagctagtatttttgggttgaaacakaaactttatggagggtgactagctatggtagttgttaagaaccctgaagacatttaagctgaacctatgtgataagaagacatttaaaatattgaaagaaaataaattccagaaacagtccggagtttccaagataggaataattttgacatatataagtgatgggagaaagattattttggctaaagcataaagaaaaaaagaaggagtgttgggaattgaggatggagaggaaatcaggatgcaggtcttacatggcctttcactttcaggggaacaattagaggagtgttgagctagggaaaaaaatgttatgatttaagcttttaagtttgttttgtccactctttaagccaggtgagc

SEQ ID NO: 922465 - DNA, 575 bp, Homo sapiens
ttgatccatttgagttaatttttggaaggtgagagatgggaatccagtttcattcttctatatgtggctggccagttttcccagcacaatgtactgaatagagtgtcctttcctcaatctatgtttttgtatgctttgtcaaagatcaattgactgagagtatttggctttatttcttggttctgtattctgttccattggtctaagtgcctatttttataccagaaccatgctgttttggcaacgatagccttgtagtttaatgtgaagtckgataatgtgatccctccaaatttgttctttttgcttaatattcctttttatatgcaggctctgttttggttccatatgaattttataattgcttttttctagttctgtgaaaactgatgatggtattttgatggaaattgcattgaatcagtagattgctttgggcggtatggtcattttcacaatattgattcttcccatccacgagcatggggtttgtttccattgttttgcatcatcgatgatttctttcagccattttctgtagttttccttgtacagatctttcacctccttggtta

SEQ ID NO: 922466 - DNA, 667 bp, Homo sapiens
aattgttggtaatggctacaggaaacggaataaaattgaagcggcttcattgttctgaagccattactgcactgggatatccagagagctgaaggagggtcccgggggcccctgggctccaggtccatgggtttgcctcgcataggcctgggcttgtgcttgagaactgccatgcagtgagctccagtatgcccccgggttctagatttccaaataaaagagcatttcggaaagttttaagactctcttaaggaacagtggtgaggtgccaacgtcctcactgtccagcttcacrgtgggtcctcgggaggaaggggatggaggtggtgctgcctcagtgctctgaccgggacacctggggcccagcactgctctgcgcctgcagtgctgaggatgcctctgtctcgaccccgccctccaggggcacaggacgacctgaggaaggtcacccgcatcgcctactccatggtgaagcagtttgggatggcacctggcatcgggcccatctccttccctgaggcgcaggagggcctcatgggcatcgggcggcgccccttcagccaaggcctgcagcagatgatggaccatgtgagtcggctctggccacaccgctgccctctgtgctccccggggagggagtccctgggtctaccacacaagggtcgcc

SEQ ID NO: 922467 - DNA, 598 bp, Homo sapiens
tatatatatatatatatatatatatataaaattgttaatggcattttgatttaggcattttagtaaattttcactgttatcagaaattttatcttgtcatctatagagtagacgggctggacactttggagaacttttatagtaactgaattgtactacttcatgattttgtaaagaaaagagaaggtagaattttctagaatactattaaagctatgtagtagtctccaagccagagaagtaaaagcggttactttaggtagtgtaaagttggttcccattcattcttgaagggagatggagaggaagggaggtaaatcagtcaggaaatagaaaccacatcagttacctaaacagtggaagtttaatacaaagagcttctcactagcagaaaatgattaactactaaaagaggtaaaaagagactcaggggtccagagatactrtgtgcaaaatatcagctactacctcgtctagggtgcggaagagtggatagtaaagtgactcaggactgggagaggccctcctccaaggctaagattagacttctttaaagagtcagtgattcctaggggaacatcgggcttgtagataatga

SEQ ID NO: 922468 - DNA, 602 bp, Homo sapiens
gggagaaccactactctcttcaaagctgtcagacagggacatttaagtctgcagaagttatcgctgtcttttgtttgtctgtgccctgcccccagaggtggagcctacagaggcaggtaggcctccttgagctgtggtgggctccacccagttcgagcttcctggccgctttgtttacctactcaagcctcggcaattgcgggcgcccctccccagccttgcygcctccttgcagtttgatctcagactgctgtgctagcaatgagcaatgctccgtgggcatacaaccctccaagccatgtgcgggatataatctcctggtgtgccatttgttaagcccattggaaatgtgcagtattagggtgtgagtgacccgattttccaggtgccatctgtcacccctttctttgactaggaaagggaattccctgaccccttgtgcttgcctgtgaggtgatgcctcgccatgcttcagctcacacaggatgcactgcacccactgtcctgcacccactgtccggcacttcccagtgagatgatccggcatttcccagtgagatgaacccggtacctcagttggaaatgcagaaatcacctgtctt

SEQ ID NO: 922469 - DNA, 791 bp, Homo sapiens
tacacattcttttcctcagcacatggatcattctcaaagatagaccatatgttagatcacaaaacaagtcttaaaacattaaaaaaactgaactaatgtcaagcatcttctctgaccacaatggaataaaactaaaaatcagtaacaagaggaattttggaaactatacaaatacatgtaaattaatcaatatgctcctgaatgaccagtgggtcaatgaagaaattaagaaggaaattgaaaaatttctcaaaacaaataacaatggaaacagaacatacaaaaacctatgggacagagcaaaagcatttccaagaaggaaatttatagctgtaagtgcctgcctacatcaaaaaagaagaaaaatttcaaataaygtaatgattcatcttaaataactagaaaagcaagagcaaaccaaacccaaaattagtagaagaaaagaaataataaaaacctgagcagacataaatggaattgaaatgaaaaaaatacaaaagattgatgaaacaaaaagtttttttttaaacttaaaccaaattgacaaacctttagccagactaagaaaaaatgagagaagatccaaataaacaaaatcagaatgaaaaaggagacattacaactgatactgcagaaattcaaaggatcattagtggatactatgagcaactacatgccagtaaattggaaaatctagaagaaatggacaaattcctagacacatacaatctaccaagactgaatcatgaagaaatccaaaacctgaacagaccaaataacaagtaacaaga

SEQ ID NO: 922470 - DNA, 591 bp, Homo sapiens
attattttcagaactatatctttacatgtacacattcacctattttatggactagttttcaaggattattttgggatgtggcttcaataaaattgtctattcttgtttaagtggtcctggtatactaataaaacttctggacattggtgatataatctcataaatattcgccaatttaaatttggattttaggactttggtgccaccatcacagtagccattctgaaccctttcgatcaccataggagaaaacaaggcatgtgctttaccatgttaattgtctgtttctggggtgttctttgccctagtggttagaatcatacatttctggaattaaggaccagattatctgggatgttcttgsaaccactggtttcggattttttatttctgtttctagattattcatagaaataggaagctctgtttttttgtttttttttctttcttaaaagaaaaactgagggtttttttttttttggtagataaatccataaagcaaaagttcaaattgtgaccaggctgggcaaaatagcaagaccccatctctacaagaaatttaaaaatttagctgggcatggtagtatgtgc

SEQ ID NO: 922471 - DNA, 576 bp, Homo sapiens
cactatgttgaataggagtggtgagagagggcatgcctgtcttgtgccagttttcaaagggaatgcttccagtttttgcccattcagtatgatattggctgtgggtttgtcataaatagctcttattattttgagatacgtcccatcaatacctcgtttattgagagtttttagcatgaagggctgttgaatcttgtcaaaggcctttactgcagctattgagataaacatgtggtttttgtctttggttctgtttatatcatggattacgtttattgatttgtgtgtgttgaaccagccttgcatcccagggatgaagccaatttgatcgtggtggataagctttttgatgtgctgctggattcrgtttgccggtattttattgaggatttttgcattgatgttcatcagggatattggcctaaaattttgttttttgtgtggtgtgtctgccaggcattggtatcaggatgattttggcctcataaaatgagttagggaggattccctctttttctactgattggaatagtttcagaaggaatggtaccagctcttgtttgtacctctgataga

SEQ ID NO: 922472 - DNA, 586 bp, Homo sapiens
gtgggaaaaagcatagaattcaacaagtatgtctttcatattgggctatgattgatgagaatatgattccaatatcttcgtattttttaggccattaaagatacattttgtgatataggacaatgccactttaaacatacaaataagtaaaaagatactatgattaacctactttataaagttatactaaggttaagttaaaataaagttttattgtcacaaacaattactgggggataatactaatatacctaacaacataaaaactaaaatgaaaagaaaagaaagagataatgcgtttcttccttttatcaatactctatccagtatcttctctgtgttttgtgtggttcttattcactctatggtaagtaagamaatgtctctgacctcttggattgtacatggagggtctgggatggcctataaatacctaaatacagttcagttataagtgctatggagcaaataaatgtctaagaggtgtgtggggagctgctattttagatgaggagaccaggaactcctctctgaggaaggatatttgtgtagacacccaaataatgggaaggagtacgcatgctag

SEQ ID NO: 922473 - DNA, 614 bp, Homo sapiens
tgagcgtggaccagtgagaaaggctttgaacacctgggatggccacaatgatgatggctgtgaacaccttggctggcctcagcgagtgttgctataatagcttggctggccccaattaacatgggtgtgaacaaataggctggacctaatgaggatggctgttaacacctcaggtgtctcagttgaggatcactgtgaacacctgagcaggctcagatgaaaatagctatgaacacctaggctggtcctgatgaagacagctaggaacacctgggtgaggcccagtgaggatagctattaacacctggctggctttcatgaggatggctgtgagcacctggtctggccactattaaacagtctctggacacctaagctgggcccaatgaggacagctattaacacctgggctggcccaataatgaccgttgtgaacactaacccagataaggatggctatgaamatttgggctggcatctaggtagatggctgtgacctcccaggctggccccagtgaggatggttctaattctttagctggcctaaaagagcatggatgtgaacacctgggctggtcctaatgaagacaactatgaatacctaggataacccc

SEQ ID NO: 922474 - DNA, 676 bp, Homo sapiens
ctcttggtttctgtaagttcaacttctttagattccacatatcctgcgattatgcagaatttatcttctgtgtctggcttgttttgtttagcatgccctccaggttcattcatgttgtggcaaatgatagagctttcttctttttaagcctgagtaatatcctattgagtatatacagtgcattttctttatctattcatccattgatggatggacacttagtgagggtggcatgtggataggaggcgttctgcatttctccagttagatctcagtctttattgagcctgtgtctctgaacttcacatgggtttctcaggcttctcccacgaggtcgcaaaggatagctaaggtggactggagctggacatttccctcccccaacacagagggctggagctagctgagatccagtctcactttccctacctaggtcagtgaggttctgataaaatcttagaaaacttaggttctggttaagtagttttgcctgaggrcagactttgttaagcacagagcattctggtagcatgagtatttccccccagtatttactgtgagaacctggttgagctactggaggtcaaaaccacaaaacgatctcgcttccccatgactgagtgcccctggtgtttttagttctcaggccagtccacagccagcctctagcagcttc

SEQ ID NO: 922475 - DNA, 605 bp, Homo sapiens
tggccataaagatggcaacaatacacgttgtggactactagaggtagaaaagcggggaaggacaagggttgaaaaactattgggtacgatgctcagtacctgggtgacaggatcaatcataccccaaacctcagcatcacacaatattcccaggtaacaaacttaccctataccccctgaatctaaaacagaaattattttttaaatttttaattaaaataaaaattttaaaaggtcaccaaggcaaggagggagtcagaagagacacacttcaacccaactttccctccaaacttcagtgtattgccattgcatcttctcagccaaatccaacaatccaccagccagcaaaggagtctgggygttgcagtctgcaagggtcaagtttgcagagaccacagcagggcagaaagggatgaatacaacttggggtacaaatgaacaaagagaagtgaagtttgcccattcttctagcttcatctcaagccaacctcctcctctctctctgtccctcctttgacctatttgaatacagcataaatagaatttttaaaatacataaataacatcataataatagataaataaataagtagaataaaaag

SEQ ID NO: 922476 - DNA, 567 bp, Homo sapiens
cacctgatgaaaatggaagcacagaggtccaatcaccagaagcttgaaccttgaatctgatgtacctggtaccaaagacaacccctaagacagagtgagaagagtaatctttggcttctccctcttcttggcatctggctcygtgctcatgcctccactgacaaacctgcctagaaaccaagagcaaaagaatcatgaaaaatgaagtgaagcagaatgcacagcagggcagaaatggtcaggaaatcaatctatgacaaatagacaaatgactagtatagtatgtaacccagaaataaggtagtgagaacccaagacaagtttcttctattcagccttactgccggtcagtccttttgatacatcctcatctcttgcaattcagtttttttcctgtgaacaattttttagatgtgtgcttactgactgagatttagggctttctattcctgcagaaagattaattttaaagagaacccccatgcccatttcagttctatctcttacatcattgagcaatagagaagttcaacaagaattttttttttttttttttttttttggaga

SEQ ID NO: 922477 - DNA, 636 bp, Homo sapiens
actgttgtggggtcgggggagggaggagggatagcattaggagatatatctaatgctaaatgacgagttaatgggtgcagcacaccaacatggcacatgtatacatatgtaacaaacctgcacattgtgcacatgtaccctaaaacttaaagtacaataataatgaaataaaaataaaaaattaaaaaaattaaaaaataaaaaaataaaaagaacagctccagtctacagttcccarcgtgagcaacgcagaagacaggtgatttctgcatttccaactgaggtaccaggttcatctcactgggacttgctggacagcccacggagtgtgagccaaagcagggcggggcatcatctcacctgggaagtgcaaggggtcggggaattccctttctgagctaagggaagccgtgagagatggtacctggaaaatcaggacacttccaccctaatactgcacttttccaacagtcttagcaaacggcacaccaggagatgatatcccacgcctggctcagagggtcccatgcccacggagccttgctcactgctagcacagcagtctgagatcaaactgcaaggtggcagcgaggctgggggaggggcgtctgccattgctgaggcttgactaggtaa

SEQ ID NO: 922478 - DNA, 620 bp, Homo sapiens
agggcaccatgtcctgaggctgcacagagcaggcaggctgtgggcccagcccatgaaaccatttttccctcttagatctcaggcctgtgatgggagagactgccatgaaggtctctgacgtgccctggagacattttccccattgtcttagtgaytaacattcagatcctcattacttatgcaaacttctgcagcggtagtcagcttgaatttctcctcagaaaatgggtttttattttctatcacattgccaggccacaaattttccaaacttttatgatctgcttcatcttgaatgccttgcctcttcaacattttttctgccagataccctaaatcatctctctcaagttcaaagttccacggatctctagggcagggacaaaatgccaccagtctctttgttaaagcatagcaagaatgacctttactccaattcccagtaagttcctcatttccatctaagaccacctcagcctggacttcattgtccatatcactatcagcattttggtcaaagccattcaacaagtctctaggaagttccaaactttcccaaatctttctgtcttctgagccctccaagtctctaggaaactccaaactttcccacattttcc

SEQ ID NO: 922479 - DNA, 689 bp, Homo sapiens
gagaagagaagacacatcagcacagcggcatgaaaccttcatcagaaaacaatgcttcattaatccgtgacaggacaagcgtcagcaaacttccaggcggctggattaggccttcatctatccatcaccttggagaggaacaaaataggtggcctgggaagwtaagcactatgtttctattagttaatatctaaagcggaggttaacaagctatggacacacaagccaaacccagccctcttggggttttttaaatctactttcaacttttattttagattcagcgggcacatgtgcaggtttgtcacgtggatatgagcatactccccaacagttggcctttcacccctcctctccctccccatccagcagttcccagttgttgccatctttaagtcaatgagtccccatgtttagctcccatttataagagagaacatgcattatgttttgtttggtttttgctggttttttttttttttttaatggagtcttgccctgtagcccaggctagagtgcagtggcacaatcttggctcactgcaacctccgcctcccaggttcaaacgattctccctcctcagcctcccgagtttaaagtatgtatttttttaaagaaaatcctcttcagtgattttctaatttttctagattttctagtttttccatgcctattttcagcaggttgca

SEQ ID NO: 922480 - DNA, 689 bp, Homo sapiens
gagaagagaagacacatcagcacagcggcatgaaaccttcatcagaaaacaatgcttcattaatccgtgacaggacaagcgtcagcaaacttccaggcggctggattaggccttcatctatccatcaccttggagaggaacaaaataggtggcctgggaagttaagcactatgtttctattagttaatatctaaagcggaggttaacaagctatggacacacaagccaaacccagccctcttggggttttttaaatctactttcaacttttattttagattcagcgggcacatgtgcaggtttgtcacgtggatatgagcatactccccaacagttggcctttcacccctccyctccctccccatccagcagttcccagttgttgccatctttaagtcaatgagtccccatgtttagctcccatttataagagagaacatgcattatgttttgtttggtttttgctggttttttttttttttttaatggagtcttgccctgtagcccaggctagagtgcagtggcacaatcttggctcactgcaacctccgcctcccaggttcaaacgattctccctcctcagcctcccgagtttaaagtatgtatttttttaaagaaaatcctcttcagtgattttctaatttttctagattttctagtttttccatgcctattttcagcaggttgca

SEQ ID NO: 922481 - DNA, 611 bp, Homo sapiens
agggcctcccggcagctttgggtgtatggcggatgggtgagccctgaaaggggaatcttgatggacaccacactgcccattgtggtggccctccctgttcagaatatgaggatgtcatggagctggggcttgagggtctcagttaaacctgagaagttcagaatgatctggggcatttgggccacagaaaagcagcactgscttaggtccagtcaccatacagaaggaaatccagggaccattaccactcaatggctgtctccctctgactatccttacactcaggtcatcttaagccaagacacagccactctggacaataccaggacagtctggtcctgccagccccaagtcctctcctgacctaacccactctcttcagagtctccctggagggcttggaggtcagggcaccctggggtctcagatccaggaaaactgagccagacctgcccatggctgtgtccacagtcctgctggggccggaggaagtgagtgacacagacagaaaaagggtttgtgtctcacttttccatctgcctgtgtcactgtgagttgagtagcatggttgtctatcaactgatagtaataatcagcctcatcctcagcct

SEQ ID NO: 922482 - DNA, 575 bp, Homo sapiens
tggtggaaaattctccagcctggagtatcccctttcccacgggtgctgattaaaagcatccgtgtgtgtgtcctattctcttagagacttctgcccccttccttctacctgacacttaacagagactgaacacaaaacctactaaaaacttgattctcaagagctacatccacttctgcctcgaagggctccgatccccaggtgagccagtctcgggctgttccctgggtggtagttgtggactgcaaatgaccttcaggacatctgcgaagttcatgarggtagagggtggggatgatttaaaaagacagccctggaggtcgggattcacagggcaaccgtcaggaggaaactggaagggccctcatggggtccctggggcctccctctctcagccagcggggaggcgatgggtctggttcctcgtttgttaagctccagggacaagcgaaactgcctcccgggggacccaggcaaaaagatctcacttcactttgaaactctgggactttgtttctctggagcagactcagagctctagaggctgacctgggcctgaacctggacggggcttg

SEQ ID NO: 922483 - DNA, 841 bp, Homo sapiens
aggatgtaggtggagctgctccagcccccaggtgtcaacgtatctgaaatttttgcctgatttttgcctttccctcttttttttttaaagtgtggtgagtctttgatccagtctgtgagaaagctgtaccccgtgacgacaaaaccacagagatggtggagctccagcmtcactctcttggtgactccacgatgctataaataaataaatttaacagacaacttcgagggaccaccaacccagccctttggtcatgtgaggacacagcattgaaggcaccatcttggaaacacaaaagcatgtcctcacagacttggaacctgctggtgtcttgatcttggacttcccagcctccagagctaagacaataagtttctactgtgtataaattacccagtctatagtatttggttatagcagcacaaatggtctaaaacagtcatgctgacagtttcaatagaaatttggtaaggagagtcttgcaaaatctgtgagctcttaatacataatatgttttccatcccctgtctctgaggtgttggtgccctacagcacctgctgctagtgtgatggccaccatctactgagcatctgttttgtaccaggcgcgagtaacctggagcagagacttcccatcattcctcaattggcaggatccctgtgattggatcttccacagaattgggtgtcagaagctgcttagttgtcagggcgatttctctgctctgaaacctagggtggggccatggctcactgtggaggcagaggacatcctcctataccaaagcactggggtccaacgtggcctgtggtgtgaggcatggcagatgccatacagtgt

SEQ ID NO: 922484 - DNA, 841 bp, Homo sapiens
aggatgtaggtggagctgctccagcccccaggtgtcaacgtatctgaaatttttgcctgatttttgcctttccctcttttttttttaaagtgtggtgagtctttgatccagtctgtgagaaagctgtaccccgtgacgacaaaaccacagagatggtggagctccagcctcactctcttggtgactccacgatgctataaataaataaatttaacagacamcttcgagggaccaccaacccagccctttggtcatgtgaggacacagcattgaaggcaccatcttggaaacacaaaagcatgtcctcacagacttggaacctgctggtgtcttgatcttggacttcccagcctccagagctaagacaataagtttctactgtgtataaattacccagtctatagtatttggttatagcagcacaaatggtctaaaacagtcatgctgacagtttcaatagaaatttggtaaggagagtcttgcaaaatctgtgagctcttaatacataatatgttttccatcccctgtctctgaggtgttggtgccctacagcacctgctgctagtgtgatggccaccatctactgagcatctgttttgtaccaggcgcgagtaacctggagcagagacttcccatcattcctcaattggcaggatccctgtgattggatcttccacagaattgggtgtcagaagctgcttagttgtcagggcgatttctctgctctgaaacctagggtggggccatggctcactgtggaggcagaggacatcctcctataccaaagcactggggtccaacgtggcctgtggtgtgaggcatggcagatgccatacagtgt

SEQ ID NO: 922485 - DNA, 584 bp, Homo sapiens
ttgtatttttaggagaaacggggtttctccatgttggccaggctggtctcaaactcctgacctcaagtgatctactcgcctcagcctcccaaagtactgggattacaggcttgagccaccacacccagccaacacataagcagttttgaaggcaataagggagttaaccrtgcagccatccagggaagaagaggtccaggagaaaaaacagccaatgcaaagcccctgtgcagatgcactcctgaaagaacaacaaggaggccagtgtgcctggagggaaggagaggaagagtccagggttaacatcaaggaggaagtaacaatcagttatctgcagagactaagatgccattgtaaagactctggctttgactctaagtcagttaacccctggagaagttttcaacaaaggactgacatgatgtaagttgtgtcttaacaggagtcatctggctgttggggggtaaaggacagaagcaaggagatcagttaggaggagatggcataagccaaatgagagatgataatgcctcgagccaacatgtgagagggttggatatactgtgatgtcagagtccagagga

SEQ ID NO: 922486 - DNA, 584 bp, Homo sapiens
ttgtatttttaggagaaacggggtttctccatgttggccaggctggtctcaaactcctgacctcaagtgatctactcgcctcagcctcccaaagtactgggattacaggcttgagccaccacacccagccaacacataagcagttttgaaggcaataagggagttaaccatgcagccatccagggaagaagaggtccaggagaaaaaacagccaatgcaaagcccctgtgcagatgcactcctraaagaacaacaaggaggccagtgtgcctggagggaaggagaggaagagtccagggttaacatcaaggaggaagtaacaatcagttatctgcagagactaagatgccattgtaaagactctggctttgactctaagtcagttaacccctggagaagttttcaacaaaggactgacatgatgtaagttgtgtcttaacaggagtcatctggctgttggggggtaaaggacagaagcaaggagatcagttaggaggagatggcataagccaaatgagagatgataatgcctcgagccaacatgtgagagggttggatatactgtgatgtcagagtccagagga

SEQ ID NO: 922487 - DNA, 584 bp, Homo sapiens
ttgtatttttaggagaaacggggtttctccatgttggccaggctggtctcaaactcctgacctcaagtgatctactcgcctcagcctcccaaagtactgggattacaggcttgagccaccacacccagccaacacataagcagttttgaaggcaataagggagttaaccatgcagccatccagggaagaagaggtccaggagaaaaaacagccaatgcaaagcccctgtgcagatgcactcctgaaagaacaacaaggaggccagtgtgcctggagggaaggagaggaagagtccagggttaacatcaaggaggaagtaacratcagttatctgcagagactaagatgccattgtaaagactctggctttgactctaagtcagttaacccctggagaagttttcaacaaaggactgacatgatgtaagttgtgtcttaacaggagtcatctggctgttggggggtaaaggacagaagcaaggagatcagttaggaggagatggcataagccaaatgagagatgataatgcctcgagccaacatgtgagagggttggatatactgtgatgtcagagtccagagga

SEQ ID NO: 922488 - DNA, 630 bp, Homo sapiens
gaaacaacccaaatatctgtcaataggggattagttattgaaatataattaaatcataatactatgcaatgagacttactgtgatgtgtgatgcaggcattattcttttttattctttgtttttgagacagggtctctctctgtcatccaggctggagtacagtggtgtgatctcagtttactgcggcttggatctcttggactcaagcgatccttccacctcaacttcccaagtagctgggactacaggtgcatgccagcacatctggctaatttttgttttgttttgttttgtttgtttgtttttggtagagacatggtttgccatgttgcctgggctggtctcaaactcttaagctcaagtgatcctcctggcttggcctcccaaagggctgggattactggcatragccacagtgctgggccgatgcaggcattattctaaacactgcctgtgtaataacttgtttaatcatcagaacaaaacaaaacagaaacactgtaagaaagtactattagcatctccattctgcagaagacaaaacacacagagaggcaagcaactttctcaaggtcttatagctggaaaattgaggactaggatttaaagcaaggtgttgtcgctccaga

SEQ ID NO: 922489 - DNA, 598 bp, Homo sapiens
gccagagttactcctttaaaatcgaagtcagaaaatatcacttctttgcacagaaaataaacaaacaaacaaacagcagtttttactttcactcaggttgaaattcagtctttcaatatgacatataccctggaaaagatcactcccattcttctctgacctcctctggctcccttgttcatgcttcctcagccaggacagccaatgagtgattctcctggcacacctggttcattccgatcctggcttttacacattctgctgcttctgttcacactgttctttctccagagatctgcaaggactgccttcttycttcttcttgggctcccctatcaagtaacttccatgattgttttgtacaaaacaataactctccccttttcactctgtctcactggctttgctttatctgtttatagcatttagagcctctctcctcccctgccatgtgaggtgcttaattgtggaatcattagtggtctgtttctacctgccagattgcataatcatgagggcatggactttgttttcctggattctgtgtcatgggtagttggccccagttgggggcatggatgctcagatggggtgcctg

SEQ ID NO: 922490 - DNA, 708 bp, Homo sapiens
aaggttgcaaatagtgtgggactctctccaggtcactgagcactggcctggggaccctctgccaggcccctgtccctgcgtggctcacactcccttcctgccaccacccagtttgagcagagggcccttggtttgagcaggtcatccccaaaaacagagaaagacctacctgaagttaatccctcaaatccagtatttggaaaaaaaaaaaagtccgtcctcctttattttctttcccaatttcaagccaggataatgccatatatttttctagacagcagatacacagcataagataaamtcatttttttccagttaagcctcctgctgggttccctagccaactttctgcagctcataaaataaacacaattcccattcatccccctagcacagatccatcattgcttggctatggacaaacgggcaggtggtgctgcacaacaggctgggatgagctctttttttccttcctggacggaaaaggtaggattaacacaagatcttttctattagtggatgacagggcagacaactgggaagttagagtaaatttcatcctggaggaaaaataaatacggaggtggtcatcagaacagtcttgctgtctccataaaggcaagtctggaatcttccatatagatcactatctcatgcacagtgcaggctggctttgttagatggagataagcaactatgtatatgtgg

SEQ ID NO: 922491 - DNA, 602 bp, Homo sapiens
attcctgttgccatgtaggaagcaggccagggaggagggccctgggactgggctgagtgtgcagcccaaaaagtggcccgaggaaacatcgcggcatccaggctggtctgtggacttgggtgggagcagccaggcagatggggaggactaaggaggagaagcttgcggagagtgatggcctctctggatgctttaaaatgcaaacaaaggcacagccactttggaggttggtttgcagtttcttgataaagttaaacgtacacttgtcagacggtcctgccgtttgttaactaggtmctactgaagagaaatgagactcatgttcacacaaaaacttgtaagtggatgtttatagcagtgttactagtaatcgcccaaacaaggaagtggcccacacgtgcctcacctggtgaggggacaagcaagccgtggcccaccccgagatggaagcgtcccgagcagggagaaaggatattgacacctggcaccataaatgtgtcccaaaggaagcggcagagcggaaggagccaggccccgccacttcctgctgtgggtcccacatgtgtccatggaagctgtgaatggagtaggggatggagaac

SEQ ID NO: 922492 - DNA, 602 bp, Homo sapiens
attcctgttgccatgtaggaagcaggccagggaggagggccctgggactgggctgagtgtgcagcccaaaaagtggcccgaggaaacatcgcggcatccaggctggtctgtggacttgggtgggagcagccaggcagatggggaggactaaggaggagaagcttgcggagagtgatggcctctctggatgctttaaaatgcaaacaaaggcacagccactttggaggttggtttgcagtttcttgataaagttaaacgtacacttgtcagacggtcctgccgtttgttaactaggtactactgaagagaaatgagactcatgttcacacaaaaacttgtaagtggatgtttatagcagtgttactagtaatcrcccaaacaaggaagtggcccacacgtgcctcacctggtgaggggacaagcaagccgtggcccaccccgagatggaagcgtcccgagcagggagaaaggatattgacacctggcaccataaatgtgtcccaaaggaagcggcagagcggaaggagccaggccccgccacttcctgctgtgggtcccacatgtgtccatggaagctgtgaatggagtaggggatggagaac

SEQ ID NO: 922493 - DNA, 606 bp, Homo sapiens
gtggggtcgtggagaggagccaggagcagaggatgaaaagcaggaagtttcaatgtatgtggtttaaatggcctggctcagcaggaccccagggtttccaagttcactcctggtgaggccctgaataactcatctctgcaggcagcagggagccactgcaggtgtgggagggagggaaggtcgtaatgaatagcgggtttgaaagattcctagggcattttcttcctaatctcatgacggggttaggtaagcagcctcggcctcaaccccactcctgctgccgcctctgccctcagattctgcctctgggtctccaggcagaggtgctgctgccccggagagggtgcttgaccttccaagagttcccactgctcagaggcacacaatttagcwtataattagagcatcgaacagggaatactgtgctagttcctaggaaacatttcctctgggcacagtctgccgcatatgctgcaattgcacccaatggcccacccacaggctttgatatcacagatccattttagaccctttctcacaaaggaatggaaagaaaagaaagttgaatgcaaattaagtacactctgtcacagcctcgctatcagg

SEQ ID NO: 922494 - DNA, 606 bp, Homo sapiens
gtggggtcgtggagaggagccaggagcagaggatgaaaagcaggaagtttcaatgtatgtggtttaaatggcctggctcagcaggaccccagggtttccaagttcactcctggtgaggccctgaataactcatctctgcaggcagcagggagccactgcaggtgtgggagggagggaaggtcgtaatgaatagcgggtttgaaagattcctagggcattttcttcctaatctcatgacggggttaggtaagcagcctcggcctcaaccccactcctgctgccgcctctgccctcagattctgcctctgggtctccaggcagaggtgctgctgccccggagagggtgcttgaccttccaagagttcccactgctcagaggcacacaatttagcatataattagagcatcgaacagggaatactgtgctagttcctaggaaacatttcctctgggcacagtcygccgcatatgctgcaattgcacccaatggcccacccacaggctttgatatcacagatccattttagaccctttctcacaaaggaatggaaagaaaagaaagttgaatgcaaattaagtacactctgtcacagcctcgctatcagg

SEQ ID NO: 922495 - DNA, 782 bp, Homo sapiens
agggcggggaaagattcacctgctggtttctggcccaggactgaggacactggcacctttccctgcctgtctcttggggctttcttttcatgatccctgagcctccatggaagaagtccaaccacctgagaccagcaggctggaggccaggtgcaggttctctggaagcaacccttccaaggcacgagtgcggccatccacgtctgaaaccagcccagacaccactgaaaaccatcatgcgtcccaggtggagaccacatagagcagaagaatcttacaggaaagacttgggattcctagaagtattcttggtatgatggtcatacaagaccatagaaagacacacaggtattataatggttgagtttgttccatggaaacagtgggactaattataaatctcattaaaggatatgagcgamgactgagaaccaaactcctgtataggttaagtgtgtgtacatagatcttctatttacttagaactcttcaggaaatttgcatgagaaatggccaatgactgtctcttggaatgagagccagaggtgatgaacggcattttattttgattttacacactcttcactgtatgatcattttatactaaatatgcataataaaaataaaatcttctgataattagtcacataaatatgagattcacaatatgagagataaaaacatctaaaaacaaaacagacccaggcaattgcatcatatgtgatccagtcctatcactttaaaattatccaaaggaattatgcacatttgctaagatttta

SEQ ID NO: 922496 - DNA, 588 bp, Homo sapiens
ttgatgtccacctggggcataggtgaccacttgtggcctagtgttgccctgaagcctaggtgtcaacccagggcataatgtcttcttggggcctgctgtccacctgcagactggtgtctgcatagggcctggtatccacctggggtctggtgtctgcrtggggcctagtgtccacctgaagactgagtacagacctcacacctgatgtatgcctggggcctatttatccacctggggactagcattcatctggcgcctcatgtccacttaagccctgggtgtcaacctggtgcctaatggccaccagggatctatgtactcacttggggcctggtgctcccatagggcctaggtatacacctggggaatgatgtgcaggtggaggcggatgtcttcctgggtgctgctgttcacctggggacaagggtctccctggggaccggtgtttatcgggagcctcatatgcaccttgaacctgctgtctacctagggcccgatgtccatgttaaggctgggtgtccacctgggacctgggtgtccacttggggcctaatgtccacctaagacctagtgttcacctagggcctg

SEQ ID NO: 922497 - DNA, 626 bp, Homo sapiens
actttatgaggctcagcattctctagtacaaaatgaaactacagaaggtaccaaaaagctcaggatgaggggagaactgcaccctgaatgcaggactgccaggcaggtggtaagcactcattagcttgtttcaagcacacaaatcatatgttgtttttcatcatgtctccccatggtgtctggtctatggctccagaaccaggaggcttctgatcaatccttatgctaaatgatagacagatagatgggtgggtggttagacaaataaatggatggatgcatggattgatagattgatgctgggatgaatggatggatgaatagatggatgaatggataaatgaatggataggtgctcagaagacagaataaaacagggagtcaaaatgaaaataamaagatgattgaaggatggggctgatacatggaagagaggtacaagatccagcccttctggctccattcagccccacaaccacataccttggggtagcactggcacatgctccagatgatacccctggacaccatgctgctgccacagaaggcttcattgaactggggcccatcacggctcaggaggaatgtactgagagccaggagaagaccaatacattgaagctgaa

SEQ ID NO: 922498 - DNA, 809 bp, Homo sapiens
aacatcggaccacaggctgaggaggggacagagcagagacccctccctcttaaggggacaccagcactgccaccctaccccacacaaggagataaaggaaaatcttgagtcctttcaggggaacttccaggtacccagctaggcctgagaagtaaatgagcagcttgataagcaagaaggtaatagtaacataaaacaatagccaaggaagttagagtcagatgtttggttccctatagaaactgaagataagatcttcacgtatgtccctgagttgtttttcagcaccacactctaaccaactgagctaaccggccaccgaccctgagcttttcaaaaacctggacccccaccacatggagtctgctggcacatagactccagagaacggggagctgagcactgaactstgacctcttgctgttctttgatctacatttcttcctgaggggcctgaaagaagccacatccacaggccagaccttaacattcctttctgctgaccccaaggttttagacaaagtctagattccttaatcaatggcaaatcagagagtctttgaatctacctatgacccagaagtgcacccacttcaagacatcccacgtttttaggccaaaccaatgtgtagcccctgtatattgatttatgattgtacttgtaacttctgctttcctgaaatgtacccctgtctttaagaggccttgtttgtaagccactggggaggttgggtctcaagtatgagctgtccccattctccttgcttggtgccctgcaaataaatgccctctcttctcctgctgcaaaa

SEQ ID NO: 922499 - DNA, 809 bp, Homo sapiens
aacatcggaccacaggctgaggaggggacagagcagagacccctccctcttaaggggacaccagcactgccaccctaccccacacaaggagataaaggaaaatcttgagtcctttcaggggaacttccaggtacccagctaggcctgagaagtaaatgagcagcttgataagcaagaaggtaatagtaacataaaacaatagccaaggaagttagagtcagatgtttggttccctatagaaactgaagataagatcttcacgtatgtccctgagttgtttttcagcaccacactctaaccaactgagctaaccggccaccgaccctgagcttttcaaaaacctggacccccaccacatggagtctgctggcacatagactccagagaacggggagctgagcactgaactctgacctcttgctgttctttgatctacatttcttcctgaggggcctgaaagaagccacayccacaggccagaccttaacattcctttctgctgaccccaaggttttagacaaagtctagattccttaatcaatggcaaatcagagagtctttgaatctacctatgacccagaagtgcacccacttcaagacatcccacgtttttaggccaaaccaatgtgtagcccctgtatattgatttatgattgtacttgtaacttctgctttcctgaaatgtacccctgtctttaagaggccttgtttgtaagccactggggaggttgggtctcaagtatgagctgtccccattctccttgcttggtgccctgcaaataaatgccctctcttctcctgctgcaaaa

SEQ ID NO: 922500 - DNA, 740 bp, Homo sapiens
gaccctgagcttttcaaaaacctggacccccaccacatggagtctgctggcacatagactccagagaacggggagctgagcactgaactctgacctcttgctgttctttgatctacatttcttcctgaggggcctgaaagaagccacatccacaggccagaccttaacattcctttctgctgaccccaaggttttagacaaagtctagattccttaatcaatggcaaatcagagagtctttgaatctacctatgacccagaagtgcacccacttcaagacatcccacgtttttaggccaaaccaatgtgtagcccctgtatattgatttatgattgtacttgtaacttctgctttcctgaaatgtacccctgtctttaagargccttgtttgtaagccactggggaggttgggtctcaagtatgagctgtccccattctccttgcttggtgccctgcaaataaatgccctctcttctcctgctgcaaaacctcagtgtggatgtttggctttactgcacttggcaagcagaccccagtccagtgtggtagcaagggctcagtccccaagactgctccccaacttccaatgtcaatcaaaagccccaggttgtttcacctctgcttctggccaactagcttgaaattggggttcccatggccacatccttgggtttaacttgctggagtggctcacggaacttagggagacacttacttatatttactggtttatcacaag

SEQ ID NO: 922501 - DNA, 740 bp, Homo sapiens
gaccctgagcttttcaaaaacctggacccccaccacatggagtctgctggcacatagactccagagaacggggagctgagcactgaactctgacctcttgctgttctttgatctacatttcttcctgaggggcctgaaagaagccacatccacaggccagaccttaacattcctttctgctgaccccaaggttttagacaaagtctagattccttaatcaatggcaaatcagagagtctttgaatctacctatgacccagaagtgcacccacttcaagacatcccacgtttttaggccaaaccaatgtgtagcccctgtatattgatttatgattgtacttgtaacttctgctttcctgaaatgtacccctgtctttaagaggccttgtttgtaagccactggggaggttgggtctcaagtatgagctgtccccattctccttgcttggtgccctgcaaataaatgccctctcttctcctgctgcaaaacctcagtgtggatgtttggctttactgcacttggcaagcagaccccagtccagtgtggtagcaagggctcartccccaagactgctccccaacttccaatgtcaatcaaaagccccaggttgtttcacctctgcttctggccaactagcttgaaattggggttcccatggccacatccttgggtttaacttgctggagtggctcacggaacttagggagacacttacttatatttactggtttatcacaag

SEQ ID NO: 922502 - DNA, 763 bp, Homo sapiens
caccttgtcttggccctggaattgctttgtgacctgggacaagtctctttttctttttggacttggttctcccatctgtgaaatggggagccagccttcttgcttgctaaggcctcttccagcaaaacagtttctctgatttcatgtcttgtctgatttcactgtatgcaccccattgagcaagagccaaaaaggcctgtgtgtccctggtggaggatattgtcctatatttcttaaattgcgaccttgaaggccgcatgkttgtgtaacttcttgccacacctgtgtttacgcaggagtgttcttgggacattgtctagcttgtggtgctagggtttctatgccagggtccccttctgggtctgtctttgtggtgctgtattcaccaagtgcccagtgagggggctcccagcacccctggggagggtctctctctctctctctcacacacacacacatgcacacacggcagagcagggctgtgtgaggctgaggactgacattctgggctccaactctctcttctgctcagtttccaggggtcctgggacaggtgtctttgtcagtttttggctctgagaaatgagggagtggggcatgaacttgaccttgttgatgctctctgtgtggtaaaaccacgcagagaggaacgtcaacagaagtgggggtttccaagcctgtatgacaccatctgggcaggtctggggtgcccagccctggcagagatgccaggagctgtggcagcaccctcaccagtctggta

SEQ ID NO: 922503 - DNA, 604 bp, Homo sapiens
ccatgttggccagtctggtctcaaagtcctgacttcaggtgatccacccacctcggcctcccaaagtgctggggttacaggcgtgagccgctgtgcccggcctgggcgtgtacttttttgtgtgtgtcagggggggaggggggcaatgtcttgctctgtcaccaggctggagtgcagtagcatgatctcggctcactgccacctccgcctcccggattcaagccattctccttcctcagcctcccgagtagctgggattataggcacccaccaccatgcccatctaatttttgtattttcagtagagatggggtttcaccatgttggycaggatggtcttgaactcctcacctcgtgatctgcccgccttggcctcccaaagtgctgggattacaggcgtgagccactgcgcccggctgggtgtgtacttttaattcactgctgtagcccctgatggagatgaggccttgagttctgcccccttgaaagctcaatctcctccctgtgaaatggggttatggtgtgtatcagttaggtattgtgccataacaaacatctcctaaactcaggggtagaaaacaacaacaattttaattagctcacg

SEQ ID NO: 922504 - DNA, 551 bp, Homo sapiens
tggaggattttgtgtttacaaatttgcatactcactaaaatttatttataaccccaaaatcaacactgggtatgcggtcattggcagacaagtatgtgcacacagcgtcctagaacaggttccccactgaggtccattgaggtgatgttctgccctcttgtttcagctgtcatattataaacaggtgtcctttttaaagtctattcaatgccatatttttctaatgttcgygctttttttttttttttttttttgagacagagtctcgctctgtcacccaggctggagtgcagtggtgcgatctcggctctctgcaacctacgcctcccagggtcaagcgattctcctgcctcagcctcctgcgtagattacaggcacgcaccaccatgcccggctaatttcttttgtattttcagtagagacggggtttcaccatgttggccaggctggtctcaaactcccgacctcaggtgatccacccacctcagcctcccaaagtgctgggattacaggcgtgagccaccatgccccgccctgtttgtgctttttgt

SEQ ID NO: 922505 - DNA, 749 bp, Homo sapiens
cctactaaataataattcactattttcccctccccacattccctggcaatcactattctacttcttctttttttttttttcttcaagacgaagtttcaccctgccgcccaggctggagtgcagtggctcaatcttagctcactgcagcgtccacctcctgggttcaagcaattctcctgcttcagcttcccgagtagctagaactacagtcacccgccaccagtcccggctaatttttgtgttttcaatagagacagggtttcaccatgttgaccaggctggtttcaaactcctgacctcaagtgatctgcctgcctcagcctcccaaagtgctggaattacaggcgtgagtcactgcacccagcaacttcttgtctccatgaatttgactactctgcgaagctcgtataagtggaatcrtgcattatttcttctttcgcatctggtttatttcacttagtgtaatgtcctcaaggttcagtagtgtcgcagcacgtaacagaacttcattcttttttaaggctgaataatgtttccttctatgtagatatcacactttgtttatccattcattcatcaacagatatttgggttgtttccaccttttggttattgtgaataatgctgctatgaacactgttgtacaaatatctgcttgggtttctgctttcagttctttgaggtatatgcccagaagtggaattgctggatcatatggtaattctatgtttaaatttttgaggaaatgc

SEQ ID NO: 922506 - DNA, 612 bp, Homo sapiens
aggcaggagaatcgcttgaacctgggaagcggaggttgcagtgagccgagatcaagccactgagactccgtctcaaaaaaaaaactcctattacacaaatgaaattcacccagtagcagtgaatggactctgcccaacacactcctcatgcctggtgtttggaggattctgtaactctcgcttaaacttgtaaaggctattgaacagtctgactcctttccagatcaataaggaaagaaaaagatctggttttcaacaattcatctggaaaaaaaagattcatggtccaggtgtaatgctttttactrttatttttaaaattgtttcaaggctacaaagtataatgttttcacatgcatcattccatttgatcttcatagctatataagatgggcaggaattattatttccatttcacagaagaagaaacagatattcagaaagattcatgacttgtccaaagttattcagaaagtggatggggacccttcatgtagtactacttcttctgactcccaaaaccatgtggattcctgggcttcccaatgcgtgcctgctatgggatggatgctcatggcatggaatctgaggcaaagagccaaagcttttctc

SEQ ID NO: 922507 - DNA, 612 bp, Homo sapiens
aggcaggagaatcgcttgaacctgggaagcggaggttgcagtgagccgagatcaagccactgagactccgtctcaaaaaaaaaactcctattacacaaatgaaattcacccagtagcagtgaatggactctgcccaacacactcctcatgcctggtgtttggaggattctgtaactctcgcttaaacttgtaaaggctattgaacagtctgactcctttccagatcaataaggaaagaaaaagatctggttttcaacaattcatctggaaaaaaaagattcatggtccaggtgtaatgctttttactattatttttaaaattgtttcaaggctacaaagtataatgttttcacatgcatcattccatttgatcttcatagctatataagatgggcagraattattatttccatttcacagaagaagaaacagatattcagaaagattcatgacttgtccaaagttattcagaaagtggatggggacccttcatgtagtactacttcttctgactcccaaaaccatgtggattcctgggcttcccaatgcgtgcctgctatgggatggatgctcatggcatggaatctgaggcaaagagccaaagcttttctc

SEQ ID NO: 922508 - DNA, 581 bp, Homo sapiens
acacaatcacatgcatataatgtgacagttaccaattctgtacttttccagacatcagtccgtactcccttgccttcacctcagttttagtacagcaggaagcccacagccatgctgttaatggctgacgtygtggttgttgtccctcggcaccccagtgtgtggtttcctagcttgatttgcccagtaatgtgtcagagactgagttgtagctgatgtacagggtccaactcacatcagactgatttggatgaaaacccaaataggcaatcacactttctagtagaaaatcttgttggggcatcaacattaagatctgaaaatatggccgggtgcggtggctcacacctgtaatccgagcactttgggaggccgagacggggggatcacgaggtcaggagtttgagatcagcccggccaacatggtgaaaaaccgtttctactaaaaatgcaaaaattagctgggcatggtagtgggcacctgtaatcccagctacttgggaggctaaggcgggagaatcatttgaacttgggaggtggagattgcagtgagccgagatcgtgccactgcactccagcct

SEQ ID NO: 922509 - DNA, 706 bp, Homo sapiens
tgcctcagtttccccacctgcaaagtgaggcgatgatgtggactctgtgagctcgtggcaggagtgaagttggataaggaggccccaggcccggtcacaggagtcactgtccctcctgcaggggctgggctccccagtggccagaccaggccagagccttggggttgtgcttttggctgggacctagagcccccagcatcctagacctgttcctcctggaagcacagggctcacgctccagcgaccaccctgaccctgggtgggmcgcacctgtagtcaccagcaggcagctatagtgacgccaggtttcgttccaaaatagttgtctctaagcgtttcctatctacctgctccatgcggtgcacccaaggccaagcctccccttcacctgtgtgcctctcctgaccctggctgccctggggcttaggccccacctccagccaagaccaggacccccaggattgctgcaaagagcacctttattcacagcaaaaggacgtcaccatagcaacaacacttcaattccctgagaacttttcccttatcattcgctttcctagctatgtctttgcaaagagaaaaacaacaagaaacacagcccacgggacaggtgagccatgctgggcccagcggggaggtggcagctacacaggaggagggcagggatgggaggttccagatgctggaacgcataaatacacagagt

SEQ ID NO: 922510 - DNA, 706 bp, Homo sapiens
tgcctcagtttccccacctgcaaagtgaggcgatgatgtggactctgtgagctcgtggcaggagtgaagttggataaggaggccccaggcccggtcacaggagtcactgtccctcctgcaggggctgggctccccagtggccagaccaggccagagccttggggttgtgcttttggctgggacctagagcccccagcatcctagacctgttcctcctggaagcacagggctcacgctccagcgaccaccctgaccctgggtgggccgcacctgtagtcaccagcaggcagctatagtgacgccaggtttcgttccaaaatagttgtctctaagcgtttcctatctamctgctccatgcggtgcacccaaggccaagcctccccttcacctgtgtgcctctcctgaccctggctgccctggggcttaggccccacctccagccaagaccaggacccccaggattgctgcaaagagcacctttattcacagcaaaaggacgtcaccatagcaacaacacttcaattccctgagaacttttcccttatcattcgctttcctagctatgtctttgcaaagagaaaaacaacaagaaacacagcccacgggacaggtgagccatgctgggcccagcggggaggtggcagctacacaggaggagggcagggatgggaggttccagatgctggaacgcataaatacacagagt

SEQ ID NO: 922511 - DNA, 501 bp, Homo sapiens
ggcaataaaaccaaaaactgacaagtgaaacctaattaaagaacttccatacagcaaaagaaactcagcagagtaaacagaccacctatacaatgggagaaaatactcagcatagtatgcatccaacaaaggtataataacaagaaactataaggtacttcaacaaatttatgagagaaaaatgaacaacaccattgaaaagtgggcagaggtcatgaacaaacacttttcaaaagaagacatacatgcrgccaaccagcatattaaaaaaaggctgaatatcactgatcattagagaaatgcaaatcaaaaccacaatgtaatataacctcacaccagtcagaatggctattactaaaaaatcaaaaattaacagatgctggcaagtttgaagagaaaagggaatgcttgtacactgctggtggaaatgtaaattagttcagccactgtggaaagcagtctggagatttctcaaagcacttaaaatagaactaccatttg

SEQ ID NO: 922512 - DNA, 575 bp, Homo sapiens
acgtaccagaatccctgggacacagctaaagcagtgttaagagggaaatttaaagcactaaatgcccacattagaaagctagaaagatctcaaatcaacaccttaaaatcacaattaaaagagctagagaggcaagagcaagctaakccaaaagctagcagaagacaagaaataactaagatcagagcagaactgaaagagatagagacatgaaaaaccctccaaaaaatcaacaaacccaggagatggtttttttgaaaaaaataaatcaatagatagaccactagatagaccaataaggaagaagagagagaagactctctcaataaaaaatgataaaggggatatcaccactgaccccacagaaatacgaactacaatcatagaatactataaacactctgcaaataaactagaaaatctagaagaaatggataagcttctggatgcatacactgtaccaatactaaagtaggaagaagttgaatccctgaatagcccaataacaagttctggaattgaggcaggaattaatagcctaccagccaaaaaaagcccaggaccagaaggattca

SEQ ID NO: 922513 - DNA, 575 bp, Homo sapiens
acgtaccagaatccctgggacacagctaaagcagtgttaagagggaaatttaaagcactaaatgcccacattagaaagctagaaagatctcaaatcaacaccttaaaatcacaattaaaagagctagagaggcaagagcaagctaatccaaaagctagcagaagacaagaaataactaagatcagagcagaactgaaagagatagagacatgaaaaaccctccaaaaaatcaacaaacccaggagatggtttttttgaaaaaaataaaycaatagatagaccactagatagaccaataaggaagaagagagagaagactctctcaataaaaaatgataaaggggatatcaccactgaccccacagaaatacgaactacaatcatagaatactataaacactctgcaaataaactagaaaatctagaagaaatggataagcttctggatgcatacactgtaccaatactaaagtaggaagaagttgaatccctgaatagcccaataacaagttctggaattgaggcaggaattaatagcctaccagccaaaaaaagcccaggaccagaaggattca

SEQ ID NO: 922514 - DNA, 776 bp, Homo sapiens
ccactccttctgtattgcagaaaactgtccatcagactccacagcagcctttagctttggagggcctgggccttactgggtgtcagcagcctgttgtctatctgtctatcctgctatctatcatgtatcactctctcatctcctgtgtttccatccaggtctgcacgaataccaatactctatgctttgtactttctgaccttacatataggttccctgcaggaaggacatgtgtgtttgttgtgggtgtgtagatgtgtgcaattctggatgctgggctttcaaccctcagtcaaggtctgagggcatacaaaaggatgtgtgtgtgtgatgtttggtataaatgtgtgtacagtgcattggtgtgtgtccagtatgttttcatgtatactgcatagcacaggtatttgtgtatggcttagccagtttctctgtccttagttctgcaaggagtgcatattggggggctccaatacacctacaaggtacttgggcatgtgtcttgtgggtcttgggtctagtgtagacatgtgtgtgttcccttgttctaggcactccctagatatgactgccaggctgcccacctctaacaggtcttcctgtccctttaagacttaagggatctcaatgggtattcattggctggagggcagarggggattgggctctttggctatcccagtccatcctttattctgtttgatttactggggatattgtggttgattcggcctttgcccctttaaacatcggagtgagagaatagaggccccttt

SEQ ID NO: 922515 - DNA, 721 bp, Homo sapiens
ttacacctgcaaagcccctcacagaagtacctagattagtgtttgactgaataactaggagactagaatctccatgggaaagggggagactctttagaattatgcctaacccgtatatcttgatggggtaatggccacattggtatattcatatgccgatgtgagtcgaactgtttatttaaaatgaattgactttattatatataatagaccttaatatactaaatttgaaatgtaamaataactatctagagaaatttatagtgaaaatacaaaataaaggcataaagtacgctttagaataaaggataatgtctttttacattcagatgtctttagtaaagtgtagtccatgatacatatataaggcatatataattcattgttatatgtaaccatatataacaatgaatatatattcaattaacggattaaaaaattaattcagttgtttccaggatgactcttctcagataacttttgtttccctgatttgaggaaaaaataaaacaggagcaagaacaaccaaattatagataactataagtcacatgcctcttgaataacttgtgtcagctctccgtgaacttgtataaatacagatgtcatgcaagactagatgagtatgaaactagatgagtaattttattactgtccagtagaaatgtaagccacataaataattttaaatattctacagatacattataatgaacgttag

SEQ ID NO: 922516 - DNA, 721 bp, Homo sapiens
ttacacctgcaaagcccctcacagaagtacctagattagtgtttgactgaataactaggagactagaatctccatgggaaagggggagactctttagaattatgcctaacccgtatatcttgatggggtaatggccacattggtatattcatatgccgatgtgagtcgaactgtttatttaaaatgaattgactttattatatataatagaccttaatatactaaatttgaaatgtaaaaatamctatctagagaaatttatagtgaaaatacaaaataaaggcataaagtacgctttagaataaaggataatgtctttttacattcagatgtctttagtaaagtgtagtccatgatacatatataaggcatatataattcattgttatatgtaaccatatataacaatgaatatatattcaattaacggattaaaaaattaattcagttgtttccaggatgactcttctcagataacttttgtttccctgatttgaggaaaaaataaaacaggagcaagaacaaccaaattatagataactataagtcacatgcctcttgaataacttgtgtcagctctccgtgaacttgtataaatacagatgtcatgcaagactagatgagtatgaaactagatgagtaattttattactgtccagtagaaatgtaagccacataaataattttaaatattctacagatacattataatgaacgttag

SEQ ID NO: 922517 - DNA, 721 bp, Homo sapiens
ttacacctgcaaagcccctcacagaagtacctagattagtgtttgactgaataactaggagactagaatctccatgggaaagggggagactctttagaattatgcctaacccgtatatcttgatggggtaatggccacattggtatattcatatgccgatgtgagtcgaactgtttatttaaaatgaattgactttattatatataatagaccttaatatactaaatttgaaatgtaaaaataactatctagagaaatttmtagtgaaaatacaaaataaaggcataaagtacgctttagaataaaggataatgtctttttacattcagatgtctttagtaaagtgtagtccatgatacatatataaggcatatataattcattgttatatgtaaccatatataacaatgaatatatattcaattaacggattaaaaaattaattcagttgtttccaggatgactcttctcagataacttttgtttccctgatttgaggaaaaaataaaacaggagcaagaacaaccaaattatagataactataagtcacatgcctcttgaataacttgtgtcagctctccgtgaacttgtataaatacagatgtcatgcaagactagatgagtatgaaactagatgagtaattttattactgtccagtagaaatgtaagccacataaataattttaaatattctacagatacattataatgaacgttag

SEQ ID NO: 922518 - DNA, 721 bp, Homo sapiens
ttacacctgcaaagcccctcacagaagtacctagattagtgtttgactgaataactaggagactagaatctccatgggaaagggggagactctttagaattatgcctaacccgtatatcttgatggggtaatggccacattggtatattcatatgccgatgtgagtcgaactgtttatttaaaatgaattgactttattatatataatagaccttaatatactaaatttgaaatgtaaaaataactatctagagaaatttatagtgaamatacaaaataaaggcataaagtacgctttagaataaaggataatgtctttttacattcagatgtctttagtaaagtgtagtccatgatacatatataaggcatatataattcattgttatatgtaaccatatataacaatgaatatatattcaattaacggattaaaaaattaattcagttgtttccaggatgactcttctcagataacttttgtttccctgatttgaggaaaaaataaaacaggagcaagaacaaccaaattatagataactataagtcacatgcctcttgaataacttgtgtcagctctccgtgaacttgtataaatacagatgtcatgcaagactagatgagtatgaaactagatgagtaattttattactgtccagtagaaatgtaagccacataaataattttaaatattctacagatacattataatgaacgttag

SEQ ID NO: 922519 - DNA, 655 bp, Homo sapiens
atgtaaaaattaatttataagttggacttcactaacattaaaaacttttgactcaaaagacactgctgaagagaatgagataagccactgactgggaaaaatattttcaaaagacacatttaacacggtactgttatccaaaatatacaaatgactgttaaaactcaacactaaaaaaaaaaagcaaccagattttaaaaatgggcaaaagacctggacagacacctcaccaaagaagatatgcagatgacaaatgagcatattagaagatacttaacatcatatgtcattagggaattgcaaataaaacactgagttactactgcacatctcttagaatggccaaaatcctaaactctgacaacatygaatgctattgaggatgtgtaataataataaatcacaattattgttggtgagattgcaaaatgttcactttggaagacagttcagcaatttctttcaaaactaacaatgtaaacatacaactcaactgttaggctgcttggtatttatccaaatgaatcaaaaatttatatccacacaaaaacctgaattcagacgattatagcagctttattcacaattgccaaaatttagaagcaacagagatgtctttcatcagatgaatggataaactgtggtacattcagac

SEQ ID NO: 922520 - DNA, 710 bp, Homo sapiens
attctgaaacaaccttctgagacatattctattagcatccccacttcacggagaaggaaactgaggcacagaggagttgagtcttaacttcccaaagttcacacatttgttggttggtgaagccaggatccccggtccagctagcgtggctccagagtctttggggtctacctgctaaactgggtcatgtggaatttgtcataatactttaatatctgtagataaagcaaggagagtgaatcttctgtttgatttttgttacccaggtctgaaaatactgagtcatttttcttactgtaccctaaatcggctaccctgatattagctaaaagcagcgtgacygactgccccgttttccccgagactgcaggtttctcttgggatttttggtgctaacacagggagcatccaggcaaaccagaacggttggtcatccaaaaagtgtgccatttagaaggaacaaatatatctctatggactctcactgatttactttgttttggcaacaaaaacatcacggggcagttcttacattttgtctctggcaacaactaatactgtagtttaagtataatggccctcatttgcttttcattaagcagtggctttcttcccaggcgtcctgggatgattttgctttgttgtttaatagagggatgatgtggctaaggggatccccaggctttcaaagccactgcaggttgggggat

SEQ ID NO: 922521 - DNA, 554 bp, Homo sapiens
catgacacgaccaaattcacatataacggtattaactttgaatgtagatgggctaaatgctccaattaaaagacacagactggcaaattggataaagactcaagacccatcagtgtgctgtattcaggaaacccatctcacatgcagagacacacatagactcaaaataaagggatggaggaagatctaccaagcaaatggaaaacagaaaaaggaaggggttgcaattctagtttctgataaaacagactttaaaccaacaaagatcaaaraagacaaagaaggccattacttaatggtaaagggatcaattcaacaagaagagctaactatcctaaatatatatgcacccaatacaggagcgcccagattcataaagcaagtccttagtgatctacaaagagacttagactcccacacaataataatgggagactttaacaccccactgtcaacattagacagatcaaagagacagaaagttaacaaggatacccaggaatttaactcagctccactccaagcggacctaatagacatctacagaactctcc

SEQ ID NO: 922522 - DNA, 554 bp, Homo sapiens
catgacacgaccaaattcacatataacggtattaactttgaatgtagatgggctaaatgctccaattaaaagacacagactggcaaattggataaagactcaagacccatcagtgtgctgtattcaggaaacccatctcacatgcagagacacacatagactcaaaataaagggatggaggaagatctaccaagcaaatggaaaacagaaaaaggaaggggttgcaattctagtttctgataaaacagactttaaaccaacaaagatcaaagaagamaaagaaggccattacttaatggtaaagggatcaattcaacaagaagagctaactatcctaaatatatatgcacccaatacaggagcgcccagattcataaagcaagtccttagtgatctacaaagagacttagactcccacacaataataatgggagactttaacaccccactgtcaacattagacagatcaaagagacagaaagttaacaaggatacccaggaatttaactcagctccactccaagcggacctaatagacatctacagaactctcc

SEQ ID NO: 922523 - DNA, 456 bp, Homo sapiens
tgtagtggatcccgcaccagggccaagggcggagctgcctgccagtcccacaccacgggcgtgcactcctcagcccttgggcggtcgatgggactggcccctggacaagggggcggcacccgtccgggagacttggyggcagcccaccgcggtgggggggcttgggcatggctggctgcaggtcccgagccctgccccacggggaggtggctaaggcccagcgagaattcgagcgcagcgcaggcaggccggcagtgctggggaacccagcgcccccactgcagttgctggcccgggtgttaagcccctcactgcccggggccagcgggccgctccgagtgcagggcttgtggagcccgcgtccacctggaactggcactggcctgccatagccacaggcagtcccggttcccgcccacgcctatccctccacacctccctgcaagcagagggagc

SEQ ID NO: 922524 - DNA, 758 bp, Homo sapiens
tggcatttcctcaaaaatttaaacatagaattaccatatgatccagcaattccacttctgggcatatacctcaaagaactgaaagcagaaacccaagcagatatttgtacaacagtgttcatagcagcattattcacaataaccaaaaggtggaaacaacccaaatatctgttgatgaatgaatggataaacaaagtgtgatatctacatagaaggaaacattattcagccttaaaaaagaatgaagttctgttacgtgctgcgacactactgaaccttgaggacattacactaagtgaaataaaccagatgcgaaagaagaaataatgcaygattccacttatacgagcttcgcagagtagtcaaattcatggagacaagaagttgctgggtgcagtgactcacgcctgtaattccagcactttgggaggctgaggcaggcagatcacttgaggtcaggagtttgaaaccagcctggtcaacatggtgaaaccctgtctctattgaaaacacaaaaattagccgggactggtggcgggtgactgtagttctagctactcgggaagctgaagcaggagaattgcttgaacccaggaggtggacgctgcagtgagctaagattgagccactgcactccagcctgggcggcagggtgaaacttcgtcttgaagaaaaaaaaaaaaagaagaagtagaatagtgattgccagggaatgtggggaggggaaaatagtgaattattatttagtaggtacagtt

SEQ ID NO: 922525 - DNA, 765 bp, Homo sapiens
ggagtgcagtggcccaatctcagctcactgcaacctccacctcccgggttcaagctattctcctgcctcagcctcccaagtagctgagactacaggtgcgtgccaccacacctggctaatttttgtattgttagtagagacaggtttcattatgttggccaggctggctcaaactcctgatctcaggtgatccacctgccttggcctcccaaagtgctgagattacaggtgtgagccagtgtgcccggccagctcttgtgatttttaaaatcttcatctttacttttaggacaaggaaaattaggctcagagatcttaaggaatttgcccaaggttcacacagcctgtaagagtggagtagatgttgaaatttcacctcagtttcctctgggacacattctccattccattacagcctgacgagcgtggccttgcccaaggtcacagagcaaataagcagcagagtggggaattgaacccaagtcctctagctgggttccatacctttttaatcaaactgtygctgccactgaaataacagactacagaatcaaggacctgagctgaagtcgcacttgataacaaattgcccagacttggaattctttgcttctacccgacgaactaaagagaagacagcttccgtgtagggaaaactctctctaaccatgtttttcctctgttctcacatcacaataatcatcagcacaggagaagacttctgtgactatatgtgtgggttttttttcctcacacaccaagcag

SEQ ID NO: 922526 - DNA, 594 bp, Homo sapiens
ctttctgtggacaagaaaaccgggagtcagaaacatcctgtggcttccatgaggcacacagttagtaagcgttagaatgagataaaaacccagagaaactcctaggtctgtgttccttcactaagtctgagaccccatggcctgccaaggggctgagtgaaaattgctgtccttgaaggttttgcccattgcctgtgtgcctggttccaggaggcctcagagctcagagggaactactgttgttcaggccagccctccaggagtgaggatggatccaggtgtctccctgcgatgaggacagcagggtgtactgcttggacaggctctgatctatagaacatgtgtattttatgccagaaacattttcatattgaggacagcagggtgaggacagtgtgaggtgaggggagawaaccaccaatacatgcagatggtacaagcagttgattatttggtggctgcaaaagtgggagagaaatagcttcgtcttttgagatctatgattctgaagcttgtacctgaaaaagctgctcatctctgttcctcgacttctgagaggagagtctttttaggtggaagacagacaggtcctgt

SEQ ID NO: 922527 - DNA, 613 bp, Homo sapiens
attttttgcatttttagtagagtcggggtttcaccatgttagccaggatggtctcgatctcctgacctcgtgatccaccagcctcggcctcccaaagtgccgggattacaggcgtgacgactgtgcccgacccggtttggatttatttatgctcccttattttgtgcttttcatttgtccttccaattctgtttcctttttttcctctttccttgccttttttaaggttttaatcatatttctcttttgctcattctctttttattctcttctaagttggaagttgtatactctatgtatatacttttagtaaccacctraacattttaatataaataattattttttaaaatacaaagttaatattttacccttctcaaaaataatataaggaacttagactattttaattttgatcatttcaaccctagcttatttcctattttcttcctatattttaatttgtttaatttaaagaaaaaaatttttttactgaaaaaaaataggggcagggtctcattatgttttccaggctggttttgaactcctggactcaagcaattctcctgcctcacttacattttaattttatcttattttttactgatcccac

SEQ ID NO: 922528 - DNA, 613 bp, Homo sapiens
attttttgcatttttagtagagtcggggtttcaccatgttagccaggatggtctcgatctcctgacctcgtgatccaccagcctcggcctcccaaagtgccgggattacaggcgtgacgactgtgcccgacccggtttggatttatttatgctcccttattttgtgcttttcatttgtccttccaattctgtttcctttttttcctctttccttgccttttttaaggttttaatcatatttctcttttgctcattctctttttattctcttctaagttggaagttgtatactctatgtatatacttttagtaaccacctgaacattttaatataaataattattttttaaaatacaaagttaatattttacccttctcaaaaataatataaggaacttagactattttaattttgatcatttcaaccctagcttatttcctattttcttcmtatattttaatttgtttaatttaaagaaaaaaatttttttactgaaaaaaaataggggcagggtctcattatgttttccaggctggttttgaactcctggactcaagcaattctcctgcctcacttacattttaattttatcttattttttactgatcccac

SEQ ID NO: 922529 - DNA, 582 bp, Homo sapiens
ctaagaccgtgagaaaagctcaatattagggtgggagtgacccgattttccaggtgccatctatcacccctttctttgactaggaaagggaattccctgaccccttgcacttcccggatgaggcaatgcctcaccctgctttggctcatgctcggtgcactgcagccactgtcctgcaccctctrtccaacactccccagtgagatgaatacggtacctaagttggaaatgcagaaatcacccgtcttctgcgccgcctcacgcttgaatgagaactgacgagggtttggaaattatcctctttccttcccagctcctccctaatttctaaatgccagcttttaaagtgattttggaaacatattcaattctaatgcagagattcagcctaatctttgagtacagtgctgaataaaccaccctcacagtgcatgttttcacttcatttcttcttgcggctttcctgaataaactagcttaagcaatatctttactcaagtcctatgttcattcagtccctgatagtttaaaagaattagcttacttcttagcaaaattgtactgatatctgcaaaattttat

SEQ ID NO: 922530 - DNA, 582 bp, Homo sapiens
ctaagaccgtgagaaaagctcaatattagggtgggagtgacccgattttccaggtgccatctatcacccctttctttgactaggaaagggaattccctgaccccttgcacttcccggatgaggcaatgcctcaccctgctttggctcatgctcggtgcactgcagccactgtcctgcaccctctatccaacactccccagtgagatgaatacggtacctaagttggaaatgcagaaatcacccgtcttctgcgccgcctcacgcttgaatgagaactgacgagggtttggaaattatcctctttccttcccagctcctccctaatttctaaatgccagcttttaaagtgattttggaaacatattcaattctaatgcagagattcagcctaatctttgagtayagtgctgaataaaccaccctcacagtgcatgttttcacttcatttcttcttgcggctttcctgaataaactagcttaagcaatatctttactcaagtcctatgttcattcagtccctgatagtttaaaagaattagcttacttcttagcaaaattgtactgatatctgcaaaattttat

SEQ ID NO: 922531 - DNA, 585 bp, Homo sapiens
ggccagcctaaaacagtaaggtcaagttgtttggacaaagaagctacaggacgcaatcccggtccttgtgtaagaattctgactgcacagccctgcacttcggctgtgtgtaatgaaaagggttgggatgagtcaggaagagctagggtggggacagtctctaaagctgtcttcaaggaatggaaagatgagtggggaaaggatttaggatctatggggtcagctaggtttccttttgtgagtttatgtaatggttttgttaggatggcaaaaccaggtatccaaaggcaaaagtatccaaccatgcccaggaaggaaaggagttgttgttttgtagaaggtgctgtagtttgagagatcagttggacactatcrgcagggagagcacatgtgtttttatgagaattatgccaagataggtaacagatgaggaagaaatttgggcttgactgaagtgatggaggctatctgtgagggcttgcagcagtacagcccaggtaatttgctgagcctgatgggtgtcagggtcagtacaagtgaaagcgaagagaggctgggacgaggggtgtaggggaatagtgaaaa

SEQ ID NO: 922532 - DNA, 602 bp, Homo sapiens
gatgagtgagaattagaatgtttgaggaactgggagatggacaggttgctagagcagagaggatggaaggagagaggtggggaaggagatggtcgagtgccaggtcaaggtgaggagcttgactctcactcccttggtgggttttaaggacaatgacaggttccaatgtcccttgtaagaggtcactttggctgctgggtgttaaatccattccacaaacagttctccagtgcctacctggagccaaacatggcacmtatggtttgcctaccccgaactgagagtcaggctctgttctcacctctgttcggcacacgaggatgctggggttcaaagggcattgagttatcttcccaagacttccccattaagagtggagctggactggaatgcaggtctccctggtccctgtcctcctgttccctgccggtttctttcctccctccagcaacacaactgattaaggacattgtccattaaagtgggttgggttgatctcccagtcagcgtaggatggaagccatggactccagtggtgtcttgccttgcccagagctaccacagggtcccctgacaagtgactgtgacaccatggggatacc

SEQ ID NO: 922533 - DNA, 651 bp, Homo sapiens
gctttctttgtttctgttctttcagaataggcctctcatgattgagggatgtagctttgcgacatttgcctaatttctaccttttgaaagaattttattgaatgtttgaatccctgtagtgtcaggcactgcactagaaactaagtcctccttttacgtcctctttcctttttgcctgcctccttttgttagcttggctgttcattctagttaagaggatttagtctgtggttctgaataaacagaagtgacattaattaygattttatacatataaatgagcaaagtggaaataaatccaaggcattaatgggcccataaatgttgtgtttaggtggaagaagagcctgaagaagaacctgaagagacagcagaagacacaacagaagacacagagcaagacgaagatgaagaaatggatgtgggaacagatgaagaagaagaaacagcaaaggtatggcaaatcaagaatgtgacttgcattttcagttctggcaaagttaggacagagttttagttctggcaaagttaagactgtgtaacttacagaagtcagactgagcatttaaattgtttatttcatgcacaaacctgtgagctaggttttttttctgctaacttttaataccttctgggtttttttaatttatt

SEQ ID NO: 922534 - DNA, 651 bp, Homo sapiens
gctttctttgtttctgttctttcagaataggcctctcatgattgagggatgtagctttgcgacatttgcctaatttctaccttttgaaagaattttattgaatgtttgaatccctgtagtgtcaggcactgcactagaaactaagtcctccttttacgtcctctttcctttttgcctgcctccttttgttagcttggctgttcattctagttaagaggatttagtctgtggttctgaataaacagaagtgacattaattacgattttatacatataaatgagcaaagtggaaataaatccaaggcattaatgggcccataaatgttgtgtttaggtggaagaagagccygaagaagaacctgaagagacagcagaagacacaacagaagacacagagcaagacgaagatgaagaaatggatgtgggaacagatgaagaagaagaaacagcaaaggtatggcaaatcaagaatgtgacttgcattttcagttctggcaaagttaggacagagttttagttctggcaaagttaagactgtgtaacttacagaagtcagactgagcatttaaattgtttatttcatgcacaaacctgtgagctaggttttttttctgctaacttttaataccttctgggtttttttaatttatt

SEQ ID NO: 922535 - DNA, 612 bp, Homo sapiens
aaagcaagacctatactagacaggcagcatcagaaggatgctggcaggaggtacctacagtagtcattattatagcaaatttattatataccaggtactgttttggatgttttacataggccaactagcttaatgctcctaaccaattattaggtactattcccwttttacagatgtggaagcatgggcataaagagattaaggaacttgcccacagagctagtaaatgggagagctgaaatttgaatccagatgacctagcttcaaagtctgcttctctagctagcaaatgtgctttactgcctctcttagtgagcaagatggagatggactgatggcaatccagttaggtgaaataaaaacctgacttactactgaaagaatcaggcagactgaagagaggtctgtacttatatgccatgtatctctatccctaactttgttcctttcagtaccttaacgtcagggtgctgatggcatggtgataaaatttgtgagtgacccaagcctgggaggaatttgtggaattaactgattgatttaatcagagtccagataaatcctgactgactggaatggtgaatcatcttttacaaagaagaggcacaatcc

SEQ ID NO: 922536 - DNA, 670 bp, Homo sapiens
ctgccccttcccagtcttcctgggggcacttccttaataaaccaatccttccctcagggccttctttgggggaacccgactgaggacagctactctctagctgagtgacgctggcaaggctcttaaccttctctgtgcctctgagccatgcttcctaatagggggcactyatggagtgtgtgccaggaagctggcatgaaggcacttgccacactttgtctcacttaatcctctcagcaaccccaagaggaagctacttccattgtccccatttgacagatgaggaggtggggagcagaggagttaagccctttgtccatattcacgcagccggtgcaagggctgagtgttttgtgtccctcccaaaattcacgtgttgaaatcctaaccctcaatgtgatggtattaggaggtgatgcctttggaaggtgattaggtcatgaagatggaacgctcatgaatgggatcagtgctcttacaaaagggacctcagagagctagccagccctcttgccatcatgtgaggacaccacaagaggatggccatctgtaagccaagaagagggacctcaccacatacctggcaccctgatctcagacttccaggctccagaactgtgagagagaaagaaacaaaccacagggtctacggtactcagcagcccaaact

SEQ ID NO: 922537 - DNA, 483 bp, Homo sapiens
tgccaggaagctggcatgaaggcacttgccacactttgtctcacttaatcctctcagcaaccccaagaggaagctacttccattgtccccatttgacagatgaggaggtggggagcagaggagttaagccctttgtccatattcacgcagccggtgcaagggctgagtgttttgtgtccctcccaaaattcacgtgttgaaatcctaaccctcaatgtgatggtattaggaggtgatgcctttggaaggtgattrggtcatgaagatggaacgctcatgaatgggatcagtgctcttacaaaagggacctcagagagctagccagccctcttgccatcatgtgaggacaccacaagaggatggccatctgtaagccaagaagagggacctcaccacatacctggcaccctgatctcagacttccaggctccagaactgtgagagagaaagaaacaaaccacagggtctacggtactcagcagc

SEQ ID NO: 922538 - DNA, 688 bp, Homo sapiens
ctgcagtcagtacacaccccagagagaaaagccactaagaagcacagccaatatcatacagaatgaacaaaagctggaagcattccccttgaaaaccagcacaagacaaggaagccctctctcaccacttttattcaacatagtatttgaatttcaggtcaggataatcaggcaagagaaagaaataaaaggtrctcaaataggaagagaggaagtcaaaccgtctctgtttgcagatgacatgatcctatatctagaatacctcaccatctcagcccaaaagcttcttaagttgataagcaacttcagcaagtctcagcatactaaatcaatgtgcaaaaatcacaagcatccctatacaccaacaatagacaagcagagagccaaatcatgaatgaactcccattcacaattgctacaaggagaataaaatacctaggaatacagctaacaagggaagtgaaggaactcttcaagaagaactacaaaccactgctcgagggaatcagagagtacacaaacaaatggagaacattccatgctcatggataggaagaatcaacattgtgaaagtgaccatactgcctaatttagaaattcaatgctattcccattcaagaagcattgacattctttacagaattagaaaaaaactatcttaaaatgtatatggaaccaaaaaagaccc

SEQ ID NO: 922539 - DNA, 530 bp, Homo sapiens
aggagaatcactcgaatccaggaggcggaagttgcgatgagctgagattgcaccactgccctccagcctgggcaacaagagtaaagctccatttcaaaaaacaaaacaaaacaaaaacaaacaaccaaaaaagaaatacatagttttgatatactctacaccagcgatctccaacctttttggcaccagggaccaattttgtgaaagacaatttttccatggatggcagggaggggtttagtggggtatagatggggatggtttcaggataaaactgttccacctcagatcatcaggcattagattctcataagaagcatgcaacctagatccgttgcatgcacagttgacaatagggttcaygctcctatgagaatctaatgccactgctgatctgacaggagatggagctaaggcagtaaagttccctagctggcagctcaccccctgctgtgtgacctggttcctaataggccacagaccagtactggtccacagccagggattgggaactcctgctctacccataa

SEQ ID NO: 922540 - DNA, 483 bp, Homo sapiens
atgaactgaatgttatatacccccaaaatttatgtattgaaattctaatccccaaagtgatgatattaggaggtggggcctttcagaggtgattaggtcaagagtacagctcctttatgaatgaaattagttattttgtagaaaaagactggcagagatttctcctcattttcattacatgaggttatagggagaagacagtcatctgtaargaaacaggccttcattagacagcaaatctcccagggtcttgattttggattttccagactccagaaatgtaagaaataaatttctgtggtttataagctactcagtttatagtattttgttataggagcctgaatggactaagacagaatcctgtatattttgcttgtaggaacactatgatcaaccagccatgatagctctacacgagccagactcttctgattgctgttttgactctaccatctactatggtaaccacatcctctttgc

SEQ ID NO: 922541 - DNA, 736 bp, Homo sapiens
agaagtacatgtaacatattttcatggatatcctcctgaaaaatatatcacacaaaaacaagcactgttgccttgttgtcaacatcggtagacttgtcaatctggattgcctaccacggtgactcactaatcctctctaacgattgkgcctcaggatcctctgctatttcctcaattcatctagttatggtgctagccaaaagaggaacacatgccaccctttgaactgcagcctctcttgaaagttcatgacagttgtccttaacagcaaacaggatcactcttcaccagtattaaagggtttctcagctttagcaatgccgttagctactaagaatgatgctctcagtgcagacacatttgatgaagtggtggccttcagtaattgcttctgtacttgatattcacatttttttcatttaaagaactccaaaggcttgtgttttaacgcagggcgcttggtctccatgtggcgaagcagtgttgaaggtttgatggcttcgtttgatagctagtcatcaaatattgtacaaagtggcttggagaatgtgaatcacctgttgcaatgaactcataatttaagtaggactcttggtattttaagtgtagatttctttttgttggcagtcttagagtcccctgctgtttcaccattgggtcttttcctgttttcaaagaagctctccagtaatgtttattttttactcatttttgctagagttagcttgtgggctta

SEQ ID NO: 922542 - DNA, 847 bp, Homo sapiens
aaccgtcagcccagttttaggattttagggttttagacaaaacagtatagggcttggctatgtataccactggcctacagtacaacctattgctaccctacaaataagagaacagcagttaaagacccccacatttcctcttcccctaagcacctcacaacatattcacctatcaccggataccccattcctggaccaagcrgccattcctttgaggtgactgattcaacaaggtagtgaaataaagaacttacccagatgattacaaatgccattgaaatgtgacactttcaaattggagagggcatgaagctcaaatgatatgctcattttacggaggaagaagcaaagactgaaaacattgacgagctttcctcaggctctgagagaggtgaactgggtgctgggtgagttctgttcctggctctacccctgaaatactggaagaagctgagagaatttttttttcttttttctgagcctcagattccacatttgtaaatagaaaaaatataactaaatggctcctaggtccctgctagcgctaacttctcgtgtgatcagtgcttctaaaattgcaatgtgtccaggtggggaagttcatttaccccctatctggtttacgctcacttaagggagtgatttctttcctctgaggctctcatcttgcccattattcagagtgagctgcctcctggtgtgctgtcaaaatacatcagcttcaaagacaaacacacacctttcaatcccagtccaagagagtttactgtataatttatgataatgttaagtctgtttctcataaatgttaatggtgctacattttttttcatagatgggtaattct

SEQ ID NO: 922543 - DNA, 745 bp, Homo sapiens
ttttcaaagtaatactaagcaaaagtacacaggcagaaaaatgtgatcatcctgaacttttatcacacatcaaaatttccctcctatatttttagaaccatttcagtgaaaagtgtagaatggcatcgctaatgtttataggcaaagaacagaatcattaggatttgagacatgttttcagaaaagtgcctttaaataattaacgtcatgacactcttcctcagttcttcatccagcagagtaaatgtctcttgacaggtaatagtcctttatgtgaagcagtaactccagtttggtcaaggtaactagtgttattgaaaagcatgctttaattaaatgcaatgtcttagaaaaccatgctgtttacaagcaataaacaactcttaaatattcaattaatcagctatcaacccaaattcataaaagacccacatactacttctatgctttaaaaaggaaaagagacatattaagaatgaaagcagattaaagaaaagagctaatcaaaaaataagaaaccaggaaatgacattgtcaatagtgagcacccgttttggagtgtgcgctatgaatttgctggctccgacagtaagtattcytacatgggctttctcatttagcactaccctaaatcctgtgaggtggttattagcatccttccattagatgaagaagctgaggttcagagacgttaagcatcttgtccaaaggcagttgctcttaaatggaaaaactaaaattccta

SEQ ID NO: 922544 - DNA, 735 bp, Homo sapiens
ttgttggtctcataatgtgattatcttttatctagactataatatctgtagattggacaccatatctgtttttgctcaccataatatatgcagagcctagtacagctcctagtgctcagttgaagattaaaatatatatttttaataaatgaaataaggactgtttggaataagaaaatggaaagccttttaggcatcataaaaaccagaaaatatatgcaatagagaatagaaacaaaaataaaatcaatgaagccaaaagttggttctttgaaaagaataacaaaatggtagcatctttagctaaaataagcatgaaaaaagggaagagacccaaatactaacctgaggaatgaaagagggaatatcactaccaactttataaagtaaaaaagaattctaagaaattacttgcgttgtatggcaacatatcaatttatgtagatgaaactttacaatttctagaaagacacaaactccaaaattggcttaaataaaaatagaaaatcagaatgcatataacaaaagaatgaattagtaatttagaaacctttctccaaaaagcccaggcccagatgggcttcaatgataarttctagcaaatatttaagaattaaacaaatatgtaaacaactcctgcaaaatataaaagagaaaagagtacttcccaactcttattgttattattgccatagtacttactagacaaagacatttaaaaaagaaaaccgtaga

SEQ ID NO: 922545 - DNA, 436 bp, Homo sapiens
tcacaatgcaggagacgaatgtgtggggtatgaggctggaggcagacaaattagttaggagactattgcaatattcccagggagagataacgagggattaaactaagaagagccattgggaatagcaaggagatgatgaggttatctaataaaaacccacagaaagtaacaaacataatggggaaagattagatgcattctgtttaaagttggaacaaggcacgggtgcctgctatcaggtatacttttcgatatagcacaggaattctgtccaattcagaaaattttraagaataaataaggtgtatacagattggaagcaataataaatatgtgattgtttgcagatatgatgagatacaggaacacacacgcaaacacacacacacgtaaaaatctatagacaaactattaaaattcaaaccaaatctatcaa

SEQ ID NO: 922546 - DNA, 589 bp, Homo sapiens
ttactctcatcctctcatttctatagataagggtgactcatctgaccatcctaaggattaggccaaaattcaaacctaaaaagtctggcttcagactgcatgctgcttctgttagttctttaaaatctctaagtgttgggcatgaccctgatctctttaatactttaccagatcagtgtccagggcccacggaaggcaggcagggccrtgaaactgacagagtaggggacggggtaaacctggggacacaggccctacctgcaagggcagctatgcctcagctccgtcagcgttaccagagaggaacacagagccagcacccacagatcttggattttcaaaaagcatccggatttctatgtgaagtctccggatccctcaaggatgataactaactcaaaataaaaacaaatacaaaaagtcagctgttggccgggcgcggtggctcacgcctgtaatcccagcactttgggaggccgaggcgggcggatcacgaggtcaggagatcgagaccatcccggctaaaacggtgaaaccccgtctctactaaaaatacaaaaaaattagccgggcgtagtggcgggcgcct

SEQ ID NO: 922547 - DNA, 559 bp, Homo sapiens
gtgaaacaccatctctacaaaaaatataaaaattagccaggtgtggtggtacacaactgtagtcccagctacttgggaggctgaggtggaaggatcacttgatccaggaggttgagactgcagtgagccaacatcttgccactgcactccaccctgggtaaaaaattgagaccctgtctcaaaaaaaaaaaaaaaaaaaattagctgggtatggtggcacacgactacagtcccagccacttggatagctttagcccaggaggtygaggctacaataagctgtgatcacaccactgcactccatcctggctgacagagcaagaccctatacatacatgtatatattttatataatttttgttgttatctctgttaaaaatgtccatgaactgctggagtttatttttaatccaagattctattagtaacaaaatatttccatcaatgtataattatatttttaatacagtattggctttggaaatttgttaagagccttttgaaaaacctaaataaattatattgactagctctcctttgtctacatttctaattaacc

SEQ ID NO: 922548 - DNA, 559 bp, Homo sapiens
gtgaaacaccatctctacaaaaaatataaaaattagccaggtgtggtggtacacaactgtagtcccagctacttgggaggctgaggtggaaggatcacttgatccaggaggttgagactgcagtgagccaacatcttgccactgcactccaccctgggtaaaaaattgagaccctgtctcaaaaaaaaaaaaaaaaaaaattagctgggtatggtggcacacgactacagtcccagccacttggatagctttagcccaggaggttgaggctacaataagctgtgatcacaccactgcactccatcctggctgacagagcaagaccctatacayacatgtatatattttatataatttttgttgttatctctgttaaaaatgtccatgaactgctggagtttatttttaatccaagattctattagtaacaaaatatttccatcaatgtataattatatttttaatacagtattggctttggaaatttgttaagagccttttgaaaaacctaaataaattatattgactagctctcctttgtctacatttctaattaacc

SEQ ID NO: 922549 - DNA, 589 bp, Homo sapiens
ggctgggatgcagggcaccaagcccctaggctgcccatagcatggggaccctgggcctagcccacaaaactgttttttcctcctgggcctccaggcctgtgatgggaggggctgccatgaaggtctctgacatggcctggagacattttccccatggtcttggggattaacatgaggctccttgttacttatgcaaatttctgcagccagcttgaatttctccccagaaaatgggtttttcttttctattgcatagtcaggctgcaaattttatgaacttttatgctctgtttctcttttaaaatggaatgtttttaacaataccccagtcacctcttgaatgctttgctgcttagaaatttcttctgccaggtaccctaaattatctctctcaagttcaaagttccacaaatctctagggcatgggcaaaatgccaccartctctttgctaaaacataacaagagtcacctttgctccagtcccaataaattcctcatctccatctgagaccacctcagcctggattttattgtccatatcgctatcagcattttgggcaaagcaattcaacaagtctgtaggaagta

SEQ ID NO: 922550 - DNA, 536 bp, Homo sapiens
ataaagctccaaaagcaagccctgggccctgaataaaatttggaggcattattaaacctggcaacctcggtgttctgtaatagggaccaagaggaacaggcccaaaaggaaaagtgagatcagagaaaggccgcagccttagtcatggccctcagacagacaaaccttggtggttcasagtggacagaaaatggagcaggccaatcacccggtaggacttgttatcagtgtggtttacaaggacactttaaaaaagattgtccaacaagaaacaagccaccccttgtccgtgtccgctatgccaaggcaatcactggaaggtgtactgccccagaggacaaaggttctctgggtcagaagcccccaaccagatgatccaacaacaggactgagggtgcccagggcaagcaccagctcatgtcatctccctcactgagccctgggtatgcttaaccattgagggacaggaaattgacttcctcctggacactggtgcggccttctcagtgttaatctcctgtcctggatgactgtcc

SEQ ID NO: 922551 - DNA, 536 bp, Homo sapiens
ataaagctccaaaagcaagccctgggccctgaataaaatttggaggcattattaaacctggcaacctcggtgttctgtaatagggaccaagaggaacaggcccaaaaggaaaagtgagatcagagaaaggccgcagccttagtcatggccctcagacagacaaaccttggtggttcagagtggacagaaaatggagcaggccaatcacccggtaggacttgttatcagtrtggtttacaaggacactttaaaaaagattgtccaacaagaaacaagccaccccttgtccgtgtccgctatgccaaggcaatcactggaaggtgtactgccccagaggacaaaggttctctgggtcagaagcccccaaccagatgatccaacaacaggactgagggtgcccagggcaagcaccagctcatgtcatctccctcactgagccctgggtatgcttaaccattgagggacaggaaattgacttcctcctggacactggtgcggccttctcagtgttaatctcctgtcctggatgactgtcc

SEQ ID NO: 922552 - DNA, 586 bp, Homo sapiens
acctttgtttttcttcatgcaccaagctagggaagtcaattttgccttcaacacataggacttgatttcatcattatcatcagaaaaagttttatatacctttctgtgtattcaaaacatgaaaacaagaatcttaaatagctatagacattgccacccagatgttttgagttcaaagtaattaacaacatggtaggacacaataaacagagccatctttcagacaagtgcacagcctgatgagacagcagattaaaggcttaatagggccaggtgtgggggcacatgcctgtaatccaagccccttgggaggccaagatgggaggattgcttgtggagttcaagaccaacctggacaacatagcaagactccatctctactcgcccccmcaaaaattagcctggcatggtcgcacacacctgtagtcccagctactcgggaggctgaagcaagaggattgcttgagcccaggagttcgaggctgcagtgatcatgccactgcactccagcctgggcaacaaagtgagactttatcttaaaaaaataaaataaaacaaaacaaaaaacgaagggctttattgagga

SEQ ID NO: 922553 - DNA, 710 bp, Homo sapiens
tggtggcttacgcctgtaaccccagcactttgggaggctgagacaggtggatcacctgaggtcaggaattcgagaccagcctggccaacatggtgaaaccctgtctctactaaaaatacaaaaattagctgggcatggtggcatgtgcctgtaatcccggcttgaacccaggaggcagaggttgcagtaagctgagatcccgccattgcactcyagcctgggcaacagagtgagactgtctcagaaaaagaaagaaagaagcgggtggagggggtggggcggggagagggagggagcggggaagggaggaaggaaacatagtgttatatcagccaacctaaaagttcctctttcaggtcattaatgaaaaatatcccagtaataacattcctttataaaagaaaccttttataaatcagtcgttttattgtaatcaaacttctagattccattctttctgaacaggttctggtaaaatgggaacggtttctattaatcaactggactctcctagcttagtcgattttctagccagctttctctctctcctgttctccgcagcagattttcaaacaccgcattccccttaaacctcccaggctcccatcactcccagcaaagagccagcccgctactttatggagacaggagagactgtcagacagttcctgctgctgcccaggtgcatctgagtaagtttttctctcttt

SEQ ID NO: 922554 - DNA, 716 bp, Homo sapiens
gattcacattcctagttcatgcaccacaaaaatgacctaggaacttttatgtgtgccctgagggagacctttatttactgtacagaagggcggaaattgctgaaagtcaaatgcagaacctcatcctgcaagtggctgaattacaacgcaagttgaactcacagctttgcaggctatgtgcagttaaagtgagagcattaattgggaaagaatgggatcttgcaagttgggatggggatgtttgggaaaactttgataaagctgaggacattgagcccctaaattctgatgtctcctttatcagtgaaggagcactcccacctttgcttcccaacaaccccagcaacagtggcattcccaaccctcagtggtattggtctttccacctctgagaggatgaagcctgcattgcctgaggaaatagtaatggcctcccctgaggcaggtgctgagcaacacaatgttgaactcctcaggaccyaccccaccactcctctttgttagacttcagtccagcagcccctgaagatgaggtacactgtgtgactggcccataagaggtgtgctgcactccactgaactacttgactttttaaatttctacagacagaaattcagggaatgtgtatgggaatggatactatgagtgtgggataatggtggtgaggagagcaaagatcacctgggagaggcaccaaacagtccatccagaggcc

SEQ ID NO: 922555 - DNA, 592 bp, Homo sapiens
gttatgtccccttcaagctgtaggggaagaggaatttggacgaagctgggtacatgtcgccttctccctttctgaattaaagcagatcaaagtagacctggggaaattttcagatgatcctgataggtatatacctgtcctacaaggtctagggcaaatccttgacctcacttggagagatatcatgctattattagatcaaacactggcctttgatgaaaagaatgtggctttagctgcagcctgagagtttggagatacctggttcttagtcaagtagatgatagaacgatagctgaagaaagrgtcaaattccctactggtcagtaagctgtccctagtatggatccccactaagacctcaactcagatcatggggactggtgtcacaaacatctgttcacctgtgttctagaaggactaagaagaattaggaaaaagcccatgagttattcaatgatgtccactataactcagggaaaggaagaaaatccttttgccttcctcgagtgactacgggaggccttaagaaaatatactcccctatcacccgactccctcgaaagtcaattgatcctcaaatataacttaa

SEQ ID NO: 922556 - DNA, 592 bp, Homo sapiens
gttatgtccccttcaagctgtaggggaagaggaatttggacgaagctgggtacatgtcgccttctccctttctgaattaaagcagatcaaagtagacctggggaaattttcagatgatcctgataggtatatacctgtcctacaaggtctagggcaaatccttgacctcacttggagagatatcatgctattattagatcaaacactggcctttgatgaaaagaatgtggctttagctgcagcctgagagtttggagatacctggttcttagtcaagtagatgatagaacgatagctgaagaaagggtcaaattccctactggtcagtaagctgtccctagtatggatccccactragacctcaactcagatcatggggactggtgtcacaaacatctgttcacctgtgttctagaaggactaagaagaattaggaaaaagcccatgagttattcaatgatgtccactataactcagggaaaggaagaaaatccttttgccttcctcgagtgactacgggaggccttaagaaaatatactcccctatcacccgactccctcgaaagtcaattgatcctcaaatataacttaa

SEQ ID NO: 922557 - DNA, 539 bp, Homo sapiens
tcattagccaacttccccatctttgataggacgaagaataccctaataggatgcacaatccaacttttacggtcttacatttccaacttcacttattacatgagcaatgaaaagccctgtaaccacgaatactgtcttaacttttcaagcccccttatgcatccaacacaaccttttatcagkcctgcccctggggcacctactatcccatcagtgtaattacacccttcaacttcaagccccaatttatcatagtaacttctgaatcacccaaacagctccattcagatggcttgtctgcttctcagggcctccaaaaatcatcaccttctccctgcttaacaaacagtctggattttgtaatggcaaaaatgctccctgcatgacgattcacccctggaccccctgcagcagtgcccccaccactaatgaatgatttctcatcccctctttcaatcactcccttgaatagttcctagcagatacaaaacgattttttctctaatgggaaaatagaacacagggagccactcagtttg

SEQ ID NO: 922558 - DNA, 554 bp, Homo sapiens
agtgtgatgtcttcatctttattatttttgtctagtattgtgctggtgatttggactcttttttggttctatataaattttagagtaattttttttctaattctgtgaaaaatgacaaagtattttcatagtaatagcggtgagtctgttcccctgcgcagtattgtcattttaacaacactgattctccctatccatgggcrtggaatgtttttccatttgaatgtgtcttctttgatttctttcagcagtgtttggtaattctcattgtagagatctttacatccctggtgagttgttctataggggtggttgtaatgtcacctctgtcattttggattgtatatatttgaatcttttgattttctttattaatctagctatcaatccatcttgtttattctattgaagaccaactttgggtttctttgatcttttctatggattttttgcatctcaaattcattcaattcaggcctgattttgattatttattgtctactgctagttttagggttggtatgctcttgtttttgtaatttttctaggtgtgg

SEQ ID NO: 922559 - DNA, 606 bp, Homo sapiens
agaggtgaaccttacttttcattgagcagttttgaaacactctctttgtacaattgttaagtgagcatttggagtgctttgaggcccatggtggaaaacaaaatatcttcacataaaaacgagacacaagcattctgacaaatttctttgtgacctgaggattcatctcacagacttgaacctttcctgtgattgagtagtttggaaactctgtttttgtagaatctgcctgtgaacatttggagcgctttgaggcctatggtggaaaaggaaatatcttccctcaagaactagacagcagcattctgagaaacttatttctgatgtgagcattcttctcacaaagttgagcctttcttttaattgagcagttttgaaacacactttttgtagaatctgcaagtggacatttggagcgctttctggcctctggtggaaaaggaagtatcttcacataaaaactagayggaagcattctcacaaacttctttgtgatgtgtgcattgatctcacagagttgaaacttactttcgattgagcagattttaaacactctttttgtagaatctgaaagtggacatttggagcgctcagaggcctatggtg

SEQ ID NO: 922560 - DNA, 711 bp, Homo sapiens
ttccattctccctgtcactttcaggtacaccaatcaaacgtaggtttggtcttttcacagagtcccataattcctggagtctttattcgtttctttttattcttttttctctaaacttcccttctcccttcgtttcattcatttcatcttcyatcactgataccctctcttccagttgattgcatcggctcctgaggcttctgccttcttcacgtagttctcaaaacttggctttcagctccatcagatcctttaagcatttctctgcattggtttttccagttatacattcgtctaattgtttttcaaagttttcaacttctttgctattggtttgaatttcctcctgtagctcacagtagtttgatcatctgaagccttcttctctcaaatcgtcaaagttattctctgtccagttttgttccgttgctggtgaggaactgcattcctttggagaaggagaggcactctgctttttagagtttccagtttttctgctctgttttctccccatctttgtggttttatcgacttttggtctttgatgatggtgatgtacagatgggtttttggtgtgggtgtcctttctgtttgttagttttccttctaacagacaggaccctcagccgcaggtctgttggagtttactagaggtccacgccagaccctgtttgcctgggtatcagcagcagtgtctgcagaacagcggat

SEQ ID NO: 922561 - DNA, 775 bp, Homo sapiens
  misc_feature 58: n = A,T,C or G
tgcctgggaggtcgaggctatagtaagatcaaggatgcagtgagtcaagatcacaccnccgcattccaggttggacaacagagtgagatcctgtctcaagaaaaaaaaaaaagaaaaaaaaaagaactatacaagccaaacatttaaagaaatccaattagaagatgaaccaaaaaaggaacattttaccacagagaataaayggcaaataagcatataaaaatatgtttaacattagagaaatccaaattaaaatcacaatgagataataccacacccatcagattggctaaaataaaatataatagcaacatcaaatgctggtgaagatgcagagaaattggatcacacatacattgctggtgggaataaaatggttctgcactctgtaaaatgatttgtcagatttttctttaaaacaggtatttgcttccagtgtaacccagtaattgcactcttgggcatttattacagaaaaactgaaaacttttgctaatgtaaaacatgtacacaaatgtctatatcagctctgttcatgagtaaaaaaacctggaaaccccccaaatatccttcaatgggtttatccattgaactttcaactgtggtttatcctttccgtggattcaacaatgaccaaaaaggaatgagctagtgatgcatgcaaaaacttgaatgtctttcaaaagaattattgagtgaaaaaaagtccatctcaaaagtttacaaagtgtatgatgccattacagaacattcttgaaataacagatttgtagag

SEQ ID NO: 922562 - DNA, 660 bp, Homo sapiens
atctgtagaagatggcagggtgttgctccaaaatcctaggggcctccactgtgatttacctaagggagcctgccaaaggctccaaagagcatccctatctgccactgacacctcaagcaccattggatctgctgggtcatatggcccaagtgacagaacagcttgcacagcagcctcaacctgtcacagaaccttcttctcttctggaccccactcaaaactggcagcctttcaggtcacttggtaaatgggccagagtaacacacccaaatgaggaatgtgttgctgccaaaatccaaataggcccagtaggcatagtgcctctttcttggttgtaggagggggcaaatgcagcaacttatccttcaccttagaagaaatatcttgacaggccccacactactggacccctagaaattttactaagatagtagttccatgaattttaatcagatttatttcccatcctctggcacgaaagtctcaccrataactccgatgtttttgctacttcttgctcactggatccaatcagcctaatgtcatcaatgtaatggaccagtgtgatatcctgtggaagcaaaaagtgatcaaggctctccgaataagattatgacacaaagcgggagagataatatacccttgaggtaggacagtaaa

SEQ ID NO: 922563 - DNA, 811 bp, Homo sapiens
aattatgtattctggcactggggaaaagaccacaggatgtgtccagggaatcactgggcctactgtaagttggacctgagttaaaactccattaacctgacctccataagcccttactttgactggaggaccacaaagatgttttgggtcctctgcaatcaacatcagctcagagccagtctgatcagtctgaagtgcctgattatttctctttccccattgcagttaccctggtaaaaggctggaggtgtcctagaggaggatggaagaaagattcactgcataaattgttggtaatgtaatggggtctttcctcaaggggacccrgcctcccctttattcaaggagttctggatctataaagtgactcaagtctggaaattgattgagagaccgtgattctcagttttaatcattcaaattagtcttttgtccatttgacctagatgttttcttctcatataaattaagtaggaatgcagtagttttcctaccaatttcatttctaggaacaccgttattaattagccaatgccagagctatacacaagtcagactattctgactgctactttgtctctgctgtccattatacgcccaccttgcctgtgaaggctgagtgctgccacttggcctctgccacctcaagatctaattattcccactgtatttaaattttgtagctgaatgattgtggttcctactgttagatctgacataccgagaagagcaattaccgggctctttgaagatgcaggtgctaccctcacaaatctatttcacaaggcattgctcaagggtatatcttctg

SEQ ID NO: 922564 - DNA, 811 bp, Homo sapiens
aattatgtattctggcactggggaaaagaccacaggatgtgtccagggaatcactgggcctactgtaagttggacctgagttaaaactccattaacctgacctccataagcccttactttgactggaggaccacaaagatgttttgggtcctctgcaatcaacatcagctcagagccagtctgatcagtctgaagtgcctgattatttctctttccccattgcagttaccctggtaaaaggctggaggtgtcctagaggaggatggaagaaagattcactgcataaattgttggtaatgtaatggggtctttcctcaaggggacccagcctcccctttattcaaggagttctggatctataaagtgactcaagtctggaaattgattgagagaccgtgattctcagttttaatcattcaaattagtcttttgtccatttgacctagawgttttcttctcatataaattaagtaggaatgcagtagttttcctaccaatttcatttctaggaacaccgttattaattagccaatgccagagctatacacaagtcagactattctgactgctactttgtctctgctgtccattatacgcccaccttgcctgtgaaggctgagtgctgccacttggcctctgccacctcaagatctaattattcccactgtatttaaattttgtagctgaatgattgtggttcctactgttagatctgacataccgagaagagcaattaccgggctctttgaagatgcaggtgctaccctcacaaatctatttcacaaggcattgctcaagggtatatcttctg

SEQ ID NO: 922565 - DNA, 811 bp, Homo sapiens
aattatgtattctggcactggggaaaagaccacaggatgtgtccagggaatcactgggcctactgtaagttggacctgagttaaaactccattaacctgacctccataagcccttactttgactggaggaccacaaagatgttttgggtcctctgcaatcaacatcagctcagagccagtctgatcagtctgaagtgcctgattatttctctttccccattgcagttaccctggtaaaaggctggaggtgtcctagaggaggatggaagaaagattcactgcataaattgttggtaatgtaatggggtctttcctcaaggggacccagcctcccctttattcaaggagttctggatctataaagtgactcaagtctggaaattgattgagagaccgtgattctcagttttaatcattcaaattagtcttttgtccatttgacctagatgttttcttctcatataaattaagtaggaatgyagtagttttcctaccaatttcatttctaggaacaccgttattaattagccaatgccagagctatacacaagtcagactattctgactgctactttgtctctgctgtccattatacgcccaccttgcctgtgaaggctgagtgctgccacttggcctctgccacctcaagatctaattattcccactgtatttaaattttgtagctgaatgattgtggttcctactgttagatctgacataccgagaagagcaattaccgggctctttgaagatgcaggtgctaccctcacaaatctatttcacaaggcattgctcaagggtatatcttctg

SEQ ID NO: 922566 - DNA, 600 bp, Homo sapiens
gaggatgagacatgtgctacattcatataacaatattcagacacaggaatattttaaatctcaaaagacataaagtagcaatgcctaagtagagacatatgatgtaaatattaattgaaaagcaaaccctgcttttgtttttgatattttcaatagtttttcatgtctcaatctccttcaattcaggcctgatttgsgttatttcttgtcttctgctagcttcgggattggtttactcttggtttatagttcttttagttgtgatgttaggttgctaaattgagatcttttgatttgggcatttagtgctataaatttgcctcttaacactgccttagctgtgtcccaaagattctagtatgttgtatctttgttctcattagtttcaaataacttgatttctaccttaatttcattatttagccaaaagtcattcagaggcgggttattcaatgtccatggaattttatagttttgaatgaacttcttagtcttgatttctaattttattgtgctatggggattgtttgttgttattttagttcttttgtatttgctgaggggtgttttactttcaattatgtgcttgattttagacta

SEQ ID NO: 922567 - DNA, 690 bp, Homo sapiens
ggtttgtgagtgcaccaatcgacactctgtatctagctgctctggtggggccttggagaacctttgtgtcgatactctgtgtctaactaatctgatggggccatggagaacctttgtgtctagctcagggattgtaaatgcaccaatcagcgccctgtcaaaacagaccacttggctctaccaatcagcaggatgtgggtggggccagataagagaataaaagcaggctgcycgagctagcagtggcaacccgctcgggtccccttccacactgtggaagctttgttctttcgctctttgcgataaatcttgctactgctcactctttgggtccacgctgcttttataaactgtaacactcacagcaaaggtctgcagcttcactcttgaagccagcgagaccatgagcccaccgggaggaacaaacaactccagacgtgctgccttaagagctgtaacactcaccgcgaaagtctgcagcttcactcctgagccagcgagaccacgaacccaccagaaggaagaaactccgaacacatccgaacatcagaaggaacaaactccagacgcgccaccttaagagctgtaacactcaccgcgagggcccatggcgtcattcttgaagtcagtgagaccaagaacccaccaattccggacacagtatgattccatttatgtgacattctggaa

SEQ ID NO: 922568 - DNA, 580 bp, Homo sapiens
acctatggttactttcccagttccagatggagaattggaatagatgtacttagcaggtggcaaaacccctgcatatgtctcctgacctctggagtgagcgctattacggtgggagaagccaagtgaagccattaaaaccacctctacctaggaaaataataaatcaaaagcaataacacccaggctgggaaacatagtgagaccccatctctacagtaaaaataaaaataaattagccggctgggtgcggtggctcatgcctgtaatcccagcactttgcagggccgaggtgggcagatcacgaggtcaggaggtcgagaccatcctggctaacacggtgaaaccccatctctactaaaaatatraaaaaattagctgggcatggtggcgggtgcctgtagtcccagctactcgggagggtgaggcaggagaatggcgcgaacccgggaggcggagctcgcagtgagccaagatccagccgctgctctccagcctggtgacagagcaagactccacctaaaataataataaatacataaataaataaatataaataaataaattagccaggctgggtggt

SEQ ID NO: 922569 - DNA, 540 bp, Homo sapiens
tacaaagagttttgagacaactgttcccagatcatagacttaggctttgtgaggactcatacacatttaactctttaagttcttcagatgaacattggtaaatgaggtttcggttgggaaaaacaacaggagagatgactggaaacaagatatgtgtggtgagtcagtagtagatgatatttagtctctggaggacaaagggactgctaaggtatagtttggggatgggccataatttcttaaacactaagaaaaggacctgggattgcatgttttttaggtagtagttcgttttcatcttsaagtatcatttttattttcagtgatagaaaatatcatggagcaatgaattttttgcatttcatatctcacctatttcaataattataatagctaatattctttgattgcttactgtcaatacaatttacatttgtaatctcaatttttatgacagtcttaccttataagggtacttactgtttttgttatataagtttatataactaaggaaatggagaggtgaagtgacttgcccaa

SEQ ID NO: 922570 - DNA, 607 bp, Homo sapiens
gggaggctgaggcaggagaatcacttgaacctgggaggtggaagttgcaagtgagccgagatcattccactgcactccagcctgggtgacagaacaagactccatctcaccgaaaaaaaaaaaaaaaagcatttctttaagcattgccgaagtaatgtgaaattgaccatcaaatacaaaaggaagatgatcatttccaacacaaacttggctgaatagaagaaccttggttgggttgaagccagtgcagtctgcaagcaatyggagtggtttgttgttgaggatactataggcatattgaaagattcttagatttctttcatccttaccaggtgaagttttcccttgcccaccatctatgtgaggaactctgaaagctttggctttagcagcagaaaaattcatggagatgcattgtctgattatatgcaaccaatcactagcataaacttacgtgaagtaaaaccacacaaccagattgtgaccatcttgcctgttctgaaaacccaaacctgaactcactctttgttatgtaaactaactggcttgctctcacttgatagggatatcttctgaaaaattactcaataatgatgaaaataatcag

SEQ ID NO: 922571 - DNA, 607 bp, Homo sapiens
gggaggctgaggcaggagaatcacttgaacctgggaggtggaagttgcaagtgagccgagatcattccactgcactccagcctgggtgacagaacaagactccatctcaccgaaaaaaaaaaaaaaaagcatttctttaagcattgccgaagtaatgtgaaattgaccatcaaatacaaaaggaagatgatcatttccaacacaaacttggctgaatagaagaaccttggttgggttgaagccagtgcagtctgcaagcaattggagtggtttgttgttgaggatactrtaggcatattgaaagattcttagatttctttcatccttaccaggtgaagttttcccttgcccaccatctatgtgaggaactctgaaagctttggctttagcagcagaaaaattcatggagatgcattgtctgattatatgcaaccaatcactagcataaacttacgtgaagtaaaaccacacaaccagattgtgaccatcttgcctgttctgaaaacccaaacctgaactcactctttgttatgtaaactaactggcttgctctcacttgatagggatatcttctgaaaaattactcaataatgatgaaaataatcag

SEQ ID NO: 922572 - DNA, 528 bp, Homo sapiens
gagaaccactgctctcttcaaagctgtcagacagggacacttaagtctgcagaggttactgctgtctttttgtttgtctgtgccctgcccccagaggtggagcctacagaggcaggcaggcctccttgagctgtggtgggctccacccagttcgaacttcctggctgctttgtttacctaagcaagcctgggcaatggcgggcacccctcccccagcctcgctaccrccttgcagtttgatctcagactgctgtgctagcaatcagcgagactccgtgggcgtaggaccctccgagccaggtgcgggatatagtctcctggtgcgccgttttttaagcccgtcggaaaagtgcagtagtcaggtaggagcgaccctatcttccaggtgccgtctgtcacccctttctttgactaggaaagggaactccctgaccccctgcgcttcccgagtgaggcaatgcctcgccctgctttggctcgtgcaacgtgcatgcacctactgacctgcgcccactgtctggcactcct

SEQ ID NO: 922573 - DNA, 528 bp, Homo sapiens
gagaaccactgctctcttcaaagctgtcagacagggacacttaagtctgcagaggttactgctgtctttttgtttgtctgtgccctgcccccagaggtggagcctacagaggcaggcaggcctccttgagctgtggtgggctccacccagttcgaacttcctggctgctttgtttacctaagcaagcctgggcaatggcgggcacccctcccccagcctcgctaccgccttgcagtttgatctcagactgctgtgctagcaatcagcgagactccrtgggcgtaggaccctccgagccaggtgcgggatatagtctcctggtgcgccgttttttaagcccgtcggaaaagtgcagtagtcaggtaggagcgaccctatcttccaggtgccgtctgtcacccctttctttgactaggaaagggaactccctgaccccctgcgcttcccgagtgaggcaatgcctcgccctgctttggctcgtgcaacgtgcatgcacctactgacctgcgcccactgtctggcactcct

SEQ ID NO: 922574 - DNA, 677 bp, Homo sapiens
aaagacatatccccaaaattaagagtgccattttaaactggatcttggatcccccaaaagagggagatactatgggagaagacagtacagtgcttctaccatgcattttattgcaaggcaacccaaagccagtgggcttattttgtaatcagcccatcccccatgggagtctcatctctcagtgggggtagcgaagtttccatatctttcaggtgaccaagagcatgcttctctgattcaaatgtgcaaacagttaagtaaccctccataactatcattagccatcccttaaagtatatttcctacctagttattacacaccaaatctctctcataatgtgaagtaatttgatwacccaaaaactcaaaactgtcagataacagaaggcaaaacagaactgctcctttgattttgagagggatctatctgcttttaattcctggggtttcatgaggaaaacgggatttttttttcccaaaatggggtctgtggcaactcctatgtttttcccaaggagtcccaggctaccagaatttatcttagggcctctcatatgtgcattaatagtggcaagacgaataatagagaaaaataattcagttgattgagaatgaaaaagagaaccttttattagaaaagcaagatccaagaagagaaaaacataaaggccttttaa

SEQ ID NO: 922575 - DNA, 582 bp, Homo sapiens
agactcactcaagtatgctatcacttaaaagtctataaagataaaattatcaagcaaattgttgtctgaaataaatgaagatattttaattagaatataaagatagatatttatcttccttgtggttacttaacaaaataaaaaaaaaaacccaaccagggaaaaaaatgtttttggtccatctagccatagcaaatactgcagtccctctagccatagcaaatactgcagtcagwccatgatattagagtttcttcatgccccagcttgactgtcttaatgcactgagacttcttatacttctgcatttgtgtggcttgtaccatgtccccttgtacccatggcttgtaccatgtacatatgacccctctctccctaatccccataaccccaagttctaaacaaatccctatacacttagatatccacctctacttgcaaaatgtgcattggaagatgatttgttaagttctgtgcattgtacccttcacatctctcatcactcagccgtgatataagtaggtattcagtcaaccgaatgccagaaggaaggtggttgcagataaagggcaggcacaacct

SEQ ID NO: 922576 - DNA, 582 bp, Homo sapiens
agactcactcaagtatgctatcacttaaaagtctataaagataaaattatcaagcaaattgttgtctgaaataaatgaagatattttaattagaatataaagatagatatttatcttccttgtggttacttaacaaaataaaaaaaaaaacccaaccagggaaaaaaatgtttttggtccatctagccatagcaaatactgcagtccctctagccatagcaaatactgcagtcagaccatgatattagagtttcttcatgccccagcttgactgtcttaatgcactgagacttcttatacttctgcatttgtgtggcttgtaccatgtccccttgtacccatggcttgtaccatgtacatatgacccctctctccctaatccccataaccccaagttctaaacaaatccctatacacttagatakccacctctacttgcaaaatgtgcattggaagatgatttgttaagttctgtgcattgtacccttcacatctctcatcactcagccgtgatataagtaggtattcagtcaaccgaatgccagaaggaaggtggttgcagataaagggcaggcacaacct

SEQ ID NO: 922577 - DNA, 615 bp, Homo sapiens
gcagactctgcatgaaaaagagaaaagatcatggactttggacccagattgtcctcttgcagccctcggtccatctctcataaattgtgtgctcctggacaatgttacttaatgctcttgaactcaatttctctattgtataaaataggagtaataatgcttatgttgacagtttttttttgtgaggcctaaattttgtagcgtaggcacccagaaggatgtctgataccactaggcatttgatattttaagtcctctctcttaatctttttttttttttttaatttttttttgagatggartttcgctcttgttgcccaggctggagtgcagtggtgcaatcttgactcaccacaacctctgcctcctggttcaagcgattctcctgcctcagcctcccaagtagctgggattacaggcatgcaccaccacacccagctaattttgtatttttagtagagatgggggtttctccatgtttatcaggctggtctcaaactcctgacctcaggtgatctgcttgcctcggcctcccaaagtgctgagattacaggcatgagccaccatgcccggccaagtcctatctttctcaaaagaatcttcctctagtaaatt

SEQ ID NO: 922578 - DNA, 587 bp, Homo sapiens
tgagttgctttaaattattttcttgatttctttttataatatactcattggcataatattattcacatacacaacttcagacactattcacattgtattttactgaacatcgcaatcctgtgtacagaaattttaagcctaattttacagatgacgaattaataattcttgtctttatgattagacttttgtctgatctctgaaattcctttctattttgagaaaaaaaaagtatcttattcttttttcttctgaattaaaaaatgtattracatttaaaatattattacacataaagtttatttttaaataaagtatcagatagagatactgttcaatttttttccaatatggataaataattattccgacaacatttattacctagtctccgattttcctgttgattgatggtcacctctgatgtgtatgaatttccttcacatgtgtttgatgaggctttttcttttgggttttgtttttttattttggcccatttctctaaattttcaccaacgaaatacccttatattcacattaaatacatttaaaatttcaaaattttagttgggtgagtttctacttat

SEQ ID NO: 922579 - DNA, 558 bp, Homo sapiens
ggctctcttaattgtagactttgatgttaaaattttctatattaatataatattaatataacaggatatattaaagtgtcaaatgtatactacatgacattatatgttaatagttatatgcaaatacagtattatcatattatgttaatattagtataacatactatggatttcaaagaaacattttgtaaaagcacacaattctttagatgacaagtactttggcggctgtcttatagatgccttcattcattttctcttgttactagaaagcatactggacttttaccaaataataagtgacaaatstcatgtaaattattattgaatgaattaataactaacctctcaatatccatgtataggctatagaaaatgacagtttgggttgttagacaaataaccaactctcagctactattcattaaaatattaatcatccttaaggtaacactcactaaaatacttggtacagacaagatgctcaacaaatattggaagaggaattgttccaaattacctatatatttatctaaaatatatatttgatatgtgcca

SEQ ID NO: 922580 - DNA, 541 bp, Homo sapiens
tataggttttcaatttattaaggcatcataacaattacttcagcctattaattatttgactacagtataatttgtatgacttagattcaaaatccaaaacaatatttctaaaacattagtaagtttttattgtcagtgagtttctcgagatcaggggctggtatatttttcccttgtaaatttccagggcctaccatkgtaccctgaacaatatagaagatacaacatttatgattattaagtcaatatagagcagtgacaaatttttctactgcaaaatataatggtattttggaattcagagttaaatctaaaagtagcaattagaaataggaaagaccttatgtatacatttaaggttctttccaaaataatttattttctttccacagtataacgtattgttattttttctagttcagtttgaactcagtgcaatggttgtagctctcgctgttttattttgcccacagtgagtaatttctaatgcagcataactttgacagaagtgtactgaggatgaatgtcaacagggacctaa

SEQ ID NO: 922581 - DNA, 752 bp, Homo sapiens
accactactctcttccaagctgtcagggacatttaagtctccagaggtttctgctgccttttgttcggctatgcagtgcccacagaggtggagtctacagaggcaggcagacctcattgaactgccgtgggctccgccctgttcgagcttccaggccgctttgtttacctactcaagcctcagcaatggcggacgctcctcccccagccttgctgctgtgttacagttcgatctcagactgctgtgctagcaatcagctaggctccgtgggcgtaggaccctgcgagccaggcatgggatataatctcctggtgtgccgtttgctatgacggtcagaaaagcacagtattagggtgggagtgacccaattttccaggtgccatttgtacccccttcccttggctaggaaagggaattccctgatcccttacgcttccaggtgaggygatgccttaccctgcttaggctcacgctcaatgcactgcatcctctgtcctgcacccactgtcccacaatccccagtgagatgaacccagtacctcagttggaaatgcagaaatcacccctcttctgcgtcgctcatgctaggggctgtagactggagctgttcctatttggccatcttggaaccgcccttaactgattttttgaagggtgttttgtgtttctgtctccttcagtgctgctctgatcttagttatttcttgccttctgctagcttttgaatttgtttgctcttgcttctctggttc

SEQ ID NO: 922582 - DNA, 656 bp, Homo sapiens
gtatagtctggacatttgtcccctccaaatctcacgttaaagtgtgatgcccagtgttggaggtggggctgagtgggagacgtgtgggttgtggaggctgatccctcgtaaacggcttggtgctgccccagcagcaatgagcaagttctcattctattagtttccaagagagctggttgctaaaaagagcctggcacctccttccccacctctttctcttccttcttttctctccatgtgacacctgctccaccatgagtggaaacagcttgaggtcctcaccagaagcagatgctggcttcatgcttcttatacagcctgcagaactgtgagmcaagtaaacctcttttcattataaataccagcctcaggtatccctttaaagcaacagaaagagactaagacagtaacaaaggatcatgatccctgaaagatgggggaaatgacgtgagccctcaaattgccccagtttgttgtcctgagggtttccaggccaaaacccagggatagtaaattcaggaggagcctggcagactccctgttgcagagatggagctgagagcccaagacatctaaggcctccagagtccacagaacagagtgctgagagggagagagctgcttaggaagaaaactcctcaaagaggatctgctgc

SEQ ID NO: 922583 - DNA, 656 bp, Homo sapiens
gtatagtctggacatttgtcccctccaaatctcacgttaaagtgtgatgcccagtgttggaggtggggctgagtgggagacgtgtgggttgtggaggctgatccctcgtaaacggcttggtgctgccccagcagcaatgagcaagttctcattctattagtttccaagagagctggttgctaaaaagagcctggcacctccttccccacctctttctcttccttcttttctctccatgtgacacctgctccaccatgagtggaaacagcttgaggtcctcaccagaagcagatgctggcttcatgcttcttatacagcctgcagaactgtgagccaagtaaacctcttttcattataaataccagcctcaggtatccctttaaagcaacagaaagagactaagacagtaacaaaggatcatgatccctgaaagatgggggaaatgacgtgagccctcaaattgccccmgtttgttgtcctgagggtttccaggccaaaacccagggatagtaaattcaggaggagcctggcagactccctgttgcagagatggagctgagagcccaagacatctaaggcctccagagtccacagaacagagtgctgagagggagagagctgcttaggaagaaaactcctcaaagaggatctgctgc

SEQ ID NO: 922584 - DNA, 656 bp, Homo sapiens
gtatagtctggacatttgtcccctccaaatctcacgttaaagtgtgatgcccagtgttggaggtggggctgagtgggagacgtgtgggttgtggaggctgatccctcgtaaacggcttggtgctgccccagcagcaatgagcaagttctcattctattagtttccaagagagctggttgctaaaaagagcctggcacctccttccccacctctttctcttccttcttttctctccatgtgacacctgctccaccatgagtggaaacagcttgaggtcctcaccagaagcagatgctggcttcatgcttcttatacagcctgcagaactgtgagccaagtaaacctcttttcattataaataccagcctcaggtatccctttaaagcaacagaaagagactaagacagtaacaaaggatcatgatccctgaaagatgggggaaatgacgtgagccctcaaattgccccagtttgttgtcctgagggtttccaggccaaaacccagggayagtaaattcaggaggagcctggcagactccctgttgcagagatggagctgagagcccaagacatctaaggcctccagagtccacagaacagagtgctgagagggagagagctgcttaggaagaaaactcctcaaagaggatctgctgc

SEQ ID NO: 922585 - DNA, 833 bp, Homo sapiens
ctggagggctcccaccctggcaaggagggctctccaagaagccatgagcacactcccaccacccaatccccacaatatacaagttggcaaaacaaggcaaggaggctccaatagaaagggacattcaccagctcctgcccccatctgaaactgtccccgcctttcctctctgaatttgggccgtcacttctcacatgcctgacatttgacaggcttgtctccccaccccagtctcagagcaccacccagcccagcgtctttcagggagtcagtccagtgtggccacactacggagcagcatgtagacggtgcatgctgggcaaggcagggaggggtggccagggcttggcactcccctgtgctcacagagtgacactcagtcccccacccttcccttaatgctagggtgagtgctctccctgagcaggaagcacagaacagctcaggtgtgggacgtggcagggctcagcacacaccctgtgcagagggaatgcaaatkgtttccatccatttccccagtatctgcaactccttttttttttttttttttttgagacggagtcttgctctgtcgcccaggctcgagtgcagtggcgtgatctcagctcactgcaagcttcgcctcccaggttcacgccattatcctgcctcagcctcccgagtaggtgggactacaggcgcccaccaccacgcccagctaattttttttttgtatttttagtagagacggagtttcaccatgttagccaggatggtcttgatctcctgacctcgtgatccaccttcctcggcctcccaaagtgctgggattacaggcatgagcaccacatccg

SEQ ID NO: 922586 - DNA, 700 bp, Homo sapiens
ctcctcaggctttcttttttaaactggaaattaaaaaataaatttccaattctttgtaattcttctgtattaaaatataacatgaataccaataagtgcacttctgaagtgtacagctcattgtactttatatgcccatgtaaattttatccartcaagacctggaactttcctagaaccgtagagctaattcccagtcatcactcctctaaagaaagccactattctggcttctatcaccataggttaatttgtccattttttaatgttattgaatacattgtatcttctttatgtccagagtcttttggcctttgagatttagccattggttacctttagcagccatttattcttttaatcatgagttgctttagtattctattgcatgaacagactgtaatttatttattcattctgttgtgaaaagacatttggggtgtttccattttttggctattataataaggttgccatgaatagtttgatccatgggtataggtatatccactgaatatattcccgtggggagaattactgggttgtagagtgtgtgtatgttttgttttgttttgttttgtttttttattttattttattttattttgagatggagtctcactctgtcacccaggctggaatgcagtggcgtgatctcacctcactgcaacctccatctcccaggttcaagcgattctcc

SEQ ID NO: 922587 - DNA, 833 bp, Homo sapiens
tgcctgggagtccttctggaagaacttgattctgagctgggcctgcagtgagggggagggcttaatgaggctaattagcatcactctctggtacagagtgtctttttttggtgacagctttattgagatgtaattcacacaccacacaattcatccatttaaagtgcagaattcagtggcattaacatattcttagtattgtacaactgccaccgcaatcagttttaggacatttttattacctcccagaagaaaccccaccccctttagctatgaccttccaatctcccatcagtcccccaccccaacctagacaacactaagttacttcctgtcccaggagattttcctgtttgggacttttcagtccgaatgcaatcatacactcagaagctatgtggttctttgcctctggcttcctttattagcattatgccttcaaggtccatgcatgttgctgtgcgaatcagtgcctcattcttttttatatggctgaataatatcccagagtatgtagaccatgtatcacttattcattcacaagtcgatggacactgtgttgttttcactttttggctacataccrtgaataatgctattatgcacacgcttgcgtagatttttgtgtggacacgtgttttcgcttctcttgggtatataccgaggagtggggttgctggaacatgtggtaactgtgtgcttaccctttagaagacctgtccgactgctttccaaagtggctgcagggtttcacagtctcccggcagctcctaagggtcccgctttctccacatcctcaccagcactgttctctgtccctttgattctaggca

SEQ ID NO: 922588 - DNA, 676 bp, Homo sapiens
atttatcaccataaacctttaaaaatttagcactgtggccggacgtggtggttcacacctgtaatcccagcactttgggaggccgaggcaggtggatcacaaggtcaggagttccagaccagactggccaacatggtgaaaccccgtctctactaaaaatacaaaaattagccaggcatggtggcaggtgcctgtaatcccagctacttgggaggctgaggcagaagaattgcttgaacccaggaggcaaaggttgcagtgagccgagatcacgccactgcactccagcctggcaagagtgagaccctgcctcaaaaaataaaaatgaaaataaaatagcgctgtgtcttttcttaaatttctgcaaygtaactgttggacagttccctttaatttcagttcattgtgacaggtctctgcttgtttcataatcagcatggcattaagtggcatgtgtgttcattgtgatgttgacagatcctctctttcaatacacaaacccgatctttatttttagctttacgtagtgttttcccatttgtcactagcttttgctcatcacttttgtcataaaacttcaacagtctgtccttctgtttcttcaggtcacgtatggtggtcattccaacaccacgctcttttctaagacatttcacacttaagctgtggtcctatt

SEQ ID NO: 922589 - DNA, 887 bp, Homo sapiens
gctcctccaggctacaaggcctgttcacgtggaaaatggaaagagtgaagctgaaagaggtggtacctgtataggaaaaacatctttcccagggaccctcagcctccatctcattgatctgaactgtgtcacatgatgaccctggctgcaaagggcaataggaagggagtcttttgctggaccttcactgacactttgctttttgttgttgttgtttgtttttgttttgtttttcttttttgagacagagtttcactcttgtcacccaagctgaagtgcagtggtgtgatcttggctgattgcaacctccacctccgggttcaagtgattctcctgtctcagcctcctgagtagctgggattacaggtgcacgccaccatgccctgctaatttgtgtgtttttagtagagacagggtttcaccatgttggccaggctggtcttgaactcctgacctcaggtgatccgcctgcctcggcctcccaaagtgttaggattacaggcatcagccaccgcacctggccttcattgacacttcgaacaaaattgatatcctgctagggaggatgagggartgggaatcgtataggcaatggcagtgtcagctaccgcaggactttttttttttttttctgatacaagttcttgctctgtacctcaggctagagtgcagtggtgcaatcacagatcactgcagcctcaaccgcccaggctccaacaatccccccacctcagcctcccaagtagatgagaccacaggtgcttgccactaccacccctgctgattttaaaatttttggtagagatgggtctccatatgttgtccaggctggtctcgaactcctggactcaagcgatcctcccagcctccaaagtgctgggattata

SEQ ID NO: 922590 - DNA, 824 bp, Homo sapiens
ggccctgagcaggatacttaacctctccaagcctcagtttcctcatcttttttatttttatttttatttattttttattttttttagacagagtcttgctctgttgcccaggttgaaatgcagtggtgcaaacaaggctcactgccacctcagcctcccaagctcaggtgattctccccaatcagcctcctgtatacctgggaccacaggctcatgccaccacacctggctagtttttttttatcttttgtagagacggagtctcactttgttgcccaggctggtctcaaacttaagggctcaagcgatcctccaacctcagcctcccaaagtgctaggattacagatgtgagccaccatcctggtcagtttcctcatctttatttatttatttttcagtcagagtcttactctgccacccaggctggagtacagtggcgtgatcttggctcacggtaactttgcctcttgggttcaaatgattctccagtctcagcctcccgagtagctaggattacaagcgtatgtaatcacacccggttaatttttgtatttttagtagagasggggtttcaccatgttggccaggctagtcttgaactcctgacctcaagtgatccgcccacctcagcctcccaaagtgctctgcctcaaaaaaaagaaaaagaaaatacagaagagtgaacagaaagaaaattgtttcaatcaccttaatctctccacggagagcaaaccactgataacatttggttaactattgtcccatatgctattcccatgcatatgcgtactcacatacagtattttacgaaaagtggaattac

SEQ ID NO: 922591 - DNA, 724 bp, Homo sapiens
gcagctgtgctgggctgtccacacacatagcatcattttggtctaggaacccagaggctgcctctgaatgccattgactgccctttccagtaacacccttgggtccagcagtgggcctgtgcatgcaagtgtgtgtgtgtgtgtgtgtgtgtgtgtgtgtgtgtgtgtgtgtgtgtgtgtgtgattcctcagggtcagtggatcagtattatctgatctttccttggattcagagacttcatggggcccttggtcatgggtagatctccactgtgcccattaagaggagcagtagggccgggcgcagtggctcacgcctgtaatcccagcactttgggaggccgagcggggcggatcacaaggtcaggagatygagatggagaccatcctggctaacacggtgaaaccctatttagtctctactaaaaatacaaaaaaaattagccaggcgtggtggcgggcacctgtaatcccagctactcgggaggctgaggcaggagaattgtgtaaacccggaggcagagcttgcagtgagccgagatagtgccactgcactccagcctgggcaacacagcgagactctgtctcaaaaaaaaaaaaaaaaaaaaaaaaaggggcagtaagggccaggtgtggtggctaaagcctatatggccagcactttgggaggctgaggcaggcagattacttaaggtcaggagttcaagaccagcctggtcaacat

SEQ ID NO: 922592 - DNA, 724 bp, Homo sapiens
gcagctgtgctgggctgtccacacacatagcatcattttggtctaggaacccagaggctgcctctgaatgccattgactgccctttccagtaacacccttgggtccagcagtgggcctgtgcatgcaagtgtgtgtgtgtgtgtgtgtgtgtgtgtgtgtgtgtgtgtgtgtgtgtgtgtgtgattcctcagggtcagtggatcagtattatctgatctttccttggattcagagacttcatggggcccttggtcatgggtagatctccactgtgcccattaagaggagcagtagggccgggcgcagtggctcacgcctgtaatcccagcactttgggaggccgagcggggcggatcacaaggtcaggagattgagatggagaccatcctggctaacacggtgaaaccctatttagtctctactaaaaatacaaaaaaaattagccaggygtggtggcgggcacctgtaatcccagctactcgggaggctgaggcaggagaattgtgtaaacccggaggcagagcttgcagtgagccgagatagtgccactgcactccagcctgggcaacacagcgagactctgtctcaaaaaaaaaaaaaaaaaaaaaaaaaggggcagtaagggccaggtgtggtggctaaagcctatatggccagcactttgggaggctgaggcaggcagattacttaaggtcaggagttcaagaccagcctggtcaacat

SEQ ID NO: 922593 - DNA, 676 bp, Homo sapiens
atctgttttatgcacatacacacatacacacacacacagacacacacactgccctttaccaccccctgaagccccgctctatttctctttttttttttttttttgagacgaagtctcactccgtcacccaggctggagtgcagtggcgcgatctcggctcactgcaagctccgcctcccgggttcacgccattctcctgcctcagcctccagagtagctgggactacaggcacccgccaccacgcccggctaattttttctatttttttagtagagacggggtttcrctgcattagccaggatggtctcaatcgcctgaccttgtgatccgcctgcctcagtctcccaaagtgctgggattacaggcgtgagccaccgcgcccggccagccccgctctatttctctgctccacttgacagcaaagattgaaagccccctctgtatttgacgactgtgctgtcttcacttccggcctctcctccatccattccaggggcctgggaccctccactcttacatgagccctcagcaactacaacccaggagacttcccgcctccctgaaacccctttttccctaggcttcctacctttccctttcctcttctctagacagtggagggcccagggctccgggatctgtttccactccctgacttctggaggcccaggttcc

SEQ ID NO: 922594 - DNA, 645 bp, Homo sapiens
ttttccccagggagatatatcagcaaaaaaaaaaacctcaaaaatcaaattttagattatatacatgtatttgtttatttttactttcatcttaaggtactttagggaaatcttctctcctaccagattgacattaagattgacaacatgctacataagagttttgtttytctgtaccttgcacgatagtgtggtgaattagtcaactataattatgcccaatcatggaaaatcaacatgaacgaaaatcttattttctgtattttggcctcagaattgtgtaagtccagagcagaaacctgaacttataactgtaaatattaacatatattcttaaaaggatattttcatagaaattaaattttattcaatactcacaatacagggaaaagtgtcttacgagttgaaaagtatttcacatcaatgaaaaattgtgaaaacactaataatcatacataataacctgcattatcttattagcttgcattacaatcttgcatatttccacattttatcaaggtcatttatactagcgcctcttcttccattctgtaatggaaaaaaagaaaacaggaacaatctgtagatttaactaggttaagctatagggtggcatcattttttattcatgacagttgttctgta

SEQ ID NO: 922595 - DNA, 602 bp, Homo sapiens
caaataggtagattctttcataaggaagagtacaggggggaacaataatttttaaaaatgcagtcagaaaatcaaataattggcaaggatgtgtggacaaggatgctcgcagcagtgttaattaattaattaattaattttttgagatggagtctcgctctgtcgcccaggctggagtgcagtggtgcgatctccactgactgcaatctctgcctcccgggtccaggttcaagtgattctcctgcctcagcctcccaagtagctgggcttacaggcacctgccaccacgcccagctaatttttgyacttttagtagagatgggggttttaccatattggctaggctggcctcgaactcctggcctcaggtgatcagagtgttattttaatggtgaaaaactgcaagcaatctaaatgcagcaaccagaagaccggtgacatctattatatttagagaaatgactggttaaatatattgatatgaaaaaatgtctaccatagattgtgaagtgataaaagcaaattgtgttactatatatgtatgcagtgtagtacagtatagttaattctatcataataggaagtgcagccaaatcttaatt

SEQ ID NO: 922596 - DNA, 489 bp, Homo sapiens
tggcttccagaacatcaaacgcctatgtttttttcctacctacctacctacctgttcctcctctgtctcttttacaggttcttccaacctctaacggggtctttccttgaacttcctctctttatctacactcccttctttggtgatttcatacagtctcatcacttaaaataccagccagatgccaagaactccataatttatgtcctcagtttggatctctttcctgaacactggattcatgtatccagctgtctactccacaattccacttkaataactaaagtagatgcatcaaatttaacttgtccaaacctgcttcactcagagcattttctatttcagttcatggtaatttcatccttccagttgctcaggccaaaaatctctctcatatctcaacttaccttcacaatatatttagaatctgaccaattctcagtatgtccattgctgccaacctagtcagaggcactaccatgtctcact

SEQ ID NO: 922597 - DNA, 589 bp, Homo sapiens
gatgttagacttaaatattccagatattccatattttttccttaaatgaactgaatatcaattcattatgtgtactttaggtctcatagaaatgtgcgaggtttcacatgattgcgctactgcactctagcctaggtgacagagtgagacyccatctcaaaaaaaaaaaaaaaaatagacacactcaataagaatagaatttggaagttctttatctctcatttaaggaaaaaaagactctagatagttttcaaaggatattgataatagtgctactaatttccttgcctaccagtcattccaatttaatattaaatgtgtccttggccagcagtgactcacgcctgtagtcccagcacttcggaaggcgaaggtgggcagatcacttgaggccaggagttcgagaccagcctgggaaacatggtgaaaccccgtctctataaaaaaatatatatataaattagccaggcatagtaatgcacgcctgtagtcccagcttcttggaggctgaggtgggaggatggcttgagcccctgaggcagaggttgcactgagctgagatcgcaccattgcactccagcctagatga

SEQ ID NO: 922598 - DNA, 593 bp, Homo sapiens
gaattgctcagagaacacaattgactatttcatccatgtgagatttatttaaatgactcgtggggcatttgcagtttagccaataattgaaaatattgttgcaatgtggcaggtaaaactaggaaatcatttcgcattcctgcagaggtgttccaagctcagcagcatattatattagttgaagaggggcaaacggagtgagatcagtgttgagtyctagtctttcacatttcattcctgggttttgccccaccatggaaatatatgggatggtgctttccagaaggacctgaaacgctaaggtgttatcttgtttctattctgtttttatatgccaaacacaaatgaatggtcagaccagatatggaaagacccatctatcccccaactctcttctgactcctatacctttctttctattcttcgtaccatttcacttcagacgtcacctggaatactgatgcaggaggctaagctgagtctctcagggtagacagttcaacctttccatggttgttcataaatattactagggatttggaatgcatgttcccactaaaatgatgtaaatgtggttaagtgataccatatta

SEQ ID NO: 922599 - DNA, 593 bp, Homo sapiens
gaattgctcagagaacacaattgactatttcatccatgtgagatttatttaaatgactcgtggggcatttgcagtttagccaataattgaaaatattgttgcaatgtggcaggtaaaactaggaaatcatttcgcattcctgcagaggtgttccaagctcagcagcatattatattagttgaagaggggcaaacggagtgagatcagtgttgagtcctagtctttcacatttcattcctgggttttgccccaccatggaaatatatgggatggtgctttccagaaggacctgaaacgctaaggtgttatcttgtttctattctgtttttatatgccaaacacaaatgaatggtcagaccagatatggaaagacccatctatcccccaactctcttctgactcctatacctttctttctattyttcgtaccatttcacttcagacgtcacctggaatactgatgcaggaggctaagctgagtctctcagggtagacagttcaacctttccatggttgttcataaatattactagggatttggaatgcatgttcccactaaaatgatgtaaatgtggttaagtgataccatatta

SEQ ID NO: 922600 - DNA, 576 bp, Homo sapiens
actattttttttttttttttgagacggactttcgctcttgtcgcccaggctggagtgcaatagcacaacctcggctcactgcaacctccatctcccgggttcaagcgattctcctgcttcagcctcccgagtagctgggattataggcacctgccgcgacgactgactaatttttatatttttagtagagacagggtttcaccatgttagtgaggctggtcttgaactcatgacctcgggctcaggtgatccgcctgtctcggcctcccaaagtgctgggattacaggcgtgagccactgcacctgacctaccaaactgttttctagagcggctgtgccattttatattcccaccagcaatgtgtgagtgatccagtttctctgcatcctcaccagcaattggtgttgtcactagtattagccattcatctggacatrtagtgacatctcattgtggttttaaaaatttggatttccccagtggctaatgatgttgaacatcttttaatggacgtatttaccatttatacatcctctttaatggaatatctatccatgtcttttatttcctaatcc

SEQ ID NO: 922601 - DNA, 795 bp, Homo sapiens
ttgctcatctctccatttttccaaagctatgagaaatcccatttccttctgaccactttagctcacagtgttctttcctcctctggagcctaataacacacatacaatatattttgcacattttgttagcccctaattatgcaatcttactttattagttatgttttggtttatrtatcccatctttccagctacattgttatgtatgtaaagagtttactttacatgccagaataaagacagtcagcttcatgtttaaaaatacagactttaggcccagcaaggtggctcacacctgtaatcccagcactttgggaggccaaggcagatggatcacctgaggtcaggagttcaagaccagcctggccaacatggtgaaaccccatctctactaaaaatccaaaaattgtccaggcatgttggcacacacctgtaatcacagctactcaggaggctgaggcaggagaatcacttaaacctcggaggcagaggttgcagtaggctgagatcgctccactgaactccagcctgggtgacagagcaagactccatctcaaaaaaaaaaaaaaaagaatacagactttaaatttcaagtagagtcagattgccttgtttcaaaacctggcttcaacatctactacttgtgcaaccttgccccatgtccttaatctttgtaaccctcagtttcctcatttataaattatggataataaccttacctatacaaaggatacagaattaaacatacataaatgtattatggtaaaatagttactactgcatttcctgactgcc

SEQ ID NO: 922602 - DNA, 795 bp, Homo sapiens
ttgctcatctctccatttttccaaagctatgagaaatcccatttccttctgaccactttagctcacagtgttctttcctcctctggagcctaataacacacatacaatatattttgcacattttgttagcccctaattatgcaatcttactttattagttatgttttggtttatgtatcccatctttccagctacattgttatgtatgtaaagagtttactttacatgccagaataaagacagtcagcttcatgtttaaaaatacagactttaggcccagcaaggtggctcacacctgtaatcccagcactttgggaggccaaggcagatggatcacctgaggtcaggagttcaagaccagyctggccaacatggtgaaaccccatctctactaaaaatccaaaaattgtccaggcatgttggcacacacctgtaatcacagctactcaggaggctgaggcaggagaatcacttaaacctcggaggcagaggttgcagtaggctgagatcgctccactgaactccagcctgggtgacagagcaagactccatctcaaaaaaaaaaaaaaaagaatacagactttaaatttcaagtagagtcagattgccttgtttcaaaacctggcttcaacatctactacttgtgcaaccttgccccatgtccttaatctttgtaaccctcagtttcctcatttataaattatggataataaccttacctatacaaaggatacagaattaaacatacataaatgtattatggtaaaatagttactactgcatttcctgactgcc

SEQ ID NO: 922603 - DNA, 574 bp, Homo sapiens
agccaggcattgacttctcctttctagctatgaaggtcctcaatggcatcttcttccaatagaagactgcttcatccacatggaaaatctgtggtttactgcagcaactttttttttttttttttttttttttttttttttttgtgagacagtctcactctgtcacctaggctagagtgcagtggcaccatctcagctcactgaaacctctgcctcctgggttcaagcaattctcttgcctcagcctcctgagtagctgggactacaggtgcttgcagccatgcccagctaatttttgtakttttagtagagatggggtttcgctatgttggccaggctggtctcgaattcccgatctcaggtgatccgcccacctcggcctcccaaagtgctgggattacaggtgtgagccaccatgcccggtctactgcagtgactttatcaattatcttaggtatagattttttctggataattttctacatcagcacttgctgcttcctcttgctcttttatgtaatgaagatggcttctttccttaaaccccatgaaccaacctctgttagcttccaag

SEQ ID NO: 922604 - DNA, 566 bp, Homo sapiens
actgacaagaggcagatttataggagaaaaggcatacaaatttatttgatcatagttttatatgacataagaaccctcagaatgaacacccaaaaatacatgggaaattgtccatttttatgcttaggttcaacaaagtatgggcagctttttagaaatatgattggacaaaacagtatgatctactgctaatagagtgagtaggaagacctagcaaggcctgcctgtgtagatccttggtctttctgagtgttcatttcttctttctggatgtggggcaaggtgctgtctggaataagggtcttatgatctatagtcaaacaaaataggccaggtaatttgtttatggtcagtttttatgcagaaaggtggaaggaatgtcagagtaatatttttaggtttcttcrctggctttggggaaaaagagttctggtttctatgacctgcatcagagaggagggattctcatgtctatggctacccttaagggaaaatgagactgagaaacaggaggacatgagaaggttagagaaaaacttttgcttctgaggctgtttctgacacct

SEQ ID NO: 922605 - DNA, 641 bp, Homo sapiens
ttgctcttcgcgcctctgggaggcactgcaatgagacttgtgcagcaacttgtgaacactttctctgtctttacttcttcactctaagatagcggaagacgaggccatgtccctagcacagggcctgtaaaattagtaagaatgcactgtttgtaaaatgaacacactttcatttaaaaaaaccacatgtttgggccaggtacagtggctcacgtctgtaatcccagcactttgggaggccgaggcgggccagatcacaaggtcaggagataaagaccatcctgactaacacagtgaaaccctgtctctactaaaaataaaaaaaaaattagcttggcatggtagtgggtgtctgtagtcccagctactggggaggctgaagcagaagaatcacttgaacccrggaggcggaggttgcagtgagctgagatagcgccactgcactccagcccgggtgacagcgagactccgtctcaaaaaataaataaataaatgttttgtttttgcttatatttgtgtttttaaaaatgatttggctatgaatagctcagttatttaacaacggactgtgacttctcagtaatcaatgatgtataccacagaaattaaccaggcatggtggcatgtgcctgcagtcccag

SEQ ID NO: 922606 - DNA, 641 bp, Homo sapiens
ttgctcttcgcgcctctgggaggcactgcaatgagacttgtgcagcaacttgtgaacactttctctgtctttacttcttcactctaagatagcggaagacgaggccatgtccctagcacagggcctgtaaaattagtaagaatgcactgtttgtaaaatgaacacactttcatttaaaaaaaccacatgtttgggccaggtacagtggctcacgtctgtaatcccagcactttgggaggccgaggcgggccagatcacaaggtcaggagataaagaccatcctgactaacacagtgaaaccctgtctctactaaaaataaaaaaaaaattagcttggcatggtagtgggtgtctgtagtcccagctactggggaggctgaagcagaagaatcacttgaacccgggaggcrgaggttgcagtgagctgagatagcgccactgcactccagcccgggtgacagcgagactccgtctcaaaaaataaataaataaatgttttgtttttgcttatatttgtgtttttaaaaatgatttggctatgaatagctcagttatttaacaacggactgtgacttctcagtaatcaatgatgtataccacagaaattaaccaggcatggtggcatgtgcctgcagtcccag

SEQ ID NO: 922607 - DNA, 641 bp, Homo sapiens
ttgctcttcgcgcctctgggaggcactgcaatgagacttgtgcagcaacttgtgaacactttctctgtctttacttcttcactctaagatagcggaagacgaggccatgtccctagcacagggcctgtaaaattagtaagaatgcactgtttgtaaaatgaacacactttcatttaaaaaaaccacatgtttgggccaggtacagtggctcacgtctgtaatcccagcactttgggaggccgaggcgggccagatcacaaggtcaggagataaagaccatcctgactaacacagtgaaaccctgtctctactaaaaataaaaaaaaaattagcttggcatggtagtgggtgtctgtagtcccagctactggggaggctgaagcagaagaatcacttgaacccgggaggcggaggttgcagtgagctgagatagcgccactgcactccagcccgggtgacagcgagactccgtctcaawaaataaataaataaatgttttgtttttgcttatatttgtgtttttaaaaatgatttggctatgaatagctcagttatttaacaacggactgtgacttctcagtaatcaatgatgtataccacagaaattaaccaggcatggtggcatgtgcctgcagtcccag

SEQ ID NO: 922608 - DNA, 685 bp, Homo sapiens
ccagggcactgactgatgtcactgaaggcagtctaagggttgttggtatggtcaggcatccagagggtcaagaaggtcctaggtaggatgcctgaggcctgcaaccccgtaacctcctttgcaaaacccccacttccaaggaacactgcctggttactagtgctaggatctgccaggccaagagcttatgcccctgtctcagtgacagtcttcagtaggctcgcctacaagagccctatctctccaagcccagagcagggcaaggagcacagcctggccgatctaaagggaggctgatgtggactcccttgctgcatctaggatgaggaagcctaggtgtaggtgccagaggcacaagcagaccaagcagtcctcaggccactggttctgctaaaaagccatggaacgagtgagtgacacaacacactgcaaccaccagcacactcrgaccacgacggagcagactgacacgcacaccgacccggccaccgtggtcatcaggataccctggcctgtagcctgtgtgcaggctgagaactcaccaacagggggtccgctttttgaagatcacaacaaactgaaagtggcttatcagcctttgcaggcagtgcaagacccaccagaagacacccctggtagatccctctgggcccgtcacagatactctgcatctcccctggcgccc

SEQ ID NO: 922609 - DNA, 574 bp, Homo sapiens
gagcatccaaggcaaaatgaacagcaagtgcaacagcccgatgacgggaagggcttggcatgtctgagaaagataaaacaggtgtagctggaaatgccaaggaatggggagagtgttgtgaggtgaacttagaaatgtagcaataactagatatggtctttaggtggtggttagtttagattctgttctttgagcaaagggaaaccattagagtttaaagcatgagtgacatctaatttttgaggtaagtcttagtggagtgctgggtacatagtagtattaactacgtaatattttaaaacaacgtgggcaactatataagaacagatcatagggggacaggacaaggarttcgagttaagaggctgttgtagtcatccaggtgagatgatagtggcttgggctaggtagtggcatgggaatggagaagtggatgaattcaagatctattttagagactgcaggatttactgatggattggatgtagaagctgtcaacaagtgaagaatcaaaatgacatttactgagatggtgaaagtgagaggggagggaatcaagagttaaattttggac

SEQ ID NO: 922610 - DNA, 627 bp, Homo sapiens
tctggtcctggcttttgttttgttttgttttgttttgtttttggttggtaggctatttagtactgcctcaatttcagaacttgttattggtctgttcaaaaattcaacttcttcctggctcagtcttgggagtgtgtaagtgtccaggaatttatccatttcttctatattttctagtttatgtacatagagatatttatagtattctctgatggttgtttgtattgctttggggtcagtgatgatatcccctttatcattttttattgtgtttatttgattcttctctcttttcttctttactagtctagctagcagtctctctatttttctcattttttcaaaaagccaacttctggatttgttgattttttgaatggttttttgtgtctctgtctccttcagttcagccctgatctttrttatttctcatcttctgctagctttggggtttgtttgtttttggttctatagttcttttagttgtgatgttaggttgttaacttgagatctttctagctttttgatgtgggcatttagtgctgtaagtttccctcttaacaatcctttagcctgccttgcagagattctggtacattgtctctttgttctcattagtttcaaaga

SEQ ID NO: 922611 - DNA, 686 bp, Homo sapiens
ctaaatgacattcaaacaaacaaaaaacaataccaaagataaatgaaacgaaaacctggtccattgacaagagaaagaaaatggatagaccattagtgagattaaccatgaaaagaagagagaagatccaaataagctcagttagaaacaaaatgggagatattacaaccaatacgacagaaacacaaaagaccattcaaggccattatgaacacctttatgtgcacaaactagaaaactgagaggagatagataaattgctgaaaacatacagccctcctagattaaaccaggaagaaatagaaactttgggctgggcgcagtggctcacgtctgtaatcccaggactttgggaggcygaggtgggcagatcacgaggtcaggagatcgaaaccatcctggctaacatggtaaaaccccatctctactaaaaatacaaaaaattagccaggaacagtggcaggtgcctgtagtcccagctactcggaaggctgaggcaggagaatggcgtgaaccagggaggcagagcttgcagtgagccgagatagtgacactgcactctggcctgggcgaaagagtgagactcctcctcaaaaaaaaaaaagaaatagaaactttgaacagaccaataacaagcagcaagataaaaataatgataatataaaaattgccagcaacaagaaagt

SEQ ID NO: 922612 - DNA, 720 bp, Homo sapiens
aatgaatgaaatggagatgagaaaaaaaacacacaaaagatcaatgaaactaaaagtttatttgaaagaataaataagattgatagaccactagctagactaataaagaagaaaagagacgactcaaataaacacaatcagaaatgacaaaggggatgttaccactgaccccacagaaatacaaacaaccctcagagggttttttttttttttttttttttttttttgagacagagtctcgctctgtcgcccaggctggartgcactggcgcgatctcggctcactgcaagctccgcctcccggattcacgccattctcctgcctcagcctcctgagtagttgggactacaggtgcctgccaccacgccaggagaattttttgtatttttagtggagactgggtttcaccgtgttagccaggatggtctcgatctcctgacctcgtgatccgcctacctcggcctcccaaagtgctgggattacaggcgtgagccaccgcgcccagccacaaccctcagaggtttttgaggtttttattatgaacacctctatgcacacaaactagaaaacctagaagaaatagaaacattcctggaaacatacaacgcccaaagattaagccaggaaaaatgaaaactctgaacagactaataatgagttctgaaattggatgagtaattaaaaaacaaacaaacaaaaagaaaaagctctggaccaga

SEQ ID NO: 922613 - DNA, 592 bp, Homo sapiens
atgagcggtcacagctgaaactgccacagacagcccccactaaggcagtgcttaatggagccaagggagcaggaccgccacagagaccccagaacataaagttaccagcattcaactccagcctaagagagctgcaggcataagactccaacccatgaaagctgcttggtggactgagcccaggaaaaccacagggacaggactgcccaaggccttggaggcccattcctaggcccagtatgcacaggatgcaggacatggaaacaaagataattctgaagctttaaaatttaaatgatgttttcyctgttgagttttgaatctgtacttaaggcctgttactcctttcttcttccctatttctcccttttggtacgggaatggcagtcccatgcctgtctcaccactgtattttggaagtctataatttgttttgagttcacaggcttgtaccaggagataaatttgcctcaaggtgaatcatcccttgagcctcacccatatctaatttagatgagactctagactttggatctttgaggtgattctggaacaagctaagactctgggggctaatgggatagaataaatg

SEQ ID NO: 922614 - DNA, 639 bp, Homo sapiens
  misc_feature 95: n = A,T,C or G
taaaactctacctaggatgataagcaaatactacaaactctttgcccattaaattcatcaactcaataaaacaggccaacttcttaaagacacanattactaaacctcactaaagaagacacaacacgaatgatcctatatctattaagcaaactgagtatgtaattaactctcttgcacaaagaaaactcatggaccaaaaatggtrtcactggaaaattctactaatcattcaaggaagaaaaaaaaaaattctacaccactcttccaaaaactagaataggagggaccacttcccaatttccataagatcacactgatatcaaaatccgacaaagacatttcaagaaaattactacatgaacaaagatgcaaaaatcctcaatgaaatattaggaaatacaatctagcaatatataaaaaggataattacaccacaatcaagtggggttcgtcctgggattgcacggatagttttaaatattcaaaattcaatttaattaccacactaaaagcctaatgaagaaaagtcacaggataggatataaataaagcatttgacaaaattcaacatccactactataaaaatctctcagcaaactaggaaacgaaaaagaagtgcctagaagaggcacttc

SEQ ID NO: 922615 - DNA, 589 bp, Homo sapiens
agaaaaccaaagccaagcacatgcatccaaagagatccttttctctgcctgtatgtgtcataagacatccttttctctcccttgttagagaaggactcaattccacagcttcactttagtattcagcttatgataaggagtccatgcaaccccccaagacacatttttgttccaaactcaattccaagctttgggtcaaagccctaggaaagaaaactggatctgagggatccagaggcagatgataacagcagttaaaaggcacagcacaggtaagcatgactgattcctgctgattaagccaagcttcccatttcatggataaaaacaccctcttatatcacactagtattcatggcataaatgaggtctaggtaattcaaggctrttgacagcaggagaaagagggcatatgtgggtaatagtggatactcctaccccgcaagccccccccccattaacatgggtgaaagcctctttaacacccatgggtggcacccttcatggtcaccaggactcagagatagaaggaggaaggagagaaaaaggaatgcctcattttccctcccttatgtaccctaggtatttg

SEQ ID NO: 922616 - DNA, 630 bp, Homo sapiens
gattctcctgcctcagcctcctgagtagctgggattacaggtgtgcaccaccacgcctggctattatttgtatttttagtagatctggggtttcaccatgttggtcaggctggtctcaaactcctgacctcatgatctgcctgcctcggcytcccaaagtgttgggattacaggcgtgagccactgcactcatcccaattaacagatttttaagtgcacaatatagtattgttacctattgttattatgttgtacagcagctctttagaacttattcatcttgtgtaaccgaaatttcatactcattgaacaacgaacttcccatttccctctcctaagcccctggtgagcacctttctattctctgcttctgtgagtttgactattttagatacctcatgaaagtggtatcatgcagtgtttgttcttctgtgactggttcatttcacttagcatactgtcctccaggttcactcatgttattgcatatggcaccgttttcttatttaagaccgaataatattgcattgtatgtatataccacatttccttttcctgtttatccgtcaatggacatttaggttgctatcttctgcttttctgataccatgttgaaactgagtcaagtca

SEQ ID NO: 922617 - DNA, 788 bp, Homo sapiens
atttggctgtgaatccatgtggtcctgggctttttttggttggtaggctattcattactgattcaattttggagcccattatggtcttttcaagattcaatttcttcctatttcagtcttgggagggtttatgtgtccaggaatttatcaatttcttctagattttctggtttgtctgcaaggttatttgtatttttgtggggtcaatggtaacatcycctttgccatttcttattctatttatttggatcatctcttttttcttttttattagtctagctagcagtttgtctatcttattttttttttccaaaaaaacaactcctggatgtattgatcttttgaatgatttttcttgtctcaatctccttcagttcagctctgattttggttgtttcttgtcttctgctagctttggggttggtttgctcttgcttctctaattcttttcattgtaatgttaggtcgttaacttgagatatttctaacttttttatgtgggcatttagtgctacagattttcctcttaacactgtcttagctatgtcccagagtctgatatattgtatgtttgctctcattagtttgaaagaacttcttgatttctgccttaatttcattatttacccaagtcattcaggaacaggttgtttaatttctaggtagtagtatagttttgaatgattttcttagtcttgacttctatttttattgcactgtggtccaaaatagtggttggtataatatcagtgcttttgcatttgctgaggagtgttttacgtccaatt

SEQ ID NO: 922618 - DNA, 551 bp, Homo sapiens
ccctaaaaaaccaaggtgtaggtcaagttggctaagacccactggatccaccatggcactggatttgacctaggtttctcctaagacctcagtaacatacaagtcacacacccaccagtgtcttagttccaggcacatkcatatttggtgtaaaaatggtggcaccacaagtccaagaaatcacccttttccaggaatgtttataaatattctaccctttagttaaagacacccatagaggtagcagccccaaacccccttgcatgaatctttcttgagtatacccacactcctctttcttgagtgtgtacttttcatttttcaataaatctctatactttcactcttttctaactcattcttgaattcgttctcacaatggtgtcaagagcctggatactggctgaggtcaagttcccaccagcgtttggggacctcccataccccactggtatcactgtggctcttgatttgtactttacctactctatgtattccattctagtttacctaattgtaatttgtctgcctcttctctctcctgctgattg

SEQ ID NO: 922619 - DNA, 551 bp, Homo sapiens
ccctaaaaaaccaaggtgtaggtcaagttggctaagacccactggatccaccatggcactggatttgacctaggtttctcctaagacctcagtaacatacaagtcacacacccaccagtgtcttagttccaggcacattcatatttgktgtaaaaatggtggcaccacaagtccaagaaatcacccttttccaggaatgtttataaatattctaccctttagttaaagacacccatagaggtagcagccccaaacccccttgcatgaatctttcttgagtatacccacactcctctttcttgagtgtgtacttttcatttttcaataaatctctatactttcactcttttctaactcattcttgaattcgttctcacaatggtgtcaagagcctggatactggctgaggtcaagttcccaccagcgtttggggacctcccataccccactggtatcactgtggctcttgatttgtactttacctactctatgtattccattctagtttacctaattgtaatttgtctgcctcttctctctcctgctgattg

SEQ ID NO: 922620 - DNA, 551 bp, Homo sapiens
ccctaaaaaaccaaggtgtaggtcaagttggctaagacccactggatccaccatggcactggatttgacctaggtttctcctaagacctcagtaacatacaagtcacacacccaccagtgtcttagttccaggcacattcatatttggtgtaaaaatggtggcaccacaagtccaagaaatcacccttttccaggaatgtttataaatattctaccctttagttaaagacacccatagaggtagcagccccaaacccccttgcatgaatctttcttgagtatacccacactcctctttcttgagtgtgtacttttcatttttcaataaatctctatactttcactcttttctaactcattcttgaattcgttctcrcaatggtgtcaagagcctggatactggctgaggtcaagttcccaccagcgtttggggacctcccataccccactggtatcactgtggctcttgatttgtactttacctactctatgtattccattctagtttacctaattgtaatttgtctgcctcttctctctcctgctgattg

SEQ ID NO: 922621 - DNA, 648 bp, Homo sapiens
tagataacgggatagttcaaaactttattcttaaagggtaagaatacctggtgaacctgtttgtttggggtttctcttggtagctttacattttcattaaactttactattaaacatgaagtactatgacgcaccacagatgatctcttgtatccaaaacatagtactccctacctgcaatatgtcacagcmatataattttcctgaatagtccaaaccaatcaccccagcctgtaaagtacctctcttctttgcctactagatctgtggcaagagataccaaagtggctatgtgtaatctgtttcatactgaacacaattattgtgtcttcaagtaaagatatttcttctttgggaaccaagatctgaaaactaacagagcacaaagttacagggataggtaaggaaaaagttggcaagcaggtaatgagaagggccgctaccatgaaaacaccttattttcagaacccatgtattctggctatgtaagagactacctataaaatagcatgtgtccaaacctttagccatctttcagtccagataaagcgaacaacaaactatactgcttaaaatctgctgacaggatttcccttcaccaccatttttctaggacatcatttttttggaagccttaatactatagca

SEQ ID NO: 922622 - DNA, 648 bp, Homo sapiens
tagataacgggatagttcaaaactttattcttaaagggtaagaatacctggtgaacctgtttgtttggggtttctcttggtagctttacattttcattaaactttactattaaacatgaagtactatgacgcaccacagatgatctcttgtatccaaaacatagtactccctacctgcaatatgtcacagcaatataattttcctgaatagtccaaaccaatcaccccagcctgtaragtacctctcttctttgcctactagatctgtggcaagagataccaaagtggctatgtgtaatctgtttcatactgaacacaattattgtgtcttcaagtaaagatatttcttctttgggaaccaagatctgaaaactaacagagcacaaagttacagggataggtaaggaaaaagttggcaagcaggtaatgagaagggccgctaccatgaaaacaccttattttcagaacccatgtattctggctatgtaagagactacctataaaatagcatgtgtccaaacctttagccatctttcagtccagataaagcgaacaacaaactatactgcttaaaatctgctgacaggatttcccttcaccaccatttttctaggacatcatttttttggaagccttaatactatagca

SEQ ID NO: 922623 - DNA, 648 bp, Homo sapiens
tagataacgggatagttcaaaactttattcttaaagggtaagaatacctggtgaacctgtttgtttggggtttctcttggtagctttacattttcattaaactttactattaaacatgaagtactatgacgcaccacagatgatctcttgtatccaaaacatagtactccctacctgcaatatgtcacagcaatataattttcctgaatagtccaaaccaatcaccccagcctgtaaagtaccyctcttctttgcctactagatctgtggcaagagataccaaagtggctatgtgtaatctgtttcatactgaacacaattattgtgtcttcaagtaaagatatttcttctttgggaaccaagatctgaaaactaacagagcacaaagttacagggataggtaaggaaaaagttggcaagcaggtaatgagaagggccgctaccatgaaaacaccttattttcagaacccatgtattctggctatgtaagagactacctataaaatagcatgtgtccaaacctttagccatctttcagtccagataaagcgaacaacaaactatactgcttaaaatctgctgacaggatttcccttcaccaccatttttctaggacatcatttttttggaagccttaatactatagca

SEQ ID NO: 922624 - DNA, 690 bp, Homo sapiens
gtgtgcattatgcaaaaccacaggagcatgccatgacctagatattttaaaaagatctctctgttactatgaagaggataaagtttagggcaccaaggataggaatggggtgggagacagaggcttcataacacctaaagagagaggtcagtgatggcactagaggggcccagaagctctggggaaaagtattctttgtgttctaaaaacacaccaaagacacagcccataagacttggagtatggggtctgagaaaaaaaaaaaaaaagttgaagagtttacctgagcagccagaagaaaaaagtacatttaaaactgtaggcggggcacagtggctcacgcctgtaatcccagcactttgggaggccgaggcgggtggatcacaaggtcaggagatcgagaacatcctggctaacacggtgaaaccccatccctactaaaaatacaaaaaaatcagccaggtgcagtggcgrgtgcctgtagtcccagctactcgggagactgaggcaggagaatggcatgaaccggggaggtggagcttacagtgagccgagatcgcaccactgcattctaacctgggtgacagagcgaaactctgtctcaaaaaaaaaaaaaaaaaaaatgtaggaagtgcatgtttgaaatagaaaatccaaaggtacattttggacttgtcccttgtgagattc

SEQ ID NO: 922625 - DNA, 690 bp, Homo sapiens
gtgtgcattatgcaaaaccacaggagcatgccatgacctagatattttaaaaagatctctctgttactatgaagaggataaagtttagggcaccaaggataggaatggggtgggagacagaggcttcataacacctaaagagagaggtcagtgatggcactagaggggcccagaagctctggggaaaagtattctttgtgttctaaaaacacaccaaagacacagcccataagacttggagtatggggtctgagaaaaaaaaaaaaaaagttgaagagtttacctgagcagccagaagaaaaaagtacatttaaaactgtaggcggggcacagtggctcacgcctgtaatcccagcactttgggaggccgaggcgggtggatcacaaggtcaggagatcgagaacatcctggctaacacggtgaaaccccatccctactaaaaatacaaaaaaatcagccaggtgcagtggcgagtgcctgtagtcccagctactcgggagactgaggcaggagaatggcatgaaccggggaggtgsagcttacagtgagccgagatcgcaccactgcattctaacctgggtgacagagcgaaactctgtctcaaaaaaaaaaaaaaaaaaaatgtaggaagtgcatgtttgaaatagaaaatccaaaggtacattttggacttgtcccttgtgagattc

SEQ ID NO: 922626 - DNA, 670 bp, Homo sapiens
caggggtctggaatgcagtggcttgggaaagtgggacaagatcaccatcactattaggatgagggacttgcctcacgggcaccgtggctgtaggcactgggtgtctcttgtgaactaccctgtcccctcccagccaccaactacccccaccatgctgagatgccctctgctctgccctatcctaacccacccccatcatctattaggaacacatgttggtgggggagactagttggggctaaggacaggaccagctacatcactgaagtgacccaatgcaagatgaaaatgtgggtcttcttgttcacaacttactcagaatttcaaaatggcaaaagtcccaasctctttcaagcatggatgcccaagaagtcaggggagcaagacagagacacgggcaggagtgggaacatcacgtagggtctctgtgatcagggctgagtaacagcactctgttcctgaaatgccctcaggcaaagcaatagttctgagagaagttccacttaggaaaagactttctcaagctcatgatgcagtgagtagcacagatgcacctcccaggtgaggccagccctcatcccatgccggcagggccaccggggatgctgcagccatgagctcagccctctgtggccagggaagtcaggcgtgcttcagacccagcgccctc

SEQ ID NO: 922627 - DNA, 670 bp, Homo sapiens
caggggtctggaatgcagtggcttgggaaagtgggacaagatcaccatcactattaggatgagggacttgcctcacgggcaccgtggctgtaggcactgggtgtctcttgtgaactaccctgtcccctcccagccaccaactacccccaccatgctgagatgccctctgctctgccctatcctaacccacccccatcatctattaggaacacatgttggtgggggagactagttggggctaaggacaggaccagctacatcactgaagtgacccaatgcaagatgaaaatgtgggtcttcttgttcacaacttactcagaatttcaaaatggcaaaagtcccaacctctttcaagcatggatgcccaagaagtcaggggagcaagacagagacacgggcaggagygggaacatcacgtagggtctctgtgatcagggctgagtaacagcactctgttcctgaaatgccctcaggcaaagcaatagttctgagagaagttccacttaggaaaagactttctcaagctcatgatgcagtgagtagcacagatgcacctcccaggtgaggccagccctcatcccatgccggcagggccaccggggatgctgcagccatgagctcagccctctgtggccagggaagtcaggcgtgcttcagacccagcgccctc

SEQ ID NO: 922628 - DNA, 515 bp, Homo sapiens
caaagcccttcatctaaggccaccctttggttggcagccttagccagacatctgcttctggtcaaatcaatgtcttgtctacagggaggcccagtgctgtttctagttttagctggatgcagggtgtcagacatggcaggtactacggtctacctggygggtatcaaagagttggtcgatgttctctcgacaacctaatagggaccaatcgtgtaaggccagtagtaaaggagtttgaagttccctttcagaaaccaattaacaaccccaaagagacagtgtgtaacataaaagagcagccataaaaatatacagttaaacatatttaatagaaatattaaaataatcattacacttcctctcattgcagaaaccatgaaagaatatgccttttgtaatcaaagtaattttttatcatgcaaaaaattattttgttatgacattcgtaagcagagactatatttcaaaacaagtttatacagacttcaaaaggtctaaagtcaaagagaaagtga

SEQ ID NO: 922629 - DNA, 515 bp, Homo sapiens
caaagcccttcatctaaggccaccctttggttggcagccttagccagacatctgcttctggtcaaatcaatgtcttgtctacagggaggcccagtgctgtttctagttttagctggatgcagggtgtcagacatggcaggtactacggtctacctggtgggtatcaaagagttggtcgaygttctctcgacaacctaatagggaccaatcgtgtaaggccagtagtaaaggagtttgaagttccctttcagaaaccaattaacaaccccaaagagacagtgtgtaacataaaagagcagccataaaaatatacagttaaacatatttaatagaaatattaaaataatcattacacttcctctcattgcagaaaccatgaaagaatatgccttttgtaatcaaagtaattttttatcatgcaaaaaattattttgttatgacattcgtaagcagagactatatttcaaaacaagtttatacagacttcaaaaggtctaaagtcaaagagaaagtga

SEQ ID NO: 922630 - DNA, 515 bp, Homo sapiens
caaagcccttcatctaaggccaccctttggttggcagccttagccagacatctgcttctggtcaaatcaatgtcttgtctacagggaggcccagtgctgtttctagttttagctggatgcagggtgtcagacatggcaggtactacggtctacctggtgggtatcaaagagttggtcgatgttctctcgacaacctaatagggaccaatcgtgtaaggccagtagtaaaggagtttgaagttccctttcagaaaccaattaacaaccccaaagagacagtgkgtaacataaaagagcagccataaaaatatacagttaaacatatttaatagaaatattaaaataatcattacacttcctctcattgcagaaaccatgaaagaatatgccttttgtaatcaaagtaattttttatcatgcaaaaaattattttgttatgacattcgtaagcagagactatatttcaaaacaagtttatacagacttcaaaaggtctaaagtcaaagagaaagtga

SEQ ID NO: 922631 - DNA, 587 bp, Homo sapiens
cccccatccatgcttcctgttcagcctgaggaatcatgagccaattaaacctcatttctttatgattacccagtctcaggtagttctttatagcagtgtgagagtggactaatacagtgatgcacaaggatatctggtggaagaaatatctaagcagcaaagcattcaggttgctgtgtggttactttcaactacatatagtggaatgctagagaaaagaaattacttaaatatgcaatttataattcaaaggaaacagaacaaaaagatttgaaaattcacagcctgactatgtaaagaataaaaagcatgtcagagagacaatgctaagggtatagccacgtgatcmtttgttaaagagattaatatgaacaaaaagaagccaagtgctattcatcaagacaatgaaagaccccacaatcattctgaaaattttctaggctgcccctctcatcacagtctcagcgctctagaagggctgaacagttttgggagataggcctggggcaccctccaccctccacaggctcactgcccaggacaaccaagggactctgctccccacttctcagtgcagcactctttgc

SEQ ID NO: 922632 - DNA, 542 bp, Homo sapiens
aaatgaggtctcactgtgttgcccagactgcagtgcagtggctgtttacaggcacgatcccagcactgatcagcataggagttttgacctgctccattttcaacctgggcaggttcacccctacttaggcaacctcgtggttccccgctactgggaggtcaccatattgatgctgaaattagtgcaggaacccaattagcatagcacacaacagcccaggactcctgggctcaagtgatcctccagcgtcaccctgctgagtagctggaactacaggcacrcaccatggcaccaggctctccttgttttaattaagtagtttatgaaacatgaaccacaaaagctacagcaattgggagtccaatggacaaaacaaagtatgtacagaccctttatcgatgctctcagtctcacacaaaccatgttgaaggaaaagaagtttgagatcaaaaggaaaacttagagttggaataaaataaagaaaagccccaagccagagttcaaacacagacctttctgccacttttgtttccaacatgaac

SEQ ID NO: 922633 - DNA, 754 bp, Homo sapiens
ttttgtgatagcgagtgagttctcatgagatctggtgtttcaaatgtgtagcacctccctcttctctctcttcctccttctctggccatgtaagatgtgcctgcttccccttcaccttccaccatgattgtaagcttcctgagacctctccagccatgcttcctgtacagcctgtggaaccttgagtcaattaaacctcttttctttataaattacccagtcctaggtagttctttatagtgatgcaagatcrcactaatacaatcactctactgagtgctgtcacctctgtgccattggagtcccatggtgcagattaactattgttgaggcttggcaggacctggcaagctctgttcttcctggctcgtgctcatggccagtcccagccccctccagagcagcctagatgagctgggcctcaggaccccttttgtcccccctatcctccagagaagtgccattcactgggcctcccacccagccacctggcttctgtcttctgtactgacagtcagaaatccattcttattaactgctgcctaattatcagcttaattaagggcacttgctggtgagataggcccctccgttccaggttcctgccatacctatcacggttaatttgttcctgaagaatcaggaccgaagtcttgtttcagccagacgtttggttatccgtaagtcagctcccactcagtccccctggataattgggaatagcctgtgcagcggggcgggccaaggcacagga

SEQ ID NO: 922634 - DNA, 587 bp, Homo sapiens
tatttttgtttgcatttatcaatcaagtaatttcatacttatccctgccaaatactataaggtgttaaaatttggcataggagttacaaaactataaacgcagcccaagacagaatgatctttgcttgtgtaatctttaataaataagacattgacattggtttaatgaaaatagctacatcttgaattatttagtaaaattaccataacttctaatcttgtggtttttggcagtcgagtccacaggcagtaaggaggtttgttttgggaaaggactgttatcatctttgtttcaaagctaaactaagtttcttccaaagtccaagaatgaacaaggacagcttggaagttagaagcaaagtggagtaagttaggtcatatctttttcactgtctcagttagaattttgcaatggcgagtttcataacttyacatcatgactattacaattttcataaacaatctaggtaaaccaataaaataaaatatgtgggaaaatgtaatgggataaatacttgtagagaaacttgtcataatttagactctaaagttatattaaattaaataatatatatttcattattagg

SEQ ID NO: 922635 - DNA, 565 bp, Homo sapiens
tatcactttggttaaatgaatgacttattttacaatgacctatgatcaagtgttttaaacctttgatatttgacaaactttccaaatcaaattataaactatgtctttttctggcctaattaatcctttaagatattagggtccctaaagtccaaaaatgacatatttggcttatttggtataaaaattttgcakgaagcattgtcaaatatgaaacagtgtttggttttctttggactgtatttgtataaatatgttattggtatgtgttccaaaattatgagaaactcctataattctgatatgacttaatgtacattataagtaataattataattattatgttaaattattgtgtgccacagaggtaacaaatttccttgtcaattgtgtctttgactacggctgtcctgaaactttttgtcatccacaaacaattgtcttgtttaggtcctctttagaaggtggcttcataatcaactataaaactctaacaggtgctcttgaatgcaggtttctggtaactctggaggttgtaacatcagaatagaggaaaaactttca

SEQ ID NO: 922636 - DNA, 629 bp, Homo sapiens
ctgaacagacaaccatgtcctctgaaaacaaggacagttttctttctttccttccaatctatatgtgtgtcttttatttcttattcttgccttattgcactggctagaatttgtaacactatgttgaataagagaggtaaaaacagacatgcttgggttgttcttgattttagaaggacatcattcagcctttcatcattaaatgtaatgttagctgtaagtttttcttagatacctttcaacaaattgaggaagctccccactattcctatttttctaggttttgttgtttttgtcatgaatgggtgttgaattctgtcaaatgttttaatgcattgattgatataatcatgtggtttctttcttyctagacctttttacatggtagattacaatgaacaaatttcaaatgttgaaccagccttacatacttagaataaattaggcttttcttttttgatcagaaatttgttgacatttggctgggcacagggcttcacatctgtaatcccaacactttgggaggccaaggtgggcagatcacttggagccaggagtttgagtccagcctggccaaaatggcgaaaccctgtctctactaaaaatacaaaaattagccaggcgtggtg

SEQ ID NO: 922637 - DNA, 743 bp, Homo sapiens
cggcaccccagccacaagacaaagtccttcccactcttccctcctcttctcataagcagaggtatctcttcctatggccaccactgccccaggtctgcagtgagttctgcatggctaccactggtgtccactcaaggcccaagagctcttcaatatgcttgtggtgaatgattccaggcctgggactctcccttcagggcagtgtgtgcttccctgtggctcagggcaagtctagaaattccatccaggagccaaggcctggaatcaggaactctggaagcctgcttagtgttctaccccmctgtggctgagctgatacctaagctgcaagacaaagtcctattaagtcttccctctgcttttctcaagcactcagagtctctcctcatagctaccacaactgccaacatgctgggtgacacctgaagccagcacatctcagagtctcactgaaggcccacagcgtgtactatacctggttgctgttgctgcttattcagggcccagtggctctttagtcagcaaataatgaattctcccaggacttggtttttccctttaaggcagtgggtttccttctggcctaaggtatgtctagaaatgtcatctgggagctagggcctgggatgggggcctcaaaactctacctggtgccctgtcctattgtgactgaactggtgtccgaattgcatgagaaaaacctctttattgtttcctccagcaatagaaaagagtttctccta

SEQ ID NO: 922638 - DNA, 571 bp, Homo sapiens
ttctactctatagctacatgaattcaattgttttcatttttagatcccacaaatacatgagaatatgccatgcttgtccttctatgtctggtttatttcacttaacataatgatctctggttccatccatgttatttcaaatgacaggatctcatatttttatggctgaataatactccattgtgtatagatgccacatttttttatccattcatctattgatggacacttatgctgtttccaaatttggcaattgggaacaatgctacaacaaatataagmgtgcagatagcacatcgataaactgatttcctttcttttgggtatatacccagcagtagaattgccacatcatatggtagctctgtctttagtttttggaggaacatgcacactgttctccataatgtttgtactaatttacattcccaccaacagtgtgcaagggttcccttttctccacatcttcaccagcatttgttattgcctgtctcttagatataaactattttaactgggatgagatgatatctcattgtagttttgatttgcatttctctgattatcagtg

SEQ ID NO: 922639 - DNA, 621 bp, Homo sapiens
gcctccgaggacgccctcagaaaaggatgaggagggaaagaggtgcctgtgtccgtagggagaaattgtcggtcactcgcctgcccccagcactgtctgagcccgtctgctcctgtctgcattggcgcaaataccatccccctgcctccccctcctcccttcccgaccggctgtctccaggtcttcaggagtgaaagacctatcgcagcccaagggtttctctttcatatgaggctacagtcttttcaccgccrtccccaccctctccctcaccccctgcttccccacctacccacaacatctaccggtctgtacctcttgttcacactttgataagtcagaaacagttcccgtacttggcaagattttgttgtagcttcttccattttggtctattaggaaataatttaaacatgcagaaaaatgtagagaataacataagcatcatttgtggagccaccacccatttctcccaaaacgtaactgtacacacatacacgtacatgcacacacgcacacacacggtgtgtatatacgtatctgtgtatttattttaaaaagaaatcaagcattccagatacatctgaaggactctcctacctccttctctggtcccaatca

SEQ ID NO: 922640 - DNA, 589 bp, Homo sapiens
tatgattgtgccactacattgcagcctaaaaaaaagaaaggaaggaaaaaaagaaggaagaagtaaaaagaaagaaagagaaaggaataaactaaggaaatgcctctctgatcccatatccttctccagcaaccatgtctctgcttctctcaacagcaacactccaaaaaattctgaaatgacatattgggtgggactttctctgtggtcctggaactgatgatgagggccaaagttggagacaaagaagtgtattaagagatggtttaggccgggcgcggtggctctcgcctgtaatcccagcactttgggaggcagagacgggcggatcacgaggtcaggagatcgagaccatcctggctaacacagtgaaacctcgtctctcctaaaaatacaaaaraattagccgggcgtggtggtgggcacctgtagttccagctactcgggaggctgaggcaggagaatggcgtgaaaccgggaagcggacgtgcagtgagcagagatcgcgccactgcactccgacctgggcgacagagcgagactctgtctcaaaaaaaaaaaaaaaaaaaaaaaaagatggtttaactgt

SEQ ID NO: 922641 - DNA, 665 bp, Homo sapiens; identical to SEQ ID NO: 920810

SEQ ID NO: 922642 - DNA, 720 bp, Homo sapiens
aaagcaggcataaaaatgtgaacaagtcagattggcttagcctttcagcctacgtctttctcttgtgctggatgcttcctgccctcgaacatcggtctccaagttcctcagctttgggattcggactggcttccttgctcctcagcttccagcctattgtaggaccttgtgatcatatgagttaatactccttaatactcacatccatctatctatctatctatctatctatctatctatctatctatctatctcctattagttctgtccttctaggtgactaatagaagtcgcttcctgataagatcttgggagttgggcaagcagactcaagcatgtgcattaagagacaaaatggmagagtttaactggtatatgaccttcgagaaacattccgctggtatgggaagaatgcctccagtaagcatgcagacaactccagtaaacacactatgtgtgctccccttccaagcgctagcaggccactatgcatgcagacagcacactccaagggaagagccagggagaaggaatgaaagatcctggaagtatgtcaatgcataaaattccaagtcaaagatcaaacagcgcacttgatttctcaagtcacctgcttggccctcctccaagtgtactttacttcctttcattcctgctctaaagctttttttaaaaaaactttcaatcctgctctaaaacttgccacagtctcttcttctg

SEQ ID NO: 922643 - DNA, 560 bp, Homo sapiens
tatttcattttatttgcttttatttggttttattttatttattgcatgttatttggttttaatttgcatttccctgatgattactgatattaagtatttttttaatatatcacttataagtcttctttgagaaatgtatattcatgccctttgtccattttttaattgggttatttgtattcttgctatggtttgtatacctcrtatattttgaatatatacacaacctcatatattcaaaacacccttttcagatatatagtttgcaagtattttctctcattctataggttgtctgttcactctgttgatagtttcctgactttgctttgtttcctaatcttaaaaatatctgtataaagcactcatttttctttagttaataatgtaaaaaagactgcattgacacagttaaattctcaagattctcagttctttagggatggacttaatggttggtatcattacttacaaaagtatcttgaacttgattgaacttattttgagaactaaagtttataatttttatttttatcttttaacttcatttttccatgaat

SEQ ID NO: 922644 - DNA, 497 bp, Homo sapiens
aggatctccttcctcttacgctgcctccagcctatgagaggatgtaggtaatgactatgctcacaaatatcacaaatgctcggtatacagcaggggctcaataaatgcttgttagaggcaaccagagcacagccagatgtgtgcgtgtgtatgtgctgactgtaccattttccagatgtgtgtcccacagcccatcactttgcctctctgagcctctgttacctcatctgtaaaatgggaggactcattcttgcctggaagggtgagtggggcatccccagggctcctgcgccycagtcacagggtgaaggtatggcaccaatgtacccagaggatatctggcaggtgcacagtagacataatagtccacataatagtgacaaccagagccaccgtagcatctggcagagcagacttgggagtgagctcttgtgagtcacaggttggggcttccctgtgtaacctggtgaggctcacaggagtccaatggcttagag

SEQ ID NO: 922645 - DNA, 598 bp, Homo sapiens
gctattattgttctctgggtttttaaacagttgggctaactttgcctttgctttcaacagaatgttaaccggataccttctgagataggttacaacttcatggcttcaagtattggttgtgctggagttgtcttcctccctggagaacagtccttgagaactaatttcatagccaaacatgctaaaactgttagaaggttgaggtgacttaacggccatttataaattaagctctgtaaaattatttggcaaataaatattattaaatgccmctagcataataaatgaacaagtccaaacatctagtgaaaattagaatttcaattagatttaggacatattttatattgtcagtgctttattttcacagttgccaaattataaagtgaaatgtcttctcatttcttaaggagtctttttcaaacttgtctgtcttctcctggaatcaagatagtgactgcacatttcagagtgaaccatctggtgcaggtctatagtaggttcttgatgtgttgttgaaagtggtgagtgagtgaacacttcagaatgaatgacacacatattagatctagttatacacactttgccaaaccattga

SEQ ID NO: 922646 - DNA, 716 bp, Homo sapiens
caggtttgttttctcctgaggcctctctccttggcttgcagatggccgcctcctcactgtatcctcacatggccctttctgtgtatctgcatcactagtgtctctttctgtgtccaattttctcttcttataaggacaccagtcaggttggattaggtgcatcccaatagcctcattttaacttaactgcctatgtaaaggccttatcttcaaatacagtcacatgctgaggtactgggggataaggctttgctatggtctgaatgtttgtgttctcccaaaagtaatttgttgaaaacctaattgccaatgtgatggcatgaggggaagggcctttgggaggtgatttgtasatgatggctgaatccttatgaatgggattagtgcccttacaatgagaccccagagagttgccttttccatcacatgaggacacagccagaaggtaccatctacgaaccataaagggggcctttagcaaacgccggctctgccagtgccttgaccttggccatcctagcattctgaactgtgagaaattcatttctcttatttatcagttacgcagtttatggtgtttgttgtaacagcctgaatggaccaagccaggcgtcaacatatgaattttgagggtgcacgatttagcccgtaacacctataaagtcggtgttattattagtcccacattatagtagaggaaactgaggcatggagta

SEQ ID NO: 922647 - DNA, 716 bp, Homo sapiens
caggtttgttttctcctgaggcctctctccttggcttgcagatggccgcctcctcactgtatcctcacatggccctttctgtgtatctgcatcactagtgtctctttctgtgtccaattttctcttcttataaggacaccagtcaggttggattaggtgcatcccaatagcctcattttaacttaactgcctatgtaaaggccttatcttcaaatacagtcacatgctgaggtactgggggataaggctttgctatggtctgaatgtttgtgttctcccaaaagtaatttgttgaaaacctaattgccaatgtgatggcatgaggggaagggcctttgggaggtgatttgtacatgatggctgaatccttatgaatgggattagtgcccttacaatgagaccccagagagttgccttttccatcacatgaggacacagccagaaggtaccatctacgaaccataaagggggcctttagcaaaygccggctctgccagtgccttgaccttggccatcctagcattctgaactgtgagaaattcatttctcttatttatcagttacgcagtttatggtgtttgttgtaacagcctgaatggaccaagccaggcgtcaacatatgaattttgagggtgcacgatttagcccgtaacacctataaagtcggtgttattattagtcccacattatagtagaggaaactgaggcatggagta

SEQ ID NO: 922648 - DNA, 615 bp, Homo sapiens
ctccctttctctctatttgtatgcagcagaaatgtggggcaactgatggaaaaggaaggaaaagttaaaaagtcagataattttcctactatctttactatcattttagcagcaaaatgctctattttcctcttttaaagcaataaaagcttcaaagggcagtatgtcaatcaaaaagatctacttctgaccaagtaatattctataagttgtttaagtagagaaataactacggcaccatttataaacattacatatgcaaaataaatattctagtacaaaaacctaatgtaagtctttcatttctggtaacaaaagttacaatttattatttaaaaatagtatttcatatacttactctatcataatgctgktccaaaaattctgcactgagcaatttatgtcttgtaagtaaatcctacaaaaagaaaaaaaaattgtttacagttgttctccaagttttcaaaaaagcgaatcctaaattccacaccattttacctaataaaaactgttgttaaaaatcaccatacttaacattttagcatgaattgtattaaaacactgattctataagagcaaaataaaatcattaattatttggaactgcaattttaa

SEQ ID NO: 922649 - DNA, 735 bp, Homo sapiens
gaggcaaggaaggatcttttcctagagcctttggagggagcatggccctgctgtcaccttgatttcagacttttggcctccagaactggactgtggaaaattatataaattttttgtttttgaaaaggcagcatcttgctatattgcctaggatggtcttgaactcctggcatcaagtgatcctcctgccttggcctcccaaaatgctgggattataggcatgagccactgtgcctggccaatgccatgctttcttaattgtcatctgtgatgattaattttatgtcaacttggctaggccatggtgctyagatatttggttatttttctggatgtttctgtcaacatgtttttaaagatgagatgaacacgtaaaccggtggtcttcaagtaatgcaaattaccttccctaatgtgggtgggcctcacccaatcagttgaaggacttaatatagagcaaagactgacttcctctaagaaagaaggaattccgtcagcaaactttcctttggactcaactgtaactcttccttgagtatccagcctgccagctctagattttgtagattttgaagttaccaagcttccacaataaacctctctctctacatagacacattctgctggctttgctggagaatcttgagtaatacaacatcattttataatgttgcgatagctgtagagcaagtcaattcacctttttcttttgaaaaaagtgccatggtttatctg

SEQ ID NO: 922650 - DNA, 735 bp, Homo sapiens
gaggcaaggaaggatcttttcctagagcctttggagggagcatggccctgctgtcaccttgatttcagacttttggcctccagaactggactgtggaaaattatataaattttttgtttttgaaaaggcagcatcttgctatattgcctaggatggtcttgaactcctggcatcaagtgatcctcctgccttggcctcccaaaatgctgggattataggcatgagccactgtgcctggccaatgccatgctttcttaattgtcatctgtgatgattaattttatgtcaacttggctaggccatggtgctcagatatttggttatttttctggatgtttctgtcaacaygtttttaaagatgagatgaacacgtaaaccggtggtcttcaagtaatgcaaattaccttccctaatgtgggtgggcctcacccaatcagttgaaggacttaatatagagcaaagactgacttcctctaagaaagaaggaattccgtcagcaaactttcctttggactcaactgtaactcttccttgagtatccagcctgccagctctagattttgtagattttgaagttaccaagcttccacaataaacctctctctctacatagacacattctgctggctttgctggagaatcttgagtaatacaacatcattttataatgttgcgatagctgtagagcaagtcaattcacctttttcttttgaaaaaagtgccatggtttatctg

SEQ ID NO: 922651 - DNA, 735 bp, Homo sapiens
gaggcaaggaaggatcttttcctagagcctttggagggagcatggccctgctgtcaccttgatttcagacttttggcctccagaactggactgtggaaaattatataaattttttgtttttgaaaaggcagcatcttgctatattgcctaggatggtcttgaactcctggcatcaagtgatcctcctgccttggcctcccaaaatgctgggattataggcatgagccactgtgcctggccaatgccatgctttcttaattgtcatctgtgatgattaattttatgtcaacttggctaggccatggtgctcagatatttggttatttttctggatgtttctgtcaacatgtttttaaagatgagatgaacacgtaaaccggtggtcttcragtaatgcaaattaccttccctaatgtgggtgggcctcacccaatcagttgaaggacttaatatagagcaaagactgacttcctctaagaaagaaggaattccgtcagcaaactttcctttggactcaactgtaactcttccttgagtatccagcctgccagctctagattttgtagattttgaagttaccaagcttccacaataaacctctctctctacatagacacattctgctggctttgctggagaatcttgagtaatacaacatcattttataatgttgcgatagctgtagagcaagtcaattcacctttttcttttgaaaaaagtgccatggtttatctg

SEQ ID NO: 922652 - DNA, 735 bp, Homo sapiens
gaggcaaggaaggatcttttcctagagcctttggagggagcatggccctgctgtcaccttgatttcagacttttggcctccagaactggactgtggaaaattatataaattttttgtttttgaaaaggcagcatcttgctatattgcctaggatggtcttgaactcctggcatcaagtgatcctcctgccttggcctcccaaaatgctgggattataggcatgagccactgtgcctggccaatgccatgctttcttaattgtcatctgtgatgattaattttatgtcaacttggctaggccatggtgctcagatatttggttatttttctggatgtttctgtcaacatgtttttaaagatgagatgaacacgtaaaccggtggtcttcaagtaatgcaaattaccttccctaatgtgggtgggcctcacccaatcagttgaaggacttaatatagagcaaagactgacttcctctaagaaagaaggaattcygtcagcaaactttcctttggactcaactgtaactcttccttgagtatccagcctgccagctctagattttgtagattttgaagttaccaagcttccacaataaacctctctctctacatagacacattctgctggctttgctggagaatcttgagtaatacaacatcattttataatgttgcgatagctgtagagcaagtcaattcacctttttcttttgaaaaaagtgccatggtttatctg

SEQ ID NO: 922653 - DNA, 765 bp, Homo sapiens
aaggagaaatagggtttcctgagtttcatcccaagcatcataaacaacaaacaaagatgtggtgttgggatccaataacaaatacctatatgctctttacttattttatcagttgataaaattttgtgtcattggtttatctgtttatcaactttttggggggaggaattttaaagtgatgataccaacaaaaaaaaaaaaaaaaaagaagaagaagaaagtgatgatacgtcttccccaagtactttaacaggtgccctgcaaatgacacaacatcactagcacatatgaaaacaataacaaaaagtcaatacttctgtcgtaatacagtctatactaaaacatcttcaactgtccccaagatacctcccttttataactgttttttgtccccttgattcaggatccaaccaaattctgtacattgcattgactgttaagttttttgaatcatcgaaatattttaagtggtattaaaaatgttagagtctcggtcatttttttttttttttttacagaatgttcctcattatggatatttaaaaagtattttctatgtgcagaattggaaatgatactacaaagataatgttatrtaattttattttaacatcagaggcagatattgtcaattcgtcccattattggtaatatttattggtaatactaggtttgatcacttaagtggtgatagcctggcaccttcattttagaaatacattttcccttttataattactaattaatacatgagatgaaacttca

SEQ ID NO: 922654 - DNA, 648 bp, Homo sapiens
aaaaaatataccaaaaatgtagatcccatgggcccaatagtaccaattctataaaaatctctttcagttaatagaactgaaaagaatacttcccaattaatgttatagggcctacattaccttgatcccaaaactagaaatagactgtatgaatgagaaaacttcagaccaatatccctcaaaaatatagatacctaaattataaaaatatattagtaaaacaactctaacagtatatttaaaaatcatttatcacaaccaataattgtttttcttgggaattcaaagctggattactatttgaaaatcaagcgagtcatttacaatatagaaacataaaggagaaagtcactttatcatattatttgatacaaaaaaaattgaaaaaattcagcacacattcttgagaaaaactccttgcaaactaacattgaaaaagmatttccccaattggatagcaggcatctaaaataaactataggtaacatcatatttaatgacaaaaaatttaatgttttccactataatggaaaaaaaatgctggatgttcagtctcgctactcctatccaatgccattctgaaagacctattcagtacaataaggcaagaaaaaaaagacacatatattgtaaagaaagaacttaaaa

SEQ ID NO: 922655 - DNA, 612 bp, Homo sapiens
atggtccgctgacagccaactcagatccattttggaaagacatagaaaattatgtaggtggatggatggatggatggatggatggatggatggatggatggggagacagtttcctttcatagagttaaggaaaatgtcatggaaacaatgatactttcaggcttggtcgaagaggatgcatggctgtttattggaagggaaggagggcagcttctacctggggcaggtagtggggagggatggggaagctggattgcactaacctttggtgaacagagctaattaagtaagttacttaataatcmcatcatctggttaatgcaattcagaatgagtcccagatactctggtcattatgctgatggaaagctttttgaaaaaaaaaaaaaaaaaaaaaaaaaaaaaaggccatctccctctgctcatcctgtaattatccatttcttgcctacctcttgctgtttttgataagagccattaggataataattacaggctcaactaatgtattaataactctatggatgtacatttcttgatgcctctgtgaaagactgaaatatgttaaccttttaaatgtcttcagtcacaggctgtgtcagacttttatta

SEQ ID NO: 922656 - DNA, 534 bp, Homo sapiens
gcccaggagttggagaccagcccggctaacatagcgagactccatccctacagaaaaattaaaaaattagccgggcatggcggcatgtgcctgtagtcccagcgacttgggtggggggctgagttcaggaggttttggctgcagtgagctgtgatcacaccgctgcactccagcctgggcattagagcaagaccttgtcttaaaaaaaaaamaacgaaagtttgaattgcccattagacatccaagtagaaaggtcgagttttaagttgggtatagaagtctggagtttggggtaaaggtctgggctggagatctagctttaggagtccttcagtcctagagagagggtgaagtcaggaaggaatgacagaggaagcacccaggcctggaccttgggaccctccaatgttcacgggcagagagaagtggggagcggccagtgaggcaggggagaccccctggagtgagtgtcaagaggatggagggagctactctgtcaaagactgctgctcatgggccaagtaaaatgaggtc

SEQ ID NO: 922657 - DNA, 534 bp, Homo sapiens
gcccaggagttggagaccagcccggctaacatagcgagactccatccctacagaaaaattaaaaaattagccgggcatggcggcatgtgcctgtagtcccagcgacttgggtggggggctgagttcaggaggttttggctgcagtgagctgtgatcacaccgctgcactccagcctgggcattagagcaagaccttgtcttaaaaaaaaaacaacgaaagtttgaattgcccattagacatccaagtagaaaggtcgagttttaagttrggtatagaagtctggagtttggggtaaaggtctgggctggagatctagctttaggagtccttcagtcctagagagagggtgaagtcaggaaggaatgacagaggaagcacccaggcctggaccttgggaccctccaatgttcacgggcagagagaagtggggagcggccagtgaggcaggggagaccccctggagtgagtgtcaagaggatggagggagctactctgtcaaagactgctgctcatgggccaagtaaaatgaggtc

SEQ ID NO: 922658 - DNA, 745 bp, Homo sapiens
atcatttggggtaaatgtgattttttgtttcttttttttgagacagagtcccgctctgtcgcccaggctggagtgcagtggcaccatctcggctcactgcaagcttcacctcctgggttcacaccattctcctgcctcagcctcccaagtagctgggaccacaggcgccgaccaccacgcccagctaattttttgtatttttagtagaaatgggttttcaccgtgttagccaggatggtctcgatctcctgacctcgtgatccacccacctcggcctcccaaagtgctgggattacaggcgtgagccaccgtgcccggccttttttttgagacagggtcttgctctgttgcccagagtggactgcagtgggctgaagtgatcctcacacctcagcctcccaagtaactgggcatacaycaccatgctctttttttttctgtagctatctgcttaggaacaaaaggaaaggcagtttcttgaatgagtcagctttcagcttaattttttcctttaggcatagtgaattggagtcccaggtttttattcttttcatgagagcaaacttttgtttgcaaacagcattatcattttcattactctgcggttgttctctttaaaaaaagagaaaaaagaaaaaaatcccttagcccaggattagcaagtatccaacatgcatactcctgctttccccttcttatcctcttcttagcaagggctgtcatgactggttaaccatattactcc

SEQ ID NO: 922659 - DNA, 745 bp, Homo sapiens
atcatttggggtaaatgtgattttttgtttcttttttttgagacagagtcccgctctgtcgcccaggctggagtgcagtggcaccatctcggctcactgcaagcttcacctcctgggttcacaccattctcctgcctcagcctcccaagtagctgggaccacaggcgccgaccaccacgcccagctaattttttgtatttttagtagaaatgggttttcaccgtgttagccaggatggtctcgatctcctgacctcgtgatccacccacctcggcctcccaaagtgctgggattacaggcgtgagccaccgtgcccggccttttttttgagacagggtcttgctctgttgcccagagtggactgcagtgggctgaagtgatcctcacacctcagcctcccaagtaactgggcatacatcaccatgctctttttttttctgtagctatctgcttaggaacaaaaggaaaggcagtttctwgaatgagtcagctttcagcttaattttttcctttaggcatagtgaattggagtcccaggtttttattcttttcatgagagcaaacttttgtttgcaaacagcattatcattttcattactctgcggttgttctctttaaaaaaagagaaaaaagaaaaaaatcccttagcccaggattagcaagtatccaacatgcatactcctgctttccccttcttatcctcttcttagcaagggctgtcatgactggttaaccatattactcc

SEQ ID NO: 922660 - DNA, 556 bp, Homo sapiens
tagtggcgcgatcttggctcactgcaacctccgccccctggattcaagcaattctcgtgcctcactgtcccgagtagcttgggattacaggtgcacaccatcacacctggctcgtttttttgtatttttagtagagacagggtttcaccatgttggccaggctagtttcgaactcctaacctgaaatgatctaccgaccttggcctcccaaagtgctgggattacaggtgtgagccaccgcacccggcttcaaaattattattgaaatgaggataattagcatgtctatcaacacaatctgtatacgtatcgaaacwtcacactgtaccccagtcacaattcctatgtgtcaactaaaaacaaaataaaacatattttacaatgaaaaatctgtacaggaaagaaactggacaacaccttaaccaagtcatcaaaatgcaagaaaacgttgacctaagagcaggcagaatagttcttcgcaaggaaaggtatcctttgtgtttcccctaaggggcagacagacatggtacatctcctattgtaatactcgaaaata

SEQ ID NO: 922661 - DNA, 627 bp, Homo sapiens
tggccatctgacatatggtcatgggaagttctggagagtgagcccaatgctgccgtccactcaaaggaagtttcaaatcctcacaccatcttgctcagttgagtcctctgcctctctgattccaactcctccaaactgggcttcctagctacccccagccagacccaagggtgrctggagggacccaggccttcagtgagggcatttgtccaacctcctagatccccacatctacactggctagagctgatggtggctttccctttagcttgggtctgatccttccaattcagtctccactagctagcttttgttatctctgttgcctgtctgtccttgagggcatttgagtttgcaactcttggctgagcctttacggagacacttctgcagcctgacaccccactgtgaacagcagaggcttccgcagaaaccagcccgctcatgttcgtagaaccttagtaattaatagtactgtgctgtatcaagcagtagcaggggctcagagccgtttgttgtgctgaccaacatggtttggctctcatggtgggggtgcaggagcccaggcctcctccatggagtctggtgcccccaaacaaagcctgtggcctacttgggtggctcaaa

SEQ ID NO: 922662 - DNA, 749 bp, Homo sapiens
  misc_feature 717: n = A,T,C or G
tcactcacccaccagccactgtaggtctcagcctcatcaccctgtgctctctccctgcagggggagctgctgagcccatgccgctgtgatggctcggtcaagtgcacacaccagccttgcctcatcaagtggatcagcgagcggggctgctggagctgcgagctgtgctactacaagtaccacgtcatcgccataagcacaaaaaatcctctgcaggtacaacccagggctgcctggtggggttgctgggcctggggcttccacaccacctgctttagcaggaggcttacttcaccttagattcagggcagtttgaggaaaaggaagaagatgggctgggtgggcaagcacggtgggcggcgtggggcaggaggggatgaaaggacatttgtgttttctcttaagcttcagcaagaagaagaggaagagatggggcaaagagagggaaatagatacagaaggaaagaagtgtggagaatcagagggaaaagggagaataagtaagtgaaaggatgaataaatgaatgcagaaaggagaggaagaaagaaggaaaggaaaggaagaaaygaaggaggcagggaagaagaagaaaaagagagaaaggccagagggcagaagagaacaggaaacaaaaagacagaaggtgggaggggtgaggagaaggactgagatcaagctatgggctggtaaagaagaaataagaagaatagactcantggcccttctcatacatcaatgtgcatgtaat

SEQ ID NO: 922663 - DNA, 616 bp, Homo sapiens
tcgccatccttgagaacaccctggactgccaaaatggcacacctttgagatgcagttccatttgcctcttcacccttccaactcagaggtcacctttttttttttttttttttttttttgagacggagtctcgctctgtcgcccaggctggagtgcagtggcgggatctcggctcactgcaagctccgcctcccgggttcacgccattctcctgcctcagcctcccaagtagctgggactacaggcgcccgccactacacccggctaattttttgtatttttagtagagacggggtttcacygttttagccgggatggtctcgatctcctgacctcgtgatccgcccgcctcggcctcccaaagtgctgggattacaggcgtgagccaccgtgcccagccgaggtcaccttttatgctggttaagcctctagccctgccctatctctgcagaatttaggtttccctctgccatgcttctgtagtgctgagtctacatctccgtggccacacttgccatgctgtgtgcaagcttctgtgcgtctcactctttgcattcaccgtgcttatgccatcatctgccatggagtctaagcccaatattgctggattaattta

SEQ ID NO: 922664 - DNA, 616 bp, Homo sapiens
tcgccatccttgagaacaccctggactgccaaaatggcacacctttgagatgcagttccatttgcctcttcacccttccaactcagaggtcacctttttttttttttttttttttttttgagacggagtctcgctctgtcgcccaggctggagtgcagtggcgggatctcggctcactgcaagctccgcctcccgggttcacgccattctcctgcctcagcctcccaagtagctgggactacaggcgcccgccactacacccggctaattttttgtatttttagtagagacggggtttcaccgttttagccgggatggtctcgatctcctgacctcrtgatccgcccgcctcggcctcccaaagtgctgggattacaggcgtgagccaccgtgcccagccgaggtcaccttttatgctggttaagcctctagccctgccctatctctgcagaatttaggtttccctctgccatgcttctgtagtgctgagtctacatctccgtggccacacttgccatgctgtgtgcaagcttctgtgcgtctcactctttgcattcaccgtgcttatgccatcatctgccatggagtctaagcccaatattgctggattaattta

SEQ ID NO: 922665 - DNA, 616 bp, Homo sapiens
tcgccatccttgagaacaccctggactgccaaaatggcacacctttgagatgcagttccatttgcctcttcacccttccaactcagaggtcacctttttttttttttttttttttttttgagacggagtctcgctctgtcgcccaggctggagtgcagtggcgggatctcggctcactgcaagctccgcctcccgggttcacgccattctcctgcctcagcctcccaagtagctgggactacaggcgcccgccactacacccggctaattttttgtatttttagtagagacggggtttcaccgttttagccgggatggtctcgatctcctgacctcgtgatccgcccgcctcggcctcccaaagtgctgggattacaggcgtgagccaccgygcccagccgaggtcaccttttatgctggttaagcctctagccctgccctatctctgcagaatttaggtttccctctgccatgcttctgtagtgctgagtctacatctccgtggccacacttgccatgctgtgtgcaagcttctgtgcgtctcactctttgcattcaccgtgcttatgccatcatctgccatggagtctaagcccaatattgctggattaattta

SEQ ID NO: 922666 - DNA, 489 bp, Homo sapiens
ggattcctaggtattttattctctttgaagcaattgtgaattggagttcactcatgatttggctctctgtttgtctgttattggtgtataagaatgcttgtgatttttgcacattgattttgtatcctgagaccttgctgaagttgcttatcagcttaaggaaattttrggctgagacaatggggttttctaaatatacagtcatgtcgtctgcaaacaggaacaatttgacttcctcttttccaaattgtctgatgctagggccaaagggcaggccacaggctgcaactgcctccagcagtgaagccactgtgcactttcacgtgcccagatagagtttcctgcctatggctgttactgctgtggactgctgcatgtggactaaagcatgtgtggaacacaagctgccactactggagatacagtgcaagtcaagcatgggctgatgccgttagggctgaagtacgagtgaagcagtttcccactttc

SEQ ID NO: 922667 - DNA, 598 bp, Homo sapiens
atccaagattcaagaagaggggattcaaaattatcatgaccattaattctgaggcagtatgatttttcaagtggagagcacctaggaattcccctatgaaaagttaaagttttgcttcaactattcccactcccgttatatagcagcccttcctccatactaaagcaagcgaattgtttccttgccaagtcrtagcctggtgtggtatgtgaatatatgaagtgtgatcataaaatatcagaatgaactttttatcaaaaacattaagtcttgtgcatgctagagagtttccagagagtatttcttcccaatcacattaggaggctgtgcaattgtgccactgctctggacacttttaaaattctattacaattctctcttgtgattgcagcatatcaatatattttatttttattgtttaaatacaggatctcattccatcacccaggctggagtgcagtggtgtgatcatagcttactgcaaccttgaactcctgagctaaagcaatcctcctgcctcagccttccaaagtactgaaattacaggaatgagccactatgtctggcccaatatctttagttggaattgcatcttcaa

SEQ ID NO: 922668 - DNA, 789 bp, Homo sapiens
caagagggaagggaagaagagacagagaaggggactgagcttgatcagtgtaaccatggttatacaaggagtattcaaaaatctcatgcaaaagacaagacatgtgagtcatgtacctaatacatgacttaaaactcctcccgcttgtgaaaggtatggagctgtacagaaggagaaaaagagcagcaagtttcctggggagtccaataatactatgtaatatctattgggagagggctggtttgatccattatcttacctggagctggtctacagtggttacccaataacatgtattacctaattttaaattttaattgttcttgtgcctatactgtttacataaataatatgccaggcgcggtggctcacgcctgtaatcccagcactttgggaggccgaggagggcggatcacgaggtcaggagatggagaccatcctggctaacacagtgaaaccccgtctctactaaaaatacaaaaaattagccgggtgtcgtggcgggcgcctgtagtcccagctactcgggaggctgaggcaggagaatggcgtgaacccgggaggcggagcttgcagtgagccgagatagcgccactgcactccggcctgggtgaaagagcragactccgtctcagaaataaataaataaataaataaataaataaataaataaataaataaaataataataatacattactttggtcattaacagtcagtatattagtattttggactggaatggaacagaatactacctgaaacaaatatatttgttttcaataaagt

SEQ ID NO: 922669 - DNA, 546 bp, Homo sapiens
  misc_feature 316: n = A,T,C or G
acattttgatgtgatcaaaacaaaccaaaaagaatgaaaagaatatttttttatttatttatttatttttattttagattcagggggtacatgtgcaggtgtgtcatcatggatatattgcatgatgctgtgagcttcacttgaacctgtcacccgggcagtgaacatagtatccaataggtaattttttgccttttgtccccctccctcctccctccttttggagtcactggtgtctattgttcccatctttatgtccrtgtatagccaatgtttggctcccacttataagtgagcatatttggttggcttaatntgttaatttccttaggataatggcctccagcggcgtctgtgttgctgcaaaggacattattttgctcttttttatggctgtgtagtattctatggtgtatatgtaccacagtttcttaatccaactcactattaatggacacctgagtttaccctatgtctttgctattgtgaatagtactgtcataaacatttgagtgcaggtgtctttttggtaaaatgatttatttg

SEQ ID NO: 922670 - DNA, 766 bp, Homo sapiens
ttcccatacttctgtgaattgtaatatatatttacctcaatgtcatccctgaggaatattctttctaattctacctctcacacctctagtcttttcttcccaggtgcaaagttattttgcttgctagttgagataagttctataatttagtttcccccctcttcctccccccaaaaaaagactataggactaaattgataggatgaaatgataggtttaaagaataattcattataccatcaagatcttggcatgctgatagctgaaaagactactttgagctgtcagttctaaagcacatactttttcattgtctgacatgccaagtgcttgatagaataatgaattgttcccattgacatcaccatcgcacgtaactcttgggctccatgcagcatttttcaggggtgatgaataacatcaatgttctttccatggtgtgtaaaactaggaggatgagggcaggctcagggactgctgaagagsaggatggtggtttagggatggagggaagaatggaggcaaggtcagaggtatcattaaggtcagacacaactgtggtgcatgtgataacacctcataattaaaaatgtatcattccaactgggcgctggtggctcatgcctataatcccaacgctttgggaggccaaagcaggtggatcacttgagctcaggagttcaagactggcctggactgtggtgaaatcccgtctctaccaaaaatacaaaaaattagctgcacatggtggcgtgtgcctgttgta

SEQ ID NO: 922671 - DNA, 766 bp, Homo sapiens
ttcccatacttctgtgaattgtaatatatatttacctcaatgtcatccctgaggaatattctttctaattctacctctcacacctctagtcttttcttcccaggtgcaaagttattttgcttgctagttgagataagttctataatttagtttcccccctcttcctccccccaaaaaaagactataggactaaattgataggatgaaatgataggtttaaagaataattcattataccatcaagatcttggcatgctgatagctgaaaagactactttgagctgtcagttctaaagcacatactttttcattgtctgacatgccaagtgcttgatagaataatgaattgttcccattgacatcaccatcgcacgtaactcttgggctccatgcagcatttttcaggggtgatgaataacatcaatgttctttccatggtgtgtaaaactaggaggatgagggcaggctcagggactgctgaagaggaggatggtggtttagggatggagggaagaatggaggcaaggtcagaggtatcattaaggtcagacacaactgtggtgcatgtgataacacctcataattaaaaatgtatcattccaactgggcgctggtggctcaygcctataatcccaacgctttgggaggccaaagcaggtggatcacttgagctcaggagttcaagactggcctggactgtggtgaaatcccgtctctaccaaaaatacaaaaaattagctgcacatggtggcgtgtgcctgttgta

SEQ ID NO: 922672 - DNA, 569 bp, Homo sapiens
gtgttggcaaagtccccaggatccctgaaagagacatgcctggttccaggagtcagcgtactcagggaatccgaaacatggctttcccagtccagatgcagtttacccatcaagcatctttttagatcagaagcattgttgcctaggcttgttgacacaagctgtcctcatttgcagagagccgacttagmtagttaacaggaggtcaaattctcatgcagaaggagagacagttttgccgacccttaatttcactgataagaggcttgtagtagagctgtgtaaaaaggttttcaggatcactgctccctagactttgagttagatttgaagtctgatgagactataattcttggcgtgttaatgctttattttccgtctatatgcatttacattttcctcttgtatttcagttttgctgccaccacagtttcatttcttcgaaatgttttgtgagcaaagggaacaacaatccctttcttttcttctttttgtatcagtgaagtcaggccacactcaccagccattacaagccctaaattattaactcagggttgttttgccgtttt

SEQ ID NO: 922673 - DNA, 569 bp, Homo sapiens
gtgttggcaaagtccccaggatccctgaaagagacatgcctggttccaggagtcagcgtactcagggaatccgaaacatggctttcccagtccagatgcagtttacccatcaagcatctttttagatcagaagcattgttgcctaggcttgttgacacaagctgtcctcatttgcagagagccgacttagctagttaacmggaggtcaaattctcatgcagaaggagagacagttttgccgacccttaatttcactgataagaggcttgtagtagagctgtgtaaaaaggttttcaggatcactgctccctagactttgagttagatttgaagtctgatgagactataattcttggcgtgttaatgctttattttccgtctatatgcatttacattttcctcttgtatttcagttttgctgccaccacagtttcatttcttcgaaatgttttgtgagcaaagggaacaacaatccctttcttttcttctttttgtatcagtgaagtcaggccacactcaccagccattacaagccctaaattattaactcagggttgttttgccgtttt

SEQ ID NO: 922674 - DNA, 545 bp, Homo sapiens
acacgtggggattatgggagatacaattcaagatgagatttgggtggagacacagctaaaccatactttcggaggacgaggtgggcagattgcctgaactcagaagtttgagacgggcctgggcaacatggcaagactcctgtgtgtgctgcggcatgaccttcactccacgtgatccacttccaggtctcattggacacattttgagttaattcttgcrtatggcatgatgaagtaaagctccaacttcattatgtatgtggctctcctgttgtcccgtcaccatgtgttgcaaagactattttctcaccttgttaaaaatcagttgactagagacacatgggcttatttctggactctcatttctattccgctgatctatatatctatccttatgccactaccacactttgcttactgttactttggagtaaggtttgaaatcaggaaggatgagtcctccactattattctttctcaagattgttttggttattctgggtcccttgcaattacatatgaattttagaatttgtttgtcaatt

SEQ ID NO: 922675 - DNA, 606 bp, Homo sapiens
agactggagtgcagtggcgtgatctcggctcactgcaacctccgcctcctgggttcaggtgattctcttgcctcagcctcctgagtagctgggactacaggtgcgcaccaccacacccagttaatttttgtatttctattagagactgggtttcaccactttggccaggatggtctcgatctcctgacctcatgatctgcccacctcggcctcccaaagtgctgggattacaggtgtgagcctctgtacccagccttaactgttcattatcttataactgagcaaagtacgaaaatctttcagcctacmtcttttattaatattttaattatgacagttaatctgtatttaagttatgtatctatagttgaaaccccaggataagcatagtcagttcctggagaattcattaaccgcaaccataccagaaagatgattcatcttgttctcttttttctatttagaaaatgttaaagtgatcattgggctaccagacagaatacttaaatcacaatagtgtcattaaaaatagtaggacgtctcaaccacaaaaaaaaacccaattcagaaatgggcaaaggtcttgaatggacctttctccaagga

SEQ ID NO: 922676 - DNA, 714 bp, Homo sapiens
aattctatctctttccctctcccttccaactttactgagttcttttaataaccaggccacgggcttggaaatgccttgacctttactgaccgagttgtatattgagcctagccctagcccttttaaggggcactgcctgagctccccagatcaaaacttctcactcttcaccatccagtcctcgagctgcagagaagcggtcctccascggcggttacagcagaccataaaggagcgggcgctgctgaacgcacacgtgacacaggtgaggctttgcagagggagggatgtggaaggaagatgaccccaggtggccaggagcaggtgaggaccagtgacagcccttcctaacttctgtgcccatttcttgcaggtgacagagtcactaaaacaagtccagctagagcgagacgaatatgctaaacacataaaaggagagagggcccggtggcaggagaggatgtggaaaatgtcggtggaggtgaggtctgacccttcagcccccactttagataggtcactggatctttctgggcatctgtaaaatgggaatagtacagccagaggtggtcatgggtctgggctttgtggagatggggacagagaatgagatggtagcctgtccagccaccagcccctctctccagggccctttcccctgtgctttgggcaggctcgaacattgaaggaagagaagaagcgtgacatacatcg

SEQ ID NO: 922677 - DNA, 731 bp, Homo sapiens
ccctctcccttccaactttactgagttcttttaataaccaggccacgggcttggaaatgccttgacctttactgaccgagttgtatattgagcctagccctagcccttttaaggggcactgcctgagctccccagatcaaaacttctcactcttcaccatccagtcctcgagctgcagagaagcggtcctccaccggyggttacagcagaccataaaggagcgggcgctgctgaacgcacacgtgacacaggtgaggctttgcagagggagggatgtggaaggaagatgaccccaggtggccaggagcaggtgaggaccagtgacagcccttcctaacttctgtgcccatttcttgcaggtgacagagtcactaaaacaagtccagctagagcgagacgaatatgctaaacacataaaaggagagagggcccggtggcaggagaggatgtggaaaatgtcggtggaggtgaggtctgacccttcagcccccactttagataggtcactggatctttctgggcatctgtaaaatgggaatagtacagccagaggtggtcatgggtctgggctttgtggagatggggacagagaatgagatggtagcctgtccagccaccagcccctctctccagggccctttcccctgtgctttgggcaggctcgaacattgaaggaagagaagaagcgtgacatacatcggatacaggagctggagaggagcttgtccgaa

SEQ ID NO: 922678 - DNA, 618 bp, Homo sapiens
cgggtggtgcctgcatatcgtgcagaaccatctgtgaaccaggacctagtcttctgttcctctgtcaactgatcacagggaactcttcatgaggccatcagtgcaggctggggaagtgaatgaagggtggcagaaatggagaccatgggcatttgagccacttcctcgtgtaacttacttgggccttcaggacatgctcgagcccaatcacatatataccacttctatttgatgatgaaatgctgctgtacatgacccactttatagctaaatgggtcagaaaacagccagttcatgataggcaattaggttgcatggtgacttgatgacccatagccaaatattcagcttccaccaaagcccagtaacaggccaagagctgtctcaaaagaaragtagttatctgcagaagatggaagagccttgctccaaaatactagaggcctctgctgtgattcaccaatgggggcctgccaaagggtccaaacaacatccgtatctgccactaacacctcaagcaccattggatctgctgggtcatatggcccaagtggcagagcagcttttacagcagtctggacctgttgcagagccttctcctgctctggaccccactca

SEQ ID NO: 922679 - DNA, 667 bp, Homo sapiens
cttcccctgaagtggtcccatgcctttcctggcaaagaaagggaacttggctggcaaagaaagacctacacttacacaatgccaaaataaccaggtaattatgtcaaaagcaaaaataattcacaacaggaaattggcaccataaaatgaaataatatgctttaaatgaaattaatagtttgtaacacaaatcttcaagttaatcartcatgacaaatatataacatagaagaaatcttcacatatttcaaactttatcatgctattgtgctgtcatttatgaagatgcttgaaaatatgtttgatttttttatcccattgcatttgtcaagcttgatatgaaaatgaaattaatgaatattttacttattcaataactattgatttagtgcttcctatatgccagagctttgataaggtcaaagaacttataaatgcaaaagattgattcttgatttaaaagattcttataattaactatcctaggatgttttatggacatatcataccctatgtatatacatttctataagaataattcaaattgcctattaactgacctcatttatttactttggcagacaagaaatccaaatgaaggtcaaactcatttgcagtgtatagactgacacttgtcatattttttaaattcaatatttgtatgtca

SEQ ID NO: 922680 - DNA, 667 bp, Homo sapiens
cttcccctgaagtggtcccatgcctttcctggcaaagaaagggaacttggctggcaaagaaagacctacacttacacaatgccaaaataaccaggtaattatgtcaaaagcaaaaataattcacaacaggaaattggcaccataaaatgaaataatatgctttaaatgaaattaatagtttgtaacacaaatcttcaagttaatcaatcatgacaaatatataacatagaagaaatcttcacatatttcaaactttatcatgctattgtgctgtcatttatgaagatgcttgaaaatatgtttgatttttttatcccattgcatttgtcaagcttgatatgaaaatgaaattaatgaatattttacttattcaataactattgatttagtgcttcctatatgccagagctttgataaggtcaaagaacttataaatgcaaaagattgaytcttgatttaaaagattcttataattaactatcctaggatgttttatggacatatcataccctatgtatatacatttctataagaataattcaaattgcctattaactgacctcatttatttactttggcagacaagaaatccaaatgaaggtcaaactcatttgcagtgtatagactgacacttgtcatattttttaaattcaatatttgtatgtca

SEQ ID NO: 922681 - DNA, 589 bp, Homo sapiens
cagtgcaagccccaagccttggtggcttacaatttgtgttgggcctatgggtacacagaagttaagaattgaggtttggaagcatctggctagatttcagagaatgtatggaaatgcctgaatgtccaggcagaagtttgctacacagacacagccctcatgaacaacctctgctagggcagtgtggaagaaaaatgttggatgggaacacccacacagagtcctgactggggcactacctagtggaactgtgagaagaggattgccatactccagaactcagaatcgtagattcaccaacagtttgcactgtaagcctggaaaagtcacagacactcaatgccagcctatgaaagcagccaggagggggctctaccctgcaaaaccacagaggcagagctgctcaagaccatgggtacccacstcttgcatcagaatgacctggctgtgagaagtggagtcaaaaaagataattttagaacattaatgtttaatgactgccctattgggttttagacttgcatggggcctgtagcccctttgttttggccaatttctcccatttggaacagttgcatttactcaattc

SEQ ID NO: 922682 - DNA, 741 bp, Homo sapiens
attgaatcataggggcaggtctttcccatgctgttctcatgatggtgaatgggtctcatgagatctgatgtttttataaatgggagttcccctggcacatgctctcttgcctgctgccatgtgagacaggcctttgcttcttctttgccttacaccatgattgtgaggcctcccaagccatgggtaactgtgattccattaaacctctttcccttataaattacccagtctggtgcatgtctttattagcagtgtgagaacagactaatacagtaaattgggaccaggagtggggtgctgctataaagatacctgaaaatgtggaactgactttggaactgggtaacaggcagaggtyggaatagtttggagggctcagaagaagataagaaaatgtggcaaagtttggaacttcctagacacttattgaatggctttgataaaaatgctgatagtgatatggacaataaagtccctgctaaagtggtctcagatggaaatggcaaacttgttgggaactggagtaaagatcactcttgctatgcaaagagactggcagcattgtgcccttgccctagaggtctgtggaactttgaatttgagacaaatgatttaggatatctggttgaagaaatttctaagcagcaaagcattcaagaggaagcagagaataaaagtttggaaaatttgcagcctgatgatgcaattaaaaagaaaaacccattttctgggagaaattca

SEQ ID NO: 922683 - DNA, 647 bp, Homo sapiens
cacaatatatgaagtaaaaattcagtagattggtagattagacatttcagaagaaaaagatcagtgaatttgaaagcataaccttaggaattttctaatctgaagcacacagaaataaaaggctaagaaataagaaaaaaaaagagcctcagtgacctgtatggcaatattaatgtgttagcgtgtctaaaatgcattcagttggggacacagaaakaagggaccagaaataatatcccaagaaatttgctaaaatttttgcaaatttgatgaaaaattaaatctgcaaatgcaatgagctcaccaaatcccaaacaaatacagagtaaaccaggagcagcagcgtcataaattatgaaaatctactgataaagtcaaaatcttaaaaccaagcagaaaaagagcaaacattacatagaggaaaacaaagataagaatacctgccatcttcctgttttaaactttaagttcagaggtacaagttcatgtttgttacataggtaaacttgtgtcatgagggtttgttgaacagattatttcatcacccaggaattaagcctagtattcattagttattttttctgatcctctccctcttaccaactttcacccactgataggccccactgtgtgtttttccctctatg

SEQ ID NO: 922684 - DNA, 597 bp, Homo sapiens
ccctgatagaagtagttgctctgtcttctggggccccactacatcttcattacacatttgctttagcctttaacatgtttggtaattcatctgcctttctctgtttagcctacatcattggcgtctttttacacccagaatctggtatcaggcctacacatagtcaaagcttgctaaccagtagaaaacagtctaataattgacttttcatgcttcccattagaaactaagaaaattgacacttttcttgaaatcgcaaaatggtagcataggtttkgttttgttttgttttgttttgtcttcagacgaagttttgctcttgttgcccaggctgaagtgcaaatgcacgatctgggctctctgcaacctccacctcttgggtgcaagcaattttcctgcctcagtctccggagtagttgggattacaggcatgtgccaccacgcccgactaattttgtatttttagtagagacagggtttctccatgttggtcaggctggtctcgatctcccgacctcaggtgatcctcccgcctcagcctcccaaagtgctggaattacaggtgtgagccaccacacccaaccagtttttttgttg

SEQ ID NO: 922685 - DNA, 597 bp, Homo sapiens
ccctgatagaagtagttgctctgtcttctggggccccactacatcttcattacacatttgctttagcctttaacatgtttggtaattcatctgcctttctctgtttagcctacatcattggcgtctttttacacccagaatctggtatcaggcctacacatagtcaaagcttgctaaccagtagaaaacagtctaataattgacttttcatgcttcccattagaaactaagaaaattgacacttttcttgaaatcgcaaaatggtagcataggtttggttttgttttgttttgttttgtcttcagacgaagttttgctcttgttgcccaggctgaagtgcaaatgcacgatctgggctctctgcaacctccacctcttgggtgcaagcaattttcctgcctcagyctccggagtagttgggattacaggcatgtgccaccacgcccgactaattttgtatttttagtagagacagggtttctccatgttggtcaggctggtctcgatctcccgacctcaggtgatcctcccgcctcagcctcccaaagtgctggaattacaggtgtgagccaccacacccaaccagtttttttgttg

SEQ ID NO: 922686 - DNA, 467 bp, Homo sapiens
tctttccaacagcccttcaaggcatcttcctggataatttatcccatttgcagaagagggcacctgggacacagagaaagtaaatgactggccaaggtcactgtattagtcggttttcatgcagctgataaagacatacctgagactgggtaatttataatgaaaaagaggtttaacgaactcacagttccatgtggctagggaggcctcataatcatggcagaaagcaaaaggcacttcttacatggcggcagcaagacagaaaacttgtgcagggaaactytcctttatgaaaccatcagatcttttgaaacttattcactgtcacgagaacagcacaggaaagacctgcctccatgattcaattacctcccaccaggtccctcccaagacatgtgggaattgtgtgaactatgattcaagataagatttgggtgaggacacagccaaaccatagcagttaccaa

SEQ ID NO: 922687 - DNA, 465 bp, Homo sapiens
cgccattgactcccacccctctggatctggcaggttgtgctcctgatccagcaaggcacccatttccactcctgatcgggctaaagtctcacctttgttcctgcacaaccaagtgccgaggttcatcctaatcaagctgaacactagtcagtggtttccatggttctcttccatgtcccacggcttctgatagagctataacactcaccacatggcccaagtttccattccttggaatctgtgaggccaagaagcccaggtcagagaacaaaaggcttgctgccatcttgggagtggcctgccccatcttgggagcagcccaycatcatcttgggagctctaagaacaaagatccgctggtaacatttggtggcctcgtatggggattctccaaagcagtgagtaatatcagaccacttttgcttgctattctgtcctctaccttagaattggaggaaaataccg

SEQ ID NO: 922688 - DNA, 612 bp, Homo sapiens
cctcctcccaataatcatgaatgttcttagtggcatctagaatggtagatcctttccagaaggttttcaactgactttgcagagatccatcagagggatcactatctgtggcaacaatatcctcacaaaatgctttttttaattgtatttaatttttttttttttggaaaagcagtctctatcgctcaggctggagtgccgtggcacaatctcggctcactgcaacctctgcctcccaggttcaagtgattctcctgactcaaactcccaagtagctgggattacaggcatgcaccaccatccctggctaatttttataattttagtagaggtggggtttcaccatgttgaccaggctggtcccgaactcctgaccttgggtgatccacccactttggcctcccaaagtgctaggattacaggcataagccaccccacacytggccttttttccaaatttttaactttaatttttgtattttgttttttatttttattttttatttttgagacagagtcttgctctgtcacacaggctggaatacagtggtgcaatcagctcactacagccttgatttcctgggctctggcaattctctggcctcagcttcc

SEQ ID NO: 922689 - DNA, 663 bp, Homo sapiens
gcccagggaagccattcctgactttatcctacaggggtccttgtagaaggaagccagtggaattagggaggggcaggattaaggaagcttctagctcaacttattaatttcaactagaagcatgaattttcctgagcagaatcttgggggcaaacaagaagtgcagataaaagcacagaagccacagccaacagtgtgggcaggtggggaggggcaaggcctgaaagccctgtttgctttctcagagagaaggcttgtggcctggggtgagatctctgccctgygcactgttggcagggcacagcaggagtgagactggccttgctggctgcatgggagctaggtgaggcttgtgactgccagctttcccaacttccctagcaacctgtatgacacagcagaggaagccataatacccctgggaacagaactccactggcctgagaaccagccccctattcccccacagtggccacagcaagcctcacccgaggagagtctgagctcagatatgcctaatgctgccccaacctgatggtctttctctacctttgctggtagctgaagacaaaagacataaactcttgggagctctatggccccgcccataacctgagaaacccaaataccctggccaacgtagggcaaccttgtaatccccct

SEQ ID NO: 922690 - DNA, 717 bp, Homo sapiens
ctaccgcagctggtggcagtggaaggggaaagcacctcaaaagtgccacctcctctcttgaaagtgccacctcctggctggagaccaaccaactcacgccattatagcaactcataacagaagaaccctgctccaaagaaagagaaaacaacaactaattccactgcctgcaacatcctggctaaccagaggtcctgagtctgtccacatgacaacttcactgctcgcataaccagcgtttgagaaaaccagtgcacgaaagaaaactacaaccaaggaccctcacagaatccacttaagtcccctgccacctscactggagcaggtgctggtatccatggctgggagacctgaagacagatcacatcacaggactctttgcagacattcctcagcaccagttcagatcccagtaattctgctgggtggatagacccagaagggcaatggcaatcactgcagtctggctctcaggaagccccatccttagggaaagggggtgagcaccacatcaagggatcaccctgtgggacaaaaggatctgaggggcagcccttgagttctagatctttccactgaaacagtctacctgaatgagaaggaaccagaaatgttaattctggtaatatgacaaaacaaggttctataagacccccaaaaggtcgcactaactctccagctatggatccaaaccaagaagaaatctctgaattgcca

SEQ ID NO: 922691 - DNA, 466 bp, Homo sapiens
tttttttgcttgtgctacacatccattaggtcatcaagggactcaccttgtcaagttactcagagattcaggctgatataaaggtttgatcttgacatacgctttcatgatgacagaaagcagggaagagaaggtggtgagccatgtgctttctcccccttctatccagaaatgacacatactcacatttcattcgccagagaaattaacatggccmctcctaagttcaaatggatagagaaatgccttcctaccaggtgcccagaattagaagagcaaacatttgtgaacagttctgagtaccacaaataccgttatctttccacttaagtcttctgtttcactcagtagtgctttaaacttttcttcatatgtttttcagtgtttcttgttgaatttcttgatattttatcatgtttgttcgtactgggagtagcctttttttccatttcattttctggctggt

SEQ ID NO: 922692 - DNA, 558 bp, Homo sapiens
tatgtgtgtttctgtttagacacctgattcaacatgtgttgttgacttactaacattgaagtaatggccaacagcaccataactcatgcctgaatgaagcatatttaactcgcgtattttctgtgtagagctatcacagccttgcgtatagaaaccctagacagcacttyagcacttgcttgggggccactgtaaacaatacaattaccaacaacgaaaatcacaaaaatgtgataaacacagcactaaatagcccatgagaaggacactcgtttacaatctgagggctgaaccgagaaagcagagttccactttgctcaacctcagctaggaatgtgtacttcgggtcactcaaatgtttcccaccctgcacatatctataagtgaccatgaaagcaccatgagtattgattttggggttagaaacacattttagtgagtaggcaaacttataaatatgaagccacaaacaaagcccaactgtattttgtcatgtatttcatgtaaagattgatttttagtaacataaacacaataccatgttttccactgaggatt

SEQ ID NO: 922693 - DNA, 509 bp, Homo sapiens
tcaacaattcatagcattcctgggcttattggttccattttaaagataagaaaacatcagtgatggctcatgactataatcccagcactttgggaggccgaggcgggcagatcacttgaggtcaggagttccagaccagcctggccaacatggtgacaccccatctctactaaaaatacaaaaattagctgggcatggtggcacacgcctgtaatcacagctacttgrgaggctgaggcccaagaatcatttgaaccagggaggcagaggttgcagtgagccgagatcatgtcactgcactccagcctgggtgacagagcgagactccatctcagaaaaaattaaattaaatttaatttaaaaaaaaagataagaaaactgaggctctgagtgattaagggatcctcacccaaggcggcatagctaataagtagcaggaatgggaatcccaacctaggtctgtttgaatccagagtcaagttctcagctattaaactctaatggtgcct

SEQ ID NO: 922694 - DNA, 509 bp, Homo sapiens
tcaacaattcatagcattcctgggcttattggttccattttaaagataagaaaacatcagtgatggctcatgactataatcccagcactttgggaggccgaggcgggcagatcacttgaggtcaggagttccagaccagcctggccaacatggtgacaccccatctctactaaaaatacaaaaattagctgggcatggtggcacacgcctgtaatcacagctacttgagaggctgaggcccaagaatcatttgaaccagggaggcagaggttgcagtgagccgagatcatgtcactgcactccagcctgggtgacagagcgagactccatctcagaaaaaattaaattaaattwaatttaaaaaaaaagataagaaaactgaggctctgagtgattaagggatcctcacccaaggcggcatagctaataagtagcaggaatgggaatcccaacctaggtctgtttgaatccagagtcaagttctcagctattaaactctaatggtgcct

SEQ ID NO: 922695 - DNA, 712 bp, Homo sapiens
gtgttcaacataagttgtaaaataggcaaaaatgaggatgttaatcctatgtaaacaatcaacttaaaagaaaagttaaacttgaatcttttttctgctacatccacatcagataaaattattagggaagctgtgtttcttttttcttgtagtaatcccttgtactaaacataaactgtttacaaatataagaatattcatcagcagcctaaaactggaaactacccaaatgcttattaataatagaacagataaatatattaggtttattcaaacaatggaataccataccactatgagaataacaaactggagctacaagcaacaattgtgggtgaatcctcaaacaatgcggagcaaaagacaccagataaacaaaagtgtatggtctacaattgcatttatgtaaactaatgtattagaagtcaggatcgtggttatccttggcagagatgaaaaattagaagaggcgctgggcgcggtagttcatgcctgtaatcctagtgagaggtgacagcgtgctggcagccctcgcagcccttgctcgctctcggcctctcctctgcctggrctcccactttggtggcgcttgaggagctcttcagcccaccactgcactgtgggagcccctttctggtctggccaaggccagagctggctccctcagcttgcagagaggtatggagggagaggcgcgagcgggaaccggggc

SEQ ID NO: 922696 - DNA, 815 bp, Homo sapiens
gagggtgccaggtgcctactgaaaccaagaacaatcctattacacggtatcttagggtccaaagagaaaagagtttccaactgaaactatgcaggaaactcaggtgggcagatggtaatcatcaaagcagggatctggcaaagaacacccccccacttgcagacaaagaaaaaacctagaggaaagtrtattcctgaaagcagagaattttcatgggagcaagaacatgaagtcattcttgctgccagtgaggtgccaactaaggctgcttcccagagacactgacatcacgttagaaaggagaagaggctggtgctgtggctcatgcctgtaaccccagcactctgggaggctgaggtgggcagatcacctgaagtcaggagttcaagaccaatctggccaacatagtgaaaccccatctctactaaaaattagccaggtgtggtggcaggcgcctgtaataccagctacttgggagtctgaggcacgagaatcgcttgaacctgggaggtggaggttgtagtgagctgagatcgcaccactgcactccagcctgggcaacaagagcgaaactccgtctcagaaaaaaaaaaaaaaaaggagaagatatgcaatgtgatagtgggacccgagtgacttgcttttgcttgctcaggtccacgttccttgatccatgtgtcccattccactctccatgctctgtcttctgatcctcactgtgtggccaggacatagaaggtcttcactgctatcacgtgacactatagttcctgagggcaggaactatattttccatttctaagagtgccttgaca

SEQ ID NO: 922697 - DNA, 571 bp, Homo sapiens
cacatgttgtcttgccatgccgcatgtgcacacccgtctgcccacaggcacaagccagccgcagcttctttcacgttcccaagcctcgcctaagccctggcacagagtgggcacgtgaccattttggtgaagggacacgttcatgaagaatggatgagagaagtgtattgtgaccactggacaasagagagcaaagaaaggacttcttgtagcttggtcccttctgagagaactgttataaaggattattgaaggtaatactttaaaaggcaatcacacgtctcctaaattggaattccaaccagccatctgagaacttgagcatggtgtcaggaagagcaacggcgacatgagagctgagagtgggagaacagtggactcacgggttgaatggattgtctggagtgtttgcacacttctttcaacacccagtgctccagcccggtgagctcctgatgcggcctttgtgggtgctccaggtgtccctcaccccagtcccaactatgctaggtgtaggtgggatacactccctcactgggtatgggtgggatacactccctcactgggtatg

SEQ ID NO: 922698 - DNA, 792 bp, Homo sapiens
ggaagggggctgcgtgtgtcacacagcacactttgtggcagcacaagcatcacgctgtgaaccacagcgactgggctgcctttgctcaccctcagctcagtgcgcaccaggccactcttctgtcttttgatccgtgcagcagcccargcacctgatggggtcatgggagaagtgcgttgagtcgtgggtggggcatgggcctcgacttctcttcagtggaaagtctatttgtgtgtcttctccaggagatgaaagagtcactgtcacggcccctccttaccccctcctcccccaatctacttagtatgcccagaatatccggatggatttatataggtgccctctcctgtaaatcttgtaacggtggcattcttcattctctgatcaggttcaggagaaaatttccaccaccgaacaccctgctgttacaaattccctccgaccacgtccccgggacgctcctggatgccccttcctgcccctgaagggagagattgtggccttatcagatgcaaggcagaggatgaagattttgtaaattttactgttacataaaaatgagcattatccctttcttaaagtgctcctacaatgggaacactcgtaaataaaagtttataaaataagacatatttttattaatgtttccacatcatcatgttctgtgattccatctgactcacctcttttagaatccactcagttaacatttatagagctctcctcaaacctaaggccagcaagacaactggactgggggctgccgtgtctccccagcacacgcatggcagc

SEQ ID NO: 922699 - DNA, 617 bp, Homo sapiens
acagtgactcagctatcccactcctggatatttatccaagtatttgaaatcagcatgttgaagagttatctgcactcttgtgttcgttgcagcactattcacaatagtcaagatatggaatcaaactaagggtccatcgatggctgaatagataagaaaaaatgcggtatatacacagtggaatactattcactttttttttttttttgagacggagtcttgctctgtcgcccaggctggagtgcaatggcgcagtctctgctcactgcaagctccatctcccaggttcatgccattctcctgcctcagcctcccgagtaactgggactacaggcgcccgccaccacacccggctaatttttttgtatttttagtagagacagggtttcaccatgttagccaggatggtttcgatctcctgacctcgtgatccgcccrtctcagcctcccaaagtgctgggattacaggcgtgagccaccgcgcctggccaccattcacctttaaacaaggaagaaatggttatttgtgacaacagccatgaaactgaagaacatttatgctgagtgaaataagccaaacacagaaaaacaaacaccgcatattctcacttctgtgt

SEQ ID NO: 922700 - DNA, 496 bp, Homo sapiens
actgcactgcacagagaccctgtgtctaaaataataataataataaaatattgatatggtttggctccatgtccctacccaaatctcatgttgaattgtaattctcagtgttgggggagggacctggtaggaagtgattggatcatgggtgcagtttttccccttgctgttccatgatagtgagttctcatgagatctgatggtttaaatgtgtctgacacgtcccccttcactctctctctctcctgccgccatgtgaagatattcttacttcccctttgccttcctccrtgattgtaagttccttgaagcctccccaggtatgactctgatacagcctctggaactgtgagacaattaaacctcttttctttatacatttgccattctcaggtagttttttatagcagtgtgagaatggactaatacagaaaattggtaccagagaagtgaggcattgctataaacatacctgaaaatgtggaagcaacttgga

SEQ ID NO: 922701 - DNA, 598 bp, Homo sapiens
gtacagcttttttttatattggggtgtgttttttctatatctagttttgggcggattttatcaagaagaaatgttgaattttatcaaatgagtgttcagcattaattgatcatatgctttttgtccttcattctgtttatatgatagtccatattgattgatttgcrtatgttaagacatccttgcataccttgagtaaatcccacttggtcatggtaaatgatctttttaaaagtattgttgaatttggtttgcttagtattttatcgaggattttttcattgatattcatcagagatattagcctgtagttttctttttttttaatgtgtcttttcctgtttttggtatcagggtagtattggccttgtagaatgagttttagaagtattctctccacctctacttttttttgaaatagtttgagtaggattggtattagtctagaaatgtcatctgggaactagggcctagaatggggtccttatggcttgtctggtgcccttactctactgtggctgagctgatatccagtgtaagacaaagcattctttactgttcactctcctctcctcaagcagaaggaaggagttacttt

SEQ ID NO: 922702 - DNA, 628 bp, Homo sapiens
cacactcttaaataactagatctcatgataagtcactcactgtcatgagaacagcaccgtgggggttttgctaacccattcatgagaactccacccccatgatgcaatcaactcccaccaggccccactccaacactgggtattagaattcaacttgagatttagtgaggacaccaaaccccattctgcccctggcccctcmaaatctcatgtccttcttatattgtaaaatacaatcatggcttcccaacagtctcccaaagtcttagtttattctagcattaagccaaaagtccaaagtccaaagtctcatctgagataaggcaatttccttccacctacgagcctgtaacatgaaaaacaagttagttgctcccaaaatacaatggggttatggcactgggtaagggagaaattggccaaaagaaaggggctacagggcccatgcaagtccaaaacccagcaggcagttattaactcttaaaactgcaaaataatctcctttaactcagtgtctcacatccagggtacactggtgcaagaggtgggctctcaaagtcttgggaaactctgcctctgtggctttccagggtacagcccccacagttgctctcaaggggtggtattg

SEQ ID NO: 922703 - DNA, 787 bp, Homo sapiens
tggatcacgaggtcaggagttcgagatcagcctggccaacatgatgaaactctgtctgtactaaaaatgcaaaaattagccaggtggggtggtgggtggctgtaatcccagctactcgggaggctgaggcaggagaattgcttgaacccggcaagcggagttggcagtgagccgagatggtgccactgaactccagcctgggtgacagagcaagactccatctggagaaaaaataataataaaaaatktaagtcatgagtacatagaatatatgtagatgttaatctattttgtaatttacttccataaaatacatacaaatctattataaaatgttaaaatttatcaaaacttatatacacaaacacagactgtatatggcgccatttgcagttgagagaaatgtaaaaaacgtaaagatgccatattaaatcataacagtggaaagttatctgtagcacatactgtactattgtaataactttctagctatctcctgttgctattgcagtaagctcgagtgttgcaagtatcctcctaaaagtctatgatgctaatcatttctgcagtttgtctttccagtaaattacatattgcagtaaaaactgagctctcaaagttctaacatttctttcatcgtagctaatgcaataccataaactttgaataacaccatgggacccgtacaaagtgccactagtgatgctgaaagtgttcctaagaaacagagaaaagttatgacattacaagaaaaagttgaattgcttcaaatgtaccatagatcgag

SEQ ID NO: 922704 - DNA, 464 bp, Homo sapiens
gtaaatccaaaaaatgatacaagaagtgaagggagaaatagtcaatgaaatagatagcttaaagaaaaaacaatcaacaattcaggaacttttggacacaattttagaaatgcaaagctttggaaagtctcagcaatagaattaaacaagtagaagaaagaaattcagagctcgaaaacaaggtttttgaactaactcaatccaacaaagacaaagaaaaaagaataagaaaatgtgaacaaagcctccaagaagtttgggattatgttaaatgaccatgcctaagaatattcggtgttmctgaggaagaagagaattctaaaagcttggaaaacatatttgggggaataatcaaggaaaacttcccaggtcttgtgagagacctagatagccaaacacaagaagcacaaagaacacctgggaaattcatcacaaaaagatcttcacctaggcacgttgtcatc

SEQ ID NO: 922705 - DNA, 612 bp, Homo sapiens
aataaataaatgtgattcaacacatcaacagaattaaaaacaaaaatcacacaatcatctcaatagatgcagaaaaatcattcaacaaaatccagcatccctttgtgatcaaaaccctcagcaaaatcggcatacaagggttataccttaatgtaataaaagccatctattacaaacccacagccaaaaaagtactgaatggggaaaagttaaaagcattccccctgagaacgggaacaaggcaaggatgccctctgtcaccactcctcttcaacgtagtactgcaagccttagtcagagcaatcagacaagagaaagagacaaacggcatccaaatcagtatagaggaagtcaaactgtccctgtttgccgatgatatgttcatttacattgaaaaccctaaggactcctccagaaaactcctagaatggatmaaagaattcagcaaagtttccagatatgagattaatgtacacaaatcagtagctcttctatacaccaacagtgaccaagtggtgaatcaaatcaagaactcaaccccttttataatagctgcaaaaaaaaaaaaaatacttaggaatatacaaaacaaaggagtcaaaagacctctac

SEQ ID NO: 922706 - DNA, 626 bp, Homo sapiens
ttttgctggaacaactggatatctacatgcaaaagaatgtgacaaaaatgaaataaaagtcatcatacattataccatttataaaattatcacatacaaaaaaagatcataactaattctaagagctaagatagtaaaactcttagaagaaaacattgaactaaatctttgtgatcttggatttgtcaatagtatcttagatgtgataccaaaaacacaagtaacaaaagaaaaaatagacaatttggactttatcaaaattaaaaccattcttgctacaaaagacatcatgaagaaagtccaaaagacaacccacagaataggaaaaaatgtttataaatcawaatctgataaaagatttgcattgcgaatatataaagaaccctcacaactcatcaataaaaaacaaataaacctatttaaaataggcaaagaatttaaagagagatttctccaaagaatatatatgaatggccaataagcgcataaaaagatgctcaatcttattagtcattagggaaatgcaaatcaaaacgacaatgagatactcacacccacttaggatagctatataatttaaaacacagacaataacaagtgttggttaggatgtggagaaataggaa

SEQ ID NO: 922707 - DNA, 648 bp, Homo sapiens
ttcttaggacacaatgcagaacagaaatggaaacaaaaaagaaaaagtcctgaaagtaggagagatcatggcggacaggaggcaggaagagatttcaggtcccacttggatggacagagcagcgcgtggaggctcgcatcrtaaacttctgctccagaatgactacaggaatatatcaggaaggccaagagaacccatataccctctgaaggaagtggattgctcctgcaggacccgggagacatctcaaatactgtgagtgcccaaatagtgtggaagtggaaagggagatcatctaccccagaacacacaccccactggggaacctgagggtctagattaaagggagatgaatctgaccttactggagctgagtcaatttagaaagccaagtgaaatacaggggtagaggaagcagtaggaaaacccctgtgggctcgctgggtcccctagcaagcagtttccatcttgcctcacaggggtccttggggaggatggccagaggcactgggaaaaggccacagggagaaggaaacctccagttgaacttcgcaacaatttgaactgatggagaagtctcctgaccagaactcaggagagggcatgaatccagtgtgtggactccacaggcaggggaaaaatgaaagt

SEQ ID NO: 922708 - DNA, 648 bp, Homo sapiens
ttcttaggacacaatgcagaacagaaatggaaacaaaaaagaaaaagtcctgaaagtaggagagatcatggcggacaggaggcaggaagagatttcaggtcccacttggatggacagagcagcgcgtggaggctcgcatcataaacttctgctccagaatgactacaggaatatatcaggaaggccaagagaacccatataccctctgaaggaagtggattgctcctgcaggacccgggagacatctcaaatactgtgagtgcccaaatagtgtggaagtggaaagggagatcatctaccccagaacacacaccccactggggaacctgagggtctagattaaagggagatgaatctgaccttactggagctgagtcaatttagaragccaagtgaaatacaggggtagaggaagcagtaggaaaacccctgtgggctcgctgggtcccctagcaagcagtttccatcttgcctcacaggggtccttggggaggatggccagaggcactgggaaaaggccacagggagaaggaaacctccagttgaacttcgcaacaatttgaactgatggagaagtctcctgaccagaactcaggagagggcatgaatccagtgtgtggactccacaggcaggggaaaaatgaaagt

SEQ ID NO: 922709 - DNA, 746 bp, Homo sapiens
gtgtctgtgcccactaaggtctcggggttttcacaggtacaggatggggcatggcgggccagggtggtcttgggaaatgcaacatttggacgctaaggcaggagtgcctgtccttacctatgtccctgggcccaggcccagggctggagccctcaccagggaccttctcctcccagcacttccctgccgtcctcccgtrtcatcatgacaccatcagatggtgttgaaccacactcagcacgtccagtagcagcccagccaccacttgcaaccaagaagtctaacacctcctcagcttctcctttgacaacactggatcatacgtggtcatctggtatgctggtttcatatgctgaagggcctagagcaggaaagaacagaagccccagacagaatttctaataactatgctgccaaacccaaaccacaccagagaaaggatttgtttttcacatggagctctaatgcatttttctcaatgcttatgactaccctttcatctaaaagcctcatttggccacatcagatggtgattcccgagtagttgagactattgaccctggattgtactgggacatctccccgggaggtcttctgtcctgggagcttcctgactcaccttctcaagaaaacaagctcccatgactataccctcatctattttggtgcactgtcttatggtgactatattcaatggagaaaatgcctgaggagttggacgatgtctcaagatgtcctcgacacat

SEQ ID NO: 922710 - DNA, 605 bp, Homo sapiens
gcatagagagaaaatgtgaaaactagaagatggccatctacaaaccaagaacagaggctttacaaggaaccaaccccgccagcaccttgatcttggagctttcagcctccaaaactgaaagagaataaatttctgttgcggcagtcacccaggccatggtaytttgttaagtacctagcaagctaatatatttccatcatatttactacaagcttatacacttccattgtgtttactacggcatcttgatatgcatgtattgaagtcattgatttaaaaaacactgcatgccacagggaccaggagagccccaaatctcacctctagagactcagtcactagactgatgtgggtgtacaaagagatgtcctctgagaatggctcatttctcatccttgctctgccatctcagctggctcttttctgggtttgtgtgtgcctggtatatcacccaccacaatctaccctctatgagggaatataatatgtatgtgccattctccctcgctacagggtggttacttgaaggtaaaagacccaagattcatttgtctctgaatctcaggcagatattagtcctgagtgcatcagttactagagacaca

SEQ ID NO: 922711 - DNA, 605 bp, Homo sapiens
gcatagagagaaaatgtgaaaactagaagatggccatctacaaaccaagaacagaggctttacaaggaaccaaccccgccagcaccttgatcttggagctttcagcctccaaaactgaaagagaataaatttctgttgcggcagtcacccaggccatggtactttgttaagtacctagcaagctaatatatttccatcatatttactacaagcttatacacttccattgtgtttactacggcatcttgatatgcatgtattgaagtcattgatttaaaaaacactgcatgccacagggaccaggagagccccaaatctcacctctagagactcagtcactagactgatgtgggtgtacaaagagaygtcctctgagaatggctcatttctcatccttgctctgccatctcagctggctcttttctgggtttgtgtgtgcctggtatatcacccaccacaatctaccctctatgagggaatataatatgtatgtgccattctccctcgctacagggtggttacttgaaggtaaaagacccaagattcatttgtctctgaatctcaggcagatattagtcctgagtgcatcagttactagagacaca

SEQ ID NO: 922712 - DNA, 722 bp, Homo sapiens
ctttgtgaggacacagcctcagcctttgtctcaatctgactctcttgttgtatcagttgcggttctccagagaagcagaaccaagggaatgcatatatacagaaaagtttcataagggactagctcatgcagttatggagtgatatggtttggctgtgtcctcacccaaatctcatcttgaattcccatgtgttgtacaagggacctggtgggaggtaattgaatcggggggtaggtctttcccgtgctgttcttgtgatagtgagtaagtctaacaagatctaatggttttaaaaaggggagtttccctgtacaagctctcttctcttgtctgctgccatgtgagatgtgcctttcaccttccaccatgtttgtgaggcatccccagccatgcggaactttaagttcattaaacctctttcttttgtaagttgccagtctcaagtatgtctttatcagcagcatgaaaatagattaatacagtaaattggtaccagtagagtggggcactactgaaaagatactgggaaatgtggaagcaactttgaaactgggtaacaggcagaggttggaaccrtgtggagggctcagaagaagacaggaaaatgtgggaaagtttggaactccctagagacttgttgaatggctttgaccaaaatgctgataatgatacagaaaatgaaaaccaggatgaggtggtctcagacagagatgaggacttg

SEQ ID NO: 922713 - DNA, 581 bp, Homo sapiens
tctttcacaataaaaagaagaacagaagccccaggagtatctggttagattaattttctgactctagattttatatccagattagattagattttaatttccagattagaaatcattgacttctagatattctgatttaatgaaattctaattcgatcatttccttcaaactggttgcaatagagcttgctccaaatgttattgccagggtggacattttagtattagatcattatcatctgaagtccaaagtactttttaaaaatccccaattcccatttttaaatattcctccataatgtacctttttgtctcctccccttgttcctacacttcttcaatatctgtattcataaagcccaaatracatacacaaatttcctgtaatgtgaaaatatcatcttaacattaaacagctcatgtcttccttagttttcttgcttcatagtttctgttgaggctgtatatctgctaggcagttgaagtgtcagcttcttaaccataataagattggccatcaggcaagaatgctgcagaggataccccccaccccaattactctgatgtgattattacacatt

SEQ ID NO: 922714 - DNA, 744 bp, Homo sapiens
tggtgaggtgtgtttttaaaagaccattagtccgttctacctttcttgaagactgaggactgaaaaggatataaaggtttcactgaataccaagagccaaaaaaaatgcttggctgatttgactaataaaggctggtccgttatcagactgtatagaggtgggaaggccaaaccaaggaattatgtctgacagaagggaagaaatgaccgtggtggccttgtcagaccctgtaggaaaggcctctacccatctagtgaaagtgtctacccagactaagaggtattttagttttctgacttggggcatgttgagtaaagccaatttgccaktcctgggtgggggcaaatcctcgagcttgatgtgtagggaagggaaggggcctaaataatacctgaggagtagtagaatagcagatggaacactgagaagtgatttctttgaggatagatttccacgatggaaaggaaatgagaggttttaagaggcgggctagtggctagtactatagcatagcctgcctttgctggtgagtggcaattaggccagttggaactgccatcaataaaccaagtgtgatcagggtgagaaacagggaagaaggacatatggggaaatggggtgaatgtcaggtggatcagagagatgcactcatgagggtcaggtgtggtatctggaataatgtgggaagccggattgaagtcccggccaagaacaatggtaattgtgggactcaacaaagagtg

SEQ ID NO: 922715 - DNA, 627 bp, Homo sapiens
tctaaaattatctcaaatcatttatttaaaaaaacaattgaccatgtaagtgcaggcataattctgggtaccattttgtttcatggatctatttgctatccttatgccaatatgctgtttagattactgtaactttattgtaaggctggtaatcatgtaaggcaagttttccagcattgtttttctcatttcattgtgttattctacacctttggattcaatgtgtaaatttcagaatcagcttgtcaatctctttttttgataggctcacccaattttgattggagattgaacagtatttaaagatcacttaaggataattggcattttatcataccatccttgcatcacagggataaaatctacttgataatggtggattagcttttagcttttttttttttttttttttttttgagatgaagtctcactctgtcaccagactggagtgcagtggcatgatcttggstcactgcaacctctgcctctcaggttcaagcgattctcctgcctcagccttccgagtagctaggactaaaggcacttgccaccactcccagctaatttttgaatttgtagtagagacagggtttcaccatgttgtccaggatggtcttgatctcttga

SEQ ID NO: 922716 - DNA, 622 bp, Homo sapiens
taagacccacacgtgaaaggtactcttcctatacccagagaaaaggaacatttgtatctctgaagacacagggacacagagaagaatctgaacaaacaggtcttgctaaatttcctcagttaattaccattagggtaataaactattttttcgattctgtttctccacaattatccacttcttcatcaaagttggcatagaaatacacaagtmtaggccaggggcggtggctcacgcctgtaatcccagcactttgggaggtcaaggcgggtggatcacgaggtcaggagatcgagaccttcctggctaacatggtgaaactctgtctgtactaaaaatacaaaaaattagccgggcacagtggcgggcgcctgtagtcccagctactcaggacgctgagaggcaggagaatggcgcaaacccgggaggcagagcttgcagtgagctgagatcgcgccactgcactccagcctgggcaacagagcgagactcagtctcaaaaaaaaaagaaatacacaagtctaattgtttcttcaggttttcatttcctcatgaaggctcctgtgtcacttaaaacttacgttaaatgaattggtacgcatttctcttgtttatctgtctc

SEQ ID NO: 922717 - DNA, 622 bp, Homo sapiens
taagacccacacgtgaaaggtactcttcctatacccagagaaaaggaacatttgtatctctgaagacacagggacacagagaagaatctgaacaaacaggtcttgctaaatttcctcagttaattaccattagggtaataaactattttttcgattctgtttctccacaattatccacttcttcatcaaagttggcatagaaatacacaagtctaggccaggggcggtggctcacgcctgtaatcccagcactttgggaggtcaaggcgggtggatcacgaggtcaggagatcgagaccwtcctggctaacatggtgaaactctgtctgtactaaaaatacaaaaaattagccgggcacagtggcgggcgcctgtagtcccagctactcaggacgctgagaggcaggagaatggcgcaaacccgggaggcagagcttgcagtgagctgagatcgcgccactgcactccagcctgggcaacagagcgagactcagtctcaaaaaaaaaagaaatacacaagtctaattgtttcttcaggttttcatttcctcatgaaggctcctgtgtcacttaaaacttacgttaaatgaattggtacgcatttctcttgtttatctgtctc

SEQ ID NO: 922718 - DNA, 622 bp, Homo sapiens
taagacccacacgtgaaaggtactcttcctatacccagagaaaaggaacatttgtatctctgaagacacagggacacagagaagaatctgaacaaacaggtcttgctaaatttcctcagttaattaccattagggtaataaactattttttcgattctgtttctccacaattatccacttcttcatcaaagttggcatagaaatacacaagtctaggccaggggcggtggctcacgcctgtaatcccagcactttgggaggtcaaggcgggtggatcacgaggtcaggagatcgagaccttcctggctaacatggtgaaactctgtctgtactaaaaatacaaaaaattagccgggcacagtggcgggcgcctgtagtcccagctactcaggacgctgagaggcaggagaatggcgcaaacccgggaggcagagcttgcagtgagctgagatcgcgccactgcactccagyctgggcaacagagcgagactcagtctcaaaaaaaaaagaaatacacaagtctaattgtttcttcaggttttcatttcctcatgaaggctcctgtgtcacttaaaacttacgttaaatgaattggtacgcatttctcttgtttatctgtctc

SEQ ID NO: 922719 - DNA, 579 bp, Homo sapiens
agaggctggtgttacaattttctatggtaaaagaagaaaggttttggttttttttttttttttttttttttagacactgtcttgctctgtcgcccaggctggagtgcagtggcgcgatctcagctcactgcaacttccgcctcccaggtttaagcaattctcctgcstcagcctcccgagcagctgggattacaggtgcctgccactatgcccagctaattttctgtatttttagtagagacagggtgtcaccatgttggccaggctgttctcaaactcctgaccttgtgattcatccacctcggcctcccaaagtgctgggattacaggcgtgagccaccgcacctggcctgttctttttctttttgaaaaaaaaagaaaaaaaaagagagagagagagagagcatagatctggacaggcaaagtcaggcaaatatgaaaatccagatagcttggcaaatgaagtcttagaaatcattccatggcaaatcctagaacagggagacaaggaggagatgctggatttgactcataccctttagatgttgggtttgttttttgcttggtttgtattttctt

SEQ ID NO: 922720 - DNA, 579 bp, Homo sapiens
agaggctggtgttacaattttctatggtaaaagaagaaaggttttggttttttttttttttttttttttttagacactgtcttgctctgtcgcccaggctggagtgcagtggcgcgatctcagctcactgcaacttccgcctcccaggtttaagcaattctcctgcctcagcctcccgagcagctgggattacaggtgcctgccactatgcccagctaattttctgtatttttagtagagacagggtgtcaccatgttggccaggctgttctcaaactcctgaccttgtgattcatccacctcggcctcccaaagtgctgggattacaggcgtgagccaccgcacctggcctgtyctttttctttttgaaaaaaaaagaaaaaaaaagagagagagagagagagcatagatctggacaggcaaagtcaggcaaatatgaaaatccagatagcttggcaaatgaagtcttagaaatcattccatggcaaatcctagaacagggagacaaggaggagatgctggatttgactcataccctttagatgttgggtttgttttttgcttggtttgtattttctt

SEQ ID NO: 922721 - DNA, 613 bp, Homo sapiens
gatggaaaaaaaatctttatcacttgggcctaagcaaaaccagaatcaacagcttatgaaataagagaaaatagggagtatgtccaaaaatacatactgataattacattgtttccataactttggtaagacagcaagattttcatggaaagaaaccacaagatatctcaaatctttacagagatccaagtttatgtaacagagaaaagagagaagtaggaagggaaaagagaagggagacgtttttatgtatccaagaagagccttgaaattttagctgmtcaattgattggaatatgttaagagtgggacactgattaatttaacattctgcatgatcaggaaattaatcaaaactttatgatgaaggccaggtgaggttgctcatgcctgtaatcccagcactttgggaggccaaggcaggcggatcacttgagctcaggaggtcgagaccagcctggctaacatggtgaagccccatctctactaaaaacacaaaaattaaccaggcatggtggtgtgcgtctgtaatcccagctattgaggaggctgtggcaggagaatcacttgtatccaggaggtggatgttgcattgagccaagattgttccact

SEQ ID NO: 922722 - DNA, 613 bp, Homo sapiens
gatggaaaaaaaatctttatcacttgggcctaagcaaaaccagaatcaacagcttatgaaataagagaaaatagggagtatgtccaaaaatacatactgataattacattgtttccataactttggtaagacagcaagattttcatggaaagaaaccacaagatatctcaaatctttacagagatccaagtttatgtaacagagaaaagagagaagtaggaagggaaaagagaagggagacgtttttatgtatccaagaagagccttgaaattttagctgatcaattgattggaatatgttaagagtgggacactgattaatttaacattctgcatgatcaggaaattaatcaaaactttatgatgaaggccaggkgaggttgctcatgcctgtaatcccagcactttgggaggccaaggcaggcggatcacttgagctcaggaggtcgagaccagcctggctaacatggtgaagccccatctctactaaaaacacaaaaattaaccaggcatggtggtgtgcgtctgtaatcccagctattgaggaggctgtggcaggagaatcacttgtatccaggaggtggatgttgcattgagccaagattgttccact

SEQ ID NO: 922723 - DNA, 808 bp, Homo sapiens
caaccatttaaagcctctggaaatggtcttaagggaaaataggaaatcaagaaacatctctctttaaaaatatattaaaacttggtaagaaaagcaagactctgtggtatgtgaaccaagacttgtcactcctcaaaaatccctatcccaactcggtgaggtggagataccactacagattgccacagtcaagaacacaggctaccactaccccaagttcccagtcagagggcttttctccaagaaggagcaagacttcagcatttgtaattctgcccccagctacctattgctgaggctaagtcctgggtgagtgcaactgagagggggtggtttctttgttcagatcaaccgccactcatgtaatggaggctctaccttaaacatggcacattgagagtaccagtatttcaaacacccttgccccagttcatggggtgatggtcctgtgatggaaaaagcaagctgagaggaactcaggctgttgccacctcccaccaactgcttagatcctagactgggggtgttgctyagagaaaatcttgccattgtcccatccccagctccagttccctggctccaagatttccccgagggtagaacaggcaacaaaacatatagctcttaatctcatccaaaagaaaagttctcatttgcaagagaatatgaagttcaaacttaaggatgctctcaagagcaaaaacagtagaggttgtgttgaaaagcaattgagaggaaatttgtagatttaatgaagatacacccagagattaggccaggtagtttgcagtagagaactggaaaataa

SEQ ID NO: 922724 - DNA, 674 bp, Homo sapiens
gcatggaggaggtgcaatgagagtgaaagtgggtaagagaacagtaaagagaaaaatgtgacaagggagggccacggggatctacgattctagttactttcctcacggttgtcatttgaagagcaggcacagatcctgtagaggttcgcaggaatagctagcattgtctcctgcattttcaggttcctttggcagtatccagcgttgtgggatgaggataagccagtataggctggttacattcctcactgagggccctggttcctttggataattttagccctaagtatttaaactgctgtgagcagagctgagcctttggtttggaaaccttgtagccacaagtggtgaggaagtttaagagcgcttgggtggcttgatggcacaaagtttctgaacaggaggctaaaagtaaatcattcacataccaaaggacgagagtgtccaagtatgagaactggctcaagtcttgggctaatgcttggccaaatagatggcctgaaaccttggggtaaaasagtccaggtgagttgagacgttgggttcgaaggatcttcaaaggcaaagaagaattgagagtcaggatgtaagggatgcagaaaaagtcatccttaaggtccaggactgtaaaccattctgcttcttctggtatttgggaaagcagagcataaggg

SEQ ID NO: 922725 - DNA, 596 bp, Homo sapiens
aatgcaatgcacccttttgacctccacattctcaccacctgtttctttgttggattaccaataaatagcgtgggctcctagagctcagggcctttgcagcctccacaatcatgatggtcccctggcctcacttctctctctctgtcttttctcaattctttgactccaccagacttcgttgcccccacgacctggtgttgagtctgatcaccccaacagtcagccttaaaaaaagaaaacatgagcttatcacctttttagtcaattcaggggctgctcactctgtttgtttcccctcatctaatgtttctcctcctcagaggaatttttagtttccagggtaaaaggggaaggagaggggagaacagtgtaatgagactgacagaggcagggaaagacaagcagaaaggaaaaagagagagagagagacagayggaagagagagagagaaaggaaaaagagagagggtaaagagggagaaaggaaagagagagaggaagagacagagagaaaagaggaagtcaacaagacagagagacatgaagtcagagaaagaaagagaaagagagaagtagtaaagaaaaaaaagtgtaccc

SEQ ID NO: 922726 - DNA, 648 bp, Homo sapiens
accccctccagagtcgtgggtcatagtcccaggggaaaatcctaccaaactaaagctaagaaaaatttaactctttcaccgattctattactttcttctttccttgctctattgctgaccacctagttattaacataaccaagtcaattttgcctcaaactattgcatttaatggttgccttgttacaccctgtagggacttgccaagtcaaagacagctctctacttcagaaaagcccctctgtccctcctgactctcctcagactgggcattagtgaattgggaccatttaaccagggagatttcgataaagaccccagtgtcagccaggagtcttggcacccccgaagtagagcttttatgctgtaattggtccaacgttctgtggaccactaaagggcaagaatggacttcyccaaccagtttttgtaatttcctaaaaccattcattcattttactaaagggacagccatccccactaactgtcagctaaaccagtgtaattctacacaggttattatctcaaaccctcgaagttcttccccttttctaaggcagttcccttctttaagccagctttatggtgtaggggctgaggtttcagggacaaaccctattagatgctttgaaatgcatttctttgatt

SEQ ID NO: 922727 - DNA, 558 bp, Homo sapiens
cagtgctaagcccctcactgcccggggctggccggcccgccactccaagtgtggggtgccaagcccatgcccatccggaattctagctggcctgcaagcgccacgcgcagccccggttctcgcccgtgcctctccctccacacctcctcgcgagctgagggagccggctctggccctggccatcccaggaaggggctcccacagtgcagtggtggctgaagggctcctcaagtgcagccagagtgggtgccgaggccctctaggaggcgccaagagcgagcgagggctgcgagggctgccagcacgctgtcacctctcaatttcaaagtttttgaatttattgagacttgttttatggccaatcatgtgttcaatcttaggttgtgttctgtgcacagatgagaaggatgtatatcctrtggttggtgggtggagtattctgtagatgtctattaagtccaattgatcgagtgttgaatttaagtccagaatttccctatttttctgcctttataatttgtctaatgctgtcagtggcatgttgaagtccccaactat

SEQ ID NO: 922728 - DNA, 638 bp, Homo sapiens
tcgtggcctcttctctgtgcatccagagaaagatctctggtgtttcttcttcttcttcttcctcttcctcttcttcttcttctttcttccttctttcctctttcttcattttttaattttttttgagacagagtctcactctgtcacccaggctggagtgcagtggtgggatctcggctcactgcaagctccgcctccttggttcatgccattctcctgcctcagcctcccgagtagctgggactacaggcgtgcaccaccaygcccagctaatttttttgtatttttagtagagatgaggtttcaccacgttagccaggatggtctccatctcctgacctcgtgatccacccgcctcagcctcccaaagtgctgggattacaggcgtgagccaccatgcccggccgtctcttcttcttctaaggacaccagtcctattggattagagctccacccttgcaacctcatttaaccttaattacctccataaagaccctgtctccaaatacagtcacacttggggttagggcttcaacatatgcatttgggagggacaaaattcagtccataacaacaagcttaggtcactgacattaatttgctcattcattctccatatgagacacagagctgtggtt

SEQ ID NO: 922729 - DNA, 622 bp, Homo sapiens
ccctgtgagcaggaggtgtggcttcggggggcggccccgccctgggctcagacttgatcctgcaccggagggagccattctggaaggccgctgccccgggccctgtccctccccctctcatccccagggtgctggccagagccgggctcacagcgtttcttaaaattaacgatcccggccgggcgtggtggctcacgcctgtaatcccagcactttgggaggccgaggcgggtggatcacgaggtcaggagatcgagaccatcctggctaacacagtgaaaccccgtctctactaaaaagacaaaaaattagccgggcscggtggcaggcgcctgtactcccagctactcgggaggctgagggaggagaatggcatgaacccgggaggcgaagcttacagtgagctgagaccgcgccattgcactccatgtgggcgacagagtgagactccgtctcaaaaaaaaaaaaaaaaaacgcaaaaaaaaaaaagatcccgtcacactgacccagctcactgttctcttaccagccttatttcggtgtggtccttagagcatgagccacttttttttgctgggaacataatccacgtttggtaaaattcggcaacgtgtgcacgcaa

SEQ ID NO: 922730 - DNA, 634 bp, Homo sapiens
cgggatgagctggttaaaccctggccctgtgagcaggaggtgtggcttcggggggcggccccgccctgggctcagacttgatcctgcaccggagggagccattctggaaggccgctgccccgggccctgtccctccccctctcatccccagggtgctggccagagccgggctcacagcgtttcttaaaattaacgatcccggccgggcgtggtggctcacgcctgtaatcccagcactttgggaggccgaggcgggtggatcacgaggtcaggagatcgagaccatcctggctaacacagtgaaaccccgtctctactaaaaagacaaaaaattagccgggcgcggtggcaggcgcctgtactcccagctactcgggaggctgagggaggagaatggcrtgaacccgggaggcgaagcttacagtgagctgagaccgcgccattgcactccatgtgggcgacagagtgagactccgtctcaaaaaaaaaaaaaaaaaacgcaaaaaaaaaaaagatcccgtcacactgacccagctcactgttctcttaccagccttatttcggtgtggtccttagagcatgagccacttttttttgctgggaacataatccacgtttggtaaaattcggcaac

SEQ ID NO: 922731 - DNA, 634 bp, Homo sapiens
cgggatgagctggttaaaccctggccctgtgagcaggaggtgtggcttcggggggcggccccgccctgggctcagacttgatcctgcaccggagggagccattctggaaggccgctgccccgggccctgtccctccccctctcatccccagggtgctggccagagccgggctcacagcgtttcttaaaattaacgatcccggccgggcgtggtggctcacgcctgtaatcccagcactttgggaggccgaggcgggtggatcacgaggtcaggagatcgagaccatcctggctaacacagtgaaaccccgtctctactaaaaagacaaaaaattagccgggcgcggtggcaggcgcctgtactcccagctactcgggaggctgagggaggagaatggcatgaacccgggaggcgaagcttacagtgagctgagaycgcgccattgcactccatgtgggcgacagagtgagactccgtctcaaaaaaaaaaaaaaaaaacgcaaaaaaaaaaaagatcccgtcacactgacccagctcactgttctcttaccagccttatttcggtgtggtccttagagcatgagccacttttttttgctgggaacataatccacgtttggtaaaattcggcaac

SEQ ID NO: 922732 - DNA, 634 bp, Homo sapiens
cgggatgagctggttaaaccctggccctgtgagcaggaggtgtggcttcggggggcggccccgccctgggctcagacttgatcctgcaccggagggagccattctggaaggccgctgccccgggccctgtccctccccctctcatccccagggtgctggccagagccgggctcacagcgtttcttaaaattaacgatcccggccgggcgtggtggctcacgcctgtaatcccagcactttgggaggccgaggcgggtggatcacgaggtcaggagatcgagaccatcctggctaacacagtgaaaccccgtctctactaaaaagacaaaaaattagccgggcgcggtggcaggcgcctgtactcccagctactcgggaggctgagggaggagaatggcatgaacccgggaggcgaagcttacagtgagctgagacygcgccattgcactccatgtgggcgacagagtgagactccgtctcaaaaaaaaaaaaaaaaaacgcaaaaaaaaaaaagatcccgtcacactgacccagctcactgttctcttaccagccttatttcggtgtggtccttagagcatgagccacttttttttgctgggaacataatccacgtttggtaaaattcggcaac

SEQ ID NO: 922733 - DNA, 737 bp, Homo sapiens
ccggagtgcagtaacaggcagaactggaacctggccccatcccggactcaggggacgggtgtcatataccccctctgcctcatccttcccactctgctaaccttccaaagatcccccgggttccgagttttccctggccgcttgatgggattcgaacctgcaaactcagcgctcgcccagcgcagcggccccgcctctcctcccctcccgccgcccggaggtcatgtgagcgcagtgccggagcggggcggggcgaggcggcggcgcgcagtgcctactagcaattgtagtccttgccccaccttggcctggcgaagatcccgcccctggaactacgctcccgtcgtgctccgcggctccaggcgragacgaggcggggtgaggtgggttgggccgggccggttgctaagacttggcgaagcgctgcgctcgcgcccggatccctcaggtaagcgcgcggccccgaggtctcgggttctccaggctcagacttccccagagggggagtaggggctgacatggggggtctcggcggtgaggggcgccggccgtttgtggggagaaaacggggggcccaggccagcctcgcgcgcgtctcgggcgggccggtgggcgacgcggggaggcggcgcgaatgcgcgtgcgcgcgcgcgcgcggcgctggcctgggggaagcctcaggaccgcgctcccccgggcctagcgcctttctgcgcgtgtgcgcccttatggtcggt

SEQ ID NO: 922734 - DNA, 737 bp, Homo sapiens
ccggagtgcagtaacaggcagaactggaacctggccccatcccggactcaggggacgggtgtcatataccccctctgcctcatccttcccactctgctaaccttccaaagatcccccgggttccgagttttccctggccgcttgatgggattcgaacctgcaaactcagcgctcgcccagcgcagcggccccgcctctcctcccctcccgccgcccggaggtcatgtgagcgcagtgccggagcggggcggggcgaggcggcggcgcgcagtgcctactagcaattgtagtccttgccccaccttggcctggcgaagatcccgcccctggaactacgctcccgtcgtgctccgcggctccaggcggagacgaggcggggtgaggtgggttgggccgggccggttgctaagacttggcgaagcgctgcgctcgcgcccggatccctcaggtaagcgcgcggccccgaggtctcgggttctccaggctcagacttccccagagggggagtaggggctgacatggggggtctcggcggtgaggggcgccggccgtttgtggggagaaaacgsggggcccaggccagcctcgcgcgcgtctcgggcgggccggtgggcgacgcggggaggcggcgcgaatgcgcgtgcgcgcgcgcgcgcggcgctggcctgggggaagcctcaggaccgcgctcccccgggcctagcgcctttctgcgcgtgtgcgcccttatggtcggt

SEQ ID NO: 922735 - DNA, 712 bp, Homo sapiens
ctcaccccatctacctgagcttccctgggtgaagaaaaggcagggaaggagggtcggtgcccacagggagcagtttaccctttcaggagctcatgcagatgagagttggaaaactctccttgggtgtgaggagctggagaaagatgttgagatcccggagaggtggcacctctgtctacacaggtaacaaaggaatggggtcttaggattcgaatcacagcaggagaagaggaaggartttgtcgggcatgacggcatgcgcctgtaatcccagcactttgggaggccaaggtcggaggattgcttgagtccaggagtttgagagcagcctgggcaacatggtgaaagctagtctccactaaaaatactaaacattagtgggtcatggtggtgcatgcctgtggtctcacctactcaggaggctcaggtgggaggatcacctgcgactcagaggtggagcccgcagtcagctaaaatcacgccactgcactccagtgtggaccatcggagtgagacgctgtctcaataaaataaatcagtaaataagacaaatagaaaaattaaaaatgaaaaaaggaggaaactgttttatttttcctagtagatcttgaaactctcacatcatgtcctacaatctcccttcttgcagaacacagaacccattccctgtggagctggttgggtggattgaaagtggggctgccctgagata

SEQ ID NO: 922736 - DNA, 759 bp, Homo sapiens
tttacttttcttctcttacaaaatccaggcatttaagaaaaatctctgtcagtgtgctgactgaccatgaagataacaaaacataggcttctggaaccacacataacaaggaatatagttttttcaaaacaatttggaaaagtcactaaacaaatgaacaactgctgccttcatcaaacaacaacaacaacccttcatgtagaaggcagaatttgatttccaaaattgccacattacrgtattcaaaatgtccagttctcaacaaaaaattatgaagcacacaaaaaatagaaagtatgacccattcatgggggaaaaaaatgataaagaccattcctgaggaagcccagatgttgaatttactaagcaaagactttaaattaactggcttaaagatgctcaaagaattaaaggaaaccatgagtaaataagtaaatgacattaggcaaactatatataaaagagtaagaaatatcaataaaggaatagaaattatttttttttaaaaagaacacagtagaaataatggagatgaaaaatataagagattaaattaaaaattcagaagaggggctcaggcaaaagaaatgtttatcaaacttgaagacagaacaattatacttacccagtcttatgaacagacaaaaaaaattaatgaagcaaaataaacagagtctacaggacttataggacatcatcaagtgcaccaacatacacattatgggttacagaaacagaaaagagagaaatgaagaaaca

SEQ ID NO: 922737 - DNA, 627 bp, Homo sapiens
taagagaaaacattatgacaatacaagcttcctaaatagaatgtggtaagacatgttgaaatgtacaaataccaagtatgggccaggtgtggtggctcacgtctgtaatcccagtactttgggaggccaaggcaggtggatcacttgaggtcaggagttcgagaccagcatgaccaacatggtgaaaccgaatctctactraaaaaatacaagcgcatgcctgtaatctcagctacttgggaggctgaagcaggagaatcgcttgaacctgggaggcggaggttgcagtgagctgagatcgcaccattgcactccagcctgggcaacaagagtgaaactccatctcaaaaaaaaaaaaaagaaatttccactctgttggtcttatgtacttctgatattcactgaggcagcctcttgccttgctatgctatctacttggaggatccaagttggctccccaggtaacagtggttgtttttattagagctcttataaagttgcacaggatgggccagggctggtggctcaaacctgtaatcccagcactttgggaggccaaggagggctgatcacctgagcctaggagttcgagaccagcctggccaacatggtgaaaccctgtctcca

SEQ ID NO: 922738 - DNA, 668 bp, Homo sapiens
acagtgagaccctgtctcaaaaaaaaaaaaggggggggcggtttgaagagcttccaggtaggtgaacaagaacacatcgaggtacctggaggggacatgaaagctctgtgtgccccttcccctgggcctcaccctacgtagctcttcatctggctgttcatctgtattctttgtaatatccttaataataaactgttaagtacaagtaaatactaaataataaactggtaagtataagtaaatgtttccctagttctgtgagccactatagcaaattattgaacatgagggagggaggcatgggaactcccaaygtgtagcgaagttggagtttctgaagtgaagatgtcttttttttttttttttggagacagggtctcgctttgtcactaagcctggagtgcaatggtgtgatcacggttcactgtaccctcgacatcctgggcacaagcaatcttcctgcctccgtctcctgagtagctgggactacaagcacaccatcacactttgctaattgtttttttactttttgtagaagtggggtatcactatgttgccaaggctgttctcgaactcctgggcccaagggatcttctcatctagcatcccaaagtgctgggagtacaggcatgagctaccatactgggccagggctgtctcactgagga

SEQ ID NO: 922739 - DNA, 668 bp, Homo sapiens
acagtgagaccctgtctcaaaaaaaaaaaaggggggggcggtttgaagagcttccaggtaggtgaacaagaacacatcgaggtacctggaggggacatgaaagctctgtgtgccccttcccctgggcctcaccctacgtagctcttcatctggctgttcatctgtattctttgtaatatccttaataataaactgttaagtacaagtaaatactaaataataaactggtaagtataagtaaatgtttccctagttctgtgagccactatagcaaattattgaacatgagggagggaggcatgggaactcccaatgtgtagcgaagttggagtttctgaagkgaagatgtcttttttttttttttttggagacagggtctcgctttgtcactaagcctggagtgcaatggtgtgatcacggttcactgtaccctcgacatcctgggcacaagcaatcttcctgcctccgtctcctgagtagctgggactacaagcacaccatcacactttgctaattgtttttttactttttgtagaagtggggtatcactatgttgccaaggctgttctcgaactcctgggcccaagggatcttctcatctagcatcccaaagtgctgggagtacaggcatgagctaccatactgggccagggctgtctcactgagga

SEQ ID NO: 922740 - DNA, 591 bp, Homo sapiens
gaaaagctgtaggtgacagcataaccagcagagcagtaggggaaggctataagtgggtgttactggaagcccatctgcagaactctccaattattaggcagggtcttcaggcaaaggagctatggtggtgcctcagggaagcacctcagttgagcatctgagsctgcactgcaagtgagtgtggtaaggcagggacctggggagaggccagcagacaagggggtgctcagataagactagcctcatcccacaggtaagatagccctgttctgtacaagtccaacagtcaataaaggccaaagacacctagagaagcatggtaaactttggaggatgggcatccctggccattttccactacagccattcccacaccaaatccactgccgaatcccttccaactctccaagcaactatctctgccagctcaaatgtccgtggggattatggggtctcctgcagctaggaatctacaggtccatggcaagagtgggctatcccatgcctgtttaactcaccccacctctaggggccgtctggggccaggaatgagtcctgtttcttggcaaccccatgcagggttcccagctt

SEQ ID NO: 922741 - DNA, 627 bp, Homo sapiens
tgtgtgtgtgtggtttttttagggttttttttctttttttagacggagtattgctctatcgcccaggctggagtgcagtggcgcgatctcggctcactgcaacctccgcctcccgggttcaagtgactcttctgcctcagcctcccaaatagctgggaatacaggcacttgccaccatgcctggctaatttttgcatttttartaaagacagggtttcaccatattgcacaggctggtcttgaactcctgaccttgtgatccgcccacctcagcctcccaaaatgctgggatcacaggtgtgagccaccatgcctggcaattctgtgtttttttctccccttatacaagagataactttggttggtacccagatgagagtttctcaagtttcctgatacttggatgaaagcaataggaggtctggtgactcaaacagataaagtaattgttttcattttatatggccattcaaaaaacagatgaagcagtcatgatccttactatccaggaacatgtctagactaacaactggatacatgggtgaattaagcattatatggttggtacaatgaatagatgtgtccaaaaaaaattggggccactgttttatattgttacttctgata

SEQ ID NO: 922742 - DNA, 563 bp, Homo sapiens
ataccaactgtaagaaccttaaggattgcaaagtttaggcagaaaagggctttctttcatggggaggagcaaacaaaattagaagttggagacggccggatgctgtggctcacacctgtaatctcagcactttgggaggccgaggcaggcggatcatgaggtcaggagatggagaccatcctggctaacatggtgaaaccccgtctctactaaaaatacaaaaaaatcagccgggcgtggtcacgggcgcctgtagtcccagctactcgggaggctgaggcaggagaatggcgtaaacccaggaggyggagctggcagtgagcctagatcgcgccactgcactccagcctgggtgacagggccagattccatcttaaaaaaaaaaaaaagaagttggaggtgactgacaaatgaagggtgaaataatcagattttagatcagagaatgttttaccctgaagtcagcatgttcttaggagggacataaaatggagttgtatattggctcagattgagggtagctccaagttcaggagcctgtgaaaaattttatttagaccact

SEQ ID NO: 922743 - DNA, 701 bp, Homo sapiens
gtgcctgcatattgtgcagaaccatctgtgaaccaggctctagtcttctcttcctctgccaactgatcatagggaactcctcatgaggccatcagtgcaggctgtgggagagaaggcagggtggcaggagtggagaccatgggcatttgagccacttcctcatgtaacttacttatgccttcaggacgtgctcaagcccartcacatttatatcacttccattcgatgatggaatgctgctgtgcatgacccactttatggatagatgggtcagaaagcacccagttcatggtaggcagttcaggtcacatggtgacttcatgacccatagtcaaatgttcagtttccaccaaagcccagtaacaggccaagagctgtctctcaaaaggagagtagttatctgcagaagatggcagggccttgctccaaaatcctagtggcctctgctgtgattagcctatggggccctgctgtaggctccaaacagcacccctatctgccactgacaactccagcaccgttggatctgctgggtcatatggcccaagtgacagagcagcttgcatagcagcctggacctgttgcagagccctctcctgttctggaccccactcaaagctgacagcctttcgggtcacttgataaatggaccagagtaacacatcaaaatgaggaatgtgttgcctccaaaatccaaatag

SEQ ID NO: 922744 - DNA, 874 bp, Homo sapiens
aaatgttcagtttccaccaaagcccagtaacaggccaagagctgtctctcaaaaggagagtagttatctgcagaagatggcagggccttgctccaaaatcctagtggcctctgctgtgattagcctatggggccctgctgtaggctccaaacagcacccctatctgccactgacaactccagcaccgttggatctgctgggtcatatggcccaagtgacagagcagcttgcatagcagcctggacctgttgcagagccctctcctgttctggaccccactcaaagctgacagcctttcgggtcacttgataaatggaccagagtaacacatcaaaatgaggaatgtgttgcctccaaaatccaaataggccccctaggcattgtgcctctttcttggttgcaggaggggccaaatgcagcaacttgtcctttaccttagaaggaatatcttgacaggctgtacaccactggacccttagaaattttactgaggtagaaggtatctgaattttagtcggattgatttttcattctctggcrtgcaaatgttttcaccagtaagtccaatatgtttgctacttcctgctcactggatccaatcagcataaggtcatcaatgtaatggaccagtgtgatatcttgcagaagcaaaaagcaatcaaggtctctccgaataagattatgacacaaagccagagagttgatataccccctgaggtaggacagtaaatgtgtattgctggtcttgccagatgaaggcaaattgcttctggtgggccttatggacagaaatggagaaaaaggcatttgccaagtcaatggctgcataccaggtaccaggagatgtgttaatttgctcaagcaatgaaactac

SEQ ID NO: 922745 - DNA, 588 bp, Homo sapiens
tggttctgggctttttttggttggtaagctatttattactaccttaatttcagaacttgttattggtctattcaggggtccattttcttcatggttcagtgttgggagggtgtatgtgttcaggaatttaccagtttcttcttggttttctagtttatacgcacagaggtatttacagtattctctgatggttgtctgtatttctgtggcattagtagtgatattrcctttatcatttctgactgtgtctgtttgattcttctctcttttcttctttattagtctagctagtggtctatttttttttttttccaaaaaaagcagctcccagattcattgattttttaaggggttttcatgtctatctccttcagttctgctctgatcttggttatttcttgtcttctgctagctttgaggtttgtttgctcttggttctctagttcttttagttgtgttgttaggttaatttgagatcttcctagccttttgatgtgggcatttagtgccataaatttgcctcttaacactgatttacctgcatcccagatattacggagcattgtctctgttctcattggtttcaaa

SEQ ID NO: 922746 - DNA, 541 bp, Homo sapiens
ctcttctgtagggctgctgtggtttgctggggaatcactccagaccctagttgcctcagttttcctttacctggaggtatcaccagtgaagactgtgaaacagtaaagacagcagcctgctcctttctcttggagctccatcccagggtgggactgacctgttgcgggcttagacacttctgtaggaggtatctggagactcttacttggaggtcacactcagtcaggagggacgggatygggaacccacttaaagaagcagtctggctgattattggtagagcaagtgtgctgcattgtggagaactctttcatgtttagaccacctggactctcaacagccagcaggctggaaaggctgagtcaactgaactgcacagacctcaaccacccctcctcccaggaactccatcccaaggagatatcagagttctgtccatataaccctggctggacttgctgaaattcccacagggaggccccacccagtgaggagggatggattggtgtcccacttaaagaagcagtctggccacaatct

SEQ ID NO: 922747 - DNA, 541 bp, Homo sapiens
ctcttctgtagggctgctgtggtttgctggggaatcactccagaccctagttgcctcagttttcctttacctggaggtatcaccagtgaagactgtgaaacagtaaagacagcagcctgctcctttctcttggagctccatcccagggtgggactgacctgttgcgggcttagacacttctgtaggaggtatctggagactcttacttggaggtcacactcagtcaggagggacgggatcgggaacccacttaaagaagcagtctggytgattattggtagagcaagtgtgctgcattgtggagaactctttcatgtttagaccacctggactctcaacagccagcaggctggaaaggctgagtcaactgaactgcacagacctcaaccacccctcctcccaggaactccatcccaaggagatatcagagttctgtccatataaccctggctggacttgctgaaattcccacagggaggccccacccagtgaggagggatggattggtgtcccacttaaagaagcagtctggccacaatct

SEQ ID NO: 922748 - DNA, 570 bp, Homo sapiens
aggccttgagcttctgggggctgagctccccctctagccctagagtgaattgggattggtctcggccattcatagtcattttactccccttgttggtggctagtttaagattgtgtgatggttactgttgtgtcaacttgactgtgccatgaggcatctggatatttgggtaaactttatttctgggtgagtctgtgatggtgtttccaggtgagattagcmtgggaattggtagactgagtgaagcagattgccctccccaatgtggatgggcctcatccaatctgttgaaggcctgattagaacaaaaggctgagcaagagagaatttgctctctctgcctgcctgactttgggctgggacgtctctcttctgctttggactcatgctagaacttaacatcattagctctcctgaatctcaggcctttgcactgcagatctggggacatttcagcctccataatcatgtaagccaattctttattttatatatatacacacacacacaaacacatacacacttgagtgtatgtacataaatatatctatctcctattagttctgtttc

SEQ ID NO: 922749 - DNA, 570 bp, Homo sapiens
aggccttgagcttctgggggctgagctccccctctagccctagagtgaattgggattggtctcggccattcatagtcattttactccccttgttggtggctagtttaagattgtgtgatggttactgttgtgtcaacttgactgtgccatgaggcatctggatatttgggtaaactttatttctgggtgagtctgtgatggtgtttccaggtgagattagcatgggaattggtagactgagtgaagcagattgccctccccaatgtggatgggcctcatccaatctgttgaaggcctgattagaacaaaaggctgagcaagagagaatttgctctctctgcctgcctgacttygggctgggacgtctctcttctgctttggactcatgctagaacttaacatcattagctctcctgaatctcaggcctttgcactgcagatctggggacatttcagcctccataatcatgtaagccaattctttattttatatatatacacacacacacaaacacatacacacttgagtgtatgtacataaatatatctatctcctattagttctgtttc

SEQ ID NO: 922750 - DNA, 560 bp, Homo sapiens
actaaaaactcaagtgtcttaatacatatttaaatggtcaaagtatattacatacataggagattagagagcagcaagatgaaactgggtaaaatctgggcagagatctggtatctaagaaagtggggaatactgtttttataacaaaaataaactacccttgtggaactgaaagcaaacttctgtgtgcattttttagttaatctctrcagtttttataacatttacaagaaagtgggcagctatcattttatgtaaatcaatgtttaacatgctgacactctgcagttaagtttaaatagcctggtcaaacgtagatagagttgtgtgtgtggtttggggaattagactcttcatagtcatacccataaatctattttctatttaacaagatgtctacacacagtgtgtgctagatagcaccaacaattagtctctcctatcaaaagaaccacataggtcagttgcagtggctcacacctgtaataccagcactttgggaggccacgttgggaggatcacttaaggccaggagttagacaccagcctgggaacatagc

SEQ ID NO: 922751 - DNA, 560 bp, Homo sapiens
actaaaaactcaagtgtcttaatacatatttaaatggtcaaagtatattacatacataggagattagagagcagcaagatgaaactgggtaaaatctgggcagagatctggtatctaagaaagtggggaatactgtttttataacaaaaataaactacccttgtggaactgaaagcaaacttctgtgtgcattttttagttaatctctgcagtttttataacatttacaagaaagtgggcagctatcattttatgtaaatcaatgtttaacatgctgacactctgcagttaagtttaaatagcctggtcaaacgtakatagagttgtgtgtgtggtttggggaattagactcttcatagtcatacccataaatctattttctatttaacaagatgtctacacacagtgtgtgctagatagcaccaacaattagtctctcctatcaaaagaaccacataggtcagttgcagtggctcacacctgtaataccagcactttgggaggccacgttgggaggatcacttaaggccaggagttagacaccagcctgggaacatagc

SEQ ID NO: 922752 - DNA, 628 bp, Homo sapiens
ccccagaaaatggggttttcttttctactacatggtcaggctgcaaattttccaaacctttatgttctgcttcacttctaaacctaagttccaatttcagaccatatcttcgtgaatgcacatgactgaacgctttcagaatcagccaagtcaccactaggatgctttgctgcttagaaattttcttctgccaaataccctaaatcatctcaaagttcatcagttctctagggcaggggtaaaatgctgccagtctttttgctaaagcatagcaaaaataacctttgctccagttcccaataagttcctcatctctgggaccatttcagcctggacttcattgtccacgtcactatcagcattttggtcaaaagtattcaaaacaagtctctasgacgttccaaactttcctatatcttccagttttcttctgagccctccaaactgttctaaccactgcctgttacccagttccaaagtcacttccgcattttcagattatctttatagcagtacccaaccctgccagtaccaattctctgtattagtcagtttttacactactataaagaatatctgagactgggtaatttataagggaggtttaatttactcatagttctgcata

SEQ ID NO: 922753 - DNA, 620 bp, Homo sapiens
tcctccccagaaaatggggttttcttttctactacatggtcaggctgcaaattttccaaacctttatgttctgcttcacttctaaacctaagttccaatttcagaccatatcttcgtgaatgcacatgactgaacgctttcagaatcagccaagtcaccactaggatgctttgctgcttagaaattttcttctgccaaataccctaaatcatctcaaagttcatcagttctctagggcaggggtaaaatgctgccagtctttttgctaaagcatagcaaaaataacctttgctccagttcccaataagttcctcatctctgggaccatttcagcctggacttcattgtccacgtcactatcagcattttggtcaaaagtattcaaaacaagtctctacgacgttccaaacyttcctatatcttccagttttcttctgagccctccaaactgttctaaccactgcctgttacccagttccaaagtcacttccgcattttcagattatctttatagcagtacccaaccctgccagtaccaattctctgtattagtcagtttttacactactataaagaatatctgagactgggtaatttataagggaggtttaatttactca

SEQ ID NO: 922754 - DNA, 535 bp, Homo sapiens
ttatagcagtgccccagtattggtactaactttctgtgttagtctgttctcacactactataaagaacacctgagattgggtaatatatgaataatagaggtttaattgactcacagttctgcaggcttaacaggaagcaccactaggaggccttaggagacttacaatcatggcggaaggcgaaggggaagcaagcacatccttaccttggcaaggcaggagagagagagcaagagaggaagttccacacacttttaaatcatcagmtctcatgagaattcactcaccatcatgagaacagcatggcggaaatctgcccccatgatctggtcatctcccaacaggcgcctcccctgacatgtggagattacaatttgacatgagatttgaatggggatacagagacaaaccatcttattgggggtcaaatttcagtatgagttttggtgaggacaaacaaatcatttccaaacgatagtctatggctatctaattaagtcagaaccatttatttaaatgcttattctttttaca

SEQ ID NO: 922755 - DNA, 533 bp, Homo sapiens
ctggaactataggcacacgccacctatagtctggctaatttttaaatatttttagagacaagggtcttactttgttgcccaggctggtcttgaactcctggccctaagtgatcctcctgccttggcctcccaaaatgctgggattagaggtgtgagycactgcacccagcccgctaactttttatattattcgttgagttaggatctctctgtgttgcccaggctagtcttgaactcctgggctcaagaaatcctcctgccttggcccctcaaagtgctgggattacaggtgtgagccaccacactggagccattatttattattattttgtttgtttgtttgttttgaaacagggttgcactttgttgcccaggttggagtacagcagtgtgatgttggctcactgcaacctctgcctccctggttcaagcaatcctcccacctcagcctcctgagtagctgggacaacaggtgcatgcccagctaattttgtatattttttgtagacacaaggttgcaccatattgcccag

SEQ ID NO: 922756 - DNA, 430 bp, Homo sapiens
ctggggtcaattatcttctgaatgaataaacctccaactactctctggtctggaccaccatcccctccttgcccccgcaaaaaagttcctggccagtggctcacctctgtaatcgcagcactttgggggactgggatgagcggaccacctgaactcaggagttcaagaccagcctgggcaacatggtgaaaccctrtctctacaaaaaattaaaaaattagccaggcgtggtggcatgtgcctgtagtcccagctactcaggaggctgagctgggaggattgcttgagcccagaagcttgaggctgcagtgagccgtgatcatgccattgcactccagcctggatgacagagcaagaccctgtctgaaaaaataaataaataaaaattaaaaatcaggtagttgccaggcacagtggctcacatctataa

SEQ ID NO: 922757 - DNA, 430 bp, Homo sapiens
ctggggtcaattatcttctgaatgaataaacctccaactactctctggtctggaccaccatcccctccttgcccccgcaaaaaagttcctggccagtggctcacctctgtaatcgcagcactttgggggactgggatgagcggaccacctgaactcaggagttcaagaccagcctgggcaacatggtgaaaccctatctctacaaaaaattaaaaaattagccaggcgtggtggcatgtgcctgtagtcccagctactcaggaggctgagctgggaggattgcttgagcccagragcttgaggctgcagtgagccgtgatcatgccattgcactccagcctggatgacagagcaagaccctgtctgaaaaaataaataaataaaaattaaaaatcaggtagttgccaggcacagtggctcacatctataa

SEQ ID NO: 922758 - DNA, 631 bp, Homo sapiens
cactgcatacatcatttgttccatgaaatttattgaagacgcctttgtgtaagactgtcctagtaacccttttccctcccttcaggcggaggtgtggttctggagcaatggagtggtgacactttgagggtattctttccactagagattgtttatttgttactttcttttttcttttcttttttttttttttttttttttttttaaaacggggtctcgttctgtcacccaggttgcagtgcaatggcacaatctcggctcactgcaacatctgcatcctgggttcaagcgcttytcatgcctcagcctcctgagtagctgggactacaggcacccgccaccatgcccagctaatttttgtatttttagtaaacacagggtttcatcatgttggtcaaactggtcttgaactcctgacctcgtgatgcgcccgccttggcctcccaaagtgctgggattacaggcgtgagccaacgtgcccggccaatttgttactttcttgaaaaacaaaattagatttgactccagggcaacataagatgtgagcctcttttaaatttgtaaagatggaatgggcattgggtaaattttacagatgaacgaactgaggctctgagaggttaaatatttt

SEQ ID NO: 922759 - DNA, 490 bp, Homo sapiens
catggtgacagtggagaccaccttcagtgcctggactttaaccctcatctgttagtaacaaggcacatggctacctccccactcaggtggtatcacagggggcctagaagagacctaaatattttcccatctcctgttgttaatagggccactctcacarcagtctctgtaaataccacataggagacaaaacacccactcctacctagaagaaataagaagccccgtccccacccctcaggtgttaacagactctgagtggggaacttggacttctacctctacctggaagtaacaaagtgatgttcctgtttcccatgccataccagtgtcagagaaagctacctaaaacagaaagcttaaataagatctaaagtgtcatcatgtaatatgaaaatatctaggtttccattaaaaaaatcactactcattccaagtgccgggaagatctcaaactgaatttaaaaaaatagattccaacactgagaag

SEQ ID NO: 922760 - DNA, 613 bp, Homo sapiens
gggggtgcagggcatcatgtggtgaggggctgagcatgctaacttgccatcttaagtctcttttcttctttttataaggtcaccaattcccctcccatgataactcatcaatccactaatttattaatccattaatccattaatggtgtaatccaatcacctttttttttttttttttttttgagacagagtcttgctctgtcacccaggcttgagtgcagtggtgcgatctaagctcactgcaacctctgcttcctgggttcatgcgattctcctgcctcagcctcccaagtagctgagattacaggcacrtgccaacacacctggctaatttttgtatttttagtagagatggggtttcgccattttggccaggctgttcttgaactcctgacctcaggtgatccacccgcctcagcctcccaaagtgttgggattacaggcgtgagccacagcgcccggccttccaatcacctcttaaaggccccacttctcaatactgccattggggattaagtttcaataagagttttagaggagacattcaaaccacagcatttacccagagaaatgagaagttatatttacacaaaaacctgtacatgaatgttca

SEQ ID NO: 922761 - DNA, 613 bp, Homo sapiens
gggggtgcagggcatcatgtggtgaggggctgagcatgctaacttgccatcttaagtctcttttcttctttttataaggtcaccaattcccctcccatgataactcatcaatccactaatttattaatccattaatccattaatggtgtaatccaatcacctttttttttttttttttttttgagacagagtcttgctctgtcacccaggcttgagtgcagtggtgcgatctaagctcactgcaacctctgcttcctgggttcatgcgattctcctgcctcagcctcccaagtagctgagattacaggcacatgccaacacacctggctaatttttgtatttttagtagagatggggtttcgccattttggccaggctgttcttgaactcctgacctcaggtgatccacccgcctcagcctcccaaagtgttgggattacaggcgtgagccacagygcccggccttccaatcacctcttaaaggccccacttctcaatactgccattggggattaagtttcaataagagttttagaggagacattcaaaccacagcatttacccagagaaatgagaagttatatttacacaaaaacctgtacatgaatgttca

SEQ ID NO: 922762 - DNA, 882 bp, Homo sapiens
ttacttctaggacattcccagttatatttattgacaactgatagagcttttgatattgataacttaaatgtaaacataattccatattaaatttggaggtattttaatgaattttgtatttgtccattttcacactgctataaagagctacttgagactgggtaatttataaagaaaaaaggctggggaggcctcaggaaacttacaatcatggtggaaggtaaaaggcaagcaagtaccttctttacaaggcagcagaagaggtggtggtggtggtggggatctgccaaacacttttaaaccatcagatcttgagaactcactcattatcatgagaacagcataggggaaaccgcccctatgatctaatcaccacccaccaggaccttccctcaacacatgaggattacaattagagatgacatttaggtggggacacagagccaaaccatatcatttccatctctggttcctcccaaatctcatgtctttctcacatttcagaatacaatcatgctttccaacagtcccccaaagtctaaactcattccagcrttaacccaaaagtataagtccaaagtctcgcctgagacaaggcaagtccctttccacctatgagcacataaaatcaaaagcaagtaagttacttccaagatacaataaaagtacaagaattaggtaagttctcccattacaaatgggagaaatagaccaataaaaggggccataggccccatgcaagtccaaaacccagtggggcagtcattaaatattaaagctctgaaatgatctcccttgactccatgtctcacatccaaggcatgatgatacaaggaaagggtggtctttcaaggagttgggcagctccactcctgtggctct

SEQ ID NO: 922763 - DNA, 582 bp, Homo sapiens
tcggattaggaaataaaagacatggatagatattccattaaagaggatgtataaatggtaaatacgtccattaaaagatgttcaacatcattagccactggggaaatccaaatttttaaaaccacaatgagatgtcactayatgtccagatgaatggctaatactagtgacaacaccaattgctggtgaggatgcagagaaactggatcactcacacattgctggtgggaatataaaatggcacagccgctctagaaaacagtttggtaggtcaggtgcagtggctcacgcctgtaatcccagcactttgggaggccgagacaggcggatcacctgagcccgaggtcatgagttcaagaccagcctcactaacatggtgaaaccctgtctctactaaaaatataaaaattagtcagtcgtcgcggcaggtgcctataatcccagctactcgggaggctgaagcaggagaatcgcttgaacccgggagatggaggttgcagtgagccgaggttgtgctattgcactccagcctgggcgacaagagcgaaagtccgtctcaaaaaaaaaaaaaaaatagtttgg

SEQ ID NO: 922764 - DNA, 587 bp, Homo sapiens
ggtatcacttaaccacatttacatcattttagtgggaacatgcattccaaatccctagtaatatttatgaacaaccatggaaaggttgaactgtctaccctgagagactcagcttagcctcctgcatcagtattccaggtgacgtctgaagtgaaatggtacgaaraatagaaagaaaggtataggagtcagaagagagttgggggatagatgggtctttccatatctggtctgaccattcatttgtgtttggcatataaaaacagaatagaaacaagataacaccttagcgtttcaggtccttctggaaagcaccatcccatatatttccatggtggggcaaaacccaggaatgaaatgtgaaagactaggactcaacactgatctcactccgtttgcccctcttcaactaatataatatgctgctgagcttggaacacctctgcaggaatgcgaaatgatttcctagttttacctgccacattgcaacaatattttcaattattggctaaactgcaaatgccccacgagtcatttaaataaatctcacatggatgaaatagtcaattgtgttctctgagcaattc

SEQ ID NO: 922765 - DNA, 587 bp, Homo sapiens
ggtatcacttaaccacatttacatcattttagtgggaacatgcattccaaatccctagtaatatttatgaacaaccatggaaaggttgaactgtctaccctgagagactcagcttagcctcctgcatcagtattccaggtgacgtctgaagtgaaatggtacgaagaatagaaagaaaggtataggagtcagaagagagttgggggatagatgggtctttccatatctggtctgaccattcatttgtgtttggcatataaaaacagaatagaaacaagataacaccttagcgtttcaggtccttctggaaagcaccatcccatatatttccatggtggggcaaaacccaggaatgaaatgtgaaagactagractcaacactgatctcactccgtttgcccctcttcaactaatataatatgctgctgagcttggaacacctctgcaggaatgcgaaatgatttcctagttttacctgccacattgcaacaatattttcaattattggctaaactgcaaatgccccacgagtcatttaaataaatctcacatggatgaaatagtcaattgtgttctctgagcaattc

SEQ ID NO: 922766 - DNA, 619 bp, Homo sapiens
ccttgtgcttcagggagaatgggtccctcatctgccccagggaaaggagctcaatccgtccagcaaatcaatgttgattttgttcccttggatacttgagtgggcatgtgacacagatctggtcaaggaggcttgaaggaaactccactgcagaaaggagacttctggaaaggctgtgctcattcttagcaagggrcacgtgaaagggaagctctctctctctctctctctctctctctgacccttggatatttctgtgtgaggatgtgatggctggagctgctgacgctattttgtccctctaaggggaggaaatgaagtgctggccatggcaggtggaaaaacatctgagtcctcaaggacatcattgagcttcagaattgtccaaacttgcaattactctgttttcagacttttttctgcaggagataatatatgtccttattgttgagccactttctgatggattttcttttccccacagccaatagcatcttaactgtattggtcaggttaagttaggtcgtgcatgatgacaaccatgctcacaccccaggggttttatacaagttaatttctcactcaggtgccatgccccttggggattggcaggggagct

SEQ ID NO: 922767 - DNA, 604 bp, Homo sapiens
cgattcagtcatatcttcaggttccacttctcttgctccttctaccacatctgtggttactttctttattgaaggcttgaactcctcaaagtcatccatgaggattggaatcaacttcttccaaactcctgttaatgttgatatttgcccccctcccatgaatcacaaatgttcttaatggcatctagaatggtgaatcctttctaggaggttttcagtatattttgcccagatccatcagaggaatcactatctttggcagctagagccttatgaaatgtatttcttaattaataaaacttgaatgtcaaaattattccttgatccctgagctgcagaatagttgtggtgttagcagacrtgaaaacaacattaatctccttgtacatctccatgacacctcttgaatgcctaggtacattgtcaatgattagtaatgttttgaaatgtatcttttttttctcagcagtaggtctaaacagtctgaagagtgggcttaaaatattcagtaaaccatgctataaacagatgtgttgtcatgcaggcttttttgttccatttgtagagcacgggctgagtagatttggcataattcgtaagagcc

SEQ ID NO: 922768 - DNA, 595 bp, Homo sapiens
atattagaataaatataaataatataagaaatcttcatttacctatcacccagcttcaacaattaacaatgcgctgccattttgtttgatccatgcccagtaacttcattttttttctcagtatttaaagcaaatcccaggcaccattctatttttcccatcaggatagatgtatctctcagtattaagaacttcctttttcaaaacataatcacaatactagcaayatgtccaacaataattccttgaaatcatttaatgtttagtctatgttaattttgcttttattgtttcaaatatgtcttttattgatttattttcatcaggatctaaacaaggaacacacattgaatttcacccttatgtctcctagaatcttatctataatattttccccttcctttattttactttgcccatgctgttaaaaggtaaactaaggcataaaataattttaaagagtatacttgaacaaacaacaattcataaatgaggcagcttcaaactgtaagtgctttggggtcttccatgaggggacacaagagaaaggcttttataggctgaacacagaaataaagcaaagaaaatatgtgat

SEQ ID NO: 922769 - DNA, 595 bp, Homo sapiens
atattagaataaatataaataatataagaaatcttcatttacctatcacccagcttcaacaattaacaatgcgctgccattttgtttgatccatgcccagtaacttcattttttttctcagtatttaaagcaaatcccaggcaccattctatttttcccatcaggatagatgtatctctcagtattaagaacttcctttttcaaaacataatcacaatactagcaacatgtccaacaataattccttgaaatcatttaatgtttagtctatgttaattttgcttttattgtttcaaatatgtcttttattgatttattttcatcaggatctaaacaaggaacacacattgaatttcacccttatgtctcctagaatcttatctataatattttccccttcctttattttactttgcccatgctgttaaaaggtaaactaaggcrtaaaataattttaaagagtatacttgaacaaacaacaattcataaatgaggcagcttcaaactgtaagtgctttggggtcttccatgaggggacacaagagaaaggcttttataggctgaacacagaaataaagcaaagaaaatatgtgat

SEQ ID NO: 922770 - DNA, 612 bp, Homo sapiens
gtgtcagtcggcccctactgggcggtgtctcccggttaggctacttgggggtcagggacccacttcaggaggcagtctgtccattctcagatctcaaactccatgctgggagaaccaccactgtcttcaaagctgtcagacaggggcgtttaaatctgcgaagtttctgctgccttttgttcagctatgccctgcccccagagttggagtctacagagtcaggcaggcctccttgagctctggtgggcttcacccagtgcaagcttcytggccgcttcgtttacctactcaagcctcagcaatggcggacacccctcccccagccttgctgccgccttgcagtttgatctcagactgctgtgctagcagtgagtgaggctttgtgggcatgggaccctctgagccaggggtgagatataatctcctggtgtgccatttgctaagaccactggaaaagtgcagtattagggtgggagtgtcccgattttccaggtactgtctgtcacggcttcccttggctaggaaagggaattccccgaacccttgtgcttccctggtgaggcaatgccccgccctgcttcagcttacactccgtaggctgcacccactgtc

SEQ ID NO: 922771 - DNA, 544 bp, Homo sapiens
taccctgcaaagccacaggagccgagctgcccaagaccatgggaacctacgtcttgcatcagcatgtcccggatgtgagacatggagtcaaaggagatcattttggagctttaagatttgactgccctgctggattttggacttgcatggggccctgtagcccctttgttttgggtaatttctcccatttggaatggctgtatttatccaaagtccgtacccccattatatctaggaagtaactaacttgcttttgtttttacaggctcataggcaaaagggacttgccttgtctcatatgagactttgaactgtggacttttgagataatgctaaaatgagttaagactttgggagactattgagaaggcatgactgtgttttgaaatgtgaggaaatkagatttggaaggggccggggcaaaatgaaacggtttggctctatgtccccaccaaatctcgaattctactcccataattcccatgtgttgtgggagggatccaatgagagataattgaatcatgggggcagtttctcccataat

SEQ ID NO: 922772 - DNA, 773 bp, Homo sapiens
aaccattagtatttgcccttaagttaacatattcaatacctgtgtgcgcacacaaactactttcctttaaagaagagtagtttgcttttttttttctcttctgtagttaggtggctcaaatgtcattgctacattaaaaaatatatcattccagtttaaacaccatagtgtgtatatagtatattttaaatatctatttaaaactacttttatgctgacagcaacctaattgtttaaatcataagttttttttttctgctgtgatttgatagtattacaaaaattggtggactactgaccaaatcctccctacttttttattttttactttatttatttatttatttttttggagatggggtctcgctctgtcgtccaggctggaatgcagcggcacgatctcggctcactgtgagctctacttcccaggttcacgccattctcctgcctcagcctcccgagtagatgggactacaggcgcccgccaccacgcccggctaattttttgtatttttagtagagacggggtttcaccrtgttagccaggatggtctcgatctcctgacctcgtgatccacccgccttggcctcacaaagtgctgggattacaggcgtaagccactgtgtccggccaatcctccctacttttttaaaccacattctttgggaaacattattttgacccacaaaagtgtaaaatgtctatagtgacatagctatttttaaagtttattcaaatgaaagttaattggttgtaatctttttattcttca

SEQ ID NO: 922773 - DNA, 653 bp, Homo sapiens
aaagaaaatattattgtacagttgtacaacatgttaatattttaaactaagtgttagtacaacagagtcaaaaagttaaaaattttaaagtttggccaggcgtggtggctcacgcctgtaatctcagcactttgggaggccaaggcaggcggaacatgaggtcaggagtttgagaccagcctggccaaaacagtgaaaccccgtctctactaagaatacaaaaaattagccaggcatggyggcaggcgcctgtaaatcgaggctgaggcaggagaactgcttgaacccgggaggcggaggtggcagtgagccgagattgtgccactgcactccagcccgggcgacagagggagactccatctcaaaaaaaaaaaaaaaaaaatttaaagtttatgaagtaaaaaagttacagtaagctaagctagggttaatttattattgcagataaattttataaatttagtgtagcctaaatgttcaacatttataagcatagactaacgtcctaggccttcacattcactcactactacctcacccacagcaacttccagtcctgcaagttccattcatggtaagtaccctatacaggagtgctttttaaaaaatatcttatactgcatttttagcatatcttttctattacttaccat

SEQ ID NO: 922774 - DNA, 551 bp, Homo sapiens
ttgtaaagtccatttttagtaacttttatgacatttctgtactactccattctaaaatacatccttatcccttctatgttatttctaactctggttaaaagcactgaaataaatgcccttgacttccttcttcatctctaaatttctttctttctccattctctttttctccaagactaaacttccatgtgtatacctgatgctaaccttgttcccttagctgcaaagacctgatttatgacaatagaaaccttgtctgtctcatctccagctactggaatgattgtatagcacatggtctatattttttaaacatgtattgaatgctgtattaattaatgaattatcctctttctggtgcctttccagttttwcccctgtccttctacaatgggttcttctgtaaatctacaaatacgtttaagtctttttccaatgaaaaaaaaaaaagactcatattttctcttgactatctttttaagatatttgctatgtctttctgtctaccatcaagcttcttttaagttttaagccacatcttcatcatttaa

SEQ ID NO: 922775 - DNA, 609 bp, Homo sapiens
caggcacatgccaccacgcccagctaatttttcgtacttttagtagagacaggttgtcgtccaggctgttcttaaactcctggagtcaagtaatccacctgcctcagccttccaaggtgctgggattacaagcgtgagccaccgcgcccagccaggtgtcatatcttaattagtgcattcccactatatggcactgtgattgctctataaatatttgttgaataaatgaatgaatattgccatcagatcaatgcctaaaagagttctaggaatactggagaatgggagtattggttaaaataacgatggcagttgacattctaagggaaaagggcaagtaaaagtagtatgaggggaaatggactatcagaaagcagcataattcatgtattcactcattcattcatttgacatttactatgggcaaggcaaataagataatcaagacatagtacctgtcctcrtagatctgtcttataatcaaaaggtgaaggtttgggggtggagtgttaagaactggtagaaaataggagtaagatactgtgtcactaaagagtaattctaaatctattgttaaaatataaggacagtttggaagaccacagccag

SEQ ID NO: 922776 - DNA, 580 bp, Homo sapiens
ggcatatagaaatgctactaatttttgtaacattggtttgaatggtttgaatataccatcccattttctcctggcctataaggttctgctgagaagtctgcttagtcttatggtattttttttttttttcttgagacrgagtctcgctctgtcgcccaggctggagtgtagtggcgcgctcttggcttactgcaagctccgcctgccaggttcacaccattctcccgcctcagcctcctgagtggctgggactacaggcacctgccaccacacctggctagttttgtttttgtatttttagtagagacagggtttcaccatgttagccaggatggtcttgatctcctgacctcatgatccacccgcctcagcctcccaaagtgctgggattacaagcataagccaccatgccaggccttatgggggttcttttataagtgataaaacattcttttcttgctgtttttagaattctctctttgtctttgacttttgacagtttgactataatgtgctgtggagaagatttttttagattatatggatttgcgtgtcgagttttctggatgtctaaatctct

SEQ ID NO: 922777 - DNA, 767 bp, Homo sapiens
agtgccatcaccatcaccaccaggaagctgattttgaaaaaaaaaaaaaatcaaatgtctatgggatcgagcctctagatctaattgtcaaagtacagaaattacatgggacaatgggacagatgaaatgacatcatgaggaagccatcagcaaaatccagacttgggaaaaccctacaggacaaaccacctggtttttccacatcataaaaagaaacagagggaacctgcaaagtacaagagacgtaagagccactttagcctattgcaacctgtggatttagctggatcctgcttcaaagaagcagtaaaaagaaagcacaggctgggtgcaatggctcacgctgtaatcccagcactttgggaggscaaggcgggcagatcacttgaggtcaggaattcaagaccagcctggccaacatggtgaaaccccgtctccactgaaaacacaaaaatcagccaggcgtggtggcaagcacctgtaatcccagctactcaggaggctgagccaggagaatcacttgaccacgtggggcagaggttacagtgagtcgagactgcatcactgcactccagtctgggtgacagagtaaaactccatctaaaaagaaaaaaagaaagcacaggacaaaaggcaaacacaaatgtcaactgcatatttgatattaggcattattatgtttagatgcgataatggtatcatggcacattttttaagaagcccttttctctagacatacacaaagaaatgttcaatgaatgaaatg

SEQ ID NO: 922778 - DNA, 847 bp, Homo sapiens
tgaaaccccatctctactaaaaatacaaacattattttgtatggtggtgtgcacctgtaatcccagctactcaggaggctgaggcaggagaatcgcttgaacctgggaggtggaggctgcagtgagctgagattgcaycactgcactccagcctgcgcaatagagaaaaaaaaagaaaagaataaagaatgatacaatgaactctggggactcaagggaaagagttgggggggtgagggataaaagactacacaccgggtacagtgtacactgctcaggtgatgggtgcaccaaaatttcagaaatcaaccactaaaattcatgtaaccacacaccacctgttccccaaaaacctattgaaattttaaaaaattaaattaaattaaaaattttttaaaagagaggtccaggggcagacttgtttgccccttctaccatggaggacactgcaggaaggcatcatctctgaggaggccaggcccttaccagacaccagatctgccagtgccttgatcttagatttcgtagcctgcagaactgtgagaaatattacaagccacccagtttatggcattatgttatagcaacccaaacagacaaacacaaatgattaaaaatgataaattgaacttcatgaaaataaaaatctttcactcttagtgaaatttaaaatacaagccacagactgacaatatttgcaaaatacatgtggtaaaggacttgtttccagagtatataaggaacccttacaactcaatagggagcagacaactcattttttaattaaacttttgtatctgatatcactgtaaatttgcatgccatcattaagaactacatcacagag

SEQ ID NO: 922779 - DNA, 650 bp, Homo sapiens
agcctaagggctgctctgcctatggagtagacattcttttgttcccttactttcttagtaaacttgctttcactttactctatggacttgccctgaattctctttttttttaattattatactttaatttctagggtacatgtgcacaatgtacaggtttgatacataggtatacatgtgccatgttggtttgctgcatccatcgactcatcatttacattaggtacttctcctaatgctatcccacccgcagccctccaccccctgacaggccccggtgtgtgggggtttgttccccgccctgtgtccaagtgatctcattgttcaattcccacctatgagtgagaacatacactgtttggttttctgtccttatgacagtttgctgagaatgatggtttccagcttcattcakgtccctataaagacacatgcacaggtatgtttattgaggcactattcacaatagcaaagacttggaaccaacccaaatgtccatcaatgatagactggattaagaaaatgtggcacatatacaccatggaatactatgcagccctgaattctttcttgtgcgagatccaagagtcctctcttggggtctggatctggacccctttctggtaacactcacgttcagaaactgattc

SEQ ID NO: 922780 - DNA, 601 bp, Homo sapiens
ttaagtctgtatgattccagaactgagctctgttcattatactaccctggcctggctcaaaaaaaaaaaaaaaaaaaaaaaaaaaagtcggggagggaggcgggcgggggctgaaaatcctcattctacaacacaatgggggagggagatgatggaaaacctaccaggtgaatataatgatgggtggcattcaatcagctaaactttytttataacatgaccattcccttgcttaaccccctccagtgattccccactgcatttaggataaaattcctaagtcctaaccatgatttgcaagactctgtaccatctagcctgtgcctaactctgcagccacatttgattctctgatccccagtttctgtccgcttttcagctatgagggtcttcctcttcctggtcagtgacacacgcttatgccaggtacttctagtaggaccatctgcctttatggaaggttccaccctctactctttgtctggcttcaagagacttgggtttttagaaaaacctttctaggccgggcgcggtggctcacgtctgaaatcccagcactttgggaggcccaggcgggcggatcaccatatcaggagatgga

SEQ ID NO: 922781 - DNA, 651 bp, Homo sapiens
tgttgaaaagattattccatcccattgaattatgttgaaacccttgttgcaaatcaattgaccatatattatgcttttttcccctctattctcaattctattcccttgatctctggctatatgtatgccagtgttatacatcctgattagggtaggattgtagtyagtttcaagtcaggaagtgtgagtcctccaactttgttcttccatttcaagacagatttggctattctgagtcccttgaattttttttttttaataagaatagtaggttcagtttttctatctttatagaaagccatcaggattttgatagggattacaattaatctatagattgatttggagagtattgtcatttgtattagtccattttgggcttgctataaagaaatacctgaggccagctaatttatacagaaaaagaggtttattttgggtcatggttctgcagactctacaggaagcatggtgctgtcatctgctgtcatctgctgttggcgagagcctcaggaagcttccaatcatggtggaaggcaaagggagagctgttgtatcacacggtgagagggagcaggagagatgccaggctcttttagaggaccaactctcgtgaactaacagaatgagagctcattaccttgggaaggg

SEQ ID NO: 922782 - DNA, 616 bp, Homo sapiens
catgtttataaggggattaagagagtgaaatatttgacagcatatttctgtttaaggaaattctgggtttactaaacttcccagagtttgactacaatttgacaaggtggctttagaaagttttttttttttaattttttattatacttttaagttctgggatacatgtgcagaacgtgcaggtttgttacataggtatacatgtgccatggtggtttgctgcacccatcaacccatcatctacattaggtatttctcctaatgctatccctccccttgccccccaccctctgtcaggccctggtgtgtgatgttcccctccctgtgtccatgtgttctcattgttcaactcccacttatgagygagaacatgtggtgtttggttttctgtccttgtgtcagtttgctgagaatgatggcttccggcttcatccacgtccctgcaaaggacatgatccttttttatggctgcatagtatgccatggtgtatatgtgctacattttctttatccagtctatcattgatgggcatttgagttggttccaagtctttgctgttgtgaacagtgccgcaataaacatacgtgggcatatgtctttatagtagaatgattt

SEQ ID NO: 922783 - DNA, 616 bp, Homo sapiens
catgtttataaggggattaagagagtgaaatatttgacagcatatttctgtttaaggaaattctgggtttactaaacttcccagagtttgactacaatttgacaaggtggctttagaaagttttttttttttaattttttattatacttttaagttctgggatacatgtgcagaacgtgcaggtttgttacataggtatacatgtgccatggtggtttgctgcacccatcaacccatcatctacattaggtatttctcctaatgctatccctccccttgccccccaccctctgtcaggccctggtgtgtgatgttcccctccctgtgtccatgtgttctcattgttcaactcccacttatgagtgagaacatgtggtgtttggttttctgtccttgtgtcagtttgctgagaatgatggcttccggcttcatccaygtccctgcaaaggacatgatccttttttatggctgcatagtatgccatggtgtatatgtgctacattttctttatccagtctatcattgatgggcatttgagttggttccaagtctttgctgttgtgaacagtgccgcaataaacatacgtgggcatatgtctttatagtagaatgattt

SEQ ID NO: 922784 - DNA, 632 bp, Homo sapiens
agcatggctaggataaaaggaggcagaggaatgtggaaggactagactggatcagtcttcaggcctttatcttactcctgtgcttcctgccctcaaacattgaactccaagttctacagcttttggattcttggaccagtggtttgccagggattctcaggtgtttggccatagactgaaggctgtactgccggcttccctacttttgaggttttgggactcggactggcctccttgctcctcatcttgcagacagcctatcgtaggacttcatcttgtgatcgtgtgagtcaatactccttaataaactccctctcggctgtgcgcagtggctcacacctgtaatcccagtactttgggaggccaagagttcaagaccagcctgaccagcatggtgaaacyccgtctctactaaaactacaaaaattagccagccgggtgtggtggcacgcgcctgtaatcccagctactcgggaggctgaagcaggagaattgcttgaacccgggaggtggaggttgcagtgagccgagatcgtgccactgcactccagcctgggcgacagagcaagactccgtctcaaaaaaaaccaaaaaaacaaaaaatctctctttcatatatacatctattctat

SEQ ID NO: 922785 - DNA, 653 bp, Homo sapiens
ggagtggtaccctgcagagccacagggatggagctgcccaaggccttgggagcccacccctttcatcagtgtgacctggatgtgagacatgaattcaaaggagattattttgaagtttgaaatttggggctggcaggcatcctgtagcccctttgttttggtcaatttctcccttttggaatgggagcatttacccaatgctatatccccatggtatcctgaaagtaactagcttgtttttcattttacaggcacataggcagaagggacttgccttgtctcaaacgagactttggacttggacttttgagttaatgctggaatgagttaagagtttgtgggactgttgagaaggctcgactgtgttttaaaaygtgagaaagacataagatttgggagaggccaggggcagaatgatatgatttggctctgtgcccctacccaaatctcatgttgaattataatccccaatgttgtaggtggaccaggtgctaggtgattgggccagttgtgaggtgactggaccatgaggagctgtttctaatggtttagcaccatccccacagtcctgtctcataatagagttctcatgacatccggttatttaaaagtgtgtagcacctcccttttcagtctcttcctcctgctcccgc

SEQ ID NO: 922786 - DNA, 573 bp, Homo sapiens
catcgtacctaatcatggtggtgtcttccaagtttctccaccctaaattgactattttttctctttgtatttccctagtgttttgtagggagatatttctctactcaccttcctgtctgctttgcaagttcatgcaatgttcattaccctagaggtccagtgacatcctgagcattctatggctgtgtggaaattacaacatggaaggttttagggaccacagctacaaaccttttgaacttgaacgtgtctgagagtcactttttgaygatgtttcttggaagaaaattatctcgtgttgaattcagtgggctcgtgcccatgcattactttgaagtcatctgttggccttcctggaggaggacatgatgaaatgaagcccaagctttgaggaggattttttttcgctttgctcccagtagtcttcctgtttttcacactggttagatggccttgggctactgtcactcatggcttcctggggactggctcttgtcatgagattgttttggttatcctaattcctgaccttttgaattcagttgaagttgttttctttctcaaccttgcaac

SEQ ID NO: 922787 - DNA, 850 bp, Homo sapiens
ctcagcactctggcagaagagctggtttgtaagaggaatagcagagaaggccagctagctcggcacagaggaggccgtgtaagacaaagaacctcaatatgctcccctcttccacctcccagacaccttgccaattgcagatcagcattcatgaggcttttctgagccaggtctgacaacggatcaaaccacactcaagtaatgccatcatctttccgggcaagatgactgcccttgctgtaataacagctaacacaatcatttcacctaacatgtattgagtagtacttagaacacgggctatatattttgtggacgttgcattacacagcttatttctcatcatgacgtacatgctataatgagatccatgtttcagaggaggaaactcattctgcaatggttagtatcatcaaaggaaaacagcctggacacatatgaaagacagaaagacagattttattcagatgattgcagtaagggacagagactctaatatgaattgagctcaactccaccaaagaaaaagatgactgaggttttctttttttytcttgttaagttggagtctcgctctgtcaccaggctggagtgtagtggcacgatctcggctcactgcaacctccgcctcctgggttcaagcagttctcttgccccaacctcccaagtagctgggactactggcccgtgccaccacgcccaactaatttatgtatttttagtagagacagtgtttcaccatgttggccaggatggtctcgggctcttgacctcgtgatcctcccacctcggcctcccaaagtgttgggattgcaggcgtgagccaccgcgcctggtcatgactgaggtt

SEQ ID NO: 922788 - DNA, 850 bp, Homo sapiens
ctcagcactctggcagaagagctggtttgtaagaggaatagcagagaaggccagctagctcggcacagaggaggccgtgtaagacaaagaacctcaatatgctcccctcttccacctcccagacaccttgccaattgcagatcagcattcatgaggcttttctgagccaggtctgacaacggatcaaaccacactcaagtaatgccatcatctttccgggcaagatgactgcccttgctgtaataacagctaacacaatcatttcacctaacatgtattgagtagtacttagaacacgggctatatattttgtggacgttgcattacacagcttatttctcatcatgacgtacatgctataatgagatccatgtttcagaggaggaaactcattctgcaatggttagtatcatcaaaggaaaacagcctggacacatatgaaagacagaaagacagattttattcagatgattgcagtaagggacagagactctaatatgaattgagctcaactccaccaaagaaaaagatgactgaggttttctttttttctcttkttaagttggagtctcgctctgtcaccaggctggagtgtagtggcacgatctcggctcactgcaacctccgcctcctgggttcaagcagttctcttgccccaacctcccaagtagctgggactactggcccgtgccaccacgcccaactaatttatgtatttttagtagagacagtgtttcaccatgttggccaggatggtctcgggctcttgacctcgtgatcctcccacctcggcctcccaaagtgttgggattgcaggcgtgagccaccgcgcctggtcatgactgaggtt

SEQ ID NO: 922789 - DNA, 575 bp, Homo sapiens
ctgtggatcaggggacactgcccagaaaagagttttgttttagaactggaaggtcatcccaagaaatattactataatagaagggactctgtctaagatgggctctctctaaaagaagtcattttgttctactatttgcccatccagaatagcagtgaccaagttatgcaccattagctgcttgggagggagctaattacaaattaaatataattgaatcagtgagtctgctttcaagtcctctaaatagaataacaacatgctaccttgtacagccaatttagcaaatcgaagctgaatcccttgctttctatgaagataaagagcctttgtgaaatttttaaagtatagatgtaaacttcaaaaaattttgcarggcaagtcatcaaaatctgggagaaaatatattggaaactgtgctccaacaggagccaatgaaggaaccttatgagggagtataaaatattaatattcaccaatgccaagaaaattttcatattatgcaggtatccaaaatgggactactatctttgatttcacaattcctttctacttctctaacacgaatttttagt

SEQ ID NO: 922790 - DNA, 582 bp, Homo sapiens
aaagaactagagaagcaagggcaaagaaattcaaaagccaacagaaggcaagaaatgactaagatcagagcagaactgaaggagatagagacgcaaaaaacccttcaaaaaatcaatgaatccaggagatggtttttagaaaagatcaacaaaattgatagactgctagcaagactrgtaaagaagaaaagagagaagaatcaaatagacacaataaaaaatgataaaagggatatcaccaccgatcccacagaaatacaaactaccatcagagagtactataaacacctctatgcaaataaactagaaactctagaagaaatggataaattcctagacacatacaccctcccaagactaaaccaaaaagaagttgaatctctgaatagaccaataacaggctctgaaattgaggcaataattcatagcctagcaaccaaaaaaagtccaggacccagatggattcacagccgaattctaccagaggtacaaagaggacctggtaccgttgcttctgaaactattccaatcaatagagaaagagggaatcatccctaactcattttatgaggccagcatcat

SEQ ID NO: 922791 - DNA, 508 bp, Homo sapiens
aggaagagatacatgtagcactctattatgtagtgtttccactctacaaatacaataggtgcaaataagcttaaagagtatagataataaaagtataagggccgggtgcgctggcacaagcctgtaatcccagcactttgggaggctgaggtgggtggatcacctgaggtcaggagttcgagaccagcctggccaacatggcaaaaccctgtctctactaaaactacaaaaatttgccaggtatggtggcaggcgcctgtaatcccagctacttggaaggctgaggtaggrgaatcacttgaacacaggaggcagaggttgccgtgagccaagattgcgccactgcactgtagcctgggcaacagagccagactccatctcaaaaaaaagaaaaaagtataaggacatgacgagcttcatatatttatttatttaaaatatttttatttaattgtaacttttatattttaatttgtataattctataataatttaaaataatgtctgt

SEQ ID NO: 922792 - DNA, 678 bp, Homo sapiens
caatcagcacactgtaaaatggaccaataagtgctctgtaaaatggatcaatcagcactctgtaaagtggaccaatcagcactctgtaaaatggaccaatcagcaggttgtgtgtgggaacaaataagggaataaaagctggccaccccaaatgaagatggaaaccatcattctgagcaaactaccacaaggacagaaaaccaaacactgcgtgttctcactcataggtgggaattgaacaatgagaacacttggacacagggtggggaacatcacacaccgggrcctgtcatggggtcgggggaggggggagggatagcattaggagaaatacctaatgtaaatgatgagttaatgggtgcagcacaccaacatggcacatgtaaatatatgtaacaaacctgcacattgtgcacatgtaccctagaacttaaagtatatataaaaaaaaaaaagctggccaccccagccagcagcggcaacccactcgggtccccttccacgctgtggaagctttcttcgttcgctcttcacagtaaatcttgctgctgctcactctttgggtccgtgccacctttaagagctgtaacactcacctcaaagtccgcagcttcattcttgaaatcagcgagaccaagaacccactggaaggaaccaactccagacacattacaatga

SEQ ID NO: 922793 - DNA, 678 bp, Homo sapiens
caatcagcacactgtaaaatggaccaataagtgctctgtaaaatggatcaatcagcactctgtaaagtggaccaatcagcactctgtaaaatggaccaatcagcaggttgtgtgtgggaacaaataagggaataaaagctggccaccccaaatgaagatggaaaccatcattctgagcaaactaccacaaggacagaaaaccaaacactgcgtgttctcactcataggtgggaattgaacaatgagaacacttggacacagggtggggaacatcacacaccgggacctgtcatggggtcgggggagsggggagggatagcattaggagaaatacctaatgtaaatgatgagttaatgggtgcagcacaccaacatggcacatgtaaatatatgtaacaaacctgcacattgtgcacatgtaccctagaacttaaagtatatataaaaaaaaaaaagctggccaccccagccagcagcggcaacccactcgggtccccttccacgctgtggaagctttcttcgttcgctcttcacagtaaatcttgctgctgctcactctttgggtccgtgccacctttaagagctgtaacactcacctcaaagtccgcagcttcattcttgaaatcagcgagaccaagaacccactggaaggaaccaactccagacacattacaatga

SEQ ID NO: 922794 - DNA, 678 bp, Homo sapiens
caatcagcacactgtaaaatggaccaataagtgctctgtaaaatggatcaatcagcactctgtaaagtggaccaatcagcactctgtaaaatggaccaatcagcaggttgtgtgtgggaacaaataagggaataaaagctggccaccccaaatgaagatggaaaccatcattctgagcaaactaccacaaggacagaaaaccaaacactgcgtgttctcactcataggtgggaattgaacaatgagaacacttggacacagggtggggaacatcacacaccgggacctgtcatggggtcgggggaggggggagggatagcattaggagaaatacctaatgtaaatgatgagttaatgggtgcagcacaccaacatggcacatgtaaatatatgtaacaaacctgcacattgtgcacatgtaccctagaacttaaagtatatawaaaaaaaaaaaagctggccaccccagccagcagcggcaacccactcgggtccccttccacgctgtggaagctttcttcgttcgctcttcacagtaaatcttgctgctgctcactctttgggtccgtgccacctttaagagctgtaacactcacctcaaagtccgcagcttcattcttgaaatcagcgagaccaagaacccactggaaggaaccaactccagacacattacaatga

SEQ ID NO: 922795 - DNA, 525 bp, Homo sapiens
ctcactctgttgcccaggctggagtgcagtggtgcaagcacagctcactgtagcctcaacctcccaggctcaagtgatcctcacacctcaacctctcaagtatttgggactacagccatgcatcactacgcttggctaatttttaaactttttgtagagacagggtcttgccatgttgcctaggctrgtctcaaactcctgagctcaagggatcttccccctcacttaggcctcccaaagtgctgggattacaggcgtgagccaccaaacctggcctcgagttgccttcttagaactaaccacatcattcaccatcacttctgacacattctgctcatgggaagcaagtcactacagccaacctatatcaaagaggagaggaattgaagtccaccttttgatgggatgagtgtcaaagaatgcggagaactggtttttgttttttttgttgtgtgtgtttgtttgtttgtttttgagatggagtcttgcgctttggcccaggctgcagtgcagtggcatgatctc

SEQ ID NO: 922796 - DNA, 525 bp, Homo sapiens
ctcactctgttgcccaggctggagtgcagtggtgcaagcacagctcactgtagcctcaacctcccaggctcaagtgatcctcacacctcaacctctcaagtatttgggactacagccatgcatcactacgcttggctaatttttaaactttttgtagagacagggtcttgccatgttgcctaggctagtctcaaactcctgagctcaagggatcttccccctcwcttaggcctcccaaagtgctgggattacaggcgtgagccaccaaacctggcctcgagttgccttcttagaactaaccacatcattcaccatcacttctgacacattctgctcatgggaagcaagtcactacagccaacctatatcaaagaggagaggaattgaagtccaccttttgatgggatgagtgtcaaagaatgcggagaactggtttttgttttttttgttgtgtgtgtttgtttgtttgtttttgagatggagtcttgcgctttggcccaggctgcagtgcagtggcatgatctc

SEQ ID NO: 922797 - DNA, 608 bp, Homo sapiens
aaggggagatacaggcacaacaagtccagtcagtgagcttgatgtagagcccccacagctggctagacaaatgcctgatttgaacctgaagaaaacaaagcttgctgcctgccctggtggtgggagtgacagaggggctgctggtgccctgggcatgtcctcctagaatttgtggtggtgaagggtacatgagtgtcctcaggaccagrtgtagccacaccagagacagggctggcattttagaccttgtccaagagggccattaaaaaaggaaacagactaattgttgatttaggtggtagtcacagaggcttactcacttgagacatttctagtagcatgcttatgatttctgcatttattaagtttgttatatttcagcaaaatttgctattaagaaaatagtgaagaagtctcatcagagagaagttaaaagcatactagtggattccttggggctgcagaaagagtagcaaaaagttggagaaaacatcaactacaccaaaggaattttaggagcttggtccccagcaaagctcatggaatctctctctgcaaggaagagtcagttttaaaagccctcagcctgctctcaatgggtcctgcct

SEQ ID NO: 922798 - DNA, 628 bp, Homo sapiens
tcccagaattacaaattggagctgaaaccattccttctgaaagtattacaaacaatagaaaaagagggactccttcctaactcattttttgactccagcatcaccctaatcccaaaacctggcagagacacagcaaaaaaaggaaattttaggccaatatccctgatgaacatcagtgtaaaaatcctcaataaaatactggcaaaccaaatccagcagcacartaaaaagcttatccaccatgatcaagtcggttttatccctgggatgcaaggctggttcaacatgtgcaaatcaataaatataatccatcacataaacagaaacaatgacaaaaaccacatgattatctcaacagatgcagaaaaggcctttgataaaattcaacaccccttcatgctaaaaacactcaataaactaggtattgctggaatgtatctcaaaataacaagagccatttatgacaaacccacagccaatatcatattgaatgggaaaaagctggaagtattccctttgaaaactggcacaaaacaaggatgtcctctctcaccactcctattcaacatattattggaagttctggccagggcattcaggcaagagaaagaaataaagcatattcaaa

SEQ ID NO: 922799 - DNA, 628 bp, Homo sapiens
tcccagaattacaaattggagctgaaaccattccttctgaaagtattacaaacaatagaaaaagagggactccttcctaactcattttttgactccagcatcaccctaatcccaaaacctggcagagacacagcaaaaaaaggaaattttaggccaatatccctgatgaacatcagtgtaaaaatcctcaataaaatactggcaaaccaaatccagcagcacaataaaaagcttatccaccatgatcaagtcggttttatccctgggatgcaaggctggttcaacatgtgcaaatcaataaatataatccatcacataaacagaaacaatgacaaaaaccacatgwttatctcaacagatgcagaaaaggcctttgataaaattcaacaccccttcatgctaaaaacactcaataaactaggtattgctggaatgtatctcaaaataacaagagccatttatgacaaacccacagccaatatcatattgaatgggaaaaagctggaagtattccctttgaaaactggcacaaaacaaggatgtcctctctcaccactcctattcaacatattattggaagttctggccagggcattcaggcaagagaaagaaataaagcatattcaaa

SEQ ID NO: 922800 - DNA, 704 bp, Homo sapiens
catagtcacaactggtcgagggagtactaagaggtcccctggtccatcaggaatatcggttctacacatattgcccattctagttgaatgtgaactgtttctgatggccttttctattggggattgaaaagcatgcatttgccaaattggtggttgggtaccataaacccaaggccatatttatctgctcccacaatggcactatgtggacacagcagatatgatcaacgtcattgcttggttgtacttgtggtagtcatcagtcataatctaggatccattcagtttctgaaagaccagactagcgaattcaatggagatatgacaggaccaccatccctgcatccttgcctctttaatctctactattcccccagggtgtaatactgtttttgatttacttatcgtagccagcaatttctgagccctacacttggccttctccattatgacaactcttktctaaaagccaaggacctagtgagggagttacatcaactgccaagtataataataccaataatacatttttggacaggaaaaatgacccctgtatgggcccatggaccagtggactcactataaaccattctttggccaggaatctatttattgcctaacatccatgtcctccgcttctcacaggagcccatgatcatgcttcaggtctttacgtatcaatgatgattcagaccctgcctcca

SEQ ID NO: 922801 - DNA, 692 bp, Homo sapiens
agcgaagcatgaagaggatgttttaaagatgggccaggaaaaagcacgtttgtccaactgactagagaggaagaagtgggtgattcaggagtgaggtggaaggcagaggtgtccttaagaggtctagtccgccagggcaggggtgtggccatccttcygcagtaatgcagggaagacacgttgccgtgagggggcagcctgcagatctattttatttatttatttatttatttatttatttatttatttatttatttatgagatggacttttgctcttgttgcccaggctggagtgcaatggcagtatcttggctcaccgcaacctccgcctctcgggatcaagcgattctcctgcctcagcctcccaagtagctgggattacaggcgtgcaccaccacgcctggctaattttgtatttttagtagagacaaggtttctccatgttggtcaggctggtctcgaactcccgacctcaggtgatccacctgcctcggtctcccaaagtgctgggattacaggcatgagccactgcacccagccagcctgcagatttattttaatgagaaaatcaaagcaaaagcaggggcataagtggagcatatggatgggacagagaacgttggaggctttagcagagagaggaaagggcaggaaggagtcatccacaggaggggagagtactgtcctgtga

SEQ ID NO: 922802 - DNA, 751 bp, Homo sapiens
gagagcgaagcatgaagaggatgttttaaagatgggccaggaaaaagcacgtttgtccaactgactagagaggaagaagtgggtgattcaggagtgaggtggaaggcagaggtgtccttaagaggtctagtccgccagggcaggggtgtggccatccttctgcagtaatgcaggraagacacgttgccgtgagggggcagcctgcagatctattttatttatttatttatttatttatttatttatttatttatttatttatgagatggacttttgctcttgttgcccaggctggagtgcaatggcagtatcttggctcaccgcaacctccgcctctcgggatcaagcgattctcctgcctcagcctcccaagtagctgggattacaggcgtgcaccaccacgcctggctaattttgtatttttagtagagacaaggtttctccatgttggtcaggctggtctcgaactcccgacctcaggtgatccacctgcctcggtctcccaaagtgctgggattacaggcatgagccactgcacccagccagcctgcagatttattttaatgagaaaatcaaagcaaaagcaggggcataagtggagcatatggatgggacagagaacgttggaggctttagcagagagaggaaagggcaggaaggagtcatccacaggaggggagagtactgtcctgtgactgctcctccaagccccctcttgccggcgtggacacagcggtctgcaccttgaccc

SEQ ID NO: 922803 - DNA, 559 bp, Homo sapiens
aatatcacataccagggcctgtcagagcatgagggacaaggggagggagagcattaggaaaaatacctaatgtgtgtggggcttaaaacctagatgatgggttgataggtgcagcaaaccaccatggcacatgtatacctatgtaacaaacctgcacattctgcacatgtatcccagaacttaaagtaaaataaaaataaataaataaatgtctgtttgatgtttccaktgcttttcccttatgcatagttttccacaaaaatctctcttgccaactaaagccttacgagtcacaaggtttttcatgaatggcacactttccaaagggcctgagagatgctgcatctggaaaatccttcctcgaacctcaccttgaatactgccccctacacacagactctcctaacctgccctcttccaggtgtcatcaactaatggctccatcatccagaattggcagggcatgacctccaagactaggtcattaaaggcatggctgcttcctccccactgtctcttggattacctgcccttggtaatctcttggattacctgccct

SEQ ID NO: 922804 - DNA, 521 bp, Homo sapiens
ttctccccagaaaatgaatttttcttttctattgcatcgtgaggctgcaaattttccaaacttttatgctctgtttcccttttaagcctaatttccaatttcaaaccatctctttgagaatgcataaaactgaatgctttcagaataatccaggtgacatcttgaatgctttgctgcttagaaatttcttccaccagataccctaaatcatctctctcaagttcaaattcccacagatctctagggcaggggcaaaatgccaccagtctctttgctaaagcatggcaagagtgacctttgctctagttcccaagaagttcctcatttccatctgagaccacctcagcctggacttcattgtccacatcattatcagcattttggtcaaaaccattcaatgagtctctagaaagttccaaactttcccacatcttcctgtctccttstgagccctccaaactgttccaacctctgcctcttacccaattccaaagtcacttccacattttcaaatatcttta

SEQ ID NO: 922805 - DNA, 470 bp, Homo sapiens
gtgagagaaaagtggaggaggtgagccaatagtgcgggtcagatggaaagccaggacttgcgtctaaaagggattactctgctgggctgagatgagactctgggggatcagggcaggggctggcaacaacctcagcaagagacgataagcctgggtgtcagagtggaggggatgaggcgtggacagactctgggcaaacctggcagggagggccagtaggrtttctggtggagtggatgcggatgtggaggaggaggtcagagaggactcgtggggttttgcctgtaaatggaaggatggagcggccatttactgggttggggagaatgtgggaggagcaggctattcagagaagacaggagctcagcgctgggaatgtttggggggagtttatgagacactgaggtggagatacaggccaagcagctagatgtgcggaatttggggcaaaaacccaggtttgaggcaca

SEQ ID NO: 922806 - DNA, 777 bp, Homo sapiens
tggccccaggaaattcagttacatgtgcaaggactaaccaaccctgtcgcttccacgcatgggcaaagacactcaccctcctcatcagagccatcgcctcagtcgtcctggttgtcacaaagccacccatggggcacacagtgcccattctcttggcacagggcctctccctctgcacaggcaggcacaagctcctcacagtggccaccgtcacccccacaatgccattgaccttcctggcacgtgctgagcacacagcgtcctgggatcagccacaggctgggcttggcccagtgctccttcaataggtcccccccaagatgacctccccactcaccagttcccgcagtccttttgcagcacagaccccggcgggaaggagttgcggccccactcacaggggcaggaagctggctccaagcaggctcctcctgaggtcacagagtgcagggctcagagcaaaagggcacagtggccccttcccagtctcagtgcccctcccctctgccctttgtcactctacacaccgtgcagcagagtcccctcggggcagaagcagccctccacacaggccaccacctggcagtgccacccgggctcaggatgctgctcatggcaggtggggggacaygtggggccacaggcctcatatacctgtcccccttcacactgcagggctgggtggagaggagagagccttggatcactgaggcacaagggcaaaaggatgcaaccacaccaggctggctggccaaggtgaccaccatggagggcaca

SEQ ID NO: 922807 - DNA, 595 bp, Homo sapiens
cctcagcctcccaaagtgctgggatgtgacccaaagtgctgggtgcgagcgacagtacccggcccgatcaatttagtacttattgcctgtgtgtaatctacttaactcatttcactaaaaccaaaaccaacaaccaaaaaacaaacaaacaacaacaacaacaaaaacctctttttactctagsgagtatttttttaaaggaaaatgaagaccaaataaaagaatgagaagttattatctgtatcgcaattctttctttcatacccatgtgtgtatgcacatgtgcacatgcacacaaacacacaaaatatgctaataatgatggggaaagatactataagttgcttagcaaggttttaaagcaagctttttcagtgttccagattgctattctgaaggtaaataaggtagaaaccaaaagattaatcactaaaaccctcatcctggataatataccatgttttaagtaaacttaatgtgaaaatctattcaataaatgtatatacagtttcctaatttcataaaggacttcattttttaaaagtttcattacaggactactttaaatggttgaaatcagttttatagcctcaat

SEQ ID NO: 922808 - DNA, 582 bp, Homo sapiens
aattaaatccaacgcatctcagaagtccctccctctcaccagttcttcacagaagctcctaggaaacaaggtcttctttttttttttttttaacttcccttgaaccaccctcctcccagtagaagttcatgaaatacagagtaaattgaatcaagttgaattgactgaattcccctgctcattcttcattataaaggatgagttttgtcttaaatgtttaatgttgtcttttaaaatagatttaacatcttattagaattctagagctttacaggcaaaagacttctcatgtttcaaatgatgtttcgaatttttccctaatasattgagatggaagataatttttctacccagttactagctttgaccaagggttccagagaagatattttcctaacttcctcaaggtcatgtacaaacttaacccaaaaaagcttactggggaagggttctgaagtgcagaaaaaagcagattgccagaatgataaaatggtgtcttaagtttagtatttattgagaactttatgggccaagtctcgtgaaaaccactgtgaacacatgatcttcttttctcattgaggg

SEQ ID NO: 922809 - DNA, 546 bp, Homo sapiens
tacccccctgttctgctttgacctactcttttttttttttttgagacggagtttcgctcttgttgcccgggccagagtacaatttcagcccaccacaacccccgcctcctgggttcaagaggttctcctacctcagcctcctgagtagctacgattacaggcatgtgccaccacactcggctaattttttgtatttttagtagagacggggtttctccatgttggctaggctggtctcaaagtctcctgacctcaagtgatctgcccgcctckgcctcccaaaggactgggattaccggcgtgacccactgtgcttggccaaaagctactaatttccatatgttaaacttgtatttagtcaccttacagaactctattattagttccaattgtttccaactgatttggattttctagataatcaattcatctgtaactattatacattctgaaaactagtaaagcaaatctcccatcactgtcctttgtccctagaaatatacttctgcatttcttggccactccttttccctgataaatgttgcc

SEQ ID NO: 922810 - DNA, 605 bp, Homo sapiens
gaacacacttgtctgaaattatgaacaaataatcatttccattattggcgttttttgagagggaaaaatactccaaaggttataaagcagtgtttttgtttttttggtttccctgaggcatagtctcgctctgttgcccaggctggagtgcagtggcatgataatagctcactgcaacctcctcctcctgggttcaagtgattcttctgccgcagcctcccaagtagctgggacrggcatgcaccgccatgcccggctgatttttgtttttgttttttgtttttttttgagatggagttttacccttgttgcccaggctggagtgcagtggtgcaatcttggctcactgcagcctccgcctcctgggttcaagcgattctcctgtctcagcctcctgagtagctgggattgcaggcgtctgccactacgcccggctaatttttagtatttttagtagagacggtttcactatgttggccaggctggtctcaaactcctggccccaggtgatctgcctgccttggcctcccaaagtgctgggattacaggcgtgagccaccgcgcctggcctgatttttgtaaagatggggtttcaccatgttgat

SEQ ID NO: 922811 - DNA, 580 bp, Homo sapiens
acaacagaagccagtgtcaaaaagcaaagcaatcacagaaaaaaatatcagcaacaacccatctgtcagagttatccaccagggaattttaaataactatcattaacatgttaagctctatgaaaaatgcaaacaaaacgcattaacaacagagacggaatctgtaagaacgtgtcaaatggaaatgttgtacataaaaaacactgtgtgctttcaatgggttcattagtagacttgacacaaccaagaaaggaatcagtaaacttgaagaaaggttgacagaaattacctaactgaaatacaaagagtaagaagagtaggagaaaaraaaagtaaaaagcaacaaataatgttagtacagcttctttggaatacagtttgtctgttatacacttatgacccagcaatcccattcctagatatttaccttaaagtaatggaaacttatgtttacacaaagtttgtgaatatctgtagtacttttatccataattgccaaaatctggaaacaacacagtgtccttcaactggtgaatggaatactattcaataaaaaagaaattaaatactgataaatgca

SEQ ID NO: 922812 - DNA, 605 bp, Homo sapiens
cacatgctcccggctggacactgggcaacacactcaggcaccttggctttggaagctctccataaatgtgagccttatttttaaataaaaaatatttgcaaaatttagacaaagataaaaatggaagataaatatgcaaaacaatgactctattccactctccgataagaaatgttttctttttaagtttttcatcttcatctgtcatctcagggcttgtctccctgtctccacccccatcaaggtgatgttctttcctgggtctcctcctcactttcccagacatgacttgcttcgtctcaactgctcacctccctgtcagccttttaggttctggttttgatgatgtgctatgtcttgctgccactgcttgaccttctacagaaaaacaatctgtgtttcagtagaaaactgtttttatctacagcagaacytgctgggttctctgattctggctgtctccactgtctttgagctattttacaactctataaataaacaggtcctttgaaatctcttttgagccagttttaacatctgcctggttccctcactgaatgagttaaataaaatctttaacatgtgttcatttttatatctgtagg

SEQ ID NO: 922813 - DNA, 584 bp, Homo sapiens
tcaacataccccattccaaaaagtaggtactacctgggccacacacacattcaccataaaaattaaattgaataggtatcaagaaacaattaagtttcatatcagattttcttccattaattttggcaacacagcgttcatttttctttgtattataaaaacttgttgctaatgtccagggtcaccamcctcatgtgaaataaaatgcatttgtgcaaggccctgacatcatatcaaaattcagtcagttatcttaatgcataatatatatgtaaaaaatcaagagagactggggaagaaaaacacaaaaatgtgagtagaatggtaaaagttgtctaccctggctgcacattagaatctgggataaacagatttagataaacagatgctcagaacccagccctagagattctgattcaggcccagtctgactgggccaatcgttgttatccctaagtgattcaaatctgctgtttttcttacctttctcagactttccactgttgtagaaaatgtgtattaaatgagaatactctgattcatatattttctgtcaaccatgataatgatgatagttactctaa

SEQ ID NO: 922814 - DNA, 584 bp, Homo sapiens
tcaacataccccattccaaaaagtaggtactacctgggccacacacacattcaccataaaaattaaattgaataggtatcaagaaacaattaagtttcatatcagattttcttccattaattttggcaacacagcgttcatttttctttgtattataaaaacttgttgctaatgtccagggtcaccaacctmatgtgaaataaaatgcatttgtgcaaggccctgacatcatatcaaaattcagtcagttatcttaatgcataatatatatgtaaaaaatcaagagagactggggaagaaaaacacaaaaatgtgagtagaatggtaaaagttgtctaccctggctgcacattagaatctgggataaacagatttagataaacagatgctcagaacccagccctagagattctgattcaggcccagtctgactgggccaatcgttgttatccctaagtgattcaaatctgctgtttttcttacctttctcagactttccactgttgtagaaaatgtgtattaaatgagaatactctgattcatatattttctgtcaaccatgataatgatgatagttactctaa

SEQ ID NO: 922815 - DNA, 584 bp, Homo sapiens
tcaacataccccattccaaaaagtaggtactacctgggccacacacacattcaccataaaaattaaattgaataggtatcaagaaacaattaagtttcatatcagattttcttccattaattttggcaacacagcgttcatttttctttgtattataaaaacttgttgctaatgtccagggtcaccaacctcatgtgaaataaaatgcatttgtgcaaggccctgacatcatatcaaaattcagtcagttatcttaatgcataatatatatgtaaaaaatcaagagagactggggaagaaaaacacaaaaatgtgagtagaatggtaaaagttgtctaccctggctgcacattagaatctgggataaacagatttagataaacagatgctcagaacccagccctagagattctgattcaggcccagtctgactgggccamtcgttgttatccctaagtgattcaaatctgctgtttttcttacctttctcagactttccactgttgtagaaaatgtgtattaaatgagaatactctgattcatatattttctgtcaaccatgataatgatgatagttactctaa

SEQ ID NO: 922816 - DNA, 804 bp, Homo sapiens
aaccagccctagccagaggggaatcacaggtccttgtggttggaacttgagttcccacaaacttcaccactgcaggctaaagtgctctgggtgtctaagtgaatttgaaaggcaatttaggccacaaggactgcaactctaggcgagtcctagtgctgaactgggcccagaaacagtggactagaggggcatgcaatctaccaaactaccagggtggmtaaaggagtggtgacatcacctctcccctaaccccaggctgcacaactagtggctccaaaaaagatcccttccttctgcttgaggagaggagaaagaagagtggggaggactttgtcttgcatcttggataccggctcagccacagcatgatagggtcagagtcataatgcctctgttccaggccctagctcctgggcaacacttctaggcacaccctgggccagaagggaacctactgccttgaagggaagaacccattcctggcagcattcatcacctgctaactgaagagcccttgggcactgaataatcagcagcgatacccaggtactacatctagggccttgggtgagcctctgagacttgctggcttcaggttcatctcggctattggggggtggagcaacaagtgggctcctggagtccccagttctaagagctgactcttggatggcatttctggaccttccgtgggccagaagggagcccactgccctgaaggatgagtctcaggccagacaaccttcatgacaagctgacttaagagaccttgggccttaagagaacatagtggtagtctggcag

SEQ ID NO: 922817 - DNA, 804 bp, Homo sapiens
aaccagccctagccagaggggaatcacaggtccttgtggttggaacttgagttcccacaaacttcaccactgcaggctaaagtgctctgggtgtctaagtgaatttgaaaggcaatttaggccacaaggactgcaactctaggcgagtcctagtgctgaactgggcccagaaacagtggactagaggggcatgcaatctaccaaactaccagggtggctaaaggagtggtgacatcacctctccyctaaccccaggctgcacaactagtggctccaaaaaagatcccttccttctgcttgaggagaggagaaagaagagtggggaggactttgtcttgcatcttggataccggctcagccacagcatgatagggtcagagtcataatgcctctgttccaggccctagctcctgggcaacacttctaggcacaccctgggccagaagggaacctactgccttgaagggaagaacccattcctggcagcattcatcacctgctaactgaagagcccttgggcactgaataatcagcagcgatacccaggtactacatctagggccttgggtgagcctctgagacttgctggcttcaggttcatctcggctattggggggtggagcaacaagtgggctcctggagtccccagttctaagagctgactcttggatggcatttctggaccttccgtgggccagaagggagcccactgccctgaaggatgagtctcaggccagacaaccttcatgacaagctgacttaagagaccttgggccttaagagaacatagtggtagtctggcag

SEQ ID NO: 922818 - DNA, 809 bp, Homo sapiens
actactcttatcctaagtagaaaaattaaatggcaaaccaataaaaaataataactacaacaacttttcaagacatagacagtacaataagatataaacaacaaaaagtttaatagttggggagacgatgttaaggcatagagtttttgttagttatttttttttgcttgtttgtttatgcaaatagggttaggttgttatcagctcaaaataatggtttataagatagtatttacaagcctcatggtaacctcaaaccaaaaaatatacaacagatacacaaaaagtagagcaagaaactaaatcatatcaccagagaaaatcaccttcattaaaggaagacaagaaagaaggagagaaagaagaccacaaaacaatcagaaaataaataacaaagtggcaagagtagktccttaattatcaataataacattgatgtaaatggactaaactctccaatcaaaagacatagactggctaaatggatgaaaaaaaacccactgatctgttgcctacaaaaaatacacttcacctataaagacacacatagactgaaaataaagggatggagaaagaaattccatgccaatggaaaccaaaaaaaagcaggagtagctatgcttttgtcagacaaaacagattttaagacaacaactataagaagagacaaaaaagttcactatataatgataaaggggtcaattcagcaagaggatataagaattttaaatatatatgtacccaacattggagcacccagatatataaagcaaatattattagagctaataagagagataggccccaat

SEQ ID NO: 922819 - DNA, 809 bp, Homo sapiens
actactcttatcctaagtagaaaaattaaatggcaaaccaataaaaaataataactacaacaacttttcaagacatagacagtacaataagatataaacaacaaaaagtttaatagttggggagacgatgttaaggcatagagtttttgttagttatttttttttgcttgtttgtttatgcaaatagggttaggttgttatcagctcaaaataatggtttataagatagtatttacaagcctcatggtaacctcaaaccaaaaaatatacaacagatacacaaaaagtagagcaagaaactaaatcatatcaccagagaaaatcaccttcattaaaggaagacaagaaagaaggagagaaagaagaccacaaaacaatcagaaaataaataacaaagtggcaagagtaggtccttaaktatcaataataacattgatgtaaatggactaaactctccaatcaaaagacatagactggctaaatggatgaaaaaaaacccactgatctgttgcctacaaaaaatacacttcacctataaagacacacatagactgaaaataaagggatggagaaagaaattccatgccaatggaaaccaaaaaaaagcaggagtagctatgcttttgtcagacaaaacagattttaagacaacaactataagaagagacaaaaaagttcactatataatgataaaggggtcaattcagcaagaggatataagaattttaaatatatatgtacccaacattggagcacccagatatataaagcaaatattattagagctaataagagagataggccccaat

SEQ ID NO: 922820 - DNA, 560 bp, Homo sapiens
atctgagttcaattcctggatagccttgttaactttctgtctcgttgatctgtctaatgttgacagtgggctgttaacgtctcccattgttattgcatgggagtctaagtctctttgtaggtctctaagggcttgctttatgaatctgggtgctcctgtattgggtgcatatatatttaggatagttagctcttcttgttgaattgatccctttaccattatgtaatggccttctttgtctcttttgatctttgttggtttaaagtctgttttatcagagactaggattgcaacccttgcttttttttgttctccatttgcttggtagatcttcctccatccctttattttgagsctacatgtgcctctgcatgtgagaggggtctcctgaatacagcacactgatgggtcttgactctttatccattttgccagtctgtgtcttttaattggtgcatttagcccatttacatgtaaggttaatattgttatgtgtgaatttgatcccgttattttgatttagctggttattttgctcattagttgatgcagtttcttcc

SEQ ID NO: 922821 - DNA, 695 bp, Homo sapiens
agtcccacagagtggcagactccaaatcacaaggagccacagaacacagttggggctcaatacaactcccccagagttagagtatgcagactctaagttgtgagctgagcatttagagtatgcagcctctgagttgtgagctgagcattgccccctccaccaccacaaaaaaaaaaacaaaaacaaaaaacaaaaaacaaaaaactcccaggaacaaagcctgttggctgaatccaccttttaccacaatcaaatactcaagaccatcaaataggatccaaaaaaccaaaccccattcaaagttcagcaactttaaagatacgcccacaaagatgagacaaaatcagtgcaaaaatgttgaaaacacaaaaagccagagtgacttctttcatccaaatgaccaaattacattaccagcaaggcctaagatgacagaagcagaattcagaatatgggtagaagcaaacttcattgakctacaaaggtaagttgcaacccaatgcaaagaagaaaaaaataattgcaggaagtgatggaaaaaacagccagtctagagaaaaatatggccaacatgatagaactgaaaaacacaatacaaaacctttataatgtaatcacaagtgttaatagaagaataggccaagcagagggaagaatctcagagcttcaagactggctttctgaaataagacaga

SEQ ID NO: 922822 - DNA, 572 bp, Homo sapiens
gctgaaatcacagagcatacttaaaatctgaccatatactggctcatagagtaaattgcaatacattttaaagaatttaaatcatacagaatatgtcttctgaccataatgcaattaaagtagaaaagaacagaaaaacttatagaaaattctcatatatttggaaattagtaaatttctaaataacccatgggtcaaaaaataatcagaatgaaaatcagaaaatatttttaatgacttatgaaaaaaattacatataaaaacttgtcagatgcacctaaactrttgcttaaaggaaacttacaaccttaagtgcatatattagaaatgaagagtgacgaaaaatgaatgagcaagcaaataccttaaaaactggaaaaggaatagtaaaataaatccagagaaatcagaacaggggaaataataatataagaatagaaattaatgtgctagaaaataggggatctatcaagtcagaagttgattttttgaaaatgctaataaaaatgatgaacctctggcaagacaataaaagctggtacaaataactcatctaaggaataaaattgagg

SEQ ID NO: 922823 - DNA, 694 bp, Homo sapiens
accacccacttcacatagtgcctgtgtcctcccgccctgcccctctgtcaccacagttccaaagcctcgtgcctcgtttacttgatcttgcttcttgctttactagaagagagagaagtggttacaggccttcagcaagctcccactgccctctccaccagcccaccatgtcatgccattctctgcctctctcctgttgtagcctgaagaattgtcagtgcagcccttctctccaagggtattactgcagatttcccttctgcatcatcagtttttctctaatgggtcattytcatcagcacacaaatctactataatacttcccgtcattaaaaattcaacaatagccaaagctctctcttgactgccttcttcagtggctgctctgtttctctgcccctgtcattaggagactccttagaagaattatgtgagttgcccattcaaattcctctcctccctggaaacccctgtaatctggcttttgccaccattgctcttttgaaaccgtgctgtcggggtccctggtgatttgcacattgctgagtgcttggttaagtcttttcagtccccatattggcctgtgacagacactggacgttctattctggctggtagaccttaggttcctgacccagcttctccccatctccccacctcatgaccctggagccctccagagagcaggccttgg

SEQ ID NO: 922824 - DNA, 694 bp, Homo sapiens
accacccacttcacatagtgcctgtgtcctcccgccctgcccctctgtcaccacagttccaaagcctcgtgcctcgtttacttgatcttgcttcttgctttactagaagagagagaagtggttacaggccttcagcaagctcccactgccctctccaccagcccaccatgtcatgccattctctgcctctctcctgttgtagcctgaagaattgtcagtgcagcccttctctccaagggtattactgcagatttcccttctgcatcatcagtttttctctaatgggtcattctcatcagcacacaaatctactataatacttyccgtcattaaaaattcaacaatagccaaagctctctcttgactgccttcttcagtggctgctctgtttctctgcccctgtcattaggagactccttagaagaattatgtgagttgcccattcaaattcctctcctccctggaaacccctgtaatctggcttttgccaccattgctcttttgaaaccgtgctgtcggggtccctggtgatttgcacattgctgagtgcttggttaagtcttttcagtccccatattggcctgtgacagacactggacgttctattctggctggtagaccttaggttcctgacccagcttctccccatctccccacctcatgaccctggagccctccagagagcaggccttgg

SEQ ID NO: 922825 - DNA, 694 bp, Homo sapiens
accacccacttcacatagtgcctgtgtcctcccgccctgcccctctgtcaccacagttccaaagcctcgtgcctcgtttacttgatcttgcttcttgctttactagaagagagagaagtggttacaggccttcagcaagctcccactgccctctccaccagcccaccatgtcatgccattctctgcctctctcctgttgtagcctgaagaattgtcagtgcagcccttctctccaagggtattactgcagatttcccttctgcatcatcagtttttctctaatgggtcattctcatcagcacacaaatctactataatacttcccgtcattaaaaattcaacaatagccaaagctctctcttgactgccttcttcagtggctgctctgtttctctgcccctgtcattaggagamtccttagaagaattatgtgagttgcccattcaaattcctctcctccctggaaacccctgtaatctggcttttgccaccattgctcttttgaaaccgtgctgtcggggtccctggtgatttgcacattgctgagtgcttggttaagtcttttcagtccccatattggcctgtgacagacactggacgttctattctggctggtagaccttaggttcctgacccagcttctccccatctccccacctcatgaccctggagccctccagagagcaggccttgg

SEQ ID NO: 922826 - DNA, 694 bp, Homo sapiens
accacccacttcacatagtgcctgtgtcctcccgccctgcccctctgtcaccacagttccaaagcctcgtgcctcgtttacttgatcttgcttcttgctttactagaagagagagaagtggttacaggccttcagcaagctcccactgccctctccaccagcccaccatgtcatgccattctctgcctctctcctgttgtagcctgaagaattgtcagtgcagcccttctctccaagggtattactgcagatttcccttctgcatcatcagtttttctctaatgggtcattctcatcagcacacaaatctactataatacttcccgtcattaaaaattcaacaatagccaaagctctctcttgactgccttcttcagtggctgctctgtttctctgcccctgtcattaggagactccttagaagaattatgtgagttgcccattcaaattcctctcctccctggaaacccctgtaatctggcttttgccaccattgctcttttgaaaccgtgctgtckgggtccctggtgatttgcacattgctgagtgcttggttaagtcttttcagtccccatattggcctgtgacagacactggacgttctattctggctggtagaccttaggttcctgacccagcttctccccatctccccacctcatgaccctggagccctccagagagcaggccttgg

SEQ ID NO: 922827 - DNA, 766 bp, Homo sapiens
gtgagttgcccattcaaattcctctcctccctggaaacccctgtaatctggcttttgccaccattgctcttttgaaaccgtgctgtcggggtccctggtgatttgcacattgctgagtgcttggttaagtcttttcagtccccatattggcctgtgacagacactggacgttctattctggctggtagaccttaggttcctgacccagcttctccccatctccccacctcatgaccctggagccctccagagagcaggccttggtgctgtgcttttctctgtctgtgcacactttcttggtgatctcatccactttcaaaggtctgagtctttctttgacccagacaactaccaaatgtatatgcaggagacattcactctattgtgttgtacttgaagcaaacttgtgcctggccccaaagggagacactcttccttctgagactttgcataacaaatgccctgggaaagataggtcagaataaaggagccagtgttgcttctcataagaagcacagaaacctgaaagacccagggagaaytgtctcacaacatacacaccccttatttctatgtagccctggcttctggtagattttcacatgcgtacatcattccataagcaattcttaatcagacctagggaaggtggaaccaatctgctttgtctgtctcatacatttattaacagcggctgtccacaggagcctacgcagcaggatgaggccactttgcagtattgacctcagccatgccctagagtctc

SEQ ID NO: 922828 - DNA, 730 bp, Homo sapiens
ctcagaaactgcttggaatatactataagaaatgttgcttctcatctgtgcactttcttggccccagtattttaacagtaattgttttcaagggtctagctgtctcagataacaatcttgaacaataccttaaagctccttggacttagagctttagaataggaaaaaaaaaagattcactgagaatgaccacacataccagcactgaagcatctataatttccttaacagttaagatctaggttttgtcactgggtctactcatctcyccctctacatctaaggcatactgctctctctttccatctaaggcagatcaaaatcttttttttttgtttttcttttttgagacaaggtctcactgtgtcccccaggctggagtacagtggcatgctcatagctcactgcagcctccatctcctgggctcaagcaatcctcctacctcggccttctgagtagctgagactacaggcacatgccaccacacctagataatttaaaaaaattttttagtagagacaaggtctatgttgcccaggctggtctcaaactcctgagctcaagtgatcctcccacctcggcctcccaatgtgctgggattacaggtgtgagccaccgtgcccagctcacagtgtcatttttggagtgtagactcagacttttgattccttatcaaccctgtgcttcaggcagctacttctaaaaaatcagacttggtgcgtgaattga

SEQ ID NO: 922829 - DNA, 582 bp, Homo sapiens
agattatgggtgggttttacctttcccatcccactgactcaaatgttaatctcctttggcaacatcctcacagacacatccagggtcaatactgtgaatccttcaatccaatcaagttgacactcagtattaaccatcacatggcaagagaatagatagagaggagaaaggaaagaagaaaggagggaaggagagaggcaggaaagcaagaaaaaaaagccccacaaaaactcaacacaaaaatccagagaattttgctagtctgatcaggagcatgaagagatgaagagtttcaagaagtatattgtcagaggatttgtaaattgtccaataatgagtctattccatacatctgtaataggaaaacattaaagaaacaaggcaataayacctcttcaagtcatcaaaattcctgggtcaggcagtaagatgaggctatcaggatattaaaattgtgtgggtatatttcagaaggaatggtaccagctcctccttgtacctctggcagaattcggctgtgaatccatctggtcctggactctttttggttggtaagctattgattattgccacagtttcaga

SEQ ID NO: 922830 - DNA, 595 bp, Homo sapiens
atgcctcaatagcaaaaatacaaataacttgattcaaatatagacataggaagtaatagatgtttatccaaagaagacatacaaatggccaacaggtatatggaagatgctcaaaatcactactcacgtaaatgcaaatcaaaacctcagatgtattatctcacacctattaagatggctattgtccaaaaaaaaaaaaaaaaagataagatgctggtgagaaacccttctacattgttggttggagtgtaaaatagtgcagtcaagatggaaaacagcatggaagttcctcaaaaataaaaattaaaatagaacttatatgtaatccagcaatcttacttctgggtatatatctaaaagaattgaaatcactgtcttgaagagctatctacaatcctatgttcattgaaacattaytcacaatagccaagatatggaaacaacatagatgaccatttaatgcgtaaatagataaagaaaatgtggtatatacatacaatggaatatcattcagccttaaacaagaaagaaatcctgccatatgggacaacatggataaaactggaggacattatgctctttgaaataaacagtc

SEQ ID NO: 922831 - DNA, 609 bp, Homo sapiens
gtggaagagttcagggtagcaggaggaggccttctgcctatatgccttctccacctctttgtctgccaccttctcctcaatgtctagcagcgcgtacaggtccatctgtaagatcttgctccttggtcactgccatggttctgacctgacggattcgtactccatttttctttcttttctttttttttttttaaccatacttaatagtgctttgtatcaaacatccctgctaatctactgtgtgatgtttatctcccaaatgaacccagactgccacattattttgatttggtcttctcattcataaagtatggagatttacatatttcttaaagataatttatgaacaaattcctgtgttcrtaagcaaagcaagtcatgaaaatgcattgcaatattttaaaacagcattatttacttttagttatggatgattttaatagcatacagaatgaatgtgcattttcaggaaagaagcattctaattaaaatattgcagatgggttcctgaaatagggataatgtttaacttaatgggatttttttgaatatctgttccatatcacgtgtttgtggatttaaaatttctattaatttcccgacgatttt

SEQ ID NO: 922832 - DNA, 534 bp, Homo sapiens
ttgaatttgcttatgggtcattggtcatgaaatccttgaatatgccaatgtctaaaagtatttttccaaagttatcttctagaacttttacagttttagggcttaggtttaagtccttaattcatctggagttgatttttgtctaaggtgaaagatgaggatccagtttcattctgctacatgtggctagccaattatcgtagcaccatttgtttaaaagggtgtctttccccactttatatttttctttgctttgttgaagatcagttgtctgtaagtattcgggtttatttctgggttctctattctgttccattggtctatgtgcctattttcataccagtaccatgctgttttkgtgactatggccttatagtatagtttgaaatcaggtagtgtgatgcttccagattttctctttttgcttagtcttgctttggctatgtgggctcttttttgattccatatgaattttagaattgttttttctaattctgtgaggaatgatggtggtattctgatggggattgcact

SEQ ID NO: 922833 - DNA, 801 bp, Homo sapiens
tgcaaaattttctcccattttttaggttgtttctcccattttgtaggtttactctgttgatagtttcttttgctgtgcagaaactctttagtttaattatatcccatttagcaatgttttgctttagttgcaattgctgtgggtgccttcatcatgaaatctttgcctgtgtctgtgtcctaaatggtattgcctaggttgtcttccagggttttcatagtttcaagttttacatttaaatctttagtscatcttgaataaatttgtgtatgtggcataaggaatgggttcagtttcagtcttctacatatggctagccagttatcccactaccatttattgaatcaggagtcatttctccattgcttgtttctgtcacctttgttgaatatcagatagttgcaggagtgtggtcttttttctgggttctctattctgttctctatttgtctatgtgtctgctttttcaccggtaccttgctgtgttggttactgtagccttgtactatactttgaagtcaggtagcatgatgcctccagctttgttctttttgcttaggattgccttggctatgcaggtcttatttggttccatatgcattttaaaatagttttctctaattctgtgaagaatgtcaatggtagttgaataggaatagcattgagtctataaattgctttgggcagtatgaccattttaatgatattgattcttcctatccatgagcatggaatgtttttctatttgtttgtgtcatctctgacttctttgagcaggggtttgtagttttccttgtagat

SEQ ID NO: 922834 - DNA, 498 bp, Homo sapiens
acactattagcattttggtcaaagccgttcaacaagtctctaggaaattccaaacttccccacattttcctgccttattctgagctctccaaactcttccaacctctgcctgtttctcagttgtaaggtcgcttccacatctttgggtatctttatagcaccaccccactctctgcgatactaatatctgtatgagtcagggttccctagagggacaggactaacagtgaaaccatctttgcaaaattatgactgagacagtgaaagagatctagcttaaccgactccatctcgtttctaacctccaagctgtccttgttcattgctaggcataggctgaactaactttragagaaacttagtttatactttgtagtttaaacaaagccgatacacaatcctttaacaaggcagacctccttcttgcctggggactagattacctttgtaggactaacaacattagccacaaagttagtaattatggtttaggagtca

SEQ ID NO: 922835 - DNA, 608 bp, Homo sapiens
tggagaatttccctgtctcctcctgttctctctctctcctcctcctcccgcttctcttccctgcctctcccccacccctatacaaacacacacatacacacacagacacacagacacacacacacacacacacactactccttgactctttaattttccttttaaggcatcaaaatcaattttgggactctatttggtacaaagagttgatatggatttgatacggatagagttgactratctctactctgggtttgaagatgttgctgcaaatggaaaggaaataatcccgggctattgtgacagatgacatggtgtagagggaagagcgcaggactgaaggtggagaatcacttgtttatgcaacacatatttcctgaacatcaaatacaaggataaagccatgaaggaaacagagccctgtttctgcagaacacacgttctggttggagaagacaagtagcgaatacaccaacaaataagagaatatttgacgatgttgagtgttttatgaaggggataaagagtgactgcagggctcagaaggaagcgattattttaagtagggaaggtcttttgtaagaaggtgctatttaaattgagacttt

SEQ ID NO: 922836 - DNA, 649 bp, Homo sapiens
aatcttgaatgtgaaggtagttggaagtaattaggtttagatgaggtcacaaggatggggcccccatgatgggattaatgtccttttaaagaagaggaaggcaccagagttctctctctctttctgccatgccaggtcacaactagacatggcagtctgcacgccaggaggcgggcccctaccaagaattcagccatactgatrccctcatcatgtgctacccagcctccataactgtgagaacaattgtctgttgcttaagccacccagtctatggtattttgtcatagcaaccaagtagactaatataagaaagaacctataagcctgctctgtccagtatggtagtcatcagcctgccaattgtgattattgagtgtttgacatatggctgatctaaattgagatgggctgtgggtgtaaagtacagagcagatctcaaagacttatatgaaaaaagaatgtaaaatatctgtttaattttctacattgattacatgttgaaatagtaatcgtttataatattgaataaattaaaataatttactaaaatcaatttcattagtttttttttgctgtataatgtgacttagaaaatatagagtcatatacatgactcatgctatagttttatagaagaacacagctc

SEQ ID NO: 922837 - DNA, 691 bp, Homo sapiens
gtaaaaagcagtataggtgactagatgttttcctcttgctaattttaaaattctttatttaactttgacgttagacattctgaatataatatgccatgatgtagtcctttttgcagtgtattttcgtggggatcattggatcttctggatctggatggctaactctgttgatagacttgggaagttgtcatcaattattttcttaaacagattttctatactttttgatacctcstcacccttgggagtactgatcattcataaatttgctcattttatgtagtcccagacatctcaaaggctttattcattctttttaattatttttgtcttattttaaaattattttaaaagacctgtcttcatgttttgagattctttcttttacttcatctaacctattattgaagctttcagatatattttatatttccttcaatgaattattttagtttcagaatctctgctttttttaaaaaagtatctttcttcttggtaaatttctcattcacattctgaattgagattctgatttctttagtttgttttcagatttttcttgaatctcactaagctttaaaatcagtattttgaatcttttatttggcatttcaaggaattctttttgattggggtctattgctagacaatctttgtggtcctttagtggtgtcatatttccctgcttctt

SEQ ID NO: 922838 - DNA, 612 bp, Homo sapiens
aatgggcaaacgtgcccatttcaatcattagggaaatgcaaattaaaaccacaatgaaatactaccatgtacctgtgagaatattagtatgaaacacacacacatgacaaaagcaaaagtgagtaaggatttggagcaactaaatatcttgtacattgctgttgggaatctaaattgataaaatttrttgggaaactcatttaggttttatactagctctaagtacgacgtggaaattttactcttagtaaatacccaaataagcgtatgtatactcataccagctttatttgtgctagccatttaaacaaatgctaaacctagcctaaataactcaagatgatagaaatcagaatattgatgattttggggagagtgcataatatcagggagggacatgagagatatccccgtgatgctgataattttctatgtcttctgctgagtgatgtttatgctagtgtatttacctaatagttaattttagatctatatatcttatgcaattatactttaataataaaaatcgatgcccccctgccccaacaaaatgagatagcaacttaaaactgtccttaaggaatcacagttttacttatcatcaatacttgg

SEQ ID NO: 922839 - DNA, 597 bp, Homo sapiens
cataaaaacaaacacattgactagggggacaggatagaaaacccagaattaaacccatgcatttatggtcagctgatttttattgtttatttatttatttgcttacttattagaggcagggtctcactatgttgcccaggctggcctgaaactcctgggttcaagcaattgtcagcccctcaagtagctgggattacaggcatgtaccaccatgcctggtgctggtcagctgatttttgacaagggtgccaggaacacacaatgaggaaagcacaatctctttaataaatggtgttaggakaactggctatttattcagaagaatgaaactagatacttacattacaccatatacaataatcaactaaaatggataaaagatttagctacaagaccagaaactatagaacaactagaagaaaaaatgggaggaaagcttcaggacactggtttggctaatgactttttggatatgaccccaaaagcacaagcaacaaaagcaaaaatagacaaattggatggcattaaacaaagaagcttctgtacagcaaaggaaacaattaacaaagtaaagagacatcctacagaatgggagaa

SEQ ID NO: 922840 - DNA, 581 bp, Homo sapiens
cggcaaagtaaaatttcctgctacctgggaaggtctaattataaaaccacctaaacaagctttcgaaatctgtctgtgaactactcaacatcaatatgggtttaacttaaagagggaaataaaggtgaaattatttgaagcatgtattacagaagaaatcaggaatattttataattttctaaagtctatatgtttaattgaagctrccttgggttttaatatcatgtcttggtttttctatatgcagacttacaatctaaagtatggagtaatcaaaaccaaaaaaaaagtgaattatagtattttttgcccttctatcttagtgttcttcattaaagaacaaacaataaaagatcagcaaatacaggctgggcatggtggctcatgcctgtaatcctaacactttgggaggccaaggcaagcagatcgcttgagcctgggagtctgagaccagcctgagcaacatggtgaaaccctatctctacaaaaaacacaaaataaattagccaggtgtggtggtgcacacctgtagtcccaactactcaagaggctgaggtaggaggatcacctgagccggagg

SEQ ID NO: 922841 - DNA, 607 bp, Homo sapiens
gccggccctgccggccccgccggcccccagtaatgaggggcttagcacccaggccagcggctgcggagggtgtactgggtcccccagcagtgccagcccactggcgctgcgttcgatttctcgccgggccttagctgccttcccgtggggtagggcttgggacctgcagcccgccatgcctgagcctcccacccccctccgtgggctcctgtgccgcctgagcctccccsatgagcaccgccccctgctccacagcgcctagtcccatcaccacccaagggctgaggagtatgggtgcacggcgcgggactggcaggcagcttcacctgcagccccggtgcaggatccactgggtgaagccaagtgggctcctgagtctggtggggaggtggagaacctttatgtctagctcagggattgtaaatacaccaatcagcaccgtgtgtctagttcagggtttgtgaatgcaccaattgacactctgtatctagctactctggtggggacttttggagaacctttgtgtggacactctgtatctagctaatctagtggggacgtggagaacctttgtgtctagctcagggattgtaaacgcaccaatcag

SEQ ID NO: 922842 - DNA, 672 bp, Homo sapiens
agcatatgctactatctaaaatctgtgtcttttttatgggttatcattgaaaccacctttgcaaaaattataacagaaaattatggcagtggagaagatctgatctcaccaacccccatcttgcatttggccttcaagctgtccttaattattcctggggttgggccaagctgacttcaggagacatttagtttatagcttaaatgataaagcccttcccacaaactctatcacctttgtaaagctaatgagacrccaccaggctaggaggatagagaagcctgaattctgctaatctgtataaataaacaacttccagccattattgcagaggtcacaagatatgcaaattccccaattactcctgtacatgacatctctaatgtagaacctaagactggccctttgagatatcttttcagtttttatgtctgatgagtgatggctccacttggacctgccaactgctcctgtggctccacccagaagagattcagtgcacaggaggaccatttcccacattcctacgattgcacccccaaccaatcagtagcaagcatccaatgtctagccactcccaccccttcccccaaattaccattaaaaaacattagcctcaaaattacctgggagactgatttgtgtagaaataaaactctggtattctattca

SEQ ID NO: 922843 - DNA, 488 bp, Homo sapiens
tgaattattctttgcccattgcaattcttctgtcttgtgaaattgactctgtctaagcagcaggcaaggtgaacccagtgggcagttacagggctatctagttgcaggaaaacaagttcaagactccctctgaatttacattatggtgagttgcataattatttcattatatcttacaatgtagtaataatagaaataaagcatacaataaatgtagtgtgattgaatcatccccaaaccattctcacccccacagtctgtggaaaaattgtcttccatgaaaccagtccctcgttccaaaaggtttggagctgctggcccatgacacagccctaggagatcctgasaataggttcctaagatggtcgggctacagcttggttttacacattttagggagatagaagacatcaatcaatacatgtacaaagtacatcggtctggtccagaaaggcaggacaactagaagtggggacttccaggctata

SEQ ID NO: 922844 - DNA, 543 bp, Homo sapiens
gtggccagatgtgatgaaaaggaaacattcccacggttgacgggaatgtaaactggcacagccactatggaagacagtatgaaggctctgcaaaaataaaactaaaaatgaaactgccttatgagaggccgggcacagtggcccacgcctgtaatcccagcactttgggaggctgaggcagaagggattgcttgaggccaggagttcaagaccagcctgggcaacatagtgagamcctacctctacaaaaagtaaaaatattagctggacatggtggcacatacctgtagtcccagctactcaggatgctgaggcaagatgattgcttgagcctgagaggtcgaggctgcagtgaactatgattgcaccatggcactccaacctgagtgacaggtcgtctcttaaaataaaaaagaaaagaaaagaaataaattccatataatccagcaatccttcttctgtgtatatatgcaaaggatataaaagatctctgcagccccatgtttattgctgcattactcacaatagccaagataatgaaac

SEQ ID NO: 922845 - DNA, 619 bp, Homo sapiens
ctgagctagacacagtgctgattggtgcatttacaatcctttagctagacataaaagttctccaagtcctcactcgattaactagatacagagcactgattggtgtgtttacaaaccttgagctagacacggagtgttgattggtctgtttacaaaccttgagctagacacagagtgctgattggtgtatttacaatcctttagctagacataarggttctgcaagtccccactagattagctagacacagagcacagattggtgcgtttacaaagcttgagctagacacaggctgctgattggtgtgtttacaaactttgagctagacacagagtgctgactggtatatttataatcctttagctagacataaaagttctccaagtacccactggactcaggagcctaggtggttttgtttagtggattccgctgctttggctgagctgcctgccagtccggcaccaggcacctgcacttctcagcccttgggcagtggatgctaccaggcgccgcggagcagtgggcggcgcccagcagggaggcttgggcgcatgcgggagcccaccaccggggtcggggggctggggcatagcgggctgcaggtcctgagccctg

SEQ ID NO: 922846 - DNA, 619 bp, Homo sapiens
ctgagctagacacagtgctgattggtgcatttacaatcctttagctagacataaaagttctccaagtcctcactcgattaactagatacagagcactgattggtgtgtttacaaaccttgagctagacacggagtgttgattggtctgtttacaaaccttgagctagacacagagtgctgattggtgtatttacaatcctttagctagacataaaggttctgcaagtccccactagattagctagacacagagcacagattggtgcgtttacaaagcttgagctagacacaggctgctgattggtgtgtttacaaactttgagctagacacagagtgctgactggtatatttataatcctttagctasacataaaagttctccaagtacccactggactcaggagcctaggtggttttgtttagtggattccgctgctttggctgagctgcctgccagtccggcaccaggcacctgcacttctcagcccttgggcagtggatgctaccaggcgccgcggagcagtgggcggcgcccagcagggaggcttgggcgcatgcgggagcccaccaccggggtcggggggctggggcatagcgggctgcaggtcctgagccctg

SEQ ID NO: 922847 - DNA, 744 bp, Homo sapiens
ggtctgtttgcggagaagtttccgactttacctggagcagagtcaagttggagagcccagcgaaaaacagggggagaggaagcagcagtaaggccctgggagcttgctgggtcccctagcagcccattcctgtctggcaccacagggatcctttgggagggtggcctgaggagcagggggtaaaactccacagggagaaggaattctgtagctgaactttgtaacaatttgaaccccgcgagaagcctcctggccagaactcaggagggggctcgaatccagcgtgcagactccacaggcgggggaagaactaaagcccttttctttctcagctaggaggtggaaagcctgcgacaagttttcaaaaccatcttgctcttcacctggaaacagatgcagggctattgtggagggcacagtgggagtgagaccagcccttcagtttgcatgggagctgggtgaggcctgtgagtgccagctttcccgcacttccctgacccctgcatgactcagcagagggaaccataatcctactatttacgcaattccagtgacctgggaatctcacccccattccccacagcagccacagcaagacctgcccyaggagagtctgagctcagacatgactaaccccgcccccacctgctggtccttccctacccaccctgttagtggaagacacaggacatataatcttgggagttctagggccctgcccaccactggtccctttccacacta

SEQ ID NO: 922848 - DNA, 593 bp, Homo sapiens
ccatggagaacatttgtgtctggcccagcgattgtaaatacaccaatcggcactctgtatctagctcaaggtttgtaaacacaccaatcagcatcctgcatctagctcaaggtttagtgaatgcaccaattgacactctatatctagctactctggtggggccttggagaacctttatgtctagctcagggattgtaaacgcaccaatcagcgccctgtcaaaacagaccacttggttctaccaatcagcaggatgtgggtggggccagataaaagaataaaagcaggctgccggagcttgtagtggtaacccgttggggttttycgtgctgtgataaggtttgtttgtttgtatttggcgtctgcgttgcctttatgagctgtagcgctcactgcgaaaattgtcactttatttctgaagtgggtgagatgacgagcccggtaggaggaacgaaacactcatctgtgaaagttgcaacttcatttctgaagtgggtgagacgactctgtgaaagttgcaacttcatttctgaagtgggtgagacgacgagcccattaggaggaacggaacactcactgcgaaagttgcaatt

SEQ ID NO: 922849 - DNA, 593 bp, Homo sapiens
ccatggagaacatttgtgtctggcccagcgattgtaaatacaccaatcggcactctgtatctagctcaaggtttgtaaacacaccaatcagcatcctgcatctagctcaaggtttagtgaatgcaccaattgacactctatatctagctactctggtggggccttggagaacctttatgtctagctcagggattgtaaacgcaccaatcagcgccctgtcaaaacagaccacttggttctaccaatcagcaggatgtgggtggggccagataaaagaataaaagcaggctgccggagcttgtagtggtaacccgttggggttttccgtgctgtgataaggtttgttygtttgtatttggcgtctgcgttgcctttatgagctgtagcgctcactgcgaaaattgtcactttatttctgaagtgggtgagatgacgagcccggtaggaggaacgaaacactcatctgtgaaagttgcaacttcatttctgaagtgggtgagacgactctgtgaaagttgcaacttcatttctgaagtgggtgagacgacgagcccattaggaggaacggaacactcactgcgaaagttgcaatt

SEQ ID NO: 922850 - DNA, 593 bp, Homo sapiens
ccatggagaacatttgtgtctggcccagcgattgtaaatacaccaatcggcactctgtatctagctcaaggtttgtaaacacaccaatcagcatcctgcatctagctcaaggtttagtgaatgcaccaattgacactctatatctagctactctggtggggccttggagaacctttatgtctagctcagggattgtaaacgcaccaatcagcgccctgtcaaaacagaccacttggttctaccaatcagcaggatgtgggtggggccagataaaagaataaaagcaggctgccggagcttgtagtggtaacccgttggggttttccgtgctgtgataaggtttgtttgtttgyatttggcgtctgcgttgcctttatgagctgtagcgctcactgcgaaaattgtcactttatttctgaagtgggtgagatgacgagcccggtaggaggaacgaaacactcatctgtgaaagttgcaacttcatttctgaagtgggtgagacgactctgtgaaagttgcaacttcatttctgaagtgggtgagacgacgagcccattaggaggaacggaacactcactgcgaaagttgcaatt

SEQ ID NO: 922851 - DNA, 631 bp, Homo sapiens
ctagatacagagtgttgattggtgcattcacaaaccttgagctaaacacagggtgctgattggtgtatttacaatccctgagctagacataaaggttctccaaggccccaccagagcagctagatgcagagtgtcgattggtgcactcacaaaccttgagctagacacagggtgctgattggtgtgtttacaatccctgagctagatataaagactctccacatccccaccagactcaggagcccagttggcttcacccagtggatcccacactgggggtgcaggtggagctgyttgccagtcccgcaccgtgcgctcgcattcctcagcccttgggtggtcgatgggactgggcgctgtggagcagggggtggtgcttgtcggggaggctcgggccgtacaggagcccatggagtgggtgggaggctcaggcatggcgggctgcaggtcccgagccctgccccgcgggaaggcagctaaggcccggcgagaaatcgagcgcagcgccggtgggctggcactgctgcgggacccagtacaccctccgcagccgctggcccgggtgctaagtccccctttgcccggggccagcagggccggctgctccgagtgcgcggcccgccaagcccac

SEQ ID NO: 922852 - DNA, 631 bp, Homo sapiens
ctagatacagagtgttgattggtgcattcacaaaccttgagctaaacacagggtgctgattggtgtatttacaatccctgagctagacataaaggttctccaaggccccaccagagcagctagatgcagagtgtcgattggtgcactcacaaaccttgagctagacacagggtgctgattggtgtgtttacaatccctgagctagatataaagactctccacatccccaccagactcaggagcccagttggcttcacccagtggatcccacactgggggtgcaggtggagctgtytgccagtcccgcaccgtgcgctcgcattcctcagcccttgggtggtcgatgggactgggcgctgtggagcagggggtggtgcttgtcggggaggctcgggccgtacaggagcccatggagtgggtgggaggctcaggcatggcgggctgcaggtcccgagccctgccccgcgggaaggcagctaaggcccggcgagaaatcgagcgcagcgccggtgggctggcactgctgcgggacccagtacaccctccgcagccgctggcccgggtgctaagtccccctttgcccggggccagcagggccggctgctccgagtgcgcggcccgccaagcccac

SEQ ID NO: 922853 - DNA, 732 bp, Homo sapiens
gcgctgcacgcagccccggttcccgctcgtgcctctccctccacacctccctgcaagctgagggagtgggctccagccttggccagcccagaaaggggctcccacagtgcagtgggggggccgaagggctcctcaaatgccaccaaagtgggakcccaggcagaggaggtgccgagagcaagagagggctctgagaactgccagcacgctgtcacctctcactttgaccaacgtctccccattcccgtgttccccagccccaggcaagccgctttctactctctgctttcatgagttctagtttagattccagatatcaatgaaatcattcagtatttgtctttctgtgcctgggcctggtttatttcacttagcataatgttttctaagttcatccatgtcgaaaatgacaatttttttttaagattgggtaatattccaccagatatatgtataccacactttctgtagccattcattcatggacagacacttggcttgttttcatatcttggccattgtgaatagtgctccaatgaacatgggagtgtagataccacttcaaggtaaggatttcatttcctttggagatatacccagtagtgaaattgctggatcatacggtaattctatttttaattttttgcgggacttccatactgtttccctgaatgcttgtactaatttaaattcccagcaacagtgtgcaggtgttcccttcctccacatccg

SEQ ID NO: 922854 - DNA, 594 bp, Homo sapiens
ccagcaagcgctgcacgcagccccggttcccgctcgtgcctctccctccacacctccctgcaagctgagggagtgggctccagccttggccagcccagaaaggggctcccacagtgcagtgggggggccgaagggctcctcaaatgccaccaaagtgggatcccaggcagaggaggtgccgagagcaagagagggctctgagaactgccagcacgctgtcacctcycactttgaccaacgtctccccattcccgtgttccccagccccaggcaagccgctttctactctctgctttcatgagttctagtttagattccagatatcaatgaaatcattcagtatttgtctttctgtgcctgggcctggtttatttcacttagcataatgttttctaagttcatccatgtcgaaaatgacaatttttttttaagattgggtaatattccaccagatatatgtataccacactttctgtagccattcattcatggacagacacttggcttgttttcatatcttggccattgtgaatagtgctccaatgaacatgggagtgtagataccacttcaaggtaaggatttcatttcctttg

SEQ ID NO: 922855 - DNA, 732 bp, Homo sapiens
gcgctgcacgcagccccggttcccgctcgtgcctctccctccacacctccctgcaagctgagggagtgggctccagccttggccagcccagaaaggggctcccacagtgcagtgggggggccgaagggctcctcaaatgccaccaaagtgggatcccaggcagaggaggtgccgagagcaagagagggctctgagaactgccagcacgctgtcacctctcactttgaccaacgtctccccattcccgtgttccccagccccaggcaagccgctttctactctctgctttcatgagttctagtttagattccagatatcaatgaaatcattcagtatttgtctttctgtgcctgggcctggtttatttcacttagcataatgttttctaagttcatccatgtcgaaaatgacaatttttttttaagattggrtaatattccaccagatatatgtataccacactttctgtagccattcattcatggacagacacttggcttgttttcatatcttggccattgtgaatagtgctccaatgaacatgggagtgtagataccacttcaaggtaaggatttcatttcctttggagatatacccagtagtgaaattgctggatcatacggtaattctatttttaattttttgcgggacttccatactgtttccctgaatgcttgtactaatttaaattcccagcaacagtgtgcaggtgttcccttcctccacatccg

SEQ ID NO: 922856 - DNA, 612 bp, Homo sapiens
agggacccggtggaaggtaattgaatcatgggggcaggtctttcctttgcgattctcatgatagtgaataagtctcatgagatctgatggttttaaaaggaggaggtctcctgcacaagctctctctctttgcctgctgccatccatgtaaaacatgacttgctcctccttgccttccaccatgaytgtgaggcctccccagccacgtggaactgtgagtccatttaacctttttcttttgtaaattgcccagtctcaggtatgtcattatcagcaatgtgggaacagactaatacagccaggaacacaaaaatgaataacatggctccttcttgaaaaggaaactttggctagtagggataaaatggataatgaaattattctaatacaatgcaacatataatatttcaataatgcccaagataaaaaaaatagtagaaagattgatcaattatttggtggtagtagaatttaaggatggtttactggaagcaatgacacctgaactagatttgaaagaatgaagagatatttacaagtgaccaaggataaggggaagaacattccacgaagatagagtaaaagagaaagtgtcatgagagtaagaaatta

SEQ ID NO: 922857 - DNA, 745 bp, Homo sapiens
aagaaagaggcgcaatgcctagtgggcctatttggattttggaggcaacacgtgtattcctcatttgggtgtattactctggcccatttatcgagtgacccaaaggctgccagttttgagtggggtccagaaaaggagaaggatctgcaacaggtccatgttgctctgcaagctgctctgccacttgggacatatgacccagcagatccaatggtgcttgaagtgtcagtggcagatagggatgctgtttggagcttttggcagcctcccataggtgaatcacgggaggcctctaggattttggagcaaggccctgccatcttctacagataaccattctccttttgggagacagctcttaggctgttacactgggctttggtggaaaytgaacgtttgactatgagtcaccaagtcaccatgcgacctgaactgcctatcatgaactgggtgctttctgatccatctagccataaagtgggttgtgcacagcagcattccattatcaaatggaagtggtatatacatgatcaggctcgagcaggttctgaaggcatgagtaacttacatggaataacttacatgaggaagtggctgaaatgcccatggtctccactcctgccttctctcctccagcctgcagtgatggcctcatggggaattccctatgatcagttgacagaggaagagaagactagggcctggttcacagatgcttctgcatgacatgcaggcaccacacaaa

SEQ ID NO: 922858 - DNA, 811 bp, Homo sapiens
aatggatattcacatgtaaaataatgaagttggacctttgcctaatatcatatacagaaattaactcaaaatgtgtccaagatctaaatgtaaggttaaaaactgtaaaactctaaaacatagggcaaaaacttcatgaaataagaattggcaatgatttcttggctatgatatcaaggtacaggtgacaaaagaaagaaaataaattgcacttcatgaaaatcaaaagttttgtgcatcaagagataatatacacagaataaaaggcaactataaaatcagggataatatttgtgaattatatatctgataagtgattaatagccagaatatgacaaaaaataacccgattcaaaaaggggcaaaagacttggatcagcttttctccaaaagagatactgatagggacaggagacagataaattcctagggagacagaagtgtgtccccagtgaaacccaaccgtcaaaccaaagcctgaaaactgagctactggttctgggcatagtccaygactggagtaagaacttcctcaatgccttttagccaatggaatgatgacttttccaggcctgttcatggaccaatcagcatgcactctcccattctaagcccataaaaaccctggactcagcctcacagatggctacccacttccatgacccctctcacacagagggctacccacttcatgttccctctcatttctgaaagcttttctgtcactcagtaagattcttctctgcctcactcactctccaagtccatgtacctcattcttcttggtcggggacaataacccaggagcaaa

SEQ ID NO: 922859 - DNA, 725 bp, Homo sapiens
aacttcctcaatgccttttagccaatggaatgatgacttttccaggcctgttcatggaccaatcagcatgcactctcccattctaagcccataaaaaccctggactcagcctcacagatggctacccacttccatgacccctctcacacagagggctacccacttcatgttccctctcatttctgaaagcttttctgtcactcagtaagattcttctctgcctcrctcactctccaagtccatgtacctcattcttcttggtcggggacaataacccaggagcaaaaaaggcgtgctcctggctggttcactgagctgcaggtggcatgaattaaaagagatgtgacatgctcccatttgccagactacaggagcgaagagctgcatcccttctgggagcccagacttcaagactccctgagccagagtataacacacagagaactgtggcattccctggtggcttagacctcggtactccccaagcagaagctatggcacccacttggagctctgtggttgctgctggcatctttgcgtccccattgtccagatgccagcgtccaagacagaagctggtcatgacacactggaccagacacaggctgagcacagaaccatgatgggcacgggatccaggccagtagcacaagccaagtgtaggctgctgggctgagtgtgcagaacaatcccaacaggcctgagcaaagtccaggcagagacac

SEQ ID NO: 922860 - DNA, 690 bp, Homo sapiens
aatggcctttcgaaatcacaattacactgctaactaggtgacgatactttgcagggctggggcaagtttctccagaaggccttggatgctctgaatcagtgtccaatatttggtactgtttctccaatagtcaaaaatcaggggtccaggaacmaaggggtggaaacggctccactcaccatcacccctagtgaccactagcaaaatgtttgcttccttttcccacaacattacagtctgctggcctagaggtcttagttctggagggaggaaagctgccaccaggagacacaacaatgattccattaaactggaagttaagattgccacctggacactttgggctcctccaacctttaagtcagacttaaggctaagtagagggtaacagtgttgtctggggtgattgacccagactatcaagatgaaatcagtctactactccacaatggaggtaaggaagagcatgtatggaatacaggagatctattagggcatctcttagtattaccatgtgctgtgattaaggtcaatgggaaactacaacagcccaatccagggaggactacaaatggtccagacccttcaggaatgaaggtttgggtcactccaccaggaaaaaaaaccatgacctgctgaggtgcttgctgacagcaaagggaatacagaatgcgtagtagaagaaggtag

SEQ ID NO: 922861 - DNA, 740 bp, Homo sapiens
gatagaacggtggaatggcctttcgaaatcacaattacactgctaactaggtgacgatactttgcagggctggggcaagtttctccagaaggccttggatgctctgaatcagtgtccaatatttggtactgtttctccaatagtcaaaaatcaggggtccaggaacaaaggggtggaaayggctccactcaccatcacccctagtgaccactagcaaaatgtttgcttccttttcccacaacattacagtctgctggcctagaggtcttagttctggagggaggaaagctgccaccaggagacacaacaatgattccattaaactggaagttaagattgccacctggacactttgggctcctccaacctttaagtcagacttaaggctaagtagagggtaacagtgttgtctggggtgattgacccagactatcaagatgaaatcagtctactactccacaatggaggtaaggaagagcatgtatggaatacaggagatctattagggcatctcttagtattaccatgtgctgtgattaaggtcaatgggaaactacaacagcccaatccagggaggactacaaatggtccagacccttcaggaatgaaggtttgggtcactccaccaggaaaaaaaaccatgacctgctgaggtgcttgctgacagcaaagggaatacagaatgcgtagtagaagaaggtagtcatcaataccagctatgacctcgtgaccaggtgcag

SEQ ID NO: 922862 - DNA, 617 bp, Homo sapiens
atgttctatttcttgtcctggtcggtgggtctggaggcattatttcatttttattattttaaatgtaaatagtaattcattcaacaaataaatgtctatcatgtatcaggcactattttaggcactggaaaaacagaaataaataaaatagataaaartgtgtccttatggagctcacaaagtatccaagaaataataaaactttccagagtccaagtacaaaaacatacaaactgaaagagtctacctaccaggtatctaggacaacagatatacaaatatccacacatcatcatgaaagtttagaatattagggataaagtggaaatcccaaaagctttcaggattgaaaacagcccagactggatcaagagagaaggctctacaaaggggatttctagaaaataaatattctgaatactctgacgttttttagcagttacacaaaaatagacatatgatagagctaacagaaaaaataaggatattttgggaggccaaggcgagcagatcacttgaggtcaggagttcgaaaccagcctggccaacatggtgaacccccatctctactaaaaatacaaaaaaattagccagatatggtgggcgcctgtaatccc

SEQ ID NO: 922863 - DNA, 608 bp, Homo sapiens
aaggcagaaataacaatgttctttgaaaccaataagaacaaagacccaatgtgccagaatctctgggacatagctaaagcagtgtttagagggaaatttatagcactaactgcccacaggagaaagggggaaggatccaaaaygacaccctaacatcacaattaagagaactagagaagcaagagcaaacacattcaaaagctagcagaagacaagaaataactaagatctgggcagaactgaaggagatagagacagaaaaaaaccctccaaaaaatcaatcaatccaggagctggttttttttaaaagattaacaaagtagacctctagccaaactaatatagaagaaaaaagaatcaaatagacaccataagaagtgataaaagggttatcatcgctgatcccacagaaatataaactaccatcagagaagatgataaacacctctacacaaataaactagaaaatctagaaattcctggacacatacatcctcccaagactaaaccaggaagaagccgaatccctgaatagaccaataacaagttctgaaatttaggcagtaattaatagcctacaaaccaaaaaaaagcccaggaccggatgg

SEQ ID NO: 922864 - DNA, 585 bp, Homo sapiens
cctcccagtagtgcataccaactttcaaagtctgtttaattgtatcttagtgtctgattccaattttatttcttgaaggaggggagtgtctctaatgtcttattttggcacccagagaccaggcaggcatcatttttgtcccaaattgtggaaggaatgtacatttggcacagattacttcccttttttctcttgtacrcctttcaccttttttgtttttgtctttttttttttgagtttgatgtgtttggacagtaacggtttacgagattaagattaaatttcaactttgtctattgtgcatatagcctaaggaaaacaaaaagttaaagaggaaaaatacattgcctctaaaaagaagactcattattcaactttttttatttttaattgttttcagagactgggtctcaccctatcacccaggctggagaggtgatcacagctcaccgtagccttgaactcctgggttcaagggttcctcttgccttagtcttctcactagctgagactgcaggcccacgccagcacacctggctaattttacaaaaattgttttggagagacgtggtcttgccatcttgc

SEQ ID NO: 922865 - DNA, 585 bp, Homo sapiens
cctcccagtagtgcataccaactttcaaagtctgtttaattgtatcttagtgtctgattccaattttatttcttgaaggaggggagtgtctctaatgtcttattttggcacccagagaccaggcaggcatcatttttgtcccaaattgtggaaggaatgtacatttggcacagattacttcccttttttctcttgtacacctttcaccttttttgtttttgtctttttttttttgagtttgatgtgtttggacagtaasggtttacgagattaagattaaatttcaactttgtctattgtgcatatagcctaaggaaaacaaaaagttaaagaggaaaaatacattgcctctaaaaagaagactcattattcaactttttttatttttaattgttttcagagactgggtctcaccctatcacccaggctggagaggtgatcacagctcaccgtagccttgaactcctgggttcaagggttcctcttgccttagtcttctcactagctgagactgcaggcccacgccagcacacctggctaattttacaaaaattgttttggagagacgtggtcttgccatcttgc

SEQ ID NO: 922866 - DNA, 687 bp, Homo sapiens
gctgtgagacacctcccagtagtgcataccaactttcaaagtctgtttaattgtatcttagtgtctgattccaattttatttcttgaaggaggggagtgtctctaatgtcttattttggcacccagagaccaggcaggcatcatttttgtcccaaattgtggaaggaatgtacatttggcacagattacttcccttttttctcttgtacacctttcaccttttttgtttttgtctttttttttttgagtttgatgtgtttggacagtaacggtttacgagattaagattaaatttcaactttgtctattgtgcatatagcctaaggaaaacaaaaagttaaagaggaaaaatacattgcctctaaaaagaagactcattattcaactttttttatttttaattgttttcagagactgggtctcaccctatcacccaggctggagaggtgatcacagctcaccgtagccttgaactcctgggttcaagggttcctcttgccttagtcttctcactagctgagacygcaggcccacgccagcacacctggctaattttacaaaaattgttttggagagacgtggtcttgccatcttgcctaggctggtgtggaactcctgggttcaagcaaacctcccaccttggccaccctaagtgttgggattacaggcgtgacccattgtgcccag

SEQ ID NO: 922867 - DNA, 734 bp, Homo sapiens
tgagttactgagaatagcctaatctctgaaaatgttttccaacctatggtgcatgtaatatactcttctatggtacctctttccaatgtctttattgtggcaaaatatacataacagattataccatttttaagtgtagaatttagtggtagtaagtatagagagaaycttaaaagcagcaagagaaaagtgacttctcatgtgcaagggagcctctagaagattatcagtggatatttcagcagaaaccctgcaggccagaaggtggtgggatgatacattgaaagtactgaaagagtaaagcctgccaactgagaatactatatttgacaaaattgtccttcaaaagtgaaggagaaattaagacattcccagataaataaaagctgaaggagtttattaccactagacctgaccaataagaaataataaaggggccgggcacagtggctcatgtctgtaatcccagcactttcgggagccgaggcaggtggatcacctgaggtcaggtgttcaagaccagcttgaccaacatggcgaaaccccatctctaataaaaatacaaaaattagctgggtgtggtggcacgcacctgtaatcctagctactcaggaggctgaggcaggagaatcacttgtacccgggaggtagaggttgcagtgagctgagatcacaccactgcactccagtctgggcaacggagcgagacttcatctcaaaaaaaaaaaaagaaa

SEQ ID NO: 922868 - DNA, 693 bp, Homo sapiens
tcccaaaccttctgtgttaagaacgtttttgcatctgtttggatttcatggctgtttttccattttccgtgcacacatgtccaattgtaccaccctattataatgcacactcttttctcacacccacaggataatttgtagttccacagctatttgttgagcatcctcatctgccagcacaggatgggggtggcaagtgaggggaaacacagatatgtggtattggtccctgcctgtggtagacgtgattggttacctacagtggctcttcttttctcttcctgctggcaggacccagttgggttggatgccacacctctcccacacgccactcaaggaaaggtgaccctgcctccagctctagggtatgtgctgattgagctgagcccatcctggaggcccgtagtttagacatggttttggccactgaggtatgagaagtctgctgggagatgctgggaaagatgtttttccttgtaaaaggaaatgcagaagggacagcttctttcactagattctcrgacgtgaagcagccatcttgttgcaatgaggaaagcaggtttgttgaggccagcagacgggaagagatgggaaaaaccctgagggccaagcccctgaagactgaagcgtccaatctccatacattttgtcctcactgttgaagccagttgagtgggaattttctactactta

SEQ ID NO: 922869 - DNA, 625 bp, Homo sapiens
cagaaacctgattctgggctccttttgcgaaggaggatttggggtctggtgagagcaaatgattttgcaagtataaaaccatgtccagagaggctgtagggatatctgtgagcccagaggaaacaccaggggatcctgtgcgaagcaccatggcttcagctagggtgggaggagtgggtgggcctctctctaatgacttatcctggtgtttgtgtttctaaagrtttgattgtggagagcatatctgatgatggggatttgtaggtaggtaactgctttccacgtaagatccaattggagagagttcccaggggccttcggggtatccatgctgcttgggaggttaagggagggggcatgaaatcaaaaggaaacaggaaatatgtgtcatattggatttggtcttttccgggtttattggcataatagttagaactgtctctctgggctatgagggtgctgtgttatttaaaggtggtctttcccagaacacctggccttttcttttctgcctctgccaaacatcacagcctttgggttggattagtcagcaccccttgggattgtgcagaagaggtttggggttgcatcgagtgtcacctgtggtgaacagaatctgagagac

SEQ ID NO: 922870 - DNA, 691 bp, Homo sapiens
ataatagttagaactgtctctctgggctatgagggtgctgtgttatttaaaggtggtctttcccagaacacctggccttttcttttctgcctctgccaaacatcacagcctttgggttggattagtcagcaccccttgggattgtgcagaagaggtttggggttgcatcgagtgtcacctgtggtgaacagaatctgagagacacaactctctcacaggcacttcctccaacctggagacagaattctcctggtgtgtgcccaggggtggaggagaaattgacagtytgcctctgaactttcaggactttaaaaagcactcatgtttccatcctcactgttgactcctggcttaaagggatctcccggggtgagtgaggaggcgggatcggaccctggcagtctgacggcagcacctgtgttcctctgcactgggccgtggatgacattacacaccttggtgagaatcaggaattgaggctaaccacatctgaaattgagatgggccttgagtcatataaatagtttggaaaagatgcattttactacgtacgctattgaaagaaaccatttatttctcactccagcaggataaatggttttcagtatccatttaactgctcattgactcttactgtagatgaggaggtggccagcagcccctgccctcccccagttggtaggcccaaggt

SEQ ID NO: 922871 - DNA, 656 bp, Homo sapiens
ttataagagagaacatgcattatgttttgtttgttttttgctggtttttttttttttttttaatggagtcttgccctgtagcccaggctagagtgcagtggcacaatcttggctcactgcaacctccgcctcccaggttcaaacgattctccctcctcagcctcccgagtttaaagtatgtatttttttaaagaaaatcstcttcagtgattttctaatttttctagattttctagtttttccatgcctattttcagcaggttgcattaacatgtacgtggtgacttagctttctgaaaagagctatggtataatgaatatatgccacttgccagaaaccatggtcaacaccatacatacctcattcctaagtgacctataaacatagcaaggctggcattaccatgcccattttatagatgaaaagatcaaggcttggtgatgctaagagacaggtctaaagctacaagtttacaaagtaacaaagtcaatttaatcataagcacattcacttctttgttcacttttcagatacaatgtttaaaaatatgtcaaatgataagcatttcctatttgttttactctgaaatatagtgatgtcctttgccagctacttaaaaatgttttgtccttactctgaaatatgaataactgat

SEQ ID NO: 922872 - DNA, 678 bp, Homo sapiens
cctgctgctgttcgccgggtgctgctgacacctgcgaggcagagaaaaggcgttcaggtggttcacaccccacacaggtgcccctcacagggtcctcactggcggccagcgctgtgggtgtgacgatgatgacaagcctaaactgcgcaaggactcgtgtcccgggcgctccatgtgaccacctcgggagaggtctccggcttgtcgtaacccagaggagtgacccactgcctcctgcagctctttcagacccagttgcaaagaagagctgcatgctcaacctgctgtcgtccctgccggaggccaacctgctcaccttccttttccttctagaccgcctggaaaggtagcccagctctcttgtggctgcccaggactccaggtctccaggccgtggggtgcccctctgctcccaccagacccccagcaccamggacctatcccctgacccctgtctgcagtaactcactgcttctaaggactagcaccactgccacccccgcccctgcctctcctctttgccaccctcctccctctgcactgtggccttaacaaagagctcagagctttggccgtggccagcagtgcatttggaccgcccccccttccctcccaagcacatcatgaagacctccccatcagcccagagctggccccttgtcctgggccactgagacc

SEQ ID NO: 922873 - DNA, 598 bp, Homo sapiens
cagctctcttgtggctgcccaggactccaggtctccaggccgtggggtgcccctctgctcccaccagacccccagcaccaaggacctatccccygacccctgtctgcagtaactcactgcttctaaggactagcaccactgccacccccgcccctgcctctcctctttgccaccctcctccctctgcactgtggccttaacaaagagctcagagctttggccgtggccagcagtgcatttggaccgcccccccttccctcccaagcacatcatgaagacctccccatcagcccagagctggccccttgtcctgggccactgagacccagaagtaccaaggctggagtcagcttgcagcacagccagggtcgaggtcactccctccctgaggactctagcacggcacagcccctctgcctctctcctggtggtggcgttgaaacagcaccctctgcttcggtcctctacaggatggcagagaaggaggcagtcaataagatgtccctgcacaaccttggcacggtgtttggccccacgctgctccggccctccgagaaggagagcaagctccctgccaaccccagccagcccatcacca

SEQ ID NO: 922874 - DNA, 553 bp, Homo sapiens
ctgtcttgtggtatgtctgtgggtgcggccccctgacacaggcagggcaggcacagcccaaggaccttgcaggccgtagcagcagtggagcggccctctgccttcaggaccctgtgctgataatgggatgaggagatacagacccttcccaccacgtgtggggacacattctgagcgtggggtcccagtggccactgtggctggccatgtgtcctgagtggcaagggacactaggaggctcccggaagggacactaggaggacaagcactgagtgacagggccacccacctgtgacaggcgctgcccctgctttgtgctggtctcctgtgtgggcagktgtgaggggtggtctagctgagtccaccccacctgctgcctcacatgagccccctctgccccagtgaggtgttctgccgggatagaaaggtgctttgggagggggagagactgaccctgccgcggctggctgacacctacgagatgctggccatcgagggtgcccaggccttctacaacggcagcctcatggcccagattgtgaaggacatccag

SEQ ID NO: 922875 - DNA, 691 bp, Homo sapiens
agatctctgaagagtctggacctgctgggtctccccgagtgactgtctgggggtctccatagcatgccctgctgtgtgcgtgacggtcactggttgggtaggggtctctactctaaagctccctctgccggcatcccctcgaactctcccttggtgaagagaggatgtggtttgccccagtgtttcatcaaacaactctctccacttccagttttaagaagctgggagtggaagagagcctggggctggccccagctgctgctgtgaaacaggggtcactggacgctgggaccctggccgggctggctggaggcctcaggaagaggcctgctacagcgtcatcctggccaagattcctccctgcagaggaccctggccacgctgccacagggtttgctggggccaccagaarcccatgctcctgcctccatctctcccctctgtgctcacctctcaccaggaggccctcccagagttcagtgtcctgctttttttttttttttttttttttgtgacggtgtctcactctgtcaccaggctggagtgcagtggcgcgatctcagcttactgcaacctctgcttcctcggttcaaatgattctcctgcctcagcctcctgagtagctgggactacaggtgccagccaccacgccccgctaatttctgtatttttagtagagacagggtttcac

SEQ ID NO: 922876 - DNA, 620 bp, Homo sapiens
tcattgatgggcatttgggttggttccaaatctttgctatagtaaacagtgccacagtaaacatacgtgtgcatgtgtctttgtagtagaatgatttatattcctttgggtatatactcagtaatgggattgctgggtcaaatggtatttctggttctaaatccttgaggaatcaccacattgtcttccacaatggtcggaytaatttacactcccaccaacagtgtaaaagcgttcctatttctccacatcctctccagcatctgttgtttcctgactttttaatattcgccattctaactggcatgagatggtatctcattgtggttttgatttgcatttctctaatgatcaatgatgatgagctttgttacacatgttttttggctgcataaatgtcttcttttgaaaactttctgtttatttcctttgactactttttgatcgggtttctttttttcttgtaaatttgtttaagttatttgtagattctggatattagccctttgtcagatggatagattgcaaaatttttctcccattccgtaggttgcctgttcactctgatgatagtttcttttgctgtgcaggaggtctttagtttaattagattccatttg

SEQ ID NO: 922877 - DNA, 497 bp, Homo sapiens
gggcaaggtgagagggagccactcaggcaacaaaacaccctaaattctgcatgcttgctctttaagaccatagtccatgcctggcttttggccagtggagaccaaaggcttgagattctgcagaaacagtcacttggccaccaacaaactagaaaaactagaagaagaggagagaaattccactaccttgttgaagtgagaaccctcygaacatcattgcttccccacaggacatggccagggacagacaggtatggcgagaactgcaagatcagcctcacagcacctttaatccatttaattcccaaagcagataaagcccctctatccttcatgtttgcaaaggcagatctcccccttgtaaagaggcaaagcaaaattaggctcaaaactacagaaaaccagctggttttacattgtacagaagtctgttgctattagggagatgagaggcagctaagaggtgtctcttcggcaggagcagtatgactctacca

SEQ ID NO: 922878 - DNA, 497 bp, Homo sapiens
gggcaaggtgagagggagccactcaggcaacaaaacaccctaaattctgcatgcttgctctttaagaccatagtccatgcctggcttttggccagtggagaccaaaggcttgagattctgcagaaacagtcacttggccaccaacaaactagaaaaactagaagaagaggagagaaattccactaccttgttgaagtgagaaccctccgaacatcattgcttccccacaggacatggccagggacagacaggtatggsgagaactgcaagatcagcctcacagcacctttaatccatttaattcccaaagcagataaagcccctctatccttcatgtttgcaaaggcagatctcccccttgtaaagaggcaaagcaaaattaggctcaaaactacagaaaaccagctggttttacattgtacagaagtctgttgctattagggagatgagaggcagctaagaggtgtctcttcggcaggagcagtatgactctacca

SEQ ID NO: 922879 - DNA, 479 bp, Homo sapiens
agcttggaaataatgatcctatttacctgctcactctcctcctctttctttacccagacatgttgattgctccttctgggacgcatggctgtttcttatgctagaaaaggtctctaaaaaccagctttgaaatgacttatttctgtgacctatagttttatttcttttaaaaaccaacagctggctactctccagaggcctgatctaattagcatagaagcagaactcatttacatgccatcacagccctgagtatactcatacttctcaaggtaagaaagaagtaggcagatctcattgaaattcacctttgggcaaatccctggaatrcctatttgccatccacaagagaactctacctagaggctgtatagcactatttctgacacctgataactaggggaaaactggatatataggaatgcaatacaacaaaaatatttttatacttcttttcttgatagtttaaggtaaactgt

SEQ ID NO: 922880 - DNA, 681 bp, Homo sapiens
gatctctctatggctgaatagtactccattgtgtatatgtaccatattttctttatccattcgtctgttgatggacacttgggttgattccaaatcttggctattgtggctagtgctgcaataaacatgaaagtgcaaatgtctctttgatatactgatttcctttctcttkgttatatacctagcagtgggattgctggattgtataatagctctatttttagctttttgaggaacctctatactgttctccatagtgaatgtacaaatttacattcctactaacagtgtatcagggttcccttttctccacatcctcagcagcctattgcctgtcttttggatacaagccattttaactggggtgagacgctatctcattgtagttttgattagcatttctctgatggtcaatgacgttgagcaccttttcatatacctgtttgtcatttgtgtaacttcttttgggaaatatctattcaaatcttttgcccattttaaaatcagattatcagatttttgtcctattgaattgtttgagctccttatacattctggttattaatcatttgtcagatggatagtttgcaaatattttctttcattctgtgggttgtctcttcactttgttgactgttttctttgctatgcagaagctttttaacttgatgtgatctcact

SEQ ID NO: 922881 - DNA, 564 bp, Homo sapiens
cctgataattttcacctgaggtctacactgcttccctgtggtcccaaaacacctatcacaccaaacagaaaatagctcattcacttgttcacctttccttctagagagcaagaggtttggaggctggggttgtgtatagttcaaagctatagctccacagcctaccatagtgtctggcatttagtaggtggttaacaaatacttgttaaatgggatgaaacactgctagtttgtatatatatttttctatctcttttcaaacaagttcacgttaacttaaaacatattaagcataatgcatggctgaatctaccagtctcagtatatatgttccttttaggttgacttacattttcattgccttttaaaagttatttttcatattagactmgtagtgtgactgcatcaaaataggcatacaagtgggaatattgaggtgatgcaagatccccattaaatgctctgcctaacagcagcttcatggatttccaaagtgtaaagatgcagaagaaagggaagcttaaggattcaaagatacgctttaccaggtgtttcattgtgaag

SEQ ID NO: 922882 - DNA, 616 bp, Homo sapiens
tccttgacgaacatagatacaaaaatcctcaacaaaatactagcaaactgaatccaacagcatattgcaaagataattcaccaagatcaagtcggtgtcatcccagggatgtggggatggttcaacatatgcaagtcaataaatgtgattcatcacataagcagaattacaaacaaaaaccatgtgatcatctcaataaatgcagaaaaaacattcagtaatttctaccattgctttatgaaaaacgcacaaaaaactagtcatagaaggaatatacctaaaataatgaaagcaacatatgacarattcacagccaacatcgcaatgaatgaggaaaagttgaaagtgttacccctaagaactggaacaacacaggatgcccacttccacctcttctattcaccactgtactggaagtctcagccagagcaattgggcgagagaaagaaataaagggcatccaaattggaaaaaagaaagtcaaactatttctggttactaatggtaagattttatagctacaaaacccaaagattccttcaaaagactcctgaatttgataaatgaattcagtaaagtctcaggttacaaaatcaatgtacataaatcagtagca

SEQ ID NO: 922883 - DNA, 616 bp, Homo sapiens
tccttgacgaacatagatacaaaaatcctcaacaaaatactagcaaactgaatccaacagcatattgcaaagataattcaccaagatcaagtcggtgtcatcccagggatgtggggatggttcaacatatgcaagtcaataaatgtgattcatcacataagcagaattacaaacaaaaaccatgtgatcatctcaataaatgcagaaaaaacattcagtaatttctaccattgctttatgaaaaacgcacaaaaaactagtcatagaaggaatatacctaaaataatgaaagcaacatatgacagattcacagccaacatcgcaatgaatgaggaaaagttgaaagtgttacccctaagaactggaacaacacaggatgcccacttccacctcttctattcaccactgtactggaagtctcagccagagcaattgggygagagaaagaaataaagggcatccaaattggaaaaaagaaagtcaaactatttctggttactaatggtaagattttatagctacaaaacccaaagattccttcaaaagactcctgaatttgataaatgaattcagtaaagtctcaggttacaaaatcaatgtacataaatcagtagca

SEQ ID NO: 922884 - DNA, 594 bp, Homo sapiens
atttcatcttctctcttcccatttggatgccttttatttctttctcttccctggttgctctggctaggacttccggtactgtgttaaatagcagtcgtagagtgggcatccttgtcttgttccagttctcagttccagttctcatgcctcctggttttgcctgtttagtatgatgttgactgtgcatttatcacagatggcttttattattttgaggtatgttccttcaatacttagtttgttgagggcttttytgaacatgaagcgatgttcaatttcattgaaagccttttctgcatctattgagattgatatggacaggagacagggaaataccgggtagaagagggcagttccccggcaaagaccccaccctcaagactggaagcccatggccctaaatgggaacaggcattcttgctttcgtgctcaaatgttgccttttggcccaccacgtttccctatcctgtacccatataaaccccaaaccccaagctttacgagcagacgagcaaatgagtggatgaacagaagagcagaggagcagaagagcagtgctgcagaggagagaaaagaaggagcatttgaacgttg

SEQ ID NO: 922885 - DNA, 577 bp, Homo sapiens
ctttggctgggatgctggggtagtgctgtaagtggatgaggccaggcagggacactgggagagaccagcagacagagggttgctcagatcagactggccctatattagtctgttcttatgctgctaataaagacatatccaagactgagtaatttataaaaggaaagtttaatggactcagagatctgcatggctagggaggactcacaatcatggcagaaggtgaaggaggagcaaaggcacattttacgtggtggcaggcaagagagcatgtgcagaggaactctgctttataaaaccatcagatttcatgacacttattcactatcacaagaacagcatgggaaagacccatctacataattcaattrtgttccactggatcccttttagaacatgtggggattatgggaactataattcaagacaagatttgggtggcaacacagccaagtaatatcagaccccatcccacaggaagcatagccttgctctgtccaatgccagcagctaataaagtctaaagctgcctaatggagtatggagaactttgtgggatgggcacccatggccatgc

SEQ ID NO: 922886 - DNA, 582 bp, Homo sapiens
actgatgcgatccctctcccaccctggcagcccctgcatggtacagagatcaccctgtgtctctaagtaagcttgaaaggcagtctaggccataaggactgcaactcttaggtgagtcctagggctgaattaggcccaatgacagtggactaggsgggcacgcggcatactgggacaccaactggagcagccaagggagtgcttgcatcacccctctcctaaccccaggctgtacagctcagggctccgaaagagactccttccttctacatgagagaaagagcaggaaaagtggggaggactttgtcttgcgtattggataccagctcagccacagcaggataggacactggtcagagctgggaggcccacattccaggccctaactcccagacgagatttctagacacaccctgagccagaaggaaatctgctgccttgaaggaaaggactcagtcctggcagcattcatcaactgctaactgaagagccctgggtcttgaataaccagcagcgatatgtcagggtactatgtcaaggggcttgggtgagcctctgagacttgctggtttcagttgagac

SEQ ID NO: 922887 - DNA, 762 bp, Homo sapiens
acaccaggtaaacttctaaggtttttgactctagtccctgactcctggatggcacttctgaacccattaggggtctgtgggaccttgctaccctgaagggaaggacacaggcctggctggctttgctacctgctgattgcagagccccagggccttgagtgaatataggcagtagccagggaatggttacagcaggacttgggcgagacatagcactgtgctggcttcaggcctgacccagtgcagtcacagtggtggtggccacaggagtgcttgtatcactccaccccccatgttaggtgggggggggrgggagagagagagagagagagagacagagagactctgtatgtttgggagaatgtaagggaagggaacaagagtttttatccaataatccagagaattctcctggatgttatccaagaccatctaggtggtacctctacagctctgcaagaaccacagcgtaactggacttggggtgccccctaaggcacatacagcctagatcacagcacccaagtcctttcaaatatctgaaaagccttcccaagaaggacagctacaaataagcccagtgaagacgacaatacatacctaacccttcaatccccagacaatgaagaacatctactagcatcaacaccatccaggaaaacatgacttcatcaaacaaactaaataaggtaccaagaaccaactctggagaaacagagatatgtgacctttcagatagagaattcaaaatagctgggttga

SEQ ID NO: 922888 - DNA, 762 bp, Homo sapiens
acaccaggtaaacttctaaggtttttgactctagtccctgactcctggatggcacttctgaacccattaggggtctgtgggaccttgctaccctgaagggaaggacacaggcctggctggctttgctacctgctgattgcagagccccagggccttgagtgaatataggcagtagccagggaatggttacagcaggacttgggcgagacatagcactgtgctggcttcaggcctgacccagtgcagtcacagtggtggtggccacaggagtgcttgtatcactccaccccccatgttaggtgggggggggggrgagagagagagagagagagagacagagagactctgtatgtttgggagaatgtaagggaagggaacaagagtttttatccaataatccagagaattctcctggatgttatccaagaccatctaggtggtacctctacagctctgcaagaaccacagcgtaactggacttggggtgccccctaaggcacatacagcctagatcacagcacccaagtcctttcaaatatctgaaaagccttcccaagaaggacagctacaaataagcccagtgaagacgacaatacatacctaacccttcaatccccagacaatgaagaacatctactagcatcaacaccatccaggaaaacatgacttcatcaaacaaactaaataaggtaccaagaaccaactctggagaaacagagatatgtgacctttcagatagagaattcaaaatagctgggttga

SEQ ID NO: 922889 - DNA, 665 bp, Homo sapiens
gagaacctggagcccctgccccatgctgtgagcaggcatggccggggctgcctgcatgctccatggagcaggcaggagctccagcctcccaggtgcaggactcaggcatctctgcactctgcactctcgggggcccaggaagggccctttgcccccacaggcttgggagtgtcgactctcatggcctggcctctccctgctcacagagcctgctccaatcctgaagtaggawtggggccaagcctggtcactgtcactgcccagccaggtgtgtgcacattcagggcagtgctaacataacagccccctgccaccttggccccctctagactttgggcactgacaagcatacagggggaatctgaaggagggctgagggcagcttggcactggcctgcaggtgccccttggcatgagcagcctggacatcatggatggtggcatgaggcagataggctcctgggcggaaacaggtgggtccccagtaaggccccaccttcaggtttgcgctgctagtcccaagaaacctgggatgggaaccggagtgggaacttgtggtaccttttcctgacccgctcctggtggcccaaggaccagtcagtgtgcactttctcccttcttaggtctataaaagccttgggctcagccagagctaaacagatgac

SEQ ID NO: 922890 - DNA, 665 bp, Homo sapiens
gagaacctggagcccctgccccatgctgtgagcaggcatggccggggctgcctgcatgctccatggagcaggcaggagctccagcctcccaggtgcaggactcaggcatctctgcactctgcactctcgggggcccaggaagggccctttgcccccacaggcttgggagtgtcgactctcatggcctggcctctccctgctcacagagcctgctccaatcctgaagtaggaatggggccaagcctggtcactgtcactgcccagccaggtgtgtgcacattcagggcagtgctaacataacagccccctgccaccttggccccctctagactttgggcactgacaagcatacagggggaatctgarggagggctgagggcagcttggcactggcctgcaggtgccccttggcatgagcagcctggacatcatggatggtggcatgaggcagataggctcctgggcggaaacaggtgggtccccagtaaggccccaccttcaggtttgcgctgctagtcccaagaaacctgggatgggaaccggagtgggaacttgtggtaccttttcctgacccgctcctggtggcccaaggaccagtcagtgtgcactttctcccttcttaggtctataaaagccttgggctcagccagagctaaacagatgac

SEQ ID NO: 922891 - DNA, 539 bp, Homo sapiens
tccagcctgggtgacagagtgagactccatctcaaaaaaaaaaaaacaaaattagaacctgaacagacaagacttgctgggtttcccccctcagtctattcatattagatcataccctttttgtccaatcacatttctacatggttgttaatcaygcctacccaattaagtctccataaaaggcccaagcgggcagagtttggagagcttctggagagctgaacgtgtaaggttcctggagggtggtgtgcccagggagggcatggaaggtgcataccccttctcacatgcctcgccctatgcatctctgcatctgtatttggcataatatccttcataatagacaggtaaacatgtttctcctattctaggatctactctagcatattaattgaacccaaggagggggttgtggaattcctgatttatagccagcaggtcagaatcacaggaaaaacagcctggggcttgtgaatgccactggaagtcgggtggcagtcttgtgggactgggagagccctcaatctataggttctgac

SEQ ID NO: 922892 - DNA, 611 bp, Homo sapiens
aatcaaaagccagaaatgatgagccttcatgaggaaggcgtattgaaagccaagagaggttgcaagtcaggcctcttgcaccaaacagttaaccaagtggtgaatgcaacttggaaaagttcttgaaggaaattaagagtgmcactccagtgaacatatgaatgatacgaaagtgaaacaatcttactgctgataaggagaaagtggcctgaatacaagatcaaaccagcaacaacattcccttaacccaaagcctaatccagagcagggccctaactctcttcaattctatgaagactgagagaggtgaggaagctggagaagaaaagtttgaagctagtagaggttgattcatggggtttaaggaaaaaagccatcaccataaacataaaagtgcaagtaaagcagcaagcgctgatgtagaagctgtagcaagttatctagatctagctaagatcactgatgaaggcagctacgctaaacaacagattttcaatgtagacaaaacagccttatactggaagaagatgccatctaggactttcatagctagagagaagccaatgccttcaaagcttcaaaggacaggctgactctcttgttagaggcta

SEQ ID NO: 922893 - DNA, 609 bp, Homo sapiens
tgtgcatatggaggaagaacatcacagtgaccaggggactttacattgaacttagtgctgccctgtgacagcagagaataaatccatgctggggtcagccagtacctgtgtagggagggagaatctgtaccagacctagccagagggtaatcacctatcctatcggttggaacttgagtttctcaacaagcctcatgaccatgggctgaagtgctctgaggacctacgtaaacttagaagacagcctaggtacacaaggacttcaactcctaaacaactcctagtgctgggctggactcagagccagaggacttcgggtggcatgtgacctagggagacacccagggtggctaaaggagtgattgcaccacccctctcccaaacctaggcagtacagctcaggggcaaaaatgtctccttccttctgcttaagggatggaaagtgaagagtaaagaggactttgtcttscatcttggatacctgctcagccacagtaggacagggcaccaggcagagtcgtgaggcccccattccaggccctagctcctatacacatttctagacaccatctggacaaaacagaacctgctgccttaaaggaaggaccc

SEQ ID NO: 922894 - DNA, 585 bp, Homo sapiens
tctagcgattctcgtgcctcaggctcccgagtagctgggagtacaggtgtgcaccaccatgcccagctaatttttttgtatttttagtagagacagggttttgccatgtggaccagactggtctcaaactcctggcctcaagtgatccaacccacctcagcctcccaaagtgctgggattacaggaatgagccaccgcacccggctcctgacagattcttaatgtcttctctctgtgtgcagtctctagttcctcccatttgattctggtccccaacaccccatgactgcatttgtgttttggtctctrtctcttatggtagagccccttttcacgtgttgagcaatccacgattacctgctcatattgggagctgccctggtagctcagagtgtatgggaggggctgttgacacattgtcactatagggtgatctggctgtgctctttcgctggggagcccccagtgtgtcgaattcttcaagaaaattcttccaacttcttgtctgacctgtcctttcagcttggtacagcagatggggcctgggttttcaagccggaccaccctgggccctgtcctggctct

SEQ ID NO: 922895 - DNA, 619 bp, Homo sapiens
aatgggaatgtatcgtatgccttgcctaccactatattttgccagcaaatgacttgttaatttcacaggctcacaggtggacaggaatttgcctcagggtgaattgtgccttgagtctcatccacatttgatttagatgagactgtagacctttgagttgatactggagagagttaagtcttttgagactatggggatgacatgaatgttctttgcatgtgagaaaaacatgaatattggggtccatgggtgaaatattatggtttgaatatgtcccccaaagttcttatgttggaaacttaatccttaatgcaacagtgctgagaagtgagacctttaaatgctttttttcgtggctatccctactacaaactgtactcttgatttcctcctcctcctcctcttcttcctcttcttcttcttcttcgcctcttcctcctcctcctcctccttctccttcttcttcttttttttgacatggkgtctcacctatttcccaactggagtgcaatggtgctatctcagctcactgccacctccacctcttgggctcaggtgactcttctgcctctgcctcccaggtagttgagactacatgctcatgccaccatgtccagct

SEQ ID NO: 922896 - DNA, 691 bp, Homo sapiens
gaccagcctgaccaacatggcaaaccccatctctactaaaaatacaaaaaaattagctggggatggtggcatgtacctgtagtcccagctacttgggaagctgaggcaggagaatcgcttgaacccaggaagcagaggttgcagtgagccgagaatctttcamtccagcctgggtgacagagcaagaacaaggctccgtctcaaaaaaaaaaaaaaaaaaacaataacaaacaaacaaaaaaaaaacagcttttcatcaagttacaacacttcaaaatacagttaatgatagtgagagtcagccagctcttgtggactatctccatgcaattgcccataatctatccccataacatactctttcatatgttaaattttctttttcttgttctttttttccccactattttaaattatcagcattattgtttacaattcactgtcccatatattttgtcttttcatcatttccaatactagaggtacaaattatataaagacttttagagagttctagttcgttttatgcatttttttgcaaacttgactctgcattatcacaatgttgactttgtaagtgttttatgtgtgcatgtaaaaatgttgaaaattccccaataaatgaagagatgtcctttttgtacatttgcttttgtgaaaattaaaatttctcaaaaactcagacctttgg

SEQ ID NO: 922897 - DNA, 561 bp, Homo sapiens
accactctcttcaaagctgtcagacacggacatttaagtctgcggaggattctgctgccttttgtttggcaatgtcctgccctcagaggtggagtctacagaggcaggcaggcctccttgagttgcggcgggctctacccagttsgagcttcctggctgccttgtttacctactcaagcctcggcaatggcgggtgcccctcccccagactcactgccccattgcagtttgatatcagactgctgtgctagcaatgagtgaggctccttgggcctaggatcctccaagccaggtgcgggatataatctcttggtgtgccgtttgctaagactgttggaaaagcgcagtattagggtgggagtgacccgattttccaggtgccgtctgtcacccctttctttgagtaggaaagggaattccctgaccccttgcgctacctgggtgaggcaatgcctcgccctgctttggctcacactcggtgcgctgcacccactgtcctgcacccactttccgacactccccagtgagatgaaccccgtacctcagttggaaatgcagaaa

SEQ ID NO: 922898 - DNA, 569 bp, Homo sapiens
atgaatcagattaagcaaatatataaataaaagaattatattcatctccacaaaagccatattttgaaaacatataatagctcatctaaaatgtactacacattttctaacataatatatttaaatatcagtgtttattaagcaatattcgatgttacctcggtgaaataatgaaatattgaatttattacatcataaaagataacagagaggcttaatacaaaaataactaactaaatgataatgacaatttattatgtaacattataatttgcattccatgataatcagcagcatattttgaaaatatattgaaagaatattagtgtyggccgggcgtggtggctcacgcctgtaatcctagcactttgggaggctgaggcgggtggatcatgaggtcaggagatggagaccatcctggccaacatggtgtaaccccatctctactaaaaatacaaaaattagctgggtgtggtggtgcatgcctgtaattccagctacttgggaggcagaggaaggagaatcccttgaaccagggagttggaggttgcagtgagccgagatcgtgc

SEQ ID NO: 922899 - DNA, 569 bp, Homo sapiens
atgaatcagattaagcaaatatataaataaaagaattatattcatctccacaaaagccatattttgaaaacatataatagctcatctaaaatgtactacacattttctaacataatatatttaaatatcagtgtttattaagcaatattcgatgttacctcggtgaaataatgaaatattgaatttattacatcataaaagataacagagaggcttaatacaaaaataactaactaaatgataatgacaatttattatgtaacattataatttgcattccatgataatcagcagcatattttgaaaatatattgaaagaatattagtgtcggccgggcgtggtggctcacgcctgtaatccyagcactttgggaggctgaggcgggtggatcatgaggtcaggagatggagaccatcctggccaacatggtgtaaccccatctctactaaaaatacaaaaattagctgggtgtggtggtgcatgcctgtaattccagctacttgggaggcagaggaaggagaatcccttgaaccagggagttggaggttgcagtgagccgagatcgtgc

SEQ ID NO: 922900 - DNA, 552 bp, Homo sapiens
ttttttttctcacaattttgtgttcatccgcatacactagttatgggtctttttttttattttattattattatactttaagttttagggtacatgtgcacaacgtgcaggtttgttacatatgtatacatgtgccatgttggtgtgctgcacccattaactcatcatttakcattaggtatatctcctaatgctatccctcccccctccccccaccccacaacagtccccggtgtgtgatgttccccttcctgtgtccatgtgttcttattgttcaattcccacctatgagtgagaacatgcggtgtttgctttttgtccttgtgatagtttgctgagaatgatggtttccagcttcatccatgtccctacaaagggcatgaactcatcattttgtatggctgcatagtattccatggtgtagatgtgccacattttcttaatccagtctatcattgttggacatttggcttggttctaagtctttgctattgtgaatagtgccacaacaaacatacgtgtgcatgtgtctttatagcagcatgatttaca

SEQ ID NO: 922901 - DNA, 622 bp, Homo sapiens
agcaaaagaaacaatcagcagagtaaacagacaacccacaaagtgggaaaaaatcttcacaatctatacatttgacaataaactaatatccagaatctacaaaaaactcaaacaaatcagcaagaaaaaaaaatcccatcaaaaagtgggctaaggacatgaataaacarttatcaaaagaagatatacaaatggccaacaaacatgaaaaaatgctcaacgtcactaatgatcagggaaatgcaaatcaaaaccacaatgcaataccacctcactactgcaagaatggccataatcaaaaaaaaaaaaaaatgttgacatggatgtagtaaaaaaggaacacttttacactactggtaggaatgtaaactagtacagccactatggaaaacagtgtagagattccataaagaactaaaagtagatctaccatttgatccagcaatcccactactgggtatctaccccaaggaaaagaagtaattatacaaaaaagatacttgcacatgcatatttataaaatagcagcataatttgtaattgtaaaaatacggaaccagcccaaatgcccatcaatcaatgagtggatatagaaaatatgttatatataccatggaatact

SEQ ID NO: 922902 - DNA, 643 bp, Homo sapiens
acagatgtaattagttgtttatgttatatataatataaacatgatgtatattcttattttcctgtgaggacccactgtcttcttaatacactgtcttctgaccaaagtcttccacacaaatcagcagttactatatatatatataatatttatatacacatatacacatacatacacacatatgtatattttaatagctaatatcttacactgatatatttatattacatatagtaatatactaatatttttgtactttatgtttatactatacatacagatgtygtgaggtatttatattatatataatatattaacatgatgcacattcttgtattctcctggggactcactgtcttcttaatacactgtcttctgactagaatattccagacaaatcaccggttgctctctctctctctctctctatatatatatattttttaatagctaatatcttacactgatatatttatattacatatagttatatacaaatatttttgtacttttgtttatactatatacacagatgtagttagctatttatgttatatataatatatcaacatgatgtatattcttatattcctctggagactcacagtcttcttaatacactgtcttctgaccaaactcttcc

SEQ ID NO: 922903 - DNA, 643 bp, Homo sapiens
acagatgtaattagttgtttatgttatatataatataaacatgatgtatattcttattttcctgtgaggacccactgtcttcttaatacactgtcttctgaccaaagtcttccacacaaatcagcagttactatatatatatataatatttatatacacatatacacatacatacacacatatgtatattttaatagctaatatcttacactgatatatttatattacatatagtaatatactaatatttttgtactttatgtttatactatacatacagatgtcgtgaggtatttatrttatatataatatattaacatgatgcacattcttgtattctcctggggactcactgtcttcttaatacactgtcttctgactagaatattccagacaaatcaccggttgctctctctctctctctctctatatatatatattttttaatagctaatatcttacactgatatatttatattacatatagttatatacaaatatttttgtacttttgtttatactatatacacagatgtagttagctatttatgttatatataatatatcaacatgatgtatattcttatattcctctggagactcacagtcttcttaatacactgtcttctgaccaaactcttcc

SEQ ID NO: 922904 - DNA, 569 bp, Homo sapiens
cagtgatgattcagtaccacgcagatggacagggaggcatggtgccctcgggatgggctcccttcctttttttctttttttttttttaatattttaagttctagggtacatgtgcacaacatgcaggtttgttacatatgtatatatgtgccatggtggtgtgctgcacccattaattcgtcatctacattaggtatttcttttaatgctatccctccccggccgtcccaccccatgacaggccccggtgtgtgatgttccccatcctgtgtccaagtgttctcattgttcaattcccacctatgagtgagaacatgcagtgtttggttttctgtccttgcgayagtttgctcagaattatggtttccagtttcatccatgtccctacaaacgacatgaactcatcctttttatggctgcatagtattccatggtgtacatgtgccatattttcttaatccagtctatcattgatggacatttgggttggttccaagtctttgctattgtgaatagtgccgccataatcatacatgtgtatgtgtctttatagtagaattatttatagt

SEQ ID NO: 922905 - DNA, 775 bp, Homo sapiens
agcagattattgaaacttcactgtacactgtaaccatataattgacttttacttatatatttcctcttttactttgaagtttgtgttcaaatcaaaagatgagaaccttaaattaatcaagttttataatattttattttagatttttgtaaaagtgaatgctttttatattccatagcaagtaactgaaaagctactgaaaagtgtccaacccaagaattttgtgtatttttcattttgaatatacttctcagttatttcaattttgaatcctagcccttttaaatttcagaatacacagtagtttaaaatggcttcaataaggctgggcgcggtggctcgcacctgtaatcccagggcttagggagaccgaggtgggtggatcacgaggtcaggagtttgagaacagcctgaccaacgtggtaaaaccctgtctctactaaaaatacaaaaattagctgggcgtagtggtgcgcacctgtaatcccagctactcaggaggctgaggtaggagaattacttcgaccccgggaggctgaagttgcagtgagccgaaatckcaccactgtactacagcctgggcgacagagtgagactccgtctcaaaagacataaaaaagggtggggggctttaataagagtatatagtggtacattttaaatattttcattgtctattagatattacgtatgcagataaacctgtttaaatatagaagatttgtattcctatttccatatatccttttgacaaattagaattgaaaataatata

SEQ ID NO: 922906 - DNA, 601 bp, Homo sapiens
ccttcgggctgtcctgccttttcatgtcaaagcaatgtacagcttacacgtattgattgatatcttatgtctccctaaaacgtgtaaaaccaacctgtagcccgacgacctttgacacacgttctcaagacctcctgaggctgtttcactgatatttctttaactttgaccaagtaaatttctaaactgattgagacttttctcagatacttatttgtttataggtatcactggatacacttaaggaattgaagagatttatgacattgaraaaaggaggaagccagggtgtgtggacatagagagagagagagagagagagagagaagagagagagagagagagagagattgtgatgtatgtacaggactaacactgagacctggttatgtaatggtgtagtactgagtatcatccccaaatagtgaggtttcattccatgaagactatgcatgtatctcatttgggaaaacagcttttgcaggtgtaaattaaggagcttgaaacagggagatggtcttagattaatcaactgggacttaaatgcaaactcaagtgtcctaaaaaaaacaagaggtagagagacatttagcatagactg

SEQ ID NO: 922907 - DNA, 564 bp, Homo sapiens
atcccccctccttcgggctgtcctgccttttcatgtcaaagcaatgtacagcttacacgtattgattgatatcttatgtctccctaaaacgtgtaaaaccaacctgtagcccgacgacctttgacacacgttctcaagacctcctgaggctgtttcactgatatttctttaactttgaccaagtaaatttctaaactgattgagacttttctcagatacttatttgtttataggtatcactggatacacttaaggaattgaagagatttatgacattgagaaaaggaggaagccagggtgtgtggacatwgagagagagagagagagagagagagaagagagagagagagagagagagattgtgatgtatgtacaggactaacactgagacctggttatgtaatggtgtagtactgagtatcatccccaaatagtgaggtttcattccatgaagactatgcatgtatctcatttgggaaaacagcttttgcaggtgtaaattaaggagcttgaaacagggagatggtcttagattaatcaactgggacttaaatgcaaactcaa

SEQ ID NO: 922908 - DNA, 560 bp, Homo sapiens
gggagggggctacctctgatgagtccaaaagcctcacctttaaaaaggaatgaaatctatggtcttgacatggaaagatgagtctaggctgcatggttgagtcataaacacaggtaacacgatctcacctataagatgaccccatttttgttattatgtagaaatactgaccccatactaggattagcagttttctcggaaagtaagattacaggggaaacattcactttctactttatatacttttcctttgttgtacccttaaaacaagtatatattgcttttatagtaaaaataatctgataataaagatatttctattatgaggaaggctcacagaaatatgcatgsgctattgaaaatgctcaacgtccttgctttgggctgggattttatcaacatggtgggaaggcctgaagcactagatctaaaatcaaagcacagagtctaatttttttttttttttttaagacagagtctccctctgtcgcccaggctggagtgcagtggcgcaatctcagctcactgcaacctctgccttccgggttcaagcgattctc

SEQ ID NO: 922909 - DNA, 550 bp, Homo sapiens
aactatcacaaggacaaaaaaccaagcacggcatattctcactcataggtgggaattgaacaatgagaacacatggacacaggaaggggaacgtcacacaccggagactgttgtggggtgaggggcggggagagggatagccttaggagatatacgtaatgctaaatgacaagttaatgggtgcagcacaccagcatggcacatgtatacatatgtaacaaacctgcaggttgtgcacatgtaccctaaaacttaaagtataataatgataaaatttaaaaaaattactattaaaaaaagcaatactatttttctcattaaaaatagtttgtatttttctgttgttgaatgtgtagggtcagtaaggtgtgacaactctcctawcccatcataggggttacgcccaacagtcctataaaaaagactggttaacaaaaggagaccataacaggcttgtttaatcaaagttttacatgacacagaagacttcaaaaatgaaaacctcaaacactcagagaatactgtctatttttatacttaagtgtgatga

SEQ ID NO: 922910 - DNA, 661 bp, Homo sapiens
gtggctgctgccagaccctaaatgtgctggcctcatgcttttgcatgttagcaccccagcccctgtcttctgtagagacactgaccatggccctgccccaggaagcctccccggccctggccattctagtggcccagcagatgggggctccttgaggctgtcacatctgcagccccactctgtgggggaaytgcttgctgaaccaagtggaatggaattctgagtctgctgggaaggggtgctgggattcaggaaggggttttgcaggctcctcctggtcctcagtgagcctggacacaggcctggaatggacccactggtgggggtggagtcagggaagaggaggtcatagcttcgtagcttctggtcttgctcctctctgtaacctgctaaagccttggtaaagagactaaatagagatgtccagccgtggattgggaggacaggagtggaggcaacccgatgggcatttaggagccagtgagtgagtgggcaagagccactgactgagtgcccttggtgaagtcagacctgatgctggaaaaggggagctgggaacagccaggttgacattgcggagccctcccacgacccggccggcagcaccagctcccaagagagtggcaagagtagctgagaagcagtgaggtgtccagagccc

SEQ ID NO: 922911 - DNA, 740 bp, Homo sapiens
gcagcaacagcatctgcttctgcccagaggccaggtaaggtgaggctgaagacgtctattgaatccagcaacccagaggtcccttttggcaatgccatttcttacagacataacaactctaagtgatcccctttcttttggagatttattatagcatttgttattttatttgcagttttcttctctattatgcctgggagcagttattaaagtgcagagctcttcagaaaaggctgagaatcagcctacattagcatttccataaaatcgccctctctgaggcttatgaggcttatacgggagaccagggagaccacgagggttgttcgaccctggctgcccctctttgcacctgtgagtcatggcacaccgaggccctgagggcatgaggcacagggtctgtgggggaagtgggacaccctgggtccactgtccactctgctatttggtgattgggttgagctgggctgcagtgtgagtaaaaataattttctctctggactaccccaatctgtagggcatgattctccagggatttccactgaaaacctgtctctgtgttctcracacagagaaattgcaaacattatttctttccgttttaaaggtcttaagcttttcttattaatgttccgtcccccatagcctcagaatgtggggagagactggctgtgtttaatggtcctgaaatctacagtttgtcaaccattgggcactgctttttctgccttaaacagcag

SEQ ID NO: 922912 - DNA, 438 bp, Homo sapiens
gcacaaactataatggaatattattcagccaaataaaggaatgaatactcatacatgcgacatgaatgaaacatgaaaacaatatgctaagtaaatgaagccagtcacaaaacaccaaaatatcacatcagtatatgaggcttagaaaatgtgsaaattgtggtgatggttgcatgtatctgcaaagagactaaaaaccactgaattatacatttttgttttcgagatggggtctcactctgtcgcccaggctggactgcagtggtgctatcatggttcactgcaggcttgacttcccaggcttaagtgatcctcctacctcagcctcctgggttgctgggacgacaggtgcgtgccactgcggctaattcttgtattttaaaaaatagagacagggttttgcctgttgcccagggtggtcttgaactcctgggctca

SEQ ID NO: 922913 - DNA, 438 bp, Homo sapiens
gcacaaactataatggaatattattcagccaaataaaggaatgaatactcatacatgcgacatgaatgaaacatgaaaacaatatgctaagtaaatgaagccagtcacaaaacaccaaaatatcacatcagtatatgaggcttagaaaatgtgcaaattgtggtgatggttgcatgtatctgcaaagagactaaaaaccactgaattatacatttttgttttcgagatggggtctcaytctgtcgcccaggctggactgcagtggtgctatcatggttcactgcaggcttgacttcccaggcttaagtgatcctcctacctcagcctcctgggttgctgggacgacaggtgcgtgccactgcggctaattcttgtattttaaaaaatagagacagggttttgcctgttgcccagggtggtcttgaactcctgggctca

SEQ ID NO: 922914 - DNA, 438 bp, Homo sapiens
gcacaaactataatggaatattattcagccaaataaaggaatgaatactcatacatgcgacatgaatgaaacatgaaaacaatatgctaagtaaatgaagccagtcacaaaacaccaaaatatcacatcagtatatgaggcttagaaaatgtgcaaattgtggtgatggttgcatgtatctgcaaagagactaaaaaccactgaattatacatttttgttttcgagatggggtctcactctgtcrcccaggctggactgcagtggtgctatcatggttcactgcaggcttgacttcccaggcttaagtgatcctcctacctcagcctcctgggttgctgggacgacaggtgcgtgccactgcggctaattcttgtattttaaaaaatagagacagggttttgcctgttgcccagggtggtcttgaactcctgggctca

SEQ ID NO: 922915 - DNA, 627 bp, Homo sapiens
gaaaatttgtgtgctaggatattgtctctaaacagtgcagtcttgggcagtctgaaagtcctttagcactttaggatccaattaaaagggaattattttctgttctacagctaaggaaacagatcaacaaagaggctgaatgactgttttaaaatctgacagatgtaacacggcagacaaggaaatgggatttagaaggcttcccctttctgagatgttattttcttcttagtgtggtctgtcagttctcccagcaatgagtcagttgaaattaacctttgatagactcataccagwaaataaaaaaatagctcacctttatccagttgcaggcaacagaaaagagcaagtatgtagaatttattctctctccatcttttggactctatccacacaatcctgcatcctcctccaaataaaagtaaaatatgattttcttcactttagtttgtacccacttactctattctgctgaaatactagcagccctcatgtctttgaatcatcaaatccactggactttaaaaaaatcccctttctggctttttctgctgtttgtcactagtttatcgagatctctgtcctcttggattccttgatgcctcactctcctggttgtcatgacac

SEQ ID NO: 922916 - DNA, 705 bp, Homo sapiens
atttcaagacaccacaatttcaaccttctcccttctattaagatctaatggcataggccgggtgcagtggctcatgcctgtaatcccagcattttgggaggccgaggctggtagataacctgaggtcaggagtttgagaccagcctggggaacatgaccacgtctctattaaaaatacaaarttagctgggcatggtggcacatgcctgtaatcccagctacttgggaggttgaggcaggagaatcgcttcaacctgggaggtggaggttgcagtgagctgaggtcgtgcaccccttgcactccagtctgggcaacaagagccaaactccgtctcaaaaaaaaaaaaaaaaaagttagtcagtcatggtgtcatgtgcctataattccacctactctggtggctgaggcaggagaatcccttgaacctgggaggcagaggctgtgtggtgagctgagattgcgccactgcactccaacctgggtgacagagtgagaccctgtctcaaaaaaaaaaaaaaaaaaaaaaaaaaaaaaaaaggccaggcctggtggctcatgcttttaatcccagcactttaggaggccaatgcgggcagatcacgaggtcaggagttcgagaccaacctggccaacacagtgaaaccccatccctactaaaaatacaaaaattagccaggcatggtggcgggcacctgtaatcccag

SEQ ID NO: 922917 - DNA, 647 bp, Homo sapiens
ttcccactgcctccagggctccctcctggtgcaagccaacaccatctcaccaggcacagcaacagccccttgaaggatgttcttgctcccactcctgtctctcacctcctgtcttttcccaacacagaggtcatgagttcctgttaaaatgtaaatgagatcacatctctctttaagataacatgctcttttgactccctgtctcactcagcacaaaagccaaggtcctgagcaggccccacctggcctgccccagcctgccctgcctccagcatctcayacctgtctcttctcctctcccactgctctctgcctcactcactccatcccagaccaggggcttccctactgttctgacacacctggcatatttccacctgaggacgttgcacttgctgttctctctgcctggatccccaatcccctggtagacatgtcgcatgctccgtcactttctcctggtctgcccaaatagcaccttcttggtggatccttccctggacatcttacctgagatgacaccccaaccctacgtttcatattcccctactcagatgaagtttccttcatggtatttagcattttctaatattaacttgaattctaactactttattgtccatctttccctaccattctttcctacc

SEQ ID NO: 922918 - DNA, 606 bp, Homo sapiens
gaagcatagggggtggcagagaagggagtgcccaggccttaggagcatgagggaaagaaaggaggcaacatgcaaattagtaacaggaagtgggacaggcgacaggagctggaagggctactccctcctagattgggctgcaaagaccccagcctcccagctttctggagccccttgctattccaagtaagctccagagaccagcggcatctgcatcaccagggctctcatcagaaaaacagaatctcagaccccaycctagacctcccgaatatacattgccacaagatcctcagatttcctgtgcacactaaagtttgagaagcacaagattaggagtcaaaatccctgagttcctggtccagctattgctatcaaattgctgtgtggttttgcaggacttgcttgacctctctgggtgctagaatttcttcctctgggctacaggatgagtgaggcttgtttctttctcctgggttctcagaggctcaagtcagacccttcatctgcaggcctcggaagcatgggagggcctttacagaaaaacgtttccattttctaccaggctgcccccttccgctttcttggagtcattagtacacagag

SEQ ID NO: 922919 - DNA, 642 bp, Homo sapiens
ttccccttgaataaaggggaggcctggtccctttgaggaaggaccccactacactactgacaatttatactgctaatctttctcccatgcttccccaaggagacctccggtcttttaccagggtaactggtcccctttcggggactactggacactggacactggctctgagctgacaatgattccaggggacccaaaacatcactgtggtcctccagttagagtaagggcttatggaggtcagrtaattaatgaagtttcagctcaggtctgacttacagtgggtcccggattcatcctgtggtcattttcccagtgccagaatgtataattgacacagacatacttagcaactggcagaatccccatattggctgactggtagtgtgaggcctattatggtgggaaaggccaaatggaagccattagagctgcttctacctagaaaaacagtaaatcaaaaacaatactgcatccctggagggactgtggagattagtgccaccatcaaggacttgaaagatgcaggggtggtgattcccaccacatccccattcaactttcctatttggcctgtgcagaagtcagatagatcttggagaacgacagtggattatcataagctgaaccaagtggtgacga

SEQ ID NO: 922920 - DNA, 572 bp, Homo sapiens
atggtttgactttgtccgcagtcaaatctcatcttgaatttctatgtgtttggagaggtacccggtgggaggtaattgaatcatgagggcaggtcttttctgtgctgttctcatgatggtgagtaagtctcatgagatctgatggttttataaaggggagtttccctgcccaagttcttctcttgtctgccatcatgtgcgatgtgcctttcacctctgccatgattatgaggcctccctggccatgtggaactgtgagtccattaaacctctttcttttgtaaattgcccaatcttgggaatgtctttatcagcagtgggaaaayggattaatatactaatttatagctagtaggtaaaaagccagggacttgccattagcgttggaagtggggttgtgggggcagtcttgtggaactgagcccttaacctgtggggttgaatgatatctccaggtatatcatgtcagaattgaattcaattagaggatacctagcttgcgttcaatgcagaattgcttgctggtgaggagaaatccctatacacattttggtgaccagaggtaaagcatt

SEQ ID NO: 922921 - DNA, 621 bp, Homo sapiens
tttctctgagattctgaataggtttttcccttgccccttgctagcttctggtggtagctgtcaatacttggcatcgcttggcttgcaattacatccaattcctgcctctgtcattacacagtatactccctgtgtgcctcgctctcttcatgtcacatttcctcttcttataaagacaacagccacattgtattagggctctccataatgattttgtcttaactctattacttctgcaagaattctatttccaaaaaaggtcacattcagaggtatcagagtcaagacttccgcatattttttagggaacacatgtcaactaataacagtggatcttcttggyggtagactctaagataagaagtttatttgaaagtgctcttaggattagcatacttttgtgaaagggaaaaatacaagattgcagagggagaatttaggctgcaatagagtcacaacaaaggtctcagccaaccagaaagtgtgctctaaatctgggatgacccctcagaattgtcctaaattagaacaaggggtggagaaattatgccacctacgttaacaagtcattgagttcagaccttccccagaaagtgggataaagcttcagggaaacagatc

SEQ ID NO: 922922 - DNA, 789 bp, Homo sapiens
gcaaacttttgcctgggcatccaagtggttccacacatctgaaatctaggcagaggttcccaaatctcaattcttgacttctgtgcacccgtaggctgaataccacatggaaggtttggggcttggaccctctgaaaccatggagcgagctgtaccttgaccccttttggcaatggctggagtggctgggacacagggcaccaagtccctagactgcacatagcacggggaccctgggcccaacccacaaaccatttttccctcataggtttctgggtctgtgatgagaggggctgccaagaagatatatgacatgccctggagacatattccccattgtcttggggattaacatttggcttcttgttacttatgcaaatgtctgcagccagcttgaatttttgctcaaaaaatgagtttttcttttctactgcatcttcaggctgcacgttttctgaatttttatgctgtttcccttttaaaacggatgyttttaacagcaaccaagttaccttttgaatgctttgctgcttagaaatttcttctgccaggtaccctaaatcatctctctccagttcaaagttgaatctctagggcaggggcaaaatgccaccagtctctttgctaaaacatgacaagtcacctttactccatttccctacaaattcttcatctccatctgagaccacctcagcctggaccatattgtccattttgctatcaggcttttggtcaaagccattcaaccaatctctaggaagttccaaactttcctacattttcctgtct

SEQ ID NO: 922923 - DNA, 652 bp, Homo sapiens
cagcctcactgataatcctgacatcttgtactaacctccactgtctattgggcttctttactcctaaaattggaggattgcaggggctattgcatggttttactaggagtagggcttttaggtccttaacaattttttggagtccttgttgggcctcgggtctaagggggtactgcctttggtagggaaaggaggtggaatcctttagtttaactagaacasgacgggcattatttgctcgtccatattgtccttctgttgcccagactttaggattaattcctttttcaagcaggggacaacaaacgggtgttccttttcctatgttcaggtgtataatggtccctgcttttgttagaatgtctttccctaacaagggagtggggtttttaggcataattagaaaagcatgtgaaaagagtaaagttccccagtcacagcttagtggctgggagaagtatctagtggctgtcccaggaccccttggatagtgacagatctggagacagttgtccaggacaggagagtaagactgagaaggccacgccagtgtccaggagacagttaacctcctggccctcaatggttaagcatacccggggctctgtgagggtgatggcatgggctggcgcttgccccaggcaccctcagt

SEQ ID NO: 922924 - DNA, 652 bp, Homo sapiens
cagcctcactgataatcctgacatcttgtactaacctccactgtctattgggcttctttactcctaaaattggaggattgcaggggctattgcatggttttactaggagtagggcttttaggtccttaacaattttttggagtccttgttgggcctcgggtctaagggggtactgcctttggtagggaaaggaggtggaatcctttagtttaactagaacacgacgggcattatttgctcgtccatattgtccttctgttgcccagactttaggattaattcctttttcaagcaggggacaacaaacgggtgttccttttcctatgttcaggtgtataatggyccctgcttttgttagaatgtctttccctaacaagggagtggggtttttaggcataattagaaaagcatgtgaaaagagtaaagttccccagtcacagcttagtggctgggagaagtatctagtggctgtcccaggaccccttggatagtgacagatctggagacagttgtccaggacaggagagtaagactgagaaggccacgccagtgtccaggagacagttaacctcctggccctcaatggttaagcatacccggggctctgtgagggtgatggcatgggctggcgcttgccccaggcaccctcagt

SEQ ID NO: 922925 - DNA, 456 bp, Homo sapiens
cggtattttcctccaattctaaggtagaggacagaatagcaagcaaaagtggtctgatattactcactgctttggagaatccccatacgaggccaccaaatgttaccagcggatctttgttcttagagctcccaagatgatgrtgggctgctcccaagatggggcaggccactcccaagatggcagcaagccttttgttctctgacctgggcttcttggcctcacagattccaaggaatggaaacttgggccatgtggtgagtgttatagctctatcagaagccgtgggacatggaagagaaccatggaaaccactgactagtgttcagcttgattaggatgaacctcggcacttggttgtgcaggaacaaaggtgagactttagcccgatcaggagtggaaatgggtgccttgctggatcaggagcacaacctgccagatccagaggggtgggag

SEQ ID NO: 922926 - DNA, 579 bp, Homo sapiens
gcatggccatgggtgcccatcccacaaagttctccatactccattaggcagctttagactttattagctgctggcattggacagagcaaggctatgcttcctgtgggatggggtctgatattacttggctgtgttgccacccaaatcttgtcttgaattatagttcccataatccccacatgttctaaaagggatccagtggaacayaattgaattatgtagatgggtctttcccatgctgttcttgtgatagtgaataagtgtcatgaaatctgatggttttataaagcagagttcctctgcacatgctctcttgcctgccaccacgtaaaatgtgcctttgctcctccttcaccttctgccatgattgtgagtcctccctagccatgcagatctctgagtccattaaactttccttttataaattactcagtcttggatatgtctttattagcagcataagaacagactaatatagggccagtctgatctgagcaaccctctgtctgctggtctctcccagtgtccctgcctggcctcatccacttacagcactaccccagcatcccagccaaagtg

SEQ ID NO: 922927 - DNA, 596 bp, Homo sapiens
caacgttcaaatgctccttcttttctctcctctgcagcactgctcttctgctcctctgctcttctgttcatccactcatttgctcgtctgctcgtaaagcttggggtttggggtttatatgggtacaggatagggaaacgtggtgggccaaaaggcaacatttgagcacgaaagcaagaatgcctgttcccatttagggccatgggcttccagtcttgagggtggggtctttgccggggaactgccctcttctacccggtatttccctgtctcctgtccatatcaatctcaatagatgcagaaaaggctttcaatgaaattgaacatcgcttcatgttcaraaaagccctcaacaaactaagtattgaaggaacatacctcaaaataataaaagccatctgtgataaatgcacagtcaacatcatactaaacaggcaaaaccaggaggcatgagaactggaactgagaactggaacaagacaaggatgcccactctacgactgctatttaacacagtaccggaagtcctagccagagcaaccagggaagagaaagaaataaaaggcatccaaatgggaagagagaagatgaaatta

SEQ ID NO: 922928 - DNA, 705 bp, Homo sapiens
cccgatcgcctcggaagccccttagaccatcacggatgccgagcttcgggtaactcttacagtggaaggtaagtctgtccccttcttaatcaatacagaggctacccactccacattaccttcttttcaagggcctgtttcccttaccttcataactgttgtgggtattgacggccaggcttctaaacctcttaaaactccccaactctggagccaacttagacaatactcttttaagcactcttttttagttatccccasctgcccagttcccttattagaccgagacactttaactaaattatctgtttccctgactattcctgggctacagcaacacctcattgccgccttttcccccagttcaaagcctccttcacatcctccctttgtatctccccaccttaacccacaagtataagacacctctactccctccttagcaaccgatcatgcaccccttaccatcccattaaaacctaatcactcttaccccgctcaatgccaatatcccatcccacggcatgctttaaaaggattaaagcctattatcactcacctgctacagcatggccttttaaagcctgtcaactccccttacaattcccccattttacctgtcctaaaaccagacgaggcttacaggttagttcaggatctgcgccttatcaaccaaattgttttgcctatccaccccatggtgcc

SEQ ID NO: 922929 - DNA, 704 bp, Homo sapiens
cgatcgcctcggaagccccttagaccatcacggatgccgagcttcgggtaactcttacagtggaaggtaagtctgtccccttcttaatcaatacagaggctacccactccacattaccttcttttcaagggcctgtttcccttaccttcataactgttgtgggtattgacggccaggcttctaaacctcttaaaactccccaactctggagccaacttagacaatactcttttaagcactcttttttagttatccccagctgcccagttcccttattagaccgagacactttaactaaattatctgtttccctgactattcctgggctacagcaacacctcattgcsgccttttcccccagttcaaagcctccttcacatcctccctttgtatctccccaccttaacccacaagtataagacacctctactccctccttagcaaccgatcatgcaccccttaccatcccattaaaacctaatcactcttaccccgctcaatgccaatatcccatcccacggcatgctttaaaaggattaaagcctattatcactcacctgctacagcatggccttttaaagcctgtcaactccccttacaattcccccattttacctgtcctaaaaccagacgaggcttacaggttagttcaggatctgcgccttatcaaccaaattgttttgcctatccaccccatggtgcca

SEQ ID NO: 922930 - DNA, 704 bp, Homo sapiens
cgatcgcctcggaagccccttagaccatcacggatgccgagcttcgggtaactcttacagtggaaggtaagtctgtccccttcttaatcaatacagaggctacccactccacattaccttcttttcaagggcctgtttcccttaccttcataactgttgtgggtattgacggccaggcttctaaacctcttaaaactccccaactctggagccaacttagacaatactcttttaagcactcttttttagttatccccagctgcccagttcccttattagaccgagacactttaactaaattatctgtttccctgactattcctgggctacagcaacacctcattgccgccttttcccccagttcaaagcctccttcacatcctccctttgtatctccccaccttaacccacaagtataagacacctctactccctccttagcaaccgatcatgcaccccttaccatcccattaaaacctaatcactcttaccccgctcaatgccaatatcccatcccacggcatgctttaaaaggattaaagcctattatcactcrcctgctacagcatggccttttaaagcctgtcaactccccttacaattcccccattttacctgtcctaaaaccagacgaggcttacaggttagttcaggatctgcgccttatcaaccaaattgttttgcctatccaccccatggtgcca

SEQ ID NO: 922931 - DNA, 604 bp, Homo sapiens
caaaactcaatgatatagctgggtgcactggctcatgcctgtaatcccagcactttgggaggctgaggcggttggatcacctgaggtcaggagttcgagaccagcctggccaacgtggtgaaaccctatctctactaaaaatacaaaaattagcagggtgtggtggcatgtgcctgtagtcccagctactagggagtccgaagcaagagaatcgcttgaacctgggaggtagagtttggagygagccaagatcatgccactgcactccagcctgggtgacagagcaagactccatttcaaaaaaacaaaaaaacaaaaaacactcaacgatgagaaaacaaacaacccaatataaaaaatgggcagaagatttaaaaaacacttcaccaaagaagataagaatggcaaataagtgcatgaaaaaacgctcaaagtcattagtcactagggaaactcaaaaccattatgagatactcctacacatctacttgaatagcaaaaattaaagataatgaccataccaagtgttgtcaagaacatgaaggaactggaactctcatgtactgctggtggaaatgtaaatggtaaaagcactttggaaaac

SEQ ID NO: 922932 - DNA, 604 bp, Homo sapiens
caaaactcaatgatatagctgggtgcactggctcatgcctgtaatcccagcactttgggaggctgaggcggttggatcacctgaggtcaggagttcgagaccagcctggccaacgtggtgaaaccctatctctactaaaaatacaaaaattagcagggtgtggtggcatgtgcctgtagtcccagctactagggagtccgaagcaagagaatcgcttgaacctgggaggtagagtttggagcgagccaagatcatgccactgcactccagcctgggtgacagagcaagactccatttcaaaaaaacaaaaaaacaaaaaacactcaaygatgagaaaacaaacaacccaatataaaaaatgggcagaagatttaaaaaacacttcaccaaagaagataagaatggcaaataagtgcatgaaaaaacgctcaaagtcattagtcactagggaaactcaaaaccattatgagatactcctacacatctacttgaatagcaaaaattaaagataatgaccataccaagtgttgtcaagaacatgaaggaactggaactctcatgtactgctggtggaaatgtaaatggtaaaagcactttggaaaac

SEQ ID NO: 922933 - DNA, 574 bp, Homo sapiens
gcactggctcatgcctgtaatcccagcactttgggaggctgaggcggttggatcacctgaggtcaggagttcgagaccagcctggccaacgtggtgaaaccctatctctactaaaaatacaaaaattagcagggtgtggtggcatgtgcctgtagtcccagctactagggagtccgaagcaagagaatcgcttgaacctgggaggtagagtttggagcgagccaagatcatgccactgcactccagcctgggtgacagagcaagactccatttcaaaaaaacaaaaaaacaaaaaacactcaacgatgagaaaacaaacaacccaatataaaaaatgggcagaagatttaaaaaacacttcaccaaagaagmtaagaatggcaaataagtgcatgaaaaaacgctcaaagtcattagtcactagggaaactcaaaaccattatgagatactcctacacatctacttgaatagcaaaaattaaagataatgaccataccaagtgttgtcaagaacatgaaggaactggaactctcatgtactgctggtggaaatgtaaatggtaaaagcactttg

SEQ ID NO: 922934 - DNA, 587 bp, Homo sapiens
agggcagctgcctgtcctgggtttctcatctgctagggtctaaatgtttgtgtcctcccaaaatccatagattgaaatcctcaccagcaggtgagggtattaggaggtgttattagtcagggttctctagagggacagaagtaaaaggacagatgcayatattgaagggagtttattaaggagaattggctcacacgatcacagggtgaagtcccatgacaggctgtctggaagctgaggagcaaggaagccagtagtggctcagtccaagtcccaaagcctcaaaagtagggaagctgacagtgcagccttcagtctgtggccaaaagcctgagagcccccagcaaaccactgcagtaagtcctagagtccaagggccgaagaacttggagtctgatgttcaagggcaggaagcatccagcacaggagaaagatgaaggctggaagactcagcaagtctgcccttccaccttcttctgcctgctttttctagcctcactggcaaccaactggatggtgcccacccagattgagggtgggcctgcctctcccagtccactgaagcaaatcttaatatcctctggcaa

SEQ ID NO: 922935 - DNA, 587 bp, Homo sapiens
agggcagctgcctgtcctgggtttctcatctgctagggtctaaatgtttgtgtcctcccaaaatccatagattgaaatcctcaccagcaggtgagggtattaggaggtgttattagtcagggttctctagagggacagaagtaaaaggacagatgcatatattgaagggagtttattaaggagaattgrctcacacgatcacagggtgaagtcccatgacaggctgtctggaagctgaggagcaaggaagccagtagtggctcagtccaagtcccaaagcctcaaaagtagggaagctgacagtgcagccttcagtctgtggccaaaagcctgagagcccccagcaaaccactgcagtaagtcctagagtccaagggccgaagaacttggagtctgatgttcaagggcaggaagcatccagcacaggagaaagatgaaggctggaagactcagcaagtctgcccttccaccttcttctgcctgctttttctagcctcactggcaaccaactggatggtgcccacccagattgagggtgggcctgcctctcccagtccactgaagcaaatcttaatatcctctggcaa

SEQ ID NO: 922936 - DNA, 578 bp, Homo sapiens
aacaatccttcaagcctaggaaagaatttacatttctacgccttcttatcatcttttgctaaaaacacatcttactgttcttatacacctcacatgtaaatctatttccagtagtttcagttacatgttataatggtaactcccagcaatttttaacttttatgtagaacctagtaagttgttataattatgtacaagtcgcagccaaggtttgactccttccagcataattaagggtgtggtttattccatatgtctgtaggcctcaccagttgtgaagcaggcaagtcaaactgttcacaaaaamcaaaaaaggcagtttataaccttaaaacatttagcaaacctaatatctgacctgcataatttagatcacctatttacattttgatgacatctacattttaccaataatctttaaggctgcttttattcctcgaggattaaagtcatgtgaactgaaaggtaccacagcttttatcttcccttttaaaaaatatttgattcaagtgcttatcctcttttaagtcaatgaagtagagctcttttttatagacatcacatacacgacacatatt

SEQ ID NO: 922937 - DNA, 560 bp, Homo sapiens
ggagatcatcctagattatccaggtaggtccaatggaatcacaagtgttcttaaatgcagaagagggaggcagaggggccagagtcagacgaggaggcgtaataaaaaagtgaggtcagagtaatgcaatgtgcaagatgctaaaccctcattgctcaccttgaagatagagggaagggaccatgagacaaagagtaaaggcagcctctagaagctagaaaatgcaagaaaacagatgctccaccaaagcctctggaaaggaatgcagccctgctgatgcactattttagcccagtgagagctatgtcagacttgcgacaaacaaaatggcaagataacaaatttatattaagtcactaaatttgtgctaacttgttatggcagcaataggaaastaaaatgaacagattggggtgctgctggaacacatgtctacaaatgccaaagtggctttggaacggggcagcaggaagagtctggaaaaattttgaggatgatagaaaatgcctagattgtcttaaacaaactaaatatgagtctatatgttaatgactgtgcta

SEQ ID NO: 922938 - DNA, 606 bp, Homo sapiens
tccccattctgcggcacggtgtttgggggtgtgaacccctggttcctcttccaccccctcaagactgtggggcctggccaagggcaagggcgggcttggcttaccttgacactcctgtgtcgcccctgaggtggccagagtgtagccagggtagcagaagcaggagtaggaccccacgcggttgatgcagcgcccttttcccttgcaggggtccctcagacactcgttgtcatctgaccagaaraaggcagggagggaggtcaggggggccagcggtgccgttctttgggcacctaccagcaacctgcccacactaggggctgggcaggggatggtgctgtgtggcaaggaaggggtgagggagtggaggaggctgaaaatctctaaggctggaagccataaagtcagcccagtgggcccactcaggcaccagaagcctggcgtgactgccagcccctcctatctgcccctcgactccttcccccagtagcctcatgattcctttctcctttgaaaccacaatggatatttctcccttatttgaaaatattggggggaggaggaatgaggtccacacttgatgatttatcttagcctcagacctcc

SEQ ID NO: 922939 - DNA, 657 bp, Homo sapiens
agatggaacacaaaagcagtgtgtacaaagagaaggaaggacaaacccgaggggcaccatgatgccagattctatgccaggggtaccttgaactcctgagaaccctgggatgtaggtgatattagatctactttgcagatgaagaaactaggggtaaaactggatttgaaccccaggtttgcycgacttcaaattttcccccaggaaactggtaggacagcaagtattattttagatcatagacacttagagctgggaaatcccaggcgccagaagccagggtgggctggggcccggcagcggagctctgggcacactccagctgtcactttcaaccacagcagctttgcttcattcttttttccttgttctttgtaagattcttttttctttgtaagatttcatttgaataaagaattccctggctgaaaagaagaagcttaaaatcattatgtatgtcatccatcctgcctcagtcttcattatagaaataagaaagataaggtccagagaagggattgatacacatggtccagctagggctggccccagaacaccaccagactgggcttctcctgatacctgagcccctggcctggagttttcctagagaggttgttgtcaggggaaagcccccacaaagctgctgcctctcca

SEQ ID NO: 922940 - DNA, 568 bp, Homo sapiens
cacaccaggagattatgtcccatgcctggctcggagggtcccaagcccatggagcctcactcactgccagcacagcagtctgagattgaactgcaaggcagcagcaaggctgggggaggggcacctgccattgccgaggcttgagtaagtaaacaaagcggcctggaagttcggactggttggagcccaacacagctcaaggaggcctgcctgcctctgtagactccaactctggaggcagggcatagctgaaaaaaaggcagcagaaacttctgcagacttaaatgtccctgactgacagctttgaagagagtagtggttctcccagcacggagtttgagatctgagaacggacagmctgcctcctcaagtgggtccctgacctccaagtagcctaactgggaggcacctcctcgtagaggccaactgacaccttatatagccgggtgcccctctgagatgaagcctccagaggaaggatcgagcagcaatatttgctgttctgcagcctccgctggtgatatccaggcaaatagggtctgtagtggacctccagcaaactccagca

SEQ ID NO: 922941 - DNA, 707 bp, Homo sapiens
aaagccatgtcgaaactccctacgattcctcgagtgttcttccagttacctgccacttgcccactgattcccctcagacctcagtcaaaacctgacacctgaggcatggagccaaaatggccaaataggaacagctccagtctacagctcccagcatgagtgacgcagaagacgaatgatttctgcatttccaactgaggtacagggttcatctcactggggattgtcagacagtgggtgcgggaccgtgggtacagcagcacactgagcgtgagctgaagcagggcaaggcatcacctcacccaggaagtgcaaggggtcagggagttccctttcctagccaaggaaaggggtgacagatggcacctggaaaatcgggtcactcccaccctaacactgcgctttttcaatggtcttagcaaatggcacaccaggagattatatcctgcgcmtggctcagagggtcctatgcccacagagccttgctcattgctagcacagcagtctagctgagatcaaactgcaaggcggcagtgaggctgggggaggggcacctgccattgccaaggcttgagtaggtaaacaaagcatctgggaagcttgaactgggtggagcccaccccagctcaaggaggcctgcctgcctctgtagactccacctctaggggcagggcatagccaaacaaaaggcagcagaaacctctgca

SEQ ID NO: 922942 - DNA, 658 bp, Homo sapiens
aaaggggtgacagatggcacctggaaaatcgggtcactcccaccctaacactgcgctttttcaatggtcttagcaaatggcacaccaggagattatatcctgcgcatggctcagagggtcctatgcccacagagccttgctcattgctagcacagcagtctagctgagatcaaactgcaaggcggcagtgaggctgggggaggggcacctgccattgccaaggcttgagtaggtaaacaaagcatctgggaagcttgaactgggtggagcccaccccagctcaaggaggcctgcctgcctctgtagactccacctctaggggcagggcatagccaaacaaaaggcagcagaaacctctgcagactttaatgtccctgtctgacagctttgaagagagtagtggttctcccagcgtgcagcttgagatctgagaacagagagactgcctcctcaagttggtccctgacccccgactagcctaactgggaggcaccccccattaggggyaaactgacacctcacagagccgggtactcctctgagacaaaacttccagaggaacgatcaggcagcaacatttgctgttcaccaatatctgctgttctgcagtctctgctgctgatacccaggcaaacagggtctggagtggacctctggc

SEQ ID NO: 922943 - DNA, 575 bp, Homo sapiens
tcttttttgttttatcttcttcttttctttcttgttttctttttttactttcccacaaatcacctttcttctggttatcccacctcctttattctttctaatcatctgtctcttttttttaaggtacataaaaccaatattacactttaagtgttttaaaacccaaattacagagtctctctgaactagcaatttatcatacttccattcctcctaatcaaatggtttggggaataatagaaagcatatgcatagtaaaaacttaaaagtgcaaagctagatgcttcagatagtagtcctcatttccttaatgaccacgcacatattcataacacagcattttatacaaatcaggctaaagtacaatctcaaaagaccctggtgctttcaacgtttgaaaaatgagtgcccataaacaatatcraatcacaatataacttgataattataatgtttatatttcacttattaaatacagaaagactgtttggtcttaaatataggtggtactttcacccttgaatgagaaataaatttatttatttagcaaaaataaatttatatgagaatggaat

SEQ ID NO: 922944 - DNA, 549 bp, Homo sapiens
ctgttttatcagagactaggatgcaacccctgctctttttgtgttttccatttgcttggtagatcttcctccatccctatattttgagcctaagtgtgtctctgcacatgagatgggtctcctgaatacagcacactgatgggtcttgactatccagtttgccagtctgtgtcttttaattggagcatttagtctatttacatttaaggttaatattgttatgtgtgaatttgatcctgtcattatgatgttagctggttattttgcccattaattcatgcagtttcttcatagcattgctggtctttacartttggcatgtttttgcagtggctggtaccggttgttcctttccacgtttagtgcttccttcaggagctcttttagggcaggcctggtggtgacaaaatctctcagcatttgcttgtctgtaaaggattttatttctccttcacttatgaagcttagtttggctggatatgaaattctgggatgagaattcttttctttaagaatgttgaacattggcccccactctcttctgacttg

SEQ ID NO: 922945 - DNA, 549 bp, Homo sapiens
ctgttttatcagagactaggatgcaacccctgctctttttgtgttttccatttgcttggtagatcttcctccatccctatattttgagcctaagtgtgtctctgcacatgagatgggtctcctgaatacagcacactgatgggtcttgactatccagtttgccagtctgtgtcttttaattggagcatttagtctatttacatttaaggttaatattgttatgtgtgaatttgatcctgtcattatgatgttagctggttattttgcccattaattcatgcagtttcttcatagcattgctggtctttacaatttggcatgtttttgcagtggctggtaccggttgttcctttccaygtttagtgcttccttcaggagctcttttagggcaggcctggtggtgacaaaatctctcagcatttgcttgtctgtaaaggattttatttctccttcacttatgaagcttagtttggctggatatgaaattctgggatgagaattcttttctttaagaatgttgaacattggcccccactctcttctgacttg

SEQ ID NO: 922946 - DNA, 833 bp, Homo sapiens
gaaaaaagaaaacaatttctaaagtctgattctgttcttttacactcattatcatagcatggtagtctagaaaagtttcttgttttcagaaataccagaaaacttactctgccattactatgactttcatgttccttcatttactttgggcctacattaagtggaaagaggctaaggcaaaggatataaagcaaagctaatgcagttatccgttggttttactgtcatcacttaacacagaaatcagcaagcttcttctgcaaagggccagataatacatgttttcagttttgtaggccataragtttctttaactactcaactcttctatatgaaaccagccatagataatacataaagcagtaagtatggctgtgttccattaaaactttatttaccaaaacaactgggctggattatggaccttaatttgtcaaacctggaaacatgttggaacacatatattttggtacttttgtatggccgatttcttaggaatagaagcataaaaccaacaaaggccaaagagcctttttatctggatttccttaagccacaataaactgtttttgttttgaaaaggctggaacttttccagaacttcattttgtgccaacacaaaacctggtcctctaccagactgctgatcaatttggagcaagtttataattaagagtggtgacagaaattaaaaacattgcatctttaaacattcttactctgtccagaaaagttaaacatttttccagtattattttgaagcagtccatggaagaactgacagccctgccatttcatttcagtttgcaactggatgaaaccactgttctctt

SEQ ID NO: 922947 - DNA, 597 bp, Homo sapiens
agcacacaaaaagctggtgagaactgtaggtgtaccatttgcatagcatgcaaagaaggtggttgtcccacactaatcttttattatgcagacgggttctctaactggcctgcgccatgttacctggttctttacacatggtgacaaagggaagctggagcctccatgttgagcatgcctggccctcaggtggcccytttttttttttttttttttttttttgagatggagtctcactctgtggcccaggctggagtgcagtggcgcaatctcggctcactgcaaactccgcctcccgggttcatgtcattctcctgcctcagcctcccaagtagctgggactacaggcgcctgccaccacgcccggctaattttttgtatttttagtagagatggggtttcaccgtgttagccaggatggtctcgacctcctgacctcgtgatccgcccaccctggcctcccagagtgctgggattaccagcatgagccaccgctgcgcccagcccaggtagcccttttctattggcacaactggcagcattcacccatgcaagcttccagcttgcttatctatgactgcagtttgatttttcagg

SEQ ID NO: 922948 - DNA, 594 bp, Homo sapiens
tcattctcctgcctcagcctcccaagtagctgggactacaggcgcctgccaccacgcccggctaattttttgtatttttagtagagatggggtttcaccgtgttagccaggatggtctcgacctcctgacctcgtgatccgcccaccctggcctcccagagtgctgggattaccagcatgagccaccgctgcgcccagcccaggtagcccttttctattggcacaactggcagcattcacccatgcaagcttccagcttgcttatctatgactgcagtttgatttttcaggctgttctttgttagaaaagaaatgattstggggggggctgctttttgttaaaagggaaaatccgtcaaggactctgttgccctcactatctacctaaataatttctttctagctcctgtatcaactgttttttgtttgtttgtttgtttgttttcataaaaggtgagtgaatacaagtccctttcactaggagtttcgaaattctcacactctaggagcctctacatcgttggagaatttacagaacattagcagttatctgcaatacttcatcaagctctcagctttatagatgatatatgc

SEQ ID NO: 922949 - DNA, 814 bp, Homo sapiens
cacagggcaccaagtccccaggctgcacacatcatggggaccctggacctggcccatgaagccactttttcttcctaggcctctgggcctgtgatgagagggactgcagtggaggggctgcagtgaaggtctctgacatggcctggagacttttccccatggtctttgggattaacattaggctccttgctacttatgtgaagttgtgtaactggcttgaatttctccccagaaaattggtttttcttttctatcacatagtcaggctgcaaattttccaaacttttatgctctgcttcccttataaaatggaatgcytttaaaagaacccaagtcacctcttggatgctttgctgcttagaaatttcttccaccagataccttaatcatctctctcaacttcaaagttccacaaatctctagggcaggggccaaatgctgccagtctctttgctaaaacataataagagtcacctttgctccagttcccaacaagttcctcgtctccatctgagaccaactcagcctgaattttattgtccatatctctttcagcattttgggcaaagccattcaacaagtctctaggaattccaaactttcccacattttcctgtcttcttctgagccctccaaactcttccatcctctgtcggttacccagttccaaagtcgcttccacatttttgggtatcttttcagcaacaccccactctactggtaccaatttactgtgttagttcattttcatgctgttgatacggacatacccgagactgggaagaaaaagaggtttaattggacttacagttcc

SEQ ID NO: 922950 - DNA, 661 bp, Homo sapiens
agggatttggagaacctttatgtctagctaagggattgtggatgcaccaatcagcactctgtatctagctcaaggtttgtggatgcaccaatcagcactctatatctatctaatctggtggggacttggacaatctttatatctagctaaggtattgtaaatacaccaatcagcactctgtgtctagctcaatgtttgtaaacacaccaatcagcaccctgtgtctagctcaaggtttgtaaatgcaccaatsagtgctctgtgtctagctaatctagggtggatttggagaacttttgtgtctagctcagggactgtaaacgcaccaaacagcaccctgtcaaaacggaccaatcagctttctgtaaaacagaccagtcagctctctgtaaaatggaccaatcagcaggacgtgggtggggccagatgagggaataaaagcaggctgccctccctcagccatcagtggcaacttggtcgggtctgcttccgcgctgtggaggttttgttttttactctttgcagtaaatcttgctgctgctcactctttgggtccgcactgcttttgtgagctgtaacactcacggagaaggtctgcaggttcatttctgagccagcgagaccaccagcccgccaggaggaagaaacgccgaacgctgcc

SEQ ID NO: 922951 - DNA, 765 bp, Homo sapiens
tgaataataagttgctgcatttggtccctcgtacaaccaagaaagagagaaagaggcacaacccctaatgggcctatttggattttggaggcaacacatttctcatttgggtgtgttactctgatccattcattgagtgactcaaaagtctgccagttttgagtggggtccagaaaaggagaaggctctgcaacaggtccaggctgctgtgcaagctgctctgccacttgggccatatgacccagcagatccaatagtgcttgaggtgtcagtagcagatagggatgctgtttggagcctttgcgagaccsccataggcgaatcacagcggcacgctgtaggattttggactgagaccttgccatcttttgcagataactactctccttttgagagacagttcttggcccgttactgggctttggtggaaactgaacatttgactatgggtcatcaagtcaccatgcctgaactgcctatcatgacatggatactttctgacccatctagccataaagtgggtcatgcacagcagcattttgtcatcagatggaagtggtatatatatgatcaggctcaagcaggtcctgaaggcacaagttacatgaggaagtggctcaaatgcccatgctctccactcatgccaccctcccttctctccctcagtctgcactgatggcctcgcggggagttccctaggatcagttgacagaggaagagaaaactagggcctggttcacaaatggttctgcacaatgcgcaggc

SEQ ID NO: 922952 - DNA, 765 bp, Homo sapiens
tgaataataagttgctgcatttggtccctcgtacaaccaagaaagagagaaagaggcacaacccctaatgggcctatttggattttggaggcaacacatttctcatttgggtgtgttactctgatccattcattgagtgactcaaaagtctgccagttttgagtggggtccagaaaaggagaaggctctgcaacaggtccaggctgctgtgcaagctgctctgccacttgggccatatgacccagcagatccaatagtgcttgaggtgtcagtagcagatagggatgctgtttggagcctttgcgagacccccataggcgaatcacagcggcasgctgtaggattttggactgagaccttgccatcttttgcagataactactctccttttgagagacagttcttggcccgttactgggctttggtggaaactgaacatttgactatgggtcatcaagtcaccatgcctgaactgcctatcatgacatggatactttctgacccatctagccataaagtgggtcatgcacagcagcattttgtcatcagatggaagtggtatatatatgatcaggctcaagcaggtcctgaaggcacaagttacatgaggaagtggctcaaatgcccatgctctccactcatgccaccctcccttctctccctcagtctgcactgatggcctcgcggggagttccctaggatcagttgacagaggaagagaaaactagggcctggttcacaaatggttctgcacaatgcgcaggc

SEQ ID NO: 922953 - DNA, 765 bp, Homo sapiens
tgaataataagttgctgcatttggtccctcgtacaaccaagaaagagagaaagaggcacaacccctaatgggcctatttggattttggaggcaacacatttctcatttgggtgtgttactctgatccattcattgagtgactcaaaagtctgccagttttgagtggggtccagaaaaggagaaggctctgcaacaggtccaggctgctgtgcaagctgctctgccacttgggccatatgacccagcagatccaatagtgcttgaggtgtcagtagcagatagggatgctgtttggagcctttgcgagacccccataggcgaatcacagcggcacsctgtaggattttggactgagaccttgccatcttttgcagataactactctccttttgagagacagttcttggcccgttactgggctttggtggaaactgaacatttgactatgggtcatcaagtcaccatgcctgaactgcctatcatgacatggatactttctgacccatctagccataaagtgggtcatgcacagcagcattttgtcatcagatggaagtggtatatatatgatcaggctcaagcaggtcctgaaggcacaagttacatgaggaagtggctcaaatgcccatgctctccactcatgccaccctcccttctctccctcagtctgcactgatggcctcgcggggagttccctaggatcagttgacagaggaagagaaaactagggcctggttcacaaatggttctgcacaatgcgcaggc

SEQ ID NO: 922954 - DNA, 596 bp, Homo sapiens
gggcaccaggtcctgaggctgcatagaacaggcagaacatgggcttagtccacaatgttattttttccctcctaggcctctgagcctgtgatggaaggggatgacatgaaggtctctgacatgcacttgagacattttctccattgtcttggtgattaacatccagttcctcattacttatgcaaatttctgcagcaggcttgaatttctccccagaaaatgggcttttatcttctattgcatcattaggctgcaaattttccaaacttttatgttctgcttcctctttaatcctttgctgcttaggaatttcttccgccagatactctaaatcatctctctcaagttcaaagttccacagacttctaaggcagaggcaaaaatgccrtcagtccctttgcatagcaagagtgaccttcactccagttcccaacaaatacctatctgcatctgagaccatcccagcctggacttcattgtttatatcactatcatcattttggtcaaagccaatcaacaagtctctaggaagtccaaactttcccacatctttctgtcttcttctgagtctttgaaactgttccaacctctgcctg

SEQ ID NO: 922955 - DNA, 455 bp, Homo sapiens
gtggtggtgggcacctgtaattcaagctacttgggaggctgaggccagagaattgcttgaacccaggaggcggaggtttcagtgagctgagatcatgccactgcactccagcctgggcaacagagcaagactttgtctcaaaaaaaaaaaaattttgtttgtacacaatattttcatttctctaagatatccaggagtggaattatsaggtcagtggtaatctatgtttaatattttcaggaattgccaaactgatttcctcagcaaatatactattttatattcctaccagagaatgtataaaggttccaatttatccatgttttcaccaacacttgttattgtttgtcttttttattttagacagtgtatgaagtggtatcttatgattttgatttgtgtttccataattcctaaagatgttgagcattatttcatatcttgttatctattca

SEQ ID NO: 922956 - DNA, 646 bp, Homo sapiens
aaagtatatcttgtttttgtttgcatactctctataaagatttttttatatctaatagttttaattatacatattaactacattaactcttagtaaccttaattaaaaaaaaatccctaggaagtaattttgaatggttatatatcaggatttgtagaacaaaccattttataattttatagaaaaatgttttataaaattttgtttattaacagatctaaatataattagcttttctatgccatataaaaataatttgccaagatattaaacttcaacttgttttaaataattgatgatttagtattttacaaatgactcagatatttttattatttaccataacagatattttattatttaccataacatgactttaagattttgaattactaaaaataactttgaaactatgacacaagtaccttccccaatgtcattttcagtaatcctgggtctcaggtggccatgtggcatcccagataccartgaaggtcagggcctatctgagtcctgaatttacatatcagttgcagagctcaggacctcaaagacagagctgtgaagactatgcctggaagattcaacccctcctaaaatagccaggaggcaacgctgaggcatggaagaaggggccatacttggc

SEQ ID NO: 922957 - DNA, 577 bp, Homo sapiens
agatagagcacacagcccaagagtactgagctaagccttggcccccaaaaatcttccagaaacgcaaccaattgattgaacccaccatataaaacaaacaaacccccaagaacatcaaagataaaagaaaaataaaatacacccaaaggacagcaatttcaaagattgaaggatcatgagccagagagagagggagagagacagagagacagagagagagagagagagaatcagagaaagaactctggctacacaaaaagccaaactggcttcttacctccaaaccaccatgctagttcccagtgtggttcttagccaggctgaaatggctgagatgacagaaatagaattcagaacatgaatagaacaaagatcatcgagattyaggaaaaattcttccttacccaactttccactctgtgtcctttaattgggacatttagcccatttatattcaaggttagtattgacaggtgtagatttgatcctgtcatcatttagttagcttgttattatgcacacttgtttgtgtggttgctttatagtgtcactgacccatgcacttaagtgtgttttt

SEQ ID NO: 922958 - DNA, 632 bp, Homo sapiens
gcctgtttagttctttaaccctctgtggctatgctagtacttgaagctagcaaacttcttaagctcacccaaggcccttgatatagtacctgggtattgctattggttctttggggcccaacggctgttcagtgagcaggtaataaatgctgccaggtctgggtcctttccttcaaggcagcatgttcccttctcacccaggctgtgtctacaaaacttatctgggagctcaggcctggaatggtggcctcatatttgaccagtgccctaccctgctgtggctgaactagtatcctaggtgcaatacaaaattctcaccattctttctctcctctcctcaagttgaaggaaggagacccacgctgaggggcttgggaatgaaagttgccarcactcccttgcctgccccaactggtatctcagtgtgtcacgtgccccccagtgcactgtctctgggtctagttcagcactaggactcacctaagatttgcagtccttatggcctagactgcctttcaagttcacttggagacacagagcactattatagcccttgatggtgaggtttgtgggaacttaagtttggatgactgggattggtgatttgcctctggctaggcctggtttaaatg

SEQ ID NO: 922959 - DNA, 446 bp, Homo sapiens
ctcacccaggctgtgtctacaaaacttatctgggagctcaggcctggaatggtggcctcatatttgaccagtgccctaccctgctgtggctgaactagtatcctaggtgcaatacaaaattctcaccattctttctctcctctcctcaagttgaaggaaggagacccacgctgaggggcttgggaatgaaagttgccagcactcccttgcctgccccaactggtatctcagtgtgtcacgtgccccccagtkcactgtctctgggtctagttcagcactaggactcacctaagatttgcagtccttatggcctagactgcctttcaagttcacttggagacacagagcactattatagcccttgatggtgaggtttgtgggaacttaagtttggatgactgggattggtgatttgcctctggctaggcctggtttaaatgttccct

SEQ ID NO: 922960 - DNA, 668 bp, Homo sapiens
tggttcgagtggggacttggataacttttctgtctagctaaaggattgtaaacgcaccaatcagcactctgtgtttagctaaaggattgtaaacgcaccaatcagcactctgtaaaaacgtaccaatcagcactctgtaaaaacgtaccaatcagcactctgtaaaaaggaccaatcagtgctctgtaaaatggaccaatcagccagatgtgggtggggccaaataagggaataaaagtttgccatctgagccagcagcggcaacccgttgggtccgtttccatgytgtggaagctttcttctttcactcttcacaataaatcttgctgctgctcactccttgggtctgcactacctttatgagctggaacacttaccacgatggtctgtggttttgctcctaaaataagggagactacgaacccactggaaggaagaaactgtggacacatctgaaggaacaaactctggacacaccatctttaagaactgtaacactcactgctagggtctgcggcttcattcttgaagtcagcaagaccaagaacccactggaaggaaccaattctggacacaccacggctatcagactgttctcagcctggggtgggtatgaagtgcattccgcattttccttcacaggagttcctagagtatttttcttccag

SEQ ID NO: 922961 - DNA, 501 bp, Homo sapiens
aaactgcaataacagtactgaaagaatgaggggcaaaccaaagtgtctgaggacagttttggaggagcataatagccagtacagaatgtctaaaatggggcccggcgcggtggctcacgcctgtaatcccggcactttgggaggctgaggcgggcggatcatgaggtcaggagatcgagactatcctggctaacacggtgaaaccccgtctctactaaaaacactaaaaaattagccgrgtgttgtggcgggtgcctgtagtcccagctacaggctggggcaggagaatggtgtgaacccgggagcagagttgcagtgagcccagaatcggccaatgcactccaacctggacgaaagaacgagaatccgtctcaaaaaaaaaaaaaaaaaaggggaaagaaaagaaaagaaaatggctaaaacgggagaaagggaattaaaaataacaaaagtatatatgtgtgttactcagaagtatgaagtatagatgtaaagggcaga

SEQ ID NO: 922962 - DNA, 628 bp, Homo sapiens
ctgagtttaagtaagcaagtagtaacacaacatacaagcaaaccaaaaaataaagcaattattcagtccaggaaaaacaaaactgcacaacaagggcaattcaaatgcaaaatatttaccttatatttatataaatgttaaatattcatttaaacaaaaactgcaataacagtactgaaagaatgaggggcaaaccaaagtgtctgaggacagttttggaggagcataatagccagtacagaatgtctaaaatggggcccggcgcggtggctcacgcctgtaatcccggcactttgggaggctgaggcgggcggatcatgaggtcaggagatcgagactatcctggctaacacggtgaaaccccgtctctactaaaaacactaaaaaattagccgggtgttgtggcgggtgccygtagtcccagctacaggctggggcaggagaatggtgtgaacccgggagcagagttgcagtgagcccagaatcggccaatgcactccaacctggacgaaagaacgagaatccgtctcaaaaaaaaaaaaaaaaaaggggaaagaaaagaaaagaaaatggctaaaacgggagaaagggaattaaaaataacaaaagtatatatgtgtgttactca

SEQ ID NO: 922963 - DNA, 798 bp, Homo sapiens
ctctgtaagtgtgctgagacacaactgtgtagtggtaaccaaacctaattgcccagcagaattaactcgaaggagggtttttttaaaaagttcaattgaaatataattcgtataccatacgcttcacccatttaaagtgtacagttcagtggcttttactatgttcatagagtattatcactgtcaccacagtcagttttagaagattttcatcactccatgaggaattccttacctattagcagttactccccattttacccaaacctctcagccttggcaaccgctaatctgtctctgtaggtttgcctcttctgaacatttcacataaatggaatcatatagtatgtggtcttttgtgactggcttctttcatttagcaaggttttcaaggttcatctgtgttatagcatgtatcagtactttatccgaggactatgattttttgattgcttactgtaaacctatggcataaaaatctctgggaacaaggcctggaaataattcttttttttttttttttcctgagacagtcttactctgtcgcccgggctggagggcagtggcgtgatctcggctcamtgcaagctccgcctcccgggttcacaccattctcctccctcagcctccccagtagctgggactacaggcacccgccaccagggccggctaattttttttgtgtgtgtatttttagtagagatggagtttcactgtgttagccaggatggtcttgatctcctgacctcattatccacccagcttggcctcccaaagtgctgggattacaagcatgag

SEQ ID NO: 922964 - DNA, 631 bp, Homo sapiens
gcttcttatctttaaaatgagagaattatcgaagccagttctcatcacactgaatgttaaaaattacagttacagcagtgattgcaaattcaaagctctggtgcagataccagcagtgaccataaagttttctaggtgattccactagtttcttatttcttrgatgtgtatgtgtagcatctggactaggcactgtagatggatgagtgggggaaattttatttagcttgaaaattgagatagttttggacctcatggttaggtctttctgggaaatttttatttgaaacacttgtagaaaaagaaagcagacatgctagatctgtccctgacctcacttgttagaactggtcggattcctgggctgatacagagaagtttgaaacttttcaaaatttacctgttttctgataccactacaatttctttggaaaaagaatttcctgttaagtgtctgttttgtaaggggacattttgtaggttctagggtgttgggtatggtgctgtcatttagttttcttcagcagagatgaggtagccacataactacactagacggcattgtatctatctgccatcttgtcaaggcagcagagttgtgttaagaaaacatttttggagtcagatgtgg

SEQ ID NO: 922965 - DNA, 729 bp, Homo sapiens
gaaaactcagagaaattcaagataacacagagatggaattcagaatcctatcagataaatttaacagattgaaataattaaaaataattaaacagatattctggagttgaaaaatgcaattgacatactgaagaatgcatcataatggcttaaaagcagttgatcggccrggtgtggtggcttatgtctgtaatcccatcagtttgggaggctgaggagggtggatcatgaggtcaggagttcgagaccagcccggccaacatggtgaaaccctgcctctactaaagatacaaaaaattagccgggcaaggtggcacatccctgtaatctgagccacttaggaggctgaggcaggagaattgcttgaacctgggaggcagaggttgcagtgagacgagatcgtgccattgcactctagtctgggtgacagggcgagactccatctcaaaacaaaaaacggcagttgatcaagcagaagaaagagttagtgagcttgaagacaggctttttgaaaatacacaatcagagaagacaaaagaaaaaagaataaaaataagcacacctacgggatttagaaagtagccttgaaggggcaaatctaagagttattgtctgtaaagaggaggtagagaaagagataggggtaaaaagtttattcgaaggaataataacagagaacttctcaaacctagagaaagatattaatatccaagtacaagaaggttatag

SEQ ID NO: 922966 - DNA, 770 bp, Homo sapiens
ctttaaaaagattaaagcctgttatcactcgcctgctacagcatggccttttaaagcctataaactctccttaccattcgcccattttacctgtcctaaaaccagacaaggcttacaggttagttcaggatctgcgccttatcaaccaaattgttttgcctatccaccccatggtgccaaacccatatactctcctgtcctcagtacctccctttacaacccattattctgttctagatctcaaacctgctttctttactattgctttgcacccttcatcccagcctcttttcgctttcrcttagactgaccctgacacccattaggctcagcaaattacctgggctgtactgccgcaaagcttcacagacagcccccattacttcagtcacgcccaaatttcatcctcatctgttacctatctcggcataattctcataaaaacacacgtgctctccctgctgatcgtgtccaattaatctcctaaacctcaatcccttacaaaacaacaactcctttccttcctaggtatggttagtgcggtcagaattcttacacaagagccaggaccgcaccctgtagcctttctgtccaaacaacttgaccttactgttttagcctagccctcatgtctgcatgcagcggctgccgctgctttaatacttttagaggccctaaaaatcacaaactatgctcaactcactctctacatttctcataacttccaaaatgtattttcttcctcatacctgacacatatactttctgct

SEQ ID NO: 922967 - DNA, 769 bp, Homo sapiens
cctggaattcacaacaccttagaccagcagccgccaacctttttggcaccagggactggaccgtgaattggctgatggaagccaatttttccacggaccaagggtgtgggggatggtttcaggatgaaactgccccattttagatcatcaggcattagttcgattctcwtaaggagcgtgcaacctagatctcttgcatgcgcagttcacaacagggcctgcgctcctctgagaatcgaatgctgctgctgacctgaccggaggtggagctaaggtgggaatgctcactcgcctgctgctcgcctcctgccatgcagcctggttcttcacacgccacagatcggtaccagtccccagcatgaggttcgggaaccctagctctagaccatgaggatgaggccacatcctagggattgccaagctgtgaagtgaaaggagcatgggttcctgaggacttcataaagcaggtccactataccaagctatgactgcaaaatgtacatttttacatgaagaaaaaaaactggttatctggggttttctgatgctcttaattgaacctaatcccatctgatgcagtggatagcaacaagaagagctatccctcacagaaataaagaagtttggaacactgtatcaaaacgtactttcgcccccaatattctctaagcctcacaaccacaataatacactgctccaacaggagctcatttataaagggtcactcaggtaagaaaaagcagtacagaactagaaaccaaatctccat

SEQ ID NO: 922968 - DNA, 769 bp, Homo sapiens
cctggaattcacaacaccttagaccagcagccgccaacctttttggcaccagggactggaccgtgaattggctgatggaagccaatttttccacggaccaagggtgtgggggatggtttcaggatgaaactgccccattttagatcatcaggcattagttcgattctcataaggagcgtgcaacctagatctcttgcatgcgcagttcacaacagggcctgcgctcctctgagaatcgaatgctgctgctgacctgaccggaggtggagctaaggtgggaatgctcactcgcctgctgctcgcctcctgccatgcagcctggttcttcacacgccacagatcrgtaccagtccccagcatgaggttcgggaaccctagctctagaccatgaggatgaggccacatcctagggattgccaagctgtgaagtgaaaggagcatgggttcctgaggacttcataaagcaggtccactataccaagctatgactgcaaaatgtacatttttacatgaagaaaaaaaactggttatctggggttttctgatgctcttaattgaacctaatcccatctgatgcagtggatagcaacaagaagagctatccctcacagaaataaagaagtttggaacactgtatcaaaacgtactttcgcccccaatattctctaagcctcacaaccacaataatacactgctccaacaggagctcatttataaagggtcactcaggtaagaaaaagcagtacagaactagaaaccaaatctccat

SEQ ID NO: 922969 - DNA, 494 bp, Homo sapiens
cccgaatattcttagaagtggaattgttcatgttttttggataatgccaaatggttttcctaaaatgttatagccatgtttgttcctacgcacagtgaatgagagttgccgttgctgcacatcatcagggatagtcygtgttgttcattgtataaattttagcaattctggtggatctgtgcccatagatcattgcgattttcatgttcatttctacagtggctatagagcttaatcagcttttcatatagttagcagtcatttggatattcttttttaggacgtatatgtgttttgccctttatttctaccgtgttgctttgcttttccatattgatcataaaattattcacatattctgaatatgagcctgtttttggttatatggcttgcaaatatttctcccactttgaagcttctgtatttacactcatgtcgattttaagtttgattaacataatttcttaaacttgctcaataagataagcttatga

SEQ ID NO: 922970 - DNA, 574 bp, Homo sapiens
ttccaggctaccacaccatgttggtgggaaagatgagatgagagatatcaagttaaaatgccatagcccttgctattctaaccaagtttcagtcatttttcttttgtaaacacttttcagagcgtcatgaactttggctaatttctggaattttgaaaaagttgactttgataattttgccagtattcttgttactttaatggaggaattttttttttttttttttttttttttgagacaagtctgtctctgtcccacaggctggagtgcagtggcgcaatcttggctcactgaaacctctacctcctggattcaagcaattctcctgcctcagcctcccgagtagctgggattrcaggcatttgtcaccatgcccagctaattttttttgtatattttgtagagatgggggtttcaccaagttggccaggccagactcctgacctcaagtgatctgcccccctcggcctcccaaagtgctgggattacaggcatgaaccactgcacctggcctggaggatcagatttatagaaaccctcatgccaccattttggaagtccggcctctgaattc

SEQ ID NO: 922971 - DNA, 603 bp, Homo sapiens
caacccatcatctacattaggtatttctcctaattctatccctcccagagtcccccaccccccaagaggcccacacacacagtgggtgatgttcccctccttatgtccatgtgttctcattgttcaactcccacttatgagtgrgaacatgtggtgtttggtttactgttcctgtgttagtttgctgagtgatggtttccagcttcattcatgtccctgcaaaggacacgaactcatccttttttatggctgcatagtataccatggtgtatatgtgccacattttctttaaccagtctatcattgatgggcatttgggtaggttccaagtctttgctattgtgaacagtgctgcaataaacatacgtgtacatgtgtctttatagtagaatgatttataatattttgggtatatacccagtaatgggattgctagctcattatggtgggtgtgacgtttgtggtcctcatctcctgtggctacaccccagctactatcctgaggatgtactccgcagttaggggatgcaaaatcttctctacctgtggttctcacattactacagtgcctctctttcccgggactgtgtttgtcatgtatgc

SEQ ID NO: 922972 - DNA, 603 bp, Homo sapiens
caacccatcatctacattaggtatttctcctaattctatccctcccagagtcccccaccccccaagaggcccacacacacagtgggtgatgttcccctccttatgtccatgtgttctcattgttcaactcccacttatgagtgggaacatgtggtgtttggtttactgttcctgtgttagtttgctgagtgatggtttccagcttcattcatgtccctgcaaaggacacgaactcatccttttttatggctgcatagtataccatggtgtatatgtgccacattttctttaaccagtctatcrttgatgggcatttgggtaggttccaagtctttgctattgtgaacagtgctgcaataaacatacgtgtacatgtgtctttatagtagaatgatttataatattttgggtatatacccagtaatgggattgctagctcattatggtgggtgtgacgtttgtggtcctcatctcctgtggctacaccccagctactatcctgaggatgtactccgcagttaggggatgcaaaatcttctctacctgtggttctcacattactacagtgcctctctttcccgggactgtgtttgtcatgtatgc

SEQ ID NO: 922973 - DNA, 760 bp, Homo sapiens
ccaggagtcaggaaggggctctaaccttggctttgggacccagctatgtggcatctgctcactcaggagtacacccatctgtgagtgagtaccatcctcggctctatttcagaggctgtcacaaagttcaaacacgacagtttatgtggaagtgccctgcttacactgcccacataaaattccaattcaaattgacaaccagcatggattttcacaaattttccaaacataaaagattaaaaacagctttttcttgtttcgttttataaaacagctttttcaataaacaaaaatgtgaaatacccaccttaggcccaattattaaatatttaatattatttaatattaatattgaagaaaaaccagtgaaataagcaaccatatatctgagaaaaaggtatcattctgtgtaacataaaatcatacctagtttctctgctatttcttttgcaagtttgccttttccagtacatatattgccatctacagttatcactctgctgcgttctgtcagtcttttgcttgctttatccccaagtaggaaatgccacattccatagcgcagyttgcactgcacactgctatgaattcctctctgaaaaacacaaaatcacacagcagcacattgtgaccactctggttcctgtaggcattagtaactattaggtaaaaataccaagaaacctcttagtgataaaaatgccaacatctacatctttattgcctattaatttgtttaattatctgtctatcccccacc

SEQ ID NO: 922974 - DNA, 658 bp, Homo sapiens
agattcttccctgtggtggtggtagaggtacccacctgaagaaaaggcatgtgtttttactgttaagaaaaccagtaagggccggacgtggtggctcatgcttgtaatcccaccactttgggaggccgaggcaggcgmatcacttgagtttgagaccagcctggccaacatggcgaaaccccgtctctactaaaaatatgaaaattagctgggtgtggtggcgcacgcctgtaatcccagctacttgggaggctgagacaggagaatcgcttgaaactgagaggcagaggttgcagtgagccgagatggcaccactgcactccagcctgggcgacaaagtgagactccatctcaaaaaaaagagaaagaaacccattaagaatttaaatgtgagatgggaaatgagcaaggttttggccttgagagataagcgttcgctttatccttggagaataggagggaattgggcctagactctgaggtgagaaaatgcctggagcactcagtggtgggtgaactggcttctgtctcagagaatggtgaatagctaggcagacagcctgcctctgaagactgaggcaggtggaattcaccctgtaagttgtgtttctgttttaatctaacactgcaacaaattccagatgttaaaagtcacagc

SEQ ID NO: 922975 - DNA, 593 bp, Homo sapiens
tctgtcgtgagttactgcatctatgtgaacctcagtttactcatctacagaatgagtgtggcacagtctgtctgtgtcacaggagacttcagtgagagccttgggatagcaatgtttaagagtgaagatagcagagaaaagccgaacttagagtctagctgaagtgagatggtggaggtrgttctactctcatggaattgtataccaattccctctcatcagctctccaaccccaacctgctggcaacaagcattcacaagttcagtgttaagctttgttgaataacttggactcatagccttccttggatgtggggattctaatggcccagaaggggaaggagggatgagctagaagcctgacttaatagaccgagagtggtatgcaagccactcagttcttccccaatgccgttcatgactacggtcctcacacatatattaaggctgtcctcgggccaggtgctcatgcctgtaatcccagcactttgggaggccgaggcaggtgcatcactggaggccaggagttcgagatcagccttggcaacatggtgaaaccctgtctctactaaaaatagaaaaaaattatctga

SEQ ID NO: 922976 - DNA, 618 bp, Homo sapiens
atctcaagtaactgtcaaaagtgccttacaatcaatgcatccataaccaaattcttgattgttctccctgaacgaatttattctttcatccccgaacaaagagaactgtgagaaagccaagagtgagtgatgaaaagagtagttggaaaggagctgggagaagtggcccagcacctgatcatgtctagccttggaggtcatggcaaggacttcggatgttaccttgagatgcaaagcgatttgaaacttttgaatagggaaataacgatatttgtgtttgaaagggttccttcgtcaatagtgtgggtgagagtggagaagagaagccagtagaaaatctatcacagaagcttaggtaatagataacagaggcttgaaagaaagtggtagaaatggaagtgattaggtgtggtcagattctgataccttttcaaggtaaagtaagcaatatttgttgatgggttagatrtagagtatgagataaagagaaaactccaagacagctcatgagatttttgttatcagtctctagtgagggaaacttagagagaaggacacattggggaaggaactggaatcaagagttgagtttaaaatctgctgatttcagatgcttat

SEQ ID NO: 922977 - DNA, 611 bp, Homo sapiens
ggcgcctgccgccatgcccgggtaattttttgtatttttagtagagatggggtttcactatgttgaccaggctggtctcgaactcctggcctcaagtgatccacccgcctcggcctcccaaagtgttgagattacaggcataagccactgcacttggcctgttttgggtctttatttagaagtttggtgatatttttgtgaccagaaatatgccttggaaactaaactctgtcttatatcagagatggtggtaaaactggtttagtatgcatcgtttcacttaaaaactggtttagtatgcattgtttcacttaaaattgtagtttccaagagcctatcaaggatgttaagtgagaacttactgtggtttctgttgctgagccaatattctattattggatrtaccaccattcaccattatccattcatcagttgttcctactttttggctattatgagcaatgctgctatgaaaatttattctaaagtctttgtgtggagacatgttgttattattcttgggaatatacataggtgtggaattaaggagtcaaatagtaactgtatctttaactttccaaggaactgccaggtgttttccaaacctgctg

SEQ ID NO: 922978 - DNA, 635 bp, Homo sapiens
aatatgtctataccaattatgcattctgacactgagaaaatgaccacaggatgagtccggggacccactgggcccaccgtaagtcaaatctgagctaaaactccattaattacctgacctccataagctcctacttaaactggagaaccacaatgacagtttgggtcccctggagtcaacgtcagctcagagccagtgtccagtagtccctgaaatgtctgatcatttccctttccccagtgcacarttaccctggtaaaaggctggaggtctccttgagaaaggatgagagaaagattcattgcacaaactgtcagtaatgtattggggtccttcatcaaggggacccggcctgtaaactgggtctgtaaactggctcaagtatgcaaattgattgaggggccatgattctctgttttcataattcagattagtattttgtccatttgacctagaagttttccatttgtataatgtaagtaggaatgtggtaggcttcctatcaatttcacttctaggaacaccgtgattatttagctgatgccagagctctacacaagtcagactattcttattgccgctttgactctgctgtccattacggtagctatggccaccttgcctttgactgttta

SEQ ID NO: 922979 - DNA, 592 bp, Homo sapiens
cccacagcagagtcaatgtaaagacctatgggagggcttcaggaatgactcctcagacaggagccctgggaagggcttctccaagagagaaagtgcactccagaggcaagagcactggccaagtcctgacctgataccggatgagctgtgtgatcatgggcacatcacgtctctgagccttggtgttcttcctgtgagatgggccaataacaccaggcacctcataggatggatgtgaagactgcatgatagagtagatagaaggcagttaaagcaacacctggtgctatggtttggatgtggtttgaccctgcaaaagctcatgttgaaatttggttcccaaggtggcagtgatgggaggtgggacctagtgggggatagttgagtcacaggggcagatccctcatgcatayattaatacccccttgagggagggagggagttctagctgtcgtgagactggattagtcactggagagcaggttgttataaaagcaaattcagctttctaaactctcttgctttctatatcaccttgtggtctctttgcgaatgtcagatccccttctgctttttgccatgagtgggagca

SEQ ID NO: 922980 - DNA, 748 bp, Homo sapiens
aacagcccctcacatctcctgaaggttgaccaccccagtgccctgctcccaatagagcagcatttgagcagagacaaaggcaaaccagccccatacctccccagagcaagggatagcctagcatcccacccccagggtagcagagcagaataattggactagtcttacaaacttcttcagcctgagctactgaggcattgaaaggcacaagtracattgactatagttgaagaaactgcatggaaactatactactgtactcacccagaacaaagccaacacgctttacccaacagatgccctaggacacatctacaggtgaaagtcttttcccacaaatgccctgtgtattagtctgtcttcatgctgctgacaaacacatacccaagattgggaaatttacaaaggaaagaggtttaattggacttacagtaccatgtggctagggaagcctcacaatcatggcagaaggcaaggaggagcaagtcatatcttacacaaatggcagcaggcaaagagagagcttgtgcagggaaatttcaccttatgaagccatcagattttgtgagaattattcactaacatgagaacagtgcaggaaagacctgcccccataattcaatcacctcccaccaggttcctttcacaacaggtgggaattcaaggcgagatttgggtggtgacatcgccaaaccatatcagcccagtacaaaattggaagaagcaactgttttatcagatgtacata

SEQ ID NO: 922981 - DNA, 709 bp, Homo sapiens
ctgaggtctggggtatggatgagcctgtcactctggtagtgagcatagtatgtgataggtagtttttcagcccatgcccccatttgccaaccccttctagtcatctccagtgtctgttgttaacatctttttttgttttttgagacagagtctcactctgtcgcccaggctggagtgcagtggcgcaatcttggcccactgcaacctctccgcctcccgggttcaagcaactctcctgcctcagcctcctgagtagctgggactacaggtgcccaccaccacgcctggctaatttttgtatttttagtagagacggggttttgccatgttggccaggctggtcttcaactcctgaccttatgatctgcccgcctaggcctcccaaagttatggcattacaggtgtgagccactgcacctggcttttttttttttttttttttcccttgagaaagggtcttgctttcaccctgactggaaggcagtggcatgatcatggctcactgcagccttgaccttctgggctcaagtgatyttcccacctcagccttccacgtagctgggaccatgggcatgtaccaccacacctggctaactttgattttttgtagatacaaggtctatgttgcccaggctggtcttgaactcctgggctcaagcagtcctcttgcctcagcctcccaagtgctggcattacaggcattagccac

SEQ ID NO: 922982 - DNA, 765 bp, Homo sapiens
aattgtattctttctccactgggaaaatagaagcaaccaggaaagaactctacagattcccactaccacatttatcccctgaccagaagttgcatcttcacactttccacctattacctgcccatcaaagcacattcctcgacttgtgcacacaatcctgcccctttcacctactcaaggacattactccagcaatgcttccctttctctcttccaccaaattctctctctctctgtctctgtctctactggatcctttccatcagtacacaagcatgctattatttctcatatcttaaaaaacaacaaagtcttttaatgactacttccatcagcagygtctgccctatttactcctctttagagcaaaaaagaatcatttatacttgctatgtccaattcctctcctccagttctctctcaaatcaacttcaaatcaggcttacgtccccattagcctacagagattgttcctgtcaaagttatcatgactttcatgttactaaatacaagggtcaattctcagctctcatcttattgattaatagcatctgatataactgaccacttcctcttccttgatacagtctcttcactgaggttcaccccagggcatcttactcgcttggttttttcctggtacctcactccttcaaaccttcttcgtcttttttcttcattcctcctcttttccctgacccctaaatgttgaaatgcccagggctcagacctcagttctctgcttttccttatccacctctttcg

SEQ ID NO: 922983 - DNA, 581 bp, Homo sapiens
  misc_feature 416: n = A,T,C or G
agctctatgactgtttcttgcttcctgccctctgacttttagaggtgggtagccctgggctcctcccaggtctggacatcatcatcccagctagagacatggagcccccaatcacaggggaagagacagtggtacaagaggctccttatccaggcacggtggctcgcacctgtaatcccagcactttgggaggctgaggcaggagaatcacttgaggtcaggagtttgagaccagcctggccaacgtggygaaacctcacccctactaaaattacaacaacaacaacaaaaaattagccaggcatggtggcgcatgcctgtaatcccagctactcaggaggctgaggcacgagaatcgcttgagcccacgtggtggaggctgcagtgagctcagattgcaccactgcactccagcntgggccacagagtgacaccctctcaaaacaaaacaaaaaagcctccttagattcaaactggattctggcctgggttccactggtcaccattcaactactgttcatctctaagtctctgtttctgtgacttcaaaaggaagttagcattttccttgcagaggtgct

SEQ ID NO: 922984 - DNA, 585 bp, Homo sapiens
gcccatatactatgcttttcccgtggtcttcgcaacccacagaccaggagattccctcaggtgactataccaccagggccctgggtttcaagcaccaaactgggcagccatttgagcagacaccaagctagctgcaggaattttttgtcatgccccagtagcatctggaataccagcgagacagaactgttcactcccctggaaagggggctgaagccagggagccaagtggtctagctcagtggatcccacccccacggagcccagcaaactatgatccactggcttgaaattcttgctgccaggacagcagtctgaagtctaccagaaacactygagtttgatgagggcaggggtgttcaccatcactgaggcttgagtaggcagttttcacctcacaaggtaaacaaagcctctgagaagtttgaactgggtggagcccaccagagctcggcaaagctgctgtagccagactgcctctctagattcctcctctctgggaagggcatccctgaaagaaaggcagcagccccagtcaggggcttatagataaaactcaaatctccctgggacagagtacctggg

SEQ ID NO: 922985 - DNA, 544 bp, Homo sapiens
attccatggtgtatatgtaccacagttttttatccagtttaacattaatgggcatttgggttggttccaggtttttgctattgtgaatactgctgcaataaacatatgtgtgcatgtgtctttatagtagaatgatttataatctttgggtatatacccagtaatgggattgctggatcaaatggtatttctggatctagatccttgaggaattgccatactgtcttccacaatagttgaactaatttacactcacatcarcagtgtaaaagcattcctatttctctacatcccctttagcatctgttgtttcctgacattttaatgatcgccattctaactggcatgaaatgatatctcattgtggttttgatttgcatttctctaatgactagtgatgatgagctttttttcatatgtttgttggctgcataaatgtcttcttttgagaagtgtctgttcatatcctttgcctactttttgatggggttggttttttttcttgtaaatttaagttcttggtagattcaggatattagccctt

SEQ ID NO: 922986 - DNA, 588 bp, Homo sapiens
aaaagaaagaagccattgtaaaaaaaaatgttgttttcattctaagttccatgaaatattatttaagggatgtaagcatagaagttaaatgatccaatttatgtcttaaaaaagatccctgtggccataatgtgtctaatggttagacaaagtcaagccaagctagacggacacaaagtccaggcaggagataatagtgactcagacaagagtttgtgataatgraactagagattataaagtgaaacgggatgagctaagcaaaaatccaagactttgtattttattctccttctgtgtttctagtatttgttgcactgccatcttcataaggttacaatttcccatcatctgagtaaagcattgctatatgactttgacgtgaggtgggagggaatcctgttactaagctagaaatgtgggatcattcattgtagattatcattcctcttgttaaaatatttctacatttcagttattcattcagtcattcatttgacaaatacttgactgactcatgagaaaagaaaagttatattgttttttaaagttgcatttttctattggttattttccatgtcaacccac

SEQ ID NO: 922987 - DNA, 643 bp, Homo sapiens
ttttaagtggtgcctgcatatcatgcagaaccatctgtgaaccaggcctaagtcttctcttcctttgtcaactgatcatagggaactccccatgaggccatcggtgcagagagaaggcagggtagcaggagtggagaccataggcatttgagtcacttcctcatgtaatttacttgtgccttcaggaccagcttgagcctgatcacatrcatatcacttccatttgatgatcgagtgctgctgtgcatgacccagtttatggttagatgggtcagaaagcacccggttcattatagttcaggttgcatggtgaattgatgacccatagtcgaatgttcatgttctaccaaagcccagtaatgggccaagagctgtctctcaaaaaaaaagagtagttatctgcagaagatggcaggggcttttctccaaaatcttagagatgtccattggggttcacctatgggggtctgccagaggctccaaacagcatccgtatctgcccctgacacctcaagcatcattggatctgctaggtcatatggcccaagtggcagagcagcttacacagcagcctggacctgttgcagacccttcttctgttctggatgccactcaaaactggcagcctttcaggtcactcaat

SEQ ID NO: 922988 - DNA, 674 bp, Homo sapiens
gacgttttggatcctctggaatcaacgtcaactcagagccagtgtccagtagtccctgaaatgtctgattatttgcctttctccagtgcacagctcccctgataaaaggtctccttggggaagaatgggagaaagattaatggcatgaattgtcggtagtgtggtggggtcccttctcaaggggaccccccttcattcaaggggttctggctctgtaaactggcttaagtctggaaactgattgaggcaccatgattctctgtttttataattccaaattagtcttttgtccattcaacttgaaagttttctgcttatataaactaaataggaatgcagtaggctttctataaatttcacttatagagtcaccatgattaattagccaatgccagagctctacacgattcagaytattctgatagctgctgtgcctctgctgtccattacagtagctccacccaccttgcctttgagggttgagtgccactactttacccctgccaacttgggatccaattattcccattatatttaaattttgtagttgagtgactgcaattgtcactgttagatctgacatacagagaagagcaattacagggctcttcaaagatggaggtgctgccctcacaaatctattttgcaaagcattggtcaagggtatgtcttct

SEQ ID NO: 922989 - DNA, 448 bp, Homo sapiens
gcttctgtaccagatgtggtttaactgattgaggaaattaacatattcccgggtacctggtatgtagcattaatctggaaaatgttttgttgggtttttttcctccatacctgtcaataaagtctaccagaagtagttgctttcagggggaarggccataaatccaccttcactgttcccctacctcaggggtaggtcaactctccagtcatgtaccataatttcatccatagggatcctgattgccttttcattccacaatatatcatactggtctactacattgatgacattatgctgattgaacctagcgactgagaagtagcaatgactctagacttactgcatatgtatttgaatgtcaaagtgtagaaagtaaatccaaataaaatccagggtcttctatttcagtgaaatttctagggtcctagcggtatgggacatatcg

SEQ ID NO: 922990 - DNA, 648 bp, Homo sapiens
cacatagagggaaaaacacacagtggggcctatcagtgggtgaaagttggtaagagggagaggatcagaaaaaataactaatgaatactaggcttaattcctgggtgatgaaataatctgttcaacaaaccctcatgacacaagtttacctatgtaacaaacatgaacttgtacctctgaacttaaagtttaaaacaggaagatggcaggtattcttatctttgttttcctctatgtaatgtttgctctttttctgcttggttttaagattttgactttatcagtagattttcataatttatgacgctgctgctcctggtttactctgtatttgtttgggatttggtgagctcattgcatttgcagatttaatttttcatcaaatttgcaaaaattttagcaaatttcttgggatattatttctggtcccttmtttctgtgtccccaactgaatgcattttagacacgctaacacattaatattgccatacaggtcactgaggctctttttttttcttatttcttagccttttatttctgtgtgcttcagattagaaaattcctaaggttatgctttcaaattcactgatctttttcttctgaaatgtctaatctaccaatctactgaatttttacttcatatattgt

SEQ ID NO: 922991 - DNA, 445 bp, Homo sapiens
tgtataaatagacacatttacaacttcctgtccatttggctatcaatcattgtaacaaaggtactaataataacaacttgcatgtgtagcagttcacagcttgcacagggatttcacatgtccttcagtatccctatctatgtgtaatgaaaatattttttccgcaggcactattaaattcaactcactttgccaaggtagcattagatgttagctttgttttgatgaagagtcctgacttaggtcctctgagcactgtcmgccaggatgttgttcccaatccccatgatggtgattgataggttattgatccttgggacagggccaaatgacgctggtccttttgatgacatgtgttcctcctagggcagtaggagggtctggggctgaccagaagatgcaggcaatctctgagcacgcaggctgagggaaaggcaggttgagg

SEQ ID NO: 922992 - DNA, 760 bp, Homo sapiens
accctcagcacaggattcagctcactaagagtaacagacacattcccagagagacaacgcccattgcagcatcaagttcagaagacaagggtgaggttgggggccaggctgggtctgggaatgatgccccaaatgaccacttgaatagtgagaggccttcaagaggtggcctgctcacctatatttcaatttggatctttaaggtatagcmtctctcttcagtatgcactcctcatcattttcttcttctgcagtgtacattgcaataaggttctacttacacatgccttgagaaaattctcaactcatgttgatcagtttaactttctatatcttatttatttgcatctgaaaataccaaactagcagtgccaagttgcctgctttccctctggacttgctcatgtgctcaaagttaatttgaagctggcaacacattcagagaatgactgaagtttaggccaggtgcattggctcacacctgtaatcccagcactttgggaggccaaggcaggcagatcacttgaggtcaggagttcaatacaagcctcggccatgtggtgaagccctgtctctaccaaaaatacaaaaattagccaggcatggtggtgtgcacctgtggtcccagctactcaggaggctgaggcgggaggatcccttgagccagggaagcagaggttgcagtaagccgaggtcataccactgcactccagcctgtgtgacagagactccacgtcaaaaaaaaaaaaaaaaaaaaaag

SEQ ID NO: 922993 - DNA, 562 bp, Homo sapiens
tgctggcacccatccatctccccagcatccatttctcttcatgggagcaccccagatttcacagctttgtgagttgaaaccctgtccttgctgagtctccactcccagggtaggtccgacaataagagaaatatttcactcagtggatcgttaactcaaggatgggcatatcacytaactcagggtagacagcaccaaggaaagtcaatttgggggacttctgacttcttccttcctactgaacatgaaggtctatatgtgattttcactattggaaaaagcctactgcaaactataaatctaaccaatagtatatttagccaaaatgtcatttctttttgcctaaaactggtatgtatggttattgaatacaagaagctctgatgggttgctgccaacagaacagaaatttttcttttctttttttttttttttttgagacagagtcttgctatgttgtccaggctggagtgcagtggtgtgatcttggctcactataatctctgcctcccacactcaagccatactcccccctcagcctactgagtagctgggactacag

SEQ ID NO: 922994 - DNA, 581 bp, Homo sapiens
cttaaggccttcaactgattagatgaaacccacccacatcatggcttacccatgtaatctgctttactcaaagtctgctgatttaaatgtaatttcatctaaaaaataccttcacagaaacatctagactagtgtttgaccaaatatctggatactgtgatgtattagtctgttttgcattagtatgaargaacacctgagtctgggtaatttacaacaaaaagaggtttatttggctcatggttctgcaggctgtacaagaagcctggcaccagcatctgtatctagtgaggacctcaggaagctttcaatcatagcattcttgaagggggagcaagcatgtcacatggtgagagagacaggaagcaaagcagggctggagggaggtgtcatacttttaaacaaccggctcttgcatgaactcatagagtgagaactcactcattaccacagggtggcaccaagccattcatgagggatccacccccatgaccaaaacacctcccactgggccccacctccaacattagggatcacatttcaacatgagatttggaggatcaaacatccagactatatca

SEQ ID NO: 922995 - DNA, 625 bp, Homo sapiens
tcttgagcggggtccagaacaggagaaggctctgcaacaggtccaggctgctgtgcaagttgctctgccacttgggccatgtgacccaggagatccgatggtgcttgaggtgtcagtggcagatagggatgctgtttgcagcctttgacatgtccctctaggtgaatcacagcggaggcctctaggattttggagcaaggccctgccatcttctgcagatgactactctccttttgagagacagctcttggcctgttactgggctttggtggaaactgaacatttgattatgggtcatcaagtcaccatgcaacctgaactgcttaacatgaattgggtgctttctgacccatctagccataaagtgggtcatgcgcagtagcattcaatmatcaaaatggaagtggtatgtacgtgatcaggctcgagcaggtcctgaaggcgcaagtaagttacatgaggaagtggctcaaatgcccctggtctccactcctgccaccctgccttgtcttcctcggcctacatcgatggccccatggtgagttccttatgatcagttgacagtggaagagaagactatggcctggtccacagatggttctgcacaatatgcaggcaccaccag

SEQ ID NO: 922996 - DNA, 709 bp, Homo sapiens
agctcctttctaggacatcccttaaggatagtggtgaaggaaaatcttcccagtgggcagaactacaagcagtgcacctggttgtgcactttgcatggaaggagaaatgaccagatgtgcgattatatactgattcacgggctgtagccaatagtttggctggatggtcagggacttggaagaagcatgattggaaaattggcgacaaagaaatttggggaaaatgtatgtagatggacctgagtggtcaaaaactgaagatatttgtatcccatgtgagtgctcaccaatggrtgacctcagcagaggaagattttaataatcaaatggacaagatgactcattctgtggacattattcagcctttttccccagccaccccgtcatcacccgacgggcccacgaacaaagtgaccatggtgacggggatggaggttatgcatgggctcagcaacatggatttccactcaccaaggctgacctggctatggccactgctgagtgcccaatttgacagcagtagaggccaacactgagcccttgatatggcaccattccttggggtgagcagccagctacctggtggcaggttaattatattggacctcttccatcatggaaagagcagaggttcatcctcagtggaatagacacttactccagatatgggttttcctatcctgcatgcaatgcttctgccaagactacc

SEQ ID NO: 922997 - DNA, 616 bp, Homo sapiens
tacagctcctttctaggacatcccttaaggatagtggtgaaggaaaatcttcccagtgggcagaactacaagcagtgcacctggttgtgcactttgcatggaaggagaaatgaccagatgtgcgattatatactgattcacgggctgtagccaatagtttggctggatggtcagggacttggaagaagcatgattggaaaattggcgacaaagaaatttggggaaaatgtatgtagatggacctgagtggtcaaaaactgaagatatttgtatcccatgtgagtgctcaccaatggatgacctcagcagaggaagattttaataatcaaatggacaagatgactcattctgtggacaytattcagcctttttccccagccaccccgtcatcacccgacgggcccacgaacaaagtgaccatggtgacggggatggaggttatgcatgggctcagcaacatggatttccactcaccaaggctgacctggctatggccactgctgagtgcccaatttgacagcagtagaggccaacactgagcccttgatatggcaccattccttggggtgagcagccagctacctggtggcaggttaattatattggacctcttcca

SEQ ID NO: 922998 - DNA, 713 bp, Homo sapiens
attcagatcctttgccaacttttaagaattgggctacttgtcattttattactgggttacaagtcacttatacattctggatacaagttcctcatcaaatatatgctttgccagtgttttctcccatttcgtttgttgtcttttcactatcatgatgtttcagtgtgcaacacaaaattttttttaaccaaatatatctaatttttcttttgttgctaatgtttttggtgtagcatgcaaaaatatattgccaaacccaaggtcataaagattttactcctaaggtggcttctaaartttaataatttttggcttttacattaaatccataatcaacattaattcttgtgtacgtgtggcatagaggctctcctccattcttttgcatgtggatatacaggtgtcccagcaccatttgttgcaaagactttgtttcccattgaattatcttataacccattgttaaaagtcaactaacaaaaatgtaaccaaatgtgaggtggtgttgttgtttttctttttttgtagacttttaattcattctatttaaatagctattcttgtgccattaccactattcttgattagtatagctttgtagtaaattttgaaattgggaagtgtgagtccttcaatttgaccttcttagtaagcatggttttggctattctgggttcttcggatttccagaaacattttagggtcagtttatc

SEQ ID NO: 922999 - DNA, 713 bp, Homo sapiens
attcagatcctttgccaacttttaagaattgggctacttgtcattttattactgggttacaagtcacttatacattctggatacaagttcctcatcaaatatatgctttgccagtgttttctcccatttcgtttgttgtcttttcactatcatgatgtttcagtgtgcaacacaaaattttttttaaccaaatatatctaatttttcttttgttgctaatgtttttggtgtagcatgcaaaaatatattgccaaacccaaggtcataaagattttactcctaaggtggcttctaaaatttaataatttttggcttttacattaaatccataatcaacattaattcttgtgtacgtgtggcatagaggctctcctccattcttttgcatgtggatatacaggtgtcccagcaccatttgttgcaaagactttgtttcccattgaattatcttataacccattgttaaaagtcaactaacaaaaatgtaaccaaatgtgaggtggtgktgttgtttttctttttttgtagacttttaattcattctatttaaatagctattcttgtgccattaccactattcttgattagtatagctttgtagtaaattttgaaattgggaagtgtgagtccttcaatttgaccttcttagtaagcatggttttggctattctgggttcttcggatttccagaaacattttagggtcagtttatc

SEQ ID NO: 923000 - DNA, 575 bp, Homo sapiens
tttctcctctcattgttcagatacttcttctcttctctccttctttgccaccccactcagctcctctgccagtggaggttgggctgtttatgggtactggatggggggcatggcaggccaggatggttttggaaaaggtaacatttgggcgggaaaacagaaatggatttttctcatttagagtcgcaggtccaggcttgaggttggagaacttgccaaggatcccatcgtcttcaccccagtattttgctgcctcctgtccatatcactgtcatctgctcaggttctggggaggccgcaggaactatggcayaaggtgaagggggagcaggcacatcacatggccagagcaggagcaagaaagagggagagcatctgaaggaggtgccacacacttttaaatgaccagatctcgggaaaactcagagagagcttacttatcaccaagaggatgggctaagccattcatgagagatctgcccccatgatccagacacctcacacaaggccccacctccaatatcggggattacttttcaggatgagatttgggtgggacaaatatccaaactata

SEQ ID NO: 923001 - DNA, 710 bp, Homo sapiens
ctctgggtgtaggtggagctgaaattctgtgccgttgatgactatgcaaatttatttggatccaaagactccatgggcccagggacctttaggctatattcaaacagggctgctatgtaaaggtactcaccgatatagctagaccagttgtttataaccatcctttataactatccttttctgatagttaagtgctcacgactgtaatagttgttaaatattttagtatcactttttcctaattttgttacttwacagttttgtgtacatgcctcagtgactcaattaggatatgaattcttggaatccaataaaatttctttttctctgtctcttttttcttttctttttttttttttttttttttttttatgagacagagtctcactctatcacctaggctggagtgcagtggtgcgatatcagctcactgcaacctctgcctcctggttttgagctgttctcctgtctcagcctcccaagtagctgggattacaggcgcccaccaccacgcctggctaatttttgtatttttactagagacagggtttcgccatgttggtcaggctggtctccaactcctgacctcaggtgatccgcccccttcagcctctcaaagtgctgggattacaggcgtgagccaccgcgcctggcccatataacaatttttttaatgattggtctatgctatgagaacagattattactaa

SEQ ID NO: 923002 - DNA, 639 bp, Homo sapiens
cacggtggctcatgcctgtaatcccagcactttgggaggccgaggcagtgggtcacgaggtcaggagatcaagaccatcctggctaacatggtgaaaccctgtctctactaaaaatacaaaaaattagcccgacgtggtgggtggctgtagtcccagctacttgggaggctgagtcaggagaatgatgtgaacccaagaggcggagctggcagtgagccaagattgtgccactgaactccagcctgggcaacagagcaagactccatctgaaaaaaaaaaaaaaaaatcttggccgggcatggtggctcacacctgtaatcccagcactttggaactccaaggcaggtggatcatgaggtcagaagatcaagaccatactgaccaacatggtgaaaccccatctctactaaaaatacaaaaattagctgtgtgtggtggtgcatgcctgtaatccyagctactcaggatgctgaggcaggagaatcacttgaaccagggagtcagaggttgcagtgagccaagatcatgccactgcactccagcctgggcaacagagcaagactccgtctcaaaaaaacaaaacaaaacaaaacaaaatcctcttagtcatgaaaagccaagcacttgatggcttcaca

SEQ ID NO: 923003 - DNA, 589 bp, Homo sapiens
aattctacaaggccagttactctgatatgaaacccagcataagacacatccaaaaaagaaaactacaggtcaatatctctgataaatattgatataaaaatcctcaacaaaatgctagcaaaccgagttgaacaatgcattggaaagatcattcataatgaccaattgggktttatcctcaggatgcaaggatggctcaatatatgtaagatattgatggttcaataatcaatcaatgtgatacttcatatgaacagaatgaaggatgaaaaacatatgatcatttcaactgatgttgaaatagcatttgataaaatctaacatcacttcataataaaaacacccatagaacagaggatagaaggaatgccttcagcataataaaagccatgtatggtagacccacagctagtatcttaccaaatgggaaaaactgaaagcctttcctctgagatttagaacatgacggggatgcccactctcaccactgttatttgacatagtactgcaagtcctagctagagcaatcagaaaagagaaggacataaagggcatccaaattggaaaggaagacgtcaaattatccttg

SEQ ID NO: 923004 - DNA, 589 bp, Homo sapiens
agcacaccaggagattatatcccgtgcctggctcagagggtcctatgcccacggaacctcactcattactagcacagcagtctgagatcaaactgcaaggtggcagtgaggctgggggaggggtgcccgccattgctgaggcttgagtaggtaaacaaagtggctgggaagctcaaactgggtacagcccaccacagctcaagaaggcctgcctgcctctgtagactccacttctgggggcagggcatagccaaacaaaaggcagcagaaacctctgcagacttaaatgtccctgtctgacagctttgaagagagtagtggatctcccagcacgcagcttgagatatgagaayggacagactgcctcctcaagtgggtccctgacccctgagtagcctaactgggaggcaccccccagtaggggcagactgacacctcacacagccgggtactcctctgagacaaaacttccagaggaaagatcaggcagcaacatttgctgttcaccaatatccgctgttctgcagccaccgctgctgatacccaggcaaacagggtctggagtggacctccagcaaactccaacaga

SEQ ID NO: 923005 - DNA, 824 bp, Homo sapiens
ttctgtagaacaagcacattgcaacttattaggatttagggcagtgtaccaaagcaacatgaaatgctctgggaccaggggataagacattttgactgaaaggactgactgtacacctgttggctctaagagtgaggacagccaccaggtggaagacaccaaggtctttataaccctttcaaggtttctccttctgaatccagatcccctgagagctcatggctatcatcagatggctctcaggccacagcacccagctctggcacaaggaagtaggttaagggtgactcttatttgtaggtatggataattttgcattgtgagtacctagttggaagatgccataagatattttctgacctgattctctgttttgaatagctttttatattttatgccagtaaaaattaatttatatactgaggagtctttactttctccatggaaggctctttgaaaagaggagtgattttatagtggtgacatcccacagtggtcaaagaaattcagtgcacctgtagttgggcaggtaagcagccagaaaactttggcacttsaagcagtcttgccagaacaccagaaagtccaacaggtggagcaaaattaaacttttacgtggttcaatttctgctttgtatcacattcaaagaaaaaaacgtctgggagaaaaaaatatagcatagattcagatgtattccatgtttcttaaatacagtgttgtatttagtgcttttcacaagtggccggagtggaggatgcagatgctttcttaatgttaagctgaatttcttaatttcatgtttagagatcattgtctttctcct

SEQ ID NO: 923006 - DNA, 611 bp, Homo sapiens
acccaagcacatggaaaatagatcatgctttgaactagaagactcaaaattattaaaatgtcaattctcctcactcttttatatagcttcaatcaaaactagtcgagtttttcaaagtgttctgtgaaattggacaagctgattttaaaatgtatgtagaaatgcaaagaacatagactaatataaaattttgaaaaagaagaataaagttagaagactctctctggtttcaagacttactatatatagctaaattataataataatgctgtgytggtgttaagataggcacattgatcaagagaacagaatagaaatttcagaaatagacacatttatggtcaattgattttgacaaaattgctatggtaatagcagaaataagaggtttttaaaataaatgtttagaaactaaatatttgcacagagaaagaaaatttgaagcttttaacttcacaacatacagaataacaaaaaaaattaagatagtgtctagctctgtcacccaggctggagtgcagtggatcacagctcactgcaccctcgacctcctgggttcaagcaatcttcctacctcagcctcacaagcagtgtgggaccatagacacatg

SEQ ID NO: 923007 - DNA, 584 bp, Homo sapiens
ctgcctctaaaatccagaaaaaaggtgcagtaatgcttgtgcatcctttttcttttcatttttggggtagatggttcaaaaggtagcaacttgcctattatctttgaagagctatctttacatgctcttgactattcgacttctaggaatttcactgaagtagtggacccttgaaattttgttcaaattctctctgtttctctggttcttgtaagtactaccaaggcatttaatataattctgctcatcagatccatagtagcacagatgtggaggattggtatgatgatgcttggaatgtcagaatggtcaataactccgcagactatattaggcagagaaaagaagagttggtccagtcctgtaacaagattctaaaaggtatactattagatctggtatatackatcagactgcttctgatgctccttgaaaattacaaagggagaaaaaccattaggccaacagctgcattttgaaagggactattttgatttgcttcccaattatactatatatgtagtatcagctgcgattggattcataacttgggtatattggtgctaaagtttttttcaagacac

SEQ ID NO: 923008 - DNA, 634 bp, Homo sapiens
acattaaatattcagaaacttttctttatgccagtttcttattttcacccatcatgacttaaagcttttttttgttttagcattttaatgtttaaataaatgtaaataatttagttacaaggtctttatggtagtgccgccattgtttttaagaagacaaattttaatccaaggttaaaaacttcacatttgcttatctctttttyctcttaagaactaagagtccagagattagagtaaaatcaccttttcctcatagttttttctttcaacgtgttagaaattcctgtttgaaaaggaaagccagttcctccccctttttatgtttgaggggatgatggtaaaatcacattattcagtcagtttccacatgtgatttgttgcctatattttttaatccagggattaaattgttgccaccaccagcatcaaatcattggggggcaggggtggggaaggtgcgagacagttggttatagacatccaaatatgacgacagaaaaatctccacagcaatatggcagtggagcatttgctgacttcagagtgccagatcaaccccaatatttttttcagggatgctaaacctcttgtaactgctaaattggatttgttactgaatgaagtatcagct

SEQ ID NO: 923009 - DNA, 613 bp, Homo sapiens
agggccgtgttcattaatgcatgagctcttggaagaacagctttggggaaaggatggcctgatttcctgatcccagcttacaggattgaaacctattgatttaaaacaaatattagcttatattatagcttgttgaaacttgcattgygtacacagtgattagaattttgggtttagtatagctgttgctaatccaagtgagatccaagatttcatttcctatcaagtgaaatcttctgttattgaattgcattaaatatagaaagaatccaggcatctttacttatcgaacacatttgcaaagctaactgagaactcatgtggcatgaggctttagaggcaacaacaggccagctcaagttttattttatatttttagcttccataatctaatactccagggtttcacattctcaaaaatttaataactaggattgatatttccctacaatttgcaggtattcttcctcacaaggattcatgcattattgacttgcgatttcttttcttcctgtagcaattcctctgaaatcggaattagcttatgagatttttgataaggggcgggttcgcttctggctccaggctgagcacttatcaccagatgccagct

SEQ ID NO: 923010 - DNA, 474 bp, Homo sapiens
tcccggtcctcttcctcgaagcatccatggaaggctctcgaatggctgaatgtcaggggtgcttcatcagcctcactaaagatggaggaggagaggggtcaaagctgggctcagatgaagctaggacagtgtggcagagccctgggctccctgcggggcatggggaagcctctgaggatggctgaaccttgtggggaggtgagatttccacccgctggtgtccctgctcccctcccctgtatgacagtgtgagaggggaaccatagccggctccttagctttccactggtamaatgatcactaacttgccctttgggtgataatttaactcacatcttaaccatacagttccctgatgccttaaatcagtggtccccaacctttttggcaccaggaacccgtggaagacaatttttccacggacggggtgagggggatggcttcaggttgactcaagcacatttacgtgtattg

SEQ ID NO: 923011 - DNA, 559 bp, Homo sapiens
cccagcactttcggaggccaaggcaggcggatcatgaggtcaggagatcgagaccatcctggctaacacggtgaaaccccgtctctactaaaaatacaaaaaaatagccgggcgtggtggcgggcacctgtagacccagctactcgggaggctgaggcaggagaatggcgtgaacccgggaggcggagcttgcagwgagccgagatcgcaccactgcactccagcctgggagacagagcaagactccgtctcaaaaataataataattattatgattatgactattattatctatatatacacatatatattttacagaagcacgggcagaagaaacatttcaacgagagggagaggaaaatcctcgccaccagacaaaacaaggcattaaagggtgagacttccagacacagtggtgccgagatatggccagtttagtgcgatgtgtttgccgtgtaatgagagagattttgtggaaagaaaaataataataagcaggccgtcttcatcccaacgccactcccaaacgcaccttttggtgtcaatctttctaatcgat

SEQ ID NO: 923012 - DNA, 650 bp, Homo sapiens
gatgctgcaacttatcttgttccttctgtagccattcttctacttttgtttctctagcagctctatcaacgggctttgcccctccaaagacaaaagaagctcgactggactgggaggtactagcagaagaatcatctcccttaggagtattatgaggctttagattcagtttgggtctttgagggggacgtctatcattatacctayaatcatcccgagagaaatcatctctggagctgcacgacccatcatcccatctgttgtatcggtcttcatagcggtccctgcctcctctgtagtcattgtccctgggtacccactgccaaatgcccttctgccactgcctatccaggaatgatagcctctagcatagtctctgctgcctcggtcatcatagcgatccctaccgccagccatatcgatccatatcccggcatgggccatcccgatactcataccaatacccacggccatactggtctgaatcataacgatctcgatacttgtctccaaacctatcatcaccccttctaggcgggtagtcatcaaagctgtctgtggcagaacgagccctccagtctgtatctgttttgtcagaatcccgatttctatcacggccaaaagaacgatcgtccctgtctgtatcctgt

SEQ ID NO: 923013 - DNA, 580 bp, Homo sapiens
agccaccgcaccaggcctttttcaactcttgataaggtcagccttttccatcttagccatcctaacaaaagtggttttactttgtatctacttaatgactaatgatgttgacaaaaagaggctccttcaactcttctgcccatttctaattgggtttttgtcttcttcctgctgagtttcaagagttctttatatatgtgtgatacatattttgcaaatattttctcctattctctggctccctagtcatgacatgcgattattagtatcttttgaaaagaaaaaggttttcattttcataaagtcaatgtatycatttttttcatttatagttatactttttgagacatattcttaaaatgtttgcctagcccaaagtcactaagacagtctacatttttttctagaagtttaattgcctgaactcttacatttaagtttatgatatgtttcaagttaattcttccatgagctgtgaggtaagtgctcaggttttgttttgttttcttttcatgcttctggatataaaattgttcctgcaccccttgttgaaagaattctcctcacccagctgaattaa

SEQ ID NO: 923014 - DNA, 562 bp, Homo sapiens
gtcttggcctatttttggttggtaggctattaattattgcctcaatttcagaacctgtcattggtctattcagagattcaacttctccctggtttagtcttgggagggtgtatgtgtccaggaatttatccatgtcttctagattttctagtttatttgcatagagttatttatggtattttctgatggtagtttgtatttctatgggatcggtggtgatatcccctttatcatttttattgcatctatttgattcttctctcttttctctttattagtctggctagtggtctattttgttgatcttttcaaaaaaacagctyctggattcaatgatttttgaaggggtttttatgtctctatctccttcagttctgctctgatcttagttatttcttgccttctgctagcttttgagtttgtttgctcttgcttctctagttattttaattgtgatgttagggtgtcaacattagatctttccttctttctcttgtgggcatttagtgctataaatttccctctacacactgctttaaatgtgtcccagagattctggtac

SEQ ID NO: 923015 - DNA, 598 bp, Homo sapiens
acactctcctatttttgtaggatcttttaaaaaattactttgcttttgtcagtgtgttcttctatttctttttactggtaaagtcaattactgaagaaaaataatttcgaactagaaattatctttttagtttgaaataaaattatgtgcaaggagcttctaaattatctaatattttttcctctttgcaaaagtgttaatattatatggaaaaattggaaaaacacagaaaaataaacaaaccaaaaaaagcattattcaagatcctcctaccccaatgtagcttactgtgaacattcttatctgaattctttcagggtctttttctttcttgtttttttwttgctctacagatatttttcaaacaaagatgggaggatggtagtatttattggcttgctttttcactcactaaatggtgaacagctttttacacaattctttatacattttcattattctttctttagggtttttttttttttttgacattgcttggtcaagctttggcacctactgcaaacctgttttcaaaatatatccatctatctttccatttctagtgcatgaaaacgatcatattcctgggccgttgcca

SEQ ID NO: 923016 - DNA, 598 bp, Homo sapiens
acactctcctatttttgtaggatcttttaaaaaattactttgcttttgtcagtgtgttcttctatttctttttactggtaaagtcaattactgaagaaaaataatttcgaactagaaattatctttttagtttgaaataaaattatgtgcaaggagcttctaaattatctaatattttttcctctttgcaaaagtgttaatattatatggaaaaattggaaaaacacagaaaaataaacaaaccaaaaaaagcattattcaagatcctcctaccccaatgtagcttactgtgaacattcttatctgaattctttcagggtctttttctttcttgttttttttttgctctacagatatttttcaaacaaagatgggakgatggtagtatttattggcttgctttttcactcactaaatggtgaacagctttttacacaattctttatacattttcattattctttctttagggtttttttttttttttgacattgcttggtcaagctttggcacctactgcaaacctgttttcaaaatatatccatctatctttccatttctagtgcatgaaaacgatcatattcctgggccgttgcca

SEQ ID NO: 923017 - DNA, 566 bp, Homo sapiens
  misc_feature 1, 2, 3, 4, 5, 6, 7, 8, 9, 10, 11, 12, 13, 14, 15, 16, 17,18, 19, 20, 21, 22, 23, 24, 25, 26, 27, 28, 29, 30, 31: n = A,T,C or G
nnnnnnnnnnnnnnnnnnnnnnnnnnnnnnnccttgggtgggcctctccctgctgtactctcccagcataatataaagcacttccaattttttaaaaaagtaatatgcagcattctttttctagagctttttattccaaggtcatccacccattctgttaatggcagaaaatctgtgataatattcggtggaaaattctgtcatttaaaagctcatgactaggaaagggatccacagagaggcttgccacacatcagcaagcaggttgtgttccattcaaacacttcattcacttttccactatagaggacgtgatccctaagaacgtgtgaccagctatgacacagccctaaactcaaccaggatgggccatcccccaggcatcactccaygggaccgtcagggatgagggacatcagtccctaaccagaagccaatggctggaaccaagtgtggcatcagagtcactggtcatgatgagcgaggtctctcatggcagtcatggctccttgtgtgtatatctttctccttaccgggaaaggccacccgcacgaaaagcatgaaaa

SEQ ID NO: 923018 - DNA, 435 bp, Homo sapiens
gtggctggaacagtttggagggctcagaaaaagacaggaaaatgtgggaaaatttggaacttcctagagacttgttaaatggttttgaccaaaatgctaatagtgctattggcaatgaagtccagactgaggtcgtacagatagaggtgaagaacttcttgggaactggagcaaaggtgacccttgctgtgctttagcagagagactggtggccttttgcycctgccctagggatctggggaactttgaaattcagagtgatgatttaggatatctggtggaagaaatttgtgagtggcaaagtgtttaagaggaaaagttggcaaaatctgcagcctgaagatgtgatagaaaagaaaaacccattttctggggaaaactttgcataagtaatgaggagcagaatgttaatcactaagaaaatgggggaaatgt

SEQ ID NO: 923019 - DNA, 645 bp, Homo sapiens
ccatgcaaagtcacagaggtggagctgcccaagaccatgggagcccacctcttgcatcagaatgacctggatgtgaaacatggagtcaaaggagattattttggaacttgaagctttaatgactgctctattgaattttggayttgcatggggcctgtagccccttcattttggtcaatttctcccatgtggaatgggtatatttacactatgcctgtacccccattgtatttatgaagtacctaacttgcttttaattttacaggctcatgagtggaagagatttactttgtcttaggtaagactttagagttggacttttgggttaattctggaatgagttaaggctttgggggactgttgaaaaagcatgattgtgttttgaaatgtgaagacgtgagagttggaagggacctgtagtaaaatgatatcatttggctctgtgttgctacctgaatctcaccttgaattgtaacaatccccatgtgtcaaggggattattctcatgagatccgatggttttataagggacttctcccttcactaagcactcattctctctcctgctgctctgtgaagaggtgccttccaccatgattctaagtttcctgaggcctcatcagccatgcatactgtatgtcattt

SEQ ID NO: 923020 - DNA, 623 bp, Homo sapiens
ctataatgtttgtaataacagctttattaagatataattcacataccataaaattcacctttttaaagtgtagaattattttattttcttatttttttcattcttatgtatttacccacgttggtttttataatgcatacttttgcaaccatcattattaactaattttaaaacattttcacctcctgcaaaataaattccttactaattaacagttactcttcatttctccctttccacagcacctggtggccactaatctactttctgtctctatcatctctatggatttatctattctaaacatttcatataagtgcarttatacaaaatatggctatttgtgcctggcttctttcacttaacgtaacatttttttttggaggtgaatatttttcttttctttttaaattatacttcaagttatagagtacctgtgcacaacatgcaggtttgttacatatgtatacatgtgccatgttggtgtgctgcacccattaactcgtcatttacattaggtatttcttctaatgctatcccttccccacccccaaccccatgacaggccccggtgtgtgatgttccccaccctgtatgcaagtgttctcattgttcaattccca

SEQ ID NO: 923021 - DNA, 623 bp, Homo sapiens
ctataatgtttgtaataacagctttattaagatataattcacataccataaaattcacctttttaaagtgtagaattattttattttcttatttttttcattcttatgtatttacccacgttggtttttataatgcatacttttgcaaccatcattattaactaattttaaaacattttcacctcctgcaaaataaattccttactaattaacagttactcttcatttctccctttccacagcacctggtggccactaatctactttctgtctctatcatctctatggatttatctattctaaacatttcatataagtgcaattatacaaaatatggcyatttgtgcctggcttctttcacttaacgtaacatttttttttggaggtgaatatttttcttttctttttaaattatacttcaagttatagagtacctgtgcacaacatgcaggtttgttacatatgtatacatgtgccatgttggtgtgctgcacccattaactcgtcatttacattaggtatttcttctaatgctatcccttccccacccccaaccccatgacaggccccggtgtgtgatgttccccaccctgtatgcaagtgttctcattgttcaattccca

SEQ ID NO: 923022 - DNA, 609 bp, Homo sapiens
tattcccaataacagtctcttatcatctgtatgatttgcaagtatttcccccattctgtgggttttcacttttttgatggtgttcttcgcagcgcaagttttaaattttgatagagtccagtttatctaatttttcttttatgcttatgcttttgctttgatgtaatactgatttggcgtcactttggttgcttatggttttggtgtcatatctaagaaactattgcctaatccaaggtcatgaagatttactcttaagttttcttctaagggtttcagagtttttagctcttatgtttacatttgtgatctattatttcatattttaaatatttgtgtgaagtaggagttcattctcattctttttgcatgtagatattcagwtgttccagcctcatttgttgaaaagactgttctttccctactgaatgtcatgacactgtcattggaaatcaactgaccataaatgtaaagactgggtgttgactgacaccgactgattctctgacaccaacttggcatctaacaatttaaatcaatttgaaacttaactcctggaattagcgtcagaccccacaggttgaaggctcagttctgtaagactgacct

SEQ ID NO: 923023 - DNA, 496 bp, Homo sapiens
cctgtaatcccagatactcgggaggctgaggcaggaaaatcgcttgagcctgggaggtggaggttgcagtgagccaagatcgtgccactgcactccagcctgggtgacagaatgagactctgtctcaaaaaaaaaaaaaacaaaaaaaaaaccccaaacacaaaacaacaacaggagggaaaggggcatcagctcctcgtgttaccaaatggcctggcaatgcaggaacaagtacgggcctctggcccaggcagatgggcgacaccaagatggccccagggaagaaaggaaagaaaagaattggagttwgattttggataaagagaggatctcaagcctgaggtttatttatttgtacctatgcctgctgtttattccctggtgaagctgctggaacaaatctgcgtccgcctcgtgtggcctcgctgcatggaagggagacagcagagctcatgctttggcgaggctttccacatgttggaaatgtgacagctgc

SEQ ID NO: 923024 - DNA, 572 bp, Homo sapiens
catattttctagtgtatcatttaagtgcattttttgacattttatgtgtgtgtgtgtgacacactcacacacatatatattttcttagtggttcctctggagattacaacaagcatcttagtcaaaacagtctatttcagatgaatactgagttctaataatatgtaaagactttgctttgctgtaacttccttccccaccccttcctttgtgctactgtcacacaaattgttataagcacattgttatcagcacaggtttgcaatcgtgtcttatgsagtttccttttacatcagttcagagaagaaaagtttaaaacatgtttgtgctgtctttttaattcacctatgtaattactctcaccagtgcttcttacctcagcctgaaggactccctttaatatgtcctgtaggtcaggtctgttggcaacaaattctgtgtgtcttgtttatctgagcacagctttgtttcttcatctctaaagatgagttttactagatatagaattcttggttgacagtggttttctttcagcattttgaatgcgccgtcccactgtcctccgacatcca

SEQ ID NO: 923025 - DNA, 665 bp, Homo sapiens
gagccctgagccagggtccggctcctccaggcactgcctgtctgtagacctcggtttcctccctcctaaagtgaggaggggggtgggtctcaatgtatccaaaggactcctcaggcttccaccctatgaaagagaagttctcaggtctcaggacactggggacccccaccacctccatgctaggattgggcctgggtccctgggccctggccgccaggctggaactgctgggatcaggtggagggaggggactgctgagctgccggcccggagactgagatggggatgtctgctcccggctggcggcctcccaagggtgctcggctgggagcctggctggcccaggctttccccaggacctgataaaccagaaaaaagaaagcacgctgtgaagggaaggaagcaccagcagacaaagaagggaagggcacgctgattccatcggctccaggccctcagccactctggcgggcygggcagggctgggcagggcttgcagacgggcagcctggggagctggcggcaggatgctgggagccagctacgtggggatcactgtgcccgcctgtccttgtgccgaggctggctggggtggggactgagaacaggccagcagggacaagccccagcataccagccctacccctcactggagcctcctcaca

SEQ ID NO: 923026 - DNA, 807 bp, Homo sapiens
tcacacctgtaatcccagcactttggaaggccgaagcgggcggatcacctgaggtcaggagtttgagaccagcctgaccaacatggcgaaaccctatctctactgaaatacaaaaattagccaggcgtggtggcggacacctgtaatcccagctactcgggaggctgaggcaggagaatcrcttgaacctgggagatagagattgcagtgagctgagatggcgccactgcactctagcctggatgacagagtaagactccatctcaaataaataaataaataaaatataacactcgggtccagccggctacatccacgctgtaattaaaagtgcatttccatggctcggtggcgcccatgtcagactgaaggctagtgtcccactcctatgctcctgccaggaatacccaccatgtcatttctgccctgttggcaaaagacattctttgtccttcccaaaccacacagaaaccctctttggggggcagggcccaaattgcttgtcttgattcgtaccctgagcaaaggtttgggagctggactgagccaggcaattcaggggtaggcggaggctgggtaggaagggctgagcagacccagaagggaggagatacgggatgggcagggagaggacaggaccagggagacatttctagaattaaattttttcatcccagagtttcaaacccacaggcccctgagttccgggccaacgtctaagacctacatgtgggaggaatgggcccatgggaaggagcagacctcagcagcctcaggctgcactcagaacctagaccagaggggaca

SEQ ID NO: 923027 - DNA, 641 bp, Homo sapiens
cagcaaatgcatgtgagaaaactacttgaggccaggaaagaactctaaaagattagaaggagcagtgcttggagctctcataagactcagaatagtgcctgttcccaacagccagaatgtaaaatagcataactcatgggacatcagttacagccccacaaaaggtctcatctcagtagtagggaaacaaccctagactaaatgctactcttgtcctgcctaataaagcttaaaatcaagacctaaaaggatcaaactctttccaagtgacttaaccacatctcataattaatcttaaaataattttaggccgggtgtggtggctcatgtctgtaatcccagcackttgggaggccgaggcaggtggatcacgtggtcaggagtttgagagcagcctggccaacatggtgaaacctcgtctctgctaaaaatacaaaaattagctgagcgtggtggcatgcacctgtaatcccagctacttgggaggctgaggcaagagactggcttgaacccaggaggcagaggttgcagtgagctgagatcgtgccactatactccagcctgggtgacaagcaagactccgtctcaaaaaataaaataaaataaaaatttagaaaataaaataatttcacttaacaagg

SEQ ID NO: 923028 - DNA, 561 bp, Homo sapiens
aggggacagtcaattatgtaattatgtattcatctggcactcagtaatcaggacttcacataaggtgaacacagtagctacctgtggagattcctttctttctttctttctttttttttttttttttttttgagacggaatcttgctctgtcaccaggctggagtacagtagaacgatctcagctcactgcaacctccacctcccaggttcaaacaattctcatacctcagcctcctgagtagctgggactacaggcgtgtgccaccaccacacctggctaawtttttgtatttttcgtagagacggggtttcaccatgttagccaggatggtctccatctcctgacctcgtgattcacctgcctcagcctcccaaattgagggacaggcgagagccaccgcgcctggccacctgtggagatttctaaccttttacctgtagctacctgcttaggaacaaaaggaaaggcagtggattgcatgatgcagctttcagcttaatttttttccctttcagcacagtgaactggggtccggagtttctattttcctttcacaagc

SEQ ID NO: 923029 - DNA, 561 bp, Homo sapiens
aggggacagtcaattatgtaattatgtattcatctggcactcagtaatcaggacttcacataaggtgaacacagtagctacctgtggagattcctttctttctttctttctttttttttttttttttttttgagacggaatcttgctctgtcaccaggctggagtacagtagaacgatctcagctcactgcaacctccacctcccaggttcaaacaattctcatacctcagcctcctgagtagctgggactacaggcgtgtgccaccaccacacctggctaattttttgtatttttmgtagagacggggtttcaccatgttagccaggatggtctccatctcctgacctcgtgattcacctgcctcagcctcccaaattgagggacaggcgagagccaccgcgcctggccacctgtggagatttctaaccttttacctgtagctacctgcttaggaacaaaaggaaaggcagtggattgcatgatgcagctttcagcttaatttttttccctttcagcacagtgaactggggtccggagtttctattttcctttcacaagc

SEQ ID NO: 923030 - DNA, 727 bp, Homo sapiens
aatcctgtgcccggaattggaggattcttagtctcacggacttcaacaatgaagctgcagaccctcgcggtgagtgttacagttcttaaaagcggcgtgtctggagtttgttccttctgatattgggatgtgtttggagtttcttccttctgatgggttcgtggtcccgctggtttcaggagtgaagctgcaggccttcctggggagtgtcacagctcataaaggcagtgtagacccaaacagtgagcagtagcaagatttattrcaaagagcgaaagaagaacgaaaccacatcgcaaaacggaactccagccggtttgccactactgcctcgggcagcctgcttttattctcttatctggccccacccacatcctgctgattggtccattttacagagagtggattggtccattttacagagagctgattggtccgttttgacagggtgctgattggtgcgtttacaatccctgagctagacacaaaagttttccacctccccactagattagctagatacagagtgtggacacaaaggttctccaagtccccaccagagtagctagatacagagtgtccattggtgcattcacaaaccctgagctagacacagggtgctgattggtgtgtttacaaaccttgagctagatacagagtgccgattggtgtatttacaatcctttagctagacataaaggttctccaagtccccaccagactcagg

SEQ ID NO: 923031 - DNA, 727 bp, Homo sapiens
aatcctgtgcccggaattggaggattcttagtctcacggacttcaacaatgaagctgcagaccctcgcggtgagtgttacagttcttaaaagcggcgtgtctggagtttgttccttctgatattgggatgtgtttggagtttcttccttctgatgggttcgtggtcccgctggtttcaggagtgaagctgcaggccttcctggggagtgtcacagctcataaaggcagtgtagacccaaacagtgagcagtagcaagatttattacaaagagcgaaagaagaacgaaaccacaycgcaaaacggaactccagccggtttgccactactgcctcgggcagcctgcttttattctcttatctggccccacccacatcctgctgattggtccattttacagagagtggattggtccattttacagagagctgattggtccgttttgacagggtgctgattggtgcgtttacaatccctgagctagacacaaaagttttccacctccccactagattagctagatacagagtgtggacacaaaggttctccaagtccccaccagagtagctagatacagagtgtccattggtgcattcacaaaccctgagctagacacagggtgctgattggtgtgtttacaaaccttgagctagatacagagtgccgattggtgtatttacaatcctttagctagacataaaggttctccaagtccccaccagactcagg

SEQ ID NO: 923032 - DNA, 727 bp, Homo sapiens
aatcctgtgcccggaattggaggattcttagtctcacggacttcaacaatgaagctgcagaccctcgcggtgagtgttacagttcttaaaagcggcgtgtctggagtttgttccttctgatattgggatgtgtttggagtttcttccttctgatgggttcgtggtcccgctggtttcaggagtgaagctgcaggccttcctggggagtgtcacagctcataaaggcagtgtagacccaaacagtgagcagtagcaagatttattacaaagagcgaaagaagaacgaaaccacatcgcaaaasggaactccagccggtttgccactactgcctcgggcagcctgcttttattctcttatctggccccacccacatcctgctgattggtccattttacagagagtggattggtccattttacagagagctgattggtccgttttgacagggtgctgattggtgcgtttacaatccctgagctagacacaaaagttttccacctccccactagattagctagatacagagtgtggacacaaaggttctccaagtccccaccagagtagctagatacagagtgtccattggtgcattcacaaaccctgagctagacacagggtgctgattggtgtgtttacaaaccttgagctagatacagagtgccgattggtgtatttacaatcctttagctagacataaaggttctccaagtccccaccagactcagg

SEQ ID NO: 923033 - DNA, 727 bp, Homo sapiens
aatcctgtgcccggaattggaggattcttagtctcacggacttcaacaatgaagctgcagaccctcgcggtgagtgttacagttcttaaaagcggcgtgtctggagtttgttccttctgatattgggatgtgtttggagtttcttccttctgatgggttcgtggtcccgctggtttcaggagtgaagctgcaggccttcctggggagtgtcacagctcataaaggcagtgtagacccaaacagtgagcagtagcaagatttattacaaagagcgaaagaagaacgaaaccacatcgcaaaacggaactccagccggtttgccactactgcctcgggcagcctgcttttattctcttatcyggccccacccacatcctgctgattggtccattttacagagagtggattggtccattttacagagagctgattggtccgttttgacagggtgctgattggtgcgtttacaatccctgagctagacacaaaagttttccacctccccactagattagctagatacagagtgtggacacaaaggttctccaagtccccaccagagtagctagatacagagtgtccattggtgcattcacaaaccctgagctagacacagggtgctgattggtgtgtttacaaaccttgagctagatacagagtgccgattggtgtatttacaatcctttagctagacataaaggttctccaagtccccaccagactcagg

SEQ ID NO: 923034 - DNA, 718 bp, Homo sapiens
actgctctcttcaaagctgtcagacagggacatttaagtctgtagaggttactgctgtctttttgtttgtctgtgccctgcccccagaggtggagcctacagaggcaggcaggcctccttgagctgtggtgggctccaccctgttcgagcttcctggctgctttgtttacctaaggaagcctgggcaatggcgggcgcccctcccccagcctcgctgccgccttgcagtttgatctcagactgctgtgctagcaatcagtgagactccgtgggcgtaggaccctctgagccaggtgtgggttataatctcctcgtgcgccgttttttaagcccgtcggaaaagcgcagtattcaggtgggagtgacccgattttccaggtggcttctgtcacccttttctttgactaggaaatggaactccctgaccccttgcacttcccaagtraggcaatgcctcgccctgctttggctggcgcatgatgcacgcacccactgacctgcgcccactgtctggcactccctagtgagatgaacccggtacctcagatggaaatgcagaaatcacccatcttttgcatcgctcatgctgggagctgtagactggagctgttcctattcggccatcttggctcctcccccgtatttttctcttttctattcctccaaatgtgcaagtagtgggctctgggcagggctgtgacagagcagaaaataaaag

SEQ ID NO: 923035 - DNA, 615 bp, Homo sapiens
ccactgcaaaaacatgccaaattgtaaagaccatcaatgctaagaagaaactgcatcaactaacaagcaaaataaccagctaacatcataatgacaggatcaaattcacacataataatattaaccttaaatgtaaatgggctaaatgccccaattaaaagacacagactggcaaattggataaagagtcaagacccatcagtgtgctgtattcaggaaatccatctcacatgcacagacactaggctcaaaataaagggatggaagaagatctaccaagaaaatggaaagcaaaaaaaaaaaagcaggggttgcaaccctagtttctgataaaacagactttaaaccaacttccgagaccagctcggtcatagggaccctaacccagcggcgctagaggaattaaasacacacacacagaaatatacaatgtggagtgggatatgggggctgacagccttcaaagctgagagcccagaagagaaatttacccatatatttattgacagcaagccagtgataagcattatttctatagattatagattaactaaaagtattcctaacggaaaacaaagggatgggctctggctaattatctgcagcaggaacatg

SEQ ID NO: 923036 - DNA, 590 bp, Homo sapiens
catctgagaaagggctaatatccagaatctacagagaacctaaacaaatttacaagaaataaacaacctcatcaaaaagtgggcaaaggatatgagcagacacttctcaaaataagccaacagacacatgaaaaaatgctcatcatcactggtcatcagagaaatgcaaatcaaaaccacaatgagataccatctcacaccagttagaatggcaatcattaaaaaatcaggaaacaacagatgctggagaggatgtgcagaaataggaacacttttacactgctggtgggaccgtaaactagttcaaccattgtggaagacagtatggccattcctcaaggatctagaactasaaataccatttgacccagcaatcccattactgggtatatgcccaaaggattataaatcatgctactataaagacccatgtatacgtatgtttattgtggcactcttcacaatagcaaagacttggaaccaacccaaatgtccatcaataatagactggattaagaaaatgtggcacatatacatcatggaatactatgaagccattaaaaaggatgagttcatatcctttgcaggga

SEQ ID NO: 923037 - DNA, 480 bp, Homo sapiens
cccgaagcagggcgaggcattgcctcactcgggaagcacaaggggtcagggagttccctttcctagtcaaagaaaggggtgacagatggcacctggcaaatcaggtcactcccaccctaatactgtgcttttccaatgggcttaaaaaacggtgcaccaggagattatatcccgcacgtggctcagagggtcctacacccacggagtctcactgactgctagcacagcagtctgagatcaaactgcaaggcggcagcgaggctgggggaggggcgcccaccattgcccaggcttgcttaggtaaacaaagcagcaagaagctygaactgggtggagcccaccacagctcaaggaggccggcctgcctctgtaggctccacctctgggggcagggcacagacaaacaaaaagacagcagtaacctctgcaggcttaaatgtccctatctgacagcgttgaagagagcagtggttctcccag

SEQ ID NO: 923038 - DNA, 647 bp, Homo sapiens
atactatcctttccaaagcccttgagctacttctggttctccacggaaacccagagtggctgtggcactgagatgggccttcttcccatcttagaatgaagatctagattcaagtctgagcagagaccgcagatagagtagtgaggacactaaatcattgtagtcagtgtagggactcagcccataaaggtgtatttgagtttatccttaggggcgatttgcttgttgtgagatagtatgtcctagaagttaatgcgctacccattgggcccatgtaagtaactcaatttgcactccctgatgtgtgtcttgtttttgtttcaaaagttggctggataggactgtggtgaaccagagggttcttgtcaatttccgtcatccatctckatctgtctaggctgattgttgctacgagaacagggggcccattcttgaggcaatctgcaagcctgagttttaatgaggaatctccggattcttaaatatctgcagttggtttaaaacttttaccaacgctggtggaccaaataaatctgtaagcgagggaggcctgtgggccagcagctagtgacctctgacgttttggtttggtttgcctgcttctctgctgcttcaacgctgcctccatttagtcctcttggcctatc

SEQ ID NO: 923039 - DNA, 785 bp, Homo sapiens
gtgtttttttaatgtgcatccccttgacctagcaattcaatcttagaaattaatcctaaggaaataatcatgactgtgtatgagtaattcactccaaggatattcatgttagcattgtttgttttaaaaattggaagcaatgggccgggcacggtggctcacgcctgtaatcccagcactttggactttgggaggccgaggtaggaggatcacttgaggtcaggagttcaagaccagcctggccaacatggtgaaatcccgtctctactaaaaatacaaaaattatccgggtgtggtggcrtgtgcctgtaatcccaactacttggaaggctgaggcaggagaatcacttgaactcgggaggcggaggttgcagtgagccgagatcacgtcatcgcactccagcctgggacacaggagagaaacgccgtctcaaaaataaataaataaataaataaataaataaataaataaaaatagaaaacaatggaagcgtttctaatgaggggctgtttactaggtggccgttcattttcattcattcaggtatttattgagcaggcatcatgtgccaggcagtgtattagacattaggcatacagcagccggtgaatgaatgaacaaaatctctgtcctctgggaggggagacaaccagggaaccagtaagcaagtgcaatatccgttgtgggtcagcgggtggtgggggtaagaggagaaggcagcaaaggcaatgctggaggtgagtgccgatggagactagagggaaggtgaggaagtgagtgagct

SEQ ID NO: 923040 - DNA, 785 bp, Homo sapiens
gtgtttttttaatgtgcatccccttgacctagcaattcaatcttagaaattaatcctaaggaaataatcatgactgtgtatgagtaattcactccaaggatattcatgttagcattgtttgttttaaaaattggaagcaatgggccgggcacggtggctcacgcctgtaatcccagcactttggactttgggaggccgaggtaggaggatcacttgaggtcaggagttcaagaccagcctggccaacatggtgaaatcccgtctctactaaaaatacaaaaattatccgggtgtggtggcatgtgcctgtaatcccaactacttggaaggctgaggcaggagaatcacttgaactcgggaggcggaggttgcagtgagccgagatcacgtcatcgcactccagcctgggacacaggagagaaackccgtctcaaaaataaataaataaataaataaataaataaataaataaaaatagaaaacaatggaagcgtttctaatgaggggctgtttactaggtggccgttcattttcattcattcaggtatttattgagcaggcatcatgtgccaggcagtgtattagacattaggcatacagcagccggtgaatgaatgaacaaaatctctgtcctctgggaggggagacaaccagggaaccagtaagcaagtgcaatatccgttgtgggtcagcgggtggtgggggtaagaggagaaggcagcaaaggcaatgctggaggtgagtgccgatggagactagagggaaggtgaggaagtgagtgagct

SEQ ID NO: 923041 - DNA, 785 bp, Homo sapiens
gtgtttttttaatgtgcatccccttgacctagcaattcaatcttagaaattaatcctaaggaaataatcatgactgtgtatgagtaattcactccaaggatattcatgttagcattgtttgttttaaaaattggaagcaatgggccgggcacggtggctcacgcctgtaatcccagcactttggactttgggaggccgaggtaggaggatcacttgaggtcaggagttcaagaccagcctggccaacatggtgaaatcccgtctctactaaaaatacaaaaattatccgggtgtggtggcatgtgcctgtaatcccaactacttggaaggctgaggcaggagaatcacttgaactcgggaggcggaggttgcagtgagccgagatcacgtcatcgcactccagcctgggacacaggagagaaacgccgtctcaaaaataaataaataaataaataaataaataaataaataaaaatagaaaacaatggaagcgtttctaatgaggggctgtttactaggtggccgttcattttcattcattcaggtatttattgagcaggcatcrtgtgccaggcagtgtattagacattaggcatacagcagccggtgaatgaatgaacaaaatctctgtcctctgggaggggagacaaccagggaaccagtaagcaagtgcaatatccgttgtgggtcagcgggtggtgggggtaagaggagaaggcagcaaaggcaatgctggaggtgagtgccgatggagactagagggaaggtgaggaagtgagtgagct

SEQ ID NO: 923042 - DNA, 636 bp, Homo sapiens
tgtgcaagtgagttcaccttcagtctctctatttcctcatttgtacaatgggaaaatggcactgcctgtctcataccgtggtggtgaggattaaatgagaaagtgcatgtaaagtacttagcacagcctctgacacacagcaagtgctcaattaatggcaggtattgttatgtttaatgacactgcccaaagsttttaaatctcagcactattgacatttttggctgaataattctttgatgtggggtggctgtcctgtgccttgtatgatagttaacaacatccctggcctttacccactagatgccagtagtaacctctagttgtgaaaaccaaaaatgtttccagacattgccagatatcccctgggaatcagaggaagcaagacacccccagttgaaagcactgcactaactccagagcctccaggtgctggtcttcagacagtgagtatttttctggtggggctgcagccagagagtacataccatggctcaggcccagggcccacctgaacctgcccaggactcatcagaggatgtgaggcagaggatggccctctgcagcagcggccaagcccagctaggggcaagtgcagcagcaaatagttatcagtgcaggaggtgtatgtcagcc

SEQ ID NO: 923043 - DNA, 794 bp, Homo sapiens
ctttccccaggtgctctgtcccagggagatgggggttttatctataagtccctgactggagctgctgccttatttccagagatgccctgcccagagcagggaaatgtggcagtctggccacagcagccttgctgagctgcagtgggctccactcagttaaaacttcccagcagctttgtttacactgtgagcacactgtgagcgtaaaaccacctaatgaagcctcagcaatggtggactccccttcccccaccaagctccagcatcccagatcgatgtcagactgctgctgtgctggcagtgagaatttcaagccagtggatcttagtttgctgagcccacgggggtrtgacctgctgagccagaccacttggctccctggtttcagcacccctttccaggggagtgaatggttctgtctcactggtattccaggtgccactggggtattaaaaaaaagaactcctgcagttagttcggtgtctgcccaaatggccacccagttttgtgcttgaaacccagggccttggttaggtaggcaccaaagggaatctcctggtttgcaggttgcaaaatccaagggacaagcgcagtatccatgccagagttccccaggctcagtccctcatggcttcccttgggtaggggagaaaattcccccaccccttgtgcttcccaggtgaggtgacaccctaccctgcttcggctcaccctccgtgggctgcacccactgtccaagcagtcccagtgagatgaactgggtacctcagttggaaatgcagaaatcacccacc

SEQ ID NO: 923044 - DNA, 794 bp, Homo sapiens
ctttccccaggtgctctgtcccagggagatgggggttttatctataagtccctgactggagctgctgccttatttccagagatgccctgcccagagcagggaaatgtggcagtctggccacagcagccttgctgagctgcagtgggctccactcagttaaaacttcccagcagctttgtttacactgtgagcacactgtgagcgtaaaaccacctaatgaagcctcagcaatggtggactccccttcccccaccaagctccagcatcccagatcgatgtcagactgctgctgtgctggcagtgagaatttcaagccagtggatcttagtttgctgagcccacgggggtgtgacctgctgagccagaccacttggctccctggtttcagcacccctttccaggggagtgaatggttytgtctcactggtattccaggtgccactggggtattaaaaaaaagaactcctgcagttagttcggtgtctgcccaaatggccacccagttttgtgcttgaaacccagggccttggttaggtaggcaccaaagggaatctcctggtttgcaggttgcaaaatccaagggacaagcgcagtatccatgccagagttccccaggctcagtccctcatggcttcccttgggtaggggagaaaattcccccaccccttgtgcttcccaggtgaggtgacaccctaccctgcttcggctcaccctccgtgggctgcacccactgtccaagcagtcccagtgagatgaactgggtacctcagttggaaatgcagaaatcacccacc

SEQ ID NO: 923045 - DNA, 794 bp, Homo sapiens
ctttccccaggtgctctgtcccagggagatgggggttttatctataagtccctgactggagctgctgccttatttccagagatgccctgcccagagcagggaaatgtggcagtctggccacagcagccttgctgagctgcagtgggctccactcagttaaaacttcccagcagctttgtttacactgtgagcacactgtgagcgtaaaaccacctaatgaagcctcagcaatggtggactccccttcccccaccaagctccagcatcccagatcgatgtcagactgctgctgtgctggcagtgagaatttcaagccagtggatcttagtttgctgagcccacgggggtgtgacctgctgagccagaccacttggctccctggtttcagcacccctttccaggggagtgaatggttctgtctcactggtattccaggtgccactggggtattaaaaaaaagaactcctgcagttagttcggtgtctgccyaaatggccacccagttttgtgcttgaaacccagggccttggttaggtaggcaccaaagggaatctcctggtttgcaggttgcaaaatccaagggacaagcgcagtatccatgccagagttccccaggctcagtccctcatggcttcccttgggtaggggagaaaattcccccaccccttgtgcttcccaggtgaggtgacaccctaccctgcttcggctcaccctccgtgggctgcacccactgtccaagcagtcccagtgagatgaactgggtacctcagttggaaatgcagaaatcacccacc

SEQ ID NO: 923046 - DNA, 722 bp, Homo sapiens
cataacctatgtttagtaagatactaatcagtagtagtaattgcagcaaaagctggttgcaagcaatcaatagaagcagaatgtgaaactagacaaccagttagaccacaaattctcagaagggagtgtcttaaccctaaagagacctagaagagccatggcaacttaagggcatttatagccctatcttatccatatgaacaggcacccctcatgcgtctatttataggctctccacaagggtcgcattccattcccagagatatgaacatctgcttttctgggataggaatcttggtgatgtgaaacctccctgactgcatgtccatttataggctctctgtagggggaagcrtatcatgtgctgttggctcattctggcagcccaacctggcattgtctttacacaatcctccatgcaattttgtatttacaataatcaggagcatttcatcttttattccatagcaatagtttcagggggtctccctacatatgccaaatttcaacaccttataatattaggaagggataagtatgaaattaaagatggatgccaaatcaaacataaaattacagaaaacaatcttagtattgtatgaagagaccagttttatttagataggagctacttatcttttactggacctctgagttctgggcagagctcacactgaatcctgggtctccaaagggagaactattatgaggcttttgtgatg

SEQ ID NO: 923047 - DNA, 591 bp, Homo sapiens
taatattaggaagggataagtatgaaattaaagatggatgccaaatcaaacataaaattacagaaaacaatcttagtattgtatgaagagaccagttttatttagataggagctacttatcttttactggacctctgagttctgggcagagctcacactgaatcctgggtctccaaagggagaactattatgaggcttttgtgatgcttttacagggcacttaaacmaaaaaattgggcaaggggatccaccaagatggccaaataggaacagctctggtctgcagctcccagtgagaccaacgcagaaggtgggtgatttctgcatttccaactgaggtaccctgttcatctcattgggactggttaggcagtgggtgcagtccatagatgacgagcagaagcagggtggggcattgcctcaccccagaaatgcaaggagtggggggacctccctttcccagagaaaggaagccatgagggactgtgctatctggcccagagactatgcttttcccatgatttttgcaatctgcaaacctggagatcccctcgtgttcctacaccaccaggaccctgggttcaagcacaa

SEQ ID NO: 923048 - DNA, 591 bp, Homo sapiens
taatattaggaagggataagtatgaaattaaagatggatgccaaatcaaacataaaattacagaaaacaatcttagtattgtatgaagagaccagttttatttagataggagctacttatcttttactggacctctgagttctgggcagagctcacactgaatcctgggtctccaaagggagaactattatgaggcttttgtgatgcttttacagggcacttaaacaaaaaaattgggcaaggggatccaccaagatggccaaataggaacagctctggtctgcagctcccagtgagaccaacgcagaaggtgggtgatttctgcatttccaactgaggtaccctgttcatctcattgggactggttaggcagtgggtgcagtccatagatgacgagcagaagcagggtggggcattgcctcaccccagaaatgcaaggagtsgggggacctccctttcccagagaaaggaagccatgagggactgtgctatctggcccagagactatgcttttcccatgatttttgcaatctgcaaacctggagatcccctcgtgttcctacaccaccaggaccctgggttcaagcacaa

SEQ ID NO: 923049 - DNA, 447 bp, Homo sapiens
accaaaacatcactgcggtcttccagtttaagtatggacatatggaggtcaggtaattaatggagttttagctcaggtctgacttacagagggtccctggattcatcctatggtcatttccttagtgtcagaatgcataatwggcgtcagtatacttagcagcttgcagaacccacacattggctccctgactgataggatgagggctattatggtgggaaaggcaaaatggaagccattatagcttcctctacctagaaaaatagtaaatcaaaacaatatcatacccctcgagggattgcagagattagtgccacttgtcttgaaagacacaggggtggtgattcacaccataacacagttcaactctcctatttggcctgtgcagaagacagaaggatcttggagaatgacagtggattatcataagcttaaacaagtggtaac

SEQ ID NO: 923050 - DNA, 447 bp, Homo sapiens
accaaaacatcactgcggtcttccagtttaagtatggacatatggaggtcaggtaattaatggagttttagctcaggtctgacttacagagggtccctggattcatcctatggtcatttccttagtgtcagaatgcataataggcgtcagtatacttagcagcttgcagaacccacacattggctccctgactgataggatgagggctattatggtgggaaaggcaaaatggaagccattatagctkcctctacctagaaaaatagtaaatcaaaacaatatcatacccctcgagggattgcagagattagtgccacttgtcttgaaagacacaggggtggtgattcacaccataacacagttcaactctcctatttggcctgtgcagaagacagaaggatcttggagaatgacagtggattatcataagcttaaacaagtggtaac

SEQ ID NO: 923051 - DNA, 802 bp, Homo sapiens
atggtttcttgggctgaggtgaaggccctcctgctctgtgcagttttgggacaagatatactgcgtcccagccatgccagctccagccatggctaaaaagcgccaaagtacatctaagatcattgcttcagagggtgcaagccccaagccttggcaggttccacatggtgttgggcctgcagaagtgcggataacaagaattgagttttgtgaacctcagcatagacttcagagaatgtatggaaatgcctagatgtccaggcagaagtctgctgcaggggcccatgaagaacctctattagggcagtggagatgggaaatgtggggttggagcccccacacagagtccccactggggcgctgcctagtggagctgtgagaagagggccactgtgctccagattccagaatggtagatccactgacaayttgcatcatgcacttggaaaagctgcaagcacaaaataccagcccatgcaagcagccatgggcctattccctgcagagccataggggtggagttgcccaaagctttgtgagctggccccatgcctcagcatgccctggaggtaagacgtgaagtcaaatgggattattttggagtttaaaggtttaatgactaccctgttgggtttgaacttgcatagtgcatgtggcccctttgttttgtcccaatttctcccatttggaatgggaacatttacctaccactctctcaagcctcctgtacaggaggtccattagtgcctcagttctattcagcgtggacctgaaggtgcttcccacccccaagccacctgtc

SEQ ID NO: 923052 - DNA, 802 bp, Homo sapiens
atggtttcttgggctgaggtgaaggccctcctgctctgtgcagttttgggacaagatatactgcgtcccagccatgccagctccagccatggctaaaaagcgccaaagtacatctaagatcattgcttcagagggtgcaagccccaagccttggcaggttccacatggtgttgggcctgcagaagtgcggataacaagaattgagttttgtgaacctcagcatagacttcagagaatgtatggaaatgcctagatgtccaggcagaagtctgctgcaggggcccatgaagaacctctattagggcagtggagatgggaaatgtggggttggagcccccacacagagtccccactggggcgctgcctagtggagctgtgagaagagggccactgtgctccagattccagaatggtagatccactgacaatttgcatcatgcacttggaaaagctgcaagcacaaaayaccagcccatgcaagcagccatgggcctattccctgcagagccataggggtggagttgcccaaagctttgtgagctggccccatgcctcagcatgccctggaggtaagacgtgaagtcaaatgggattattttggagtttaaaggtttaatgactaccctgttgggtttgaacttgcatagtgcatgtggcccctttgttttgtcccaatttctcccatttggaatgggaacatttacctaccactctctcaagcctcctgtacaggaggtccattagtgcctcagttctattcagcgtggacctgaaggtgcttcccacccccaagccacctgtc

SEQ ID NO: 923053 - DNA, 802 bp, Homo sapiens
atggtttcttgggctgaggtgaaggccctcctgctctgtgcagttttgggacaagatatactgcgtcccagccatgccagctccagccatggctaaaaagcgccaaagtacatctaagatcattgcttcagagggtgcaagccccaagccttggcaggttccacatggtgttgggcctgcagaagtgcggataacaagaattgagttttgtgaacctcagcatagacttcagagaatgtatggaaatgcctagatgtccaggcagaagtctgctgcaggggcccatgaagaacctctattagggcagtggagatgggaaatgtggggttggagcccccacacagagtccccactggggcgctgcctagtggagctgtgagaagagggccactgtgctccagattccagaatggtagatccactgacaatttgcatcatgcacttggaaaagctgcaagcacaaaataccarcccatgcaagcagccatgggcctattccctgcagagccataggggtggagttgcccaaagctttgtgagctggccccatgcctcagcatgccctggaggtaagacgtgaagtcaaatgggattattttggagtttaaaggtttaatgactaccctgttgggtttgaacttgcatagtgcatgtggcccctttgttttgtcccaatttctcccatttggaatgggaacatttacctaccactctctcaagcctcctgtacaggaggtccattagtgcctcagttctattcagcgtggacctgaaggtgcttcccacccccaagccacctgtc

SEQ ID NO: 923054 - DNA, 802 bp, Homo sapiens
atggtttcttgggctgaggtgaaggccctcctgctctgtgcagttttgggacaagatatactgcgtcccagccatgccagctccagccatggctaaaaagcgccaaagtacatctaagatcattgcttcagagggtgcaagccccaagccttggcaggttccacatggtgttgggcctgcagaagtgcggataacaagaattgagttttgtgaacctcagcatagacttcagagaatgtatggaaatgcctagatgtccaggcagaagtctgctgcaggggcccatgaagaacctctattagggcagtggagatgggaaatgtggggttggagcccccacacagagtccccactggggcgctgcctagtggagctgtgagaagagggccactgtgctccagattccagaatggtagatccactgacaatttgcatcatgcacttggaaaagctgcaagcacaaaataccagcccatgcaagcagccatgggcctattccctgcagagccataggggtggagttgcccaaagctttgtgagcyggccccatgcctcagcatgccctggaggtaagacgtgaagtcaaatgggattattttggagtttaaaggtttaatgactaccctgttgggtttgaacttgcatagtgcatgtggcccctttgttttgtcccaatttctcccatttggaatgggaacatttacctaccactctctcaagcctcctgtacaggaggtccattagtgcctcagttctattcagcgtggacctgaaggtgcttcccacccccaagccacctgtc

SEQ ID NO: 923055 - DNA, 515 bp, Homo sapiens
cgtggctatacgatgagtcagtagttttgtattcataatcattgtcctttaagatgctacaggttaattcaaaaagacatttaatgttacatgaaggctgtttgctaacatttttcatgcccccaaacaaaaggaaattcacattagagaactgaattcatttgccaacamgaggtctcatccaaaactaaactatatttaataacaacaacaaacattaggacaatttgcaatttagaaagaactaaaacttaggttcaagttctggggtttgctagtaatccatcctgagaggtcaagggagttcatcatggctctttgacttagtttcctcttctgcaaaatgaggagtttgaaaggggtggctttataattatttgttagcaacacccaatttttccccagaactttaatattaaaaagcagatgtaaatataaaatatatgtttatatatataaacaacctcaaatacatattggattataaaataatgaaacaaggctgtttgtgtatc

SEQ ID NO: 923056 - DNA, 766 bp, Homo sapiens
tgccatgcccttcaaagccacccctatttggtcctaacaataacccttggaggcactatggagatttaacacaaaagtcatttgggtcttgtaaaaattaaattattcatccaagatgaaatggctagaaaattagagccaggatcagaaccctaggacctggctccaaactccagctcttggtcttcgtacttyaacacagaaacagcccctaaaggataagaaatgattggcaggagccagatgatggcagggacttaaaacaaccccttcctcccctctggcatctccaccaagtacagcccacatagagctgcaaaagcaccagctttcgcaggacacctttggaacagtgtccttttcctttatgatatttggtgactggaggtcaacctcgtgtggcaccagttcccagaccaaatctgccccagagatcaggaacaacctaaccgtgatctacactgcaccaatcccaggtgacctaacaagcaattcccggtggattagcgatggcagatgggaagtaggggagatgacgactctgcccactggtgcaaataaggggagggtctgagattaatgtacagtcgcaggacgcataaccatgaggatgtgctgagaaatgcatcattaggcaatttcgacattatgcaaacgtcgcagagtgcacttacacacatctagaggggacagcccgctatacatgtgaggctgtttggtgtagcctcgtggtcctaggctgcacacctgtgaaggctgttactgt

SEQ ID NO: 923057 - DNA, 738 bp, Homo sapiens
aggcaggaggattgcttgagcccaggagatggaggctgcagagagctgtgatgtcactactgcactccagcctgtgtgacagagtgagaccctgcctcttttccctcagagtttgttttgctatacccagaactttcctgacggggttagtgtcactgagattttcccttacagctttagggagcattatataattgtacactggctcaggctttcttaggacgacaacagtataagatggactccaggctctctgcaaggcttcttgctccaaaaatgcrctgtagaaattgttgcttttgccctaaaaagtcagagacacaaattctatgtagctggaagagaatgaatttctgtgcccagcttgtagcagtttatcacagcagccacaggaaattaatagagacagcgggtgcccttctgctaaatcctgcatcctttcatatcatcaaaaggcaaacagtcattgtttttgtgaactgggcaaggtgttagctctgtaatcctgaggttcgcttctctttgcattagggaactgtggtgttctgagcagagttctttgcacctagtggtttggagaggactcaagctcccgaggcctcagtgccgtctggctgctactatgcgcaagcatgcagtccccatgctcctaccccaacactaggaattttcttctcccatcccccactgcttttaatgatgtgagtagttatggttctgtgggaatgcgagagctat

SEQ ID NO: 923058 - DNA, 738 bp, Homo sapiens
aggcaggaggattgcttgagcccaggagatggaggctgcagagagctgtgatgtcactactgcactccagcctgtgtgacagagtgagaccctgcctcttttccctcagagtttgttttgctatacccagaactttcctgacggggttagtgtcactgagattttcccttacagctttagggagcattatataattgtacactggctcaggctttcttaggacgacaacagtataagatggactccaggctctctgcaaggcttcttgctccaaaaatgcgctgtagaaattgttgcttttgccctaaaaagtcagagacacaaattctatgtagctggaagagaatgaatttctgtgcccagcttgtrgcagtttatcacagcagccacaggaaattaatagagacagcgggtgcccttctgctaaatcctgcatcctttcatatcatcaaaaggcaaacagtcattgtttttgtgaactgggcaaggtgttagctctgtaatcctgaggttcgcttctctttgcattagggaactgtggtgttctgagcagagttctttgcacctagtggtttggagaggactcaagctcccgaggcctcagtgccgtctggctgctactatgcgcaagcatgcagtccccatgctcctaccccaacactaggaattttcttctcccatcccccactgcttttaatgatgtgagtagttatggttctgtgggaatgcgagagctat

SEQ ID NO: 923059 - DNA, 601 bp, Homo sapiens
agatcaagaccatcctgactaacacggtgaaaccccatctctattaaaaatacaaaaaattagccgggcatggtggcggtgcctgtagtcccagctactcgggaggctgaggcaggagaattgcttgaatccaggaggcagaggttgcagtgagccgagattgtgccactgcactccagcctgggcgaaagagcgagactctgactcaaaaaaaaaaagtaaaataaaaaataaaaataaaaaataaaacatactggggggaggctgcctctgctggaaaggcaaggacaagggatatacccatttgaagttctcagcctcatttttgtctacccaaatgtacatatttcaacacacgagatttttcttttcrcctttctaccagctcctttgccttggtataaaagatctagtaggtttaattggctatcaaattttcagctcttacattccagccatgggcttgattctcagtcatatcttcccaacttcgggagatgaaggactccttcattgctgccagtgacttgatttttctatgtataattgcagtttgatatttaatttttcctttatacattctttagggccaccaaaataa

SEQ ID NO: 923060 - DNA, 593 bp, Homo sapiens
ctgtgggaggtaattaggtcatgagactggagcttccgtgagtggagttaatgccctcagaagaagcagagagctagcttgatctttttttttgccaggtgagattacaaggtgaagttggcagtctccaaactggaaatgagccctcaccagaacctcatcctgatcttggacttctaaacttcttggacttttaatctatgagaaataaatttttgttgtttataaaccacccagtttatggtactttgttacagtagtgtattagggttytttagagggacagaactaataggatagatgtatatataaaggggagtttattaaggagtattgactcacatgatcacaaggtggaagtcccacattatgccatctgcaagctgaggagcaaggaagccagtccgagtcccaaaaacctgaaaagtagggaagccttcattctgtggccaaaggtccaagagtccaaaagctggagagcttggagtctgatgttcaaggacaggaagcatccagcacgggagaaagatgtatgcagaagactcagccagtctagtctttccacgttcctctgcctgcttttatcctagcca

SEQ ID NO: 923061 - DNA, 593 bp, Homo sapiens
ctgtgggaggtaattaggtcatgagactggagcttccgtgagtggagttaatgccctcagaagaagcagagagctagcttgatctttttttttgccaggtgagattacaaggtgaagttggcagtctccaaactggaaatgagccctcaccagaacctcatcctgatcttggacttctaaacttcttggacttttaatctatgagaaataaatttttgttgtttataaaccacccagtttatggtactttgttacagtagtgtattagggttttytagagggacagaactaataggatagatgtatatataaaggggagtttattaaggagtattgactcacatgatcacaaggtggaagtcccacattatgccatctgcaagctgaggagcaaggaagccagtccgagtcccaaaaacctgaaaagtagggaagccttcattctgtggccaaaggtccaagagtccaaaagctggagagcttggagtctgatgttcaaggacaggaagcatccagcacgggagaaagatgtatgcagaagactcagccagtctagtctttccacgttcctctgcctgcttttatcctagcca

SEQ ID NO: 923062 - DNA, 582 bp, Homo sapiens
tatttcatacatggcactttcttgttgtgtcctcacatggcagaacagaatgggcaaacaagctctctgaccttttttttttttttttttttttgagacacaatctcactgtgtcacccaggctggggtgcagtgatgcaatcacagctcastgtgcagcctcgacctcccaggctcgagtgatcctcccacctcagtctctggagtagctgggactacaggcacgcaccaccatatctggctaattttttttctttctctttctctctcttttttcttttttatagagacagggtctcactatttcccaggctagttgcaaactcctggaatcaagtgatcctcccaccttagcctcccaaagtgctgggattacacatgtgagccactgcccccagttccctcaaggatcttataatcagatggaggaaatagaaaagtaaacagttgtaaagcagcctgataagcaaaaagaaataggtccaaatgagtattgtgagggcatttttaagtatgtatctcacctagattggagccaggtgagatttcctagagatcttgaactgagtcctgaagggcaaa

SEQ ID NO: 923063 - DNA, 716 bp, Homo sapiens
gaacaaggtgacatgctgccttcttggttcagctctcatactgtaaacagtgtctttttcacaatatatttaatgccatattttttatatttttgtgctgtttttggtgatttccatgttcaaaaatgtccctcagccatagtgctaatgtgttgtctattgttccaaagtgcagggagactgtgatgttccctatggaaaaaatacatgtgttagataggcttctttcaggcatgrgttatggttctgctggctgtgggttcaatgctaatgagtcaacaatatgcattaaataagatgtctttaaacagaaatacatatacaacaaggttatgtattgtattgatcagtttaaaaaaattgagcaggccgggcacagtggcttatgcctataatcccagcactttgggaggccgaggtgggtggatcacgaggtcaggagttcgagaccagcctggccaacatggtgaaaccttgtctctactaaaaatacaaaaattagccaggcgtggtggcgagcacctgtaatcccagctacctgggaggctaaagcaggagaatcacttgaacccgggaggcagaggttgcagtgagctgagatcgtgccattgcactccagcctgggcgacaagagcaagactctgtctcaaaaaaaaaaaaagtacgagcagaggactcacaggaacctaacctgtgtttccccaaggaacagttgt

SEQ ID NO: 923064 - DNA, 631 bp, Homo sapiens
gatctataagcccctaactggggctgctgcctttttttcagagatgccctgcctggagaggaagaatctagagacgcagtctggctacagtggctttgccaagctgtggtgggctccatgcagttcgaacttccctgaggctttgtttacactgtgaggggaaaaccgcctactcaagcctcagtaatggcggacgcccctcccccaccaagcttgagtgtcccaggtggacttcagactgckgtgctggcagtgagaattttaagccagtggatcttagctcactgggctccgtgggggatctgctaagctagaccacttggctccctggcttcagtctcccttccaggggagtaaatggttctgtctcactggcattccaggcaccactggggtatgaaaaaaaaaaaacaaaaaactcctgcagctaacttggtatctgcccaattggccacccagttttgtgcttgaaacccagggccctggtggcataggcaccctagggaatctcctggtctgtaggttgtgaagaccatggaaaaaaccatgggttggaatgcaccattcctcatggcactgtccctcatggattcccttagctaagggagggagttccttgaccccttgcact

SEQ ID NO: 923065 - DNA, 682 bp, Homo sapiens
atggagtctgagaatctatgtgagtcctatggaatttgatatggtcaatcagttttcaacctttctatggagccacatctgacattgtgaaggtaaaaaagctgtgtgctggtaactgattagatatataagacagagagaagaggtgattaaatttctaaatctttgtatgagaagctaaatagagaaggaaaaagtttcatcttcaraagaatagaaataattgaaatgagttttttgacagggctacatctactctacccacctgtgatttcggctgcatatgagatgcaacctagaagcatcttaccttatgtatccacctagtttcttcacttttccacctcaggacaaaatttataaaagcttgctcaatgagacagacaaacgtcttctacaaactttgggggagttatcaccccctgggatagcctccaatcaacagggtataggagccagaagataacattgggtctctcatcctttggaaggataattctgagtcacattctacagggttccttgagaggttatctacagtggtcacaagctcaatgaggtttcctttattagcattttcccccttccctgtcttttccttttctatcatctcagcttcctgacatcagctcccaattaaactaccttgtcccttgctctgattttggggaaagtcaaattc

SEQ ID NO: 923066 - DNA, 652 bp, Homo sapiens
cagggttccttgagaggttatctacagtggtcacaagctcaatgaggtttcctttattagcattttcccccttccctgtcttttccttttctatcatctcagcttcctgacatcagctcccaattaaactaccttgtcccttgctctgattttggggaaagtcaaattcaagttgggggttctagaaattgtgttagggaactactttttgatttaaaacctttggctataaaggaaggtattcacttcactaaaatagtaaagtgaatttcatggmccaaatgtactgtttttatgactttttgtttttttaaagagcagagattataaatcccatagtagggttaatgaaggtgaacattagaggtagtagtcaggtagcaagccagggttgaaatttagcaagagaggtatggaaaaagacaagaaggacaagaaaaagacaagaacggtggcatggccaacttgagaacaactgaggacacaaagagttagatggctgataaaaatggaaaagatttagggcagccataaagccagtaaagtgaaggtgaggtgcaggcacagaaaattatcaaacagaaggtattttttgaggttttggtcttggataaatgtagaggtggacatcaaatatgacatccaatgtgtg

SEQ ID NO: 923067 - DNA, 582 bp, Homo sapiens
tgtctataagagactcattttaggttcaaagacacagatagaaagtgaaaggatgaaagaaatgcaaatggtatcccaaagagtgcaagggtggttgtggctacactctcagactaaatagactaaattttaaaaattttacaagagacgaagaacatattactaaaattttaatatagcaagatgattaatgattatgaacttttatgcacataataacagaccatcaaatatatgaagtaaaaaaaagamaattgaaggggtagacagttgcacaatcatagttggagactccaataccccactctcactaatagtgaacacactgaaaagggaattataaaaaaattattttcaatagcatcaaaataaataaaatatttaggaattaatttaaccaaggaggtgaaagtcttgcacaataaaaacgataaaacattactgaaagaaattaaagacgcttaacatcactaaccattagggaaatgcaaatcaaaactaagatttcaccacacccattaggatggctgctatcaagaaaacagaaggtaataagtgttgatgaggatgtagagaaataag

SEQ ID NO: 923068 - DNA, 580 bp, Homo sapiens
actgtaaatccaataaatctctttctcttctaaatttcccagtcttgggtatgtctttatcagcggcaagaaaatggactaatacggtaaattggtaccaggagtgaagtgctgctaaaacgatacacaaaaatgtgtaagtgacyttgggactctgtaacagacagagactggaacagtttggaggtctcagaagaatacaggaaagtgtgggaaggtttggaactccctagagacttgttaatggctttgagtaaaatgtcaataatgatataaaatccaggctgaggtggtctcagataaagatgaggaacttgttgggaactggagcaaaggtgactcttcttatgttttagcaaagagactagtggcattttgcccctaccctagagatttgtgaactgttgaacttgagggagatgatttagtgtatctggcagaagaagtttctaagcagcaaagcattcaagaggtaacttgaatattgttaaagcattcagttttaaaatgggaaacagagcataagagtttggaaaatgtgcagcctgatatgattgaaaaggcaaatctctttttctga

SEQ ID NO: 923069 - DNA, 646 bp, Homo sapiens
acatagcaagaccctatctctccaaaaatcaaaacaaaataaacagctaggcatggtggtacacacctgtagtccttgctactcgggagcctgaggtgggaggattgcttgaacccagaagttggaggaagcagtgagctagaattgagccactgcactccagcctgggtgacagaacgagacactgtttcaagaaaaaaaaaattaaaattaaaaacaaaaaatacggccgggcaccgtggctcatgcctgtaatcccagcactttgggagcctgaggtaggcagatcacctgaggtcgggagtccgagatcaacctgaccaaaatgsagaaaccccatgtctactaaaaacacaaaattagaggttacagtgaaccaagatcgcgccattgcactccagcctggacagcaagagtgaatctcaaaaaaaaaaaaaaattaaaaattaagaattaaaataaatttcttttttaagaaaaagtcaccaaatcctgcccaagctcaagggggtgagaactaggctccactttttaaagggaggagtatcaaagaatgtgtggacatattttaaaacaaccgtagtggctcagcctgtatcctaactatcattattaactcaacttttttttctttttttgagacaag

SEQ ID NO: 923070 - DNA, 604 bp, Homo sapiens
tgtttttgtgtttgttcttttgtgagtcggagtctcgcgttgtcgccaggctggagttgcagtgttgcgatctcggctcactgcaacccccacctccggttttcgagagattgtcctacctcagcctcccgagtagctgggactataggcgcgcgccaccacgcccagctaatttttgtataaatattggcaaggatggtctcgatctcttgacctcgtgatscgcccgcctcggcctcccaaagggctgggattacaggcgtgagccaccgcgcctggccaatgcagagctttttaatggctttaattttttaggtttgggagatacctgcgcaggtttgttacctggatatgttgtgggatgctgggatttggagtgcagcttagcccgttttcattgccccctctagtagaccacagtgtctgttgttgccacttttatgtccacgtgttcctaatgtttagctcccacttatgaatgagagcatgcggtatttggttttctgttcaatgcaatactttagctggtttctggagctagcgttttaaagcctgtagccacaagcgtttgaaaattcaaattctagcgtcaaggtagaagccc

SEQ ID NO: 923071 - DNA, 604 bp, Homo sapiens
tgtttttgtgtttgttcttttgtgagtcggagtctcgcgttgtcgccaggctggagttgcagtgttgcgatctcggctcactgcaacccccacctccggttttcgagagattgtcctacctcagcctcccgagtagctgggactataggcgcgcgccaccacgcccagctaatttttgtataaatattggcaaggatggtctcgatctcttgacctcgtgatgcgcccgcctcggcctcccaaagggctgggattacaggcgtgagccaccgcgcctggccaatgcagwgctttttaatggctttaattttttaggtttgggagatacctgcgcaggtttgttacctggatatgttgtgggatgctgggatttggagtgcagcttagcccgttttcattgccccctctagtagaccacagtgtctgttgttgccacttttatgtccacgtgttcctaatgtttagctcccacttatgaatgagagcatgcggtatttggttttctgttcaatgcaatactttagctggtttctggagctagcgttttaaagcctgtagccacaagcgtttgaaaattcaaattctagcgtcaaggtagaagccc

SEQ ID NO: 923072 - DNA, 575 bp, Homo sapiens
aaaacatccaagaactgtaagataatttcaaatgatataaatacatgtaaatagaatcctaggagaggaaaaagagaatagagcaaataaagaaaagaaaggtttgaagtaataatggctaagaattttctaaaattagtgacagacactgttttggtgtctttgttttactataaaagaatacctaaggtatgtgcagagatcacatggtgacacagaaagtaagagagagagggaagggagatgccagycgtttttcaaacaactaactctcatggaaatgaacatgagtgagtactcactcaactgccccactgcaagcccagggagggcattaatttattcataagggctccaactccatgacccaaacacctcctattaggcctcaccactggggatcaaattttaacgtgaggttttgagtagtcaaatattctgcattctactcctggcccctcaatactcatgttcttctcatattgtaaaatataatcatctcttcccaatagtcccaactcttaactgcttgtagcattaacttaaaagtccaaagtttcatttgagtccaaggc

SEQ ID NO: 923073 - DNA, 575 bp, Homo sapiens
aaaacatccaagaactgtaagataatttcaaatgatataaatacatgtaaatagaatcctaggagaggaaaaagagaatagagcaaataaagaaaagaaaggtttgaagtaataatggctaagaattttctaaaattagtgacagacactgttttggtgtctttgttttactataaaagaatacctaaggtatgtgcagagatcacatggtgacacagaaagtaagagagagagggaagggagatgccagccgtttttcaaacaactaactctcatggaaatgaacatgagtgagtactcactcaactgccccactgcaagcycagggagggcattaatttattcataagggctccaactccatgacccaaacacctcctattaggcctcaccactggggatcaaattttaacgtgaggttttgagtagtcaaatattctgcattctactcctggcccctcaatactcatgttcttctcatattgtaaaatataatcatctcttcccaatagtcccaactcttaactgcttgtagcattaacttaaaagtccaaagtttcatttgagtccaaggc

SEQ ID NO: 923074 - DNA, 603 bp, Homo sapiens
cttgtggctgaggtgtacataggaatgtacataaagaccctcataatgcaggattgagctggaagtgaaatgagaaggcagagccagctatgggctgtgtattagtcctttttcatgctgccgataaagacatactagagtctgggaaatttacaaaagaaagaggtttaatggactcacagttccacgtggctggggaggtctcacaatcatggctaaaggtgaaaggcaagactcacatggcagcagacaagagaagagaatgagaaccaaatgaaaggggtttccctttaaaccatcagatctcatgagacttattcactaccacaagaatagtatgggggaaactgcccctatgattcaattacctcccactgggtccctctcacaatacaagggaatagtgagagctacaattcaagatgagatgtgggtggggacacagccraaccatatcattctgtccctggcccctcccaaatctcatgtcctcacatttcaaaaccaatcatgccttcccaacagtatcccaaagtcttaactcatttcagcattaacccaaaagtccacagtccaatgtctcatctgagacaaaggaaatcc

SEQ ID NO: 923075 - DNA, 593 bp, Homo sapiens
gcctgggtgctaagcccctcactgcctggggctggcagttctggctggccactctgagtgcagggcctgctgagcctgtgcccacccggaactcgcactggcccacgagggccacgtgcagcctcagtcccacctgcgmctctccctccacacctccctgcaggcagagggagccggctccagcctcggccaacccagagaggggctcccacagtgcagcggtgggctgaagggctcctcaagaatggccagagtgggcactgaggctgaggaggcaccgagattgagcaagggctgccagcatgctgtcacctctcaatccctcctctaaacaggacaccccaactgctgttgggaatttggccgatgaccactctagctacttcctgctggataggggcaatgaaggggccctgcagttgtagtgtcctccagaggggagatctctaggccagtgaaactgacagtgggttggtccaagggtctttggtagaagtcgttagttgaactcatttggggttccatttgtaagaccatctgtagcttgatggtcctgattctagaggaaacaaatttgacaagaaggttaaaaa

SEQ ID NO: 923076 - DNA, 591 bp, Homo sapiens
aattttaagttcatgtaattttcagttgccatatagtattctttgatttttttcttgatcatttaaaaacctttcatatctcatcggtcacacaaaaatgggcagacagctgaatttggtttgtgggttttattttgccaacccttacatatagtattgaataaaacatatatgatatttgccctttggggcttaaaatctagtggatgactgctttgattagggtgcagaaacctcatagttaactggtggtatgggttgaatccccctttcaaaactcatgttgaaacttaatagccattgtgatgctattaaaagataaggcacttaaaaggtaattaggtcatgagggctctgcctttgttaatggtttgatgccattattgtgggaatgggttagctatcgtaggagtgggtccctgataaaaggatraagttcatctccatcctttctctgtctcatgtgctcacttgcccttccaccttctgctatgggaggatacaatgagaaaaccctcatcagaggtggcccctggatcttggaattcccagtctccagaatcataagccaaataaacttcttttgttcat

SEQ ID NO: 923077 - DNA, 632 bp, Homo sapiens
ccttctggcatatcatagaagttactctagaaatgctgttaaacctaatctgcttcacttctctgaaaaaataaccaatttcactctgcctaggtgttaggattgtgagtgattttaatgatagtctttgtgctgtgctagttttttcttaagttttctataataggtaagtggttttttaaaacagtaaatgttatttaaaatataaaattaaaatcaagtaaacatatttcaacactagaaaatagatctgtgggcatcaggatctgtcacctgtaccactgccttaaatttagcttagtttaatgtttaggtaatattaactctatgagcagagtcacaaccatgtgactaccttcacttcacagaagacttccaatgaccaaggtgccatttatctattcaagatggccttaagccaagcttgggatctaaaactgatgagatgctgtattaatttttagcactttctgcccagtaaatttwtttctttaactacaatcctgaaaatgaatatgaacttatgaatggaaattccattaaggaaaaaaaccacccatgtataaaaataagcacagagaacttttgaagcagagcttacaaaagaggctatctattcaaggtaacacagt

SEQ ID NO: 923078 - DNA, 483 bp, Homo sapiens
ataaaaataaatagcctttaaaaaatgtcttaaccactctgaacctcagtttacccggctgtaaaatggggataataataataaataaaacattatttagtcatcatttttcctatcacctccctgtaagaatgtaaacttcacaaaggcagggatttttttatctcttttgtttacaaatgctcagcatggcacctaggacttagcaggtgctcagtaaaaaattactgaatgaatgaatgaatgaataaggaatacatatgatttacgggttcctcacaatgtgcctgkcactgcagaaaatgctttccatgcagaatcctgtttaatccttagaacaatcctgaggtgtggaattggtatgattatctccactttgcagaggaggaaactgagcctcagagagattacacatgacttactcgtggtcacacagttcctgggtgatggaactgggatagaagccctgctttgtggggcccc

SEQ ID NO: 923079 - DNA, 725 bp, Homo sapiens
ggggtgtcacctcacccaggaagcacaaggggtcagggaactacctcctctacccaagggaagccatgagggactgtacctgaggaacggtgcactccagcccagatactgcacttttcccatggtctttgaaaccygcagaccaggagattccctccggtgcctacgccactggggccctgggtgtcaagcacaaaactgggcagccatttgggcagacactgaactagctgcaggagttttattttccataccccagtggtgcctggaatgccagcaaggcagaaccattcactcccctggaaggggggctgaagccagggagccaagtggtctagcttggcgggtcccacccccacggagcccagcaagctaagattcactggcttgaaatcctcattgcaagcacagcagtctgaggtcgacctgggacactcgagcttggagggaggagggccgtctgccattgctgaagcttgagtaggcattttaccctcacagtctaaacaaagctgcctgggagttcgaattgggtagagcccaccacctcagctcagcaaggccactctggccagactgcctctctagattcctcctctctgggcagggcaactctaaaaaaaaggcagtcagggactaatagataaaaccccatctccctgggacagagcacctgtgggaaggggtggatatgggagcagcttcagcagacttaaatatctctg

SEQ ID NO: 923080 - DNA, 742 bp, Homo sapiens
acctgggacactcgagcttggagggaggagggccgtctgccattgctgaagcttgagtaggcattttaccctcacagtctaaacaaagctgcctgggagttcgaattgggtagagcccaccacctcagctcagcaaggccactctggccagactgcctctctagattcctcctctctgggcagggcaactctaaaaaaaaggcagtcagggactaatagataraaccccatctccctgggacagagcacctgtgggaaggggtggatatgggagcagcttcagcagacttaaatatctctgccggacagctctgaagagagtagtggatttcccagcacagtgctcgagctctggtaagagtcagactgcctcctcaagtgggtccctgaccctcgtttatcctgattgggagatatctcccagtaggggccaacagacacctcatacaggagagctctggctggcatccagtgggtgcccctctgggacgaagcttccagaggaaagaacaggcagcaatctttgctgttctgcagcctccactcgtgacaccaaggcaaacagcatctggagtggacctccagcaaactccagcagacctgcagcagagggcactaactcttagaaggaaaactaacaaacagaaaggaatagtatgtccactcagagaccccatccgaacatcagcaggatcaaagaccaaaagtagataaatccaggaagatgaggagaaaccagcgc

SEQ ID NO: 923081 - DNA, 742 bp, Homo sapiens
acctgggacactcgagcttggagggaggagggccgtctgccattgctgaagcttgagtaggcattttaccctcacagtctaaacaaagctgcctgggagttcgaattgggtagagcccaccacctcagctcagcaaggccactctggccagactgcctctctagattcctcctctctgggcagggcaactctaaaaaaaaggcagtcagggactaatagataaaaccccatctccctgggacagagcacctgtgggaaggggtggatatgggagcagcttcagcagacttaaatatctctgcyggacagctctgaagagagtagtggatttcccagcacagtgctcgagctctggtaagagtcagactgcctcctcaagtgggtccctgaccctcgtttatcctgattgggagatatctcccagtaggggccaacagacacctcatacaggagagctctggctggcatccagtgggtgcccctctgggacgaagcttccagaggaaagaacaggcagcaatctttgctgttctgcagcctccactcgtgacaccaaggcaaacagcatctggagtggacctccagcaaactccagcagacctgcagcagagggcactaactcttagaaggaaaactaacaaacagaaaggaatagtatgtccactcagagaccccatccgaacatcagcaggatcaaagaccaaaagtagataaatccaggaagatgaggagaaaccagcgc

SEQ ID NO: 923082 - DNA, 605 bp, Homo sapiens
aacagaatgcctcttctcctccaaaggatcacaactccttgccagcaagggaataaaactggatggagaatgagtttgacggatggatagaagtaggcctcagaaggtgggtaataacaaactcctccaagctaaaggagcatgttctaacccaatgcaaggaagttaagaacactgtaaaaagattagaggaattgctaactagaataacaagtatagagaagcacataaatgacctgatggagctgaaaaatacagcatgagaacttcatgaagcatacacaattatcaatagccaagtygataaagcacaagaaaggatatcaaagattgaagatcaacttaatgaaataaaggagaagacaagattagagaaaaaagagtgaaaaggaactaacaaagcctccaagaaatatgggattatgtgaaaacaccaagtctacgtttgattggtgtacctgaaagtgacggggagaatggaaccaagttggaaaacactcctcaggatattatccaggagaacatccccaacctagcaagacaggtcaacattcaaattaaggaaatacagagaacgccacaaagatactcctcgagcagagcaa

SEQ ID NO: 923083 - DNA, 605 bp, Homo sapiens
aacagaatgcctcttctcctccaaaggatcacaactccttgccagcaagggaataaaactggatggagaatgagtttgacggatggatagaagtaggcctcagaaggtgggtaataacaaactcctccaagctaaaggagcatgttctaacccaatgcaaggaagttaagaacactgtaaaaagattagaggaattgctaactagaataacaagtatagagaagcacataaatgacctgatggagctgaaaaatacagcatgagaacttcatgaagcatacacaattatcaatagccaagtcgataaagcacaagaaaggatatcaaagattgaagatcaacttaatgaaataaaggagaagacaagattagagaaaaaagagtgaaaaggaactaacaaagcctccaagaaatatgggattatgtgaaaacaccaagtctacgttkgattggtgtacctgaaagtgacggggagaatggaaccaagttggaaaacactcctcaggatattatccaggagaacatccccaacctagcaagacaggtcaacattcaaattaaggaaatacagagaacgccacaaagatactcctcgagcagagcaa

SEQ ID NO: 923084 - DNA, 600 bp, Homo sapiens
atgctgtgatatttcatgtctgtgcatgctggtctctctgattagagtgcttcaataaataaagctctaatcacctaatgtggtggacatctcctcaacctttaaacacctccaatctatctcctctcctagaaagcctttcctgaaccctccttcmcaaagagagagttattccctcttttcacctatttttgaatcttctgtggatgcatctagcaaagcatccatcaccctgtgtttcggttgtaaataaaccatctctccaactgatttgtgattctctctgtggccatcagcttatgctggttatgctgcgggataaacaaccataaaatcacagcagctcaccatgcaaaggtttatctctcattatgttacacatcggctgtggcactggcattccacgtcttctcttcattgtgggacccagctagagaggcctggccctattctggacatgccactcttctagaagataaaaaagagaaaacgcagtggaaccgcaaaatgtccctgaaacctcctgctcaggctttgaggagaaagcttctgctcaaatttcactggccaaagcaagccacatgaccaggtctgacatca

SEQ ID NO: 923085 - DNA, 600 bp, Homo sapiens
atgctgtgatatttcatgtctgtgcatgctggtctctctgattagagtgcttcaataaataaagctctaatcacctaatgtggtggacatctcctcaacctttaaacacctccaatctatctcctctcctagaaagcctttcctgaaccctccttcccaaagagagagttattccctcttttcacctatttttgaatmttctgtggatgcatctagcaaagcatccatcaccctgtgtttcggttgtaaataaaccatctctccaactgatttgtgattctctctgtggccatcagcttatgctggttatgctgcgggataaacaaccataaaatcacagcagctcaccatgcaaaggtttatctctcattatgttacacatcggctgtggcactggcattccacgtcttctcttcattgtgggacccagctagagaggcctggccctattctggacatgccactcttctagaagataaaaaagagaaaacgcagtggaaccgcaaaatgtccctgaaacctcctgctcaggctttgaggagaaagcttctgctcaaatttcactggccaaagcaagccacatgaccaggtctgacatca

SEQ ID NO: 923086 - DNA, 600 bp, Homo sapiens
atgctgtgatatttcatgtctgtgcatgctggtctctctgattagagtgcttcaataaataaagctctaatcacctaatgtggtggacatctcctcaacctttaaacacctccaatctatctcctctcctagaaagcctttcctgaaccctccttcccaaagagagagttattccctcttttcacctatttttgaatcttctgtggatgcatctagcaaagcatccatcaccctgtgtttcggttgtaaataaaccatctctcmaactgatttgtgattctctctgtggccatcagcttatgctggttatgctgcgggataaacaaccataaaatcacagcagctcaccatgcaaaggtttatctctcattatgttacacatcggctgtggcactggcattccacgtcttctcttcattgtgggacccagctagagaggcctggccctattctggacatgccactcttctagaagataaaaaagagaaaacgcagtggaaccgcaaaatgtccctgaaacctcctgctcaggctttgaggagaaagcttctgctcaaatttcactggccaaagcaagccacatgaccaggtctgacatca

SEQ ID NO: 923087 - DNA, 572 bp, Homo sapiens
ctgtctctgccttgctggagtttcaggtttttataggcacaggatgggggcatggcaggccagggtggtctagggaaatgctacatttgcgcaagacatgcctgtcctcacttaggtccgtgggggtggaccccgagccagggrctacgccctccttactcagcacttccctttccctcccaactccagtatcatttaaagggaccacgctcttcccttcccagtacttctatataaatattactctaagatttacaatacaaattaatatccaattgtttgagagaattgcaataactaaagaatgcttatgatcccacatattttaatctgaaaatacacacatgtgtgcacacaggcacacgcacatgtacatgacttcaaaataaattctcaggtatactatatgactatcaaaattgaaatctctgtaaaacttaaaaattgtgctgtaaaaatagtattaaatactcaagaaaaaataaaactgctaagaattgctgagggtagtttggcaaaaatgagaatacaaaccatgagaatacagagtgatttttcttttttatttaccc

SEQ ID NO: 923088 - DNA, 702 bp, Homo sapiens
aatgcctagtgggcccatttggattttgaggacatcacattcctcatttgtgtgtgttgctctggcctatttattgagtgactcaaaaggctgctagttgtgagtgcaggagaagactctgcaacaggtctaggctgctgtgcaagctgcgctgccacttgggccacataacccagcagatccagtmatgattgaggtgtcagtggtaaatagggatgctgtctggagcctttggcaggtccccataggtgaatcacagtggagacccctaggattttggagcaatgccctaccatcttctgcagataactattctcctttggaaagacagctcttggcctgctactgggccattgtagaaactgaacatttgactatgggtcaccaagttaccaagcaatctaaaccgccttttatgaactgggtgctttctgacccacctaccaataaaattgggcatgcacagaaacattccatcattaaatggaagtggtatatatgtgatcaggcttgaggaggtgctgaaggtacaagttacataaggaagtggcccaaatgcccatggtcctcattcctgctaccctgccttttttctctcagcctgttcctatggcctctttgggagttccctattattagttgacagaggaagagaagactagggcctgttttacagatggttctgtaagacatgcaggcacc

SEQ ID NO: 923089 - DNA, 562 bp, Homo sapiens
acattctcttgaggttcaatagaaatatccctccattatgggacatagtagaaaccttacaagcctggttaaggattcagagtcagactggtttcaaattctagcctcccagctatgaaaccataggcaaattatacttatcttctctgaacctaataataatgcaactaatagcaattatattatagggttattgggaagatcaaatgagacaatgcttctcaaaagtgaatgaaataaaaatcattttgagtgcttagcacacaacccttgggacatagtaaacactcaacacattttaactgttatttaatggtaactagaccccttgatgtggtctcatttttttccccctaaactccattcaratttcagggaacagttgatttttttctttggcaaggaattaattcttcctcttctaccacatttttagccacagagtgacttaaaataatcacgaaaaatttcaagaggcagctcggctggttgcttctcccttttgaggaaccatctgtcaaagatgacaattctggagaagatataaattgtggacctcact

SEQ ID NO: 923090 - DNA, 626 bp, Homo sapiens
ccaaagatctaatctaaagagataaaaactatagaactcatagaagaacagatgcggaaaatcttcatgacattggattgggtaatgattgcttacatatggcaccaaaagcacaggcaataaaaaaaggagataaagtgaacatgaaaattaaaaacttgtgcatccaagaaaactatcaggagagtgaaaagacaactcagaatgcgagaaaatatttgcaagttatatatatataatatatattacacatattatatatatgggattaaatttcagaatatataaatattctacacgtcatcawcaacaacaacaaaacaaacccaattcaaaaatgggcaaataactctctttttttttaagatggttgactggctctgtcactcaggctggagtgcagtggcatgattatagatcattgcagcctcaaactcctaggtttaagcaatcctccccctcccagccttctgagtagctaggactgtaagtatgtgacaccacacccagctaatttttttttttgtacattttttagagacaaggtctcactgtgttgtccaggctcgtctcaaactcctggcctcaagagattcttcagcctcagactcccaaagtgctgagat

SEQ ID NO: 923091 - DNA, 528 bp, Homo sapiens
cactgcaagatgcgctatgtgaattttcacatagagatgcccatggccaaagtgaggaactgaaaggacatccttgtggaactgatttaggaagacactaacttttgtttacagaagaaaaagatgaatggaacatctgcgaggatattacagaagcagtctctcatatatcagaaggctgtgtgtgtgtgtgtttgtatatatatgtgtgtgtatgtttgtatatatgtatgtgtgtgtgtgtgtgtgtgtatatatatatatatatatattcttctttctcttggccacagacatttccccaaacatgttctgaccttctgcttggaggtctccttgaggacattctcasagaaacctctgttgcggtattagaactgatcactcatccctttccattattaaatgttctctactatctcaccttaggcagtataaagccctggttcactctcaggcaaaagagctgacccagttacgggagaagttacgggaagggagagatgcctcccgctggctgaacaagca

SEQ ID NO: 923092 - DNA, 445 bp, Homo sapiens
gaagtcattactagaagctcagctaggaacctatgtcttcaggctttccaacaattcttaagccagcttttttgttttgttgtgcttttattttcattttattttatttttgagacggagtcttgctctgtcgctagggtggagtgcagtggcatgatctcggctcactgcaacctctgcctyccaagttcaagcgatcctcctgcctcagcctcctgagtagctggggctacaggcgtgcgccaccacacccagctaatttttgtatttttagtagagatggggtttcaccatgttggccaggatggtcttgatctcttgacctcatgatccacccacctcggcctcccaaagtgctgggattacaagcgtgggccaccacgcccggactttatttttattttttatttatttatttttttgagacagagtttcactcttgttg

SEQ ID NO: 923093 - DNA, 619 bp, Homo sapiens
tatttttctttcattgctttttcttttgatgtcacatctgagaaaccattgcctaatccaaagccacaaaattcaagcctttgttttcttctaagttttatacatttagctcttatatttaggtttcagattcattcgagttaattttttttttttttttttttttttttttgagacagagtctcgctctgtcacccaagctggagtgcagtggcgcgatctcggctcactgcaacctccacctcctggattcaagtgattctcctgcctcagcctcctgagtagctgagattacaggcacccaccaccacgcccagctaatttttttttttttgtattagtagagatggggtttcaccatgttagccaggagggtcttgctctcctgacctcgtgatccacccgctttggcctcccaaagtgctgggattataggcatgagccactgcacctggccgctctasttaatttttgtacgtggtgtgaggtagacaccaaactttattcttttttatgtaaatatccagttggcctagaaacatttgttgaaaaaccatctctcaatcgtcttggaagcccacagacttgaatgatgtggcttgacttctcaagcttcatc

SEQ ID NO: 923094 - DNA, 580 bp, Homo sapiens
aaggatggcagtttttgcatgactcaagttccaagcttaattttcctttgtcatagtgagtttggggtcctgagattttattttcctttcacactttctaccaatataaagcttcctcatagatgccttcttttttcaaacattaacaaccctcgtgggttttctctcattttragtacagaaaacataatactgtacaataattttatctgtcttaaatacaagactgcttatgattcacttaaaataaaaaaaatggctccacatttctggcttttagttggattatgatttcaaccaaaaatcagagctttttaaccttgagtttgagtttcacacacccagtaaagtggaaatatagactttttcttaggacagtgttatgacactcaaaagaatcgtggccaaacttaattacctgttgcaaacatcattgcagttttttactgaactatcagagactttcttgtgcctatcacagtgtatatgctaaatacatattacagggccaggcacggtggcccatgcctataatcccaatgcttagacaggccaaagcaggagcattgcttgaggccaa

SEQ ID NO: 923095 - DNA, 580 bp, Homo sapiens
aaggatggcagtttttgcatgactcaagttccaagcttaattttcctttgtcatagtgagtttggggtcctgagattttattttcctttcacactttctaccaatataaagcttcctcatagatgccttcttttttcaaacattaacaaccctcgtgggttttctctcattttaagtacagaaaacataatactgtacaataattttatctgtcttaaatacaagactgcttatgattcacttaaaataaaaaaaatggctccacatttctggcttttagttggattatgatttcaaccaaaaatcagagctttttaaccttgagtttgagtttcacasacccagtaaagtggaaatatagactttttcttaggacagtgttatgacactcaaaagaatcgtggccaaacttaattacctgttgcaaacatcattgcagttttttactgaactatcagagactttcttgtgcctatcacagtgtatatgctaaatacatattacagggccaggcacggtggcccatgcctataatcccaatgcttagacaggccaaagcaggagcattgcttgaggccaa

SEQ ID NO: 923096 - DNA, 580 bp, Homo sapiens
aaggatggcagtttttgcatgactcaagttccaagcttaattttcctttgtcatagtgagtttggggtcctgagattttattttcctttcacactttctaccaatataaagcttcctcatagatgccttcttttttcaaacattaacaaccctcgtgggttttctctcattttaagtacagaaaacataatactgtacaataattttatctgtcttaaatacaagactgcttatgattcacttaaaataaaaaaaatggctccacatttctggcttttagttggattatgatttcaaccaaaaatcagagctttttaaccttgagtttgagtttcacacacccagtaaagtggaaatatagactttttcttaggacagtgttatgacactcaaaagaatsgtggccaaacttaattacctgttgcaaacatcattgcagttttttactgaactatcagagactttcttgtgcctatcacagtgtatatgctaaatacatattacagggccaggcacggtggcccatgcctataatcccaatgcttagacaggccaaagcaggagcattgcttgaggccaa

SEQ ID NO: 923097 - DNA, 595 bp, Homo sapiens
taatcccagcactttgggaggccgaggcgggcggatcacgaggtcaggggatcaagaccatcctggctaacacggtgaaaccccgtctctactaaacaaaatacaaaaaattagccgggcatggtggcgggagcctgcagtcccagctagtcgggaggctgagacgggagaatggcgtgaacccgggaggcggaggttgagtgagccaagatcgcgccactacactccagcctgggcratagagcgagactctgtctccaaaaaaaaaaaaaaaaaataataataataataataatgagtttgtattgttcttattttgcaaaagaacgcaagatctgggtagagaaagggcaagagggaggacttcccagattgaatcaataatattaacagtatcaatctgccactaataattatttaagaaaagtatttttctgctttcagttttatttattaaatagtttctgctagcctaatgttaaagtctgccaactagttccttcaagttaatcacattcacttttgattccctcttaacacattaagatattttataattctgtgagtttaaaatccaatgcaaattcattgtggt

SEQ ID NO: 923098 - DNA, 621 bp, Homo sapiens
tctttttacagtacctattgccttttgaattctttattgttttcatttaagaaatgtggaaatctgaaacaaactatattctcaatcatgttagataaagtatatgtaatatgtattttttaaagtccagtggctaagaacttagactgggttttgaaataataatttcctaacacagtttctcagtatgtttcctctagacaagagaaaactctgtaattatgattcttaatttaccctggtaatttcataagaaaaatgattaattactttgagcaatyagttatacagataatcatggttctttatttaaaccacaaaaaatagaaagaaagcagagaagcttaagcataaaatataaagaaaaattcagtcatttagtaaaaatgaaatcagtgttaaaatatttcttttgacacagtcagctaacatctttctatttttgctgagtaactattaattatattttaagttcaactaactcttgacacagcaatggaatttgaagtgaatatactactttgaaaaataaatggtgtatttagagtgttgacatttagaaaatggtagttttgtgaaatttgcaatgtgttttagaattataaatgctaaagtaaatga

SEQ ID NO: 923099 - DNA, 575 bp, Homo sapiens
ttgatctcatttttactattcttctcattgctcattcaattcaatttcaagcataatgattttttgctctttttggaatacactagctttttgatttcattagagcctgtacacttccctcttcctgaaatgttcttccccaaatttatgtatagcttattttctctctttgttcagggctcagtgtaattgtagattgttctctaccttgaatatgtcttacccctcatttgactggttttccttcataccaattatttgtattctaaaatattttatatttttctgttgacgtgttcactgagttccttcctctaaaatgtagcttcatgaggkcgatattttgttaaaattgtatgctactgtatcactagaactgagaacaatgcctgaacagagtagctactcatgactcattggctaaaacaagttaatgaatgagaacaggcaggtagaaagccaggaacgaaaagaggatattatattaagttgaatgagggattaaatgaatataaataagctgaaagtagcataggttatgcaatatgcttaataaagtatgtttgtctattttc

SEQ ID NO: 923100 - DNA, 598 bp, Homo sapiens
caaggttttgccacattgcccaggctggtctccaactcgtgggctgaagtgatctgcccaccttggcctcccagtgttctgggattacaggagtgagccactgtacccggctgatgcaaatgatttctattattaatatcttgcagttattcttccattggataaccatcaatgtcaaaataaagattattagttactgaaggactgaaaaatcaaaaatcaacttcatgagatgctttacaaactagtgttctcttttaatatttgactcagtaaaagtttttaagaaaagttaagtttgtgtttttatttgtgyatactctctagtgcttaaatgtatcaggatagaacttttctaaactaggtcagtcttttttccatatctatggttgaatacttcagttaaataaagcaatggtagatagcaaactatgttataattggcattttgggcactggttgcaattaattgccaaaaaaagtatatctcaccacaattgatctctcatttttccactctcatttatttcccttcactttcttcttggcttctgcaaaagcatttgtttttcctttttctttcttctttttttttttt

SEQ ID NO: 923101 - DNA, 637 bp, Homo sapiens
agaattttactaacaatatatcgttaacattctaaaatatttttgtataatctagactttggtgggaacaaaccttggaacaaactggttccaaggtttcttggaggggagtggtgaaaaagaaatggggaaatttatgttttttgaatttgtcaacttattgaggaggggtaagtagagaaattgactaatttgctaagacaatagaaggcatctttatttcaaatagtacttgaaaattatgcatctaattgtgaggtcaaaaaattgaagataccccttaataaagaaataaaggatagatcttccaaaataacaaggatgtagtggaatgaataaaaatgtatcaagtcagcagcaataaggtaaaaatattagaaaagtaatgttaaatagttgtcagatggaagkatatatttgagcaaatattttgttaaatagatgacaaaaaggtaatatttatacattacatatatgtgtttgtatgtatgtatgtatgtatgtatgtatttattttgagatatagtcttgcctgtcacccaggctggtatgcagtggcacgatctcggctcactgcaacctccgcctcctgggttcagacaattctcctgcctcaacctcccgagtagttggaact

SEQ ID NO: 923102 - DNA, 664 bp, Homo sapiens
tcattctgaatgtctgcagtagaattgaattggggagcagttaggttccaggaacatattcactcctgttttgttctctccccaatctcagcctttcggtgactgtttgggcaaagcctcccttgtggtagaagatgcctcacttctggggagaggagactcctcatcttgcagacaagaagcagcacccactggttcctgctccaaaagccattaacattataaactggccaggtgcagtggctcaaacctgtaatcccagcaccatttgggatgttaaggcagaaggattgcttgagcccaggagtttgagaacagccttggcaacaaagtgagacccaatctctacaaaaactagagaaaaaatagctgggtgtggtggcactcacctgtactaaggaggctgggctgrgaggatctcttgagcccaggtggttgaggctgcagtgagccaagatcacgcctctgcacttgagcttgggtgacagagtaagaccctatctcaaaaaaaaaattataaactgattcacaataactttggttttgtcactaatatgctgaatatttttgttacaactaatatgcaaaatgcaaactggctatcactaccattctgataatggaattagctgtcctacatacctgatgacctaatgcttaacct

SEQ ID NO: 923103 - DNA, 664 bp, Homo sapiens
tcattctgaatgtctgcagtagaattgaattggggagcagttaggttccaggaacatattcactcctgttttgttctctccccaatctcagcctttcggtgactgtttgggcaaagcctcccttgtggtagaagatgcctcacttctggggagaggagactcctcatcttgcagacaagaagcagcacccactggttcctgctccaaaagccattaacattataaactggccaggtgcagtggctcaaacctgtaatcccagcaccatttgggatgttaaggcagaaggattgcttgagcccaggagtttgagaacagccttggcaacaaagtgagacccaatctctacaaaaactagagaaaaaatagctgggtgtggtggcactcacctgtactaaggaggctgggctgagaggatctcttgagcccaggtggttgaggctgcagtgagccaagatcacgcctctgcacttgagcttgggtgacagagtaagaccctatctcaaaaaawaaattataaactgattcacaataactttggttttgtcactaatatgctgaatatttttgttacaactaatatgcaaaatgcaaactggctatcactaccattctgataatggaattagctgtcctacatacctgatgacctaatgcttaacct

SEQ ID NO: 923104 - DNA, 646 bp, Homo sapiens
caactcaccttttcaccggggatctgtgcaatccagattaagggagagcactctgtgtctcccaagccttggagctagcacaaaagtggctgagagatggggaaagaggaaagacactcagaaaagctgcaggcatttmcccagacctgggactgagagaaggatgccctttttaatctgggctcatacaaagtcaatcattttttggtgcctggcaatggtggccactgcagacactttaatcttgggctaggaattggagtgctttctctggagcaggggagcagcctcaacagccagaattgagtgttgagtgtggaaagtgccccagcagtaagtgttggaattaggctctctcctcttgcaggactgtagtgggaagagagttgctaaagcagaggtttctcaaggatggtgagacttgcagccaagaacagctttgcaacctggaactggtctgtgtgtgtcattgctgggtgtctcagcctgctcccttggtcagttgagagagtactccatcagctccaagaaacaagagggaggtgaaccccatcccccaggagacctaaactttggtgaggaccagccctaagggaaggaggaatacagcttgccaaagccaccccttgggtcaaaggaaacacga

SEQ ID NO: 923105 - DNA, 593 bp, Homo sapiens
caaaatatactaaactgagtggcttacaaatgacagaaatttatttctcacagctctggaggctgggaagtccaagatcaaggcaccagcagattcagtgtctggtgtgggctctctgcttcacagaccacacttcttgttccatcmtcacatggtggaagggggtgaacgctgtgtatccttatataagggtactaatcccattcatgatggtggagctttcataacctaatcccttgctaaaggtcccatctcttaaaactattgcattggggattaagtttcaacatttgaatttgaacattcaaaccatagcaagctccaaactggaaataattcaagttttccttcaacaagtgaatgaataaagcaaattgtggtatattcacataatggaatactactccatgataaagaagaatgaactcttggtatacgcaacaagagggacgaacttcaaaataattatggtgagtgtaccaaaaagagtacatattgcattattccaattatataagatgttagaaaattcaatccaatgtctagtaacaaaaaagcgtattagtgacttcctgggcatgagggaggctgag

SEQ ID NO: 923106 - DNA, 593 bp, Homo sapiens
caaaatatactaaactgagtggcttacaaatgacagaaatttatttctcacagctctggaggctgggaagtccaagatcaaggcaccagcagattcagtgtctggtgtgggctctctgcttcacagaccacacttcttgttccatcctcacatggtggaagggggtgaacgctgtgtatccttatataagggtactaatcccattcatgatggtggagctttcataacctaatcccttgctaaaggtcccatctcttaawactattgcattggggattaagtttcaacatttgaatttgaacattcaaaccatagcaagctccaaactggaaataattcaagttttccttcaacaagtgaatgaataaagcaaattgtggtatattcacataatggaatactactccatgataaagaagaatgaactcttggtatacgcaacaagagggacgaacttcaaaataattatggtgagtgtaccaaaaagagtacatattgcattattccaattatataagatgttagaaaattcaatccaatgtctagtaacaaaaaagcgtattagtgacttcctgggcatgagggaggctgag

SEQ ID NO: 923107 - DNA, 593 bp, Homo sapiens
caaaatatactaaactgagtggcttacaaatgacagaaatttatttctcacagctctggaggctgggaagtccaagatcaaggcaccagcagattcagtgtctggtgtgggctctctgcttcacagaccacacttcttgttccatcctcacatggtggaagggggtgaacgctgtgtatccttatataagggtactaatcccattcatgatggtggagctttcataacctaatcccttgctaaaggtcccatctcttaaaactattgcattggggattaagtttcaacatttgaatttgaacattcaaaccatagcaagctccaaactggaaataattcaagttttccttcaacaagtgaatgaataaagcaaattgtggtatattcacataatggaatactacyccatgataaagaagaatgaactcttggtatacgcaacaagagggacgaacttcaaaataattatggtgagtgtaccaaaaagagtacatattgcattattccaattatataagatgttagaaaattcaatccaatgtctagtaacaaaaaagcgtattagtgacttcctgggcatgagggaggctgag

SEQ ID NO: 923108 - DNA, 585 bp, Homo sapiens
agaataaagcaggtagcagaagatggaagagcagacttgctgagtcttccagccttcatctttctcccatgctggatgcttcctgcccttgaacatcagactccaagttcttcagtttttggactcttggacttacaccagtggtttgccaggggctctcaggcctttggccacagactgaagcctgcactgttgscttccccagttttgaggtttggggacccagactgatccaccactgacttccttgctcctcaacttgcagatagcctattgtgggactttaacttgtgattgcgtgagccaattctccttaataaactccctttcatatatacatatatcctgttagttctgtccctctggagaaccctgactaatacacccctcttctcttgatgttaaatgttactctgtttgatgtaatctgtaacatttatatattgagtatactactatgtatggttttgcaattttgactgacctatgctgtggcttgagcctgtgtgccatgtctctgactaccaagcaaatggatagtactaagaatttccttcttgggaactccatgtagcttgtggcttt

SEQ ID NO: 923109 - DNA, 565 bp, Homo sapiens
ttttgtagaatgatgggattttttcctgaattttcaaatttcccgcataagatatagtagctataaaagcaagaaaaaaatatatatgaatttgcatgctgtttttcgaatgttgttattctatttttaaaaaatacttatattcagtggaatactttgctatggaaattcatacaattttaaacaaagtaattaaatcataaatgagaaatttatgccaaagataatattcataatgcttcattcatttattagagctctgtgatatttcttaaatgatgttttaaatttgacgccagaatgtcttccacgtttcaaaggttttcaggtatttgaaagttctgtgacacattagtgtgtggctttgacatttatccagaataaaagcagtcataatataaattcaaatttatatttrtatattagttattttctaacttaaacttgcctaaatagtaagtctttatgcacaaatataaaaacaaatctgttcttcattttgatgaattcaatataaataaatacactacagagcaggtgcccttttcttcattgtacttgtttt

SEQ ID NO: 923110 - DNA, 556 bp, Homo sapiens
aatgtgcaaacgacaggccgactcattcagaaatgaatgcaagaaaccccatgcctctgtgcaggtaaggctgtctgtccctgcccacccaccacagcaactcaaagaaggcagcaaccagaaaggttccatcggggcctttcacttccatttccaatgagtccaaatttagaccgtgctctggaacaaagtggaaaaactatcttgaagcatgtttttggagttctttaatatccactggatgactcacagttatgcatcatagaggccaggtacttttatttctataaaaggaatatgtytgagagttgggaaggccagcctagagctcaaaagcctggtgatcaggctagaaaaacaagggagaaactggctgtctccagctcaggcaaagtggttttaaggaccaaaagctggtttaaaatgtcacacttgagtttgcaatttattttccagcatagtcccatgaatctagtcaacatctaaatactactcagtagtgctaattgggtgtacctcttaaaagtctgtttaacaagctattcaaaacactctg

SEQ ID NO: 923111 - DNA, 634 bp, Homo sapiens
ataccctgaccactgtgggcacatgtcattaggacttcctgagattgtgtcacggttgtgtccttaacctggtcaaagtagactttctaaattgactgagacctgtcacagatattttgggctaacatcgccaatctccttaatctggggttcccctgagtaccttccatgggccatagaacactgggctgggtgggcttaccccacatactctcaaggcacatcaaacccaagagccttcaggttctgctcatgctgactcctgctttcagaaatctttaggccagaagaggtgctggtctctgtgttttgtgtgagcccacactctgagggccatgtccaataactcccttcccttgctctgctttgagagggctttggctccactgcaggttctacactgtgggatgagctcgcagcctctgtccttgcaggtggcaccagcctttccaggtgattccagtagactccccttycccttggcttagggaagaggaagaactttcatgggaagggataacagtataacagtttacacctcaaacactgcactctccccagggataacccctttccttccccaccccgtcatacacagatgtgaggcaaaggggatggggtgggggcgggggaa

SEQ ID NO: 923112 - DNA, 580 bp, Homo sapiens
ggatgaggtttttgtgaggacttttctgtagatgatgttgctgttgctttctgtttgtttgtttttctctcaatggtcagttccctcttctgcaaggctgctgcagtttgctggggattcacttcaggccctattcatctggttgcttcactcctgcacctggagatgtcactcaagggggctagaaaacagcaaagatgggtgcctactcctgcccctgggatctctgaccttgaggggcactgacctgatgccagtaagaacattcctatayaggatgtctgacagcccctgttagagggtctcacccagttgggtggcatgggtagtaggacccatttaatgaagcactttgttccttggtggaggggttgtgatttgctaggtggaaacccgctcgtctgggctacacagatttctcaggactagcaggaggaaagactaagtctgctggtctgcagagactgcagccaccctacctctaagggttctggtccagcgagatcagagtccagctcgagcccctggctggagttgttggagttcatgcagggaggccccgcccagtgaagagggatgg

SEQ ID NO: 923113 - DNA, 580 bp, Homo sapiens
ggatgaggtttttgtgaggacttttctgtagatgatgttgctgttgctttctgtttgtttgtttttctctcaatggtcagttccctcttctgcaaggctgctgcagtttgctggggattcacttcaggccctattcatctggttgcttcactcctgcacctggagatgtcactcaagggggctagaaaacagcaaagatgggtgcctactcctgcccctgggatctctgaccttgaggggcactgacctgatgccagtaagaacattcctatacaggatgtctgacagcccctgttasagggtctcacccagttgggtggcatgggtagtaggacccatttaatgaagcactttgttccttggtggaggggttgtgatttgctaggtggaaacccgctcgtctgggctacacagatttctcaggactagcaggaggaaagactaagtctgctggtctgcagagactgcagccaccctacctctaagggttctggtccagcgagatcagagtccagctcgagcccctggctggagttgttggagttcatgcagggaggccccgcccagtgaagagggatgg

SEQ ID NO: 923114 - DNA, 580 bp, Homo sapiens
ggatgaggtttttgtgaggacttttctgtagatgatgttgctgttgctttctgtttgtttgtttttctctcaatggtcagttccctcttctgcaaggctgctgcagtttgctggggattcacttcaggccctattcatctggttgcttcactcctgcacctggagatgtcactcaagggggctagaaaacagcaaagatgggtgcctactcctgcccctgggatctctgaccttgaggggcactgacctgatgccagtaagaacattcctatacaggatgtctgacagcccctgttagagggtctcacccagttgggtggcatgggtagtaggacccatttaatgaagcactttgttccttggtggaggggttgtgatttgctaggtggaaacccgctcgtctgggctacacagattyctcaggactagcaggaggaaagactaagtctgctggtctgcagagactgcagccaccctacctctaagggttctggtccagcgagatcagagtccagctcgagcccctggctggagttgttggagttcatgcagggaggccccgcccagtgaagagggatgg

SEQ ID NO: 923115 - DNA, 486 bp, Homo sapiens
tttttgtatttttagtagaaacgggtttcgccatgttagccaggctggtctcgaactcctgacctcaggagatccacctgccttggcctcccaaagtgctgggattacaggcattggccaccgtgcctggcctgctttttttttttctaagttaagcatcctctgcccctcttgggccagacaccagagagttagtccctctgtaccttttactatttaggtttctttattgaaatttataagacctccagttcagtgttgaataagtgataaatgcaggcagacttttgtsttgttcttgattctaaagacaatgcattctcttcctgccttctgtcctccctttttctctctgcctttctctgtctttctcactctcattctctctgtctctctcctagctctctttcttattctctatttttatcattccctctacccagggtcttttattaatgaatatcctgcaagattgaggaaggagac

SEQ ID NO: 923116 - DNA, 636 bp, Homo sapiens
ttcttgtttttgtcaggtttgtcaagatggccgatacacaacagctccagtctacgcatcccagcatgagcgatgcagaagacgggtgatttctgcatttccaactgaggtaccgggttcatctcactgaagcttgtcggacagtgggctcaggacagtgggtgaagcccactgagcatgagccgaagcagggcgaggcatcgcctcacccaggaagtgcaagggatcagagaattccctttcctagccamggaaagctgtgacagatggcacctggaaaattaggtcactcccaccttaatattgcgcttttccagtggtcttagcaaacaacacaccaggagtttatatcccgcgcctggcccagagggtcccacacccacagagtctagctcattgctagcagagcagcctgagatcgaactgcaaggcagcagcaaggctgggagaggagcacccaccattgctgaggcttgagtaggtaaacaaagcggctaggaaacttgaactgggtggagcccactgcagctcaaggaggcctgcctgcctctgtagactccacctctgcagccagggcacagctgaacaaaaggcagcagaaacctctgcagacttaaatgtccctgtctgacagtt

SEQ ID NO: 923117 - DNA, 790 bp, Homo sapiens
ccagcaccttgggaggcagaggtaggtggatcacctgaggtgaagagattgagaccagcctggccaacatggtgaaactccacctctactaaaaatacaaaaattagctggatgtggtggcagacacctgtaattccagctactcgggaggctgaggcaggygaatcgcttgaacctgggagatagagtttgcaatgagctgaaattgcaccactgcactccaacctgggtgacaagagcgaaactctgtgtcaaaaaaaaaatgtagataacttttttcactgttaggaaaatcaattgtagatattagccatgaatcttttaatctgaatatgagtgtattggggtaggagtaagtctcgttctaattaatttcactaagtaactgtaaataactaggcaaatattaagttccaggcactgggaggtgccaggagtaaaatggaaagcaaagcagacacatggctgcttcactagggagggaagttaacttcaattagcggtcacctaatcaagtgtaataaactgaagcaggtgctacaagggaagaaatgttatctctgagatggaataacaaaggaacatactctaggctacaggcaaggccacaattaattttctgttgttgttcaacaagttccctccagcttaggcaagacccatgacagtcgggtggttgcaaggcaattctgagagacttcacagatgaagggcatgttcccccacaagatctctctcacttcagatgccagccacaactgcaggggctcccagccacctgcattttgga

SEQ ID NO: 923118 - DNA, 790 bp, Homo sapiens
ccagcaccttgggaggcagaggtaggtggatcacctgaggtgaagagattgagaccagcctggccaacatggtgaaactccacctctactaaaaatacaaaaattagctggatgtggtggcagacacctgtaattccagctactcgggaggctgaggcaggtgaatcgcttgaacctgggagatagagkttgcaatgagctgaaattgcaccactgcactccaacctgggtgacaagagcgaaactctgtgtcaaaaaaaaaatgtagataacttttttcactgttaggaaaatcaattgtagatattagccatgaatcttttaatctgaatatgagtgtattggggtaggagtaagtctcgttctaattaatttcactaagtaactgtaaataactaggcaaatattaagttccaggcactgggaggtgccaggagtaaaatggaaagcaaagcagacacatggctgcttcactagggagggaagttaacttcaattagcggtcacctaatcaagtgtaataaactgaagcaggtgctacaagggaagaaatgttatctctgagatggaataacaaaggaacatactctaggctacaggcaaggccacaattaattttctgttgttgttcaacaagttccctccagcttaggcaagacccatgacagtcgggtggttgcaaggcaattctgagagacttcacagatgaagggcatgttcccccacaagatctctctcacttcagatgccagccacaactgcaggggctcccagccacctgcattttgga

SEQ ID NO: 923119 - DNA, 790 bp, Homo sapiens
ccagcaccttgggaggcagaggtaggtggatcacctgaggtgaagagattgagaccagcctggccaacatggtgaaactccacctctactaaaaatacaaaaattagctggatgtggtggcagacacctgtaattccagctactcgggaggctgaggcaggtgaatcgcttgaacctgggagatagagtttgcaatgagctgaaattgcaccactgcactccaacctgggtgacaagagcgaaactctgtgtcaaaaaaaaaatgtagataacttttttcactgttaggaaaatcaattgtagatattagccatgaatcttttaatctgratatgagtgtattggggtaggagtaagtctcgttctaattaatttcactaagtaactgtaaataactaggcaaatattaagttccaggcactgggaggtgccaggagtaaaatggaaagcaaagcagacacatggctgcttcactagggagggaagttaacttcaattagcggtcacctaatcaagtgtaataaactgaagcaggtgctacaagggaagaaatgttatctctgagatggaataacaaaggaacatactctaggctacaggcaaggccacaattaattttctgttgttgttcaacaagttccctccagcttaggcaagacccatgacagtcgggtggttgcaaggcaattctgagagacttcacagatgaagggcatgttcccccacaagatctctctcacttcagatgccagccacaactgcaggggctcccagccacctgcattttgga

SEQ ID NO: 923120 - DNA, 752 bp, Homo sapiens
cttcactaccctgctggctgagcctgggaggggatagcactcccactccatctgtccctgggccagggccccaggcttcttggactggcaccaacagattccctctccctatgtttcaggacacggatgttgctgatgggtgcagagagacccccacgaaaactctggaaggagatggggaccaagagagactcatctccaaaccmagggtggggagaggcaggcagagccagagggagaggctctcttggccaaaatttcaatccataaagagcaagcgggggccgggaccccagaggtcacacagctcgtcagaggcctacgaacctagggacgcacatgacgtgtcccctacaagcacagacacagaggcccagctcacggtggagcgccaagagcagaaggcagggccgggcagccagaggaggcggaagttcctcaacctcagattcaggacaggctcgggacagggcccttcatcgacaggacagccaggcagggggttccagagtggggtgggccgtgctggggtcctggaagagttggggccctggggtgatagcctcgaggagactggggctgccacaggcagcaggagagaggagagggcagaacaggatcgagaagtgatgcctgctcagagcatgccattgcccacagagctcggtgaccctagactttgcgagggaacccctcaggaagggggactcagggcagccaggctccatggaaagaccctggaggggcaggca

SEQ ID NO: 923121 - DNA, 752 bp, Homo sapiens
cttcactaccctgctggctgagcctgggaggggatagcactcccactccatctgtccctgggccagggccccaggcttcttggactggcaccaacagattccctctccctatgtttcaggacacggatgttgctgatgggtgcagagagacccccacgaaaactctggaaggagatggggaccaagagagactcatctccaaaccaagggtggggagaggcaggcagagccagagggagaggctctcttggccaaaatttcaatccataaagagcaagcgggggccgggaccccagaggtcacacagctcgtcagaggcctacgaaccyagggacgcacatgacgtgtcccctacaagcacagacacagaggcccagctcacggtggagcgccaagagcagaaggcagggccgggcagccagaggaggcggaagttcctcaacctcagattcaggacaggctcgggacagggcccttcatcgacaggacagccaggcagggggttccagagtggggtgggccgtgctggggtcctggaagagttggggccctggggtgatagcctcgaggagactggggctgccacaggcagcaggagagaggagagggcagaacaggatcgagaagtgatgcctgctcagagcatgccattgcccacagagctcggtgaccctagactttgcgagggaacccctcaggaagggggactcagggcagccaggctccatggaaagaccctggaggggcaggca

SEQ ID NO: 923122 - DNA, 734 bp, Homo sapiens
cagaaattcttgagtttccccctgatgatagccaagaggcaaccacaccactggcagatgaaggcagggctccaaaagacaaaccagaaagtaaaaaatctggtctgctctggttttggcttccaaacattgggttttcctcttctgttgatgagacaggtgttgattccaaaaatgacgtccagagatctgctcccattcaaacacagcctgaggcacgaccagaggcagaactgcctaaaaaacaggagaaggcaggctggttccgatttcccaaattagggttctcctcatctcctaccaagaaaagcaaaagcaccgaagatggggcagagctggaagaacaaaaacttcaagaagaaacaatcaygttttttgatgcccgagaaagtttctcccctgaagagaaggaagagggtgaactgatcgggcctgtgggcactgggctggactccagagtgatggtgacatccgcggcaagaacagagttaatcctgcccgagcaggacagaaaagctgacgatgaaagcaaagggtcaggcctgggaccaaatgaaggctgagaggtatggctcatcagtacaagagagatgcaaaaaactaagttggaaagtaaaggctacacacacatatggagcaccccatcccacagcacattacatccacctcacttcacagaacggagaacagagcagaaatgaccagaacacctttgtcaccatcacacagccctc

SEQ ID NO: 923123 - DNA, 613 bp, Homo sapiens
actggctgtagagatattggaattgttattttgaaaacatgttaaatatagggtaagctaaagctagtaattacattaaagttgttaggagccaaaattttccatataagagaaatgacatacaagtacaaaaccaaagaaattaagaaaaactctttttttttttttttttttttttgagacatggtctctgctctgtcaccaaggctggagtgcagtggtgccatctcgactcactgcagcctagacctcatgggctcaagcaatcctcctacctcaaactcccacataggtgggactacaggtgtgcaccaccacacccaactaattttttgtattttttgtaaaaattaggttttgctatgtttcccaggctgctctcaaactcttgagctcaagcgatctacccaccttggcctcccaaagtgctgggattacaggcgtaagccattgttcccagcctaaggaaawtttttaatgttaaatttgaattggaactatcaataggaactcatgatttaacctgggtttctaaatgccatttccccactttaaagacccatggactcctcagtaagtagctgagtccaggtctggtgcaggaaatgtgtaa

SEQ ID NO: 923124 - DNA, 729 bp, Homo sapiens
agttctgggcagagctggagctgctggtgatgccaggctgccctgtgcagatgctgaagcctctttggaaagcagcagtggcccccacatggccacgctccatgccgccccgccgcccgtgggacagagaggctggcacggtaggactggggggccccaggggggaggtggctgggatcaatggcctttcaagagctccgagccagagtggagaggtcacaagcagccttgagggggcctccaagcagaggtgccctgactggtgggcaagggaagcctycctgggctgctccagaccttccctttatgcccctgctggaggtgctggggacagccagttaccacgagccacagcattgcagagtgggctgcaggccccctgacccctgccaccaccctgggctgggggccttctctgtatcaccctcccctctcccttgtccaccctagtcccaccccagtggcagcccaggtccgggaagtcaagacggtctctgtctcagcactggaggggccatcgtggcccagccagaagtcaagccccgccctgtctggtgaccctgcgggtgctgccccatccagttgcaggtcctgggagcgctggctgtgctgtggctgggctccgtggctcttatctgcctcctgtggcaagtgccccgtcctcccacctggggccaggtgcagcccaaggacgtgcccaggtcctgggagcatggctccagcccagct

SEQ ID NO: 923125 - DNA, 705 bp, Homo sapiens
catcactgttatttttgtctttagctttaaaggaaagagttgttggtgccattgcaggtgccccctccaggcctgactggctccgccaggcactaacctgccataaccctttgtgctggcctgcggccaggcagaggaagagaggtcgactgtggggtcatttggtgccaaacatggaggtgggcaggctcacctgttcctgggactgtctgagatggcagggcacttgccctggtggctcccacctgaccccaggccttttataggcaggagccccactgcttccagcctctggtgccaacacagttgccaaacccattgagcttggggctgcccygtggaggcctcctgggtatggaccaggggcttgttgagagctgagccatgcacacaggtgcagacaccccccaactcccatgcacacggctagtccaggcgcctccacgctgcaccgtgaggactgcagggcatgtccccgtgaggggctatgggcctctgtaggtgggcttccaaggtcctgggtgcagccgggtgcatggcagcccttctggcgggggtgagcgcacgaccaaagtcactggaagccgggtttccggaagctcgcagcttggcctgcaccacacgccctccccttttggcttcacgccatcaggcctcaagtgggcatgggggcagggacgggcccaggaactgttgttttctcag

SEQ ID NO: 923126 - DNA, 517 bp, Homo sapiens
cagccatctgccgtaccatctatccactcaagaagggagctcccagcctggtccctgccctcagggtgctctcactcaagaaaaggcactggcacccagtggatttactctgaatgggctactcacctggcaatctccgcaatctctgccgtctgcacgatgaaaccataagggtcaggctcctcctcmtcgtcgtccgtgtcccgggggccgggggcccgggaacgagcccggctggagctgccagccctcggggtctgagtggctgttgaggtgtgggagcgtgtgtgtttgggggagccgtggcgggagccgtactcctcctcagaggtggacgtgtaatccgagccctgctgccggcgcctcgtgtcttggtgagtgaattggttttagaagcaagaacagaacaaagcagcactcagcaccctgtggcagtcccagggtccctctgggagagggctcagtgctgcagggctgggcagcgtcgaggctggtgcccccacccagtagcccttca

SEQ ID NO: 923127 - DNA, 462 bp, Homo sapiens
actcagcctgcagctctcaaccccttgggaaggggagcacacaggtaagcgagtgcagaccctggagcaagtgcttctgggcaccagtaggagccaaactctgtgcagcctcacagcagcatctagtggggagtacctgcaaccctcaaagccccagaaggcatgtgttacagtgctcttgcagctttgccatccacagacagcttaagtgtttaacagytcagtgggccctctgcctttttgcatgaggcagttgctctctgtcagcaggggcagagggtcagtgtgacagccttctgtatcccaagctcttgtccagcacccaggaaaaatcaggtggcccaaatgaattgaagggtagtaaatgtggagagtttattgctgatgaaagtgcctctcagtgggaggaggagctgtaaaggggatggagtgggaaggtatttttcttctgaagtatggtca

SEQ ID NO: 923128 - DNA, 750 bp, Homo sapiens
gatgatctttctattgttgaggtaaatttccttctctattttgtttaggatttcgactagatgttgaattttgtgaaatgctttttctccatctattgagatgatgtggttttcatcattcattctgttcaagtggtatatcacactgatttgcttgaatatgttgaaccatccttgcatcccagaaatatgtggcattgggatatctacaatcatttttatatcctcttgaatacaggttgccagtacaaggggttttcaagaagttcatggaaaaacaygtattataagaaaattgtgcatgaatttcacactttttgcacccaaatacactggttcaagtctgttataacgtgtctgaacaggctctagtttgaggcactcagagggaaaagacatgagtttgaaaagagactctattgaagcaatataaattctgctaaaattgaaacaagaagaaacattaaatttatgataagcccaggtgcagtggctcaggcctgtaatcccagcacttttggaggctgagagaggtgagtcatgtgagcctaggtattcaagaccagcctgggcaacacggtgaaacttttttctctgcacccccttctttacaaaaaaacacaaaaattagctggatatggtggcacatgcctgcaggctcagctactgttgagtctacagtgggaggatgtcttgagcctgggagtttgaggctgcagtgagctgtgatcatgccactgcagtccagag

SEQ ID NO: 923129 - DNA, 727 bp, Homo sapiens
agaccccaccccagatccttcccttactcatgttattcctcctccttacaaccctgactcttgggaattattgtctcatgagcctgctcattaccacctaagtacccttccttaaaaggacttaaatgtgaggtagagcaatgtaaaaaggatattcagagcttccctttcccttctacctctaaggaatcagctcccacsctcttcccgttaagagaggtgcccctaggacggggagccattggcttcacgaatttccccttaacgagcttggaagttcaaaatttgaaaaaagaactcaagccactgttagatgacccttatggagtggtggatctaattgtccaatccagttgcatacttgagcctagttaacgtccatcctggacatcctcttctcaggggaagaaaggagcatgattcatagggctgctatggtaatttgggaacgtgaacattctcctggtcaaaacgttctctccacagaccaaaaattccccacctaagaccactgaagggacaataacaatgcagctcaccaggaaaataggcaagaccttagggaaatgataataaaaggaatttgggaatcagtaccccaaacacaaaatctttcctgagcattcaacatacaacaaaggaaagatgaagggcctatgggattcttagactgactaaaagagcaaatgagaaaatatgtgggcctagatttagaagatccccttga

SEQ ID NO: 923130 - DNA, 722 bp, Homo sapiens
ataaagtcctgtaccacacttcctccctccaacaacccctgcaaattatcaggaaaaaaaggagactataactgaactacatttgattaatatgttaatcataaaaattgctattttaatgagcttgtcttacttaaggtaygatgcttccatgttccaagattttatagttttcttcaaatgaatcaatttcttttcttgctagagatgaacggtgggggaacatatttcattcacaaggtaacaaactcatatgaagaaagcgataaaatcttaagtgttcaacactaattgctgttgcatctgatacgttaatgtgttcatgaagctattctccatgaatttgctgatgcaatggattattctttctgtgctggaatatactctgtttaatcataaagtattattcttttgatacaatggtaaaattcatttaacattttatttcaaatttttacatctgtagtaataagcaaaattggcctaaatgttttattttgcttttgtagtctctttctcagaactttctttttcaatagtgggtatagtataagtaagtggaactagctgtctttttctaaatcaactgtgaacccatttgcagtaatctatctgtgaacctgttggtaattttatcagttgtacacttttacttatttttgtaatacctctatggtaactgttctaaatcaagttctcacttctgtcaattttagtaatct

SEQ ID NO: 923131 - DNA, 612 bp, Homo sapiens
tataatgataaagtgttcaattcaagaagaagacttaactatccaaaatatatacatgcctaacagtgtagcacccagattcctaaaacaagtttttcttgacctatgaaaatatttagacagcacacaataatagtgagggactttaataattgagacagaaaactaacaaagaaattgtgaacttaaacttgtcagttgacaaatgggacctaatagacatctacagaataccacacctaacaaccacagagtatacagacttctcatctgcacatggaacttattctaagattgaccacacgctcagtcataaagcaagtctcaataaattcaaaaaaaytgaaatcctaccaagaacagtctcagaccacagtgcaataaaaatggaaattaataccaagaaggtccctgaaaactacacgaaaacatggaagttaaataacatgctcctggccaggcacagtggttcatacctgtaatcccagcactttgggaggctgaggagggtggatcatgaggtcagaagttcaagaccagcctggccaacgtagtgaaaccctgtctctactaaaaatacaaaaattagcggggtatggtggcacacacctg

SEQ ID NO: 923132 - DNA, 612 bp, Homo sapiens
tataatgataaagtgttcaattcaagaagaagacttaactatccaaaatatatacatgcctaacagtgtagcacccagattcctaaaacaagtttttcttgacctatgaaaatatttagacagcacacaataatagtgagggactttaataattgagacagaaaactaacaaagaaattgtgaacttaaacttgtcagttgacaaatgggacctaatagacatctacagaataccacacctaacaaccacagagtatacagacttctcatctgcacatggaacttattctaagattgaccacacgctcagtcataaagcaagtctcaataaattcaaaaaaattgaaatcctaccaagaacagtctcagaccacagtgcaataaaaatggaaattaataccaagaaggtccctgaaaactacacgaaaacatggaagttaaataacatgctcctggccaggcacagtggytcatacctgtaatcccagcactttgggaggctgaggagggtggatcatgaggtcagaagttcaagaccagcctggccaacgtagtgaaaccctgtctctactaaaaatacaaaaattagcggggtatggtggcacacacctg

SEQ ID NO: 923133 - DNA, 609 bp, Homo sapiens
tcttggggaacttggtagcaaaagctgctacttattctaggaattataatcatatgttgtgttttgctcagctttagttttcactgctgctgtttgcaatggagtcaatgcactactgaaaagactaaaacagtggtcatgtaaagaattgccttcattaaagatgtagctgtttagcctgacacagttcacaaagtcactttcttcatgttgctttacatccaacctatactcttatcagctttatagctcatccaatcaatcccccctcactgggagacatgacattctaggaataagccttcctagcaacatgggactaaatttctgaacataacaggaggcaaaagsctgggtgcggtggctcacgcccataatcccagcattttgagaggctgaggtgggtggatcacctgaggtcagtcaggagttggagatccacctgaccaacatagtgaaacaccatctctactgaaaatacaaaattagctgggcgtggtggtgcatgcctgtaatctcagctacttgggaggctgaggcaggagaattgcttgaacccaggaggcggaagttgcagtgagcaaagatcacaccactgcactccagcct

SEQ ID NO: 923134 - DNA, 630 bp, Homo sapiens
ataaaaatcacccattgtgaataacaaaaagctaaaaaaaaaagtcaattaaaaaagatgagtagataacataaggcaattttcttatcccctgatagtaaatgaataaatgatgtaattttagaaacgttatctgtaaaatgtaaattagttttggctcctgcttttgagtgcactatactaattcatagcgaamccatactcactacagctactggaaaaaagatgaattacaaaaattataaaaatcatattttaaagtcatcaacattgtctagaagaagtattagatgaaccaaattccagaaatgaaaaaaccctattttatgcaaactaattatatccatcgaatagttttcctgggcatgtttgctgattttaatgctatgcagatggtggttaagttaggtttaaaactagagcttaatgtttattttttaaagaaaatgaaataacatcttcccatgtctcactatggttatgaaacaaagaacagttatgataaagatatgcctttaactcactgtaggtcccgacctccagattttgccaggtttgaagttatctgggatatttgcctgggctgtgaggctgaagagatgggctgcaaactgaacgtgcagatattat

SEQ ID NO: 923135 - DNA, 626 bp, Homo sapiens
agtttctcagatatcttccttctaggttttatcttcggatattcacttttaaccattgacctcaatgagctaaaaaaaatccacttgtggaatggacaaaaacagtgtttccaaactcttgaatccaaagaaagttttgtctctgtgagatgaatgtgcaaatcacaaagcagtttctcagaaagcttctttctagtttttatctgaagatatttccttttttcactatagttctcaacatgctcccaaatatgccatcaaatattctgcaaaaacagtgtttctaactgatgaatgaaaaaaagtttacctctatgagttgaatgcattacatcacaaagcggtttctcaggtagctttcttcttgtttttaccctgggatattcattttttcrcctgtggcctccatgagctcccaaatgtccattccaagaatttccaaaaagagtttccaaactcctgaatccaaagaaagatttaattctgtgagatgaatgcacacacaatgaaatagtttctcagaaagcttctttgtagtttttacctgaagatatttcttttttcaccataggcctcaatgcactcccacatatcccttcgaagattctaccaaaacagtgtttcca

SEQ ID NO: 923136 - DNA, 542 bp, Homo sapiens
acggtcgtagaatctgcaaaggtatatttatgaactcattagggcctatggtgagaaatcaaatatcccaggaaaaaaaaactagaagaaatcagtctgagaaaccactttgtgatgtgtgcattcatctcacatagataaaactttctattcattcatcattttggaaacaacgttttcataaaatctgcaaaggtgtatcttggagtgctttgaggcctatggtgaaaaaggaaatatctccagataaaaattagaaagaagctttctgagaaactactttgtggtatgtgcattcatctcacagagttaaacctttctttggattcagcagtttgaaaaactgttgtagaatcagcaaagcgatatttgggagctcattgaggccaatggcaaaaaacccaakttaccatgataaaaacttgaagaaagctatctgagatactgctttgtgttgtgtgcattcacctcgaacagttaatgctttcttttgattcagcaatctgtaaacactgttttggcagaatccacagagggatatt

SEQ ID NO: 923137 - DNA, 592 bp, Homo sapiens
tgagaaataaagggacagagtacaaacgagagaaattttaaagctgggcatccgggggagacatcacatatcagtaggttctatgatgcctcccaagctgcaaaaccagcaagttttagggagtttcaaaaggggaggaaatgtgtgaatatgtgtgggtcacaaacaacaagtacttcacaaggtaatagagtatcacaaggcaagtggaggcagggcgagatcacaggaccacaggactggggcaaaattaaaattgctaatgaagtttcaggcaccattgtcgttgataacatcttatcaggagacagggttttgagagcaaccagtctgaccaaaatttattaggcgggaawttcttctacctaatatgcctgggagcactatgggagactggggtctattgcacccctacagtctacagaccataaaagatggcctcacctggggggggcgtctatagacctaaacccaagcatgtattctctttcccggggatattccttgctgagaaaaataattcagtgatatttctcccatttgcttttgaaagaagagaaatatggctctgttccacccagctccctggcag

SEQ ID NO: 923138 - DNA, 566 bp, Homo sapiens
gcagtcacagatggcagtcactgacctgctgtgatttgagagatggagagaaaaccttccactcttcttattctccctaatagcctcagtctctgccttcagttccacatttccctttggcgtaagctatgattgtcgtccaaggcccctcctagataggcaaggactcatgataccaagagtgtgatcaggggatagagatgagatgtctgggttggatgcgggagtggggtattttctaactaatggggtgcaaggggtacctgagcatgctctcaaaatgtgttataccctaaaaaatgtttttaaggtagtgtgttgatatamcagttgttaagaccatgatgctagaggcaagatcgtgagatccatagagaaggtagttgaagggtagggccttttattcacatatatgctgccttctccaccaactgatgtgatatccttttatattcgtgactccagtgaacccacgcctctgaggatttacacccttgtatttgtactcctcttgagtctgggctggcctgtgactttaatcagtgcaatgcagaagtggttcagtg

SEQ ID NO: 923139 - DNA, 684 bp, Homo sapiens
ggtggtgagtgcctgtaatcccagctactggggaggctgaggcagaagaattgcttgaacccaggaggtggaggttgcagtgagccaagatcgtgccattgcactccagcctgggcaaaagagcaagactctatctcaaaaaaaaaagaagtttaaaaaacaagatttctgttactcawcaaatactaaacatgaagtacctggtaatgcaaaggacactgtaatgtgtagttcaaaagtacttttctgcagaagtgtatagtctgattttggattatctctaaaggaaactaataaaatgcaatttaggcctgggtgtggtggctcatgcctgtaatgccaacactttgggaggctgagtggggagaatcgcttgagtctaggagtccaaaaccagcctgggcaacatgaatgaaaccctgtctcaaaagaaaaaaatcaaagtctttgtccaattatgtggatacatatatctttggaaatgaatatattggtattcgtttcatttccttctttaatcattcaatgccaagtatgtcacccctaaatatttttataaggatattatactatgccttggggttaacagtaacaaatattggaggtaaaagtctctgtaactataatgttgaattaacacattaattggttattacttattggtaatgttagttaattgattaa

SEQ ID NO: 923140 - DNA, 668 bp, Homo sapiens
gtgtgtctatgccagttatgcattctggcactagggaaatgaccacaggatgagtccaaggacccactggatccactgtaagttggacctgagctaaaactctgttaattacctaacctccataagtccctactttaactggaggaccaaaatagggatgtgtccccattcaratctgaacttgaattgtatctcccagaattgctacgtgttgtgggagggacccagggggaggtaattggatcctgggttctgtcttttccgtgctattcttgtgatagtgagtaagtctcatgagatatgatgggtttatcaggggtttctgcttttgcttcttccccagtttctcttgctgccatgatgtaagaagtgcctttcacctctcaccatgattctgagccctccccagccatgtggaactgtaagtccaattaaacctctttttcttcccagtctcaggtacatctctatcagcagtgtgaaaacagactaattcagtaaattggtaccagtagagtggggtgttgctgaaaacatacccaaaactttggaaggcagttacccagtttgaacagttggaacagtttggaaggctcagaagaagacaggaaaatgtgaccaagtttggaacctcctagagacttgttgaatggctttgacaaaaatgt

SEQ ID NO: 923141 - DNA, 668 bp, Homo sapiens
gtgtgtctatgccagttatgcattctggcactagggaaatgaccacaggatgagtccaaggacccactggatccactgtaagttggacctgagctaaaactctgttaattacctaacctccataagtccctactttaactggaggaccaaaatagggatgtgtccccattcaaatctgaacttgaattgtatctcccagaattgctacgtgttgtgggagggacccagggggaggtaattggatcctgggttctgtcttttccgtgctattcttgtgatagtgagtaagtctcatgagatatgatgggtttatcaggggtttctgcwtttgcttcttccccagtttctcttgctgccatgatgtaagaagtgcctttcacctctcaccatgattctgagccctccccagccatgtggaactgtaagtccaattaaacctctttttcttcccagtctcaggtacatctctatcagcagtgtgaaaacagactaattcagtaaattggtaccagtagagtggggtgttgctgaaaacatacccaaaactttggaaggcagttacccagtttgaacagttggaacagtttggaaggctcagaagaagacaggaaaatgtgaccaagtttggaacctcctagagacttgttgaatggctttgacaaaaatgt

SEQ ID NO: 923142 - DNA, 623 bp, Homo sapiens
aactccatctactaaaatacaaaaaaaattagccaggcatggcggtatgcccctgtaaccccagctactcaggaggctgaggcaggagaattgcttgaacccaggagccggaggttgcagtgagcccagatcatgtaactacattccagcctgggtgacagagggagactctgtctctaaaagaagaagaaraaaaaagatttttctgttgtatgagatgctgtttgatagcattttacccacagtagaacttctttcaaaattggagtaaatcctctcaaaccctgatgctgctttatcaactaagctaatggaatattctaaattctttgatgtcatttcaacattgtgcataacatctttcccaagagtagattccatcttaagaagctacttcctttgctcatccacaagaagcaactcctcattcattcaagtgttattttgagattgcagcaatccagttccatcttcaggctctacctctaattccagttctctttctatttccactacatctgcagttacttcctccactgaagtctccaaccccttcaggtcatccataagtgttggaattgactttcaaactcatgttgatgttgatattttgaccttctcct

SEQ ID NO: 923143 - DNA, 651 bp, Homo sapiens
gtaacaaatcacaggggggctctaattctttgccttctgctaaaatgaagaagggctaaacaaatttttcgctgatagatctttaaaaatacttttgcattgacagtaatttttggcacaaaagttgtataaaggtccaagaattaaacgtcataactgtaattaaaaagtgttttcattctcattcataaataaaggttttgtttgtttgttttagcgtttacctcarttaaaatgacaagaatagaagtaatatcaaactctaacttattctagcaataagtagcattcagatacagatctatgagggaaaaaccaaaacccgttaagagataattttgttcttttagatttaatgtatacttatcaatattttaatattttaattagttatattaaatgattcaataatagaatgtattttgatacattattaatacatgcttactactaatacttgtaatattacagaagaaatattttttaacatttacaacctgttaggaaattaaaaaattatatttcttttatatttttgctgcaaagaagtataacagggtcattagtagaagatttaagaataaaataaaattatattttgtgaattaaattatatgaaatttggataaaacttgatgcgaaagggaactt

SEQ ID NO: 923144 - DNA, 576 bp, Homo sapiens
gtccataggcagcttgtgttagtcagctccattagagccctgccttactgcaaggacagagggctttctgtatcccagggttcttgccttggtgtactagaagaatcagatcacctgtgggcttggagaatgaggacgaggttttattgagtggaagtagctctcagcagatgggggagccagaagggagatgcttttcccctagagttgagccacttagtggcctgggctctcctctgccctggccaaattctgcgtcattccactggttgatgacaactgtcggtgtgctcttttgtcggtgtgctcttctgccagtgtgctcccctcaacatccagccrcttctatcttcttccgccaatgtgttcctctcaacatccagcagcttgtgtatctacctgctagggtctcatagtttttataggcacaggaagggggcatggcaggccagggtggtcttgggaaatgcaacatttgggtacaaaagcaggagtgcctgtcctcacctatgtccacaggcacaggcctgggggtgaagcccaagccaggggcccaccttctcctcccaggactcc

SEQ ID NO: 923145 - DNA, 760 bp, Homo sapiens
ctacagctgatggtcatggtgttcccagagagtcaggaatatccatggaagctgagcagatgccctgttgctctcccatctcagctctttgattctgagaccatcatccgctcattgcacctttgatcacaaaagctttgaacttctgattctgctcccaatccctcgctcctttttcccctatcccctgtgccaaccaggagtttcttctatttccaggcctcctggcagaggcaggcgtgcggctgctgtcctaccagacttcactggtgtcagatggggagacctggcacgtcatgggcatctcctccttgctgcccagcctggaagcgtggaagcagcatgtgactgaagccttccagttccacttctaaccttggagctcactggtccctgcctctggggcttttctgaagmaacccacccactgtgatcaatagggagagaaaatccacattcttgggctgaacgcgggcctctgacactgcttacactgcactctgaccctgtagtacagcaataaccgtctaataaagagcctacccccaactccttctgcacttttgtgtggtcattatcctaaagcgccaccagagggcgtccaaaggcagacgtagggtttggtttagactgcgggagcggagcgggtgtgggggaagatggggatgagcaaatggcttggttgagttctttgaaggtgatccctctcttgtctgccgaaggttactcagaggcacttttacaggagcaaagctcaatg

SEQ ID NO: 923146 - DNA, 590 bp, Homo sapiens
accaccatgcccagctaatttttgcattttttgtagagacagggttttactgtgttgcctaggctggtctagaactcctgggctcaagcagcacgcccccatcagcctcctaaagtgctgggattacaggtatgagccgagaaggctgactgttttaaaaaatatttcctggatataagtcctttgtcagatacgtgccttgcaaatatttttttctagtctgtacttattttttcatcttctaattagagcttttcacagaggaaaagttttttattttgatgatgttcaatgtatatacttttaaagttttwtggataatggttttggtattagtcctaaaaacccttctccacgcactagttcctaaagaatcccttacattttttcttaagttttatacttttacatttacatttaaacctgtgacccattttgagttaattttttagtaaggtatgaaatttatttttccttttctttttgcctatggttatctcatggctcctgcaccattggttgaaaaaactattttattacattgaattgtttttgctgcagcattgtgtagttttcaacgtatctatctt

SEQ ID NO: 923147 - DNA, 681 bp, Homo sapiens
tcggggcaagagctacccgctgtgcccctactgctacaaccacccacccttccgagacatgaagaaaggtgagtgcagccactccctcctgtccacaggtagctgcagtctcttttcagtgccaacccctgccttgcaccaggctggactctgaggggacccctcaccctggcctttcctgcactcattggcactgagacgagagaccctggatgtagctggggcactgcttaggcctcagccagtggtgccaccctctctctgtgtcagaatcgagcaggcaaccctagtccaccctcaggacctgggcacaggtgtgcagtgctccctctggagctgagtgagcaagaggatgcagcagtcgggggacccacccggtgagcgggcacccccagtcagcgtccaccaccgtcctccatcctcatcctcrtcctcattactggaggagggagcgcatgtccaggcaggcaggacagagcaccgagccagaccaggaatcagcgggagtgaggcatctgcccacattcaccgtgtgctctgcagaaagctccctcaggcctcagtctgcacccaggctgccccgggagtgagaccccatccctgccctcctgctgccgccagagtagctgacagggtggttccatgtggcccagtgacatgagggtcatgtggcattaccag

SEQ ID NO: 923148 - DNA, 750 bp, Homo sapiens
ggtgccagcgaggggccttgaaagttgaggaggtttcaggtaagcagaaaacaggggtaatggcagccaggagccgaaacatgagcaaggctgtccccaagagcaaggccaagaagagttccttctgctgggacgagggatccaggagcttgaggcattgggagcaggcagcagagggcaggtgggcacagtgggcgtgcctttacagggctcccttctcccgccaggcatgggctgcaacgagtgtacgcacccctcctgccagcactcgctgagcatgctgggcatcggccagtgcgtggaatgtgagagcggggtgctggtgctggaccccacctcgggccccaagtggaaggtggcctgcaacaagtgcaacgtggtagcgcactgcttcgagaacgcccaccgcgtgcgggtgyccgccgacacctgcagtgtctgtgaggccgccttgcttgatgtggacttcaacaaggccaagtccccactcccgggcgatgagacgcagcacatgggctgcgtcttttgtgaccccgtcttccaggagctggtggagctgaagcatgcggcctcctgccaccccatgcaccgcggtggaccagggagaaggcagggtcgagggcggggccgggccaggaggccccctgggaagcccaaccccagacggcccaaggacaagatgtcagccctggccgcctactttgtatgatgaccctgtcctccctcacccaggctgcagtgccatgcaga

SEQ ID NO: 923149 - DNA, 826 bp, Homo sapiens
acgcacccctcctgccagcactcgctgagcatgctgggcatcggccagtgcgtggaatgtgagagcggggtgctggtgctggaccccacctcgggccccaagtggaaggtggcctgcaacaagtgcaacgtggtagcgcactgcttcgagaacgcccaccgcgtgcgggtgtccgccgacacctgcagtgtctgtgaggccgccttgcttgatgtggacttcaacaaggccaagtccccactcccgggcgatgagrcgcagcacatgggctgcgtcttttgtgaccccgtcttccaggagctggtggagctgaagcatgcggcctcctgccaccccatgcaccgcggtggaccagggagaaggcagggtcgagggcggggccgggccaggaggccccctgggaagcccaaccccagacggcccaaggacaagatgtcagccctggccgcctactttgtatgatgaccctgtcctccctcacccaggctgcagtgccatgcagacacctcatggcacttcaaactattaaaatgcattttatcttatccagagctggggcccctttgctggtgcagcgatgtcagagcgttaccgtgtccctgggcacctgtggggccctctctccctctccgaaacccaatacgtctcccttcagcctgcatacacgtgcccagagtgctccctgctatccctacaccctggcagtacgggcagggatgccccaaccctgaagccctggggaatagacccagtttgcactcacaccccatctcaatccgtgctgctgatggtagctgtgtgcacaagcagtggccctgatgcctta

SEQ ID NO: 923150 - DNA, 796 bp, Homo sapiens
ggaccccacctcgggccccaagtggaaggtggcctgcaacaagtgcaacgtggtagcgcactgcttcgagaacgcccaccgcgtgcgggtgtccgccgacacctgcagtgtctgtgaggccgccttgcttgatgtggacttcaacaaggccaagtccccactcccgggcgatgagacgcagcacatgggctgcgtcttttgtgaccccgtcttccaggagctggtggagctgaagcatgcggcctcctgccaccccatgcaccgcggtggaccagggagaaggcagggtcgagggcggggccgggccaggaggccccctgggaagcccaaccccagacggcccaaggacaagatgtcagccctggccgcctactttgtatgatgaccctgtcctccctcacccaggctgcagtgccatgcagacacctcatggcacttcaaactattaaaatgcattttatcttatccagagctggggcccctttgctggtgcagcgatgtcagagcgttaccgtgtccctgggcacctgtggggccctctytccctctccgaaacccaatacgtctcccttcagcctgcatacacgtgcccagagtgctccctgctatccctacaccctggcagtacgggcagggatgccccaaccctgaagccctggggaatagacccagtttgcactcacaccccatctcaatccgtgctgctgatggtagctgtgtgcacaagcagtggccctgatgccttaaggaaggcggccttgacagctgtggctccggcaggagaggagtctagtgg

SEQ ID NO: 923151 - DNA, 665 bp, Homo sapiens
tcctttattttcctctgcagttgtcccttgtgtgtgaccctccttcaaggcccttggcttccgcagcttgattctgcactccgagtccattcaccttctcccatccaatagcatccaaccccgctgctactgctgccaacctggccttgggagcaatgaggacraggaagggacaagaccccttttaggccagaactgccttcagatcagccacgctccatgggactgtacctctgccctggaggctggagaggtcagtggctgcagactgtctcaaggagcccctggccctgcccacctagccaggggtgcagccttgccagagaagcagagaagcgtctgtggctgggtgggtgatattgaaagattcctttcaccagggtggaagccaggatctgaggcgtgatggaatgtggacagtgaggcagtgacagcgccacaaggcaggagtcatctccaggcacgtccttggcctggagcccatagggacaagctcctggtggtgcctcactttgccatcctctctaagccgcagaccttgaatggaatcagtgctcaagagtctaattgggcccactctgaggatgcctgcgggaatatcagcttttaccgcaccacactgcactttacagtgtgggagggcctgccccacgcaccacctcacc

SEQ ID NO: 923152 - DNA, 665 bp, Homo sapiens
tcctttattttcctctgcagttgtcccttgtgtgtgaccctccttcaaggcccttggcttccgcagcttgattctgcactccgagtccattcaccttctcccatccaatagcatccaaccccgctgctactgctgccaacctggccttgggagcaatgaggacgaggaagggacaagaccccttttaggccagaactgccttcagatcagccacgctccatgggactgtacctctgccctggaggctggagaggtcagtggctgcagactgtctcaaggagcccctggccctgcccacctagccaggggtgcagccttgccagagaagcagagaagcgtctgtggctgggtgggtgatattgaaagattcctttcaccagggtggaagccaggatctgaggcgtgatggaatgtggacagtgaggcagtgacagcgccacaaggcaggagtcatctccaggcaygtccttggcctggagcccatagggacaagctcctggtggtgcctcactttgccatcctctctaagccgcagaccttgaatggaatcagtgctcaagagtctaattgggcccactctgaggatgcctgcgggaatatcagcttttaccgcaccacactgcactttacagtgtgggagggcctgccccacgcaccacctcacc

SEQ ID NO: 923153 - DNA, 667 bp, Homo sapiens
actcagccccctatcctcattcattccgcagctccatctcctgcccagaccatgttcttgcaggccctcaggcctcttgacctccgtggaacacaagtcgctgtggaaacagagcccattgcccatcccctgcctgactcttccatccccatcagggtaattaactgtaccacgagccttctagttgctcagaatagaaacttcaacactgtccctgcccctccatttatactgccygactctgtctgctcctgtttgtcaccatggccctgcccagcccaggtcttagactctctcctttagacagtcgtccccttcttgccagcccaccctccacaccagggtcagagaggcctaaaagccccatctgatcatgccatgtccctcttcaaacagaccaaaggcggccaggtgtggcggctcacgccattatcccagggctttgggaggctgagatgggaggatcacttgagggcaggagttcaagaccagcctggacaacatagcaaaaccccacctgtacaaaaaaatttacagattagctggacatggtgatgtctgtagccctaactactgcctgtagccctaactactctggagtctgaggtgagaggatctcttgagcccaggggtttgaggctgcagcgagccatgattgcacagctgt

SEQ ID NO: 923154 - DNA, 724 bp, Homo sapiens
ggcagtttctgattggttaagcttaaatttcattttactttttacattgaattgggttttggttggcttaggtagaaactcaaggtgctggagacatcttagcctcatgacttcccaattaactgtcttaacggtaccattgcattgatattcgtaagtgagattggtcagtagtttaatttttagagacatcattttcaatttatgttttmgaatttggtaatgaaatagccctgtaaattttagtctgtctcgtagaactcaaacttgaatctagtatgacttgggatgaataagctggctgaatgatggattctatcctatcctaggtggataggatagttttccactgaagtggatcacaacccttccaggttgtctctcgtctttcattgttttgagctactttagaagactggtgatagcactgcaacataattctcgtctctagacatgtacattttgtcctattcaattggcttctctccctactggaagccaattttacctccatttgcatattcatttcaatattctggatcttattttggattctccctagaactgattttaacaccttctcagtttcctcactaaccagttaaataacatctttaacatgtgtttatttattgattttgcccaggctctggtgtggaatggtgcactctggagtggagtggtacaatcttggctcactctgttgcccaggctggaatggagt

SEQ ID NO: 923155 - DNA, 692 bp, Homo sapiens
aaggtccatttccccacagtctcaccaggctgcaggattcttcctgtcaggtaagaagcctgtcttggggcaattgttaagtttgcttttctgttacagagtgagtttgagcgtgttttcaaaagctgaagatcatttacacagcctttcctgcaaacactgtttttttcctttgcctgtttttcttatcagtttataggttccttgtatatgtgaaggaggttggttccttgtctgtgatgatttgcaaatrtttttccatgcatcttttatttttgtttatgggcttttgccacatggaggctttgtgtttttctgtagttgagtagtctttttgtggcttctggtttggaaagcacatagagacaccaggacttgatgattgtaacagtcaggggcagctacattccttggcctttcactgcggctcacggtctggtatgggccccctgtacgtcctctccccattgtacagaggagaaaactgaggctcagtcacttgcccagagcacaccgccaaagtcacagatagtctctgccactcccctgcctccaccaccgtgggggaatttggcacctgctccctagtgggctctcctccccaggatatgcagtcagatgaaatgtggccaagtcaggattcgtgctgggcccactcccacctgctgcctgcacacctacaggctcagcat

SEQ ID NO: 923156 - DNA, 692 bp, Homo sapiens
aaggtccatttccccacagtctcaccaggctgcaggattcttcctgtcaggtaagaagcctgtcttggggcaattgttaagtttgcttttctgttacagagtgagtttgagcgtgttttcaaaagctgaagatcatttacacagcctttcctgcaaacactgtttttttcctttgcctgtttttcttatcagtttataggttccttgtatatgtgaaggaggttggttccttgtctgtgatgatttgcaaatgtttttccatgcatcttttatttttgtttatgggcttttgccacatggaggctttgtgtttttctgtagttgagtagtctttttgtggcttctggtttggaaagcacatagagacaccaggacttgatgattgtaacagtcaggggcagctacattccttggcctttcactgcggctcacggtctggtatgggccccctgtacgtcctctccccattgtacagaggagaaaactgaggctyagtcacttgcccagagcacaccgccaaagtcacagatagtctctgccactcccctgcctccaccaccgtgggggaatttggcacctgctccctagtgggctctcctccccaggatatgcagtcagatgaaatgtggccaagtcaggattcgtgctgggcccactcccacctgctgcctgcacacctacaggctcagcat

SEQ ID NO: 923157 - DNA, 841 bp, Homo sapiens
gaactgagcagttacagtctgatagtctcccccaagactgcttctcttaagaggcagaagttgaagactggtcctgagtatttagtagggtgggcaatgactgttttttctggtgccctccacccaagggttcatccactctgtatcccctcagccagttggagatgacagggtttggtatctggtctttatccatttctttgccgtatataagagcctgctgtagagggaaataagctcagccatttcaaatgcaaaagagcatacaggattaaacatgccaccagaagcaaatacgttagaaaagaggaacacagaacttaaaattagcctaaataagcatattaacaggggtaaagggtgctttaaactaaaatgagaaaataagagaattaagcagaaatatgcatacagaatagctgaatcaattaaaaaaaccactgctatggggaaaatggatagagcaaggaacaaatgagtgcatttgaagaagatgttgagtaaacaagctggaarcgagggtgacaaactgtcccagtctgcctgagactgcggggttttgaagacatgggactgtcagtgctaaaaccaggagagacccgggcaaaccaggacagctggtcacttttgaatagacataaagaatataaaagcaaaactaagagcaatggaggaaaagaagtgcaaacatccagataattgtgatcccagaaggacagggaaatgaaacagagaagaaatacttgaagaaatcatggagatacctttcgtagattaaaaagaaaaagcgaggcttctggtttctggtctgaaatataagaagcttggaagtcatcactcc

SEQ ID NO: 923158 - DNA, 685 bp, Homo sapiens
cccgagggagaccccgagtgttttcccagctggtgggaccgtgtcaggagagcttcaatgtccctgactgactgcaggccccagtttctatcaggcctctttgacaggcctgagcccttccctggagggtcctagatggcctggatcaacttttctggtgctgctgctgctcatcacctcagaatggatttatcgaaattccaagttctagatgagcattgttggcccagaggagrcaatctcactgggactaagttagagaagacttgtcttccatcagcatagcataggagtaataggcttttaaattagatcaaatagaacaacccaaaagaagtaaaacaggaaaaaaaagaaatctatctttccactttttagtatcctggatgcaaaaaattaaattctttctactgctcatgcattgggtaaacccctcaccagtcagttttaggcacttattttgttttattttatctttttttaaaccttcatttcttattcaaaagtacatcccaatgtcctacagttagtactctgctatgtggaaataataagaacatctaatttgtttttcaagtattacattttttacccatgaattatccatactgggccaggtgtggtggcttatgcctgtaattccagcaatttgggaggccaaagcaggaggatcagttgagcccag

SEQ ID NO: 923159 - DNA, 685 bp, Homo sapiens
cccgagggagaccccgagtgttttcccagctggtgggaccgtgtcaggagagcttcaatgtccctgactgactgcaggccccagtttctatcaggcctctttgacaggcctgagcccttccctggagggtcctagatggcctggatcaacttttctggtgctgctgctgctcatcacctcagaatggatttatcgaaattccaagttctagatgagcattgttggcccagaggagacaatctcactgggactaagttagagaagacttstcttccatcagcatagcataggagtaataggcttttaaattagatcaaatagaacaacccaaaagaagtaaaacaggaaaaaaaagaaatctatctttccactttttagtatcctggatgcaaaaaattaaattctttctactgctcatgcattgggtaaacccctcaccagtcagttttaggcacttattttgttttattttatctttttttaaaccttcatttcttattcaaaagtacatcccaatgtcctacagttagtactctgctatgtggaaataataagaacatctaatttgtttttcaagtattacattttttacccatgaattatccatactgggccaggtgtggtggcttatgcctgtaattccagcaatttgggaggccaaagcaggaggatcagttgagcccag

SEQ ID NO: 923160 - DNA, 685 bp, Homo sapiens
cccgagggagaccccgagtgttttcccagctggtgggaccgtgtcaggagagcttcaatgtccctgactgactgcaggccccagtttctatcaggcctctttgacaggcctgagcccttccctggagggtcctagatggcctggatcaacttttctggtgctgctgctgctcatcacctcagaatggatttatcgaaattccaagttctagatgagcattgttggcccagaggagacaatctcactgggactaagttagagaagacttgtcttccatcagcatagcataggagtaataggcttttwaattagatcaaatagaacaacccaaaagaagtaaaacaggaaaaaaaagaaatctatctttccactttttagtatcctggatgcaaaaaattaaattctttctactgctcatgcattgggtaaacccctcaccagtcagttttaggcacttattttgttttattttatctttttttaaaccttcatttcttattcaaaagtacatcccaatgtcctacagttagtactctgctatgtggaaataataagaacatctaatttgtttttcaagtattacattttttacccatgaattatccatactgggccaggtgtggtggcttatgcctgtaattccagcaatttgggaggccaaagcaggaggatcagttgagcccag

SEQ ID NO: 923161 - DNA, 685 bp, Homo sapiens
cccgagggagaccccgagtgttttcccagctggtgggaccgtgtcaggagagcttcaatgtccctgactgactgcaggccccagtttctatcaggcctctttgacaggcctgagcccttccctggagggtcctagatggcctggatcaacttttctggtgctgctgctgctcatcacctcagaatggatttatcgaaattccaagttctagatgagcattgttggcccagaggagacaatctcactgggactaagttagagaagacttgtcttccatcagcatagcataggagtaataggcttttaaattagatcaaatagarcaacccaaaagaagtaaaacaggaaaaaaaagaaatctatctttccactttttagtatcctggatgcaaaaaattaaattctttctactgctcatgcattgggtaaacccctcaccagtcagttttaggcacttattttgttttattttatctttttttaaaccttcatttcttattcaaaagtacatcccaatgtcctacagttagtactctgctatgtggaaataataagaacatctaatttgtttttcaagtattacattttttacccatgaattatccatactgggccaggtgtggtggcttatgcctgtaattccagcaatttgggaggccaaagcaggaggatcagttgagcccag

SEQ ID NO: 923162 - DNA, 617 bp, Homo sapiens
actaaaaagcaaagaacatctagaaaaccgtcacagaccagaggaggccagggagacacggtgactatacatgaggtttctgaatgggactgtgacacagataaaggacatttgtgagaagctgacaaaacccacatgacgtgcagagtgcatggtccatagcaaggtggcatcactggtttctcgatgcacgatgataacataagatgttgccaacaggggaaatggggtgtgggctctctatgcgagagcgctctgtactatctttgcatcctctttgtaaatctaaattcattcaaaacttaaaaatttattttaataacaggttagtgggyatccacctgtgtataattggctgttctctttgggtctaacttaaggagacattttcttttctctctccacctccaccaatgttgtggattatctattcaacgaaatttcatggaaatgtattcctcatctcacattgagatccatcctaaaaggatgaatctatagaagggatttcctaccggcttacattgagatgccatttctgtttctctcaccctggtgaaccttcatggcttgaaggaaaggggcagaaacatttatggtgagactagtggagcgtg

SEQ ID NO: 923163 - DNA, 615 bp, Homo sapiens
ttggaatgggtgtatctacctaatgcctataccctgattgtgtctaggaagtaactaaattgctttgattttacaagctcataggtagaagggacatgccttgtcttagttgagactttggacttggacttttgggtgaatgctggaattagctaagactttgggggactgttgggaaggcatgattgtgctttgaaatgtgaggacatgagatttgggaggggcaaggggcagaatgatatggtttggctatgtccccacccaaatctcatcttgtagttccyataattcccatgtgtagtgggagggagctggtgagaggtaattgaatcatgagggctgttaccctcatgctgttcttgtgaaagtgagttctcatgagctctgatggtttttataagaggctttcccccaacctttgctctgcatttctccatcctgctagaagggcatgtttgcttccccttctgccatgattgtaagtttcctgaggccttcccagcaatgtggaactgtgagtcaataaaaccctttcctttataaatcacccagtctcaggtatgtctttattagcagtgtgagaatggactaatacatgtgtacttttgtgaacac

SEQ ID NO: 923164 - DNA, 718 bp, Homo sapiens
  misc_feature 248: n = A,T,C or G
cctagctactcgggaagttgagacagcagaatcacttgaactcaggaggcagaggttgtaatgagctgagattgcgccactgcactccagcctgggcaacagaacaagaccctgtctcaaaaataaataaatatatatatattcatatatattcatatatatgttcataaatattcatatatttttatatatattcatacttatattcatacatatattcatacatatagtcatacatatatgcatanatatgcatatattcatataaacatataaattcatatatatgcatatmtatgcatatatatatgaatagatatatatgtgcatatctattcatatatatatgcatgtatgtatgaaaggtaaggctcccaggtgagtggagaagaggccaaactctgtctacggccaaggaccgcaagactaaaatgctactctagactagagatttaccaagcaccccaaattagagaacagaggcaaacgtgaagggaggttgtgagctgtaattaatggttatgtgtttagtggattagtttacatggatttttctgtcattagtttgtaacttcacaactccttatcatgctgacttgctttacccccacccacccccgccaaaaaaataacatttctaatctaatcctgtggcatcatcttccatcattgggacctctggtaaaattcaccatactgtgccctttgggaagctgat

SEQ ID NO: 923165 - DNA, 718 bp, Homo sapiens
  misc_feature 248: n = A,T,C or G
cctagctactcgggaagttgagacagcagaatcacttgaactcaggaggcagaggttgtaatgagctgagattgcgccactgcactccagcctgggcaacagaacaagaccctgtctcaaaaataaataaatatatatatattcatatatattcatatatatgttcataaatattcatatatttttatatatattcatacttatattcatacatatattcatacatatagtcatacatatatgcatanatatgcatatattcatataaacatataaattcatatatatgcatatatatkcatatatatatgaatagatatatatgtgcatatctattcatatatatatgcatgtatgtatgaaaggtaaggctcccaggtgagtggagaagaggccaaactctgtctacggccaaggaccgcaagactaaaatgctactctagactagagatttaccaagcaccccaaattagagaacagaggcaaacgtgaagggaggttgtgagctgtaattaatggttatgtgtttagtggattagtttacatggatttttctgtcattagtttgtaacttcacaactccttatcatgctgacttgctttacccccacccacccccgccaaaaaaataacatttctaatctaatcctgtggcatcatcttccatcattgggacctctggtaaaattcaccatactgtgccctttgggaagctgat

SEQ ID NO: 923166 - DNA, 450 bp, Homo sapiens
tgactgcacttttgagaagaaagtgaaaacaaagtagtttgagactatcagtcaaccaaaaacatttttgattagggccaatagatttgtgagggtaaaggaaacaccgtgaagattttagtgacactgtgggttacatctatcaatgagtcacattctctgccctgtattatttcaaatgattcatatttacttttcagtcatgaagtttgttttttctaacttaatataggatgtgtmcagtgacctacaagagcatccaaatttagtaatctgtagtttgcctaaaatgtgcatatcattgatacataaattcctaggcagtggctgcctcttaagctagaaatgttctgcttattcatgatgagagggtttgttaaattcaggaaattgaggaggaagttccatgagaacattatcatagtttaccagtctagtggtttccttaaa

SEQ ID NO: 923167 - DNA, 579 bp, Homo sapiens
aatcattattctactttctacctccatgagatcaattttttaagttcccacatatgagtgagaacatgcaatatttgtctttctgtgcctggtttatttcacttaacataatgacccccagttccatctatattgctgcaaatgacaggatatccctttttatggctgaataatattccactgtgtgttaagtaccacattttctttatccattcttctgtygatggacacttcagttgattccacatcttggctattgtgatgtttgctgcaatacacacgggagtgcagctatttcttccacatagtgatttcctttcttttggatatatacacacagccgtaggattgctggatcgtatggtagctctattttcagtgttttgaggaaccttcagactgctttccatagtggttgcactaaatatacattcctctcaacagtgtaccactgttatccttcttccgcagccttgccattatctgctattttttgtcattttgataacagacattttaactaaggtgagatagtatctcattgtggttttgacttgcatttccctgataattagtgat

SEQ ID NO: 923168 - DNA, 617 bp, Homo sapiens
atacacatgtacagacatatatttcctggctctgtacactgaggggacctggaggcaccccattagcaatgagcacacctggcttccccgtactggcttttaaataccattagtcactaaagaaaccagagtttcttgaagaaatggtggctggttccagggccagagtagtgaaagtacaagatgaagttggaatattttgttgtcccagaaaatatgaagaacgatgaggacacatccgaagagcacaaaagcctgcttgaaggggttccactggccaaacctgggacaatyagagcatcaaaatatatgatagtcatagattataacgcttctgaaaaaggagaaaaacatgaggccatactgatataagtaagagaataatgaaatatttggtgaggaacaggaaatttgcatggcttcagaatacttctccacagaatactcgttaatttcaaagaaaaaggaataattttatagtgcaggagcctggcagccccaatttgagtcaagtgatgaaagcgaacgttaccaagaatgggacaagtagaggtcatctgccacctgataggatgtggtgaaaagaacacagcatcacttctgtgattcttgccgaa

SEQ ID NO: 923169 - DNA, 782 bp, Homo sapiens
tcttacttcccagccatgtggtcgtgaatgagacccttcttgtctcttcccctaggctgtaaatttagaacatgggagtgagacttcttctcttccagaactattatgagtcttaaagagaaagaaagtgtagaaagttcctaggacctggtgcaggctcactacgtgggttttcttctcagtcctgcctcccaggcccgagttagagccagtcctgcccacrgacatttttgcagctctgtgaggcttttggtcagggtcagggacaatgggcgccagaccaacaatgtgtgtccagaccacctttaaagggctgtcgtggactttttaaatttcagctttctggaggaccgtcctttgaagttacccgcagtggcctgaatctctttgggagtgcatttcaactttcccctaagagtccagtgagatatttcgttggtgatagggccggaaagatccacaggagagccatgcaatatctttcttcccaaatttcccagtcctcgaaggaaaggccatgtttggtttgaaaacagagctgctttatcaccaaccagggccctggatgaaatctttccccctaaagctgaataaacagctccaggctcagctcacaccctgctcttagctcctgaaactcacttatctaggtcctgcctactccccagcacccctacacataccccaggcctgcccagacaccttcttctttgaggcgtaccctgaaccccagaatgacctcatagtgctgtgagacctgtgttcagctctgtctcttcctt

SEQ ID NO: 923170 - DNA, 598 bp, Homo sapiens
aaatacttggcagttcctcaaaaagttaaatataagagtaaccatgtgacctagcaattccactcctaggtatatacccaaggaaattgaaagcatatggtatcaggtcattcttgtgttgctgtaaagaaatacctgaggctgggtaatttgtaaagaaaagaggtttcattggctcacagttctgcaggctgtacaggcacggcaccagcatgtacttggcttttggtgaagcctcrggaagcttacgatcatggcagaaggcaaagggagagctagcatctcatggtgaaagtgggagcaagaaagaggaggtgggaggcaccacactcttttaaacaaccagatctcatgtgaactaactaaatgagaactcttcaccaaggtgatggtgctaagccattcatgagggatccgccccatgattcaatacctctcaccaggccccacttacaacattagaaattacatttcagcatgaagtttggaggtgacaaacatccaaaccatgacacatatatctatgcgaaaacctcaatgtgaatattcatagtaatattatttataacagccaaaaagtggaaacaatctaacatcc

SEQ ID NO: 923171 - DNA, 573 bp, Homo sapiens
caagtgattctcctgcctcggcctcccgagtagctgggattacaggcatgtgccaccacacctggctaatttttatatttttagtagagacagggtttcaccatgttggccaggctggtctcaaactcctgacctcaagtgattcacccgcctcagcctctcaaaatgctgggattacagcgtgagccactctgcctggctgagctctccttagggttaggttactctgtctctgcttggagctagtttctcttccccataagcagaaagccttgactgaaatggaartttagaattttagagcaggaagaccccttagacatcattttatggcaaagacgcaaaagcaggacatttccaccctctcctgctgcctttaccaagatctgaggacgggaactcctgtgtgtcctgggaagaggcccgagagctgctccccgagtcctaggtgggagcgggagaagggcccctagcaggaggagggcggccttgcagagcccttctcgggtcctggtggatgacactgcagtgtgagggatccgcccaccctctctgccacccctggcggtggcc

SEQ ID NO: 923172 - DNA, 645 bp, Homo sapiens
aagcgaagcagagacttgtcatggaactgctatgagaaccagtgttggggtagagaaaacaattttaattgacaaattgctggaggaggggcagtgtagacaagtttgagagttaaaactcgagaggaaccagatgtaggggagtccgcacaatgttgtgagatttaccttcaggagctcaaccagattccacaataaatataatagaaaaatcccctcatgcttccaccagggggaggggaaaaggaaccattctgaaatatgttagaacactctttttttaaataaggcctgccctsacgagaaactattcaactagagtctaatctgctggtacattatcagagccaaactgatctggataaaggaaaatatccaacttcaactccctctagccttccatgtaggggaggggaaatactcaactccagctcactctagtcattctgtcctacctaagatggaagaaaatagctgatgaacactcgtgaagttcaaagtacagaggcataagcttacaaaaagactgagaccaaatcacaggactatagaacattccctgtgccccgacactttgccactatattactgaaggcctattcacagcagtttctgctactatcatatcttgctatcaagaaaatt

SEQ ID NO: 923173 - DNA, 695 bp, Homo sapiens
accccatatctactacaaatacaaaaaattagctgggcgtggtggtgggcacctgtagtcccagctactcggagaggctgaggcaggagagtggcgtgaacccgggaggtggaacttgcagtgagccgaggtcacgccactgcactccagtctgggcgacagagcgagactccgtctcaaaaaaaaaaaaaaaaaaagaatctgtggatcagggcggactcagtggttcatgcctgtaatcccagcactttgggaggccaaggcgggcagatcacgaggtcaggagttcgagaccatcctgaccaacatggtgaaaccctgtctctactaaaaatacaaaaattagctgagcgtggtggtgcatgcctgtagtcccagctacttgggaggctgaggcaggagaatttcctgaacctgggaggcggaggttgcggtgagccgagattgcgccactgcactccagcctgggcaacagagcaaaactccgtcttgggcgggggtggagaaaaagaacctgtagatcaaaacaaagrttttgtaggtcgtaataaagagtttggattttattccaagaacagttagaggccattggagggttttaagcagagaaagaataaagtctgatttgttccaaaagattgttctggccactgtgtagagactggattctaaggagcaaaggtggaggcaggaat

SEQ ID NO: 923174 - DNA, 608 bp, Homo sapiens
ctctttgtactctttctctttatttctcagactggccaacacttagggaaaatagaaagaacctatgttgaaatattgggggatggttcccccaataattcttctcaaggtgacttataatcagctacagcccagggcttacttcttttaaggagttcatgaaaaggacttttgaacactggtttcttataactttatagattatgccattggattagagagaaaacttccrggactctaattaaaaggctaatgtgttcataaggattgctaacccaacatgaagcagagcagcagttgattttatggattaaactgatggagaactaaaatcattttaatggctttgttgttattgttgttgtttgaaccactgctgactcttcagactctggagaactgttttcctgctgagctatttacaacctttaatgcttgagtagagtatactcttgtaaacagaatttgggacatatttctctctctctgcctaatttatccagaatttgtaaactgtttgtgaatattcttaattcatggcaatgtttttggctgtaagagttcagtaagaatccgtttttgttttgttttgttttgttaaacaatgg

SEQ ID NO: 923175 - DNA, 608 bp, Homo sapiens
ctctttgtactctttctctttatttctcagactggccaacacttagggaaaatagaaagaacctatgttgaaatattgggggatggttcccccaataattcttctcaaggtgacttataatcagctacagcccagggcttacttcttttaaggagttcatgaaaaggacttttgaacactggtttcttataactttatagattatgccattggattagagagaaaacttccgggactctaattaaaaggctaatgtgttcataaggattgctaacccaacatgaagcagagcagcagttgattttatggattaaactgatggagaactaaaatcattttaatggctttgttgttattgttgttgtttgaaccactgctgactcttcagactctggagaaytgttttcctgctgagctatttacaacctttaatgcttgagtagagtatactcttgtaaacagaatttgggacatatttctctctctctgcctaatttatccagaatttgtaaactgtttgtgaatattcttaattcatggcaatgtttttggctgtaagagttcagtaagaatccgtttttgttttgttttgttttgttaaacaatgg

SEQ ID NO: 923176 - DNA, 747 bp, Homo sapiens
ctgaggcaggaggatcacttcaacctgggtggttagaggctgcggtgagccacgatcgcgccactgccctccagcctgggagacagcaaaaccctgtctcaaaaataaataaataaataaagagacgtagcattcattctgtggcaaaaccagaaaccatctgttatggactgattattggtgtctccccaaaattcgtatgttgaaatcctaccccctaatttggtggcattaggaggtggggtctttgttaggtcattaggattcattgaggtcttaagagtggagcacctgagaatgggattcatgcccttaaaagagtcccgagagagctcctttctctctgtcatctgtggggaacacagagagaagacgccatctctgaaccaggaagtgggccctcaccagatgcagaatcygccagcaccttgagcttggacttctcagcctctagaactgtaagaagaaaacttttgttgtttaagccacccagtctatggtatttagtccatcgcaccctggacggactaaaacatcacccaaaactccatcaacagtgaaatgaaagaataaatgaatgaaatactgatcagcaataaagatgaaggaactgttgctacatgcaaaagtgggaattaatctcactgttaccattttaagtgaaagaagctttacactttgtataggaaggtactgtaaaatcacatttgtagaaggttgagtaataggcaaacgtaatctgtagtg

SEQ ID NO: 923177 - DNA, 658 bp, Homo sapiens
caagaagctgcgtcagatatactttcctaattgtgtgcaccatgagatcttaatactgtggaagggccgtacagtcatccctcggcatccaaaggggattggttcctggacctcccatgaatacaaaagtccatggatgctcaagtccctgatttaatatggtgcagtattttcatataacctaagtactttctctcatatactttaaaacatctccagattgtgtatgatacctaaacaatgtaaatgatatgtaaatgtttgctatactgtattgkttagggaataatgacaagaaaaatgtctgtacatgttcggtacagatgcaactaaaaaatatttccaatgtgcgcatggttggttgagttcagggtaactgaagccacgcatatggaaggctgttgctgtgctgatcgtttatctctgcttcaccttccaccaccccatgagaatgcacaccctggggtcctaaacgcggcaggcaggagcagaatgtcggagtcacggccccatgcaggactaccctggtcctggccaccatcgcagttgggcggcctcacctgcctggttttcctgtctccagctctacagctcaccaatcccgtctgaaatgcagtcggactctctccctccccatgttcaagcccttctctgcacc

SEQ ID NO: 923178 - DNA, 752 bp, Homo sapiens
caaggagatagttggtgtcagggctccctgacagcatctctttctgaagacatgcaccttaactcctaaactttgacccctgagcagcaggtggtcttaaagaagacactcggccagacgcggtggctcacgcctgtaatcccagcactttgggaggtggaggtgggctgatctcgaggttaggagttcgagactatcctggccaagatggtgaaatcctgtctctactaaaatacaaaaaattagccgggcctggtggcaggcgcctgtagtcccagctactcgggagactgaggcaggggaatcacctggacctggggggcagaagttgcagtgagctgagctggcaccactgcactccaggctggcaacagagcaggactctgtctcaaaaaaaaaaaaaaaaaaaaraagaagaagaagaagaagacactctaggctgctcgtcaggaggcctggttttagtcctccgtgggaccatgagtgagcaccttaccctctgtcatccactccgtgatggtgtgcttcctgtgtaccaggtgtgaacccaaatatctgagacaggcctcaatccatttggaaagtttattttgccaaggttaaggatgtgcgtgtgccacagcctcaagaagtcctggtgacatatgcccaaggtggtcggtcaggaacagcttggctttagggagccatgagacatcaatagatacatgtatgacgtacattggttcagcccagaaaggcaagacaaggca

SEQ ID NO: 923179 - DNA, 720 bp, Homo sapiens
aaaatggtttctcaatttcttataaaattaatcatgcaattaacacacaacccagcagtagctctcttgagaataaaatgaaataaaaacttatgcacacacaaaaacagtatgtgaatgttcatagcagttttatttgttgtcaccaagaactggaaagtcaagatgctcttaaacaggccaatggttaaacaaactgttacatgtataccattaaatactgatcagcagtaaaaaggaatagactactgatacatccaacaactggatgaatctccatgaaatttttctgagtacaaaaatgccaaatcaaaaatgttacatactgtgtgattctctttatttaactttgtgaagtgacagcatttaaaaaaatgaggaatagatacgttatgtctagggcttaggggaggcagcaaggtgagcatgaggaaggtgtgcttggtgataaatgagccgtgcaaaggaatctcgaggcaattgaatggtttaacatctygactgtggtggtggatacaaaatcctataattatgataaaattgtacagaactaaatgcacacacccaaacaaatgactacaagtaaaactggagaaatagtaataagatcagtagattgtattctggttttgacatactactatacttttgccaaatgttaccattgaagggaacttggtaaatcgtacagaggatctctgtatattattattttttttg

SEQ ID NO: 923180 - DNA, 764 bp, Homo sapiens
gccagccttgctcaaccctgagggctcctggattcacaagctgtaagttaatggaggattggaagataagttcctgggaagtggagaattaagttctatatatgcagaaatggatccccatccccacaccattgttagaggagttcttgtcctgcatccaggaagaatgacaaaagcagacaagtgaagggtgaagaacatgagttttaatgttagaacgactcacagaaatgggtagttcctctctgtaggccggtcatccagtccagtgttcagcgtcttagcaaagagacctccctggagaaagtgactcatctctgcaagaaagtcattctgacctctctgcaggtctctgaagttctcagcaaaaaaggactgctctgcagcttgtcgtcccacygctggaatcccactcccatcatctcgccacctttgtcgtcctcttgctgtcttctgccttgcgctggctgagcccagggcttttatggaactcaaaggggaggaagtgcgtgctgattggtccacgggcagccatgggcgggccagaagaggcactacgagttcccactccagtccgtgggactggaagcccagcccccagccttcaggccctccctggcctgagggtggggcatttctggggaccccgcccgctttctgcccaggaatcaatccgcctcctgctgtggttcatggacccggggcttggcccaacccttctctgagatgggagtgggtgctgggagctgagagagaccaggcag

SEQ ID NO: 923181 - DNA, 764 bp, Homo sapiens
gccagccttgctcaaccctgagggctcctggattcacaagctgtaagttaatggaggattggaagataagttcctgggaagtggagaattaagttctatatatgcagaaatggatccccatccccacaccattgttagaggagttcttgtcctgcatccaggaagaatgacaaaagcagacaagtgaagggtgaagaacatgagttttaatgttagaacgactcacagaaatgggtagttcctctctgtaggccggtcatccagtccagtgttcagcgtcttagcaaagagacctccctggagaaagtgactcatctctgcaagaaagtcattctgacctctctgcaggtctctgaagttctcagcaaaaaaggactgctctgcagcttgtcgtcccaccgctggaatcccactcccrtcatctcgccacctttgtcgtcctcttgctgtcttctgccttgcgctggctgagcccagggcttttatggaactcaaaggggaggaagtgcgtgctgattggtccacgggcagccatgggcgggccagaagaggcactacgagttcccactccagtccgtgggactggaagcccagcccccagccttcaggccctccctggcctgagggtggggcatttctggggaccccgcccgctttctgcccaggaatcaatccgcctcctgctgtggttcatggacccggggcttggcccaacccttctctgagatgggagtgggtgctgggagctgagagagaccaggcag

SEQ ID NO: 923182 - DNA, 764 bp, Homo sapiens
gccagccttgctcaaccctgagggctcctggattcacaagctgtaagttaatggaggattggaagataagttcctgggaagtggagaattaagttctatatatgcagaaatggatccccatccccacaccattgttagaggagttcttgtcctgcatccaggaagaatgacaaaagcagacaagtgaagggtgaagaacatgagttttaatgttagaacgactcacagaaatgggtagttcctctctgtaggccggtcatccagtccagtgttcagcgtcttagcaaagagacctccctggagaaagtgactcatctctgcaagaaagtcattctgacctctctgcaggtctctgaagttctcagcaaaaaaggactgctctgcagcttgtcgtcccaccgctggaatcccactcccatcatctcrccacctttgtcgtcctcttgctgtcttctgccttgcgctggctgagcccagggcttttatggaactcaaaggggaggaagtgcgtgctgattggtccacgggcagccatgggcgggccagaagaggcactacgagttcccactccagtccgtgggactggaagcccagcccccagccttcaggccctccctggcctgagggtggggcatttctggggaccccgcccgctttctgcccaggaatcaatccgcctcctgctgtggttcatggacccggggcttggcccaacccttctctgagatgggagtgggtgctgggagctgagagagaccaggcag

SEQ ID NO: 923183 - DNA, 754 bp, Homo sapiens
tgatgtttggtaccatcagccaccaaggaaattcaaactaaaaccacaatgagacaccactacaaattgatcagaatatgtaatttttaaaaaatgtgatggtgctggccctgtgtggtggctcacgcctataatcccagcactttgggaggcygaggcaggcggatcacgaggtcaggagatcgagaccatcctggctaaagtggtgaaatcccatctctactaaaaaatacaaaaaaattagccacgcatggtggtgtgtgcctgtagtcctagttactcgggaggctgaggcaggaaaatggcctgaacccgggaggcggagcttgcagtgagccgagatcatgccactgcactccagtctgggcgacagagtaagactccatctcaaaaaaaaaaaaaaattgtgtgacagtgccaaatattggtgagaatggggagaagctggacccctcatacatccttgttgggaatgtaatatggtccagtcactaaaaaatggtttctcaatttcttataaaattaatcatgcaattaacacacaacccagcagtagctctcttgagaataaaatgaaataaaaacttatgcacacacaaaaacagtatgtgaatgttcatagcagttttatttgttgtcaccaagaactggaaagtcaagatgctcttaaacaggccaatggttaaacaaactgttacatgtataccattaaatactgatcagcagtaaaaaggaatagactactgatacatcc

SEQ ID NO: 923184 - DNA, 593 bp, Homo sapiens
agtggttaacgttaaatcatctttttttttttttttaacttaggatacttctaaactgttgaagtgtgcccacaatgaggtttcctctaaaagctattttctactttcttctgctagcaaagaaggtgccactacagattgaattcatttggaccatctacaggttactgggttaaggatttttaataggaaggctacaggttgccggtggcctcagtgctttcgggctaagcccttgtttacacttacaacaggattgtattggagtattggcgggtcatggagaaaaccatcaattatcaattacaggttttaaatttaccgtggcttttaaaggaatagcatacactttattttttcttaactacttgtatatttctttctttctttctctctttgactctccatctctctctgtttgactttccttttgcctckgtctctttctctctctctctgcctctgtctctctcactcactcttgaatccctctttgtctttctgtctcttcccctctctttctctctgctggtctttctttgcctttgccagccgtttatgctgctgttctctcaaccactgtgaggggtggt

SEQ ID NO: 923185 - DNA, 785 bp, Homo sapiens
tctgatgtataaacccatgctcttcggtgaacagagcccccagtttaggattcaggctgacagagattacttcctattccatctggaaaggtcaagcatgctcctgcctcgtggtgacaagctgggagctccagaacccgtgttcttccagtggagactgtcctcagcttctgcaagcggaaatgcaaaaccaaataccctcccctcaggctgcagtaggaatgagaacatattagaactttgctgtagttctcatcattggcagctatgtcagggacagctagaggcattgatagrcactttataaagatatggcactacagcatttaagaccattggttgcaagtattagtttcagccaaaaagggtacacatgacgagaatacagggatcattcacagaccaaagggcaaaaatagaactgaaccccaggaaggagctggagctgaaactgaaccccaggaaggagttggagctgaaactgaaccccaggaaggagctgatgtggcatggattccatgggttcatcttctagatctctcttgccaatgccctgaactgtgggttatcaaatttactgtacactagaatcccttagggagctttaaaaatactgatgccagccaggcgcgatggcgcacacctgtaatcccagcactttgggaggcccaggtgggcggatcacaagggtcaggagttcgagaccagcctggccaatatggtgtgaaaccccatctctactaaaaatacaaaaattagcagggcgtggtggtgggcgcctgtag

SEQ ID NO: 923186 - DNA, 607 bp, Homo sapiens
atgtgggaaagtttggaacttcctagggacttggagggctcagaagaagacaggaagatgtgggaaagtttggagcttcctagaaatttgttgaattgctttgactaaaatgttgatagtgatatggacaataaagtccaggctgaggtggactcaaatggagatgaggaacttcttgggaactggagtaaaggtcactcttgttatgcaaagagactggcagcattttgcccctgccctagagatatgtggaaccttgaacttgagagagatgatttagggtatctggcagaagaaatttctaagcagcaaagtgttcaagagaaagcagagcataaaattttggaaaatttgcagcctgctgacatgatagaaaagaaaaccccattttctgggragacattcaagcctgctgtagaaatttgcataagtaatgagaagccaaatgttaatcaccaagacaatgtggaaaatgtctccaaggcaagtcagagaccttcacagcagcccctcccatcacaggcctggaggccttggagggaaaaatggtttcataggcctgacccagggctctcctgctgtgtgcagtctggggtatatggtgcct

SEQ ID NO: 923187 - DNA, 631 bp, Homo sapiens
gtatggccattttaatgatattgattcttcctattcatgcacctggaatgatttcccatttgtttatgtcatctctgatttctttgagcagtgttttgtaattctcattgtagagctcttttaactccctggttagctgtattcctaggtattttattctttctgtgacagtcatgaatgggatagccttcctgatttggttcttgacttggttgttgttggtgtatagaaatgctagtgatgggtttttttkttgttgttgttgtttgctttttgtttttatggggtttttttgagacggagcctcgctctgtcgccccggctggagtgcactggcgcgatctcggcgcactgcaagctctgcctcccgggttcatgacgttctcctgcctcagcctcccgagtagctgggactacttgcacctgccactacgcccggctaatttttttttattttatttttagtagatatggggtttcaatgtgttagccaagatggtctggatctcctgaccttgtgatccgcccgcctcggtctcccaaagtgctgggattataggtgtgagccactgtgcccggccgctagtgatttttgtaaatgattttgtgttctgaaactttgctgaagtca

SEQ ID NO: 923188 - DNA, 631 bp, Homo sapiens
gtatggccattttaatgatattgattcttcctattcatgcacctggaatgatttcccatttgtttatgtcatctctgatttctttgagcagtgttttgtaattctcattgtagagctcttttaactccctggttagctgtattcctaggtattttattctttctgtgacagtcatgaatgggatagccttcctgatttggttcttgacttggttgttgttggtgtatagaaatgctagtgatgggtttttttgttgttgttgttgtttgctttttgtttttatggggtttttttgagacggagcctygctctgtcgccccggctggagtgcactggcgcgatctcggcgcactgcaagctctgcctcccgggttcatgacgttctcctgcctcagcctcccgagtagctgggactacttgcacctgccactacgcccggctaatttttttttattttatttttagtagatatggggtttcaatgtgttagccaagatggtctggatctcctgaccttgtgatccgcccgcctcggtctcccaaagtgctgggattataggtgtgagccactgtgcccggccgctagtgatttttgtaaatgattttgtgttctgaaactttgctgaagtca

SEQ ID NO: 923189 - DNA, 815 bp, Homo sapiens
tcatttctacagcctctgttctgttccattgatctacatatgtgttttggtaccagtaacatgctgttttggtcactgtagccttgtagtatagcttgagatcaggtagcatgatacctccagctttgttctttttgtttaggattgtcttggctatacgggctcttttttggttccacatgaaatttaaagtagttttttttctaattctgtgaagaaagtcagtggtagcttgatgagaatagcattgaatctataaattactctgggcagtatggccattttyacgatattgattcttcctatccatgagcatggaatgtttttcgatttgtttgtgtcctctctcattttcttgtagttctccttgaagaggtcattcacatctcttgtaagttgtattcctaggtattttattctatttgtagcagttgtgaaagggaattcactcatggtttggctctctgtctattatttgtgtataggaatgcttgtgattatcagcttaaaaagactttgggctgagacaatggggttttctagatatacaaaaatgtcatctgcaaacagagataatttgacttcctctcttcctattagaatatgctttacttctttttcttgcctgatttccctgtccagaatttcgaatactatattgaataggagtggtgacagagggcatccttgtcttctgccagttttcaaaaggagtgctcctagcttctgcccattcagtacgatattggctgggggtttgtcataaatagctcttattattttgagatacgttccatcaatacctagtttattga

SEQ ID NO: 923190 - DNA, 815 bp, Homo sapiens
tcatttctacagcctctgttctgttccattgatctacatatgtgttttggtaccagtaacatgctgttttggtcactgtagccttgtagtatagcttgagatcaggtagcatgatacctccagctttgttctttttgtttaggattgtcttggctatacgggctcttttttggttccacatgaaatttaaagtagttttttttctaattctgtgaagaaagtcagtggtagcttgatgagaatagcattgaatctataaattactctgggcagtatggccattttcacgatattgattcttcctatccatgagcatggaatgtttttcgatttgtttgtgtcctctctcattttcttgtagttctccttgaagaggtcattcacatctcttgtaagttgtattcctaggtattttattctatttgtagmagttgtgaaagggaattcactcatggtttggctctctgtctattatttgtgtataggaatgcttgtgattatcagcttaaaaagactttgggctgagacaatggggttttctagatatacaaaaatgtcatctgcaaacagagataatttgacttcctctcttcctattagaatatgctttacttctttttcttgcctgatttccctgtccagaatttcgaatactatattgaataggagtggtgacagagggcatccttgtcttctgccagttttcaaaaggagtgctcctagcttctgcccattcagtacgatattggctgggggtttgtcataaatagctcttattattttgagatacgttccatcaatacctagtttattga

SEQ ID NO: 923191 - DNA, 765 bp, Homo sapiens
gtttggctctctgtctattatttgtgtataggaatgcttgtgattatcagcttaaaaagactttgggctgagacaatggggttttctagatatacaaaaatgtcatctgcaaacagagataatttgacttcctctcttcctattagaatatgctttacttctttttcttgcctgatttccctgtccagaatttcgaatactatattgaataggagtggtgacagagggcatccttgtcttctgccagttttcaaaaggagtgctcctagcttctgcccattcagtacgatattggctgggggtttgtcataaatagctcttattattttgagatacgttccatcaatacctagtttattgagtgtttttagcatgaaggggtgttgaattttatcggaggccctttcggcatcaattgagataatcatgtgtttttggcattggttctgtttatgtgatgaattacatttactaacttgcrtatgtttaaccagtcttgcatcccaggaattaagccaacttggtcatggtggataagctttttgatgtgctgctggattcggtttgccagtattttattgaggattttcccatcaatgttcatcagatatttgcttgaatttttcttttttattgtgtctctgccaggttttcgtaacaggatgatgctggcctcataaaatgagttagggaggaggccatctttttcttttgtttggaatagttgcagaaagaatggtaccagctcctctttgtacctctggt

SEQ ID NO: 923192 - DNA, 572 bp, Homo sapiens
atttgtagatctctatttctataggattgattactggagcctttctagtttcatttggttgttttattgtccataaagcctcacattattgcctgtgcaactaaaggagcaaacacctctttcagtttttataagctggttttagcatataaagactttctcttttggagtccttgcaaagacatgactaccttcaggatcacagatgaatggggttgaagccaggtcacctaactgctgccgggtttgcagtggagcctgtagttggcagatctattaccaagtgcttgaatgggcatggattctatctagtctcttggtgcrcttaactgcctccacagccttggtcagtaggggttgcacctggaccagcgtcttattcagtgtctgccaacagaaagactgttaccaaatatacagatgctcagatgggtatcacttcctctgggtttcgggacggcttcctgctgtgtcactggttaaatacctgggcaggcaatactggcccatgactgcaactgagctagaatggagttctagctgggaaagaactgagttacagggttctgtca

SEQ ID NO: 923193 - DNA, 572 bp, Homo sapiens
atttgtagatctctatttctataggattgattactggagcctttctagtttcatttggttgttttattgtccataaagcctcacattattgcctgtgcaactaaaggagcaaacacctctttcagtttttataagctggttttagcatataaagactttctcttttggagtccttgcaaagacatgactaccttcaggatcacagatgaatggggttgaagccaggtcacctaactgctgccgggtttgcagtggagcctgtagttggcagatctattaccaagtgcttgaatgggcatggattctatctagtctcttggtgcacttaactgcctccacagccttggtcagtaggggytgcacctggaccagcgtcttattcagtgtctgccaacagaaagactgttaccaaatatacagatgctcagatgggtatcacttcctctgggtttcgggacggcttcctgctgtgtcactggttaaatacctgggcaggcaatactggcccatgactgcaactgagctagaatggagttctagctgggaaagaactgagttacagggttctgtca

SEQ ID NO: 923194 - DNA, 572 bp, Homo sapiens
atttgtagatctctatttctataggattgattactggagcctttctagtttcatttggttgttttattgtccataaagcctcacattattgcctgtgcaactaaaggagcaaacacctctttcagtttttataagctggttttagcatataaagactttctcttttggagtccttgcaaagacatgactaccttcaggatcacagatgaatggggttgaagccaggtcacctaactgctgccgggtttgcagtggagcctgtagttggcagatctattaccaagtgcttgaatgggcatggattctatctagtctcttggtgcacttaactgcctccacagccttggtcagtaggggttgcacctggaccagcrtcttattcagtgtctgccaacagaaagactgttaccaaatatacagatgctcagatgggtatcacttcctctgggtttcgggacggcttcctgctgtgtcactggttaaatacctgggcaggcaatactggcccatgactgcaactgagctagaatggagttctagctgggaaagaactgagttacagggttctgtca

SEQ ID NO: 923195 - DNA, 589 bp, Homo sapiens
tcaattgattgagtttgtatatattctggtgattaatctatatgtggggccacaaaacaatcctcacataaattcaagaaacattgaaatcgtatgaagtattttttctgatgacaatggaataaaactagaaataaatcaaaagaggaactttggatactgtacaactacctggaaattaaacaacatgctcctcaatgacaagtgggtcaaaaaagaaattaagaagaaaattgaaatatttcctgaaacaaataaaaatggaaacaaaacataccrgaacctataagatacagcaaaagtagtactaagagggaggtttaaagcaataaatatctatattaaaaaaatagattccatataactaactaaatgatgcacctcaaggaactaaaaaagcaagaataaaccaagccccaaattggtagaaagacagacataataaaggtcagagcagaaatatatgaaattaatactagaaaaataaaatattaacaaaactgacaaacctttgactagactatctaacaaaaacacataaaaaagagatgaaaaaggaaatattacgactcatagcataggaacacaa

SEQ ID NO: 923196 - DNA, 668 bp, Homo sapiens
atcagcaaatagcgacagtctgacttcctctttactgatacggatgcccttgtttctttctcttgtctgattgctctggctatgactttcagtactatgttaaatagaagtggtgaaagtggacatttttgtcttgttccacttctcaaggggaatgctttcaacttttccccatctagtataatgttggctgtgggtttatcatagatggcttttattaccttaaggtatgtaccttctatgccagtttttctgagggttttaatcataaagcaattgtggatttttgtcaaatggtttttctgcatctactgagatgatcatgtaattttgtttttaatcccgtttatgtgatgtatcacatttattgayttatgaatgaaaagccatccctgtatccctggtataaatcccatttgatcatggtggattatctttttgatatggtgttaggtttggttagctagtaatttgttaaggattgttgcatatatgttcatcagggatattgatctgtagtttttgttgttatttttatgtccttccctggtttgggtggtagagtgttattggcttcatataatgatttaaggacaattccctttatctctgtcctgtagaatagtgtcaataggattggtaccaactcttctttgaatgtctgatag

SEQ ID NO: 923197 - DNA, 643 bp, Homo sapiens
cccttcctgctgtgtttgtgccattctaaatgtctctgactctgatggctaccagattctcttgagggtctcttcagtcttttcagtaggccacccaccttgtccactgctgcataatttctccaggttccttcctggttcaaaactctttgtgtggtcaggtgcggtggctcaygcctgtgatcccagctctttgggatccctaagtagaaggatcacttgagcccaggaatttgagaccagcatgggcaacaaagcaagacttcgtctctacaaaaaataatttaaaaaaattaggtggttatggtggcacatacctgtagtcccagctactcaggaggctgaggcaggagtatggcttgagccagaagttggaggctgcacttagctatgattactccactgtactctagcctgacgacagagcaaaacccttctcaaaaacaaacaaaaccccaaaaactttgcattccttccaaaggatgaaacatttcatttaacccagccacatggagttaaatatggtcaagccaaatgaactcatttcacatgtttagctcaagcaagctgatttcttcacaggagctgcccagtaaatgcttcagtgacgcccaccatgatgtgtgtggggttagttcatcag

SEQ ID NO: 923198 - DNA, 645 bp, Homo sapiens
tggctggagccaagatggccgaataggaacagctccggtctacagctcccagcgtgagtgacgcagaagacgggtgatttctgcatttccatctgaggtactgggttcatctcactagggagtgccagacagtgggcgcaggacagtgggtgcagcgcaccatgcatgagccgaagcagggtgaggcattgcctcacttgggaagtgcaaggggtcagggagttccctttcctagtcaaagaaagcggtgacagatggcacctggaaaattgggtcactcccaccccaatactgtgcttttccgatgggcttaaaaaayggcgcaccaggagattatatcccgcacctggctcggagggtcctatgcccacggagtctcactgattgctagcacagcagtctgagatcaaactgcaaggcagcagcgaggctgggggaggggagcctgccattgcccaggcttgcttaggtaaacacagcagccaggaagctccaactgagtggagcccaccacagctcaaggaggcctgcctgcctctgtaggctccacctctgggggcagggcacagacaaacaaaaagacagcagtaacctccgcagacttaaatgtccctatctgacagctttgaagacagcagtggttct

SEQ ID NO: 923199 - DNA, 710 bp, Homo sapiens
ataaactgagaaacagactagaagagattttctggaatgtagtacaaaaagaaaagaagatagagtatatgagaaagtggctaagaaatttggaggataaagtgagttgggaggtttaacatctgactgaagtttctaaaagacacaatggagagcatagggtagagkcagtattaaaacagataatggcaaaaattgttcagaactgatgaaatacacaaactacatattaaataagcccagctaatcgcaaaaaggataaatgaaatctacacctagtcacatcacagtgaaactacagaactctaaatataaggtgaaaaaatttaaaaacaaccaggaaaagagaagttaccttcaaaagagtggagatcaacaaattgatttcataacagcagcggtggaagccagaagataggataatgaatgatatgttcaatgtactgaaggaaattaccaacctagaattctatgcacagcaaatatgtcttttaagaatgaaggtgaaataaagacatttgaaacaaaataataaaaacaaaatctaagagaattcccattagtattcttacactaaaagaaattataaagcttataattaaggcaggacagtgaccccagttagaaggtctgagatgcaagaaaagctaaagaacaaggaaagtactaactatgttggataaggctaaatgaacattgaccatataaat

SEQ ID NO: 923200 - DNA, 745 bp, Homo sapiens
tagacacagttgaaaagagatccataaactgagaaacagactagaagagattttctggaatgtagtacaaaaagaaaagaagatagagtatatgagaaagtggctaagaaatttggaggataaagtgagttgggaggtttaacatctgactgaagtttctaaaagacacaatggagagcatagggtagagtcagtattaaaacagataatggcaaaaattgttcagaactgatgaaatacacaaactacatattaaataagcccagctaatcgcaaaaaggataaatgaaatctacacctagtcacatcacagtgaaactacagaactctaaatataaggtgaaaaaatttaaaaacaaccaggaaaagagaagttaccttcaaaagagtkgagatcaacaaattgatttcataacagcagcggtggaagccagaagataggataatgaatgatatgttcaatgtactgaaggaaattaccaacctagaattctatgcacagcaaatatgtcttttaagaatgaaggtgaaataaagacatttgaaacaaaataataaaaacaaaatctaagagaattcccattagtattcttacactaaaagaaattataaagcttataattaaggcaggacagtgaccccagttagaaggtctgagatgcaagaaaagctaaagaacaaggaaagtactaactatgttggataaggctaaatgaacattgaccatataaattaggagtatcca

SEQ ID NO: 923201 - DNA, 745 bp, Homo sapiens
tagacacagttgaaaagagatccataaactgagaaacagactagaagagattttctggaatgtagtacaaaaagaaaagaagatagagtatatgagaaagtggctaagaaatttggaggataaagtgagttgggaggtttaacatctgactgaagtttctaaaagacacaatggagagcatagggtagagtcagtattaaaacagataatggcaaaaattgttcagaactgatgaaatacacaaactacatattaaataagcccagctaatcgcaaaaaggataaatgaaatctacacctagtcacatcacagtgaaactacagaactctaaatataaggtgaaaaaatttaaaaacaaccaggaaaagagaagttaccttcaaaagagtggrgatcaacaaattgatttcataacagcagcggtggaagccagaagataggataatgaatgatatgttcaatgtactgaaggaaattaccaacctagaattctatgcacagcaaatatgtcttttaagaatgaaggtgaaataaagacatttgaaacaaaataataaaaacaaaatctaagagaattcccattagtattcttacactaaaagaaattataaagcttataattaaggcaggacagtgaccccagttagaaggtctgagatgcaagaaaagctaaagaacaaggaaagtactaactatgttggataaggctaaatgaacattgaccatataaattaggagtatcca

SEQ ID NO: 923202 - DNA, 632 bp, Homo sapiens
gctgagtatggtggctcatgcctgtaatcccagcactttgggaggctgagatgagtggactgcttgagcccaggagttcaagaccagcctgggcaacatggtgaaaccccatctctactaaaaatacaaaaattagctggacatggtggttgtgcctgttgtcccwactacttgggaggctgaggtgggaggatcccttgagcccaggagacagaggctttagagtgagccatgattgcactactgtactccagctagagcaacagagtgagaccctgtcaaaaaaaaaaaaaaaaaaaaaaaaagaaagaaaagaaagaaagaaaagaaaaattaaaacctacaagtaaacttatgattgaacatgtttactctaagattagggaaagagagaaaggacaataatgaccactcttaccacttttttttttaagacattgaactggcagtcctagcctgtgcaatgaggcaagaaaaagaaacaaaatgtgtaaagactggtaaggaagatgcaacaccatttttatttgcagaaaaaatgattttgtctgtgtggaaaatcctaagcaattaatattgcaagtttacagaatacaaagtcaatatagtaaattctcattatttatggtgaa

SEQ ID NO: 923203 - DNA, 597 bp, Homo sapiens
atgagcacttagaaactcaccagttactttcctgttaggtaatgagtaatgattcttgaatcatttaaaccacccagacctagtagtaaattcaacaacacagtcaagtcaaaccttctctttcatcactgcaaacaactttttgctttggtcatgattatcatggtgctaagaggagtacacttctgtgtctggccttcagtctacatgattagaagtttctccatatctgatataggcccttcccaaatttttgttagtctcattgccttcagtgaagsagattatctcagagcttctattagttagttcttgtactttaagatcatagttatagtggaatgagatctgtctgacaggtgagcagtaatcatcattgatgttctacctttgtagttcttaatcacttctaattttgttttcaggtcaatcacttgttgtagcttcttactggcaatattagcagtaggctttttatactcagaggccctgatgaacaaaacaaaatgagattaaatcaagcacaaaagaaaatgatgtaattaagagacacagtaaataggagaaatatgatcctgctgctagaataacatagca

SEQ ID NO: 923204 - DNA, 597 bp, Homo sapiens
atgagcacttagaaactcaccagttactttcctgttaggtaatgagtaatgattcttgaatcatttaaaccacccagacctagtagtaaattcaacaacacagtcaagtcaaaccttctctttcatcactgcaaacaactttttgctttggtcatgattatcatggtgctaagaggagtacacttctgtgtctggccttcagtctacatgattagaagtttctccatatctgatataggcccttcccaaatttttgttagtctcattgccttcagtgaaggagattatctcagagcttctattagttagttcttgtactttaagatcatagttatagtggaatgagatctgtctgacaggtgagcagtaatcatcattgatgttcyacctttgtagttcttaatcacttctaattttgttttcaggtcaatcacttgttgtagcttcttactggcaatattagcagtaggctttttatactcagaggccctgatgaacaaaacaaaatgagattaaatcaagcacaaaagaaaatgatgtaattaagagacacagtaaataggagaaatatgatcctgctgctagaataacatagca

SEQ ID NO: 923205 - DNA, 597 bp, Homo sapiens
cccatggaccaatcagcacgcaagtcctccctcctgagtccataaaaacccccggctctgccagaatcagacagatattaggactaccagcagagggagggagctacccacatccagtctcctccataggacaacctgtctgctgaaaggggctacccactacaagtctcctctcttctgaaagctggagactcctcaggatgatctgcccgtggaaatgagctacccacttcaggtatcctgagagctgttctgccgctcagtgaagctcctctgtgcctagctagctctccagttgtgtgtgcctccttcttcctggatgtgggacaagaacttgggacctgctgaatggtgggactgaaagagctgtaacacaaacaggactgaaacactcccctgtccaactcacgctgtgtgcgacaagaagragagaagacttgtggcttttcagggaacccagacctaggggctccccaagccagggatgtaacactcttttgggggctctgtggtttctggcgtctccaagcttttgggtgccaccgcatctccccgtcccggacgcctgtgcctgcagcaagccgcttgcagtacgtc

SEQ ID NO: 923206 - DNA, 679 bp, Homo sapiens
gtagttatctgcagaagatggcagggccttgctccaaaatcctacggacctcctctgtgattcacctatgggggcctaccaaaggctctaaacagcatccctatctgccactgatacctcaagcaccactggatctgctgggtcatatagcccaagtggcagagcagcttgcacaacagcctggacctattgcagagccttctcctgttctaaaccccactcaaaactggcagcctttcaggtgactcaataaatgggccggagtaacatactcaaatgaggaatgtgttgcccccaaaatccaaataggcccactaggcgttgtgactctttcttggttgtaggagaggccaaatgcaacaacttatcyttcaccttagaaggaatatcttgacaggcccctcagcactgggcccctagaaatttcactgaggtagaaggtccctgaattttagtctgatttatttcccatcccctggcacccaaatgtctcaccagtaagtccagtgtgtttgctacttctcgctcactgggtccagtcggcataatgtcatcaatgtaatggaccatcatgatatcttgtggaagggaaaagcgatcaagatctctgcgagcaagattatgacacaaagccagggagtttatatacccctgaggtaggacagtaaagacatactgc

SEQ ID NO: 923207 - DNA, 601 bp, Homo sapiens
gtttgagatggagttttgctctgttgcccaggctggagtacaatggtgtgatctcggctcaccacaacctctgcctcctgggttcaagcaattctcttgcctcagcctcccaagtagctgggattacaggcatgtgccaccacacccagctaattttgtatttttagtagagacagggtttcgccatgttggtcagggtggtcttgaactcccgacctcaggtgatcagcctgcctcagcctcccaaagtgttgggattacaggcgtgaaccaccgtgcctggccaatgttattaattccctttgtagccccatgtatttttcttttatgcattgaggaagtatttttgagaacaggtcayaggttttccagactgcgaaaggggcctaaggctgaaagtggtgaagagctctggcctcatcctccatctctcgcccatgcagggccaagtcccaggcaaagaggagccccagatgcagacccaagaggagacaggcactggaaggacctcaccagccccagatcacagggccaccccaagtggacagaggacagtccatggcggcctccactgagcacctgcgccctccccgcagtgccc

SEQ ID NO: 923208 - DNA, 591 bp, Homo sapiens
ttggagtcgtcaccacttggttcagcttatgataatccactgtcgttctccaagatctatctgacttctgcacaggccaaataggaaagttgaatggggatgtggtgggaatcaccacccctgcatctttcaagtccttgatggtggcactaatctccacagtccctccagggatgcagtattgtttttgatttactgtttttctaggtagaagcagctctaatggcttccatttggcctttcccaccataataggcctcacactaccagtcagccaatatggggattctgccagttgctaagtatgtctgtgtcaattatacattctggcactgggaaaatgaccacaggatgaatccgggacccactgtaagtcagacctgagctgaaacttcattaattayctgacctccataagcccttactctaactggaggaccacagtgatgttttgggtcccctggaatcattgtcagctcagagccagtgtccagtgtccagtagtccccgaaaggggaccagttaccctggtaaaagaccggaggtctccttggggaagcatgggagaaagattagcagtataaattgtca

SEQ ID NO: 923209 - DNA, 584 bp, Homo sapiens
cttgagctgaaggggctctctactccccctgtaaacagctcaccttaactagtgacttgcaggggtggaaggaatttgttccacactgtgtaggtctggggtgctaaggttctctgtgacacgagataaacaaggatggcaggggtgctggccccacatcatgcagtggctgaaaggctcacaagccctcctataaagcttaatcttttcctctgcattcctttcttttctttttctctttttctgttcaatccaggrgctcagacttaaagggaaaaacaggccgggcatgttggctcatccctgtaatcctagcactttgggaggccaaggtaggtggatcgcttgagcccaggaatttgagaccagcctgggcaacatagtgaaaccccatctctgtatttaaaaaaaaaaaaagaaaagaaaagaaaaaacggtttcgaacatcctatcttctaattttgttgttccctttgaaactatagctgattacatattatggctcatttttgtgtacattttaaactgataggcaaattacaagaaaaattcagagctcaaatggttaacctatgccatagact

SEQ ID NO: 923210 - DNA, 657 bp, Homo sapiens
attagaaaaaaacttcaaaagtctgccttaggcccggagcgaaacttagaaaccctgttgaacttggcaacctcagttttttataatagagatcaggaggagcaggtagaatgggacaaacaggattttaaaaaaggccaccgctttactcatggcccacaggcaagcggactttggaggctctggaaaagggaaaagctgggcaaatcgaatacctaatagggcttgcttccagtgtggtctacaaggacactttaaaaaagattgtccaagtagaagtaagctgccccctcttccatgccccttatgttaagrgaatcactggaaggcccactgccccaggggatgaagttcctttgagtcagaagtcactaaccagatgacccagcagcaggactgagggtgtctggggcaagcaccagcccatgccatcaccctcacagagccccgggtatgcttgaccatcaagggccaggaggttaactgtctcctggacactggtgcagccttctcagtcttactctcctgtcctggacaactgtcatccagatctgtcactatccaaggggtgctaggacagccagtcactagatacttctcccagccactaagtcatggctggggaactttacttttttcatatgcttttctaattat

SEQ ID NO: 923211 - DNA, 687 bp, Homo sapiens
tcactaaccagatgacccagcagcaggactgagggtgtctggggcaagcaccagcccatgccatcaccctcacagagccccgggtatgcttgaccatcaagggccaggaggttaactgtctcctggacactggtgcagccttctcagtcttactctcctgtcctggacaactgtcatccagatctgtcactatccaaggggtgctaggacagccagtcactagatacttctcccagccactaagtcatggctggggaactttacttttttcatatgcttttctaattatgcctgaaagccccattcccttgttagggagagacattctagcaaaagcaggggccgttatayacctgaacataggggaaagaacacccgtttgttgtcccctgcttgaggaaggaattaatcctgaagtctgggcaacagaaggacaatatggataagcaaagaatgcccatcctgttcaagttaaactaaaggatgccacctcctttccctgcgaaatgcaggacccccttagacctgaggcccaacaaggactccaaaagattgttaaggacctaaaagcccaaggcctagcctagtaaaaccatgcaatagcccctgcaatactccaattttaggagtacagaaacccaatggacagtggaggttagtgcaagatctcaggactatcaatgaggc

SEQ ID NO: 923212 - DNA, 687 bp, Homo sapiens
tcactaaccagatgacccagcagcaggactgagggtgtctggggcaagcaccagcccatgccatcaccctcacagagccccgggtatgcttgaccatcaagggccaggaggttaactgtctcctggacactggtgcagccttctcagtcttactctcctgtcctggacaactgtcatccagatctgtcactatccaaggggtgctaggacagccagtcactagatacttctcccagccactaagtcatggctggggaactttacttttttcatatgcttttctaattatgcctgaaagccccattcccttgttagggagagacattctagcaaaagcaggggccgttatacacctgaacataggggaaagaacacccgtttgttgtcccctgcttgaggaaggaattaatcctgaagtctgggcaacagaaggacaatatggataagcaaagaatgcccatcctgttcaagktaaactaaaggatgccacctcctttccctgcgaaatgcaggacccccttagacctgaggcccaacaaggactccaaaagattgttaaggacctaaaagcccaaggcctagcctagtaaaaccatgcaatagcccctgcaatactccaattttaggagtacagaaacccaatggacagtggaggttagtgcaagatctcaggactatcaatgaggc

SEQ ID NO: 923213 - DNA, 790 bp, Homo sapiens
ggaacccaccaagcacacatcccccggagacctgggcagccgctgttccctttggtctctatgccacccccacccaccacatgccatccaatccaaggatcaatgactttgctcctcgcttcactctggtccagtgacacctcaccaaggaggtcttacctgaccaccctgtcaccacaagccaccatcattctgyatcttctcacagcacttgatgtttccacggcagtttccactatccagcatcggcatgtatttatttatcatctcttactcccctgtatcacaactggccctctcccccaacttcacacacaaaaaccacactagaacgagggcagtcgctgcattcttcactgctgtatctttgtcacctagaatagtctctggcatatgttaagaactccatatatatttcttaactgaatagaccgtatacatcacatggtgggcaataagtgcggggcttaaaatcgtgggttttggagttaggaagagctgtgttcaaattccacctctgattttcacagaccacatgaccttaggcaattcaggtaacttctctcagcctcatctatgaaagggggctaaactgtaacagggttgttttgcaggctaaaggggatactgtacgtaaatccctgagcacagtgcccattagacagtaagtagcaattaaccaaaggtcagaagtgtcaaaaaacaaaattaccacaaatttttaaatattttaattggctttatttgcaattttagaatcaggcaacacttcattccataaaatagaata

SEQ ID NO: 923214 - DNA, 577 bp, Homo sapiens
caaaaaacaaaatttaataattagctggatgtaaaaaaaattacctgggtggcatgcacctgcagtcccacctcagaaggctgaggtgggaggattgcttgagcccaagagttcaaggttacagtgaactatgattgtgccactggactccagcctgagtgacagagcaagaccttrtctctaaaaagaaaaaaacaaaaaacaaacaaaaaagggagtttggacaagaagtaaatatgccaatcaggtaacacacattgctatgacattataggatgttttctgtattttcctttttaaaaattatttaattactttattttttataaatagagacgagatctcactgtgttacctaagctggtctcaaactcctgtactcaagcgatcctccctcctcagcctccgaaagtgctgggattacaggcatgatccactgcacctggcctgtattttcaatagacataagtgaggcacacactgtcttagctcaggctgctataagaaaatatcatagactgggtggcttaaacaacaaacatttatttctcactgtcttagaggctgggaagtccaa

SEQ ID NO: 923215 - DNA, 742 bp, Homo sapiens
tgaactcccaccatttcacacctcccacctccttaacactgtcaggggaaaacctcctgttcaagcctcagtaatggtggacaccccttccccaccaagctcgagtgtcccaggttgacttcagactgctatgctggcagtgagaatttcaaaccagtggtttttagcttgctgggctccgtgggaatgggaacccctgaatgagaccacttggctccttggcttcagccccytttccaggggagtgaacttttctgtctcactggggttccaggcactactatggtacaaaaaatactcctgcagctagctcagtgtctgcctaaacagccacccagttttgtgcttgaaacccagggccctcgtggtgtaggcacatgaggtaatctcctgacttgcagattgcaaaaacagtgggaaaagcatagtatcagggcagggtagcacagtccctcatggcttcccttgattcaggagggaggtctcccagctccttgcacttcccaggtgaggtgacgccccgtctgtgttctgcatcccctgcctaaccagtcccagtgagatgaactgggtacctcagttggaaatgcagaaatcacccaccttctgcattggtctctttgggagctgcagacaggagctcttcctagtcagccatcttgtcagatcttcaggaaatattattttatgtagtataatatataattaaagcatacactttagtatgtgcagtgtgtaatat

SEQ ID NO: 923216 - DNA, 825 bp, Homo sapiens
gaactcccaccatttcacacctcccacctccttaacactgtcaggggaaaacctcctgttcaagcctcagtaatggtggacaccccttccccaccaagctcgagtgtcccaggttgacttcagactgctatgctggcagtgagaatttcaaaccagtggtttttagcttgctgggctccgtgggaatgggaacccctgaatgagaccacttggctccttggcttcagccccctttccaggggagtgaacttttctgtctcactggggttccaggcactactatggtacaaaaaatactcctgcagctagctcagtgtctgcctaaacagccacccagttttgtgcttgaaacccagggccctcgtggtgtargcacatgaggtaatctcctgacttgcagattgcaaaaacagtgggaaaagcatagtatcagggcagggtagcacagtccctcatggcttcccttgattcaggagggaggtctcccagctccttgcacttcccaggtgaggtgacgccccgtctgtgttctgcatcccctgcctaaccagtcccagtgagatgaactgggtacctcagttggaaatgcagaaatcacccaccttctgcattggtctctttgggagctgcagacaggagctcttcctagtcagccatcttgtcagatcttcaggaaatattattttatgtagtataatatataattaaagcatacactttagtatgtgcagtgtgtaatatattatatacaaaatattatgtattatgtcaggaattaaatttataatattatcttcaatttacatataatctgtgatgtttgca

SEQ ID NO: 923217 - DNA, 825 bp, Homo sapiens
gaactcccaccatttcacacctcccacctccttaacactgtcaggggaaaacctcctgttcaagcctcagtaatggtggacaccccttccccaccaagctcgagtgtcccaggttgacttcagactgctatgctggcagtgagaatttcaaaccagtggtttttagcttgctgggctccgtgggaatgggaacccctgaatgagaccacttggctccttggcttcagccccctttccaggggagtgaacttttctgtctcactggggttccaggcactactatggtacaaaaaatactcctgcagctagctcagtgtctgcctaaacagccacccagttttgtgcttgaaacccagggccctcgtggtgtaggcacatgaggtaatctcctgacttgcagattgcaaaaacagtgggaaaagcatagtatcagggcagggtagcacagtccctcatggcttcccttgattcaggagggaggtctcccagctccttgcacttcccaggtgaggtgacgccccstctgtgttctgcatcccctgcctaaccagtcccagtgagatgaactgggtacctcagttggaaatgcagaaatcacccaccttctgcattggtctctttgggagctgcagacaggagctcttcctagtcagccatcttgtcagatcttcaggaaatattattttatgtagtataatatataattaaagcatacactttagtatgtgcagtgtgtaatatattatatacaaaatattatgtattatgtcaggaattaaatttataatattatcttcaatttacatataatctgtgatgtttgca

SEQ ID NO: 923218 - DNA, 825 bp, Homo sapiens
gaactcccaccatttcacacctcccacctccttaacactgtcaggggaaaacctcctgttcaagcctcagtaatggtggacaccccttccccaccaagctcgagtgtcccaggttgacttcagactgctatgctggcagtgagaatttcaaaccagtggtttttagcttgctgggctccgtgggaatgggaacccctgaatgagaccacttggctccttggcttcagccccctttccaggggagtgaacttttctgtctcactggggttccaggcactactatggtacaaaaaatactcctgcagctagctcagtgtctgcctaaacagccacccagttttgtgcttgaaacccagggccctcgtggtgtaggcacatgaggtaatctcctgacttgcagattgcaaaaacagtgggaaaagcatagtatcagggcagggtagcacagtccctcatggcttcccttgattcaggagggaggtctcccagctccttgcacttcccaggtgaggtgacgccccgtctgtgttctgcatcccctgcctaaccagtcccaktgagatgaactgggtacctcagttggaaatgcagaaatcacccaccttctgcattggtctctttgggagctgcagacaggagctcttcctagtcagccatcttgtcagatcttcaggaaatattattttatgtagtataatatataattaaagcatacactttagtatgtgcagtgtgtaatatattatatacaaaatattatgtattatgtcaggaattaaatttataatattatcttcaatttacatataatctgtgatgtttgca

SEQ ID NO: 923219 - DNA, 612 bp, Homo sapiens
caacttaagacctattaaaacaacaaatgggctaatgtgagcaatatttaaaagaatattaaaatattatagtcaattcaatatgggcaaaaaattttactttcttaagaccctgaaaagcagcaaaaacaaataaaagccagagtcaacaattgcaaatattaacaacaatcaaagaccattagaactaaagggaaaatgtagaactgagtaaaatgatcacatggacttaaaaaaaaaaaagtgggtcaaattaagttgaaaacaagcttggagtacattaaaatgcacctaataatggttttttaaaattcattgacgtttatacagtgttatggaatttagcctggaaggtatcagtgactttttaggaactttgaggaaatgaccccttggtctcctgatttgtacctgctgasttgcttgctagaaaacaggatttccatgagttgaagagtctgagaggctaagactgtaggcgggccacctagacaacactcaacccttgctggaggatatttggttattaaaaccatccagaaaaatgtgtcagaaaaaagtgaggaaatttagtccaaggaacagatcagaaaaacttgctaggcctgttaa

SEQ ID NO: 923220 - DNA, 579 bp, Homo sapiens
aaactgctggccttaagcagtgattggcaaactctggtgcagattagaatcacctggggagcacttaaaactcccagggctcaggccacatcccagaccaattaaatgaaaaacactggagggagatgaagcggtgatgtctgcaccagtttttaaaagtcaaataagatatttccaggaagacacagtaagaaggcatttctggcagagggaagagtccacaaaggcacagaagcatgaaacagctctgtattttggaggtaaaatcaacactattactgaagcataaaatttamaggggtggccaggcatggtggctcaagcctgtaatcccagcactttggggggccgaggcaggcggatcacttgaggtcaggagttcgagaccagcctggctaacatggcgaaaccccgtctccactaaaaatataaaaaaaattagccaggcgtggtgatgcgtgcttgtaatcccagctactcgggaggccgaggcgggagaattgcttgaccccaggaagtggaggttgtagggaggcgagattgtaccactgcacttcagcctgggcgacagagtgagac

SEQ ID NO: 923221 - DNA, 633 bp, Homo sapiens
aaatgtgaggcaatgtgaggaggaagttctagggcagtgctattgaataaatctttctacagtaatgaaaatgttctgctgggtgcagtggctcatgcctgtaatcccagcactttgggaggctgaggtgggtggattgtttgagtcccggagttttgagaacagcctggccaacatggtgaaaccttgtctctactaaaaatacaagaattagccaggcgtggtggcacacgcctatgttcccagctactcaggaggctaaggctggagaatcagttgaatctgggaggcagagsttacagtgagccaaaactgtgccactgcactccaacctaggtgacagagggaggctctgtttaaaaaaaaaaaaagtgttctatatcttttctgtctagaagaggatcttatctttccagtagctacatctggctagtatctaccatactagtgaggtagtgtggtagctgttgggcacctgatgtgtagctaattctactgaggaactgtatggctaatatctaccatattggccagtgcagttctagacaaataggcaaataacacaagaaaatatataagataggaagaatggaaagcacagagtttacgtgaaagataaagtaagttgtctac

SEQ ID NO: 923222 - DNA, 765 bp, Homo sapiens
taataaaatgtcaaaaaaataacatgctggcgaggttgcagaaaaagggatggcttatatgttgctagtgggaatgtaacttagttcagcattgtgaaaacttgtttgacaatttctcagagaactcaaagcagaattaccatgtgacctagaaatcccattattgggtatatactccagggaatctaaatcattctaccataaaaacacatgcatgtgtatattcatcatagcaatattcacaatattaaagacayggagtcaacctaaattcccatgaatggtagactgggtaaagaaaatgtgatacacacacgctatagaacactaagctgcaataaaaaagtatgttactatgtcttttgtagcaatgtggatggagctggaggccattatcctaagccaactaatgctggaacagaaaaccaaatacagcatggtcttacaagtaggagctaaacattgagtacatctggacacaaagaagggagcaaaagacactaaggtctacttgaggtggaaggagagagaagggtgaggatcaaaaattacctattactatgcttattacctgggtggaggaataatctgtaaaccaaactcctatgaaacacaatttacttctacaacaaacctgcacatgtacccctgaacctaaaataaaaattttaaaaaagaaaatgtggcacatgtacaccatagaatactatgcagccatagaaaataatgaaatcatgtctttcaaattattcagttttgcagaaa

SEQ ID NO: 923223 - DNA, 620 bp, Homo sapiens
tccgcccgcctaggcctcccaaagtgctgggaatgcagaagtgaaccacctcgactggcctagctgcactttttttgagctacgagcaaaatactacaccaaaataaccagaatatgtctcactgtaccaaattatattgctgtcaattaaaacttttattcaataaggaaaagaaaaataaatgatttaataaataactagagaaaattgtcaaaattttgtatttgttgttgcattatgagtttataaaaaattggaaaacttctataaatttttataaatcacaacttttataaatcaaattttaagaattaacttgcagaattacgctgtgggaaaaaaaaccctttctgatctttacacattaaaactatgacytaaacattaaaaatagctatgctgcataaaattcacatataataagtgttatagacaactcctgagctttagagttggacacatgtaagttcaaattctagtagtagtattttttagccatgaaccaaacatctttgattatctgctactcaagtattatttgtggataataatgcctactttacagtattagtaggaatatcagttgttattaacatttgcaaataccttgtatattgca

SEQ ID NO: 923224 - DNA, 631 bp, Homo sapiens
gagtcgggtggggacttggagaacttttgtgtctagctggagggttgtgtatgagccaatcagcactctgtgtctagctccgggtttgtggattcgccaatcagcactctgtatctagctaatctggtggggacttggagaacttttctgtctagccagaggattgtatatgcaccagtcagcactctgtctagctcaagatttgtaaatgcaccaatcagtgctctgtgtctagctcatctagtggggacttggagaacttttgtgtctagctaaaggtttgtaaatgcgccaatcagcaccctgtcaaaacggaccaatcagctctctgtaaaatggaccaatcagcaggatgtgggtggggtcagataaggcaataaaagcaggctgtcagmgctccagcaacgacctggtggggtccctttccacactgtggaagcttggttcttttgctctttgcaataaatcttgctgctgctcactctttgtatctgcactggctttatgagctgtaataccacgaaggtctgcaccttcactcctgaagccaccaagaccacgaacccaccagaaggaagaaactccggacacactatctttaagaactgtaacactcaccgcaagggtccgt

SEQ ID NO: 923225 - DNA, 655 bp, Homo sapiens
taggactcggtctcaggcacagcatcaggcctcctggctcatctcaatgtactcacagagacccccttgccactggatgcccatcatgggagctgagatcagggcaagggctttcacagggcagagatcacgggccagagaagcctgtgctctgtctctaggctcagaaatctgccaaatgctgatccagactcaaacttgggactcctggggaaatttttcttgacttatttggaaggatccatgagaaatgcaactccagcagagtcacatatataagaaggtgaaaaaagcaagacgagaggctcagaattacatttactacctagtacctcaccttagattctgggcagaactttctcccacttcctctctatggtttctgatctctttctgacttatttttaagctgcccagtttacatatgtggttttttttgtcttgtttcattttttgagatggggtctcgctctgccgcccaggctggagtgcagtggtgcratcttggcttactgcaacctctgcctccagggttcaggtaattctcctgcctcagcctcccaagtagctgggattacaggcacccaccaccacgcccagctagtttttgtatttttttagtagagacgggatttcaccatgttggccaggctgg

SEQ ID NO: 923226 - DNA, 609 bp, Homo sapiens
ccccagctcagtacctggacaacatgaatccacccccatcgtcaataagcgtctttcagagctgccagctccctctggggaaagccctttccactcgttctttgaggcccaaagctgattctggtctaattataactgtattcccagcaggtgtgacacaaagcaggtgcataataaagattcctggatggatgactcaatttctgactcctggaattctataggccattttttttttttttgagacggagtcccgctctttagcccaggccggattgcagtggcacaatcttggctcactgcaagctccgcctcccaggttcacgccattctccygcctcagcctcccgagtagctgggactacaggcgcccgccaccgcgcccggctaattttttgtatttttagtagagacggggtttcaccgtgttagccaagatggtctcgatctcctgaccttgtgatccgcccgcctcggcctcccaaagtgctgggattacaggcgtgagccaccgcgcccagcctataggccattttgtaaagtcctcttttgtccaactcccgtgcagctcagcctcttcctaccatttctgccacaggcacaggagca

SEQ ID NO: 923227 - DNA, 608 bp, Homo sapiens
gtgtacatacatcacaatatcacattgtaccccataaatatatacaatttttgtcattaaaaataaattaaatatttttaaaaatgtattttaaatagcagaaatttttattttgataaagaaaaatttatgattttgtgggtcttgcttttcatattgtttctaaaaattatttgcttaacccaaagattaaatgattttatctttccagacatttacactttgggcatttacttttaggtctataatctatatttatacaatttttatatattatatatatatatgttgctaatatgatgaatcacaattttttaaactttaagttcaggatacatgtgcaggtttgttatataggtgaactactgtcactgaggtttcttgtacagattattttgtcacycaactattaagcctagtattcattagttatttttcctaattctttctctcccacccttcaccctctgggaggtaacagtgtcttttgttctcctttatgtgttctcatcatttagctcccacttataaattagaacatgtggtatttggttttctgttcctgcaaatgacatgatcttgttctttttagtggctgcgtagaattc

SEQ ID NO: 923228 - DNA, 540 bp, Homo sapiens
catagagaccgaagaatgaaaaggatttttcctgtttggttcatggaaggaaaactttgttttagaaaatgaataatttcatgagaacatttaagactacagctaagaacatgtcaaactagcaagaaaaaaatctttgatgaggaactcagttatcaatttccatacaaaggcttatccagcacaggcatgcaggtagtttacacatggagaagtcaaaagcagcttttcaktgtctggaagccaaggcgagttctaatcatttaatcacttctgctccatatctttgtcctcattatcaaaagactcagaaaaagcctagcagtgagagaaacaagaagctgggtcacacctctaggacttattcccagaccccagtttcgccccacagggttaagatggcatcacacagccaggtgcggtggctcacatctgtaatcccagcattttgggaggctgaggagagcggatcacctgaggtcagcctagcaaaaatggtgaaaccccatctctactaaaaatacaaaaaaattagctggg

SEQ ID NO: 923229 - DNA, 597 bp, Homo sapiens
ccaaaactcttcattctccctctactcaagtttacccaagttgtaaatgccaaggcaaggatctgaactcaggtctgtgctacgattcatttatatgggcacagatttcccctgaaagaataccatgttgacccaatctctcatgaaggatctctcatgttgggggttgttcaggattccacatcccaggaggggctaccacattycttcttcagatacttatttctgcccctaatcatttagacgactttaaaaaaatgttttttcaagagaagaacaatatggtaaaatagcaagcttgagaaaagaggagtaaagcaaatgaattgtcattctggtcaatacagttgctctgatataaaatctgtctctaggcaccaagaaaaaaaggaaatagaaataagaagtagagaagaaactcatatttattgagactgtctgcacctggcactgtcctggcactaattaacataattcatataatgtcaaaacatccctgtgaggtagctgagagatgatagttttttttaacttttaagtccaggatacatgtacaggcttgttatataggtaagcttgtgtcacagcagtttgttg

SEQ ID NO: 923230 - DNA, 811 bp, Homo sapiens
aatgctacaggggttgttgtttggggccaaatgctacaggggttgttgtttggcttcctggattgtaacgagacagcaatttggcttccttcaagtctgacttagaacagcctggcttcctggactgctgctgcagattgcaggtcaaagttctattattatacatggcctagtcattttccattggtatgttcagcctcttagtatttttactgtgctctgtcttatgagttttgcagcaccgctacactcagggtgtgtgttttcttcacaaaatatgggcactgggatttrctaaatgtctggctgttgcaagtctccagagtaccttcttatcacacaattcagagtattctagaaagcaggataagaatgtttgcactaccaaactcagctctttaatgatatgtggacacaggcagacatagctaattaaactacagtaagatatgcagcaataggataagaaggaccgagaccttgaaactaagctgggcactggttggatgaggcatgccaggggtgaggggagagggaaagaaggttcaggactccaactccaataaagatctgggataaagtctgttttagaagcagagaacacaattattatatttagtaccattaaatatgctttcatttcatgctaagtgctgtgtgaagcatatttttttctagtattttgtgtaagcttcattaaaatcctataacatcaatacttagactatccctttttacagatgagaaaattaagactcagaaaaattaagtgttttgcccaagctcacatagctcgtgagatacagaactg

SEQ ID NO: 923231 - DNA, 570 bp, Homo sapiens
ctgttaacagtaaacttaactttacctttctaaaaatatgggttgcctctgtgcatccaaatcaatgttaactttcagtttaaaaaatcacaggcgatgatcttgaaacatatagcagtgtctgaatatttttacagaattttctatttctgaatttatttctttggatgaggtaaattaaaattagattcttctctttttattttttattttgcaaagaaaataccaaggtattttctcttcagttttaaatgcataaagacaatattatgttaaaccaaattaaaacttcaaaggtgtatgaaatgactaaatttattagtatctacatatcttattttgttatatactttatattttaaagtttatgatagttgatatttattatgcttattaaatgctaggtatttaacacagatggattcatwtaatcttcacagttctattacttccattttattcagacactaaaaagaaaggttaagtaacttgcccatatcacagagccactatgtagcagggctgtgatttttaactcaagataccagaactcaatatctaaggctttag

SEQ ID NO: 923232 - DNA, 578 bp, Homo sapiens
acttcaattctgtagcatggtgaagatcttagttatgcctaactcactaaggtttcatgattcaatgagtgaaataataaatgaaaagtgctgaacacagagtctggtgcagagcagaaactcaggaaccttagccaaaagccttgtagtggttcttgactcttccctttcatactctacgtgagattcctcagacaatccttgggctctgccttcaacgtgcatccggattctaccctcgctcacttccatggccacckggtccaagccagaggcatctcttacatggctatagcaatagccttctaacaggtcttatttcttcctcctgttttttacaaacaattttcagagcagtcaacatattctgctaaaattgtagtcagaatatatcactcttgttaaaagagaaccttagacaaattaaatttaaaatagtttaattgagcaaaggacaattcccaaattgggcagcccccaaaccagaataagttcaggcagatcctggagctgtgcacagtcagataaaattatgggcagaaaaaggagaatgacatgcagaaaaccgaagtgagata

SEQ ID NO: 923233 - DNA, 666 bp, Homo sapiens
gggctggggatgggggcgtgtaaaagagagcttgagacaattctaacaaatacccgagcttgctaagccttcactaaagacatttactaagtttcctgtgataaagtgaaaactgctatatttttttttccattttaaaacaaaactcaggcctggcatggtggttcactcctgtaatcacagcacttcgggaggccgaggcaggtagatcatctcaggtcaggagtttgagaccagcctggccaacatggtgaaaccccgtctctactaaaaatacraaaattagctgggcttggtggcaggtgcctgtaatcccagctacttgggaggctgaggcaggagaatccttgaaacctgggaggcagaggttgcagtgagccaagatcacaccattgcattccaacctgggcaacaagagcaaaactccatctcaaaaatgataaataaataaataaataaataaataataactaaaacaaaataaaataaaactcagtgtggtttaaatgacaatgccatggctgcccagagacagagttttgcacaataatctcttcttttcagggacatgcaagatagacattttaagtgttatttttagcttcagaattaactttttaaaagagattttaacttttattttaagttcacagttacctgtgtgca

SEQ ID NO: 923234 - DNA, 786 bp, Homo sapiens
tgcctttatgagctgtaacactcatgcgaaggtctgcagcttcgctcccgaagccagccagaccacgaacccaccaggaggaacaaacaactccagacgcgctgccttaagagctctaatactcaccgcgaagatctgcagcttcactcctgagccagcgagaccacgaacccaccagaaggaagaaaacgccgaacacatccgaacatcagaaggaacaaactccggacacgccacctttaagaactgtaacactcaccgcgagggtccgcggcttcattcttgaagtcagaccaagaacccaccaattccrgacacacatgcaccactacacctggctaatttttgtatttttagtagagatggggtttcaccacgttgcccagtctggtctggaactcctgagctcaagcgatcttcttgcctaggcctcccaaagtgctgggattacaggcactaggttatttttttttattttttttctgagaaagagtctcgctctgtcgcccaggcttgagtgcaatggcgcgatctcagctcactgcaacctctgcctctcaggttcaagtgattctcctgcctcagcctcctgagtagtcgggattacaggcacgcaccaccatgcccgactaatttttgtatttttttgtttagtagagacagggttttgccatattggtcaggctggtctcgaactcctgacctcatgtgatctgcctgcctcggcttcccatagtgctgagattacaggcgtgagccactgcacccggcctacaggcactaggt

SEQ ID NO: 923235 - DNA, 645 bp, Homo sapiens
gataactctgaaaactcaaaatgctggagtgccttctttcctccaaatgactgcatcacctctccagcaagggttttgaactgagctgagatggctgaaatgacagtaatagaaatcagaatatgaataagaaaaaaggtcattgagctacaggagtatgttgaaacctaatgcaaggaaagtaaaaattacgataaaacaatgcaggaactgacagacaaaatamccagtatagaaaagaatataacagacccagcagagctgaaaaacagtacaaaagtttcataatgtaatcacaagtattaatagcagaatagaacaagcagagaaaagaatcccagagcttgaatactggctttctgaaataagacagcctgacaaaaataaataaaaaaggatgaaaaggaaccaacaaaacctccaagaaatatgagattatgtaaagagaccaaatcttcaactcattggtgtccctgaaagagatgggggagaatgccaacttggaaaacatatttcaggatatcatccatgagaacttccccagcctagctagagaggccaatattcaacttcaggaaatacagagaactccagtaagttacttcacaagaagatcatcccaagacacataattatcagagttaa

SEQ ID NO: 923236 - DNA, 639 bp, Homo sapiens
  misc_feature 603: n = A,T,C or G
aatgcacagcaaaagaaactaacatcagagtgaacaggcagcctacagaatgggagaaaatttttgcaatctatccatctgataaaggggtaatatctagaatctacaaagaacataaatttagaagaaaaaaacaaacaacttcattaaagtgggcgaaggatctgagcagacacttctcaacagaagacatttatgcaggcaacaaacatgaaaaaaatgtcatcatcactggtcattagagaaatgcaaataaaaaccacaataagataccatctcacgccagttagaatagtgatcattaaaaagtcaggaaacaggctgggtgcagtgactcacgcctgtaatcccagcactttgggaggccgagacaggcagatcacgaggtcaggagatcaagaccatcctggctaacatggtgaaaccccgtctctactaaaaatacaaaaaaattagcccrgtgtggtggcaggcacctgtagtcctagctactcggaaggctgagccaggagaatggtgtgaacctgggaggcagagcttgcagtgagccgagattgcaccacagcactccagcctgggtgacagagagagactctgtctctnaaaaaaaaaaaaaaaaaaaaaaaaaaagtcaggaaa

SEQ ID NO: 923237 - DNA, 631 bp, Homo sapiens
  misc_feature 589, 590, 591, 592, 593, 594, 595, 596, 597, 598, 599, 600,601, 602, 603, 604, 605, 606, 607, 608, 609, 610, 611, 612,613, 614, 615, 616, 617, 618, 619, 620, 621, 622, 623, 624,625, 626, 627, 628, 629, 630, 631: n = A,T,C or G
ggagtgggagaggcttatcacttccccaaaggcctgcagctccggcaatgataaaagctaactctcagtcatcagcttccttgctattcataggcgggtccaaatcctcctttgccttccagcaaagagaagcttggaaattccttcagaggagagaccttgtttgtcacaggcagaagagccctggcagccggaagcctgatgaggatttgggtccacactgctggggctcacagacctgaagtagacaaggcctggcctgtggatggcggattctgygcagcctccggcagggaggggttgggaggtggtggtggcccccttgttcccttttccaaccataggactccgcaggccccacataagcttggaggaggtgcctttttttttttttttttttgagatggagtctcactctgtcacccaggctggagtgcaatggtgcgatctcggctcactgcaacctccgcctccctggttcaagcgattctcctgcctcagcctcctgaatacctgagattacagacgtgcaccaccccacccagctaatttttgtatttttagaaaaaacgggggtttcatgaagttnnnnnnnnnnnnnnnnnnnnnnnnnnnnnnnnnnnnnnnnnnn

SEQ ID NO: 923238 - DNA, 727 bp, Homo sapiens
cagctgatcttggacttgtcttttggatctcagcttaaatgtcacttcctccaggatgcgttccctgatttccccagactaagtctggtcctcctgtgagatcctcgaatagcatcttattctactcctttataatgcttgtcatcactttatatatttgctccattgtgtgtgtgtgtgtgtgtgtgtgtgtgttgacagagtctcactctgtcgcccagggtggagtgcggtggcacaatcttggcccactgcaacctccgcctcctgggttcaaatgattctcttgcctcagtctcttgagtagctgggactacaggcacgtgccaccatgcccggctaattttttgtatttttagtaaagacagggtttcactgtgttagccaggatggtctcgatctcctgacctcgtgatccgcctgcctcggactcccaaagtgttgggattacaggcrtgaaccaccacacctggccctcattgtgtgttttatgtctcagttccctcctaaagtgtaagctctaggacatcaggaattttgtctgttctgttttctgcaatatccctcgagtgcctaaaaaggtgtctggcacacacagtatgtgctaaataaatgttcgttgaatgaggaatggatgaatgtgatcctcagaggccacatagtgcagaggttcagagtgtaagctctggcatcaacatgtttcaaattctaactctaccccatgtgt

SEQ ID NO: 923239 - DNA, 693 bp, Homo sapiens
ccccagaaaatggatttttcttttctaccatatggtcaggctgcaattttttccaacttttatgttctgcttcacttttaaatataagttcccatttcagaccatctctttctttatgcaaatgagttaggcttttaggaagggccaggccatatcttcaacactttgcttcttagaaatttgttcctccagacgcccttgatcatctctctcaagttcaaagtttcaaagatttttagagcagggacaaaattcctctagtctctttgctaaaatatagcaagaatgacctttgctctagtttccaataagttccccatctgcatctgagaccacctcagcctgggcttcattgtccatatcactatcagcattttggtcacaaccattcaacaagtctctaggaagttccaacctttcycacatcttcctgtcttcttctgaacccttcaaactgttccaacttctgcccattacccagttccaaagttgcttccacattttcaggtgtcattatagcagtgccccactcccaataccaattttctgtattagttcattcttacactgctgtaaacacatacctgagactggatcatttataaagaaagtaagtttaattgactcacaggaagagagagagtgtgtttggggggaagtgccacacactttgaaacaaccagatctcgtgag

SEQ ID NO: 923240 - DNA, 602 bp, Homo sapiens
cctgggctgcccagccaactccttgtgagaaaaagggaccaggatcatactttctgagcttggggactctagccaagatggccaaataggaacagctccagtctacagctcccagcgtcagcgacgcagaagacgaatgatttctgcattttcaactgaggtaccaggttaatctcactggggattgtcggacagtgggtgcaggacagtgggtgcagcgcaccgagtgtaagccgaagcagggcaaggcatgacctcacctgggaagtgcaaggggtcagggaattccctttccaaaccaaggaaaggggtgacagacagcacctggaaaattgggtcactcccaccctaatactgcgcttttccaatggtcttagcaaatggtaccccaggagattatatcccacgcctcgctcggagggtcctacacccatggagcctcgctcattgmtagcacagcagtctgagatcaaactgcaaggcggcagcgaggctgggggaggggcgcccgccattgctgaggcttgagtaggtaaacaaagccgctgggaagctcgaactgggaggagcccactgcagctcaaggaggcctccctgcctct

SEQ ID NO: 923241 - DNA, 508 bp, Homo sapiens
aggtggcgtggaagataggaggatggaaatagtcttaggtttatcacacgctaaagaaaaaaatggaataaaaatgccttactttaacaccttaatattttccaaggtgattggcctatataattttatttgaccctcacgttcacttcatataggcctctttcctcatttattatttaattcattcattaatgaatatttatagagtgactagtatatgcccagaaatgaaccaggcaccaaggaagaaacaataacaagacaaacatgtttctgccacaggaagcttagatactagaggggaaataatayggaagataggttaaggggccaataaatcactatagcacaaccgttttggccgagtgcagtggctcatgactgtaatcccagcactttgggaggctgaggcgggcggatcacctgaggccaggagttcgagaccagcctgaccaatatgatgaaaccccatctctactaaaaatacaaaaattagccaagcctggtg

SEQ ID NO: 923242 - DNA, 540 bp, Homo sapiens
caaagcagtgtgtagagggaaatttatagcactaaatgcccacaagagaaagcaggaaagatctacaattgacaccttaacaccacaattaaaagaactagagaagcaagagcaaacacattcaaaatctagcagaaggcaagaaataactaagatcagagcaaaactggagatagagacacaagaaacctttctaaaaatcaatgaatccaggagctagttttttgaaaagatcaacaaaactgataaaccactagcaagactaataaagaagaagagagaagaatcaaatagatggaataaaaaataataaaggggatctcaccaccgatcccacagaaatacaaactaccatcagagaatattatacacacttctatgcaaataaactagaaaatctagwagaaatggataaattcctagacacatacaccctcccaagactaaaccaggaggaagttgaatcactgaatagaccaataacaggctctgaaattgaggcaataattaatagtctaccaaccaaaaaaagtccaggac

SEQ ID NO: 923243 - DNA, 721 bp, Homo sapiens
acaccctcaatagcatcagtctatgcagagaatactgagagataaaactagtcagattttaatttttaattaaattcttaatttaatgatagaacccactaaattccttaagaattagatgtgagatgtgagagaaaggaaaactcaggcatgatccttgamtcatgctttaggctgagccactgggaggacatcaagtgagctgaagagacttggagaacagctttggaaggaagatcaagagctcagatttggacaacacaaacaacataatcaaacatacaaagcccatttggacatccaatttaaattgtttatcagatatccacatagagatcttaagtagatagttggatatatgagtgtcacattttggagacaattctaggcaggagtagaaatatgagcatgaccagcaaataattcatatttaaggtcaggagactaacaagacacagctaacaaatgatggagctgggattaggatttggttaagtctaagcaaaggtgtgaatgcagtctagaatgagtggatatgaaaaagcaaggctaatgtataatggtaaagccatttaaccttcttggctggaaggctagtcaaggaagggttatgtagctaaaattgcaatgagaagttcacagccattaggaaagtagagtaatttcttacatgcaatttcatttttactggatcagggaaatatttggagttaaatatgaa

SEQ ID NO: 923244 - DNA, 595 bp, Homo sapiens
gtatacacagtgtcctccaggttcatccatgttgtagcatgtggcaagattttcttcttttttagagacagggtctcactcggttgcccaggctggagtgcagttgtgtgatcacagttcactgtaacctcgaacttctgagctccaacaagactactgccccagccccagccaccctgcctcagaagtcaggactacaagtgtgcaccaccacacccaactaatttttttatrtataattttttgtggagacagagtttcactatgttaccccagcaggtctcaaactccaggactcaagcgatctacctcaacttcccaaagtgctgggactacaggcgtgagccacctttcttcttttaaagactgaatgttatttgaatgttattccattgtatgtatataccaccttttctttatccattcatgcatcagtaggcgtttgcgttatttccatttcttggctattgtgagtaatgctgcaatgaacatgggtatacacacaccttttcaagatcctgctttcaattcttttggatatatagccagaagtggaattgctgggtcatacggtaattttgacggaccaccatac

SEQ ID NO: 923245 - DNA, 710 bp, Homo sapiens; identical to SEQ ID NO: 922553

SEQ ID NO: 923246 - DNA, 545 bp, Homo sapiens
gaatctctaggacacaactatagcattaaatgcccacattgaaaagttagaaagagctcaagttaacaacctaaacaactaaggaactagagaatcaagagcaaagaaatccaaaagatagcagaaaacaagaaataaccaaaatcagagctgaactgaaggagatagagacgtgaaaaamcattcaaaatatcaacaaatcctggagctgattttttttaaaaattaataaaatagaccactagccagagtaatagagaagaaaagagagaagattcaaatgagcacaatcagaagaacaaggatgatactgcactgacccaacagaaatacaaacaaccattagagaatattatgaacacctctatgctcataaactagaaaatctggaagaaatggataaattcctggacacatacatcctcccaggactgacctaggaaaaaatggaatccctgaatagagcaataacaagttatgaaactgaggcagtaataaatggcccacaaaccaaaaaaaaaaaaaaaaaaaaaaaagcccaggac

SEQ ID NO: 923247 - DNA, 545 bp, Homo sapiens
gaatctctaggacacaactatagcattaaatgcccacattgaaaagttagaaagagctcaagttaacaacctaaacaactaaggaactagagaatcaagagcaaagaaatccaaaagatagcagaaaacaagaaataaccaaaatcagagctgaactgaaggagatagagacgtgaaaaaacattcaaaatatcaacaaatcctggagctgattttttttaaaaattaataaaatagaccactagccagagtaayagagaagaaaagagagaagattcaaatgagcacaatcagaagaacaaggatgatactgcactgacccaacagaaatacaaacaaccattagagaatattatgaacacctctatgctcataaactagaaaatctggaagaaatggataaattcctggacacatacatcctcccaggactgacctaggaaaaaatggaatccctgaatagagcaataacaagttatgaaactgaggcagtaataaatggcccacaaaccaaaaaaaaaaaaaaaaaaaaaaaagcccaggac

SEQ ID NO: 923248 - DNA, 455 bp, Homo sapiens
agcttggttgggggaggggcatccaccattactgagacttgagtaggcagttttcccgtcactgcttaagaggctgggaaggtcagactgggcagaactcaacacaatgcagcaaagaggctgtggccagaatgcctctctagattcatgttcatagggtatctctgaaagaaaggcagcagccccagttaggggcttatagataaaactcccatccccctgggacagagcacctgtagagaggggcgaatgtggttgtagcttcagtgaaataaaacgatctggcttgatggctctgaagagtgcagcrgatcctgacaagcaggatcctcccagcacagcactagagctctgttaagggactgagtgcctcctccagtgagtccctaacccccatgcctcctgagtgggaaagatctcccaacaagggttgactgactcctcatacaggagag

SEQ ID NO: 923249 - DNA, 589 bp, Homo sapiens
gtttaattcattcctttttaaggctgcatagtattccatggtgtgtgtgtgtgtgtgtgtgtgtgtgtgtgtgtgtgtgtgtgtatgagcaaatgcattatccaaaagaaaatacatattatatttacacaacataatctttcctccctgaaaattaaaaatccctttttcaagcccttcccactgttattcagaacgtatcatagtgttctattctctctagaatcaagaaagccccttgggacaagttagatgctcagcaatgtctactggctctgcaagatctcctgaagaatgagaccttcaagacataagtgggcgcatagaaaaatagaaagggcagcttgatctcatatatatatataaaatatrtaatcatggtatatatataaaatatatatataatcatggtatatatatacataatatatataatcatggttccatgatttttgctgaattgtgctgctataaacatgtgtgtgcaagtgtcttttttgaataatgacttgttttcctctgggaagcgggattgctggatcaaatggtagttctacttttagttatttaaggaatcgccacactgttt

SEQ ID NO: 923250 - DNA, 760 bp, Homo sapiens
tgtctccaaaatcaaccttgaaaactacagaaacaagaagaaattggctgttggaagtaaatgaagactgtgagaaacccctgggaagaagggaactagtgactagaagggagggaggcagccgaagagcacagcagtcacatggggaggaggatgtccctggaagcttgggaggctctggggaggtcatatataatcttagctcttgtctcccgtacttcacctgggaagctttgctgccctcccagtgttgtgaagcactaccagaggagcacaaggccaggctaataaggagctgatagaaataggactaggatgaattgtaccctggaatgttcaggcctccaactcctgtcagcagaggttattggtccctggrgctctctcctctgaaacttaacccttctgctttcctcaaattctcaaaaaaggattcagttgagaatgtgtctttgagcacttccctaatagacaacacagagcagtatagctgatttcatcagtaaattaatgtgatgctacaggttcaaagaaactaggttcctatattagtccattttcacactgctataaagatactaccggaaactgggtaatttataaacaaaagaagtttaattgactcacacttccgcatggctgaagaagcctcaggaaatttatgatcatggcagaaggtgaagggaagcaaggcacatctgacatggtggcaggagagagagacagcaagcataggaaatgacagacacttatcaaataa

SEQ ID NO: 923251 - DNA, 623 bp, Homo sapiens
tcttcatattgatctacacattcaatgaaatccctataaattccagcctttttttttttgcagaaattgacaagctgattgtaaaattcatatgaaaatttaaggaactcaaaatagcattaaaaaaaatcttgaagtacaaaaacaaactttgaggaatcacacttcttggtttcaaaacttactagaaagctacaatattcaagatgatatgatactgatttaaggctagaaaggtagattaaagaaatagaattgagactccagaatcagtctttacattatggttaacaatttttgaaaaggacgycaatctaattcagtggcaaaagaatagactatgcaaaaaataatggtaggaaaactagatagtcacatgcaaaagaagttggaaccttaaataatttaccaaaatttatttaaaatggatcagatatctaaatgtaagcattaaaactacaaaatttttagaagaaaacataggagtaaaccttcataaccttgaattaggaaatggttcttagccacaacactgaaagcacaaacaataaaagaaataataggtaaattggatttcatcagaatccaatatctatggatttcaaaggataccattaacaagg

SEQ ID NO: 923252 - DNA, 627 bp, Homo sapiens
ggaaggaggcattggaagcacctaggatagtcaccaatccaaacaccctacaatggagctacagactgacaccctgtgatagggctacagttaagggatatctccccaggattatttctccattgcaattaaatccttgcacattggatcagcagtaccccaccaatagagtaccagagtcagccccagtccaaaagaactargcagccacttgggctggcctctggatccattgctggagcgtgggggggcactgaaccatgagcaggtagccacaagggcaatcctggacaagcccctgaatttgtaactgcccagggggttcaccttgcccactgcgtagacagagccaattcatcaagacgggaattgcaatggagaaagagtaattcaagcagagctcgctgtgtggaagactggagttttattattactcaaatcagtctccctgagcatttggggagcagagtttttaaggataacttggtggctgggggaagccagtgagccaggagtgctgattggtcagggatgaaatcatagggagttgaagctgtctccttgcactgagtcagttcctgagtccagggccacaagatcagatgagccagtttatgtaggggattg

SEQ ID NO: 923253 - DNA, 627 bp, Homo sapiens
ggaaggaggcattggaagcacctaggatagtcaccaatccaaacaccctacaatggagctacagactgacaccctgtgatagggctacagttaagggatatctccccaggattatttctccattgcaattaaatccttgcacattggatcagcagtaccccaccaatagagtaccagagtcagccccagtccaaaagaactaagcagccacttgggctggcctctggatccattgctggagcgtgggggggcactgaaccatgagcaggtagccacaagggcaatcctggacaagcccctgaatttgtaactgcccagggggttcaccttgcccactgcgtagacagagccrattcatcaagacgggaattgcaatggagaaagagtaattcaagcagagctcgctgtgtggaagactggagttttattattactcaaatcagtctccctgagcatttggggagcagagtttttaaggataacttggtggctgggggaagccagtgagccaggagtgctgattggtcagggatgaaatcatagggagttgaagctgtctccttgcactgagtcagttcctgagtccagggccacaagatcagatgagccagtttatgtaggggattg

SEQ ID NO: 923254 - DNA, 522 bp, Homo sapiens
ctgtttttagacacataaggggagcccagagaaagcctctgcctacatccactgtcccccaagtgccctcagtatgaaatgtcaacacactgaaggggcatattttatagtggcatttcctgaactcctttaatgcataagcaaaccttttttcctgttaatctgtccattgtcagttaatatacaggcccccaaccactggattcamcctggcagaggaaaagctttccttccaacaagttactcgtataacctggtttctgagcattggctgctgttctcactgcatttgctgcggaagaattgttcaagggtggtataacctgtgtggcagaggtacttggcagcaatcacttcagcataccctcagaatgtgcctatgatctaagaagaatgtgtgttcagagttctgagctaaggaatctgggagtggccaacctggagattcattccttatctatgaaggacatttgaatccctggcccattagttggaaggcaggctgtacagaggattgaggcc

SEQ ID NO: 923255 - DNA, 522 bp, Homo sapiens
ctgtttttagacacataaggggagcccagagaaagcctctgcctacatccactgtcccccaagtgccctcagtatgaaatgtcaacacactgaaggggcatattttatagtggcatttcctgaactcctttaatgcataagcaaaccttttttcctgttaatctgtccattgtcagttaatatacaggcccccaaccactggattcaccctggcagaggaaaagctttccttccaacaagttactcgtataacctggtttctgagcattggctgctgttctcactgcatttgctgyggaagaattgttcaagggtggtataacctgtgtggcagaggtacttggcagcaatcacttcagcataccctcagaatgtgcctatgatctaagaagaatgtgtgttcagagttctgagctaaggaatctgggagtggccaacctggagattcattccttatctatgaaggacatttgaatccctggcccattagttggaaggcaggctgtacagaggattgaggcc

SEQ ID NO: 923256 - DNA, 616 bp, Homo sapiens
tggagtgaggcggtaaagtgaggggcagcagggctgtgtgtgcatgggtgtgttacctatcacattctgctgctcagatgcagttatggagttgagtggcaatttggatatattcagggtttatgttttgccctgaagagctcagttgagggtgagagaagcacagctctttagagttttggcactggagtaataataaccttgggccttgaaatctaagctgagtacggatcaaagtgaggctaagaaaggaaaygagggatgaatagatcaatgtattggaggtcctggggcagttgaggagctgttgaactgagagcactagactgattaaagtaaaaagatagcatgtggtagtcaaagaagggagaagttgaaattgagtttatgagttattagtaatggcatgatatagtatagcacgtgactgaatgtttctatgtaaaggtagatttagaagacaaggccatgggagagaggaggtaaaggcagtgagaagccagaatactggatgcatcatccagatgtttcaactatctatcgttgcaaagcaaactcctaaaaacttagggaggggggagggatagcatttggagatatacctaatgttaaatga

SEQ ID NO: 923257 - DNA, 763 bp, Homo sapiens
tcgaagagtcaacttgacttctgaggagagaagtagaaagtcaacttgacttcaggggagagtgacctgcccttcccatctgctttccagctcccttctctactgagagccactttcattgctcagtaaaaatcttcgcattcaccagccttcagttgtccacgtgacctcacttttcttgggtactggacaagagttcgggacccaccaagtgcagtacccaaaaaggctcacactagccctttgctctcactggtggagggccgccaccccatgcaatgaggcaaagggaccactgagctgatagcactctgctgtcctcagatggtgaagctaagasagcactgtaacataccctctggggttttggggtcacaggcacccccatctggatgctgctgcaggcctgcctggagtttgctcctgccagcgccaaagcagccagccagttcctacactcattcgctcatgtgctccctcccacaaggagttgagtgtggaagcctgagtaaatggggcacccctgttgcaagtcctgcaaaggggtcaaggaaaaatcctgcatcaatttccagatgattttccttacagggtttagaaggaactttcttattatgctggctcagtacaactaattgctctgaatcttctgtttcttgggaaaatggcctttttcaaagttcagtttgattatgtggcacttagcatgagtgagtccatttaggtttggccgggtctgctgggaactagagcagaagcttag

SEQ ID NO: 923258 - DNA, 763 bp, Homo sapiens
tcgaagagtcaacttgacttctgaggagagaagtagaaagtcaacttgacttcaggggagagtgacctgcccttcccatctgctttccagctcccttctctactgagagccactttcattgctcagtaaaaatcttcgcattcaccagccttcagttgtccacgtgacctcacttttcttgggtactggacaagagttcgggacccaccaagtgcagtacccaaaaaggctcacactagccctttgctctcactggtggagggccgccaccccatgcaatgaggcaaagggaccactgagctgatagcactctgctgtcctcagatggtgaagctaagagagcactgtaacataccctctggggttttggggtcacaggcacccccatctggatgctgctgcaggcctgcctggagtttgctcctgccagcgccaaagcagccagccagttcctacactcattcgctcatgtgctccctcccacaaggagttgagygtggaagcctgagtaaatggggcacccctgttgcaagtcctgcaaaggggtcaaggaaaaatcctgcatcaatttccagatgattttccttacagggtttagaaggaactttcttattatgctggctcagtacaactaattgctctgaatcttctgtttcttgggaaaatggcctttttcaaagttcagtttgattatgtggcacttagcatgagtgagtccatttaggtttggccgggtctgctgggaactagagcagaagcttag

SEQ ID NO: 923259 - DNA, 763 bp, Homo sapiens
tcgaagagtcaacttgacttctgaggagagaagtagaaagtcaacttgacttcaggggagagtgacctgcccttcccatctgctttccagctcccttctctactgagagccactttcattgctcagtaaaaatcttcgcattcaccagccttcagttgtccacgtgacctcacttttcttgggtactggacaagagttcgggacccaccaagtgcagtacccaaaaaggctcacactagccctttgctctcactggtggagggccgccaccccatgcaatgaggcaaagggaccactgagctgatagcactctgctgtcctcagatggtgaagctaagagagcactgtaacataccctctggggttttggggtcacaggcacccccatctggatgctgctgcaggcctgcctggagtttgctcctgccagcgccaaagcagccagccagttcctacactcattcgctcatgtgctccctcccacaaggagttgagtgtggmagcctgagtaaatggggcacccctgttgcaagtcctgcaaaggggtcaaggaaaaatcctgcatcaatttccagatgattttccttacagggtttagaaggaactttcttattatgctggctcagtacaactaattgctctgaatcttctgtttcttgggaaaatggcctttttcaaagttcagtttgattatgtggcacttagcatgagtgagtccatttaggtttggccgggtctgctgggaactagagcagaagcttag

SEQ ID NO: 923260 - DNA, 756 bp, Homo sapiens
tttgggcatatccacaatttaggattttcagtaaacagaattctaaaattgacattggaggaatgaaactctcaaatcaatttcctcatgtgtaaataataataataataataatacagtcatatgttgcttaatgatggggatacgttctaagaaattcaacgttagacaatttcaacaccttttgaacaccgcagagtgtacttacacaaacctagagagtatagcctactgcacacctaggctgtatgatatcctctattgcttctcggccacatacctctacagcaggttactagactgaataggtagttgtaacacagtggtaagtattgttgcgggagtccttgctcccagagctcccaagatggtggtgggctgcttccaaaatggcggcgggctgcttccaagatggtggcaagcctcttgttctctgacgtggggttcttggcctcacggattccaaggaatggaatcttgggccatgccgtgcgtgttatagctctattagaagccgtgggtcacggaagagaaccgtggaacccartgactagtgttcagctccattaggacgaagctgggcacttagccgtgcaggaacaatggcaagcctttagccggatggggagcagcaatgggcgcctcagtggatcaggagcacagcggacaccctgacggatcccgagggatggatgtcagtggcgggtctgccacgttgaccagcagcagtggtggatggcaagcaaaagctcagtt

SEQ ID NO: 923261 - DNA, 584 bp, Homo sapiens
caggcacccgccaccacgcccggctaatttcttgtatttttagtagagaagggttttcactgtgttagccaggatggtctcaatctcctgacctcgtgatccacccgcctcggccacctaaagtgctgggattacaggcgtgagccaccgcgcccagccctactttttaaattttttgtagagcggggtctcactatgttggccatgctggtctcgaattcctggcctcaagcgatcctcccgccttggcctcccaaaagctgggattacargtgtgaaaccccgcgccggtctgaacctcaatgtttgaaccaccaaattttacctgtattgacacaggccccgtcttgttgtttttctaaatctcatgtcattgtttgcatattggttacccgtggttggctttggagctgaaggtggacagagctaacatcaggttgcacacaggaacacagtgaggtcgcgaaaaagtagcgcgagctgcctccatggcccagggcgacctcaccggcgtttcctgtctgggactgcgcccacgcggtcacgtggtggcccggaggacgcgcggcggcagcggcgcacgc

SEQ ID NO: 923262 - DNA, 653 bp, Homo sapiens
gatgtttgataaaggaaacaaaaacataaaatgggaaaaggacaccctattcaacaaatggtgctgggatgactggcaagcaacatgtagaagaatgaaactgtatccttgtctctcaccttattcaaaaatccaaaaatcaactcaagatggatcaaagacttaaatctaagacctgaaacygtaaaaacgctagaagataacattggaaaaatccttttagacattggcttaggcagagacttcataaccaagaactcaaaagcaaatgcaacaaaaacaaaaataaatgggacttaattaaactaaaaagcttctgcacagcaatataaataatcagcagacttaacagaaaacccacagagggagaaaatcttgacaatctatacatccaacaaaggactaatatgcagaatctacaaagaattcaaacaaatcagcaagaaaaaaacaaacaatcccatcaaaaagtgggctaaggacatgaatagacagttctcaaaataagatatataaatgggcaacaagcatatggaaaaatgctcaacatcactaattatcagggaaatgcaaattaaactcacaatgtgataccaccttacccctgaaagaatggccataatcaaaaaattaaaaaataatagatggtggcg

SEQ ID NO: 923263 - DNA, 566 bp, Homo sapiens
ggaagcattccctttgaaaaccagaacaagagaaggatggtcactttcaccacttctattcagcatagtactggaagtcccaagaagagcaatcaggcaagagagaaagaaataaaaggcatccgaataggaagagaggaagtcaaaataactctctttgtagattatataattctatacttagaaaacacataatttttgcccaaaagcttctaaatctgataaacagctttagcaaagtttcaggatacaaaatatatgtagaaaaattagtagcatctctatataccagcaacatccaagctgaragccaaatcaagaacacaatcccttttgcaatagccacaagaataaaatacttagtaatacagctaaccagggagatatcagatctctacagcaagaattataaaacgctactcaaagaaatcagagatgacacaaacaaatggaaaaacattccatgctcatggataggaaaaaataatattgttaaaatggccatactgcctaaagcaatgtacagattcaatgctattcttatcaaactatcaaagtcatttttc

SEQ ID NO: 923264 - DNA, 604 bp, Homo sapiens
tgtcagcatttctcatcccatccctcacccacagctatatgttatagaaattaaatttcagggagtgcagttgagagggcaagagctctccttatgcctaaccctcacttgtgaggcagaggatactgaaaataatagggccctaactgccctcacctggttcatctgtagggcaaagaatctatgccagagagccctaccaagaagacaaaagacaacttcatgggtatcacacagagagaagcatgccactgtcctcatcaccggttcrgaagccctggctcagagactttcccgagggaaaaggcaagccataaaacagatagttccaaagctctctccaaagaaatgcctaaccaagctcttttgatggaaagtaattaatgggaaattgttaactttattagagatataaactaaaccattgaccagctagcttaccagagaaaatgagttaaggcccttcccgggactagaaaacaactcaaacactgacctcaaaaattaccctgaaaaggatcttagttaaagtggatcaagtatgtagagaaatttatgaaccaaggcattgttgaaaataataaatcaattaagtggaacttag

SEQ ID NO: 923265 - DNA, 649 bp, Homo sapiens
ggaactcctgtgaaggaaaatgcggaatgcacttcatacccaccccaggctgagaacagtctgatagccgtggtgtgtccagaattggttccttccagtgggttcttggtctcgctgacttcaagaatgaagccgcagaccctagcagtgagtgttacagttcttaaagatggtgtgtccagagtttgttccttcagatgtgtccacagtttcttccttccagtgggttcgtagtctcccttattttaggagcaaaaccacagaccatcgtggtaagtgttccagctcataaaggtagtgcagacccaaggagtgagcagcagcaagatttattgtgaagagtgaaagaagaaagcttccacarcatggaaacggacccaacgggttgccgctgctggctcagatggcaaacttttattcccttatttggccccacccacatctggctgattggtccattttacagagcactgattggtcctttttacagagtgctgattggtacgtttttacagagtgctgattggtacgtttttacagagtgctgattggtgcgtttacaatcctttagctaaacacagagtgctgattggtgcgtttacaatcctttagctagacagaaaagttatccaagtccccactcgaacca

SEQ ID NO: 923266 - DNA, 717 bp, Homo sapiens
cggagccttccgcccagcgccctgtgtaggtagcgagtgtcgggagaaatcatcactacgaattcgtttccatataggggcaacgccaggcggggcacaatgatctgtccttgaggacaaagagtgattccggagagagcaggtttttgtccctccacgcaggtttctctccccasaccccagccttcggcttcctcccttcctgtcacggacgcagccggagaaactggggcccagacgcggagctcactccgccagaaaccctgggtcccttcccctacgctggcaggctgggtccggttccatcgtcgcggctccgtttatccctccagggagcgcgggcagagcgccgagcgcggcgcagggactggagttctcgccagcttcgggttctttctccccggagctgcccggggggtctcggcctcgggcgctcccgccgccgtcctgttcccctcagggttcatgtcctgttcccggggccccagaggtcccgtctgagagcggcccccgcgagcttgggtgtcgcggaaccaccgctgtcggaagccgaggttacacaaacgccacgggcaggagcgggagggcaccggcggcggctgcgaggccgggccctgacatgccgctgtgtccgcagtgaaggaggagggcgaccgcgagatctccagctccagggacagtcccccggtgcgcctgaaaaagccacgcaaggcgcgc

SEQ ID NO: 923267 - DNA, 632 bp, Homo sapiens
ggaatgatatacttcggctgtgttcccacccaaatcgttttttttttttttttttgggacggagtctcgctctgttgcccaggctggagtgcagtggcacgatctcagctaactgcaagctccgcctcccgggttcatgccattctcccccgctcagcctcccaagtagctgggactacaggtgtccacaaccacgaccagctaattttttttgtatttgtagtagagacagcatttcactgtgttagccaggatggtctcgatctcctgacctcgtggtccacccacctcggcctcccgaagtgctgggattacaggcatgagccactgtgcccagyctccacccataacttttcttgaattgtaactcccacaattcccatgtgtcatgggaggaacccagtggggtgtaattgaatcatcgtggtgggtctttcctgtgctgttctcatgatagtgagtaagtcccaggagatctaatggttttaaaagcgggagtttccctgcacaagctctctctctctgcctgctgccttccacataagatgtgacttgctcctgcttgccttccgccatgattgtaaggcctctacaatcatgtgagactctaagtccaataaacttctttcttt

SEQ ID NO: 923268 - DNA, 632 bp, Homo sapiens
ggaatgatatacttcggctgtgttcccacccaaatcgttttttttttttttttttgggacggagtctcgctctgttgcccaggctggagtgcagtggcacgatctcagctaactgcaagctccgcctcccgggttcatgccattctcccccgctcagcctcccaagtagctgggactacaggtgtccacaaccacgaccagctaattttttttgtatttgtagtagagacagcatttcactgtgttagccaggatggtctcgatctcctgacctcgtggtccacccacctcggcctcccgaagtgctgggattacaggcatgagccactgtgcccagcctccacccataacttttcttgaattgtaactcccacaattcccatgtgtcatgggaggaacccagtggggkgtaattgaatcatcgtggtgggtctttcctgtgctgttctcatgatagtgagtaagtcccaggagatctaatggttttaaaagcgggagtttccctgcacaagctctctctctctgcctgctgccttccacataagatgtgacttgctcctgcttgccttccgccatgattgtaaggcctctacaatcatgtgagactctaagtccaataaacttctttcttt

SEQ ID NO: 923269 - DNA, 579 bp, Homo sapiens
acattttaacaatattaattcttccaacctgtgaacataaaatatctttacatttacttgtgtcatcaatttctttcatcaaagctttgaaatttttagtgtgcaaatccttcacatccttggttaaatgtatttctaagcactttttattcttagtagctgctgtaaatgaaatatatttcttcatttctgtttcasattgttcattgttagtgcatagaaacactactgacttttatatgttgattttttttatcctgcaactttactatattcatttattagttctaacagttttttttggagtctttaggttttcatacataagatcatgtcatcaccaaacatgaacaattttcttaatcttttcccatttggaagtattttatttgtttctcttacctaattgttctggcaaggagcgctatagtcactttcagcactatagtgaagaggtgaaattagacattcatgtcttgtttctgatcttatagggaaagttgccattgttttcatcattaagtataatgttagctgtggcttgtcatgcatggctttcattgtgttgaggtacattcc

SEQ ID NO: 923270 - DNA, 607 bp, Homo sapiens
cactactcagagggaagcttgtagctttaagtgcctataacaaataagagaaaaaacttcaaaaaacacctaattctaaaccttaaacaactataaaagcaagagcaaaccaaacccaaaattagaagaaaataaataataaagatcagagcggaaataaatgaaactgaaataaaaaacaacaaaaatcaatgaaacaaaaagttgtttttttaaaaattaaacaaaattgacaaactttagccagacaaagaaaaaatgagaaaaggtccaaataaataaaatcagaaatgaaaatggagacgttacaactgctatcccagaaattcaaaggattatttgtggcctctatgagcaacgtaagtccacaaagtgaaaaatctagaagaaatggtaaaattcctagacacatacaacstacaaagactgaaccataaaaaaaaatccaaaaggtgaacacaccaataacaagtaacaatatcaaaacgtaataaaaattctcccagtaaacaaaatcccaggacttagtttcaatgctgaattctatgaaacgtttaaagaaaaactaatacaaatcctacttaaactattccaaaatatagaggag

SEQ ID NO: 923271 - DNA, 707 bp, Homo sapiens
gtctggtgggaacttggagaatctttatgtctagctaagggattgtaaatacaccaatcagcactctgtatctagctcaaggtttgtaaacacaccaatcagcaccctgtgtctagctcagggtttgtgaatgcaccaatcggcactctgtatctagttaatctggcggggacttggagaacctttatgtctagctaagggattgtgaatgcaccaatcagcactctgtatctagctcaaggtttgtaaatgcatcaatcagcactctgtgtctagctcagggtttgtaaatacacmaatcaacactctttatctagctaatctagtggggacgtggagaacttttgtgtctagctcagggatagtaaacgcaccaatcagcatcctgtcaaaatggaccgatcagctctctgtaaaacagaccaatcggctctctgtaaaatggaccaatcagcaggtcagcaggatgtgggtggggccagataagagaataaaagcaggctgccagagccagcagtggcaacccgctcgggtccccttccacactgtggaagctttgttctttcgctctttgcaataaatctcgctgctgcttactctttgggtccatactgcctttatgagctgtaacactcactgcgaaggtctgcagcttcactcctgaagccagcgagaccatgaaccccccgggaggaatgaacaactcc

SEQ ID NO: 923272 - DNA, 702 bp, Homo sapiens
ttcctgaggatctatttgctactggtttatattggatgcaattaagttgccttttaaaaattatggtttctgaccttatacccaatttctaactcatccaaaatgtctgttttatgttacattttaatcctcaattctcagtactggccgttcataccttgttcaagtacgacttgagacttcattcgacttcacacagccctgtgagcacttgagtggtaacaaggggtttctgccattcatcctagttgaatcacagctaagtcacaaagccatttggactcattgcaaaacttttttctctaacactgagtggcactgaactgattatgagcatgtactcaccctgaccacatcattacatgattgcaacatcctgaacaaactcattctgcagcaccattgccacgtccacagaagcaagcattgcagccctgtgtgtagaccatactgcactgtgatgtcctgagcccgcactcaagaacctcttytgattcaaacctggaaacacgctgcttccctacctgactgcccgtcactgattttcttgtgtaagtagctttcaactgcacttgtgagatagaaagaaactagagatgatttctcctctgaagacggaaccctcaggattgctgacacgtcattcttacacaccatgtcagcccatatttcccacccctgcaaaggacattgcatatcatc

SEQ ID NO: 923273 - DNA, 574 bp, Homo sapiens
aatctccaggaagcccagggagaactcagaccttgccccaggctataagcttccctgctgagaaagcaagcatcactttcaggcctcacctgcccctccctgtctgcccacacgatgggccatggctcctgtgcttctttctgcagcagttcctgttcaacacctggattctgctcaagagagtttatgcccaataaaattattataaagttcagtttgaagcttcccttctcttcctagcagatatctggggtatgtgagagagagaggaaagagcgtcctctttccctcttctgtccttccatcccygagtccaggcgaccttggcagtcaccaccataggtgttaaaatgacttacactcatgaagcagggggtttagggggtgaaaatctgccattcttacccacatatgccctatctcccttattgtcagtagccttgaattccctagacctcatttatgccatggacactaacgtggcctttatccatcaaacaggaagcttgggcatggcttaattggcaggaatcagccacgatcacctgtgctgtgccttttaacctctgttgtt

SEQ ID NO: 923274 - DNA, 614 bp, Homo sapiens
cagctggggactagagacaggtgtgcagccctcggtttacagaggctgtgagaccaagagagttccaagacctccaggaaaacatctccctgctaaaaggctttcccaacctttagaaatctattcattttccccactttccatcctctttctcttgctatctctttatcgctcctcctgccttcttcctttctttccttcagtaaacgttttttgaaacgatgatgagcaaaaaacgcctgatccagtctatggcgcgtttcggtgggaagatgaacacgccttcccagcagagtaaaacgtgattacaccaaggaccggtaccctctcccttccctcggccaggtccacgtccccaggcgtcggagaaggggttggaccgcgcagcggggcgtcagakttgccaggcgcccggggcaaataccggcagcggtggttgtgcggtgtcctagcaacggggcggcagcagggcacacacaccgcccaagcccggacggtggccgcgaagctagggccaccatggcggaccgcaggcggcggctccggccggggacgttggccccggtgcgcgagggcgtgaactgcaggtccaggtaaacactcagcgcccgggc

SEQ ID NO: 923275 - DNA, 622 bp, Homo sapiens
acttatcttccagccaagatgcttgggaatcttagaacaagattttgttcccccaatctcagacatcctgctgccttgtatatgagctcatttctgagaccatgcagtgaaaacaactatctaactcataccaatgggtggcctagtcaacctgataaggtaacaattcttgaactctgacatatggatgtcagacaacatagtgaaaatgtcatatttgttatctctcttmgtttggatttatcgaaaagtaaacccaaaaacaagaatttgagtacaggtaacttacttaggtgcaaaaagattgataatccttagaaatgagctcttaaatcatgccattaacttataagattatctcctgcatagagagacgatagtctagcaaatagcaagacaatttcttgtatatcgagaaagaaccaacccttgcaattaacttaaaatgaactcccaggcccacctatactagttgtctaactgcctggccacccagctttattcattcgaggattgaccacacagctcagttttcctctctatgttaagaccttccatccctccaggaggttttgacacacagactctggtgcctcaattatctggcctcctcacttcccaa

SEQ ID NO: 923276 - DNA, 552 bp, Homo sapiens
gacaattgcccttatcccttaacatctcctaagagtcaggtctgagtatctgaggctcaggattatgacctgaaatataccttctcatttgcaatagggtttgagacctcttaatacttttaaagcatctcacaaggcatcctggaagtaatgttgtccayggttagtcaattataagtcaaatatatctttccactccaaagccccccaaaattaaaatttctcactgctctctgggtccatctttccattcagtattccattgattcccattctgctttcatcctcaatttttccatcatttccataggctttagatgggataaaaatgtgaagcccctatctcttgcagtaccataagggagattgcctctgtcccagctcagcaaagatttcaaggcccagattcaaaacaacagattggcttgctaagcaacaaaattattgccttgatttgtaggggaatttgcctcgtggtgctcatatcattaccgatataaaaggcagttctgtgcttctccaacctggcacgcatctgactccactgccaag

SEQ ID NO: 923277 - DNA, 604 bp, Homo sapiens
gaggtataacaaagaggagcaaggatgactccagggtttgggcttgaggaattgaaagaatgaagttgtcatcatctgagaggaggagcgtggggcaagagcacctctgagtggctccttttgcacgcatgaagatggacatggcataatgttgtgtccatcatttataactgcatttttcaattgccaaatgtatcmtcagtagtttcctttttttaaattagattatacattcttcagggacattggctttgtgttttcacctgtgattcaaattccttagaaggtaaggagtaaataattctacatttgaaatccaaagcctgattcttattaggataagaatattttacatattattttaggattttgtggctaagttttttaaaagtaattttgacttaggttttcaatatttcagtaacatgcaagtatacataaaacaaactatagtctgaatatttgcatttgtaagatacattgatggattgtgatattcaggaacacaatatgtgttgacaacagagagacacgttttggaaccaatctttctctttctggttttgttttcactatctgattaaagagttagaagtaatgcaat

SEQ ID NO: 923278 - DNA, 772 bp, Homo sapiens
attttaatttgatggcaccatccatttacctttccaaaaatcatagccccctaaataattatgctatagaaatcctatctgtgctatataagttaaacaacaaagcctggatgacaacacatctgttcacttcatggtttactgatcattataagcccagtgctgagatatgcttctcagaaaagaagatttccttcaaactactgtgctccttgacaatgcacctggtcacccaagagctctgacgaagttgtataagaaaattaattctgttttcatgcctgctaacccaacaccctttctgtattccaaggatcaaggagtaattttgactttcaaatcttattagttaagaaatatattcaataaggctatagttgccatagayacaaatattgattagattcctccaatggatttgggcaaattaaattgaaaatctcctagaaaggattcagtattccggatgccattaagaacatttgtgattcatcagaggaggtcaaaatatcaacattatcaggaatttggaaaaagtggatttcaaccctcatggatgactttgatgaggggttcaagacttcagtggaggaagtaactacagatttgatagaaatagcaagagaactaaaattagaagtggaacctaaagatgtgactgaattgctgcaatcacatggtaaaacttgactggataaggaattccttcttatggataagcaaagaaattggtgttttgagatggaatccactcttggtgaagatgctgtga

SEQ ID NO: 923279 - DNA, 646 bp, Homo sapiens
acatattccactaccttcctttgacacatatgctgactggatgctacaaaatataatgtaaagtttaactatcaaacacttgcaaaatcttgtatttctaaagcatatgctgttaaaataaggagaggtttcaaattaatgaaatagagagatttgtgagacttagaatttatctcacaaactaaagattgggtacactttgttcacaaacacaaggatataccatatcacatacatttacacagacagatgtatatataaccctatatatatagaaatatgtgaggcttaggcaaagtaaatttaatagaatcataaatcttaaatatgagcacatttagaaaatatgccaggtatgaaggaactgtgttttaaaaaaaagcaacaaaattagagtcagaatttcatgaaacagaatcagagatatgtcactgkgtgaatttggtcttatctttgcacgtagtattaataattttaaagattaggccgggcacagtggctcatgcctgcaatcccagcactttgggagggtgaggtgggcaaatcacctgaggtaaggagttcaagaccagcctggccaacatggtgaaaccttgtctctactaaaaatacaaaaattagctgggtgtggtggtgcacgcctgta

SEQ ID NO: 923280 - DNA, 649 bp, Homo sapiens
tccctcctagtgaaaatgtcatgtgttcatgcctaagcctggggaattcaacactcccaatagcacatcttcccataaggcctatagcgctaggcttatttttctcttggatatttttcatattccagatctatcaaaaatatttaacagagcatgtctctgaaatgttattaaatgtaacttcacatttttgtatattaagtattcctataacagtcrcagattgcttatcttttttgaaagtgtaaactttgaagaaagaaatgaaataggaacaggtgagagagtcttttatgcaatttttcctcatggttgcttactctttcaaaacttcagaaagctgtgagttgttgagggaaggagagcaggacagatactgtgaatctgcattagcaggcaagaaaagaaggaaccgtagtcagaagcagttggatataccacaagaaaggatggaagcattaaaatgtgtcctaaagaaaggcatggcaatcagaatttataacacctaacctaaatgggaagtaagacttttttgtcaataaaataaatgttaaataggaaatataaaattacagtaaatatacatggaaaaaacaggaatcaatattttattgtctaaatggagccctccctactatagatgacgcca

SEQ ID NO: 923281 - DNA, 607 bp, Homo sapiens
gctaaggtaggatgcatgataaacaaagattataattgtttaaatgcctaaaaatgatttcttctatcttgacatttgataatttcactggtcatagaattatcagtagaagaataaacaaatttgaaggcatgtttttacggttcttttatttgttttttcatgagctgggtcagatgggccacataattttatttttatattcaagtcattttacatagcagaaataaaaataaagaggcagtgacatttcattagaaagttttggttttggaggaggaatcaagatggccaaatagaaatagctccagtctatagcttccagtgtgagtgacgcaaaagactggtgatttctgcatttccaactgaggtactgggttcacctcactaggacttgtcggacagtgggtacaggatagtgggtgcggcccacggtctgtgagccaaagctgggcgaggcaytgcctcacctaggaagcacaaggggccggggaattctctttcctagccaagggaagcagtgacagacagcaactggaaaattgggacactcccaccctaatactgcaattttccaacggtcttagcaaatggcacaccaggagat

SEQ ID NO: 923282 - DNA, 658 bp, Homo sapiens
cactgtgttattttgcttactatctactctgtgttataaagatactgctgaaaatgtcagaagaaataggcctacatcacataaccctatgggttacagtgataagaaaaagggaacatttatgtttagcacaaaaagtcaagcagttggggaaactggacagtggtgtcagtgtgaaacatcctacagatgagtatggggttggaatgaccactatatatggcctgaagaaacagaaggataaactgtgctatgtgagaagtgataagcagatcttaatgaaaaatggaaaaacactgcacaaagccaaaagtgaaggtttcaatcttgtatggaaagagctgatctgtcagtgttgcaatgaatccatgccacttaatggtacgctgatcatgaaacaaacaaggwtctatcacaatgaactgaaaactgaggaaaactgcgtgaatgttcaaaaggctagttgcagaaatttaaggaaagatgtgacattaaatgtttagagattttcagtgatgaagcatctactgattacaaagcagtggagaaattcattgacaagtgtgcaaaggtcattgctgatgaaaatctgacacctgaacaagtctataatgctggtgaagtatcactgtgttggcatattgccccagaaagacac

SEQ ID NO: 923283 - DNA, 570 bp, Homo sapiens
gacccccccacctccctcccggacggggtggatgccaggcggagacgctcctcatttcccagacggggtggcagccaggtggaggggctcctcacttctcagacggggcagttgctgggcggagggtctcctcacttctcagacggggcggccgggcagagacactcctcacctcccagacrgggtcgcggccgggcagaggcgctcctcacatcccagacagggcggcggggcagaggctctccccacatctcagacgatgggctgccaggcagagacgctcctcacttcctagatgggatggtggccaggacgaggcgctcctcacttcccaggtgggatggcggccggttagagacgctcctcactttccagactgggcagccaggcagaagggctcctcacatcccagacaatgggcagccaggcagagacgctcctcacttcccagacggggtggcggccgggcagaggctgcaatctccgcactttggggggccaaggcaggcggctgggaggtggaggccgtagcgagccgagatcacgccactgcactccagcctgggcacc

SEQ ID NO: 923284 - DNA, 587 bp, Homo sapiens
tgtcgcatgccccatgagtccaccatctctgagcttagttcgacactaggactcactgctgcctggggtggggcaggggtggcgtcttggcaattcagtggcgattcaggactgttttttgtatctcttcagtgcctctttcagtgatatgaagttaaaaccaggtacttatgagtgctcacctgagttttggttcttacgaaggtatttttttctatatagatagttcttaacttggtgtccttgcagggcggtggcggggcagcggggacgggacgacaggtggagccttctattccgccatcttgccccacctccatatgtgatattttgatacatgaatataatgtgtaatgatcaaatcagagtaattagcatatcagtctcctcacacatgtattwtttttttgtgttggaaacgtttcaaatcttctggctattacaataaattattgtaaactatagttaccctgttgtgctgtcaaacaccagaacttatttcttccacctaactgtactttcgtacccattaaccaacctctttacaacctcctaacccccttcccagcctctggtaatcatcatcc

SEQ ID NO: 923285 - DNA, 707 bp, Homo sapiens
ccaccattctactttctgtcactgtgaatttgactatactaggtacttgatataagtggaattgtacaatgttttcattttattactggattatttcacttaacataatgtcttcaggatttttccatattgtagtatgtgtcagaatttccttcctatgtaaggctaaacaatgtcccattgcatgtacataccatgttttgtttatccattcatccatgatggacatttgggttgtttctaccttttggctatggtgaatgatgctgcgatgaacatggatgtacaaatctctgttcaagtctctcctttaaattcttttgtgtatatacccaggaatagaactgctgagttatttagcggtttcaagtttaactttttgagaaactgccaaactgtctttcacagcagcwgtgccactttacaggcccaccagcaaagcatgagatttccaatttctccatatcctcagcaacacttgttattttttggtagttgttgttgttttataagaaccatcctaagaggtgcacacccacctatatacttttaacattttgaaaatgatacttaagacaatataagggtactattctgatagtgtttctttacaaccacaatgtttggttaatttggtggttattttgttaattgagaaggtacaattagtggtgcttccaactgaatccatcaactaaacttcctga

SEQ ID NO: 923286 - DNA, 751 bp, Homo sapiens
ttgaaaaataaagggacagagtacaaaagagagaaattttaaagctgggcatccgggggagacatcacatgttggtaggttccatgatgccccacaaaccgcaaaaatcagcaagtttttattagggattttcaaaaggggagggagtgtgcraacaggtgtgagtcacagacatcaagtacttcacaaggtaatagaatatcacaaggcaaatggaggcagggcgagatcacaggaccacaggaccggggcgaaattaaaattgctaatgaagttttgggcaccattgtcattgataaaaacttatcaggagacagggttttgagagcaaccggtctgactaaaattgattaggtgggaatttcctcttcctaataagcctgggagcactataggagactggggtctatttcacccctacagtctacagaccataaaagacgagcacgcccagtgggccgtctatagacatatacccccaggcgtgtattctctttcccagggatgtttcttgctgagaaaaagaattcggcaacatttctcccatttgtttttgaaagaagagaaatatggctctgttccgcctggctcacgggtggtcagagtttaaggttatctctcttattccctgaacaattgctgttatcctgttcttttttcatggtgcccagatttcatatttgttcaaacacacatgctctgcaatttgtgcagttaacgcaattatcacatggtcctgaagtgacataca

SEQ ID NO: 923287 - DNA, 582 bp, Homo sapiens
gtgtctttgttctcgttggtttcaaagaacatctttatttctgccttcatttcgttatgtacccagtagtcattcaggagcaggttgttcattttccatgtagttgagcagttttgagtgagtttcttaatcctgagctctagtttgattgcactgtggtctgagagacagcttgttacaatttctattcttttacatttgctgaggagagctttacttccaagtatgtggtcaattttggaataagtgygatgtggtgctgagaagaatgtatatgctgttgatttgggatggagagttctgtagacgtctattaggtccacttggtgtagagctgaatttaattcctggatatccttgttaactttctgtctcgttgatctgtctaatgttgacagtggggtgttaaagtctcccattattattgtgtgggagtctaagtctctttgtaggtctctaaggacttcctttatgaatctgggtgctcctgtattgggtgcatgtatatttaagatagttagctcttcttgttgaattgatccctttacaattatgtaatggtcttctttgtctcttttgatc

SEQ ID NO: 923288 - DNA, 532 bp, Homo sapiens
aattcaaatttcccatggctatatggacacacacaaaaacaatcaccaaaacacaatccaactgctgcagcaacaaacaagccccaaaagtgtccaaactgaaagagttagggtgcttcatctcttcattggttgagcttgatcaacctacaaacagaaattccttcagaatttctcagttgagaggagccaatctctctgtctggtacccacaaaagatactcacttgcctggacacacacaaacaacacrattacaaacaagaccccaagaatgtttatactgaaacagccagggtgcttccctcatgtcagttgggcttgttcaacctgcaaatgaaaattactgaaaaaatttcccgaattgagaggaatagaccctgctgcctgggcacacaaagaactctcacctatccagatgtggatgccaaatctcaaaggcagttcttcctgggtaatcaggaatgcaactggggccagcagcagcagcagggccggagagaaacagaaactcacctccagccaaaattggg

SEQ ID NO: 923289 - DNA, 699 bp, Homo sapiens
tgtatgaggtgtctgttggcccccactgggaggtgtctcccagtcaggcaatgtgggggtcagggacccgcttggaggaggcagtctgactcttagcagagctcaaacgctgtgctgggagatccactgctctcttaagagccatcaggcaggagtgtttaagtttactgaagttgtgcccacagccgccccttcccccaggtgctctgtctcagggagattggggttttatctctaagcccctgactgggactgctgcctttttttcagagatgccttgcccagagagggggaatctaaagaggcagtctttccacagcagtgttgctccacccagttcgaacttcccggtggctttgtttacactgtgagggtaaaactgcctactcaagtctcagaattgtggacgctcttccccccaccaagtttgagtgtcccggcttgccttctgactgctgtgctggcagtgagaatttcaagccagtggatctgagcttcttgggctccgtgggggtgggacyttccaagccaaccacttggctccctggcttcagccccctttccaggggagtgaacggttttgtctcactggcattccaagcgccactggggtatgaaaaaaaactcccgcagctagcttggtgtctgcccaaacaactgctcagttttgtgcttaaaacccagggccctggtggcata

SEQ ID NO: 923290 - DNA, 848 bp, Homo sapiens
ctgtctcagggagattggggttttatctctaagcccctgactgggactgctgcctttttttcagagatgccttgcccagagagggggaatctaaagaggcagtctttccacagcagtgttgctccacccagttcgaacttcccggtggctttgtttacactgtgagggtaaaactgcctactcaagtctcagaattgtggacgctcttccccccaccaagtttgagtgtcccggcttgccttctgactgctgtgctggcagtgagaatttcaagccagtggatctgagcttcttgggctccgtgggggtgggaccttccaagccaaccacttggctccctggcttcagccccctttccaggggagtgaacggttttgtctcactggcattccaagcgccactggggtatgaaaaaaaactcccgcagctagcttggtgtctgcccaaacaactgctcagttttgtgcttaaaacccagggccctggtggcataggcactggagggaatctcctggtttgcaggttgcaaagaccatggggaaagcacagtatctaggccagagtgcactgttcacagtccctcayggcttcccttggctagggcagggaattcctcgactccttgcacttcctgggtgaggcaataccccaccctgctttggctcaccctccatgggctgcacccactgtccaaccagccccagtaagatgaactgggtacctcagttggaaatgcagaaatcacctgccttctgcgtcgatctcactgggagctatagactggagctgttcctactcaattattttgccagcgatctcattcaccggtttttaagttgtctttaaag

SEQ ID NO: 923291 - DNA, 738 bp, Homo sapiens
aacaaaaataacctcacacatgctctgaaaaggaaattcaagacagtttgcggaaaagaagagaatcaaaagatggcaaaggtcacccaaatatcaatcagatatgctcgtcccctaaggtaggggttgaactctgaacccaggccaccactgtgaaaagagaaagtacggccacrtggttataaggtcaagctcccaaggacaaacaagacaagagagaaacctcatccagttttttttttttttccttttcaggacccttcagcaaagtttataactgaccaatttgctgggccatctttaacagcaggcttatgaggtcctaggcccgcattctatcctacggtacccctctttatgacagaacaaaacagaaagacccacaaagcacatcagattcactacagcttaagactagcctcacaaatccttttttccattaatcaaaactttacagaggagataaatagtgattttttaaaaccattcattcaactggtttgcacagagagagagagaaagagaggaaagcattgcctgatgtaaggtggggaaggtgaagagctcagggaggctagagaaagatgagatagagacagagagagagagagagaagcattgcctgatgtaagatggggaaggtgaagagttcagggaagccagagaaagactcacccattgctcaaaagttcaggcaactgcttgttggtcagagagggatcttttccagcagtctca

SEQ ID NO: 923292 - DNA, 586 bp, Homo sapiens
actcactgtcacaggaacagctatgaggatatctgcccccatgatccaattgcctcccaccaggtccctcccgcaatggtgagaattagtttgagtgcgatttgggtggggacacagagccaaaccatattcactaacccccaaagctagtagaataaaataactaaaatcagaggagaactgaataaaactgagacccccaaatccataaaataatcaacaaaacaaaaaattggtttttcaaaaggataaacaagagtgatagaccactagctagataaacaaagaaaaaaagagagaagatccaaataagcataatcagaaatgacaaagatgacattacaaccaataccacggaaatacaaaagattctcagagaatattatgaacacctccctgcacccaaactagaaaatagataaattccgggaaacacaaaayctcacaagattaaatcagtaagaaattgaaaccctgaacagaccaatatttagttacaaaattgaatcagtaatttaaaaaaccctaccagctaaaaaggtcctagaccagatggattcacaaccgaattctaccagacatacaa

SEQ ID NO: 923293 - DNA, 616 bp, Homo sapiens
cataagaacagacgaatacttatatatttatggaatacaatgtgatgtcttgatatgtgtatatgttgcagaaagattaaatcaagctaatttattcaccattttacctattgttttttgtggtgaaaacatttaaaatctattcttttagcaattttgaggtagacaatacatcattaactatggtcaccatgctatgcaatagatcactaaaacttattcctcttgtctaactgaaactctgcaccctttaactaacagttctcctttccccttccaccacttcccctagtcatcattctactctttccttctatgggttcaactttttaagattccacataaaagtgagatgatttgttttccatgagtctggcttctttcacctaacacagcgtcctccaggttcatctatgttgttgcaaatgactgaaattccttctttgtaaatgctgtayagtattccattgtgtatatatactacatttttgtatccgtccattggttaacaaacacttagattgtttccatatcttggttactgtaatgctgaaatgaccatagtgcaaatatctcttcgacatactgattgcaaatcctttggatatatatccag

SEQ ID NO: 923294 - DNA, 576 bp, Homo sapiens
atgtacatatgctttaactcagcagttccacttccagaaactcatcccataggtaaacttgtgcatgtacagaatgatgtatattcaagaagcattggttataattggaaaatattggaagctacttaaatttctatgaatagggccctggctagatgaattcaggtacacccatacaatggaatagtttayagatattgaggtagaattatgctaacagtataaactgacctaactcaaatacatattttaagtgaaaaaagtaaaatagagaacattttgtattttatgcttccatttggagactgtgtgtgtgtgtgtgtgtgtgtgtgtgtgtgtatttctttgatacttattgatgtgcttgtatgtgcattgactttatctggaagaatttactaaacgctaaagcactccttgcctctgcatggtggaggaagaagagtgaggggaaaaattgattttcactatatacccctttgcaccttttaaattttgaattatatgcacttaatacttattcaaaccattttattttaaattttaaaactatgagccttttctgataaggttgtc

SEQ ID NO: 923295 - DNA, 599 bp, Homo sapiens
tgtggctagggaaagaggctgctgacatctatagctcatcttgtccatcagattattaaaagccttgcctgctgtgggcatcttaaggcaagcattcacacagcatacagatatcctcacgctgtgcccattccaaaaggactatctacaaatcccttttccagaccttatagccaccaatctcttagtcttgttccttctaaatccctgaccatccagccaaatcattagctacctcccataaatcagcatagatctctacctgtaaacatctttctttccaggcaaaatgaacaaccagtggtcttttttaaagtattgcccagagggagaatttccctccccattatgttccgtataatgtgtagcactcttcatctagttggtgcagcaccctgtgcagatccattcgtgaactttgtcgsagctttttcttcctcagtcaactgatcataaagaactccccatgaagccataggtgaagactgagggagtggagagaggtactataggaatcccgcttatggattcctataagtaggaaggcacctactggtgccttcaggacctgactgagaccaatattacttctgtcactg

SEQ ID NO: 923296 - DNA, 720 bp, Homo sapiens
tctcctcctcagaggtgggcttccccgtgggcaggggccatctggggtgctgggtctgtagaatcagggcagtggtaatgacgccaaatgctggtgtgtaggagactacagagtgctgggctgccctgaaaagtgggtagatccccactgtgtagatgagaaagctgagacatagagcttctccactctcccaatgtctgtgcctctaagctgccacccctaagaacatctggcattagatgagcagctatggtcaggcmtggtgggtcacacctgtgatcccagcactttgggaggccgaggcaggaggatcgtgtgaagccaggagtttgagaccagcctaggcaacatagagaaaccccgtctctattaaaaaaaaaaaaaaaaaaaaaaggggttggcggtggtggctcacacctgtaatcctagcactttgggaggccgaggtggatggatcacttgagcccaggaattctagagcagcctgggcaacatggcaaaatcttgtctctacaaaaaatatgaacagattaggccaaggcgagcagatcacttgaagtcaggagtttgagaccagcctggccaacatgctgaaaccctgtctctactaaaaatacaaaaattagctgggtgtggtgacacgtgcctgggtgtggtggcacatcccagctacttagagaagctgaggcaggagaattgcttgaacccgggaggtggagg

SEQ ID NO: 923297 - DNA, 720 bp, Homo sapiens
tctcctcctcagaggtgggcttccccgtgggcaggggccatctggggtgctgggtctgtagaatcagggcagtggtaatgacgccaaatgctggtgtgtaggagactacagagtgctgggctgccctgaaaagtgggtagatccccactgtgtagatgagaaagctgagacatagagcttctccactctcccaatgtctgtgcctctaagctgccacccctaagaacatctggcattagatgagcagctatggtcaggcctggtgggtcacacctgtgatcccagcactttgggaggccgaggcaggaggatcgtgtgaagccaggagtttgagaccagcctaggcaacatagagaaaccccgtctctattaaaaaaaaaaaaaaaaaaaaaaggggttggcggtggtggctcacacctgtaatcctagcactttgggaggccgaggtggrtggatcacttgagcccaggaattctagagcagcctgggcaacatggcaaaatcttgtctctacaaaaaatatgaacagattaggccaaggcgagcagatcacttgaagtcaggagtttgagaccagcctggccaacatgctgaaaccctgtctctactaaaaatacaaaaattagctgggtgtggtgacacgtgcctgggtgtggtggcacatcccagctacttagagaagctgaggcaggagaattgcttgaacccgggaggtggagg

SEQ ID NO: 923298 - DNA, 449 bp, Homo sapiens
  misc_feature 1, 2, 3, 4, 5, 6, 7, 8, 9, 10, 11, 12, 13, 14, 15, 16, 17,18, 19, 20, 21: n = A,T,C or G
nnnnnnnnnnnnnnnnnnnnncttggcctgagaggcgaggaagatgggagagggacaagcagaggcaaggcctgcctgagactgaggaaggaaaggggtttgaccactcccgaggctgccatgcggtgggaccaccctgctgtccgtctcctgtggctgcccctctgcccsctcctgatggatcgccttgtctctccagcaagactgtgcactccttgcaggcaggggctgggctgggtgctgctcttgtgtcccacgtggtacttagttcaaggctgccccagcagatgcttaataaacagctcttcactttcctggcttctggtcttgctcctttggtgtctggctggggagggatggggctggggcaggacccctgggacagggcactggacactcaggtggcaccaggtttcttgtgctcccagcgccctgcccacccttggagc

SEQ ID NO: 923299 - DNA, 449 bp, Homo sapiens
  misc_feature 1, 2, 3, 4, 5, 6, 7, 8, 9, 10, 11, 12, 13, 14, 15, 16, 17,18, 19, 20, 21: n = A,T,C or G
nnnnnnnnnnnnnnnnnnnnncttggcctgagaggcgaggaagatgggagagggacaagcagaggcaaggcctgcctgagactgaggaaggaaaggggtttgaccactcccgaggctgccatgcggtgggaccaccctgctgtccgtctcctgtggctgcccctctgccccctcctgatggmtcgccttgtctctccagcaagactgtgcactccttgcaggcaggggctgggctgggtgctgctcttgtgtcccacgtggtacttagttcaaggctgccccagcagatgcttaataaacagctcttcactttcctggcttctggtcttgctcctttggtgtctggctggggagggatggggctggggcaggacccctgggacagggcactggacactcaggtggcaccaggtttcttgtgctcccagcgccctgcccacccttggagc

SEQ ID NO: 923300 - DNA, 449 bp, Homo sapiens
  misc_feature 1, 2, 3, 4, 5, 6, 7, 8, 9, 10, 11, 12, 13, 14, 15, 16, 17,18, 19, 20, 21: n = A,T,C or G
nnnnnnnnnnnnnnnnnnnnncttggcctgagaggcgaggaagatgggagagggacaagcagaggcaaggcctgcctgagactgaggaaggaaaggggtttgaccactcccgaggctgccatgcggtgggaccaccctgctgtccgtctcctgtggctgcccctctgccccctcctgatggatcgccttgtctctccagcaagactgtgcactccttgcaggcaggggctgggctggrtgctgctcttgtgtcccacgtggtacttagttcaaggctgccccagcagatgcttaataaacagctcttcactttcctggcttctggtcttgctcctttggtgtctggctggggagggatggggctggggcaggacccctgggacagggcactggacactcaggtggcaccaggtttcttgtgctcccagcgccctgcccacccttggagc

SEQ ID NO: 923301 - DNA, 449 bp, Homo sapiens
  misc_feature 1, 2, 3, 4, 5, 6, 7, 8, 9, 10, 11, 12, 13, 14, 15, 16, 17,18, 19, 20, 21: n = A,T,C or G
nnnnnnnnnnnnnnnnnnnnncttggcctgagaggcgaggaagatgggagagggacaagcagaggcaaggcctgcctgagactgaggaaggaaaggggtttgaccactcccgaggctgccatgcggtgggaccaccctgctgtccgtctcctgtggctgcccctctgccccctcctgatggatcgccttgtctctccagcaagactgtgcactccttgcaggcaggggctgggctgggtgctgctcttgtgtcccacgtggtacttagttcaaggctgccccagcagatgcttaataaacagctcttcactttcctggcttctggtcttgctcctttggtgtctggctggggagggatggggctggggcaggacccctgggacagggcactggacactcaggtggcaccaggtttcttgtgmtcccagcgccctgcccacccttggagc

SEQ ID NO: 923302 - DNA, 728 bp, Homo sapiens
caggaattcgcccggcgttacttccggaggtcccaggccttgtgagtgcactgggccaacccctgtgcctgtctgtcctcagtcttcctgagagagagcaccctgctcagagccactgggctgtgctcttagcactctccctgcctggctggctgggatgarggcaggagggccaaacaagctgggccgtctccctctgccccccacaggctgggccagactgatggaggtgccgcaggaaaggacacggacagcctggtgcagtacaccaaggtgggagagaggcagggaggggtctggcccgtagatctgccctctgacccccacggccccccagacccatggcctcctctctttggccacaggctcccatccaggagtcgctcctcagcctcagtgatgatgtgagcaagctggctgtagccagcttcctgggtgagtggccacaggcatcctgggtccccatgtctgcagtgccatgaacctgggtgtctggtccccttatctccttgagctctgcctggctctgtcccagtctgccaactccgggaagctcactggtggttcctggaccccagggccctcacccgcttctactcccactcaagggttgtgggttgtgtggagtctggggttggaaggcagtccatgggtccagaggatgctatgtgctgtgtggggccttggatacccaggagcctcagtttccccatgagtcgagctgcaac

SEQ ID NO: 923303 - DNA, 686 bp, Homo sapiens
aaaaatcattttttaaagatgctcaataatacaacattaggggaaagctggggaaatttgaataaggtctgcaatttagttacaagcattgtacgaatgttaatttcctggtttcatgtcctggttaatttcctgtcaatgttaatttcctgattatgtaagatgttaacaggggtagcagggtgaagggtataaaggaactcyatttaatttttgcaacttttctttaagtctaaaattatttcaaaataaaaggtccaaaaattcttttaaaaaggatgctcagctttcaggtggcccagtggcctagggcggcgggctacatcagtcagacacagagatgtggaaccctgcccttgtagctcctctccacgcaggatctgcaggcttcctcttctgcactgtgttcattgaatgtttgcctcccagactgacggggagctcaaagggacccaaattctcaaagagaagttttctggagctacagctatccaagtcactgacatttcaggaggctgtaggtgatgtataaaatccaaatcaaaccagaagaatttaaagaaacaagaactgtccctcagcaccagatgattaatcaggcactaaaaaaggaaaatcaaagggatgcacagatggtgggtatttacctctgtccccagacactgacctccatgcccccggggctg

SEQ ID NO: 923304 - DNA, 546 bp, Homo sapiens
aattagggttttttttttctttttccagaaagctggttgttaaacatttatccgcataccacaaacataaacatgtgtaatggcttattataaggacttattgtagggatttgcctacatgcaaatgtgggggctggttaaacagtctatatggaggctattgcttctgtgtcaggcactagtgcctgaaatcaatagggcaggtagtcaagaaaggaagatgggctgggcgcggtggctcacgcctgtaatcccaacactttgggaggccaagacgggtggatcacgaggtcaggagatsgagaccatcccagctaacatggtgaaaccccgtcactactaaaaatacaaaaaactagccaggcatagtggcgggtgcctgtaatcccagctactcgggaggctgaggcaggagaatggcgtgaacccgggaggtggagcctgcagtgagccgagatcgcgccactgcactccagcctgggcgacagagctagactccatctccaaaaaaaaaaaggaagatggtaatgaagtaagggaagcaag

SEQ ID NO: 923305 - DNA, 557 bp, Homo sapiens
ttaggtcccacttgtcaatttttgtttgtgttgtaactgcttttggggacttggtcataaattctttgccagggccgacatccagaatggctatttcctaggttttcttctagaatttttatggtttgaagttttacatttaartctttaatccatcctgagttaatttttgtatatggtaaaaggtagggatccactttcattcttctgcatatggctagccagttatcccggcaccatttattgaatagggagtcctttcccattgcttgttattgtcgcctttgtcaaagatcagatagctgtatgtgtacagttttatttctgggctctctaacctcctccactggtctatgtgtttgtttttgtaccagtagcatgctgttttggttactgtagctctgcagaacagtttgaagatgggtagtgtgatgcctctcattttgttatttttgcttaggattaatcactttggctatttgagctcttttttagttccatctgaattttagaatagcttttttccaattctgtgaaaaatgacagtagtttgatag

SEQ ID NO: 923306 - DNA, 557 bp, Homo sapiens
ttaggtcccacttgtcaatttttgtttgtgttgtaactgcttttggggacttggtcataaattctttgccagggccgacatccagaatggctatttcctaggttttcttctagaatttttatggtttgaagttttacatttaagtctttaatccatcctgagttaatttttgtatatggtaaaaggtagggatccactttcattcttctgcatatggctagccagttatcccggcaccatttattgaatagggagtcctttcccattgcttgttattgtcgcctttgtcaaagatcagatagctgtatgtgtacagttttatttctgggctctctaacctcctccaytggtctatgtgtttgtttttgtaccagtagcatgctgttttggttactgtagctctgcagaacagtttgaagatgggtagtgtgatgcctctcattttgttatttttgcttaggattaatcactttggctatttgagctcttttttagttccatctgaattttagaatagcttttttccaattctgtgaaaaatgacagtagtttgatag

SEQ ID NO: 923307 - DNA, 517 bp, Homo sapiens
agattaagagcataaattgtcagtagtgcagtggggtccttcctcaaggggacccagcctccccttcattcaaggggttctgggtaygcaaactggttcaagtctcgaaaatgattgaggggccatgatttttctgtctttataattcaaattagtcttttgtccagtttactgcttatataaattaagtagggttaagtaggaatctggtaggcttcctatcaatttcacttctagaaacactgtgagtaattagccagtgccagagctctacatgagtcagactattctgattgatgttttgcctctgctgtccattactgtagctaagcacaccttgcctttgatggttgggtgccaccactttgcccctgacacctcgggatccaattgttcacattgtatttaaattttgtagttgagtgactgtgattccctctgttagatctgacatacagagaagaacaattacagggctcttcaaagatgcaggtgctgccctcacaaatctatttca

SEQ ID NO: 923308 - DNA, 745 bp, Homo sapiens
aaaatcatataggagttcctcaaaaaattaaaaacaaaactaccatcgaatccagtaatccaacttccaaaggatatatccaacttccaagatatatattcaaaggaaatgaaatcagtagttgaagggagagctgcaccccgtgttcactgcaggrttattcacaagatggaatcaatctaagtgtccatcaacaatgaatggataaagaaaatgtggtttatgtattaaaaattgaacactattcagtcttaaaaagaaagaaatcctggcacttgcaacaacatggatgcatctggaaaacattatgctaataaagaaagcccagcacagaaaggcaaatactgcacgacctcacttagatgtggactccaaaagactggagctcgtagaagcagagagtaaaatggtaattaccagagcctgggggaaagggaaggatggggagttcagaaagtatacaaagtttcagttagacaggataaataagttctgcaacctactgtacagcatgatgactatagttaacctatgctccactgtacttgaaatttgctaagagaatagatattaaatattccccccacccataaataaaataaaataaaattacctatggtggggaaaaagaaagccatagtgacaattggaagagcttttcattaaggcagcattggtgagtagctgtgaaagtaaaatgtaatcagtttccagttcaaattagtaacaggtttcccatttgtca

SEQ ID NO: 923309 - DNA, 569 bp, Homo sapiens
gttaagccacggcagtcaggagctggagctcaggaaatgtctgagcacatttacagctacccagcgccacagccgcggactggcattagaaactgatttccaggtttggttgaaagtgaagaaacaaacattataagctaggggtccccagcccccaggccacagactggtactggtacagtacacagtgcatctttcagacatcctgcagtacgggtccgtggcctgttaggaaccgggctgcatcgcaggtgagtggaagcttcatctctatttgcagccgctccccatcatttgcatcactgcctgagctccacttcctgtcagatcagcagcagcattaaattrtcatgggagcgccaaccctattgtgaactgtgcatgcaagggatctaggttgcccgctccttatgagaatctaatgcctgatgatccaaggtggagctgaggcagtgatgcaatcactggggagtggctgcaaatacagattaacattagcagagaggtttaactgtgcagagaccataataagtcaatcgcttacagacgcacatcaaaatcctatcagt

SEQ ID NO: 923310 - DNA, 569 bp, Homo sapiens
gttaagccacggcagtcaggagctggagctcaggaaatgtctgagcacatttacagctacccagcgccacagccgcggactggcattagaaactgatttccaggtttggttgaaagtgaagaaacaaacattataagctaggggtccccagcccccaggccacagactggtactggtacagtacacagtgcatctttcagacatcctgcagtacgggtccgtggcctgttaggaaccgggctgcatcgcaggtgagtggaagcttcatctctatttgcagccgctccccatcatttgcatcactgcctgagctccacttcctgtcagatcagcagcagcattaaattatcatgggagcgccaaccctaytgtgaactgtgcatgcaagggatctaggttgcccgctccttatgagaatctaatgcctgatgatccaaggtggagctgaggcagtgatgcaatcactggggagtggctgcaaatacagattaacattagcagagaggtttaactgtgcagagaccataataagtcaatcgcttacagacgcacatcaaaatcctatcagt

SEQ ID NO: 923311 - DNA, 639 bp, Homo sapiens
tttagtttcttatatactttttttttttttttttgagagagagtttcactcttgttgcccaagctggagtgtaatggcacaatctcagcttccacaacctctgcctcccgggttcaagcgattctcctgcctcagcctcccaagtagctgggattacaggtgtgcaccaccacgcccagctaattttttgtatttttagtagaaagggggtttctccatgttagccatggtstcgaactcctgacctcaggtgatccacccacgtcagcctcccaaattgctgggattacaggtgtgagccacgcgcccagtctcttatacagtaatatttaaaatgtttatttggcctgaagctgccagtagcattgttaggctgtcttaagaaaaacacatttgtttcataatttatcaaacgaaactggtctttgagctcatcttaaaataaccctagaaatgaatgtctctgcaacaagccatgaagttctacctcattcttcttcttttttaaatatataccatgaaaatgtaaaaggtacaagtcaagggtccacagcctgaggagtgtttgcctatagagacccccatgaaaccaccacctaggtgaagatatgcaccctggccagcagccaggaagtctac

SEQ ID NO: 923312 - DNA, 548 bp, Homo sapiens
tctcccctcaccccacccaccgatcgccctcacacctcccttggaagcctcatcatccacccccttctcagctccagccccagaaatgtccatgcttctccaacaaggctctaggcccaccgtttagggtctttgatagaaacttcagttctccttctcagtagccttggccccaggtaccygcaaggctgattctgtctctatcttaaaatatgtgtcatcatctcaggggaacttccatgaccagcccacctgaaatcaccaccaactgccccccagcactctcagtgccatcgacactcctgtcttctttatcccaacgcactgtcactgtccatatccataatatttcatttattacttggttgtattttgtattgttatctcctcccttgagaatctaacctccacaaggaaagagatcctaatttgttgattgatgtgtcccaagtgagtagaactgacatgcagtaggcactcagaagttttctgtttgttttgagatggagtttcactcttatagcgcgggctggagtgcagtggcacgg

SEQ ID NO: 923313 - DNA, 714 bp, Homo sapiens
agtctcccacaattaccattgttcctggcccggacttcaatccagcctcccacattattctggataccacacctgacccctatgactataactctctgatccatctgacattcaccccatttccccatgtttccttctttcctgttcctcrccctcatcacgcttggtttattgagggcagttccaccaggcctaatcgccccacgccagcaaaggcaggctatgctatagtactagccactagcccgcctcttagaacctctcatttcctttccatcatagaaatctatcctcaaggaaataacttctcagtattccatctgctattctactacttctcagagattattcaggcccccacccttccctacacatcaagctccaggatttgcccctgcccaagactggcaaattagctttactcaacatgccccgagtcagcaaactaaaatacctcttggtctaggtagacactttcactggataagtagaggcctttcccacagggtctaagaaggccaccatagtcatttcttcccttctgtcagacataattcttcagtttagccttgtcatttctttccttctgtcagacataatttctcggtttggccttcccacctctatacagtccaatagcagaccggcctttattagtcaaatcagccaagcattttttcaggctcttggtattcagtgaaacctttatatccc

SEQ ID NO: 923314 - DNA, 714 bp, Homo sapiens
agtctcccacaattaccattgttcctggcccggacttcaatccagcctcccacattattctggataccacacctgacccctatgactataactctctgatccatctgacattcaccccatttccccatgtttccttctttcctgttcctcgccctcatcacgcttggtttattgagggcagttccaccaggcctaatcgccccacgccagcaaaggcaggctatgctatagtactagccactagcccgcctcttagaacctctcatttcctttccatcatagaaatctatcctcaaggaaataacttctcagtattccatctgctattctactacttctcagagattattcaggcccccacccttccctacacatcaagctccaggatttgcccctgcccaagactggcaaattagctttactcaacatgccccgagtcagcaaactaaaatacctcttggtctaggtagacactttyactggataagtagaggcctttcccacagggtctaagaaggccaccatagtcatttcttcccttctgtcagacataattcttcagtttagccttgtcatttctttccttctgtcagacataatttctcggtttggccttcccacctctatacagtccaatagcagaccggcctttattagtcaaatcagccaagcattttttcaggctcttggtattcagtgaaacctttatatccc

SEQ ID NO: 923315 - DNA, 536 bp, Homo sapiens
cacatggaacattctcgtggacagatcgtatattaggccataaaacaagtcttaaacattttaagaatattaaaataatattaaggatctcttttgatcacaatggtatgaagctagaaatcaataacaggagaaattttgggaaattcacaaatatggaaaaattaacatgttcctgaacaataaataagtcaatgaagagattaaaagtttaaaaatatcttaaaataaataaaaatgaaaacattccagaacttatggaatgcagcataagcagttctaacagaaaagtttatagtaataaatgctwacatcaaaaaagaatttctcaaataatctattgttacatcttaaggaactaaaaactgaagggcaaactaagcttactaaactaaagtcaattgaagtaagagaataataaagatcagagcagaaataaataaaataggtagtagaaaaacaacagaaaaggccaacaaaaccaagagtttgttttttaaaaaagaaacaaaatgaacaaacctttagctaggcta

SEQ ID NO: 923316 - DNA, 633 bp, Homo sapiens
gaagggtaagcaagtacatcttcacataacatcaggagagagagagtgacgggggaagtactacacagtttttaacaaccaggtctcatgagaactccatcatgagaacagcaaaaaggaagtccagccccatgatttaatcactttccgacaggctcctccttgaacatgtggggattacaattcaacgtgggagatgagtggggacacagtgccaaaccatatcattccaccctggctygtccaaaatctcatgttcttctcacatttgaaaacacagtgatgccttcccaacagtcccctagagtcttaacttattccagcattaactaaaaagtccaagttgaaagtttcatctgagacaaggcaagtcccttctgcctatgagcctgtaaaatcaaaaacaagttaattactcccaaggtacaatggaggtacaggcatagggtaaatgctccctttccaaaaaagagaaatcagccaagagataggggctacaggcaccatgcaagtccaaaacccagttggacagtcattaaatcttaaagctccaaaatgatctcttttgactccactaatcatgttcagggaatgctgatgcaaggagcagctctgcttctgtgccgctgcctg

SEQ ID NO: 923317 - DNA, 578 bp, Homo sapiens
agaggtgggctcccacagccttgggcagccccacccctgtggctcttcaaggtacaggtacagcccctgcagctgctttcatgggctggcattgagcatccatggcttttccaggcacgtggtgcaagctgtcagtggatctataattctgaaatctggaggacagtggccttcttctcatagctccactaggcagtgccccagtggggactctatgtgggggctccaaccccacattttccctttgcactgctctagcagaggttctccatgagggctttgcccctgcaatagacatttgcctggacatccaggtgttttcatacatcctatgaaatctcttgaagctcccaagcttcaactcttgcctcctgtggaacttcaggctcaataccacatgggagctgccaaggtttggggcttggatcctctgaagccattgcctgatctgtaccttggcccctgttarccacagcatgagttggagaggctgggacacagggcctcatgtcccaaggctgcacaaagcagcagggccttgggcctagcacatgaaaccatttttccctcctagagct

SEQ ID NO: 923318 - DNA, 583 bp, Homo sapiens
ggaatagcagaattatgtaatgtcttcccaagtggccagcttcgcattgtagctccccttcctccaattcagggcagaaacaagaaatctaactgaataatactaacagaatctaactgtttattcaacccaaaaaaacttggcttcagggcctgccaagattttaacagtgccagaggcaaggaggtaagaaaccagaaaggaaaaggatgaaagagatttgtaagatgtgggcaagcaaaggaagaaaatggcgcacacagccagtgagcttcctgcctytccagaccttatttgtgaaatctgagcacctgctcccccaacacatggagccaggatacaaaacggatggaaaagaagaaaacttcaagccatttcctgacttccccaatgtggtcccaccttttagcagactgtccccaaaccagacaggtgtgagcaagatttcctttacactgtgtcttgttccccagcccttgctcgttgagttcagaggggccacatactgcaaaggaccccaagaggtcatttggttgatccctctgccttcaggcagcatgatgcctgaagattgcaaactttg

SEQ ID NO: 923319 - DNA, 748 bp, Homo sapiens
tacccagcagctccgaagagagcgaccatcgagaacgagccatgatgacaacggtggttttgtcgaaaagaagggggaaatgtggggaaaagaaagagatatcagactgttactgtgtctatgtagaaagaagtaaacataagagactccattttgttctgtaccaagtaaaattttgtcttgagatgctgttaatctgtaaccctacccccaaccctgtgctcgcagaaacatgtgctktgtcaagatttaatggatttagggctgtgcaggatgtgctttgttaaacaaatgcttgaaggcagtatgctcgttaaaagtcatcaccactccctaatctcaagtacccagggacacaaaacacagtggaaggccgaagggacctctgcctaggaaagccaggtattgtccaaggtttctctccatgtgatagtctgaaatatggcctcctgggaaggaaaagacctgaccgtccccaagcccaacacccgtaaagggtctgtgctgaggaggattagtaaaagaggaagacatctgtctcctgctcatcccctgggcaatggaatgtctcagtgtaaaacccgattgtatgttccatctactgagataggagaaaaccgccttagggctggaggtgagacatgctggcagcaatattgctctttaatgcaccgagatgtttatgtatgtgcgtatcaaagcacagcacctttttcttaaccttgtttatgacacagagacatttgtt

SEQ ID NO: 923320 - DNA, 574 bp, Homo sapiens
aaaagatatatatagattacaacatgttcttgacacagcacaaaaattgaatggaggtgaggacagtttcagcaacaaatgacttaaacattgaatctaaaaggaaaacatggctatcaaacttaaagtaactagaatgtcaacaataaaccttacagatcacctgtcccaataaaaaaacagaatgttgactttttaaacacacatgtatccagaagaattattgggaaattattgtatccatttctaagtatctctaagtactggaaatatgtattttgatatagattcaaaaaataattaatgtgtaagacaaactattttagaagatatttaaaggattatatttaggttggttaggcaaagaactgaaaaagaayaccctgcccttatttcaattctatttgctctgtgaaggagtggagctggccaacttaagttacttctttgtgcccaggatataactcatcccaagtagcttttgaattgcctgggagctcacaaaaggagaggggtccctgaaggatttctaggactatgaaatagtttgagtacaccatgctctctttgtaca

SEQ ID NO: 923321 - DNA, 715 bp, Homo sapiens
cgtgtagaaggatgcaccccacgaggtttggctccagatgaaatctgacagatggatgttaccaatatagccacctttggcaaactcagctatgtccatgtgactatagactcctactcccatatgctgcatgccacatgccaaacaggggaaatagctggtcatgcctggtgacattgttgtcatttgcccatataggggggtccctaaacaattgaaaactgacaatgaacttgcttatgctagtgatgcctttcaaaattttttagttatgggcagtcacccataaaacaggaattccttacaatcctcgagggcaaggccttactgagtgggtacatcaaacggtacaacgtatgttgaaaaaacaaaaagggggaataggagaccaactaccacctcaggcaaaattacattagccttgcttactttaaactttttgactcctggtacagacggtaagactagcagaacgacattggcaagtgttagaggaaaagaggcaagtttacccaaaggtgttatggaaatctccagatgagggacagtggaaaggcccggkggaattgctgatgtggggacgagagtatgcttgtgtttttacaggagatggacaaaccatgtgggtgccctccaggtgtgtgcgaccatgaaatgggagactagcaggacccacgttggccaaccgtggacctggtccctccagtaggagtcg

SEQ ID NO: 923322 - DNA, 607 bp, Homo sapiens
acatgtatgctttgcagtccacagtaggctaatctttacactatatttcttgctggttgagcaggaaagatgttcctttccatatggtagaaaactgacatgaagaacgttaataatctgagagtgaatgtaaaaatcatgcttagtgctcttcaggcaatgagatggagcagacttagatctcagtccctactcccttcacttaactgacttagcatcctgactacttattaaacctctcaaaaactgttttctctccataaaaatggaggacagtaactacctagaagctttgtgaaattaaagaaaacactgcatgtaaagtactgagctatactttgcaggtaacagatgctcaacatgtctcctctttcacacctttccctgcamttaaccatgagtgctcttagaaatggactaatgtgtagaaacagcaaggaatgctgaactgtggattcctgccttaaaatactgatttgcaattttttttttttttttttttttgaggtggagtcttgctctgtcacccaagctggagtgcagtggcatgatctcagctcactgtaacctctacctcccgggttcaagagattctcctgcctcagcc

SEQ ID NO: 923323 - DNA, 722 bp, Homo sapiens
accaggagtagattctatctcaagaaaccactttctttactcatccataagaagcaacttctcattcaagttttaccatgagattgcagcaattcagtcacatcttcagactccacttctgattctagctttcttgctatttccaccatgtctatagttacttcattcactgaagtttttaattcctcaaatttgtgcatgacagttrgaatcagcttcttccaaactcctgttaatgttgataatttgacctccgcccatgaataaaaaatgttcttaatagcatttagaatggtaaatcctttccagaatgttttcaattgacttggcagatgcatcagaggaatcattatctatggcactgatagccttacaaaacgtatttcttaaataataagacttgaaagtcaaaattactccttgaccatgggctgcagaatggatgttgtgttagtgggcatgaaaacgatatttatctccttgtacatctccatcagagctcttgggggatgaggtgcattgttgagcactaatattttgaaagagatctttttttctgagcagtaggtctcaacagcaggcttaaaatattcagtaaatcatactgtaaacagatatactgtcattaggctgtgttgttgcatctagagaacacaggaatagtagatgtagcataattcttaaatgtcctgcgattttttgaatggtaaatgagcactgac

SEQ ID NO: 923324 - DNA, 722 bp, Homo sapiens
accaggagtagattctatctcaagaaaccactttctttactcatccataagaagcaacttctcattcaagttttaccatgagattgcagcaattcagtcacatcttcagactccacttctgattctagctttcttgctatttccaccatgtctatagttacttcattcactgaagtttttaattcctcaaatttgtgcatgacagttggaatcagcttcttccaaactcctgttaatgttgataatttgacctccgcccatgaataaaaaatgttcttaatagcatttagaatggtaaatcctttccagaatgttttcaattgacttggcagatgcatcagaggaatcattatctatggcactgatagccttacaaaacktatttcttaaataataagacttgaaagtcaaaattactccttgaccatgggctgcagaatggatgttgtgttagtgggcatgaaaacgatatttatctccttgtacatctccatcagagctcttgggggatgaggtgcattgttgagcactaatattttgaaagagatctttttttctgagcagtaggtctcaacagcaggcttaaaatattcagtaaatcatactgtaaacagatatactgtcattaggctgtgttgttgcatctagagaacacaggaatagtagatgtagcataattcttaaatgtcctgcgattttttgaatggtaaatgagcactgac

SEQ ID NO: 923325 - DNA, 609 bp, Homo sapiens
acattcttctcttcagcacatggattattctcaaggacagatcatgtcttaggccacaaaacaagtaataaaacattcaagaaattgcaataatatgaggtatgttctgtgaccacaatggaataaaactactaatcaataaaaagaagaaatttggaaactattcaaacacatggaaattaaacaatatgcttctgagtgaccagtgggtcaatgaaaaaaataagaaataaattgaaaaatatcttggaacacataataatagaaccacaacatactaaaacctacgggatagagtgaaagtagtactaagagggaagtttataactataagcacctacatcaagaaagtagaaaaatgtcaaataagaaaactaatgatatacgctatagaactagaaaaacaagagcacactaaactcaaaattagttgaagaaaagaaataacamaaatcaatgaacaagaatgaaatgaagaaaacaatacaaatgatcaacaaaacaaaaaagttgtttttttaaaaaaataaacataattgacaaacctttagccagattaagaaaaaagagagaatagtcaaataaataaaatcaaagatgaaaagggag

SEQ ID NO: 923326 - DNA, 603 bp, Homo sapiens
gctggcgccagccaccagctcctgtacccactcctgcctggagccctgctcccaccctacactcacaaggcctccctgctcagcacctgcccccaccccagacccaggtacacgggcccctggtgctccccacagcactcctgggtccctgggccacctccctgaagcattcatcactctcgatcggaactgcctgtttaaggctgcattttccatacctcttgaccagttctgattgttcttttttccagtgtactttttgcctctaacgtactattataatttacttattacatgtatatggattggctatctaccccaattaaaacgtaagcttctcgaccatatcattcatctgatatgttcactgaaatatcccaagtgctgagaacagtgactggctggtaaaagcagctcaaggtrtatttgttgcatgaaaaaataagtcatttcccttgttagactatttgcctcttgagagcaggaacaatcttaattctgtagcccagtgtggtgggcacagtaatgcccgcacccctcaaccaaagctgtccatgtcctcatctttgaggcctgtgaatatgttgccttatatagcaaaga

SEQ ID NO: 923327 - DNA, 614 bp, Homo sapiens
aaagagaggcccaaggttcaggatagagaggctagtcctctccactcactgttggagtagatacccaggtgaatttctcatcttttgcttggtggatgttactctttaatctggcactttatgtccacaacttacctgcaacatacctttytaaaggtctctctcactacctctttttcagctccctatccatgatccttttttcttttctctctctaggtcattccctctgacataaatgctcatttcttccaatttccacacattcaaattatatctacttttagcatccagctcaaataaatgccattcataattcccttctttcaactctctcctttttgaatgctcatatagttatatatatgggtctctactagggttcatgttctacttacagcagagattttatgtatacacccccatctaccttaaaatggaatacctaatgaatactcaataaatatttaataagtaaattcttcttcttataatagtggccaccacagaccctcacagacattctatttgttcaacaaactgttatccatggtacaagggacaaatctgtacaaacagtcctaactcaaatccactaagtgagcaaccagccg

SEQ ID NO: 923328 - DNA, 614 bp, Homo sapiens
aaagagaggcccaaggttcaggatagagaggctagtcctctccactcactgttggagtagatacccaggtgaatttctcatcttttgcttggtggatgttactctttaatctggcactttatgtccacaacttacctgcaacatacctttctaaaggtctctctcactacctctttttcagctccctatccatgatccttttttcttttctctctctaggtcattccctctgacataaatgctcatttcttccaatttccacacattcaaattatatctacttttagcatccagctcaaataaatgccattcataattcccttctttcaactctctcctttttgaatgctcatatagttatatatatgggtctctactagggttcatgttctacttacagcagagattttatgtatacacccccatctaccttaaaatggaawacctaatgaatactcaataaatatttaataagtaaattcttcttcttataatagtggccaccacagaccctcacagacattctatttgttcaacaaactgttatccatggtacaagggacaaatctgtacaaacagtcctaactcaaatccactaagtgagcaaccagccg

SEQ ID NO: 923329 - DNA, 558 bp, Homo sapiens
tagattagcatactgaaaagaaccatagtagatatattcaagtaagtacatatatatacacgtatatatgtatatatacgtatatatacgtatgtatatgtatatatatacgtatatatacgcatgtatacgtatatatatacgtgtatatatgtgtgtgtgtgtatatatatatatatatatttttttttttttttttttttttgagacgcagtctcgctcttgttgcccaggctagagtgcaacggtgcaatcttggctcaccgcaaagtctgcctcccaggttcaagcaattctcctccctcagcctctmgagtagctgggattacaggcatgtgccacaagcccagctaattttgtatttttagtagagatggggtttctccatgttggtcaggctggtctcgaactcctgacctcaggtgatccacccaccttggcctcccaaagtgctgggattacaggcgtgagccactgcacccagccagtatatatattattgttaatataaggctctaaaattctatttaccctaaagtgattcatttctgtaaaagt

SEQ ID NO: 923330 - DNA, 622 bp, Homo sapiens
ggttggcaaacccaatacccaatggtaggcagaggtcccagccttgacagagacagcttggggagctctttgtgaaaggcactaaggtcttttcaggggaagggagggagccacctcagctcccctgccagttcagcaggaaggcaatccacctcgcagtcacactcctgatgcagtgtcayggctattcagattaggcaggcacctcttttcatttgcaggaatgctgatgttccatgtagagagggattatgactctacccctcatgcaagcctgcacctggaaggcactccccttgtgaggttgcagacaccctgaagtgttccacaaaggctgtcaacaggcgcatccatgccgagctcctttgggaggagccccagttgtatctgcagtagtggatgagggggaaaagaaatcccattctccaagacccttcaggagcaccaggactgcctcattgctggagtggagctgcagattttctccaccaagcccagcactgcacctctgcctctgctgaaagaaacttcccacaactagtaaaattctataactcaaggcctaccactctggattttttttttttttttttgtcccaagaggtgctcccttgatgtgggg

SEQ ID NO: 923331 - DNA, 814 bp, Homo sapiens
gcatatgagggaaaaataattccaactggagaaataccttcatagaagggacaatgtatggggcatattttggctggatgtatagtgtgtggaggcagtaggggaagtaattttaaaaagcaagtagaatctaattaatgtattacttcaaatgttatttggaacagtttggatttcaagggtgcccactttcaccacttctattcaactagtactgaaaattctagccagaacaattagacaagagaaagaaatagaaagcatctgaattggaaagaaagtaacattgtctgtgatttcaaattacattatcctatatatagaaaaccctaaagacaccaccagaaaactgttaaatgaattcagtgaagttatagaatataacatcaacattaaaaaagtcatatttcaatacaagaacaatgactgattcaaaaagaaattgagaaaacaattctattaaaatagcatcaaaaggaataaaatacttaagaaataaatttaataatgaagtgaaagatctgtacactgaaaactaygaaaaaactcatgaaacatattgagaaagacaaataaatggaaagatatcccatgttcatggattggaagaattaatattgttaaaattttcatattacacaaagtgacctacagattcaatgcaatttttattaaaattctgatggcatttttaacagcctgcatagagcttgcacactctgcatccctgcagagttagcaccatgtggacattgtcaaggtttgtgggttttgccttttggagtagcagcctgaactgcacttaggctcactt

SEQ ID NO: 923332 - DNA, 758 bp, Homo sapiens
gcacatgaatagcattttgagtcatcagaaaacactggttctaagaagagatcaggaaatctgattatttttgcatatttcttatttctggtcaatgaaaccacaaagcattgtcaaactgagttcttgaatataaatcaaaatataagtaagcaataaatagctagaggaatgctaaaagaaatatccagcttcttctttaaagaatagtctagacttctaatcatttaactgatatgtggagaacattcattgggcaattttttttttaatttcaaccagtattaagcactgagctaggtgtttggtatacagtaatgaataaaacagartaatgaatgtcctttggagcatatggtctagtagtgatggcagctcctctctgctaggaactgaacactcttcgggacaccctggctgcagaaaggagtgacccactgcaggtctcctctgagctgttctatcactcaataaagctcttcttcaccttgctcactcttcagttgtctgcatacctcattcttccagttcgcaggacaagaacttggggcccaccaaatagccgggctaaaagagctgtaacaccaacagggctgaaacacgccccttgctcaccatgttgtgggtgacaaggagagaaaagagatggagagaagagctgcgaccctttggggagcccagacctaggagctccctaagccaggctgtaacaccctctttggaactctatggttcctgatgtctccaagcttccaggc

SEQ ID NO: 923333 - DNA, 758 bp, Homo sapiens
gcacatgaatagcattttgagtcatcagaaaacactggttctaagaagagatcaggaaatctgattatttttgcatatttcttatttctggtcaatgaaaccacaaagcattgtcaaactgagttcttgaatataaatcaaaatataagtaagcaataaatagctagaggaatgctaaaagaaatatccagcttcttctttaaagaatagtctagacttctaatcatttaactgatatgtggagaacattcattgggcaattttttttttaatttcaaccagtattaagcactgagctaggtgtttggtatacagtaatgaataaaacagagtaatgaatgycctttggagcatatggtctagtagtgatggcagctcctctctgctaggaactgaacactcttcgggacaccctggctgcagaaaggagtgacccactgcaggtctcctctgagctgttctatcactcaataaagctcttcttcaccttgctcactcttcagttgtctgcatacctcattcttccagttcgcaggacaagaacttggggcccaccaaatagccgggctaaaagagctgtaacaccaacagggctgaaacacgccccttgctcaccatgttgtgggtgacaaggagagaaaagagatggagagaagagctgcgaccctttggggagcccagacctaggagctccctaagccaggctgtaacaccctctttggaactctatggttcctgatgtctccaagcttccaggc

SEQ ID NO: 923334 - DNA, 758 bp, Homo sapiens
gcacatgaatagcattttgagtcatcagaaaacactggttctaagaagagatcaggaaatctgattatttttgcatatttcttatttctggtcaatgaaaccacaaagcattgtcaaactgagttcttgaatataaatcaaaatataagtaagcaataaatagctagaggaatgctaaaagaaatatccagcttcttctttaaagaatagtctagacttctaatcatttaactgatatgtggagaacattcattgggcaattttttttttaatttcaaccagtattaagcactgagctaggtgtttggtatacagtaatgaataaaacagagtaatgaatgtcctttggagcatatggtctagtagtgatggcagctcctctctgctaggaactgaacactcttcgggacaccctggctgcagaaaggagtgacmcactgcaggtctcctctgagctgttctatcactcaataaagctcttcttcaccttgctcactcttcagttgtctgcatacctcattcttccagttcgcaggacaagaacttggggcccaccaaatagccgggctaaaagagctgtaacaccaacagggctgaaacacgccccttgctcaccatgttgtgggtgacaaggagagaaaagagatggagagaagagctgcgaccctttggggagcccagacctaggagctccctaagccaggctgtaacaccctctttggaactctatggttcctgatgtctccaagcttccaggc

SEQ ID NO: 923335 - DNA, 603 bp, Homo sapiens
tcccctttgtcttggcaaattcctgctcattttttagggtttagttttatcttcaatcctccagaatatctcctctgatctcaatgtgtctgctgtctctttgtaacctggtataagtctcttttcgtgtatcatgttatcatttaattttctgtttatgtgtttgttctttcacaggtctattcatctamctccagccgctggcagagaagctaacaagaatagagatccaccagtgtttcttttcttttctttccttttttttttttgaggttctcgatactcgatttttaaaaaataatttttctctttctttttctttttcctttttttaatttcaatagatttgtgggaaacaggtggtgtttggttacatgaataagttctttagtggtgagttctgagatcttggagcacccatcacttgagcggtgtacactgtaccacccttctcccaccctttcccctgagtccccaaagttcactgtaccattgttatgcttttgcgtcctcatttgcgttcccacttatgagtgagaacatacagtgtttggttttccattcctgagttacttcacttagaataatggtctctaattccat

SEQ ID NO: 923336 - DNA, 603 bp, Homo sapiens
tcccctttgtcttggcaaattcctgctcattttttagggtttagttttatcttcaatcctccagaatatctcctctgatctcaatgtgtctgctgtctctttgtaacctggtataagtctcttttcgtgtatcatgttatcatttaattttctgtttatgtgtttgttctttcacaggtctattcatctacctccagccgctggcagagaagctaacaagaatagagatccaccagtgtttcttttcttttctttccttttttttttttgaggttctcsatactcgatttttaaaaaataatttttctctttctttttctttttcctttttttaatttcaatagatttgtgggaaacaggtggtgtttggttacatgaataagttctttagtggtgagttctgagatcttggagcacccatcacttgagcggtgtacactgtaccacccttctcccaccctttcccctgagtccccaaagttcactgtaccattgttatgcttttgcgtcctcatttgcgttcccacttatgagtgagaacatacagtgtttggttttccattcctgagttacttcacttagaataatggtctctaattccat

SEQ ID NO: 923337 - DNA, 777 bp, Homo sapiens
tgtaggatttctgtgctagcggggaatgtgttctcacctcatagagccaggtagaaattatgcagatgggcagttctctgggaagaaagcagggcctttggggctctcagtgtccccgttgggttgtagacataacacgcttactttgcgtaggggaacggctctgccggcccccaggtgccctagcgcatatgcacggaggcccgcaggtcagaaccgcagtctcacctgtcttggcggaaatgccctgcgatcctcccggagatagaaggcgggaagttttatgaggagccggtccagtttccctactatctcctgccgttyatatatctagtctttcttcagactttaagcgactgcttcatgtttgatgtctcactcccacatcctacatccactgccagccaactttatagatagcaccgtgacccatccttcccacccccaagaagccctttcctatttctggtgccagtgtcctccccagtccctctttcttcaggccctcgcttatcaccttcatggacagaaaatacttagctctctctcaacctgaggtttacacctgacacgcgtcagtgccctggcaaattccttaataccccttctcaaatagcactgtaaatcacctctttttaactcccagaactatctaattggttttgtccctgcactacatgaatactagtattccactacagaggaaaaccccaggcctagcgatggcggttctgggcattgtgccagcctctcccagggtatgttttctgacctcac

SEQ ID NO: 923338 - DNA, 595 bp, Homo sapiens
cccgcttgtcggccagatttttgctcaaaagtatcaccttctgagggacctacccctgactctcagctaaagaggtccctccagtggctgttccgttttctccaacatgtatgttgtctgtctcctccttttttttttctttgagacagggtcttgctctgttgtccaggctggagtgcagtggcaaaatcatggctcactgcagccttgacctcctgggcttaagggaggcccaggagggggggcctctgggaggccacctcagcctcctgagtagctgggaccacaggtgcatgccaccatgcctggctaattttttacttgttgtagagatgagatgttgcccargctagtctccaactcctgggctcaagccgtcctcccacctcagcctcccaaagtgccaggttggcttagttcactgccacttccacagtgcatgggctaaggccaaagctccatgaagagctgctgaatgaattaatgaatgctaagagccaaggacaccagcgaacacatatccagcatctgccgcatcccagaagttcagggtgaaaaccagggagtgacccccacaggggccacctgggtggaa

SEQ ID NO: 923339 - DNA, 538 bp, Homo sapiens
caggccagagtgcagtggtgcaatcttggctcactgcagcctccgcctcctgcgttcaagcgattctcctgcctcagcctcctgagtagctgggactacaggtacgcaccaccatgcccagctaatttttgtatctttagtagagatggggtttcactatgttggccaggatggtcttcatctcttgacytcgtgatccgcctgccttggcctcccaaagtgctgggattacaggcatgagcccccacgcctggcctaaagctgctgtttttaaaaaaaaaaagaagaagaaaaagactggctttctcctccactgcaggagattaggaactataaagtcattttctagggatacatccacagggaccttggaaggaccaggactcagcatcactgagggtcacatcagactccaaagccattccattttctcgccacctacctggctcttccatgtgaacaatgatccagttgaaggccacctcggcgcccatatttccagtgaagtacacagccttgcgacatgcttccagcggga

SEQ ID NO: 923340 - DNA, 642 bp, Homo sapiens
tgaggcaggtctggtggtaatgaaatctcttaccatttgcttgtcttagaaggatcttatttcttcttcacttatgaagcctagtttgactaaataggaaattcttggttggaaattctccgttggaaattcttttctttaaatttgctgaatataggcccccaatctcttctggtttgttgggttyccgctgaaatgtccactgttagcttgatggggtttccttcgtagatgacctatcccttctctctagtttccttcaacattttttctttcatttcatccttggaaaacctgatgattatgtgtcttggagatggtcttcctgtgcggtatcttgcaaagattctctgcatttcctcaatttgaatgttggcctctctatggaggttggggatgttttccaacatcctaaaatatgttttccaagttgcttgttttctctccctttctttgagggatgccaatgaatcatagatttggtctctttacataatctctatgtctcagagccattgttcattcttctttattgttttctctttatttttgtctgattgagtgagcttggagaaccagtagtaacaagtccctttgttccttccccagcccaagggcagttaagacagtaccactgcagct

SEQ ID NO: 923341 - DNA, 642 bp, Homo sapiens
tgaggcaggtctggtggtaatgaaatctcttaccatttgcttgtcttagaaggatcttatttcttcttcacttatgaagcctagtttgactaaataggaaattcttggttggaaattctccgttggaaattcttttctttaaatttgctgaatataggcccccaatctcttctggtttgttgggtttccgctgaaatgtccactgttagcttgatggggtttccttcgtagatgacctatcccttctctctagtttccttcaacattttttctttcatttcatccttggaaaayctgatgattatgtgtcttggagatggtcttcctgtgcggtatcttgcaaagattctctgcatttcctcaatttgaatgttggcctctctatggaggttggggatgttttccaacatcctaaaatatgttttccaagttgcttgttttctctccctttctttgagggatgccaatgaatcatagatttggtctctttacataatctctatgtctcagagccattgttcattcttctttattgttttctctttatttttgtctgattgagtgagcttggagaaccagtagtaacaagtccctttgttccttccccagcccaagggcagttaagacagtaccactgcagct

SEQ ID NO: 923342 - DNA, 779 bp, Homo sapiens
aacttgttacaacaaactgtaagaaaaagaaatttcccattttatattactcatattcgaccacatactaatttaccagggcctttaactaaaacaaatgaacaagctgacttgctagtatcatctgcattcctggaggcacaggaacttcatgccttgactcatgtaaatgcaacatgattaaaaataaatttgatatcacatggaaacaggcaaaaaatattgtacaacaytgcacccagtgtcaagttctacacctgcccactcaggaggcaggagttaatcccagaggtctgtgtcctaatgcattatagcaaatggaatcacacatgtaccttcatttggaaaattgtcatttgtccatgtgacagttgatacttattcacattttttatgggccacctgccagacaggagaaagtacttcccatgttaaaagacatttattatcttgttttgctgtcatgggaattccagaaaaaattaaaacggataatgggccaggatactgtagtagaacatttcaaaaattcttaaatcagtggaaaattacacatacaacaggaatcccctataattctcaaggacaggccataattgaaagaactagtagaacactcaaagctcaattggttaaccaaaaaaggaaaaagacagtgaggactacaacccttcccagatgcaacttaatctagcactctatactttaaattttttaaacatttatagaaatcagaccactacttccgcagaacaacattttactggtaaaaagaacag

SEQ ID NO: 923343 - DNA, 633 bp, Homo sapiens
gtccatgtgacagttgatacttattcacattttttatgggccacctgccagacaggagaaagtacttcccatgttaaaagacatttattatcttgttttgctgtcatgggaattccagaaaaaattaaaacggataatgggccaggatactgtagtagaacatttcaaaaattcttaaatcagtggaaaattacacatacaacaggaatcccctataattctcaaggacaggccataattgaaagaactagtagaacactcaaagctcaattggttaaccaaaaaaggaaaaagacagtgaggactacaacccttcccagatgcaacttaatctagcactctatactttaaattttttaaacatttatagaaatcagaccactacttccgcagaacaacattttactggtaaaaagaacagcccrcatgaaggaaaactgatttggtggaaagacaacaaaaataagacttgggaaataggaaagatgataacatgggggagaggctttgcttgtgtttcaccaggagaaaatcagcttcctgtttggatacccactagacatttaaagttctacaatgaacccatcagagatgcaaagaaaagtgcctccgcagagacagaaaacctgcaat

SEQ ID NO: 923344 - DNA, 654 bp, Homo sapiens
tgaggctgacgatgttcagtgggtcttcactgggactaccaccaaggaaagtatcccctttcatatccaggaacttatttttcagagatcagagaagatctaggttcctcctgattcaaacacagcagagaatgacagcatcaagacaacgtagatggtggtgccaggtcataaattacaagctgagtcggttcaattttatcctgtaggcaattaggagctagcaaagatttctgagcagtatgtgacttttggaatctgtgctttaggaagttgacttggcagcaaaggagggaattgtctatgacagagcctggaggcaggttacaagctggaggaagttaccgtggtgtgagcacaaggcaacaaaggcatggacagagctgggggccagatactgcakggacagataggagaggtgacctggggagaatgcacagtccttggtattcatttaaatggacaaaagaaatgatgctgtcaaaagtacttccattgggccaggcgcagtggctcacccctgtaatcccagcactttgggaggccgaggcaggtggatcatttgaggcctggagttcaagaccagcctggtcaacatggtgaaaccctgtctctactaaaaatacaaaaattagctgaccggtagtggtgtgc

SEQ ID NO: 923345 - DNA, 603 bp, Homo sapiens
gaggaccacaaaacaaccagaaaataaataacaaaatggcagtagcaagtactcatctatgaataataatactgaatgcaaatggactaaactctccaaccaaaagatacatagtagctgaatggattaaaaaacaagacccaatgatacactacctacaagaaactcatttcacctataaagatgcacatggactgaaaataaagggatagaaaaagatattccatgaagtggaaaccaaaaaagaacatgactagctatacttatatcatatttttaaaatttgagacaaaaaaatataaagagagaaagaaaaggtcattatataatgataaaggggccaatttagcaagaggatataacaattataaatacctatatatccagcaccggagtactcagatatawaaagcaaatattgttagcattaaagagagagccagacttcaatatgacaatacaataatagctggagatctcaataccctactttcagcaatggacagatcatccagatagaaaatcaacaaagaaacatcagacttaatctacattataaaccaaatgaacctcatagatatttacagaacacttcatcaaaca

SEQ ID NO: 923346 - DNA, 602 bp, Homo sapiens
aattaaataaatagaacatctaaaagtcagctttgtaatttattaaaaaatctaggggagaacgtacagcaagatggccaaatagaagactttatgctgtgggaactccaaatttaagaactacctacacacacaaaaaaaacacctacataagaatcagaaatcaggtgagcactcacagtacctggttttaacttcaaatgrctgaaagaggcactgaagagggtaggaaagacagtcttaaattaccagtgccacccttcccctatctcctggcagtggccatgtgacatggagagagaattgtgcacttaggggagggagaatgcagtgactgttggactttgcattgaactcggtcttgccctgtcatagcagagagcaaaaccgggccaaatgcatctcatgcctgcccacagaaagagcatttagaccagacctgtccagaggacaatcacccatcccagtggttggaacctgagttctggcaagcctcattaccacaggactttggggctctatataaacttaaaagactgtctaggccacaatgacttcaactcctaggcaagccctagtgcagagttgggctcagaccagtg

SEQ ID NO: 923347 - DNA, 602 bp, Homo sapiens
aattaaataaatagaacatctaaaagtcagctttgtaatttattaaaaaatctaggggagaacgtacagcaagatggccaaatagaagactttatgctgtgggaactccaaatttaagaactacctacacacacaaaaaaaacacctacataagaatcagaaatcaggtgagcactcacagtacctggttttaacttcaaatgactgaaagaggcactgaagagggtaggaaagacagtcttaaattaccagtgccacccttcccctatctcctggcagtggccatgtgacatggagagagaattgtgcacttaggggagggagaatgcagtgactgttggactttgcattgaactcggtcttgccctgtcatagcagagagcaaaaccgggccaaatgcatctcatgcctgcccacagaaagagcatttagaccagacctgtccagaggacaatmacccatcccagtggttggaacctgagttctggcaagcctcattaccacaggactttggggctctatataaacttaaaagactgtctaggccacaatgacttcaactcctaggcaagccctagtgcagagttgggctcagaccagtg

SEQ ID NO: 923348 - DNA, 747 bp, Homo sapiens
caaagaaaaatcctaaagtactaagaaaagtgaatgaactaaataatttttaaatagtccttcctagggaactttctctcacgcagcttttgggtaagagttggaaggcatcagttcaagggcttagagagacgttattttgtgtccttatttgaagaatgatctgtagacttgaaaccttattatgttgtgatggaaggcagggaggacctgaagtcaaagccaggaatttctcaggaaacagttcggggtccaccctatcccatgaacaagtcagagctttattatccagagagggctagaggtgatttcatcctggaagattttcaaagctcgcgtccaccaccccacgaaaaaatccatcaatgcccacatttttawggacaaaaagtcatgtgtctcctaagccccttgtggagactgatggacctgaagcccttttatgctcacttgactcttagtctagtctaggtgacatttctccttcatatttcctgacatggagaccgagtttcaaatacctaaaagcactagaatccaagaattctgattccacttcattttttctattaatcatgtcctgctactcccaactccccatgcttagagatatcaaaagtgcagccatatgtggaatattaactgggtaacagcagtatcacgctgttccccctccaccttacaaaaagcacaatctgcagaactgtgagctcggcctccacagaaatggaaactctcaagcgctgc

SEQ ID NO: 923349 - DNA, 556 bp, Homo sapiens
tatagctttaaaatgtttctattagaaaagaaagactgcaaaatcattgatctaggctcattcattcacactttgggaaactagaaaaggaaaaacaaagtaaaccctaagcaaccagagggaaggaaataattattacactagaaattagtaaaatagacaaaaagacaaaccatagagggaaatcagtgaaaccaaaagtggatttttttttaaaagatagtagsattgatgaatctctaactagactgatttaaaaaaatagagaggacacagattaccattttcacaaaataaagagagaataacaagacaaatactacagacattagaaggaaaatactggaatatcattaacaactttatgccaatacatttaacaacttagatgaaaggtactaatgctttgaaccacacaaatgatcaaatctgacaaaaaaagaaatagcaaattttactagacctacatttatttaaaatgttaagtttgtcgtaaaaacctttccacaaacaaaacccctggccaagatggtttcctagtgagttctatcaaaca

SEQ ID NO: 923350 - DNA, 556 bp, Homo sapiens
accaaacctgctgagatacaacaaaagtagtgcaaagagtgaagtttacagccttaaatgcttacataagaagtagaaagattaaaaataaacaatgaaacatcacaactcaatgaactagaaaagcaagaataaaccaaacccaaaatttgctaaagaaaataaatcagaaacataaaagatataaagwtataaagaaaaaattacaaaggattaaagaaataaacagttggttcatcaaaaagatgaaaacaattgataaactcctagctagtctaaccaagaaaataagaataaagatctaaataaacaaaatcaaatataacaaaagacattacaactgataccacataaatacaaagatcatcagagactattaccaactctatgctcacaaactggaaaacctagaggaaacagaaaaattccccaaacataccactttttaagatttatcaaaaagaaatagaaaacctgaatagaccaataataatgagtggtgagactgtatcagtttttaaaaatctccatacaaagaaaagcccaggaagagatg

SEQ ID NO: 923351 - DNA, 735 bp, Homo sapiens
agacacttaatcaaggctgtttgggttctgcagctgaccttccctgcaagcagggagttctctcccttccccagtagatctgggctgggccaggccactgtccagtgccaggggaggggctggaagcagtaaagagccagagacttgagaacgggatgatagcagccccctgcccgcagtctctcctgttcatctgggaattcctccctgccctcactggcatcagcaaggccttaaaatgtcacttgtgaagtgtaaacttagcaatgtgacattaacagaggggtttttttaagaggaaaaaacacatacaattgctcccttctgtttcttttttttttttttttttgagacagagtcttgctctgtcaccaggctggagtgcaatggcgcgatcttggctcactgcaacctccgcctcccyggttcaagtgattctcctgccttagccgcccaagtagctgggactacaggcgcccaccaccacacccagctaatttttgcatttttagaagagacagggtttcaccatgttggccaggattgtctcgatctcctgacctcgtgatccaaccgccttggcctcccaaagtgctgggattacaggtgtgagccaccgcacctggtcctcttctggtctttgagcacatgatgcaaggagtttacctagagctgcggtttcacttctttctacctgatactctccctgtgctgcaccttgcctcccaatcacag

SEQ ID NO: 923352 - DNA, 678 bp, Homo sapiens
gcagaataagcaatacaaacccactggctgggcgcagtggctcacgcctgtaatcccagcactttgggaggccaaggctggatcacttgagcccaggagttcaaaatcagcctgggtaacatggtgagacctggtctcttataaaaaatmcaaaattagccaagcatagtggcacacacatgtagtcccagatactcaggaagctagggcaggaggatcacttgagcccaggaggtcaaggctgcagtgagccatgttcatgccactgcactctagcctgggcaacaaagtgtgaccctgcctcaaaaaaaaaaaaaaaaaaaaaaaaaaaagaaaagaaaaaaagaaagaaaggaaaagaaaacaagagaaaaaaaaaaacctactgcagagtgccccaagccatctaactgagggctaccggacacattatttacgtcaaccacttccctagcattgggggaaggtgttgctggcagttggcgggcaggcctgtaactcccagtgagtagtggcaccaaaacacacagaacaagttaactgccctccacctaccttcactgcctatcccatgacaaacctcacctgctaccacagagattcccttcgggttggggatggatctggaacacaacacaaagtgttttctgaaaacaaagcattttctgccttactgga

SEQ ID NO: 923353 - DNA, 631 bp, Homo sapiens
gctcactgcaacctccgcctcccaggttcaagtgattctcctgcctcagcctcctgagtagctgggattacaggcacccgccaccacacccagttaattttttatatttttagtagagatggggtttcaccatggtggccaggctggtctcaaactcctgacctcaggtgatctgcccaccttggcctcccaaagtattgggattacaggtgtgagacaccgtgcccagcctgagaaagtatatttaatataattatttttatattttttcaatgttcacactacagataaaagataaaagaaaytgttttaagaattaaccaaacttcacttgtattacctgggtttttgtagaattaattcacctaatcatgttatacttagattgatatcagtcactaatcatgttatgcttagattgatattagtcaatttggatacctacaactgattttaagagaaacagccagagacaaactttgtagcagaagaaagcctacgatcaaattctatcactgataaattacatttgaaaaactgttaaatgtctatgttttatgttactcaagagcagagaaaggatataataggaggcatatacatgacagatgaaggcacaggctctggaggc

SEQ ID NO: 923354 - DNA, 704 bp, Homo sapiens
atctattgagttaatcatgtgttttttgtcattggttctgtttatgtgatggattgtgtttattgatttgcatatgttgaaccagccttgcatcctaggcatgaagccaactcgatcgtggtggataagctttttgatgtgctgctggattcggtttgccagtattttattgaggattttcgcatcracgtttgtcagggatattggtctaaaattctctttttttgtgtgtctctgccaggctttggtatcaggatgatgctggcctcataaaatgagttagggaagattccttctttttctattgattggaatagtttcagaaggaatggtaccagctcttccttgtacctctggtagaattcggctgtgaatccatctggtcctggaatttatttggttggtaagctattaattattgcctcaatttcagagcctgttattggtctattcagagattcaacttcttcctggtttagtcttgggagggtgtatgtgtcgaggaatttatccatttcttctagattttctagtttatttgcatagaggtgtttatagtattctctgatggtagtttgtatttctgtgggatcggtggtgatatcccctttatcattttttattacgtctatttgattcttctctcttttcttctttattagttttgctaatggtctatcaattttgttgatcctttcaaaaaa

SEQ ID NO: 923355 - DNA, 634 bp, Homo sapiens
gaaccagctggtaaatgttttggtccttggtgcccatatggtctctgtcacaactactcaactctcccgtggtaggacatacgcagccatcacgtagagaacagaaacacaggcgtgtggctttgttacaggacaactgaattcatggctactgaaacctgaatttcagtaactttcatgtcactaaatatttttctttgattatgtgtcaaccatttcaaaacataaagaccccagcctggtcaacatggtgaaactactaaatatacaaaaattagccgggcgtggtggctggtgcctgtaatcccagctacttgggaggatgaggcaggagaatcgcttgaacccaggaggtggagattgcagtgagccaagatcatgccactgcactccagcctgggcgacacagtgagactctgtcataaaataaaataaaataaaataaaacgaaaaataaaaamataaagaccattcttagctcataggctatagaaacccaatgagctgggttcagctatagtttgctgaccccagtctaaatcatctcccagaggtcccagtgagctggagccctgcttgcccgcagcggtaatctggagtgattggctccttcccttccctggtttactttgcc

SEQ ID NO: 923356 - DNA, 749 bp, Homo sapiens
tctgtggccgctgtccttatccagccacctgcaagggaactgcagccatgtggaaatcacctatagctggagaggagcctgtccaaggggcttctgggataagcaacagcaggaagggagattagccatcaaaacagaactgtgtagctccaaatgagaacaaaaaacttaactttaaaaaaaagttacctaatagcagaataaagcgtgaagaagcctgtctgcaatgagtataggggggttagaagagcaaagtcatccagctttagtgcttggcaagctgtccattttccagcccccctgaatgacttgagcagctctgtgggccccacatgtgcagccagtaacaggatctcacccaccccaacccaagggtcctgagcgtctgtctgcaatccccacatccctgctatagaggggcagacagaacacatatgctgcccatttgtggaacctattgattcataagagggactagttctgaggcaggcactggctgtgctagaaattaattcactaatcaattactctcacatccccrgtctgcgggatatttctgtgcgatggattcctcctgccccactgagctgcggctttggtttttataataagatggtggcggcgggaggagccaagatggccgaataggaacagctcctgtctacagctcccagcgtgagcgacgcagaagacgggtgatttctgcatttccatctgaggtaccaggttcatctcactatggagtgcca

SEQ ID NO: 923357 - DNA, 677 bp, Homo sapiens
attcttcattcccagaccttaatggctcatgaatggagctggctcttgccagcaacatttgccaggatctgtagaataccaactctactttaagaatttccttaggcgagggattccattccaagatggctgaataggaagagctccggtccgcagctcccagygtgattgatgcagaagatgggatttctgcatttccaactgaggtacctggttcacctcattgggactggttggaaagtggatgcagcccacagagggtgagccaaaacagggcggggcatcgtctcactcaggaagcacaaggggttgggggatttccctttcctagccaagggaagctgtgacagacagtacctggaaaattgggacactcccacccaaatactgcacttttccaatggtcttagcaaatggcacaccaggagattatatcccatgcctggcttggcaggtcccacactaacggacccttgctcactgctagtgcagcagtctgagatcaacctgcattgcagcagcctggtggggggaggggcatctgccattgctgagccttgagtaggtaaacaaagcaggccagggaagcttgaactgggcggagcccactacagctcagaaaggccagttgcctctgtagattccacctctaggggcagggcatagctgaacaaaag

SEQ ID NO: 923358 - DNA, 598 bp, Homo sapiens
gcttatgctgtaatataactgaaatgaactaggataggaagtagtatttctaaaccttcctatgtgtctcatgtgcagaaacaggagtgaaataagccaaaaagtaaggcttaatgcatgacttctaagctagcaaaatatttgacctacgcaatggagagcaagamgagtggtagaagcatagtaagtggaataatgtgaaatggctaaagtgatactatacatgtagtttggttagactgactgtagcatagttgacaccccatctgtatcatctcaggcttgccaaattcagtgtgcctcaccctgcatgtcttcacctgaggttctctcaggcaacaatgcagttgtggcaagttaatatatatcaggaaatcaacagcacattgtaacaaccctttaataataagtgatgtatatcagtagataaatatcccagatcccctgactctcaggctgggacaattctgacatgtgtatctactctggccaccagactctccctggcagaattccccttagttgttctcaggatgacaaacttgttaatgcccccttttaggagaatgcatcagtaaaagattggggagttgagaca

SEQ ID NO: 923359 - DNA, 597 bp, Homo sapiens
gcagctggaggttgttatcctaagtaaattaacacagaaacagaaaaccaagtttcacatgttctcacttataagtggaagttaaatttggggttcacatggacatacagatgggaaccatagacactagggattccaaaaggagggagtagggcaaggattgaaaaactttctattaaataatatgttcactaccatggtgataggtttaatagaagcctaaacctcagcatcacacaatatacccttgtaacaaaccctgcacaggtaccccctgaawctaaaagaaaaatggaaattaaaagcctcataagtccatagtttatggtacatttttttgtgttgcattctatgagctttgacaaatgtataatatatcctctattatagtatcatacagaatagtttcactgccttaaaatgaacctgagttccatctattcatccctgaatctatcagtcactagtctttttattgtctccatagttttgtctttcccagaaggtcatacgttttgaattatacaaccacttgttttttaaaaattgttgcaacacagtcatatccattcatttatgtattgcctatggctgctt

SEQ ID NO: 923360 - DNA, 733 bp, Homo sapiens
acgtcctctacaagtaaagagcaggggaagagtttaatattgtattaatcctggatcactgctctcccctcacttagatactgaatggataaactgaggtaccattaaacagaccatgaggcagtaggttttccattccaggtgttaacagacaaagtggcacatttaaaaaagaaacaaaaacctagtcctcttaatcgtattgcttagaagtgctgtgacagacagagataagcaggtagctagatagatgtgtaggtgtaaagaaacagaaaaagatagattgacagaaagcaagatggcctgtaagttagattatctgcaaggacgagagataaatcgataaatagagcagttacctaaccacttgcattttgtttcctcccacattcttcttagctttagatcagctaccagaattttatcatkatgtacagagcaggaaggtacttaagtgatctccatattcattctatgatgtttcttcaagaaattttaattaagtcatttttgcataaaaaatcaagtactatgaagttccatgtattaagtgcacattcaatattaagatgcataagttataaacatccaaaagacactcccccaactcccaaagaaactcacagcttatggacctgcagatggttctgatgtgggcagtgggagctgtagcctggaaaatgaagctgtgacactgtatgaagttctgtgtcttggattctgtttgtggcta

SEQ ID NO: 923361 - DNA, 733 bp, Homo sapiens
acgtcctctacaagtaaagagcaggggaagagtttaatattgtattaatcctggatcactgctctcccctcacttagatactgaatggataaactgaggtaccattaaacagaccatgaggcagtaggttttccattccaggtgttaacagacaaagtggcacatttaaaaaagaaacaaaaacctagtcctcttaatcgtattgcttagaagtgctgtgacagacagagataagcaggtagctagatagatgtgtaggtgtaaagaaacagaaaaagatagattgacagaaagcaagatggcctgtaagttagattatctgcaaggacgagagataaatcgataaatagagcagttacctaaccacttgcattttgtttcctcccacattcttcttagctttagatcagctaccagaattttatcattatgtacakagcaggaaggtacttaagtgatctccatattcattctatgatgtttcttcaagaaattttaattaagtcatttttgcataaaaaatcaagtactatgaagttccatgtattaagtgcacattcaatattaagatgcataagttataaacatccaaaagacactcccccaactcccaaagaaactcacagcttatggacctgcagatggttctgatgtgggcagtgggagctgtagcctggaaaatgaagctgtgacactgtatgaagttctgtgtcttggattctgtttgtggcta

SEQ ID NO: 923362 - DNA, 733 bp, Homo sapiens
acgtcctctacaagtaaagagcaggggaagagtttaatattgtattaatcctggatcactgctctcccctcacttagatactgaatggataaactgaggtaccattaaacagaccatgaggcagtaggttttccattccaggtgttaacagacaaagtggcacatttaaaaaagaaacaaaaacctagtcctcttaatcgtattgcttagaagtgctgtgacagacagagataagcaggtagctagatagatgtgtaggtgtaaagaaacagaaaaagatagattgacagaaagcaagatggcctgtaagttagattatctgcaaggacgagagataaatcgataaatagagcagttacctaaccacttgcattttgtttcctcccacattcttcttagctttagatcagctaccagaattttatcattatgtacagagcaggaaggtacttaagtgatctccatattcattctatgatgttkcttcaagaaattttaattaagtcatttttgcataaaaaatcaagtactatgaagttccatgtattaagtgcacattcaatattaagatgcataagttataaacatccaaaagacactcccccaactcccaaagaaactcacagcttatggacctgcagatggttctgatgtgggcagtgggagctgtagcctggaaaatgaagctgtgacactgtatgaagttctgtgtcttggattctgtttgtggcta

SEQ ID NO: 923363 - DNA, 707 bp, Homo sapiens
agactgcctcctcaagtgggtccctgatccctgatccccgagcagcctaactgggaggaaccccccagtagaggcagactgacacctcacacagccgggtactcctctgagacaaaacttccagaggaacgatcagacagcagcattcgcagatcacgaaaatctgtggttctgcagacaccactgctgatacccaggcaaacagggtctggagtggacttctrgcaaactccaacagacctgcagctaagggtcctctctgttaggaggaaaactaacaaacagaaaggacatccacaccaaaaacccatctgtacatcaccatcatcaaagaccaaaagtagataaaaccacaaagatggggaaaaaacagaacagaaaaactggaaactctaaaaagcagagcgcctctcctcctccaaaagaacgcagttcctcaccagcaacagaacaaagctggatggagaatgactttgacgagttgagagaagaaggcttcagatgatcaaactactccgagctacaggaggaaattcaaaccaaaaggtgaagaagttgaaaactttgaaaaaaatttagacgaatgtataactagaataaccaatacagagaagtgcttaaaggagctgatggagctgaaagccaaggctcaagaactatgtgaagaatgcagaagcctcaggagctgctgtgatcaactggaagaa

SEQ ID NO: 923364 - DNA, 620 bp, Homo sapiens
cagtttttagccactataagcaaacaccagtgtctagcgtttttctgtgagaacaagttttccaattgatttgggtaatgtgagtgttggatcacatgaagagtacatgcatactcatataatcatgtgataatcatgtcaaactgtttttaaaagccactgtatgacttttaattcttaccagtaagaaacaagagttcctgctgctctgcatatttgtggtgaaggacttgccagtttttaaacctgttttcttattttagccattctaacaggwattagtatctcactggggtattaatttgcattttcttaatgactaatgatatggaagatcttttcatatgcttattgccatctgtatattttctttggtaaagtatcttcagatctcttatccacttaaaaaattgtttggtttttgttgttaagttttaagaattctatacatatgttctgggtacaaaccctttatcagacatgtaagatataaatattttcacccagccttttttttttgggacagggttttactctgtcacccaggctgaagtgcagccgtgcagttgtggctcacaacagccctgacctcctgggctcatgcaatcctccagcctcat

SEQ ID NO: 923365 - DNA, 600 bp, Homo sapiens
atctaatgctagaaatgattgaagttcagtgaggaacatatgtcaaaagttgagacaggctgaaagctaggcttcttgcaccaaccagccaagttgtgaatgtaaaggttttgaaggaaattaaaagtgctactccagtgaatacacgagtgataaagtgaaagagccttattgcttatatggagaaagtttcagttctctggatagaagatgaaaccagccacaagtctcctttagccaagcctactctagaagaaggccctaatgctcttcaattctttgaactatgagagaggtgagaaagctgcagaaggaaagtttgaagctagcagaggttggttcatgaagtttgaggraagaagccacctccataaaagcacaagatgaagcagcaagtgctgatgtagaagctgtagcaaattgtccagaagatctagcaaagatgatcgatgaaggtggctataccaaacaacaggttttcaatgtggatgaatcagccttgtattggaagaagatgtcatctagggctgtcaaagctagagtgaagttaatgcctggcttaaagcttcaaaggacaggctgactctctttttagaagct

SEQ ID NO: 923366 - DNA, 560 bp, Homo sapiens
tggccaggacaatgcatttctattgtttaagccacccagtctggggcaggtttttacagcagccccaggaaaccgatacagtcctgggggatggtatggctgcggggtccttcctcttgggacctgcccctcttccactgatggattctgagattgagaacaagttcagayttggaaacagcaggggatcattcctttctgttggggcatccggccttggacttctgctcatcgattcttggttgcttttcattctatttgttgaacaaaatccttgccggctgcctagacaccttccccctggaaatgctatgtcctatgagccatctccataggctgggcagggcaggctcccccgcggctgtcccaaccctgctgtccattctgatcctctcacccccttgcttgtgacagacagttaagtgctgccctttgacctgtgctactcgggaatccagttgtccctgtggctatgggagagctcagatccatggcagcccacccctgccaggcccgggcaaccctcacagggctgctcagcaacgccaatgtctcctcga

SEQ ID NO: 923367 - DNA, 832 bp, Homo sapiens
cccatgtgtttgctttttgtgctgctttcatgcgacaacagcagagttgcatagttgcaacggagaacaaatggtccacagagcctaaaacatttataaatttgatagaaaaagtttgctaacccctggcttagctgaatggtcagggatttgggaaaaacagaattggaagatggtgacatgcagtgtgggtaggaaatacgtggagcgctgagaatgggcacagaatgcaaagatgtttgtttccaatgcggatgccccgcagagggcacccccggcagaggagctcttcagagccaggtggacacaatgatgagagcgtgagggagaatttctctgtggatgtcagttatcctctttccccagccagcccagtgcttgcccattgtgtccatgttcaacgtggccatggtggcagagatggaggttatgcaggggttcagcggcsaatgtgtacttctcggcaccagggcttctggataacgctactgctgagtgcccggcctgccaagagcagagactgacactgagcccctgatacggtgcatccagtgcaccaggcagcctgctagcaggttgattacttgaaccctttctattatggaggggatggagatttgttttcactggaaaagactcatactctggagatgtgtttgccatccctgctcgtaatgcttctgccagcatcatcatctgtggactttgtgagtcttattcaccatcatggtacaacattgcttctgatcaaggaatccatttcatgacaaaagaaatgtgacaatagctttatggtcatgaggttctccggtcctaccaaatactccatcac

SEQ ID NO: 923368 - DNA, 832 bp, Homo sapiens
cccatgtgtttgctttttgtgctgctttcatgcgacaacagcagagttgcatagttgcaacggagaacaaatggtccacagagcctaaaacatttataaatttgatagaaaaagtttgctaacccctggcttagctgaatggtcagggatttgggaaaaacagaattggaagatggtgacatgcagtgtgggtaggaaatacgtggagcgctgagaatgggcacagaatgcaaagatgtttgtttccaatgcggatgccccgcagagggcacccccggcagaggagctcttcagagccaggtggacacaatgatgagagcgtgagggagaatttctctgtggatgtcagttatcctctttccccagccagcccagtgcttgcccattgtgtccatgttcaacgtggccatggtggcagagatggaggttatgcaggggttcagcggcgaatgtgtacttctcggcaccagggcttctggataacgctactgctgagtgcccggcctgccaagagcagagactgacactgagcccctgatacrgtgcatccagtgcaccaggcagcctgctagcaggttgattacttgaaccctttctattatggaggggatggagatttgttttcactggaaaagactcatactctggagatgtgtttgccatccctgctcgtaatgcttctgccagcatcatcatctgtggactttgtgagtcttattcaccatcatggtacaacattgcttctgatcaaggaatccatttcatgacaaaagaaatgtgacaatagctttatggtcatgaggttctccggtcctaccaaatactccatcac

SEQ ID NO: 923369 - DNA, 571 bp, Homo sapiens
catggaaattgtgggagttacaattcaaggtgagatttgggtggggacatagccaaaccatatcaggtggtaagtgccctctttactctcagttcttgttcttttgctttcaagagtttagataaaggaaagaccagatgtgttttagaaatcaggggttcaaactttatcatgtgtagaatgtgacatttagttcatggctggtcttwttcatactttgattcttgaaattagagactacatctttctgtgattcagagtaacttatgtcattcaaatttgatgtctaaatacagcttataactgctttcctctgaaataggagattttgcccttgatagaattttttaaatagtgaaacaaaacatctctaacagaactctaagttaattttttttggtttttttgagactgagtctcactgtgtcacccaggctggagtgaagtggtgtgaactcagctcactgcaatttctgtctcccgggttcaagcgattctcctgtctcagcctcctgagtagctgggattacaggcgtgcgccaccgcgcccagctaatttttcatattttta

SEQ ID NO: 923370 - DNA, 571 bp, Homo sapiens
catggaaattgtgggagttacaattcaaggtgagatttgggtggggacatagccaaaccatatcaggtggtaagtgccctctttactctcagttcttgttcttttgctttcaagagtttagataaaggaaagaccagatgtgttttagaaatcaggggttcaaactttatcatgtgtagaatgtgacatttagttcatggctggtctttttcatactttgattcttgaaattagagactacatctttctgtgattcagagtaayttatgtcattcaaatttgatgtctaaatacagcttataactgctttcctctgaaataggagattttgcccttgatagaattttttaaatagtgaaacaaaacatctctaacagaactctaagttaattttttttggtttttttgagactgagtctcactgtgtcacccaggctggagtgaagtggtgtgaactcagctcactgcaatttctgtctcccgggttcaagcgattctcctgtctcagcctcctgagtagctgggattacaggcgtgcgccaccgcgcccagctaatttttcatattttta

SEQ ID NO: 923371 - DNA, 669 bp, Homo sapiens
gattggttgagcccaggagttcaagactgcagtgagctatgatctcaccaatgtactccagcctcggtgacagagcaagaccttgtcccttacaaaaaaaaaaaaaaattaagacaaaataaaaatgtaaaaaagaaaccctactactttcatgtaattctgctaacattttggtctatgtatttcctgacttcttaaaaatacatgtgtacygaggggtggagccaagatggccgaataggaacagctccagtctacagctcccagcgtgagcgacgcagaagatgggtgatttatgcatttccaactgaggtaccgcgttcatctcactggggagtgccggacagtgggtgcaggatagtgggtgcagcgcaccgagcgtgagctgaagcagcacgaggcatcccctcacctgggaagcacaaggggtcgggaattccctttcctagtcaaagaaaggggtgacagacggcacctggaaaatcgggtcactcccaccctaatactgtgcttttccaatgggcttaacaaacggcacaccaggagattatatcccgcacctggctcggagggtcctatgcccatggagccctgctcattgctagcacagcagtctgagatcaaactgcaaggcggcagtgaggctgggggaggggcgtccgccattgc

SEQ ID NO: 923372 - DNA, 669 bp, Homo sapiens
gattggttgagcccaggagttcaagactgcagtgagctatgatctcaccaatgtactccagcctcggtgacagagcaagaccttgtcccttacaaaaaaaaaaaaaaattaagacaaaataaaaatgtaaaaaagaaaccctactactttcatgtaattctgctaacattttggtctatgtatttcctgacttcttaaaaatacatgtgtaccgaggggtggagccaagatggccgaataggaacagctccagtctacagctcccagcgtgagcgacgcagaagatgggtgatttatgcatttccaactgaggtaccgcgttcatctcactggggagtgccggacagtgggtgcaggatagtgggtgcagcgcaccgagcgtgagctgaagcagcacgaggcatcccctcacctgggaagyacaaggggtcgggaattccctttcctagtcaaagaaaggggtgacagacggcacctggaaaatcgggtcactcccaccctaatactgtgcttttccaatgggcttaacaaacggcacaccaggagattatatcccgcacctggctcggagggtcctatgcccatggagccctgctcattgctagcacagcagtctgagatcaaactgcaaggcggcagtgaggctgggggaggggcgtccgccattgc

SEQ ID NO: 923373 - DNA, 669 bp, Homo sapiens
gattggttgagcccaggagttcaagactgcagtgagctatgatctcaccaatgtactccagcctcggtgacagagcaagaccttgtcccttacaaaaaaaaaaaaaaattaagacaaaataaaaatgtaaaaaagaaaccctactactttcatgtaattctgctaacattttggtctatgtatttcctgacttcttaaaaatacatgtgtaccgaggggtggagccaagatggccgaataggaacagctccagtctacagctcccagcgtgagcgacgcagaagatgggtgatttatgcatttccaactgaggtaccgcgttcatctcactggggagtgccggacagtgggtgcaggatagtgggtgcagcgcaccgagcgtgagctgaagcagcacgaggcatcccctcacctgggaagcacaaggggtygggaattccctttcctagtcaaagaaaggggtgacagacggcacctggaaaatcgggtcactcccaccctaatactgtgcttttccaatgggcttaacaaacggcacaccaggagattatatcccgcacctggctcggagggtcctatgcccatggagccctgctcattgctagcacagcagtctgagatcaaactgcaaggcggcagtgaggctgggggaggggcgtccgccattgc

SEQ ID NO: 923374 - DNA, 582 bp, Homo sapiens
cgcgaacagcctgggcatcgtggacagcatgtcgatggcagtggaagacagaaaggttaccaggcaggaaggggccggtcctcggtgaaacccccaccttcaggccaaggatagcctgaagcctggggtccaggccatccagtcctgggtgaagttggcacgtcagttctgggtgaagtctggggctcagagtgagaacttcattgatggctgttcagccagccagatggygctttttccaggcctgcctgtggccacacatggaccaatcagcacacagagccaaatcaggaatgaacttccattcacaatggccacaaaaagaataaaatacctaagaatacagctaaccagagaggtaaaggagcgctacaagaagaactacaaaccactgcccagagaaatcagagatgacacaaacaactggaaaaacattccatgcttatcagaggaagaatcaatattgttaaaatggccatactgcccaaagtaatttacagattcaatgctatgcctattaaactaccactgatattctccacagaactagaaaaaaactattttataattcatatggaacca

SEQ ID NO: 923375 - DNA, 455 bp, Homo sapiens
agaggagggagaggatgagaaaaaggaactattggttgctaggcttagtacctagatgacaaaatagtctgtacaataaacccccatgacacaagtttacctataaaacaaacctggggcggtggctcacgcctgtaaccccagygctttggaaggccgaggcaggtggatcacgaggtcaggagatcgagaccatcctggctaacacagtgaaaccccgtctctactaaaactacagaaaaattagccgggtgtggtggcaggcgcctgtagccccagctactcgggaggctgaggcaggagaatggcgtgaacccaggaggcggagcttgcagtgagccgagatcgcaccactgcactccagcctggacgacagagcgagactccgtcttaaaaaaataaattaaatttaatttaatttaaaaattaaaaaaaaaaacaaacaaacctggaca

SEQ ID NO: 923376 - DNA, 602 bp, Homo sapiens
gttaaatgcttattttagtcgtttaaaaggaatttgcaagatacaatcccaaactagtttcttaactagtgattggtctcagtctgtagactgctctctaccatcctagaagaagagaaaacaactcatcttccctgttggaagaagcaagctcaaacttcataaaggagttacctscattccattgtcatggaagcaggaaaatttgccttcctgttgaaagcaagtaaaactccaaaaaaagaagagttgtacagtaaaataaacttaagatctcaaccaaatttggggagatcagggattctctggagggggtgctgtcagatctcagcaaattatcctattggcttgagccataaagttagctcatgctggtaccaagcactgacaggagatttgtcaaaggtcaggggcatctccactcagaatccccccgtggtggttaccaaaatgtgaacccaacaaatctgagacaggtctcagttgatttagaaggtttattttgccaaggttgaggacgcacaaggacacagcctcaggaggtcctgacgacatgtacccaaggtggttggggcacggcttagttttatacatttagggag

SEQ ID NO: 923377 - DNA, 781 bp, Homo sapiens
taaatgcttattttagtcgtttaaaaggaatttgcaagatacaatcccaaactagtttcttaactagtgattggtctcagtctgtagactgctctctaccatcctagaagaagagaaaacaactcatcttccctgttggaagaagcaagctcaaacttcataaaggagttacctgcattccattgtcawggaagcaggaaaatttgccttcctgttgaaagcaagtaaaactccaaaaaaagaagagttgtacagtaaaataaacttaagatctcaaccaaatttggggagatcagggattctctggagggggtgctgtcagatctcagcaaattatcctattggcttgagccataaagttagctcatgctggtaccaagcactgacaggagatttgtcaaaggtcaggggcatctccactcagaatccccccgtggtggttaccaaaatgtgaacccaacaaatctgagacaggtctcagttgatttagaaggtttattttgccaaggttgaggacgcacaaggacacagcctcaggaggtcctgacgacatgtacccaaggtggttggggcacggcttagttttatacatttagggagacatgagacatcaaccaatatatgtaagaagtaaattggttcagtctggaaagacaggaaatcttgaaggaaaggcaggaaaactcaaagtggagagggagcttccatgggagggagcttccaggtcacagatgggtgacacacaaatggttacattattttgagtatctgattagccttt

SEQ ID NO: 923378 - DNA, 559 bp, Homo sapiens
tttgttttttttttttttcccacataaagtctcctaaatacctacccaaacttaaagtgttagaatttatgtggaaagaatttcaaaactgtattttaaagagccctccagttaatgctgacatgtgatcacccaggaacccctaaacttaatctgaatggctgttatgctcttgacaagtttctgtaaaacagaaaggaatgtcttcatccctctttcaacttttctaactagtgaactacaaagttatatttattatttaataatcataaccacaacaacagcctaaccaattttaagcaccttccaaacaggcctatggaaattactttccatgtgctacttaattctattcacacaattatgaaaaagataggtactattgtttttctactttatataaaaaaaaattcragagatcaagtacctgcccaacgtaaaacctgatacattttagatctttgattcattgtgtaatgtggcagacacggagatgccctccccagatccctcttcatagaaagatttgttgccccaagtgctgagagtgtggtcagca

SEQ ID NO: 923379 - DNA, 626 bp, Homo sapiens
caggcaaattacttaacttctctgggccgtgtgggtcttacttgcaaggtggggacaatcacagtacctatttcataggctcattgtagagattaaaggcacagatgtatgaaaagcacttggcagagggctaggtgtgcagcaaattcttggtcaaggctgaccaccacctaggggcttgggcttcacctcgagggcagtggggagccactgaaggctttaggcagaagaatgactgggacagatgtgaattttcaaaatatccctcttagttggtgggttggagatcctagctttctaatttaaggcattttattggccaggcaagtcaatgaattaatcattctatacctgttggacacttaccatgtgcttttgctacattwgatgactggagaatggaaaaaagtatatatatgtgtatatatatataacaattaggcactgttctaaaaaacagagtatttattttaaaattgtggcaaatactgccaaacctgtagatatcaggatgaaattgcttttgtcagacccaggcaaaataggcctgggaaagcaccaaggagaggggactcctgcctacgtgtctgagatacaaagtgtttccaaggactttctaaaaaccc

SEQ ID NO: 923380 - DNA, 633 bp, Homo sapiens
gaggggcccccccaaagaggcaagggaaggggggtcctgggaaggaaactcagcttggctgtcagagtttgcagcgtaaccagtgtgcttattgtaaagaaataggacagtggaagaacaaatgccctcagctcaaaagaaaacaaggtgactcagagcaggaggccccggacaaggaggaaggggccctgctcaacctggcagaagggttcttggactgagggagaccgggctcaagcgtccccaaagagcctgtggtcagaatgacagtcgggggtggagacattgactttcttgtagatagcggtgctgaacattcgctagtaaccgccccggtcgcccccttatccaaaaagactattgacgtcatyggagcaatgagggtttcaacaaagcaagctttctgcttgtcttggacttgtactgtaggaggacattcagtcattcatcagttttggtacatgcgtgactgtcccttgacctttttgggaaaggacttgctcagcaagctgagagccactatctctttgacagagcacagctctttgctgctaaagttacccggagcgggagtcattgtgacccttatgttcccccgagaggaggaatggagacttttcttaactgagccgg

SEQ ID NO: 923381 - DNA, 543 bp, Homo sapiens
aagcgcaaatcctgtaccggcaggtagtccttggtcggtggcttggtaacaggcaggaggggagtgttgcatggagactgacaaggaacaataattccaaaagttcttaggtgcttgagacggacctggataccttgaaggscttctctggggatcgggtcctgtttttgcctcaccggctgggccccagtcttaaccggccaatcctggagggttgtcttctgcccgtactcttggccaccgcttagccagagctggtcttctctcttggcccggctcagttaagaaaagtctccattcctcctctcgggggaccttaagcatcataatgactcccgttccgggtaacttgagcagcaaagagccgtgctctgtcaaagagatagtggctctcagcttgctgagcaagtcccttcccaaaaaggtcgagggacagtcacgcatgtaccaaaactgttgaatgactctgtgtcttcctacagtacaagtccgggacaagcagaaagcttgctttcctgaaacccccgtgactccgatgatgtc

SEQ ID NO: 923382 - DNA, 543 bp, Homo sapiens
aagcgcaaatcctgtaccggcaggtagtccttggtcggtggcttggtaacaggcaggaggggagtgttgcatggagactgacaaggaacaataattccaaaagttcttaggtgcttgagacggacctggataccttgaagggcttctctggggatcgggtcctgtttttgcctcaccggctgggccccagtcttaaccggccaatcctggagggttgtcttctgcccgtactcttggccaccgcttagccagagctggtcttctctcttggcccggctcagttaagaaaagtctccattcstcctctcgggggaccttaagcatcataatgactcccgttccgggtaacttgagcagcaaagagccgtgctctgtcaaagagatagtggctctcagcttgctgagcaagtcccttcccaaaaaggtcgagggacagtcacgcatgtaccaaaactgttgaatgactctgtgtcttcctacagtacaagtccgggacaagcagaaagcttgctttcctgaaacccccgtgactccgatgatgtc

SEQ ID NO: 923383 - DNA, 543 bp, Homo sapiens
aagcgcaaatcctgtaccggcaggtagtccttggtcggtggcttggtaacaggcaggaggggagtgttgcatggagactgacaaggaacaataattccaaaagttcttaggtgcttgagacggacctggataccttgaagggcttctctggggatcgggtcctgtttttgcctcaccggctgggccccagtcttaaccggccaatcctggagggttgtcttctgcccgtactcttggccaccgcttagccagagctggtcttctctcttggcccggctcagttaagaaaagtctccattcctcctctcgggggaccttaagcrtcataatgactcccgttccgggtaacttgagcagcaaagagccgtgctctgtcaaagagatagtggctctcagcttgctgagcaagtcccttcccaaaaaggtcgagggacagtcacgcatgtaccaaaactgttgaatgactctgtgtcttcctacagtacaagtccgggacaagcagaaagcttgctttcctgaaacccccgtgactccgatgatgtc

SEQ ID NO: 923384 - DNA, 543 bp, Homo sapiens
aagcgcaaatcctgtaccggcaggtagtccttggtcggtggcttggtaacaggcaggaggggagtgttgcatggagactgacaaggaacaataattccaaaagttcttaggtgcttgagacggacctggataccttgaagggcttctctggggatcgggtcctgtttttgcctcaccggctgggccccagtcttaaccggccaatcctggagggttgtcttctgcccgtactcttggccaccgcttagccagagctggtcttctctcttggcccggctcagttaagaaaagtctccattcctcctctcgggggaccttaagcatcataatgactcccgttcygggtaacttgagcagcaaagagccgtgctctgtcaaagagatagtggctctcagcttgctgagcaagtcccttcccaaaaaggtcgagggacagtcacgcatgtaccaaaactgttgaatgactctgtgtcttcctacagtacaagtccgggacaagcagaaagcttgctttcctgaaacccccgtgactccgatgatgtc

SEQ ID NO: 923385 - DNA, 596 bp, Homo sapiens
aggttgaccacaattatccagggttcaaagccaaagacaatctcctccaatccattgtcatactcaggtcgacagccaaaggcgggaggtatccaaagctgcaagagaagagaaaatggcatgtggtggggagcagcttccaagccaccacggaggccccactcaagtcccaggcctcatgggagctgaacctaatgcacagggactgagtcacccctgacagaacaataaggagacctcatggcatttcccatctccacagaaaccaccaaatccatgtctgccatgatcctgctcacttcctcaacmacccttccctgcaatccatcctgaatgagcactttctgaacccatccaactctttccatccctacagccctcgcccagcctcggtttcctcatttgaaagatgggaattctaacacgtgtctgagagggcttagatgagaattaagtttgcaaaactgaaagcaatgacttttgtttgtgttgttcacggaacctacacactgttccctgcttctcagactcttttgtgtcccagttctctccccctgtgccacctcttgagttgtcaggctcctcactcccgcttc

SEQ ID NO: 923386 - DNA, 596 bp, Homo sapiens
aggttgaccacaattatccagggttcaaagccaaagacaatctcctccaatccattgtcatactcaggtcgacagccaaaggcgggaggtatccaaagctgcaagagaagagaaaatggcatgtggtggggagcagcttccaagccaccacggaggccccactcaagtcccaggcctcatgggagctgaacctaatgcacagggactgagtcacccctgacagaacaataaggagacctcatggcatttcccatctccacagaaaccaccaaatccatgtctgccatgatcctgctcacttcctcaaccacccttccctgcaatccatcctgaatgagcrctttctgaacccatccaactctttccatccctacagccctcgcccagcctcggtttcctcatttgaaagatgggaattctaacacgtgtctgagagggcttagatgagaattaagtttgcaaaactgaaagcaatgacttttgtttgtgttgttcacggaacctacacactgttccctgcttctcagactcttttgtgtcccagttctctccccctgtgccacctcttgagttgtcaggctcctcactcccgcttc

SEQ ID NO: 923387 - DNA, 563 bp, Homo sapiens
accaggcgccttgagggttgaacttaggtgcagcctccaggggcctttctggtgctgtgggaggtgggtgcctgtgcacggactggaccgcacagaggaaaaatggcaatcactgtctgttggagggagtccctgggaggactgctcttaaagaaggctttagggcaaatgatgctctagtgggctttggagggtgtgtaggagcttgcctcggagacaaaaccttggggaagagaagagagtccccagtagaaggtactaattgcacaaaggcgaggagatargacgtggcctgccccccgcccctcagtgccttttacttgtaccattctttattatttattattattattattttcagacggagtctcactctctcacccaggctggagtgcagtggtgcgatctcagtttactgcaacctccacctcctgggttcaggcgattctcctgcctcagcctccggagtagctgggattacaggcgcctgccaccacgcccggctaatttttggatttttagtagagacagggtttcaccatgttggtcaggcgggtctctta

SEQ ID NO: 923388 - DNA, 563 bp, Homo sapiens
accaggcgccttgagggttgaacttaggtgcagcctccaggggcctttctggtgctgtgggaggtgggtgcctgtgcacggactggaccgcacagaggaaaaatggcaatcactgtctgttggagggagtccctgggaggactgctcttaaagaaggctttagggcaaatgatgctctagtgggctttggagggtgtgtaggagcttgcctcggagacaaaaccttggggaagagaagagagtccccagtagaaggtactaattgcacaaaggcgaggagataggacgtggcctgccccccgcccctcagtgccttttacttgtaccattcwttattatttattattattattattttcagacggagtctcactctctcacccaggctggagtgcagtggtgcgatctcagtttactgcaacctccacctcctgggttcaggcgattctcctgcctcagcctccggagtagctgggattacaggcgcctgccaccacgcccggctaatttttggatttttagtagagacagggtttcaccatgttggtcaggcgggtctctta

SEQ ID NO: 923389 - DNA, 695 bp, Homo sapiens
caagttatagtgttcacatcattaacctgggtataaaccaagtaccgacctcatacaatagttatccgggttaaagttagctaaatatctaaagcgatttgcaagatataaaccacgcaatgcacgtcacctcagctccttgcttcccttcacaggcaactgaggcccaaagagggtctgccagagcagagaggggcaaaaacagacaactccagggtttcagatggtgacctctccctcactggtttattcctgaagatatgagacttctagggcctggaagtcttctgtgtcttgatcatggtggtggtaacacgagttttatgagtatgtctgaaaaattaatcgagctgtacctttttttttctttttaagagacaggktctcgccttgttgctcaggctggaggaggagtgcagtgacaggaatgatagctcactgcagcctcgaactcctgggctcaagccattctcccggctcggcctcccgagtagctgggactacaggtgcacgccattacactgttatttttttctaaaagacagggtctcgctatgttgcccaggctggtctcgaactcctgggctcaagtgagcctcccgcctcggcctcccaaagtgctggattacaggcgtgcgccaccgcgccccgcagagctgtacttttaagatgttcgctgtactatttgtaagtta

SEQ ID NO: 923390 - DNA, 670 bp, Homo sapiens
tggagaataggtatgatgatactgacttcatcagggtgttgagcagtttccagactgtgtcaggtctgtgaaagccgcgtgcgccagcctggagcatagtaggttcgtagacatttgcgaaagagagaatgaagtagctctgggagatgctgtgagaagatgtcttagcttaggataagaaggaaggggaggaggaacagtgtaggcttacagggcgggctggttcttaatgtggatctgggggaggcgggggcgagtgctaaggggggtgtgaggaggagggggcccmtctgcggggaccactgagtcacgaggacatgtaagcgacatgacaaccggcaacatggtaaccaggaaactagcggcggtgggaaacagagctggagcagtgtggggtgggggtggcgggtaggcctggcagtgccgggctcaaggggtccggggagaagccaggctggcccctcagagtgaggaggggaggccccagggccaggctagctggggaagagatgggggccctgaggggagggaggggaggcacctcggggctgtagggcagggggctcctcctgcaccaccccaggctcctctctgctcctccacatctccacttttcatgcctctccccctaggatgccaaatttggctcacgcaatctgtcgtctctctt

SEQ ID NO: 923391 - DNA, 693 bp, Homo sapiens
actttcttaaagtcagatttctatctctcttcgtggtctaaattcaaaaacctttgccccagataccactgcaaatttgtctgttattactggttggggaaaaataacccagttcaccttactccaaaaacatgagcatttcagaaaagtttttatactgcctctaaaatgaggccattaagtgatattcaataatcaggcttccttcacccgaattcaagaaatttcctgccgtctttgtgtaataaacttttttcttccatgtgcattttaattttaacacccctccccgccgcagaatctggaaaagaggtgtgcggatcaagacccctccacccgccattgtctcaagtttaatttacatgctgtaaccaaacccttcactctttcgaatatttaacaagattgagattcctttaattccatgttggtagctgttctrtaaatacctttcaggtttttattttttaatatcccagtaatctaaaaactattctgttgttagatttcaattgaaggaactggatttaaaatcttattacgtttattttattagtggaatactcagtttatgcaactgtctcatgtttttcattcctactttctaattctaaggcttgaaaacagccattgctcagtccttcagcttcaccttcccaattcattcattaaacattctgctcagggattaaa

SEQ ID NO: 923392 - DNA, 693 bp, Homo sapiens
actttcttaaagtcagatttctatctctcttcgtggtctaaattcaaaaacctttgccccagataccactgcaaatttgtctgttattactggttggggaaaaataacccagttcaccttactccaaaaacatgagcatttcagaaaagtttttatactgcctctaaaatgaggccattaagtgatattcaataatcaggcttccttcacccgaattcaagaaatttcctgccgtctttgtgtaataaacttttttcttccatgtgcattttaattttaacacccctccccgccgcagaatctggaaaagaggtgtgcggatcaagacccctccacccgccattgtctcaagtttaatttacatgctgtaaccaaacccttcactctttcgaatatttaacaagattgagattcctttaattccatgttggtagctgttctataaatacctttcaggtttttattttttaatatcccagtaatctaaaaactattctgttgttagatttcaattgaaggaactggatttaaaatcttattacgtttattttatyagtggaatactcagtttatgcaactgtctcatgtttttcattcctactttctaattctaaggcttgaaaacagccattgctcagtccttcagcttcaccttcccaattcattcattaaacattctgctcagggattaaa

SEQ ID NO: 923393 - DNA, 742 bp, Homo sapiens
cacaccactggttctctctaatcactcactcccatgagaccatgaaaattcaagttcaagtttactgagttaaaaattactcaccggaccaggctcagtggctcacacctataatccctacacttagggaggcagaggcagaaggttagcttgagcccaagagttcaagaactgcctggacaacatagcaagaccccattctccacaaaaagaaaaaacaaataaataaataaaaaatgggctgggtgcagtgggtcacacctgtaattacagmactttggaaggctgaggagggaggatcgcgtgagaaccacaagttcaagaccaccctagccaacatagtgagagccccatctctacaaaaaacaaaacaaaacaaaacaaacaaaaaaaacagttgagcatggtggtgccactgcactccagcctgggcaacagagcaaaaccttgtctcaaaaaataaaaaattaaaaagtttaaaattttaaaaaattaaaatgatgtcgtttcagtcacgcaagatgaataagttctagagagttgctgtacagtattgtgcttatagttaatactgaactgtacacttaaaaacctgttgaccaggtgcggtggctcacgcctgtattcccagcactttgggaggccgaggtgggcggatcaccaggtcaggagattgagaccatcctggctaacatggtgaaaccccgtctctactaaaaatacaaaaaaattagccgggcgc

SEQ ID NO: 923394 - DNA, 614 bp, Homo sapiens
tatacggaaatgcaagggatcccaaatagctaaaacaatcttgaaaacaaagaacaaagttggaggactcatactttcttggtttactacaaagctacaataattaaaaagtgtattcctggcatctgggcaaacatatatctcaataaaatagcaccaacaatccagaaataaactctcacatttatagtcaattggtttttgacaagggtgccaagacaattcagtagagaaagaatagtcttttcaaaaaatggtgctaggacaactggatattcacatgcaaagaaatgaatctggaccctttacaccatacaaaaaaaactaactcagactgggygtggtggctcatgcttgtagtcccagctactcaggaggctgaagctagaggattacttaagcccaggagtttgaggttatagtgagctatgatggcaccactgctctccagcctgggtgacagagggagatcctgtctcagaacaaaacaaaaaaacaacaaacaaaccttaaaacaacaacaaaacaataacaacaacaacaaagtcgaaatatgtagctactgtatgacccagcagtttcattcctagctgtatactcaggagaaatgaaaa

SEQ ID NO: 923395 - DNA, 591 bp, Homo sapiens
tttgacttttttttttcttccagaagcctttcccacgtcttccgaaattattctctcttcccagcctctatcttatctgaatctttgtttgcatttctaatgctaacacctaattcaggagcttatcgctcacacctggaccactccaatagtctcctaactgatttgtcaaaatyagcccatgtgaaactggttttgtttctcctccaacaggagggttaatttgttccaacaccagaagattctcttactcaaagctgcccctttgtgcgatcactttccagaactttgttttcccatgtaaagcctcaatgccctagctaaaagagtgggagggggtcaggcctggagaaattgctgtctctcagcttgcatccttacatacagtgggcgctcaatgaatacttgtggacacattcttttttctttttgagatggagtcttgctctgtcacccaggctggagtgtagtggtgcgatctcggctcactgcagcctccgcctcccaggttcaagcaattcttctgcttcagtctcccaagtagctgggactacaggtgcgtgccaccacgcccagctaattttttgtatt

SEQ ID NO: 923396 - DNA, 591 bp, Homo sapiens
tttgacttttttttttcttccagaagcctttcccacgtcttccgaaattattctctcttcccagcctctatcttatctgaatctttgtttgcatttctaatgctaacacctaattcaggagcttatcgctcacacctggaccactccaatagtctcctaactgatttgtcaaaattagyccatgtgaaactggttttgtttctcctccaacaggagggttaatttgttccaacaccagaagattctcttactcaaagctgcccctttgtgcgatcactttccagaactttgttttcccatgtaaagcctcaatgccctagctaaaagagtgggagggggtcaggcctggagaaattgctgtctctcagcttgcatccttacatacagtgggcgctcaatgaatacttgtggacacattcttttttctttttgagatggagtcttgctctgtcacccaggctggagtgtagtggtgcgatctcggctcactgcagcctccgcctcccaggttcaagcaattcttctgcttcagtctcccaagtagctgggactacaggtgcgtgccaccacgcccagctaattttttgtatt

SEQ ID NO: 923397 - DNA, 591 bp, Homo sapiens
tttgacttttttttttcttccagaagcctttcccacgtcttccgaaattattctctcttcccagcctctatcttatctgaatctttgtttgcatttctaatgctaacacctaattcaggagcttatcgctcacacctggaccactccaatagtctcctaactgatttgtcaaaattagcccatgtgaaactggttttgtttctcctccaacaggagggttaatttgttccaacaccagaagattctcttactcaaagctgcccctttgtgcgatcactttccagaactttgttttcccatgtaaagcctcaatgccctagctaaaagagtgggagggggtcaggcctggagaaattgctgtctctcagcwtgcatccttacatacagtgggcgctcaatgaatacttgtggacacattcttttttctttttgagatggagtcttgctctgtcacccaggctggagtgtagtggtgcgatctcggctcactgcagcctccgcctcccaggttcaagcaattcttctgcttcagtctcccaagtagctgggactacaggtgcgtgccaccacgcccagctaattttttgtatt

SEQ ID NO: 923398 - DNA, 531 bp, Homo sapiens
tgtaaatgctcctcttacaagtactaatgttaggaatttcaagaaggaaatgaaaccactcctagaagatcccctcggtttagcagaccaactggacaaattcataggacccagcttttacacctgggctgaaatgatgtctatcttaaatatcctgttcataggagaagaaaagggaatgattaggagagtggccatgactatctggaagaggcaacaccctcccaggcaagaagtcttgacagtcgaacaaaaaacttccaaatgtcaatcccaaatgggataataatgatcccagggacyaggcccaaatgcaggacctcagagaactgatagttaaaggggtcaaggagcccactcctaggacacaaaatgtctcaaaggcattcgagattcaacaagaaaaagaaaactccctctgcattcctgcagaggccagagatcagatggaaaaaaaaaaactccagattaagttcagagaacccagtaaggcaaagccttttaaaagttaactttgtaactaagagctgg

SEQ ID NO: 923399 - DNA, 613 bp, Homo sapiens
tttctcaaaaatgatgaaaaccactcagttacacatctaagaatcttaaggaactccaagtagtagagagccacactcagatacactctattaaaactctggaaagctaaggacaaagagaatacactgaaaacaagagaaaaatgatttgtcatgtccaagggaatcccaataacaataacagccaccttctcatcagaaaaaatggagggaagaaggcagtgggattacacattcaaactgctgaaaataacctgtcaaccaacagtcttttccagcaaaactagtgttatgggatatttggggtttcgattttatggccagaaacctgtggctggtggcacctttgctcaagttctcgtcctgtgtccmggaagaatgaggaatgcagacaagtgaagggtgaacaagtcaaagaggagctttattaagtgtcagaacagctcaaaggagacccacagtgggtagctcctctctgtaggcaggtcgtcctgttgagtgttcaactctcagcagagaggaggccctggagagggtggttcccctctgcaggcaggtcactctgatgtctgcttctctcagcagagaggaggccctggagaaggtagcttgt

SEQ ID NO: 923400 - DNA, 634 bp, Homo sapiens
tttattgtatgtgaactagaactcagtaaagtaatgtcatttttaaaaattggggggaggccaggtgatgtggctcatgcctgaaagcccagcactttgggaggttgaggcaagcagatcacttgagcccaagaattcaggatgagcctgggcaacatggtgaaaccccatctctacaaaaaaaaaaaaaaatcattctggcatggtgccacatgccagtactcccagctactgggaagctgaggtgggaggatcgcttgagccccagcagtcaagactgcagtgagctgtgatgacaccaccgcactccagcctgggtgatagagtgagaccckgtctcaaaatatatatatgtggatccctggggcagcctgagtctagggaataaggaccccaccttctacctcttgcaatatatctaaaaaaagacttgcatttagaatatacgaagaattcttacaactcaataataaaaagacaaataatccacttaaaaatgcacaaaggatctgaatagaaatttctccaaagatttacaaatggccacccttcactgcttcccttccaacagcagggcctccaattgaacacctgggggcacccacgcccacagagttagttctccaccagctag

SEQ ID NO: 923401 - DNA, 609 bp, Homo sapiens
tgctgtcagcctcatggctctttcatgatccatacctgaaaaccaaatgctccacctccaagtcgatggtattttatttgttgactggagcagaatagtgatgctgtcacctgtcgggagagcagcgagccttccctggggtggggtgtgaaggacacggggaggagacaggggtaggctgctgatgggagattgatatgcagcctgggtatgagagccacasggtctgtgactctgacaggagacagtcaactccagcctgggacaggcatcatgtgatgggcaggccaggtgtagagtcagcctagcagggctcatggtcaaagttagacacatgtggccatggggagacagactttcttgtggtgttcgtagtacgtggaacatagtcttccaagagatggtctccctctctcagcctggcccagggcatggacaacaggaacttctcctaagagggctagtcttgggacatggtcttccagccttggtttccctacccaggacatttattttttttttcttttttcttttctttctttctttctcttttttttttttgagatggaatctcactgtaatgcccaggctggagtgcggtggttgcaa

SEQ ID NO: 923402 - DNA, 555 bp, Homo sapiens
atccctcccttatggtccaggcactaaagcagtaatgcttgacaaagcaagggattctgaaactttcctccagcactatagccagtgtccaatctgactgctcagagcccatccgtccactgttgatgaggtttcatctttcctgaatggagtgatgctgtgctggttatattcagataatctatatctgtgatggtgaattttatatgtccacttgactgggctacggggtgaccagatagttggttaaacattattgcttgatgtgtctgtgagggtgtttctgaaagataatagcatttgaatcagtagagggagmaaagaagattcatcctcaccaaggtaggtgagcaccactcaatccattgagggactgaatagaacagaaaggcaaaggaagggtgaattcactctttctgcttgagctgggatagccatcttctcctccaatgtacatagctgatcctggttcttggacttacaacattaatttcctggtggccttagagtttggactggcgttaccccattggctttcctgggactccagcttgc

SEQ ID NO: 923403 - DNA, 775 bp, Homo sapiens
ttatgcaaatgggcacttgtggcttgggggaacaacatagtaaatgcaccacacacagatgtaaacttaaaccttgaactacaggtgtaagtacaatttgaaacagtatggatgactctcatgagcataatattgactaaaataaactagacacaaaaaacacttacataaaattcaaaagcaggcacctttaaactgctgtggtaggagtcagggttctggtttccctctgaagaggaaaagggcggggcttctggggcactggttggtaatgagtgcaagggtcgttctgttggctcactttgagcaaaatcaataagccaaacacggatgatttgtgcctttttctgtatatgtatgttttacttcagtgaaacttttttttttttttttttgagacggagtctcgctctgtcgcccaggctggagtgcrgtggcgccatctcggctcactgcaggctccgcctcccgggttcacgccattctcctgcctcagcctcccgagtagctgggactacaggcgcccgccaccacgcccggctaattttttgtatttttagtagagatggggtttcaccgtgttagccaggatggtctccatctcctgacctcgtgatccgcccgcctcggcttcccaaagtgctgggattacgggtgtgagccaccacgcctggccgaaactttttaaaaatactacactttgagcaatttagagctaaagatgatatgttctggaaatctgttttatttatgtgactctgaaggtggctccagt

SEQ ID NO: 923404 - DNA, 786 bp, Homo sapiens
ggcacttgtggcttgggggaacaacatagtaaatgcaccacacacagatgtaaacttaaaccttgaactacaggtgtaagtacaatttgaaacagtatggatgactctcatgagcataatattgactaaaataaactagacacaaaaaacacttacataaaattcaaaagcaggcacctttaaactgctgtggtaggagtcagggttctggtttccctctgaagaggaaaagggcggggcttctggggcactggttggtaatgagtgcaagggtcgttctgttggctcactttgagcaaaatcaataagccaaacacggatgatttgtgcctttttctgtatatgtatgttttacttcagtgaaacttttttttttttttttttgagacggagtctcgctctgtcgcccaggctggagtgcggtggcgccatctcggctcactgcargctccgcctcccgggttcacgccattctcctgcctcagcctcccgagtagctgggactacaggcgcccgccaccacgcccggctaattttttgtatttttagtagagatggggtttcaccgtgttagccaggatggtctccatctcctgacctcgtgatccgcccgcctcggcttcccaaagtgctgggattacgggtgtgagccaccacgcctggccgaaactttttaaaaatactacactttgagcaatttagagctaaagatgatatgttctggaaatctgttttatttatgtgactctgaaggtggctccagtgacggcagggatgatgtaatga

SEQ ID NO: 923405 - DNA, 485 bp, Homo sapiens
aagatatagactagctgaatggatttaaaaatgactcactatatgctgcctacaagaagtttatttcacctgtgaaaacacatatagactaggccaggcatggtggctcatgcctgtaatcccagcactttgggaggccaaggtgggaagatcacaaggtcaggagattgagaccatccgggctaacatggtgaaaccctgtctctactaaaaatacaaaaacaaaattagccgggtgtggtggtgggcacctgtagttccacctactaggaaggctgaggtgggagaatggcgtgaacctrggaggcggagcttgcagtgagccaagatcgtgcctctgcactctagcccgggtgacagagcaagactctgtctcaaaaaaaacaaaaaacaaaacaaacaaaaaaccaaaacaaaacaaaacatatagactaaaagtaaaggaatgtaaaaagataatcctgcaaatggaaaccaaaagcaag

SEQ ID NO: 923406 - DNA, 613 bp, Homo sapiens
taatctcctggtgtgccgttttttaagcccgtcggaaaagcgcagtattagggtgggagtgacccgattttccaggtgccgtctgtcacccctttctgtgactaggaaagggaactccctgaccccttgcacttcccgagggaggcaatgcctggccctgcttcagctcgtgcatggtgcgctacacccactgtcctgcacacactgtctggcactccctagtgagatgaacccggtacctcagatggaaatgcagaaatcacccctcttttgcgtcgctcacactgggagctgtagacsggagctgttcctattcagccatcttggctgcgctcccctatctttttcagtaatatgtatattcgaatcttttgcccttttcaaaaaattgggctatgtgtttccttatgtgtttgttgtgtgtgtgtgttttattgtggtaaaatatacatatcatgaaatttaccattttagccatttttaagtatacagtttagtagcattaagtacattcacattgctgtgtagccatcaccactatttccaaactttttcattatcctaaacagaaactccatacaccctttaagcaataactctccattctcctctc

SEQ ID NO: 923407 - DNA, 772 bp, Homo sapiens
tcccagcatcatgtagcaacttagtatcggaaacttctagcccaagtggcctctaacactaaaagtccttgctttctccaccattcttctgcctccccttgagactcctaatggggctctggtcagactggcttctggattttcgatattcttagcagaaaaacatgtctggatgtataattacactgattatatgtatatgtacatatatatgcatatatgtgtgtatgcacacatatacacatctgtaatatatatttgtatatttaaatatgtatataatacatatacacatatgtaatatctgtttcaaaaatcttacatcttatacgtatgcctacaaatgtgagygtataaaagacaactgtttggaaatgagaaggaggaaaaaggaaaagagaatgcagaagaggaagtgtgtgagggaggaagagaagaaaaagggggtagaaaagtaagaggaggagtcaaaagaaaaagagaggggtgggtgagtgaaagaattgccagaagaggaaatagagaaagtgaagatgaagacatctcttctcagcaaaataaatagccgtacccactctgaggccattaacttgccagaaattctcaggaggctccttgggcccaagaaagcaggttcagccagtgaggactcctcgaagccagttttgtctcaagagccacagactccgagacccttgttccatgtatgccagaaggtggagatgacttgggtgtggctgatggagaaggtgtgtactcagcccagttcagg

SEQ ID NO: 923408 - DNA, 779 bp, Homo sapiens
ccttcactgttctatctcaggtgtatcaactctgcagccctatgacataacttagttctcagggatcttgatcacctttcccttccacaagatatcacactgacccattatattgatgacattatgttgattggctctagtgagcaagaaattagcaactactctagtttattggtaagaaatttttgcagcagagtttgggaaataaaattcaaaaaacttcagggccttccaccccagtgaaatttcttggggtccagttgtgtggggcatgtcaagataccccttctaaagtgaaggataaggtgttgtatctggcccctcctacagacaagaaagagcatgcctagtgggcctctttgaatgttggaggcaacatattcctcatttggatgtgttactctggcccatttacawgtgacctgaaaaatttctagttttgagtggaactcagagcaagagaaggctctgcaacaggtccagattgctgggcaaactgctctgacacttgagggtatatgatccagcagatccaatggtgcttaaaagtatcagtggcagataggaatgctgtttggagcctttagcaagccctcattggtgaactgaagtgcaggcttctaggattttggagcaaagctcagccattatccacagataactactcaccttttaagagatagttcttgacctactactgagccttagtagaaactgagtgcttaaccatgggccaccaagttaccatataacctgagttgcccatcatgaactgcgtg

SEQ ID NO: 923409 - DNA, 516 bp, Homo sapiens
ggatgggaccattgcctttcctatttcttcatctatgctgatttctgttttgtctctgataaaattccatcatgcatcatacccatggaataatgcttaattcaaactttggcctcctgaggtaccctagaaggctctgataaaaaaaaatgtctgggtttttggtcttccataaaggaaagttagtgagtgttgcctttgcattccagaaagataagcatagcamctcactaaataaagggattttgttaggcatcagacagaccagggattaaatgtagctctgttacttcagctttgagcaacatttttacattctttgagcctcagattctcagctataaaatggggataataacagcacctatttcctagggctgtggtgaggattagacaaagtaagcattttatgtgcatgagcgtagtatctgacccagtagttattcaatagctatgcactattgttattctccttcatttttgaattccaaaacccttttgggaacagagtgtcct

SEQ ID NO: 923410 - DNA, 630 bp, Homo sapiens
ctggtggtgcctgcatattgtgcagaaccatctgtggaccaggccatagtcttctcttccactgtcaactgatcataaggaactcaccatggggccatcgatgtaggccgaggaagacaaggcagggtggcaggagtggagaccaggggcatttgagccacttcctcatgtaacttacttgcgccttcaggacctgctcgagcctgatcacgtacataccacttccattttgatkattgaatgctactgcgcatgacccactttatggctagatgggtcagaaagcacccaattcatgttaagcagttcaggttgcatggtgacttgatgacccataatcaaatgttcagtttccaccaaagcccagtaacaggccaagagctgtctctcaaaaggagagtagtcatctgcagaagatggcagggccttgctccaaaatcctagaggcctccgctgtgattcacctagagggacatgtcaaaggctgcaaacagcatccctatctgccactgacacctcaagcaccatcggatctcctgggtcacatggcccaagtggcagagcaacttgcacagcagcctggacctgttgcagagccttctcctgttctggaccccgctcaagactggc

SEQ ID NO: 923411 - DNA, 905 bp, Homo sapiens
cgaggagcggtgccaggctcaagggaatggaggtagccattccagccagccacaaatggtgagccctagagggagggctcaagggtcctcagtggggagagctaagagggctgcctttctggggacccctggttgcaggtactcattctcatctctgcaaacatctttgcacttgccacaccagatgagccagtgcagagtagggaaaacacacccaaaccaagttctcacatcacaggtcaagataaatgtgactaggggtcagtgaatgagtacacgggcctcaaaataaagcctaaaattaaagccacaatgacacagcacctaacacccactcgcatggctataatcaaaacgacagacaatagcaagtgttggcaaggatgcgaagaaaccggggccctcccacactgctggtgggagtgtaaaatagcacaaccactttgggaaacagtctgactgttgctcagaaagttaaatatatttgccagtaacatggccaaaaaaaaaattaaacatagaatgaccacaaaaccccacaattccactcctcggtatatacccaagagaacagaaaacacacgcccacgcaaatgcttgcccacaaatgtacattattcatgcacaatagccaaaacagtggacacaacccaaatgccatccatcgatgaatgggcaaacaaaatgtggtctactcataaatgtaatattattcgaccataaaaagkcatgaagtattgatacatattacaacttggataaaccttgaaaacattatgctaagggaaagaagccagctataaaaggccacatattgtattattccatttatatgaaatgtccagaacaggcaacgctatagaaatgtagtggttgccatgggctaggggtgcaaggggagaggt

SEQ ID NO: 923412 - DNA, 620 bp, Homo sapiens
tcactgcaacctccgcctccagagttcaagcaattctcccgcctcagcctcctgagtagctgggactacaggcccgtgccaccatacccggctatttttttttgttttttttagtagagacggggtttcaccgtgttagccaggatggtctcgatctcctgacctcgtgatctgcccgcctcagcctcccaaagtgctgggactacaggcgtgagccaccatgctcaaccacaactcacttctttttagccctgaataacattgcattgtctggatgtgctacagtttacccattcacctactcaaggacatcttggttgtttccaatttttggccattacaaatgaagctgctataaacatctgtgtgtagctttttgtatgggtgtacrtttcaactcaactgggtatatatctaggagcacaattgctgagttgtacaatcagactatgtttaaatttgtaagacgctgccaaactgtcttccgaagtagctgtaccattctgtactccttgccagcaatgaatgagagttcctgttgctctgtacacatttggtattgtcatatttggggatgttagcattctgatacgtgtgcagtggtatctcactgtggcttt

SEQ ID NO: 923413 - DNA, 576 bp, Homo sapiens
tgttacaactcaactgtcaagatgtttttgttaatggtcagccctttacttcctgccttggtgactcccgagtgctttggtgccatagtaagaggagaacagcctttctcttttgatatggtttgggtctctgtccccatccaaatctcatgtcaaattgtaatcccccatgttggaggtggggccttgtgggaggcgattggatcatgagggtggatttcccctttggtgctgttcttttgattatgagtkaattcttatgagatctggctgtttaaaagtgtgtggcacctccctcttcgctctctgtcttcctcctgctctagccatgtgaagatgtgcctgcttcctctttgcctttcaccatgattgtaagtttcctgaggtctccccagccatgcttcctgtacaacctgcagaactgcgagccaattaaatctcttttctttataaattacccagtctcaggtacttatttacagcaacgcaaaaatggactaatagatctttttacaccacctgctaaagattggagccctgttgtggagcccctgtggttcccaggaccttgttttc

SEQ ID NO: 923414 - DNA, 576 bp, Homo sapiens
tgttacaactcaactgtcaagatgtttttgttaatggtcagccctttacttcctgccttggtgactcccgagtgctttggtgccatagtaagaggagaacagcctttctcttttgatatggtttgggtctctgtccccatccaaatctcatgtcaaattgtaatcccccatgttggaggtggggccttgtgggaggcgattggatcatgagggtggatttcccctttggtgctgttcttttgattatgagtgaattcttatgagatctggctgtttaaaagtgtgtggcacctccctcttckctctctgtcttcctcctgctctagccatgtgaagatgtgcctgcttcctctttgcctttcaccatgattgtaagtttcctgaggtctccccagccatgcttcctgtacaacctgcagaactgcgagccaattaaatctcttttctttataaattacccagtctcaggtacttatttacagcaacgcaaaaatggactaatagatctttttacaccacctgctaaagattggagccctgttgtggagcccctgtggttcccaggaccttgttttc

SEQ ID NO: 923415 - DNA, 562 bp, Homo sapiens
taggacacagctaaaacagtgtcaggacggaaatttagagcaccaattgcccacactagaaagctagaaagatctcaaatcaacaccctaacatcacaattaaaagagctagagatgcaagagcaaactaatccaaaagctatcagaagacaagaaataactaagataagagcagaattgaaggagatggagacacaaaaaaaccctccaaaaaaatcagtaaacccaagagctggttttttgaaaaaattaacaaaatagatagactgctacctagactaacaaagaataaaagagagaagaatcaaatagacacaataaaaaaagawaaaggggatatcaccattgaccccatagaaatacaaactaccatcagagaatattataaatgcctcacacaaataagcaagaaaatctagaagaaatggataaattcctggatacatgcactctcccaagactgaacaaataagaagtcaaatccctgaaaagatcaataaacagttctaaaatcgaggcagtaattaacagtctaccaaccaaaaaaagcccatgaccagat

SEQ ID NO: 923416 - DNA, 583 bp, Homo sapiens
ttgaaaatgtgaaatcggttttggaactgagtaatgggcagagtttggaaggatgtggagggctcgtaagaagacaaaacaatgagggtatgtttgaaacttcttagaggttaagtgattggcaccaaaatgctgatagagagtcagacagtaaaggccatgctgatgaggtcttaggagagaatgaggaacttagtgtcaactagagcaaaggtaatccatgtttccccttagcaaagaagttggccgcattgtgtccatgccctaaggtttgaggaaggccaaacttaagagtaacgatgaggtcagcagatcgagaaccatcctggctaacatggtgaaaccccrtctttactaaaaatacaaaaaaatagcgggaagtggcgggcgcctgtagtcccagctattagggaggctgaggcaggacaatggtgtgaacccgggaggcggagcttgtagtgagcagagatcacgccactgcactccagcctgggcgacagagcgagacactgtctcaaaaaaaaaaaaaaaaagagtaatgacttacagtatctggaggaagaaatgtctaagcagcaaagca

SEQ ID NO: 923417 - DNA, 614 bp, Homo sapiens
cagttgtactggctgtgcatgagaccacccacctaggcgaagagtcacttgaaaagttgttaggctggtactgtcagcctttgccaaaatggtggtgcagcagtgtgacacctgccagcagcacaatgctaggcaaggtccaaacgtcctgcctggcatacaagcttatggagtagccccctttgaagatctccaagtagacttcaccgagatgcccaaatgtggaggtaacaagtatttkctagttctagtgtgtacatactctgggtgggtggaggcctatccaacacgaactgagaaagcttgtgaagtaacccatgtgcttctctgagatctcattcctaggtttggagtgcccttatggatcagctcagacaatgggccggcatttgtggctgacttggtacaggagacagcaaaggtgattgagtgtggatcgaagactggaacatagcccccttgcggccacagtggaaaggaccccagactgtcatcttgaccactcccacagccataaaggtagagggaatcccagtctgggtccaccacagccacgtaaaacctgcagcacctgacacctgggaggcgagagcaagcctggacaacccctgcaa

SEQ ID NO: 923418 - DNA, 817 bp, Homo sapiens
tatgagggacagactaagctatggatattcagacacaggacataaaaatacccatgatgatagtacttcaaggcatcaagtgtttattttatatgcagttgttaaaattatagatttttgaatcagtcacttggatttgactaagtagtcttataaatcattagctgcatgacttggaactctgttcccttctctataacacagcaacactgaaaacatctgttacatatatttgctgtggagattaaaagaaataaggtactagcactgtgcctgacctattcagcaaatattagctattattattgatactatggatcttctatgtgccatgtactgtaccaaactcctttcataatattattacatggtcataaaagatctgcagagtaagcataactgtctctattttataaaagagtgagacacagagaagaagccaagaaatgatagcacctggtaagaggctggacaatgattcaaacccaagtctcttgcctccatgctcttttcttcatgcatgacstatctagtgcagtaccagtcacatacatatggctatttatttaaattaattaaaattaaataaacactttagtgcctctgtttcgccagccagatgtcaaatctcaataaccatgtgtttctagtagctatgatattggacagcacagatatggaatatttccattattgcagaaagccctattggacagtactatagtctgtaccactatcatctctctaggctgctttactctcaataggaaacaatacatttttcttaaaatcttaataaatgctcatatataaatta

SEQ ID NO: 923419 - DNA, 619 bp, Homo sapiens
acctaactgctgcagaccctgaagtaggtcctgtcccggctgcaatcttactgacccaggtcatggaggcagtccagtctacccagggaccagacaggatccatatctgaccagctctggtaataggccaaccaatcactgaacccatgatagaccaatcagcagccatgtaaactgaccccaatcctacacaactgtgatcctagaggcaatcccatcagggaaaggacccaacaggaaaaggtctttacctgccaaacccagtctgtaaaaattggaaaaggygtttgctccttcaaatgcgcagacaccagtgcaaggcttgatgaaccacagtaatggaggcgaatatgtcatcactaaaggaaattaaagttttagtactcgaccccagagaaatgaagatctatcaattttctgataaataacacaaagtaatcatctaaaagaagcttgacaagatgcaagaagacaggatagacaactaaacaaaatcaggaataaaatacatgaacaaaattagatgtttaataaagaaatggaaaccgtaaaaaaaaagacctaaaaagaaaacctgaactaaagaacacaatgacagagttgcaaaagcaatagacag

SEQ ID NO: 923420 - DNA, 692 bp, Homo sapiens
gtttactggaggtccacttcagaccctgttttcctgggtatcagcagcggtagctgcagaacagcggatattggtgaaccgcaaatgctgctgcctgatcattcctctggaagttttgtctcagaggagtacccggccgtatgaggtgtcattccacccctactggggggtgcctcccagttaggctactcgggggtcagggacccacttgaggaggcagtctgcccatctctcaagctgcgtgctgggggaaccactactctcttcaaagctcagttggaaatgcagaaatcacccgtcttctgcattgctcatgctgggagctgtagactggagctgttcctattcggccatcttggctcccaagccatgatcacaagttccaacaataggctgtctgcaagctggaggagcaagaagagccagtccgaatcttaaaactgaagaacttggagtctgatgttcaagtattcctggaagcatccagcacragagaaagatgtaggttgggaagctaggcccatctccattcttgctttcttatacacaaaataaaagaaagtaagctctgtgaattgttgattgacttgtatatctcaagtgtgaagatttatttgatgaaaatgttaaatatttgtgagtgtatagcttatgagatgcagctataatacgtttaaaccaatggagtttta

SEQ ID NO: 923421 - DNA, 588 bp, Homo sapiens
ccactccagcctcggctccaaggggcccaggtacaggttgggccatagttccagagggcataagctactgtaagacttggtggcttccatgtggctttaagcctgtggccgcacacagtgcaagaatgaatgaggcttgatgttcgctgtctagatttcagaggatgtattatgttggtgcaaaagtaattgcggtttttgccattaaaagtaatagtaaatataagaaagcctgggtgcccaagcagaagcctgctgcaggggcagagccctcacaaagaaccctagggaaatgcagaggaaaatgagttggaggccccacttagagtcctcactggggcactacctaatggagctgtgggaagaaagccactgtcctgcagactccataatggtagatccaccgccagcatgcatactcagcatggaaaagycacaggcactcaacgacctgtgacagcagcctctggagccgaactttgcaaagccataggggcagagctgcccaaggcattgggaacccatcccttgtaccattgtgtcctggaggcaagacatggagtcaaaggagataattttggagcctta

SEQ ID NO: 923422 - DNA, 740 bp, Homo sapiens
ctgaagcagatgggtaaatgcaacacccaatcatcggcagaggtcccaatcttgacagaggtggctgggggagctctcagtgaaatgcactgagatcttaccagggggaaggatggcctctcccttgccaggccagcaggaaagcaatccacctcccagtcacactcctgacccagtgctacagctattcaaatcagacaggcatctcttttcatctgcaggaatgaaattccaagtagagttgaatatttgatattccaagtagagacgaattgtgactctacccctcaggcaagcctgaacccagagggcactcctcttgtggggatccagtcaccctgaagtgttccagaaaggctgcctataggtgcactcatgctgaactcctaygggagaagccctagctgtgtctgcagtgattggcaggagggaaaagaattcctcttctccaggaccctttgtgagcacaagggctgcctgacagttggggcagagctgcagactttccccactgagcccagcactgtatctgtgcctctactgaaagacacttcccaccagcagaaagttctgggactcaaggcctgccatccagacttgtttatctcccaaggtgttctcttaatgtggtacattcactctccgcctaggagtaggattttctgagaaccagactactgtgaatgctgctgctcctctgggtctagccacctagtggggctgccacactccaggttggt

SEQ ID NO: 923423 - DNA, 694 bp, Homo sapiens
ggccctgcacagcaagatggctggcatcttctgcttgccgtcccctcctgccatgaacctgtgaccacagagccttttttcccatggttgaaggatccttacttgtctaaaccagggaaggaatacagtaattgaagaaacccaattgcacagagcaagagactctcccccatctcccatcctttcgtactttaagtttttttttttttccctaagggagataattcttttcctcagcgttctgcttataataaggaaaataatggaggagccccccttctggctgataactgcaaatttggcagggcgcatctggaacttaatctaaatgaattcatgaacccccgagacaactttttgtcccaaactcaattctaaacttcacattgcagccctagaaaggaaaaccagatctgagggacccaaagcccggcaacaggcayggtataaatgggcaagactgattcctgccaattaagcccccacttcatggcaggggccattctccacggcatagatgaggccaggggaactcaaatgttgtcagtagtatgggggatggaagcataggtgagtgtggataattcctattctctaggccctccctgattcatgggtgcaatccacattgacacccatgggtggcacctgccggggtggctgggactcagggataaaagacagaagagaaagg

SEQ ID NO: 923424 - DNA, 607 bp, Homo sapiens
ttttaaatcccttgttatccaactttagccacaccaagtggttagtatttctggcttttgagctttaccagaagtaacctcacaggtgaaaaccacaagcctcaataaagattatgatttaaccacaagtgtatgaggtgttttcaaagtggggtaagcagttcttacaaaatatagaacctttaaagataactcagggaaatgaagatttaagaaaaaaggtaaatgttgttcatagaggagaagagaatcaggaaatggcaaaagtcacacagatattaacccaaaagtgctcattcctcaagtcaggattgaactcaggccaccattgtaaaayagcagaggccaaaacaaagtaccaccacatcgcaaggtcacggtcccaaggacataaaacaagatggaggcctgcagcaaaatttgttactgaccaacttaccaggctggctggaacagcaggcttatggagtcccaggcctgcattccatttcaaggtatccctctctctgcctttttcttgtgtttcctctccttttcctgggcctcctcttggtccctattataaaagaccaaggtgggtactcttaggaggttttctgtggtgcta

SEQ ID NO: 923425 - DNA, 659 bp, Homo sapiens
gatgttcggcagcgtcttcctcctggcgggctggtggtctcgctggctcagaaatgaacctgcagaccttctccgtgagtgttacagctcacaaaagcagtgcggacccaaagagtgagcagcagcaagatttactgcaaagagtaaaaaacaaaacctccacagcgcggaagcagacccgaccaagttgccactgatggctgagggagggcagcctgcttttattccctcatctggccccacccacgtcctgctgattggtccattttacagagggctgactggtctgttttacagaaagctgattggtccgttttgacagggtgctgtttggtgcgtttacagtccctgagctagacacaaaagttctccaaatccaccctagattagctagacacagagcactsattggtgcatttacaaaccttgagctagacacagggtgctgattggtgtgtttacaaacattgagctagacacagagtgctgattggtgtatttacaataccttagctagatataaagattgtccaagtccccaccagattagatagatatagagtgctgattggtgcatccacaaaccttgagctagatacagagtgctgattggtgcatccacaatcccttagctagacataaaggttctccaaatccct

SEQ ID NO: 923426 - DNA, 629 bp, Homo sapiens
tctcttttcttttttgaatatttttttgagattgagttttgctcttgttgcccaggctggagtgcaatggtgccatctcagctcactgcaacctctgcctcctgggttcaagcaattctcctgcctcagcctcctgaatagctgggattacagatgcctaccaycacgcctggctaatttttgtatttttagtagagactgggtttcaccatgttggccaggctggtctccaactcctgacatcaggtatccacccccttcagcctcccaaaatgctgggattacaggcgtgagccattgagccctgcctttttttttttcccccctctggagtctctgttttctccaagttgctttttctccatttttttgtgggttttttttctgtttttgttttttatattccatgcaatcctccaatgtcatcttttagactgaggaagagaagctgatggaagctcataacatatgaatgtggcttatcaatttttatctcaccacagagcagtggctttcaaaacgttttgatcaagtcaacagtaagaaatgtattttacatgataaccctgggtatgtgaatgtgtgtgcgtgcatcttagaaaaggttcaccatacttttttcacaatac

SEQ ID NO: 923427 - DNA, 629 bp, Homo sapiens
tctcttttcttttttgaatatttttttgagattgagttttgctcttgttgcccaggctggagtgcaatggtgccatctcagctcactgcaacctctgcctcctgggttcaagcaattctcctgcctcagcctcctgaatagctgggattacagatgcctaccaccacgccyggctaatttttgtatttttagtagagactgggtttcaccatgttggccaggctggtctccaactcctgacatcaggtatccacccccttcagcctcccaaaatgctgggattacaggcgtgagccattgagccctgcctttttttttttcccccctctggagtctctgttttctccaagttgctttttctccatttttttgtgggttttttttctgtttttgttttttatattccatgcaatcctccaatgtcatcttttagactgaggaagagaagctgatggaagctcataacatatgaatgtggcttatcaatttttatctcaccacagagcagtggctttcaaaacgttttgatcaagtcaacagtaagaaatgtattttacatgataaccctgggtatgtgaatgtgtgtgcgtgcatcttagaaaaggttcaccatacttttttcacaatac

SEQ ID NO: 923428 - DNA, 655 bp, Homo sapiens
gctataatttatccatttacctgttgagtgacaaataatgctgctatgaatatttgtgtgcaaatattttaatgcacatatactttcatttgtcttgggtaaacacctcagagtaggatggctggatcataaagtataactttttgagaaatgccaagttattttccaatatagtagtacaattttacatcaacatcagcagtggatgagagctccaatttctccacattctcaacaacacttggtatggacagtcttttgacatttagcctttctgataagtacacagtggtatcttactgtggttttaaatttgatttccctgataactaatgataatragcatcttatgttctaatttgccttctttgaagcatctgtaccactcttttgtccacttttaagtgggattttttgttttcttattattagattttgagatttccatattctcgatacatatcctttatcggatatatgaatcccaaatatcatttccagactgttgcttatctttttgctctcataacaatgtcttttgaagagaagtttttaacttgattaaatccaatttatcaaatttttgttatttatttatttatttatttatttatgagatgacatcttgctctgtcacccaggctggagtgcagtg

SEQ ID NO: 923429 - DNA, 671 bp, Homo sapiens
aaattagagagaaaaatcactagaagcatacctcagagatattgcaagtttgtttccaaaccactgcaatgaagtaaatatgcaataaagggagtcatacaattgttttttgtttcccagtgaatataaaacttacgtttatgctatactgtagtctattaactgtgtaatggcaccatgtctaaaaaatgtacataccataattaaaaatacctaactgctaaaaaatgctaacaatcatctgagccttcattgagtcataatctttttgctgttgaaaggccttccctagattatgatggctactgatggatcagtggtggttaactacctattgkgtactatgttcactacctgagtgcaatatacccatgcaacacatctgcacatgtagtctctgtatcacaaagaaaagttgagaaaaaaaaattgaaagcaatgctctcaaacgctgccattgctttatcaacacaatttaggcaatagtctacatcctttgtcgtcacttcaacaatgtgcacagcatcttcaccaggagaagattccatcccaagaaaccacattgtttgctcacttacaaggagcaactcctcatccattaaacttttatcatgagattgaaacaattcagtcacatcttcaggtttcacttctaattctagttctcttgc

SEQ ID NO: 923430 - DNA, 598 bp, Homo sapiens
agaggaagataaacaaaagaacctcttggctaccagtctagctatagcccattgctctcaaccaccatccactggatcgtagcccaaattacacaaaaagcagggctaatttgcccctctgagaaaccaggagcaagaattcaacaacaaagacyctgaacagagcctttggtctctgaaaacttctagaaatgaagccaactgactatactcaatttataccacaatctaaggtacacaagccatcccagataagaaagaatcagcacaaaaactctggcaactcaaaaagccagaacgtccctttacctctgacggagctcagtagctccccaaacaatgcttttttaactagtctgaattgtctgaaaatgacagacatgtaattcagaatctggatggcaaaaagcccattgagatgaaggagaaagttgaaactcaatctaagtaagccaagcaattctgtacagttattgaaagctgaaagacaaaacactcattttaagaaagactcaaattgaacttttgaggtaaaatattcactacaaaaatttcataatacaatcagaaatattaacaacagaatagaacaagctga

SEQ ID NO: 923431 - DNA, 645 bp, Homo sapiens
cagtgacagcttgacttcctctttaccaatttggatgccctttatgtatttctactttctgattgctctggctaggacttccagtactatgttgaatagaagtggtgaaagtggacaaccttgtcttgttccagctctcagggggaatgcttccaacttttccccattcagtataatgttggctgtgggtttgttatagatggcttttattaccttaaggtatgtcccttctatgctgattttgctgactgttttaatcataaaatgatgctggattttgtcaaatgttttttctgcatctattcatatgatcatgtgtcttttgtttttaattgtttatgtggtgtatcacacttattgacttatgtgtgttaaaccatccctgcattcttggtatgaaacccagttgatcagggtggattatctgtttgatatgctgttggrtatggttagctagaattttgttgaggatttttgcatctatgttcatctgggatgttggtctgtagttttcctttttgttatgtcctttcctggttttggtattagggtgatactggcttcatagaataatttaaggaggattccctctttccctatcttttggaatagtgtcaatagaattggtaccaaattttctttgaa

SEQ ID NO: 923432 - DNA, 627 bp, Homo sapiens
gtcccaaatcagtcataattctcacctcagggtaaactgacagacccctaagaagacaaattggccgtcagaagtagaatctagagctcccatcaagacaatgaccctgataaattcctgcaggggtagttttaaatgtccgtcatttaaattaatacaaatatcgcagtaaagatttgctttgggagaggctatcaaaggcaaaataagaataactggtttgaaaggaggagttgggtgtgtttgtctgtttgagcacccaaatcccccttgtgtagcccttgcagaaaagccgtatcacttatgtgaagcagtcaacacatatgttttcccttccttttttttttttttttttttttttgagacagagtcttgctctgttgcccaggctggagtgcagtggcatgacctytgctcaccacaacctccgcctcccgggttcaagccattctcctgcctcagcctccctagtagctgggattacaggtgcatgccaccacacccggctaagttttgtattttgagtagaggctgggtttcaccgttttggccaggctggtcttgcactcctgacctcgtgacccacccaccttggcctcccaaggtgctgggattacaggcgtgagc

SEQ ID NO: 923433 - DNA, 594 bp, Homo sapiens
caagaacaaagaggcacaacgcttcctttgtttagaacagattacaaagctacataaataaaaacactgtggtacttgaaagaagacaactagtgatggaacagaacccagaacttaaaaccaaaccatgtttgtatatatgctcaaatgatcttcaacaakgttgctatgaccgcacaacaagaaaaacacagtctcttcaataaatggtattggaaaactctgtatccacatgggaaaaactgagattgggtccttcctctgaaccatataaaaaaaactgtcttgaatgagttaaatatttaaatgtcagaattatacctatataatctctaaaagaagatacagtaagattatgaccttggtctcagcaattttttttttttttgagacagtcttgctctgtcacccaggctggagtgcagtggtgcgatctcagttcactgcaacctctgcctcctgggttcatgtgattctcatgcctcagcctcccaagtagctgggattataggtacaggccagcaggctagagtgcagtggtgtaatctcaactcactgcaagctctgcctcctgggttcacaccattctcctgc

SEQ ID NO: 923434 - DNA, 641 bp, Homo sapiens
acatagcaagaccctatctctccaaaaatcaaaacaaaataaacagctaggcatggtggtacacacctgtagtccttgctactcgggagcctgaggtgggaggattgcttgaacccagaagttggaggaagcagtgagctagaattgagccactgcactccagcctgggtgacagaacgagacactgtttcaagaaaaaaaaaattaaaattaaaaacaaaaaatacggccgggcaccgtggctcatgcctgtaatcccagcactttgggagcctgaggtaggcagatcacctgaggtcgggagtccgagatcaacctgaccaaaatgsagaaaccccatgtctactaaaaacacaaaattagaggttacagtgaaccaagatcgcgccattgcactccagcctggacagcaagagtgaatctcaaaaaaaaaaaaaaattaaaaattaagaattaaaataaatttcttttttaagaaaaagtcaccaaatcctgcccaagctcaagggggtgagaactaggctccactttttaaagggaggagtatcaaagaatgtgtggacatattttaaaacaaccgtagtggctcagcctgtatcctaactatcattattaactcaacttttttttctttttttgag

SEQ ID NO: 923435 - DNA, 567 bp, Homo sapiens
ataactatgacccccatacaaaggatctgaaagtgagcagaacagtgattacctccgaggagggaattttaactgtttactctgtatactctggtgttgtatgattttatttataataataatataacattattataatgttttgagatatgacttatataaatgaattttcaaagagttccagtagccgggcacagtggctcacccccgtaatcccagcactttgggaggccaaggcaggccgaccacgaggtcaggagattgagaccatcctggccaacatggtgaaaccctgtctctactaaaaawacaaaaattagccaggcatagtggcatgtgcctgtaatcccagctactcagggggctgagacaggagaatcacttgaacctgggaggcagaggtttcagtgagctgagatcacaccactgcactccagcctggcaacagagcgggactccatctcaaaaaaaaaaaaaaaaaaaaagagttccagtaaaggtttgtttttaaaggaaaaaagaggccttttccctattttgatacatacattgtgcctgaaaagaaat

SEQ ID NO: 923436 - DNA, 660 bp, Homo sapiens
cagctggtcgtgaggctgagctgggggcttcgcttgagaccaggagtttgaggctgcagtgagctacgacagcatgactgccctcagcctaggtgtaagggtaagaccccgtgccaaaaaaaaaaaaaaaaaaaagaaaagaaaagaaaaaaagaaagcaagatctgaagatctgatggtccctctgtctttaacacatgaagaatggaaagcagtactttgagacgtacatagtctcatacatttaaaaaaattattatagaaaatctcagatacacataaaatttgagggaaaactataaatttctatgtacctatcacccgacttcaacaattatcaattcatccccagtccagtttcatctatatgttctcttgttcctttcactcttagatcgttttgaagtacctcctacacatcatataaattcactggtaaatattttagtatcrtaactaaaaaccaagaaccttttaaagacctaatcgtaactaaaaattattccacccaatcgaaatcatgaaagttacattattttttagtacagtgcatagaatgtgcaagccacactattaggctacgtaagtttctctttgaacctccagggtcaacttacatattgctctggttaaggatgacttccagtttatgtgatatat

SEQ ID NO: 923437 - DNA, 627 bp, Homo sapiens
atcccaaggagtcaaagagactcaaattgggtagcttcttcctgtagctggtagtctgatgtctgtgtgagtctggctgggtctggagtttttcatgggctcagaaggaaggaagtgtgtgctgactggtccaagggcaggcccagaaaaagctccrtaagttttcactcccactgtgaactccaccaggaactgacagcccggccctgaggctgtaggctgtccctgtcttgaaggtagggcttcaatggggacctgcccctttccacccatgagcctgtctgcctcctgctgccaccaatcatgtcatctacaggctgtttctgtggagggtcacctgcaggcccatgcggagctaccctcagcccaaccccgtcggcctccctccagtgctccttggtcccaaagtctggaaagggatgcggtggcagggggctggcatgtcagcgccaccctgagtgtgtgcacacccagccaggtcacaacagtgcccaggcttggccacagctttgctccatcccagagcaggcactgtgagcagggtgaggccagacagcaggagcaggcacttccaagcctgctggggtagggggacttcctgggcccccaagagtatagggatgccca

SEQ ID NO: 923438 - DNA, 586 bp, Homo sapiens
actcctgaccttgtgatccacccacctcggcctcccaaagtgctgggattacaggagtgagccactatgccaggccaacaccgtgattttttaaaaatttatcttccttccacaatgacattcttcacagaattagaaaaaaawctattttaaaattcatatgcaatcaaaaaagagcccaagtagccagagcaatcctaagcaaaaacaacaaagctagagacatcacaatacctgacttcaaactatattacagggctatagtaaccaaaacagcatggtactggtacaaaaatagatacaaaggccaatggaacagaatagacagcccagaaatagtacctcacacctacaaccatctgatctttgacaaagttgacaaaaacaagcaatggagaaagaacttcccattcaataaatgggtgctaggcaaactggctagcatgcagaagattgaaactagaccctttcccttacaccatacataaaaatcaactcatgaggattaaagacttaaatgtaaaacccaaaactacaaaagtgtggatgataacctaggaaataccattctggacataggacttag

SEQ ID NO: 923439 - DNA, 594 bp, Homo sapiens
accatgggagacacagaagagacatagcctattacctttttttttcctttttttctttttttttttttttctgagacacgttctcactctgtcacccaggctggagtgcagcgccatgacctcagctcacagtagcctcaacctccttggctcaagcaatctcacccatttcagcctccagagtagctgggaccacaggcatgggccaacacacctggctawtttttttttttttttttttttttttttgtagagatggggtctctctgttacccaggctcctaacaccattttaaaaagataacaatatttgacaatatatcattaactgccacatgaaaggccttgataaatgctatggtcagaaggaaaagacacattttagctagaatgatcagaaaatcagagccaagatgggcatggggatagagtgggaatgttagctatgccagtaataagaaagaatatctgcataaactggaaataggaaagggaggagaaaggggcaggataaaaggctggcaagcaaaggtaaattccaaggatagtgattaggctaatctcagaaaaacataagaagagaattgcaatcca

SEQ ID NO: 923440 - DNA, 631 bp, Homo sapiens
tgggatatcaccatggtaacaggaatatacaatcaaagcaggtttccatgctacgatggcagcattactcatttaaagaatgtaatatgctgaagacaggaagaaacaatttcacaatattatcattggcccgctcataaaagaagaaaaagatgagtattcaaaatggcagatagaaacaatggaaccattctgttggacaatcactggcagtcactcttttaactgagagaataaaatgttttaaaaataaatgagtaagtccaggcaccaggcacggtggctcatgcctgtaatcccagcactttgggaggctgaggcggctggatcacttgaggtcaggagttcgagactaggctgaccaatgtggtaaaaccctgtctctactaaaaatacaaaaattagccaggcgtggtggcaggcrtctgcaatcccagctactcgggaggctgagacagaaaaatcacttgaaccagggaggcagaggttgcagtgaaccaagatagtgccactgcagtccagcctgggcaacaaagcgagactccagctctaaattaattcatcagttaattaaaaaataaatgaataaatgaatgagtgaatgaatgaaaatgcatgaatgaatgacaaa

SEQ ID NO: 923441 - DNA, 577 bp, Homo sapiens
aactaaactgacaaacctttagctagattgactatgaaaagatactaattgctaaattcagaaatgaaagtgggcacattactactgatcttactacttatgaatacataagaaggattcaaagagagtactattaacaactgtatggcactaaattggataacctacacaaaacagaccacttccyagaaacccaaaatatgccaaaatctaatgatgaagaaatagaagacctaaaagacatacaattaagtagatcagtaatcaaaatctctcgttgaagaaaagccttggacttgatggattcactggtgaattctaccaagcatttaaagaagatgtaatagcactttgggaggctgagggggggcggattgcttgagcccaggagttcaaaagcagcctgggctacgtggtaagaccccctccctacaaaaaattacaaaaattatccgagttggtggcacactcctgtagtcccaagctacttgggaggctgaagtgggaggatcctttgaacccgggaggcagagattgcagtgagctgagatcgcgccactgcactctagcttggcaa

SEQ ID NO: 923442 - DNA, 572 bp, Homo sapiens
tcggggcggctggccgggcggggggctgaccccctcacctccttcccggacggggcggctggccgggcagaggggctcctcacttcgcagtaggggcggccgggcagaggtgcccctcacctcctggacggggcggctggccaggcggggggctgacccccacctccctcccggacggggtggctgccgggtggagacgatcctcacttcccagacggggtggctgccgggcggaggggctcctcacttctccgacggggyggttgccaggcagagggtctcctcacttctcagacggggcggccgggcagagatgctcctcacatcccagacggggcggcagggcagaggcgctccccacatctcagatgatgggcggccgggcagagacgctcctcacttcctagatgggatggcggccgggcagagacgctcctcactttccagactgggcagccaggcagagaggctcctcacatcccagatgatgggcggccaggcagagacgctcctcacttcccagacggggtggcggctgggcagaggctgcaatctcggcactttgcggggcc

SEQ ID NO: 923443 - DNA, 622 bp, Homo sapiens
  misc_feature 600, 601, 602, 603, 604, 605, 606, 607, 608, 609, 610, 611,612, 613, 614, 615, 616, 617, 618, 619, 620, 621, 622: n = A,T,C or G
cctgctacaaagaggtagcaaaggatgtaactggctaattggacatctgcactgtccttgctgtggtatggaagtttgagagacttctctgaccaattacatccttggacatttcagggtaaatttggaaaaaggcagatgttgttaatctattctgtggagtctccagataattttcattttatataaaaaagttttcaaggatatktatttatcattgtaccacaatatttgggaataggtcataccagatacattggaaagaacctatgtccatccacaggggaattagttttttttttgttgttgtttgtttgtttgtttgtttgtttgtttttgagatggagtcttactctgttgcccaggctggagtgcaatggcgcgatctcggctcactgcaacctctgcctcccgggtttaagcgattttcctgcctcagcctcccgagtagctgggattgcaggtgcccgccaccacgcccagctaatttttgtatttttaatggagacggggtttgactatgttggccaggctggtctcaaactcctgacctcaagtgacccacctgccttcgcctctcagagtgctgggattataggnnnnnnnnnnnnnnnnnnnnnnn

SEQ ID NO: 923444 - DNA, 644 bp, Homo sapiens
aaggtcaggagttcaagatcagcctggccaatatagtgaaaccccatctctactaaaaatacaaaaattaactgggcgtggtagcgcactcctgtaatcccagctacttggaaggctgaggcagaagaatcacttgaacccaggaggcagaggttgcagtgagccgagattgtgccactgcactccagcatgggcaacagagcgagactctgtatccaaaaaaaaaaaaaaaaaaaaaaaaagattgctctgcatggtttcagcttgcacggtcctatctgtggtcctgcatggccatgcaaagtgaaggctgctggttaagcagtttctacacsgttgttgtcttcatatctgatgctggagtttgaggtccccggggcaggcagttggtaaagtggagaatgagctggaactcactagcataaactggagcccatgagggcaggctggagaccgcgtcagttcttgttgcttctaatgttggtggtgtgggcatccaggagaaaccagggctctttgcccagagatataaacactgacacctggtccaggagtaagagaagctgaaggaagattcaggagaaggtgaagcaattacaggtgtagctgctgcctcttgccaatgagttgaggcatcagataac

SEQ ID NO: 923445 - DNA, 623 bp, Homo sapiens
aggattacagacataagccactgcatccagccagcaaatatttaccaagtgcccgcaatacagaaatagaaagtcaaagctgggtgttatggtttggatctgtgtccccacagaatctcatgtcgaatcgtaatccccgtattggaggcggggcctggtaggaggtgattgtatcattggggtgacccttcataaagagtttagcaccatcccgttggtgctgtcctcatgatagtgagtgagtgatcatgagatccggttgtttaaaygtgtgtggcacctcccactctcgttctcttttccttgttgctctggccatgtaaactgcctcactccccctttgccttctgccatgattggaaacttccgttatgcttcctgtacagcctacagaatcatgaaccaattaaacctctttataatttgcccagtctcaagtatttcttcatagcagtgcaagaacagactaatatgcgggacatagtgtctcccacctgtaatcccagcaccttgggaggccaagacaggaaaatggattgaggtcaggagtttgagaccaggctgggcaagatagcaagacttcgtctctacaaaaaataaaaaaaatgagccaggtgtggtgg

SEQ ID NO: 923446 - DNA, 658 bp, Homo sapiens
ttgttatttggaatttgttttcccataaaaaataatgttggctaaatttttgagccaacacacagaacctatttcttcacaactgacttaatcaccatttatagcttgttttttgggataaaatgcattgcaccttctaactcttgtaattgtagctgctgctgcttttcttctacttttttaaagagacagggtctcatgccagtcagaatggtgattattaaaaagtcaagaaacaacagatgtggtgaggttacagagaaatatgaacacttttacactgttggtgggaatgaaaattagttcaaccattgtggaagacagtgtggtgattcctccaagatttagaactggaaatacaatttgacccagcaatctcattactgggtatatacccaaaggaatataaatcattctgttataaaaatacgtgcaygtatatgttcattgtagcactattcacaatagcaaagacatagaatcaacccaaatgccaatcaatgataggctggataaagaaaatgtacatatacaccatggaatactgtgcagccgtagaaggaacaagatcatgtcctttgcagggacatggatggagctggaagccattatcctcagcaaactaatgcaggaacagaaaaccaaataccacatgttc

SEQ ID NO: 923447 - DNA, 600 bp, Homo sapiens
acagagcaccaagtccctaggctgtacacagcaagggggccctgggcccagcccacaaaaccactttttcctcctaggcttccaggcctgtgatgggaggggctgccatgaagatctctgacatgccctggagacattttccccagtatctcagggattaactttcagctcctcattccttacccaaatttctgcagccagcttgaatttttccccagaaaatggggtttycttttctatcacattgtcaggctgcaaattttccaaacttttttatgctgtttccttttaaaactgaatgcctttaacagcacccaagtcacctcttgaatgatttgctgcttagaaatttcttctgccagataccctaagtatcatctcttaagttcaaagttccacaaatctctagggcaggggcaaaatgcgctagtctctttgctaaaacatagcaagagtcacctttactccaattcccaacaagttcctcgtctccatctgagaccacctcagcctgaatttcattgtccatatcgttatcagcattttggccaaagccattccacaagtctctagggagttccaaactttcccatattttcc

SEQ ID NO: 923448 - DNA, 600 bp, Homo sapiens
acagagcaccaagtccctaggctgtacacagcaagggggccctgggcccagcccacaaaaccactttttcctcctaggcttccaggcctgtgatgggaggggctgccatgaagatctctgacatgccctggagacattttccccagtatctcagggattaactttcagctcctcattccttacccaaatttctgcagccagcttgaatttttccccagaaaatggggttttcttttctatcacrttgtcaggctgcaaattttccaaacttttttatgctgtttccttttaaaactgaatgcctttaacagcacccaagtcacctcttgaatgatttgctgcttagaaatttcttctgccagataccctaagtatcatctcttaagttcaaagttccacaaatctctagggcaggggcaaaatgcgctagtctctttgctaaaacatagcaagagtcacctttactccaattcccaacaagttcctcgtctccatctgagaccacctcagcctgaatttcattgtccatatcgttatcagcattttggccaaagccattccacaagtctctagggagttccaaactttcccatattttcc

SEQ ID NO: 923449 - DNA, 609 bp, Homo sapiens
agctcatctgtaagtgccatgagaatggaggctttgcctgcttggttcactgctatattgccagtacacaaaacagtgtctggcacatagtagactcttaacacttatttgtgaagtggtcttgttgtctggggtgacactgaggttcrttgtctcatgacggtggagatcaaggatgcggacacacaaaaagtgaggttaagagaggaaatgaaatagacaaaagaaagagaataaatagctctctgctatagagaggggttttggaaaaatgggttgccaatctgtggtgaaatgcagcaggggttttatagatgagctagtggggaggtggtgtctgacttacacagggcacaaaaacccggttcggaccaagtgtttcatctgcaaagggtgcgaatcacttgcagcccccaccctaatcttttgttatgcaggtgggttctcttcctgagcttctccatgttgccctttttctcattgtacacctgctaacaaaaaagggaaggtggagccccatgatcaacatgcctggccctcaggtagcccttttctactggtgcagctgcaggcctcccacgacgcaagcttccagctttcttacctatg

SEQ ID NO: 923450 - DNA, 482 bp, Homo sapiens
ggactctcagggtgctgggatcacaggcatgagccactgcacccggtcttgatttcttatttttacaaagagactaaagatacttggatctgtaaataaacattttttttatcacactgaaaaattgtattatgaagaggcatatacgaattatgaaatgatgtattcataaactgctagcctgctayggaatgttggaatatgacagacaattcacaattgtctacttttcactactgtctagttttctctataaaaggaaggttactaatgataaaaattaattataactaatataagtaaattaaactactaaaaataataacagtgaagggaaacaaacacaaggaaggggctgggcatagtggctcatgcctgtaatcctagcactttgggaggctgaggccagagactcacttgagtccaggagttcaagaccagcctgggcaacacagcaagaccctacctcttaaaaaagaaaa

SEQ ID NO: 923451 - DNA, 578 bp, Homo sapiens
acatggctgaaacacaaagtaactggctctagatcatgtagcaattaagtgacagagctgtgaatccagtttagataggcctgactggagcacttcattatattgtctttcaggagtctatacctgatctggtggtctctgtattggggttgctaaccagtgcaataaggtaagaaaaaaggtaaagcaattgggaagaagcaagtattgccatattttcagcttacatgactatgcatatacaaaatccagaggaatctacaaattactagatttaagaaataaacttattgagkttactaaacatcgtaagactacacacaaaacttaactgtatttctgtgtacaacaatagaaaagaaaaaatatttaaaatatattattaaaatcactaaaaccaccaaaacaagatatacaaggtttttaaactaaaaatgtcaaaacatagcaattaagttaaagaaattctagttacatgaagcgatacatgatgaacattgattagagattcagtagtaagttgccagttctgcataagttgattgatagactcaatgtggtcccagtagaaacctcat

SEQ ID NO: 923452 - DNA, 594 bp, Homo sapiens
ctggaatccaggtgctggtaggcggcactctctgcggaggctctaggggaggctcttgtttccttgcttttccagcttctagagctactacgttccttgcagtccttggcttgtggcctcttccttcatcttgaaagccagcagtgtagcatcttcaaatctttctgccaaagtcctcacatcaccttcttttacccttgtagtcaaatctccctctgactccctctcctaaggacacttgtgattacatttggggcccatccgggaaagccaggatcctctctccacctcaagccttaatcacttctgcccaggccctcttgccatagaaggttacrttcacagcttccagggattaggagctggatatctttgggggccataattcaggctttcatgggtacaaaagtggacacttcctgtaatagttagctattgctgtgtaacaaattaccccaacatgtggcagcccaaaacaacaaactttttaaatctcatgcagttttcatgggtcagttatttcagagtagcttagctgtgtggttatatctcaagaggttgcaatcaagctgtcagccagggctgacatcacca

SEQ ID NO: 923453 - DNA, 594 bp, Homo sapiens
ctggaatccaggtgctggtaggcggcactctctgcggaggctctaggggaggctcttgtttccttgcttttccagcttctagagctactacgttccttgcagtccttggcttgtggcctcttccttcatcttgaaagccagcagtgtagcatcttcaaatctttctgccaaagtcctcacatcaccttcttttacccttgtagtcaaatctccctctgactccctctcctaaggacacttgtgattacatttggggcccatccgggaaagccaggatcctctctccacctcaagccttaatcacttctgcccaggccctcttgccatagaaggttacattcacagsttccagggattaggagctggatatctttgggggccataattcaggctttcatgggtacaaaagtggacacttcctgtaatagttagctattgctgtgtaacaaattaccccaacatgtggcagcccaaaacaacaaactttttaaatctcatgcagttttcatgggtcagttatttcagagtagcttagctgtgtggttatatctcaagaggttgcaatcaagctgtcagccagggctgacatcacca

SEQ ID NO: 923454 - DNA, 594 bp, Homo sapiens
ctggaatccaggtgctggtaggcggcactctctgcggaggctctaggggaggctcttgtttccttgcttttccagcttctagagctactacgttccttgcagtccttggcttgtggcctcttccttcatcttgaaagccagcagtgtagcatcttcaaatctttctgccaaagtcctcacatcaccttcttttacccttgtagtcaaatctccctctgactccctctcctaaggacacttgtgattacatttggggcccatccgggaaagccaggatcctctctccacctcaagccttaatcacttctgcccaggccctcttgccatagaaggttacattcacagcttccagggattaggagctggatatctttgggggccataattcaggctttcatgggtacaaaagtggacacttyctgtaatagttagctattgctgtgtaacaaattaccccaacatgtggcagcccaaaacaacaaactttttaaatctcatgcagttttcatgggtcagttatttcagagtagcttagctgtgtggttatatctcaagaggttgcaatcaagctgtcagccagggctgacatcacca

SEQ ID NO: 923455 - DNA, 604 bp, Homo sapiens
gaaaacaaaacgtggctgccaattagcgctgtctcacttgtctgtccaactgctccgtcttttctgaagccttacatgcatttttccaagccacttggcttcttcggtgctggatatttaatttgcctggaacattctcacagatcagcatttcatgagagcctcgtggaaggcctgtctgacggtgtggtgcttggctggagggcagcacctgtaccttcctggtcagttctcatcagagaaaaggtgtcacttgctgtctttcatatgttgaagtcctaaccctcaggacctcagaacttgcccttatttggaaatagggtctttgcagaagtaatcaagttaagatgaggtcatcaagatgagctctaatccaaagaccagtttccttataaaaagtaaaattaggccgggcgyggtggctcacgcctgtaatcccagcactttgggaggccgaggtgggcggatcacaaggtcaggagatcgagaccatcctggctaacatggtgaaaccctgtctctactaaaaatacaaaaaattagccgggcgtggtggcgggtacctgtagtcccagctacacgggaggctgaggcaggagaatgg

SEQ ID NO: 923456 - DNA, 600 bp, Homo sapiens
ttctgtcttagtttatataaaactatcaaaatataaaaaatgaaactttgaaattatttttaaatcatacaatagaatagacataataatcaactttcccttccccactctaaagcttcaaattatagtagaaaaatcattatttctgttattctctattttcaatgcatatttcttccttattaatattctagctaataactttagtcggtgtcaaagaaagaatctctttttataagttccacccacctcaaaggagcagggggaaactaagaaatattacaaaggttctaatttttggacaaaagttttcaagttatctactaattagtgaagaggcacaacaaacctatattaactggcttgttacagattgcacggcaaatcatgataattttaatttggaacatgaatctrtgctctttgtgtcttcacatataaaatatcttccagtttatcagacaaaacaaggaatatttgacttagtagaatttaggttgccagatgtgattcaccctactaggggaaaatgaaacgatatatcttttgagttcagatgtcaatcaatgaaaaaacaatttctataaacaaattgtttct

SEQ ID NO: 923457 - DNA, 745 bp, Homo sapiens
gcaaattcctcagagattgatttttttttttaaacacaaagggaaagaaatggagtgactgtcatttttatcagagaagtttaaatgtctaactggcaaagtaggtacaactccgccatccaccgttagctccctctgcctcactactaaggagatggttattttacccgatgaagtaccgtatttataatctgaaaagttatgactgaaaggacgaggatgctttaagccctgtcatcagaaactgcataacagtgtgtgtgtgtgtgtgtgtgtgtgtgtgtgtgtgtgtgtgtgtgtgctggggaggacggggctgttggctgctgctgaaaagaatcactccagyagccatggctcctcagtcccctggccatcccaggaagagcaggaccacctctcagcatcccccagtacagtgtggggttgtgtctttgctcccctctctgctgttggcctcatggctgacccagtggccagaaacactgccaagtcctgacactgcagaaagccaaggattgtggctccaaatcaagctgaaatgaatagcttttgttccaaaacaattctgtgagccaagaaagtgtccatgcagataaagcttgcagtcagtcttgcacaaggagccccagccgtgttttgcacgctgtctgagtgactggcgctgtgcccggaatgctgagtggtgaggctatcctcagagccttccctgtgcacctgatcttggcccatttcttgagattgt

SEQ ID NO: 923458 - DNA, 721 bp, Homo sapiens
tcatactgcattataacacagcagaaatggggaagggcaagtgagtgcacgcaaaagacacctcagggcactaactcagtcccttggaaatgatctcactcacaaacagcattaatccacttatggggctctacccttattacctaattcccttttaaaaggccccacctctcaatactgttacattagcaactaagtttccaacacatggacttctgagggacacactcaaaccyatagaagcatcctgtgatcacagtcccttttcagctcctgtgcaattaggatctgtatgcttcacatgagacacatttttattctgtgctgtgtattggtcatctctctctatatactttaccacctcagctcccagaggacaaagattatgttgtttatttgtagcagtcatgccactggattcataaaaagtattcaattaaatctcactctttgcattaggttgtctaactgagtttttcttatgtgtctttactgtctggtccctagaaggcatattgtgacaatgataacatctatcactaccactcccaccctattgtcactgttcctatattgccttagggattatataactgtttcatattcattattttcatttgatcacaagcacccttttaaatagatagggcagatattagatgtttttttccttagtggatgaaaatactaaggttcagagaggtcagttaactggtccagt

SEQ ID NO: 923459 - DNA, 721 bp, Homo sapiens
tcatactgcattataacacagcagaaatggggaagggcaagtgagtgcacgcaaaagacacctcagggcactaactcagtcccttggaaatgatctcactcacaaacagcattaatccacttatggggctctacccttattacctaattcccttttaaaaggccccacctctcaatactgttacattagcaactaagtttccaacacatggacttctgagggacacactcaaacctatagaagcatcctgtgatcacagtcccttttcagctcctgtgcaattaggatctgtatgcttcacatgagacacatttttattctgtgctgtgtattggtcatctctctctatatactttaccacctcagctcccagaggacamagattatgttgtttatttgtagcagtcatgccactggattcataaaaagtattcaattaaatctcactctttgcattaggttgtctaactgagtttttcttatgtgtctttactgtctggtccctagaaggcatattgtgacaatgataacatctatcactaccactcccaccctattgtcactgttcctatattgccttagggattatataactgtttcatattcattattttcatttgatcacaagcacccttttaaatagatagggcagatattagatgtttttttccttagtggatgaaaatactaaggttcagagaggtcagttaactggtccagt

SEQ ID NO: 923460 - DNA, 721 bp, Homo sapiens
tcatactgcattataacacagcagaaatggggaagggcaagtgagtgcacgcaaaagacacctcagggcactaactcagtcccttggaaatgatctcactcacaaacagcattaatccacttatggggctctacccttattacctaattcccttttaaaaggccccacctctcaatactgttacattagcaactaagtttccaacacatggacttctgagggacacactcaaacctatagaagcatcctgtgatcacagtcccttttcagctcctgtgcaattaggatctgtatgcttcacatgagacacatttttattctgtgctgtgtattggtcatctctctctatatactttaccacctcagctcccagaggacaaagattatgttgtttatttgtagcagtcatrccactggattcataaaaagtattcaattaaatctcactctttgcattaggttgtctaactgagtttttcttatgtgtctttactgtctggtccctagaaggcatattgtgacaatgataacatctatcactaccactcccaccctattgtcactgttcctatattgccttagggattatataactgtttcatattcattattttcatttgatcacaagcacccttttaaatagatagggcagatattagatgtttttttccttagtggatgaaaatactaaggttcagagaggtcagttaactggtccagt

SEQ ID NO: 923461 - DNA, 617 bp, Homo sapiens
taaaaataatagcctctagctccatccatgttcccacaaaagacacgatcttgttctttttatggctgcatggtattccatggtgtatatgtaccacattttatttatccagtctgtcattgatgggcatttaggttgattccatgtctttgctattgtgaatagtgctgcaatgaacattaatgtgcatgtgtctttatggtagaatgatttctattcttcaggtatatacccagtaatgggattgctgggtcaaatggtagttctatttttagctgtttgaggaattgctatactgccttccacaataattgagctaatttaaactcacactaacagtgtataagtgttcccttttctctgcaacctctccagcatctgttatttttttaactttttaataatarccattctgactagtgtgagatggtatctcatagtggttttgatttgcatttctctaatgatcagtaatattgagcttttttccatatgtttgttggccacatgtatgtcttcttttgacaactgtctgttcatgtcctttgcccacttttgaatggggttgtttttctcttgtaattttttttaagttcgttatagatgctggatattag

SEQ ID NO: 923462 - DNA, 505 bp, Homo sapiens
ctgatcctcgaccttttttggttggtaggctattaattattgtctcaatttcagatcctgttattggtctattcagagattcaacttcttcctggtttagtcttgggagggtgtatgtgtccaggaatttatccatttcttctagatrttctagtttatttgtgtagagttgtttatagtattctctgatggtagttcatatttctgtgggatcggtggtgatatcccctccatcattttttattgcatctatttgattcttctttcttttcttctttattagtcttgctagtggtctattaattttgttgatcttttcaaaaaaccagctcctggattcattgatttttttgaagttttttttgtgtctctatctcctttagttttgctgtgatcttagttatttcttgccttctgctagcttttgaaggtgtttgctcttgcttctctagttcttttaattgtaatgttagggtgtcaattttagatctttcctgctttctct

SEQ ID NO: 923463 - DNA, 618 bp, Homo sapiens
tccgcccgcctaggcctcccaaagtgctgggaatgcagaagtgaaccacctcgactggcctagctgcactttttttgagctacgagcaaaatactacaccaaaataaccagaatatgtctcactgtaccaaattatattgctgtcaattaaaacttttattcaataaggaaaagaaaaataaatgatttaataaataactagagaaaattgtcaaaattttgtatttgttgttgcattatgagtttataaaaaattggaaaacttctataaatttttataaatcacaacttttataaatcaaattttaagaattaacttgcagaattacgctgtgggaaaaaaaaccctttctgatctttacacattaaaactatgacytaaacattaaaaatagctatgctgcataaaattcacatataataagtgttatagacaactcctgagctttagagttggacacatgtaagttcaaattctagtagtagtattttttagccatgaaccaaacatctttgattatctgctactcaagtattatttgtggataataatgcctactttacagtattagtaggaatatcagttgttattaacatttgcaaataccttgtatattg

SEQ ID NO: 923464 - DNA, 731 bp, Homo sapiens
gttgcagaaaaagggatggcttatatgttgctagtgggaatgtaacttagttcagcattgtgaaaacttgtttgacaatttctcagagaactcaaagcagaattaccatgtgacctagaaatcccattattgggtatatactccagggaatctaaatcattctaccataaaaacacatgcatgtgtatattcatcatagcaatattcacaatattaaagacayggagtcaacctaaattcccatgaatggtagactgggtaaagaaaatgtgatacacacacgctatagaacactaagctgcaataaaaaagtatgttactatgtcttttgtagcaatgtggatggagctggaggccattatcctaagccaactaatgctggaacagaaaaccaaatacagcatggtcttacaagtaggagctaaacattgagtacatctggacacaaagaagggagcaaaagacactaaggtctacttgaggtggaaggagagagaagggtgaggatcaaaaattacctattactatgcttattacctgggtggaggaataatctgtaaaccaaactcctatgaaacacaatttacttctacaacaaacctgcacatgtacccctgaacctaaaataaaaattttaaaaaagaaaatgtggcacatgtacaccatagaatactatgcagccatagaaaataatgaaatcatgtctttcaaattattcagttttgcagaaa

SEQ ID NO: 923465 - DNA, 626 bp, Homo sapiens
ttgggtatatactccagggaatctaaatcattctaccataaaaacacatgcatgtgtatattcatcatagcaatattcacaatattaaagacacggagtcaacctaaattcccatgaatggtagactgggtaaagaaaatgtgatacacacacgctatagaacactaagctgcaataaaaaagtatgttactatgwcttttgtagcaatgtggatggagctggaggccattatcctaagccaactaatgctggaacagaaaaccaaatacagcatggtcttacaagtaggagctaaacattgagtacatctggacacaaagaagggagcaaaagacactaaggtctacttgaggtggaaggagagagaagggtgaggatcaaaaattacctattactatgcttattacctgggtggaggaataatctgtaaaccaaactcctatgaaacacaatttacttctacaacaaacctgcacatgtacccctgaacctaaaataaaaattttaaaaaagaaaatgtggcacatgtacaccatagaatactatgcagccatagaaaataatgaaatcatgtctttcaaattattcagttttgcagaaacacagatccagctggaggccatta

SEQ ID NO: 923466 - DNA, 495 bp, Homo sapiens
ctgatcctcgaccttttttggttggtaggctattaattattgtctcaatttcagatcctgttattggtctattcagagattcaacttcttcctggtttagtcttgggagggtgtatgtgtccaggaatttatccatttcttctagatrttctagtttatttgtgtagagttgtttatagtattctctgatggtagttcatatttctgtgggatcggtggtgatatcccctccatcattttttattgcatctatttgattcttctttcttttcttctttattagtcttgctagtggtctattaattttgttgatcttttcaaaaaaccagctcctggattcattgatttttttgaagttttttttgtgtctctatctcctttagttttgctgtgatcttagttatttcttgccttctgctagcttttgaaggtgtttgctcttgcttctctagttcttttaattgtaatgttagggtgtcaattttagatctttcc

SEQ ID NO: 923467 - DNA, 618 bp, Homo sapiens
agatatttccaaagatatacaaatgaccaataaggacatgaaaataagctcaatataattaaacactagggaaatacaactcaaaaccacaatgagataccaccttacatcccctagggtggctactacttaaaaaaaacaaaaacaggaaaatacttattgaggatgtagggaaactgaacactcagycactgttggtgggaatgtaaaatggtgcagccactatggcaaacagtttgggagttcctcaaaaagttaaacacagaacgaccatataatccagtgggatataaacccactttctggtttatatccaaaagaaccggaagcagggactcatacagtggaattattattccaccttaaaaaggaagctacaacaatggatgaaccctgaggacattacgctaagtgaaataaactagacacaaaaagacagatactgcatgactccacttacaagaagtcccgaggccaggcacagtggctcacacctataatcccaacattttgggaggctgaggtgggtggataacttgaggtcaggagtttgaaaccagcctgaccaacatgatgaagccacatctctactaaaaatacaaaaattagctggtgttg

SEQ ID NO: 923468 - DNA, 638 bp, Homo sapiens
tgtagccacagtagcagagctgcccaagaccatgggatcccacctcttgcattagtgtgacctggatgtgaggcatggagtaaacataaatcattttggatctctaagatttgactgcctcactggatttcagacttgtatggggactttagcccctttgttttcttcaatttgtcccatttggaaagktatgtttatccaatgcctgtacctccattgtatctagaaagtaactaacttgctttagattttacaggctcatagccagaagggacttgccttgtcttggataagactttgaactgtggacttttgagttaatgctgaaatgagttaagactttgggggaatattggaaaggcataattggtcttgaaatgtgaggacatgagatttgggaggggcaggggcagaatgatatggtttgactatgtccccaggcaaatcgcatcataaattgtagttcctataattcccatgtgttgtggaaggaaactggtgggagataactgaatcatggggtggtttcctctatactgttctcatggtagtgagtaagtctcatgagatctgatgatttcataagcggtttgtgctttcacttggctctcattctctctcttgcctgctgctaatgt

SEQ ID NO: 923469 - DNA, 628 bp, Homo sapiens
agctgtctgtatgtgtcattgctgggtgtcccaatctactcccttgagatcatggtacagcagggccctgttggctccatgcccagttcaatctacaggcattcagagaatcccctcacctggaagagcctgatcttccccaaccttcctgtgcatagwtcatggtagactgcagcccttatgactacaagacaagcagatcttgagccattcagagcacctgcttggatgaactagaggcctgagtcactttgcccttcctgtgcagacatcctgatacaagcaggtctcttccatttcatgcccaggcagatctccaggaacccactcatctggttcagcagcctgagctgtcccatccttccagggcatagattgtggtgcagtggtaccctccctgctccacaaccaagcatatcaccaggcatttggagaacctgcttgcctagaccagcaccctaagctaccccacccttcctatgcagagattacagcacagttgggccttcatcactcaatgctcaggcagatatccaagcagtctgagtacacattctcctgaatcaagagcctgcgctgacccacccttcctgtgcagaagtcatagtggagcaggaccttctccaat

SEQ ID NO: 923470 - DNA, 645 bp, Homo sapiens
gtatgtgtcattgctgggtgtcccaatctactcccttgagatcatggtacagcagggccctgttggctccatgcccagttcaatctacaggcattcagagaatcccctcacctggaagagcctgatcttccccaaccttcctgtgcatagatcatggtagactgcagcccttaygactacaagacaagcagatcttgagccattcagagcacctgcttggatgaactagaggcctgagtcactttgcccttcctgtgcagacatcctgatacaagcaggtctcttccatttcatgcccaggcagatctccaggaacccactcatctggttcagcagcctgagctgtcccatccttccagggcatagattgtggtgcagtggtaccctccctgctccacaaccaagcatatcaccaggcatttggagaacctgcttgcctagaccagcaccctaagctaccccacccttcctatgcagagattacagcacagttgggccttcatcactcaatgctcaggcagatatccaagcagtctgagtacacattctcctgaatcaagagcctgcgctgacccacccttcctgtgcagaagtcatagtggagcaggaccttctccaatctgcagccaggcagatctccaggaa

SEQ ID NO: 923471 - DNA, 514 bp, Homo sapiens
ccttcctatgcagagattacagcacagttgggccttcatcactcaatgctcaggcagatatccaagcagtctgagtacacattctcctgaatcaagagcctgcgctgacccacccttcctgtgcagaagtcatagtggagcaggaccttctccaatctgcagccaggcagatctccaggaatctggagcgcacactatcctgaattaggagtttaggctgctccayctccccatgaagagaacttggggtcaaagaggtttcccagatccatgcataggcatactgctgggtgcttggtggccacccactggatattcccttggtacttgtgcatgtgcctgccataagaggaactgtaggcatccatacccatgtccagctctgtctatcttgcctcttactcccctagggctaagtagggagcttagaccactgtgcacttggtggatcagtccattgtctgaggcaatgagagcttttcccagtaaacaagaatcaagtatatatctaatc

SEQ ID NO: 923472 - DNA, 611 bp, Homo sapiens
acaaggaatgtcaaagattgacagccaccaccagaagctgggaagaacaagaccagacctttccctggaaatgttgggggatcattgttctgtcaataccttgattttggacttttagcctgaaaaataccttgttttgttttaagccacccagttattggtacttggttataaaacctctmggaaattaatattcaagtgtaaaaaagataatttttctttctttcttctcaatctgtatgcctttgattttcttatgacattatagtggctagaacatctagtagaacatggaatagaagtgaggtgaatatatgttcttgccttgatcctgatctcagagactatttattcagactttgaccataacatatgatgttgcctgtgggtttttttctaggtgacttctatcagtttgagaaacgtccactgtctttttaatttgctaagaatttattgaattttatcaaatacatctatttagataatcgtatacattaatcccttagtatcctggggaattggttccaggatctctcaaggataccaaaatctgcagatgttcaagtgcctgatataaaatggtgtagtatttgcatataacctatgca

SEQ ID NO: 923473 - DNA, 611 bp, Homo sapiens
acaaggaatgtcaaagattgacagccaccaccagaagctgggaagaacaagaccagacctttccctggaaatgttgggggatcattgttctgtcaataccttgattttggacttttagcctgaaaaataccttgttttgttttaagccacccagttattggtacttggttataaaacctctaggaaattaatattcaagtgtaaaaaagataatttttctttctttcttctcaatctgtatgcctttgattttcttatgacattatagtggctagaacatctagtagaacatggaatagaagtgaggtgaatatatgttcttgccttgatcctgatctcagagactatttattcagactttgaccataacatatgatgttgcctgtgggtttttttctaggtgacttctatcagtttgagaaacgtccactgtcttyttaatttgctaagaatttattgaattttatcaaatacatctatttagataatcgtatacattaatcccttagtatcctggggaattggttccaggatctctcaaggataccaaaatctgcagatgttcaagtgcctgatataaaatggtgtagtatttgcatataacctatgca

SEQ ID NO: 923474 - DNA, 627 bp, Homo sapiens
tctacttctgggggaataaaaattaagacaccttctgtgacccctaaaggagctaccttgtctttttcacatcacaccattttaattctctgcatggctcttaccaccaccattttccttgttactttaggtacaatttatttaaaaacatttttttccccactgaattttgagaactaggaaagcagggtatttttcttactttagtatgtccaataactaaaagagtgccttctatattacaggtgttcaagaaatgattgatgaataagtgggtaaatgattttacrcagaataaaaggacctgatttcaagaatacaaattgtaggttgaaactattcggctgcccacgaataaacacttgactgtgtgctattgaaattttaacttttatatggagcgctttgcagagagcaaaaattgttagctattcgtttggccaacatattgagtggcttctctgtggattttaggctaggctgcttggctggtgtggcatattaagcagggctttaaatgaataaagaataatattttaactgatgtagcttgttagaagaggggccatttcttctcaggaatagacatcagcaattcccagtggcagtcttttttactatttcctt

SEQ ID NO: 923475 - DNA, 696 bp, Homo sapiens
tccttagggtgtcgcttttccagtcaaaacctctggagctggtggcgcctttgcccaagtttggctcagacccgctgggctcattctgtccactcagctcagcaggctgcactctgttcatgccaccagcctggatcccaagcctgccaagaatgagccaggtgcatagcggtgatgggtgtgtgagcaagcatggggtctggctgctgcacacagccaggcatgctggttgtggtggggcaggctgctccaggcactggcacaggcgccacctccatgcttgcatactgcaagcggcttccactgcaggcaccaaaaaatgtggtggcacccagaagcttggaggtgccagaaaccacagagccctaaaaaggatrtcacagccctggctcggggatcccctaagtctgggatccccgaagggctgcagctcttctctgcttctcattgcctgcaacatggcaagtggggggcatgtttcagccctgtttgtgttacagcttttttagtcccaccatttggcaggtcctgagctcttgtcccatgtccaggaagaatgaggtatgtgaataactggaggtgaggagcttcactgagcgacagaatagctctcaggagacccaaagtgggtctcctatttgtaggcaggtcatctcgatgagtgtccagcccctaatggagaggagacccaaagtg

SEQ ID NO: 923476 - DNA, 648 bp, Homo sapiens
agtgcagtagcaccatcacagctcactgcagcctggatcccctgggctcaaggggttttcccacctcagcttccctgagtagctgggactacaggcactcaccaccatgcctgactaattttaaaaattatttgtagagatagggtcttgctatgttgcccaggctggtgatcctaccaatctcctaaagtgttgagattataggyaggagccactgtgcccagcctctaggcagatttttttctttttctgtttttttttttttgagacagggtctcactttgtcacccaggctggagtgcagtggcacagtctcggcttactgcaacctagacctcccaggttcaagcatcctcctgcctcagcctcctgagtagctgggactaccggtgcatgctgccacatctcactaatttttgtattttttgtagagatgagatttcaccatgtttcccaggctggtcttgaacccctgggctcaagtgatcctcccaactcggcttcccaaagtgttgggatgacaggtgtgagccaccacgccaggcctctgggcagatttctaaacctccctgagttttagtttcctcatttgtgaaatgaggatatccatagtacctgctttgtgtggttactgtgaggatcacatga

SEQ ID NO: 923477 - DNA, 828 bp, Homo sapiens
gttttgctgttctgtgggcctttaaaaaatattgagttatgatttacatgccataaaattcaccttcttaaagtatacaattcattggtttttttgatgtattcacaaagttgtgcaacttccaccacaatataatttacagaccattttcattgccctagaaagaaacctttatccatcagcagtcagttaccactccccacaccccaggctcttcaaccaycaatctactgtttgtctttatagatttgcctattctagatatctcatataaatacaataatataatatgtggcattttgtgactggcttctttcacttaccgtaatgtttttaagtttcaccctcactgtagcatgaatcaatagttcaatcagttttatggtcaaataatattgcgttgtatggatagaccacattttgcctatccattcatcagttgatagacatttgagttgactccactttttggatatcgtgaataatgttgctgtgaacatttgtgtgtgtttttacattctgttaggtgtagtcctaggagtaggattcctgggttatgtggtaactctgtgtatctttttgataaattttttgaggaactgccaaagtgttttccacagtggctgcgctattgacctgtggggttttgtaatacttttccctttatttgggacagatttctgttgcctctgggtctcctctggcatgagccaactatatggttaaagacgaatatgtaggatgctgggaagggcattggtgtctcctgtacccattatcaaactctgggtaaaaattcttcttgagaattcctatggatcaactcat

SEQ ID NO: 923478 - DNA, 828 bp, Homo sapiens
gttttgctgttctgtgggcctttaaaaaatattgagttatgatttacatgccataaaattcaccttcttaaagtatacaattcattggtttttttgatgtattcacaaagttgtgcaacttccaccacaatataatttacagaccattttcattgccctagaaagaaacctttatccatcagcagtcagttaccactccccacaccccaggctcttcaaccatcaatctactktttgtctttatagatttgcctattctagatatctcatataaatacaataatataatatgtggcattttgtgactggcttctttcacttaccgtaatgtttttaagtttcaccctcactgtagcatgaatcaatagttcaatcagttttatggtcaaataatattgcgttgtatggatagaccacattttgcctatccattcatcagttgatagacatttgagttgactccactttttggatatcgtgaataatgttgctgtgaacatttgtgtgtgtttttacattctgttaggtgtagtcctaggagtaggattcctgggttatgtggtaactctgtgtatctttttgataaattttttgaggaactgccaaagtgttttccacagtggctgcgctattgacctgtggggttttgtaatacttttccctttatttgggacagatttctgttgcctctgggtctcctctggcatgagccaactatatggttaaagacgaatatgtaggatgctgggaagggcattggtgtctcctgtacccattatcaaactctgggtaaaaattcttcttgagaattcctatggatcaactcat

SEQ ID NO: 923479 - DNA, 828 bp, Homo sapiens
gttttgctgttctgtgggcctttaaaaaatattgagttatgatttacatgccataaaattcaccttcttaaagtatacaattcattggtttttttgatgtattcacaaagttgtgcaacttccaccacaatataatttacagaccattttcattgccctagaaagaaacctttatccatcagcagtcagttaccactccccacaccccaggctcttcaaccatcaatctactgtttgtctttatagatttgcctattctagatatctcatataaatacaataatataatatgtggcattttgtgactgkcttctttcacttaccgtaatgtttttaagtttcaccctcactgtagcatgaatcaatagttcaatcagttttatggtcaaataatattgcgttgtatggatagaccacattttgcctatccattcatcagttgatagacatttgagttgactccactttttggatatcgtgaataatgttgctgtgaacatttgtgtgtgtttttacattctgttaggtgtagtcctaggagtaggattcctgggttatgtggtaactctgtgtatctttttgataaattttttgaggaactgccaaagtgttttccacagtggctgcgctattgacctgtggggttttgtaatacttttccctttatttgggacagatttctgttgcctctgggtctcctctggcatgagccaactatatggttaaagacgaatatgtaggatgctgggaagggcattggtgtctcctgtacccattatcaaactctgggtaaaaattcttcttgagaattcctatggatcaactcat

SEQ ID NO: 923480 - DNA, 592 bp, Homo sapiens
ttacatatgtatacatgtgccatgttggtgtgctgcacccattaactcgtcatttacattaggtatatctcctaatgctatcccttccccctctccccaccccacaacaggccccgaagtgtgatgtcccccttcctgtgtccaagtgttctcatygttcagttcccacctatgagtgagaacatgtaatgtttgtttttttgtccttgcgatagtttgctgagaatgttggtttccagcttcatccgtgtccctacaaaggacatgaactcatcattttttatggctgcatagtattccatggtgtatatatgccacattttcttaatccagtctgtcattgttggacatttgggttggttccaggtctttgctattgtgaatagtgctgcaataaacatacatgtaaatgtgtctttatagcagcatgatttataatcctttgggtatatacccagtaatgggatggctgggtcaaatggtatttctagttctagatccctgagaaatctccacactgtcttccacaatggttgaaccagttaacagtcccaccaacagtgtaaaagtgttcttatttctccacatcctc

SEQ ID NO: 923481 - DNA, 642 bp, Homo sapiens
gaggttgcagtgagcagagatcccaccattgcactccagccctggggcaacaagagcaaaactccatctccaaaaaataaaaaagaaagaaagaagaaagaggaaggaaggaaggaaggaagggaaggagggaggcaagaaaacaactttcttagggactagaagtttaaaaatatgccataatttactataaataacatcctatagatttgggtcygcacagaggcattctcaacatcttttagtttgttttcatctgagtaagttcttgctctctaaactctctaaaaagaaggacgagaggaaaggggtcccatcttgaagttcataggtgcctagaggaatgcaatcctttgcagttagttttagaaatcggccaccaccacaccatttcctccaggtcatattatcagaactgcaggtacaaataagtttacaggaagtgctcattaactgtgtcctgactggtagacagttggaccatagcacgttttcctgaactcatggtaggactgcagtggcccagccagatgtttttctttaaacaaaggagagactcgaaccttggtttatctctgggaagcagtaagctgaggcttaacttatcaaaaaaaaaaaaaaaaaaaaggtggctaactccac

SEQ ID NO: 923482 - DNA, 642 bp, Homo sapiens
gaggttgcagtgagcagagatcccaccattgcactccagccctggggcaacaagagcaaaactccatctccaaaaaataaaaaagaaagaaagaagaaagaggaaggaaggaaggaaggaagggaaggagggaggcaagaaaacaactttcttagggactagaagtttaaaaatatgccataatttactataaataacatcctatagatttgggtctgcacagaggcattctcaacatcttttagtttgttttcatctgagtaagttcttgctctctaaactctctaaaaagaaggacgagaggaaaggggtcccatcttgaagttcataggtgcctagaggaatgcaatcctttgcagttagttttagraatcggccaccaccacaccatttcctccaggtcatattatcagaactgcaggtacaaataagtttacaggaagtgctcattaactgtgtcctgactggtagacagttggaccatagcacgttttcctgaactcatggtaggactgcagtggcccagccagatgtttttctttaaacaaaggagagactcgaaccttggtttatctctgggaagcagtaagctgaggcttaacttatcaaaaaaaaaaaaaaaaaaaaggtggctaactccac

SEQ ID NO: 923483 - DNA, 642 bp, Homo sapiens
gaggttgcagtgagcagagatcccaccattgcactccagccctggggcaacaagagcaaaactccatctccaaaaaataaaaaagaaagaaagaagaaagaggaaggaaggaaggaaggaagggaaggagggaggcaagaaaacaactttcttagggactagaagtttaaaaatatgccataatttactataaataacatcctatagatttgggtctgcacagaggcattctcaacatcttttagtttgttttcatctgagtaagttcttgctctctaaactctctaaaaagaaggacgagaggaaaggggtcccatcttgaagttcataggtgcctagaggaatgcaatcctttgcagttagttttagaaatcggccaccaccacaccatttcctccaggycatattatcagaactgcaggtacaaataagtttacaggaagtgctcattaactgtgtcctgactggtagacagttggaccatagcacgttttcctgaactcatggtaggactgcagtggcccagccagatgtttttctttaaacaaaggagagactcgaaccttggtttatctctgggaagcagtaagctgaggcttaacttatcaaaaaaaaaaaaaaaaaaaaggtggctaactccac

SEQ ID NO: 923484 - DNA, 588 bp, Homo sapiens
ggcaccatgtcctgaggctgcacagagctgtgagaccctgggcctgtcccatgaaaccatttttccctcctagggctccaagcctctgatggaaggggctgccatgaaagtctctgaaatgtcctggaggcatttttcccattatctccgatgttagcatttcacctctctttacttaagcaaatttctgcagtcagcttgaatttctcccagaaaatgggtttttcttttctaccacatgaccaggctgtaaatttttcaaacttgtatgctctgcttcccttttaaatatgtttcagtttcagactgtctttttttgtgtatgcatattggcatatacagttagaagcagccaggtcacatcttgaacaatttgctgcttagaagtttcttctgccagatacccttgaggaagttctaggaagttccaaactttccctcatgttkctgtcttcttctgagccctccaaactgtttcaactctgcccatcacctagttccaaagacacttccacattttcaggtacttttataacaatggcccacttctctggtaccagttttctgtattaatttgtttttgcactg

SEQ ID NO: 923485 - DNA, 611 bp, Homo sapiens
ggtacaaagtctctaggctgcacagagcagggggtcctgggcctacgcatgaaaccatcattgcctgttaggcttccaggcctgtgaggggagtggctgccatgaagacctctgatatgtcctggagacattttccccattgtcatggggattaacttttggctccttgttacatatgcaaatttctkcagccagcttgaatttctcctcagaaaatgggattttcatttctattgcattgtcaggctgcaaattttcagaacttttatgctgtttcccttttaaaactgaatgcccttaacagtcaccgcttgaacactttgctgcttagaaatttcttccaccatttacactaaatcatctctctgaagttcaaagttccacaaatctctagggtaggggcaaaatgccaccagtctctttgcttaaacataacaagagtcacctttgcgccagttcccaatatgttcctcatctccatctgagaccacctcagcctggatttcattgtccatatcattatcagcattttggtcgaagccattcaacaagtctctcaagagttccaaactttttcacatctttctctcttcttctgagccctccaaact

SEQ ID NO: 923486 - DNA, 611 bp, Homo sapiens
ggtacaaagtctctaggctgcacagagcagggggtcctgggcctacgcatgaaaccatcattgcctgttaggcttccaggcctgtgaggggagtggctgccatgaagacctctgatatgtcctggagacattttccccattgtcatggggattaacttttggctccttgttacatatgcaaatttctgcagccagcttgaatttctcctcagaaaatgggattttcatttctattgcattgtcaggctgcaaattttcagaacttttatgctgtttcccttttaaaactgaatgcccttaacagtcaccgcttgaacactttgctgcttagaaatttcttccaccrtttacactaaatcatctctctgaagttcaaagttccacaaatctctagggtaggggcaaaatgccaccagtctctttgcttaaacataacaagagtcacctttgcgccagttcccaatatgttcctcatctccatctgagaccacctcagcctggatttcattgtccatatcattatcagcattttggtcgaagccattcaacaagtctctcaagagttccaaactttttcacatctttctctcttcttctgagccctccaaact

SEQ ID NO: 923487 - DNA, 611 bp, Homo sapiens
ggtacaaagtctctaggctgcacagagcagggggtcctgggcctacgcatgaaaccatcattgcctgttaggcttccaggcctgtgaggggagtggctgccatgaagacctctgatatgtcctggagacattttccccattgtcatggggattaacttttggctccttgttacatatgcaaatttctgcagccagcttgaatttctcctcagaaaatgggattttcatttctattgcattgtcaggctgcaaattttcagaacttttatgctgtttcccttttaaaactgaatgcccttaacagtcaccgcttgaacactttgctgcttagaaatttcttccaccatttacactaaatcatctctctgaagttcaaagttccacaaatctctagggyaggggcaaaatgccaccagtctctttgcttaaacataacaagagtcacctttgcgccagttcccaatatgttcctcatctccatctgagaccacctcagcctggatttcattgtccatatcattatcagcattttggtcgaagccattcaacaagtctctcaagagttccaaactttttcacatctttctctcttcttctgagccctccaaact

SEQ ID NO: 923488 - DNA, 611 bp, Homo sapiens
ggtacaaagtctctaggctgcacagagcagggggtcctgggcctacgcatgaaaccatcattgcctgttaggcttccaggcctgtgaggggagtggctgccatgaagacctctgatatgtcctggagacattttccccattgtcatggggattaacttttggctccttgttacatatgcaaatttctgcagccagcttgaatttctcctcagaaaatgggattttcatttctattgcattgtcaggctgcaaattttcagaacttttatgctgtttcccttttaaaactgaatgcccttaacagtcaccgcttgaacactttgctgcttagaaatttcttccaccatttacactaaatcatctctctgaagttcaaagttccacaaatctctagggtagkggcaaaatgccaccagtctctttgcttaaacataacaagagtcacctttgcgccagttcccaatatgttcctcatctccatctgagaccacctcagcctggatttcattgtccatatcattatcagcattttggtcgaagccattcaacaagtctctcaagagttccaaactttttcacatctttctctcttcttctgagccctccaaact

SEQ ID NO: 923489 - DNA, 614 bp, Homo sapiens
tatgacctccatcatccacttatccaccagatggaactcattccatctgcaatgcttactgcctgccctaagggaacactgagctttggaagcagttgcacttaccttcaatggcaatgcagctttttcaaaaacatgaaagaataatgtgttgctttcatacttaacatgattcaattaagaagaataagtggggatgtgctcggttagaaaaataatactcaaagcattatcattcaccaactgatttgttttcacaagaaaaaataaacaaaaatatttgattttctactcagacgaccatttactatcccaaaatatggtatagcaatcttaaaagaggcgaactgaaaagaatttttgtgtcasgtgatatacctcattaacgcttacatatttgtggtgtggctttgttttcctagcttttatgtcttaatgaattatttctcattcttcctcagggtagtcataaaatttatttccctgatggttctaagattaataactctccactttaaaatcataatgctttatagttctaaataagaaattgtgttcaatattaaatttaaaagtctattaaagaaaattagggtgggcacagtggcttatgc

SEQ ID NO: 923490 - DNA, 565 bp, Homo sapiens
caaatctatgtttgattggcgtacctgaaagtgatgaggagaatggaaccaaactggaaaacactcttcaggatattatccaggagaacttccccaacctagcaaggcaggccaacattcaaattcaggaaatacagagaacaccacaaagatactcctcgagaagaggaatcccaagacaaataattgtcaaattcaccaagrttgaaatgaaggaaaaaatgttaagggcagccagagagaaaggtcgagttacccacaaagggaagcccatcagactaacagcagacctctcggcagaaactctacaaggcagaagagagtgggggccaatattcaacatcattctgtcgcccagactggagtgcagtggcgtgatctcagctcactgcaagctccgcctcccaggttcacaccattctcctgcctcagcctcccgagtagctgggactacaggcgcctgccaacatgcccggctatttttttttttttttttgtatttttagtagagatagggtttcactgtgttagccaggatggtctcattctcctgaccttgtgatct

SEQ ID NO: 923491 - DNA, 596 bp, Homo sapiens
tatacttgtattagataaaatagaaagataattctataatgagaaagaaatcaatacagcaatatcacaattataagtgcaaatgcaaccaacactcaagcacctaaacacagaagcaaatattaacagaccttaaaggacagatggactgcaatacaataatagagtacctgaacactaatctataatgaacacyccactatcatcaatgaacagatcatccagatgacaaaaaatcatcagttaaactgtaatctctatggaatggacctaacatttacacagccttccactctgcaactgcacaatgcacattctactgagtagcacatggattattctccaggacagactatgtgttaggccaaataacaagtcacagcccatttttaaatactgaattcatatcaagcatcttttctgatcacagtggaataggaggagaaatcaataacaggaggaactttaaaaactgtacaaacatatggaaattaaaatacatgttcatgaacgatgaataaagaaataaaaaaattaaatatttattgaaataaataaaaagagaaacacaacataacaaaacctgtgggatgcag

SEQ ID NO: 923492 - DNA, 596 bp, Homo sapiens
tatacttgtattagataaaatagaaagataattctataatgagaaagaaatcaatacagcaatatcacaattataagtgcaaatgcaaccaacactcaagcacctaaacacagaagcaaatattaacagaccttaaaggacagatggactgcaatacaataatagagtacctgaacactaatctataatgaacactccactatcatcaatgaacagatcatccagaygacaaaaaatcatcagttaaactgtaatctctatggaatggacctaacatttacacagccttccactctgcaactgcacaatgcacattctactgagtagcacatggattattctccaggacagactatgtgttaggccaaataacaagtcacagcccatttttaaatactgaattcatatcaagcatcttttctgatcacagtggaataggaggagaaatcaataacaggaggaactttaaaaactgtacaaacatatggaaattaaaatacatgttcatgaacgatgaataaagaaataaaaaaattaaatatttattgaaataaataaaaagagaaacacaacataacaaaacctgtgggatgcag

SEQ ID NO: 923493 - DNA, 505 bp, Homo sapiens
agctgatagcacccctaaccctccccctagctggcggtcagcccccttagtacacacaaccacccccaccaccaggcagtatagcccccaccaactccgccaacccatgcccccgataccccaccggcaatgtgaccttgatagtgctcctacccagggtagcgcatccctggatagctcacctaccctgccacctttctaccatgctggccaagctgcaacctccatcacctccaccaaccgcagtgaggtgagcctagataccayaggctcaagccgccagctcggggtatgtggctcccacttcctgttctctaagctgagctcccagcttcgattctgattggatgagagcaagtcttaggacaaccaatcacagcatgaaaataaagtccaatcagaataggcctagaggttttctctcatccaatcagaatatgtagtccaggaacctcatttgcataagctcatgtataaggcatgcagaaggggcatcaggccattc

SEQ ID NO: 923494 - DNA, 654 bp, Homo sapiens
tggctcacacctgtaattccagccctttgggaggctgaggtgggcagatcacgaggtcaggagattgagaccatcctggctaacatggcgaaaccccgtctctactaaaaaatacataaaattagctaggtgtggtggcgggcacctgtagtcccagctactcaggaggctgagacaggagaatggcatgaacccaggaggcagagcttgcagtgagccaagatcgcgccactgcactccagcctgggcgacagagygagactctgtctcaaaaaaaaaaaaagaaaagaaaaaaagtacgaactacatgctgcaacctgaatggacttcaaagacaatatatttagtgtaaaaagtccatcttaaaatattacataatgtattattcaatttgcataacgttgtcagagtcataaaactatagagatggaaaacagattagtggttatcaggaaaaagggatggggtgggatgagggatgctcatgaaatacaaagaagtatgcgttgatgaaacagtttagaacagtcctgtatcttaactgtggtgggggttacatgaatgtatacatgggataaaatttcacagccctatacatgcccacataaacacaccaatgaatgcaggttaaacaaatagagaaaactgattaag

SEQ ID NO: 923495 - DNA, 643 bp, Homo sapiens
atcagcaaggtctttatgacctgtatcttatgctgaccccctatctcatcctgtgatttaggatgccttaaccgtctgagaatgcagcccagtaggtctcagcctcattttacccagctcctattcaagatggagttgctttggtccacacacctctgacagtggggttacatgactgtaatcccagcacttcggaaggccaaggcaggaggattgcttgagcccaggggttcaagaccagtctgggcaagatggtgagaccctgtcccaacaaaaaaatttttttaaatgtatatttagctgggtgtaatggcatgtgcctgtagtcccagctcctggggaggctgactggggaggattgcttgagcctggtaggtcaaggatgaagtgagccatggtcacrctactacactccagcctgggcaacagagtgagaccctgtctccaaaaaatatataataataataataataataataatgaagtatgtgttgcccatatctactcattcatgggtaatcttgaaactgcctttgcaaaagttatatccatgagaaaattataacggtaaactaagctagcctaacctccatcttgcctttcccttaattattcccagattattggactaagctaactttgg

SEQ ID NO: 923496 - DNA, 700 bp, Homo sapiens
agtgaaagttattaaaaagctttagagcaggaaagaaagaaaagtacatttggaagagacccaagagggcaatgtgaaggtcaagtgcagtgttttttgtttttgtttttgtttttttgtttttttgagacggagtctcgctctgtcccccaggctggagtgcaatggcgcgatctcggttcactgcaagctccgcctcctgggttcacgccattctcctgcctcagcctcctgagtagctgggactataggcacctgcaaccacgcccggctaattttttgtatttttagtagagayggggtttcactgtgttagccaggatggtctcgatctcctaaccttgtgatccgcccgcctcggcctcccaaagtgctgggattacaggcgtgagccaccgtgcccagccaagtgcagtgtttaaccgtaatcctaggactttataggctgacccacttctggcgtcttgcacccctcccttctccatgattcatcccttagggtgggctgcctgcatgcacagtgcccttcttaagcttgggaggtgagcatgagcagtgtgtttaggaagttgtacgcatgcccatctgtggctttctttttcctgtggagtgcccccagaaggtcatactctgccattttgtctcctgatgtgtatgcccaggaagttgcccctctctggcatctgcatttaattaacac

SEQ ID NO: 923497 - DNA, 632 bp, Homo sapiens
tactaaaaatacaaaaattagccagacgtggtggcgcacacctacaatcccagctacttgggaggttgaggcaggagaatcacctgaacccgggaggcggaggttgcagtgagtggagatcgtgccactgcactccagcctgggtgacagagagagactctgtctcaaaaagaaaaaaaaaaagctttatgtgcattatcttatgtaatcctcttaacmattacttggtgaatagtgagttccactactatccccatttcatagaggagtaaactgaggcacagggagatggactaacttgctcatagtcacgtagttacttaatggtgaggctgggatctgaatacaggcagcctgagaagtggctcttccgtccacctccaacctccttttagccgagggttttgagctcatttcaacacagccactgtgtccagggataccagcaaagaattagatcaatgtcaggctctgacgcacaggcaggctcagtaataacaacagtccacacacacatacgataagttaactcaccgcagcctcacaccgcgccaggaggcaggcactaatattatctcaattttacggatgaggaaaccgaagctcagataggtcagatgactggcccaagg

SEQ ID NO: 923498 - DNA, 718 bp, Homo sapiens
tggcttctatcctcagctcacctcatggttcaggatggctgctggggctccagccatcccatcaactctccaaaccagcaacagaaggaggaacaagggcagtgtggatagtgtacctttcggctaaatcagtctcttccagcagcttcctgcaagttccacacatatccctgtaacatmttgttgtctagaacgtaatcatatggctcacaccatcaggaaaggtgtctttgaactagctgctgggtgcactgccgctccgaatacagtaggatttctgttagtcagcggggaaatggatattggctgccagcagcctttgccttgtctgccttttcttcttttttgagatctggtgcccaagccgctgtctgctcagcatacccacctgtggccgtcggagactgaagcctgtgctcagtaggtccccatcttcctcccccagggttcctgccttctccgaggattggtttccccatcttttctgtaccccttttcctggttggagtctcctgggctctcatggttttgtgggggcagaaatgaaaggggaaggccctggaaatgttcgcaggccgagccctttcgccacccctgggcctccgcccaccagcaccctgtcctcaggccccctgcgttcagctccatggtcagccccccttaaccaggagggatatggaaggggacttctttggagtgagattcagagggaaaggga

SEQ ID NO: 923499 - DNA, 718 bp, Homo sapiens
tggcttctatcctcagctcacctcatggttcaggatggctgctggggctccagccatcccatcaactctccaaaccagcaacagaaggaggaacaagggcagtgtggatagtgtacctttcggctaaatcagtctcttccagcagcttcctgcaagttccacacatatccctgtaacatcttgttgtctagaacgtaatcatatggctcacaccatcaggaaaggtgtctttgaactagctgctgggtgcactgccgctccgaatacagtaggatttctgttagtcagcggggaaatggatattggctgccagcagcctttgccttgtctgccttttcttcttttttgagatctggtgcccaagccgctgtctgctcagcatacccacctgtggccgtcggagactgaagcctgtgctcagtaggtccccatcttcctcccccmgggttcctgccttctccgaggattggtttccccatcttttctgtaccccttttcctggttggagtctcctgggctctcatggttttgtgggggcagaaatgaaaggggaaggccctggaaatgttcgcaggccgagccctttcgccacccctgggcctccgcccaccagcaccctgtcctcaggccccctgcgttcagctccatggtcagccccccttaaccaggagggatatggaaggggacttctttggagtgagattcagagggaaaggga

SEQ ID NO: 923500 - DNA, 614 bp, Homo sapiens
tacacatatgaatgttaattttaattttgtgggcagagtgtcatttgtccatctagtacctatctctttttttcttccttagccacagaacccttgttttattgaaataacaatgagtccagctacaaaattcaaatttctcagcccccattgcagacactygtgactgtgctaaattctggccactgagatttaagtagcagatgttggctgaggcttccaggaaagcctcttaaaagagggaaaggcaactggcacattccccttagtcctctcgcctttatctttcttcctgtctggaatgcagacatgatggcttaggcttcagcagtccatgaagtagtcttgaggtcagaagtaactcgctgaggatggtgaaagaactttagaaggaacctgggacttccttctttggacttccttctttctttctttctctttctttctttctttctttctttctttctttctttctttctttctttctttctttctttctttctttctttctttttttttctggagatggagtttagctcttgtcgcccaggctggaatgcaatggtgcaatctcggttcactgcaatctctgcctcccagattcaagtgattct

SEQ ID NO: 923501 - DNA, 736 bp, Homo sapiens
attgtaatgttcccaatacaaataaaagataaatgtttgaggtgatggatataccaattgctctgatttgatcattaagccttttacacatgtgtcaaaatatcacacgtgttgcgggaagtcagggaccccgaatggagggaccggctggagccgcagcagaggaacataaattttgaagatttcatgggcatttatcagttcccaaataatacttttataatttcttatgcctgtctttactttaatctcttaatcctgttatcttcgtaagctgaggacgtacatcacctcaggaccactgtgataattgtgttaactctacaaattgattgtaaaacatgtgtgtttgaacaatatgaaatcagtgcaccttgaacaaaaacagaataacagtgatttttagggaacaagggaagacaaccataaggtctgactgccagcggggkcgggcaaaaagagccttatttttcttcttgcagagagcctataaacagacatgcaagtgggagagatatcgctgaattcttttcctagcaaggaatactaatactaataccctgggaaaggaatgtgttcctggggggaggtctataaacggccgctctgggagtgtctgtcttatgcggttgagataaggactgagatacgccctggtctcctgcagtaccctcaggcttactagggtggggaaaaaactctgccctggtaaattcgtggtcagaccagttctctg

SEQ ID NO: 923502 - DNA, 775 bp, Homo sapiens
cagggtaccatgtcccaaggctgcacagaatggcagggcccttggcctggcccacaaaactatatttgcctcccaagcctccgggcctgtgatgagaggggctactgtcaagaactccgaaatgccctggaaacattttccctattgtcttggatatttacatttggctcctcattacttatgcacatttctgcaggtagcttgaatttcttcccagaaaatgggtttttcttttctactgcatggtcacgctgcaaattttccaaacttttatgctctgcttcccttttaaacataagttccaatttcaggtcatctttttgtgaatgcatatgactatatattttcagaaaaagccaggttacatcttgaatgttttgctgcttaaaagtttcttctgccagataccttaaatcatctctctcaagttcaaagttccatacatccctatggcaggggaaaaatgctgtcactctctttgctaaagcawatcaagagtgacctttgctctagttcccaataagttcctcaaccccatccaagaccatcccaacctggagttcattgtctatatcactatcagcattttggtcaaatacattcaacaagtctctagggagtttccaatttttcctcatctgtcttcttctgagactttcaaacctttccaacttctgcccattacccatttccaaagtcacttccacatttttaggtatctttaaagcaatacacaacttctgataccatttttttttttggtattagtttgttt

SEQ ID NO: 923503 - DNA, 819 bp, Homo sapiens
cccgtgggcatgtgttacagagtgctgttttcgtttagctgtccataggcggcttgtgttagtcagctcaattagacccctgacttatcacaaggacagggggctttctgtatcctggggttctcgccttggtgtactggaagaatcggatcacacgtgggcttggagaatgagtgcaaggttttattgagtagaagtagctctcagtagatgaggaagccagaagggagactggttttcccctggagttgggccactcagtgttccaggctctcctccaattgccccagccaaactctgcgttgtkctgccggtcagtggcctccccgctgccggtgcctgttggtgcattcctctccatgtccagcaacccgtgtgttcctccactgatgtgctcctctcgatgtccagccacctgtgtgcctacctgttagggtcctgaggttttcatatgcacaggatgggggcatggcaggccaggacagaaatgcaacatttgggcaggaaaacaaaaatgcctgtcctcacctaggtccgtgagcacagggccgggggtggagccctagccagggaccatgccattccccccttccgaatcattttcaggttttttgcacttctgacacccatggctccacatggacccaccagcccatggctcctgtacccaccccaaagtgactcagcacaagagaacagcttccactgcctatgattttatctccagcccaattggtcaacagcaagcacccactgttgccacactactacttcccgcaaactacctttgaaaaactcctaacttatgagcccttgatg

SEQ ID NO: 923504 - DNA, 729 bp, Homo sapiens
ggtaccatgtcccaaggctgcacagaatggcagggcccttggcctggcccacaaaactatatttgcctcccaagcctccgggcctgtgatgagaggggctactgtcaagaactccgaaatgccctggaaacattttccctattgtcttggatatttacatttggctcctcattacttatgcacatttctgcaggtagcttgaatttcttcccagaaaatgggtttttcttttctactgcatggtcacgctgcaaattttccaaacttttatgctctgcttcccttttaaacataagttccaatttcaggtcatctttttgtgaatgcatatgactatatattttcagaaaaagccaggttacatcttgaatgttttgctgcttaaaagtttcttctgccagataccttaaatcatctctctcaagttcaaagttccatacatccctatggcaggggaaaaatgctgtcactctctttgctaaagcawatcaagagtgacctttgctctagttcccaataagttcctcaaccccatccaagaccatcccaacctggagttcattgtctatatcactatcagcattttggtcaaatacattcaacaagtctctagggagtttccaatttttcctcatctgtcttcttctgagactttcaaacctttccaacttctgcccattacccatttccaaagtcacttccacatttttaggtatctttaaagcaata

SEQ ID NO: 923505 - DNA, 683 bp, Homo sapiens
gaagctgaggcaggagaatctcttgaatctgggaggctcttgaatctgggaggcagaggttgcagtgagccgagattatgtcactgcactccagcctgggcgacagagtgagactctatctccataaaaacaaaaaccaaaaaacaattatccatcagatgggctggagaagcaaaatgtgatactgtcatgcaatggaatcttaaagatgcaatacaaagtgatgaactactgatgttcacaatatatgtaaatttcaaaaacacactgtgcaaaagaagtcagacacagaaatattttacctatgattttatttttataaagctctagaaaaaagaaatagagwctatgggccagaaagcagaaaagcatttttcctggggcttggggtgggggtggcatgtgtttacagcaactaggaagaggtataagagaacttggcgtgatggtgaaaatatgttagggcttgatttagtggtagcaacatggtagataaacttctctaatctcatccaaatatacactaaagatgagcgcttgttattgcacatgtattatgccttaatatagttgattaaaacaaaaccttaactggcttcttattattttataatatcagactgatctcttaaaatctcgtatttcaagagtcatctttaatattgaatattaatttagtacat

SEQ ID NO: 923506 - DNA, 611 bp, Homo sapiens
gttgaatgtctgtgacttttccaggcaaacggtgcaagctgtcagtggatctaacattctggcatctggaggatggtgacccttttctcacagctccactaggcagtatcccaacagggactctgtgtgggggctctgaccccacatttcccttctgcactgccctagcagaggttctccatgagcgtcctgcccctgaaacaaacttccacctgggcatccaggagtttccatgttctgaaatctacgtggaggttcccaaaccccaattcttgacttctgtgcactctcaggttcaatactatgtggaagcttccaaagcttgtggcttccacccactgaagccacagcctgagctctacgttggccctttcagccatggctggagtgcctgggatgcarggcgccaagtccctaggccacacacagcacagggaccctggccctggcccaggaaaccattttctcctaggcctccaggcctgtgatgggaagtgctgctgtgaagatctctgacatgccctggagacatttttcccactgtcttggggattaacatttggctcctcattacttatgcaaatttctgtagctggcttgaatttctcctt

SEQ ID NO: 923507 - DNA, 633 bp, Homo sapiens
acatggaggtattggaaacctagataagggctgttttggtgaggtgatgggcaaaaaagcccaaaagcattgagttcaagatggaaaaagaggtcagaaattggagaycattctgcaaaggagagcagagaaatgagtgggaactagaagtaggtaaagggtgagcaaagggtttgtgttttgcattggatggaaaaggtcaagaagagagagaaaatttgatggtgcaggagacagcgtggctgaccgatcaatgaccttgttattgaaaaagagaatgaggacctagggttcaagcagaagggctggcattagagctttcagttcatctgtgatgttgagtgggaatgcagagcttctaggacaaatgccctgagggtggtagatgtcttggtggaagcctgcaacattttcttctgattgcttctattttcttagtccagagtgaggaggagaaagaagttacaaaataatagtttagtctcttaattggattttctccaatcacactaggcagaaaagcatataaatggatgacttgcgaaatggagtaggattggaaggtagcatttgggccccttgaggtaggatctcatgcatttgaaataggccagtcaatatgcttgcgtattt

SEQ ID NO: 923508 - DNA, 562 bp, Homo sapiens
ggccctggggaccgttgcttctctctgcagccaatgtctcttcaggtctctgaagcgctcagcagagagggtagttccactctgcggctggttgtcctgtcctctcctgctatcagcagagagggtagttcctctctgaagttggtcctctcttcatctcttcctcctctgcccctgctctggctgagcccagggcttttatggacctcagaggggaggaagtgtgtgccattggtccacatgcagycccagaagaggcaccacaagtccccacagtctacagcactggcagcccggtccccagccttcaggccctcccaggcctgaaggtgtggccctactggggacccgccgcctttgacccaggaatctgtctgcctcccactgccatttatgtctccggagtttggccagcctttgctcccagatcagagtgggcaccgacagcagggagaaggagaagccaggcagtgggagcaggcacttctgagcctgcgagggcagggggatcttctcaggccccaagagtgcagagatgcctgaatctgcaatctcgatttgg

SEQ ID NO: 923509 - DNA, 458 bp, Homo sapiens
ccttaacccagcaggtttcccaacaggggatctaaatcttaattaccatacaaaggtccgaccagacctaggaggaactcccttcaggacaggatgatagatggttcctcccgggcaattgaaggaaaaaaaaaaaagccatctataccaattctaagttagtttggactaaacaaggtcttattaatagcaaaggataattgaaatcccaaacttacaaggttttcaacaaaagtaaagtttactaaaagttaacagtgtaacatgtattatagtaacctgtaatcttgtggcyttagacagtctagtccacagacataaaggaagtttgctttggaaaagaacggttatcttcaggaaaaaaaggggggcagaatttatgcaaaaataatgttatatggtaaattcttgtcctgaaataaattaaccggttgtttaaagaaagaaatgtttgtaat

SEQ ID NO: 923510 - DNA, 652 bp, Homo sapiens
atatggaagtcctagccagagcaattagggaagaaaaaagaaataaaaagaatccaaactggaaaataagaaattaaattgtcacggtttgcccacaatgtgaacttatatatagaaaaccttaaagatgccaccaaaaaatgatcagaacaaataaaagaattcagtaaattttcagaatacaaaaatcagtagcatttccatacactaacaacaaattatcctataaagaaatcaagaaaacactcccatttacaatagctacaaaaaatacttgataataaatgttatcaaggagatgaaagatttctatactgatatctataaaatgctgatgaaggaaattggaaaagacacaaataaatggaaagatagcttgtgttcatggattgaaaaaatcatatttttaaaatgtccacwctacccaaagtgatctacagattcaacgaaaaccctatcaaaattcccatgtcatttttcacagaaaaatgactgtatacctagaaaaccctaaagactcatccaaaaagcttctagatttgataaatgaattccattaagtttcaggatacaaaaccaatgtacacaaattagtactgctatacagcaagagtgaccaagctgagaatcaaatcaaaacctcaatccctcc

SEQ ID NO: 923511 - DNA, 801 bp, Homo sapiens
aaggggaatggtgttaacccatgagaaactgcctccatgacccaatcacttcccactaggccccacctccaacaatgggaattacaatcgaatatgagatttgggtggggacatagatccaaatcatattattccacccctagcccctcccaatctcatgtccttctcacatttcaaaatataagcatgctttgccaatagtcctccaaagtcttaactcattccaatactaactcaaaagtccacagtccaaaatctcatctgagacaaggctagtaccttccacctataagcctgcaaaaatcaaaaacaagttagttattcccaagatacaatggaggtatatacattgggtaaatactcccattccaaaagggagaaatcagccaaaataaaggggytacaggatgcatgcaaatctgaaatccagcagggcaatcattaaatcttaaagcttcacagtaatctcctttgactccatgcctcacatccaggacacattggtgtgaggggtggcctcccaaggtcttgggcagctctgcccctatggctttgcagggttcagcccctgcagccactctcatgggctagttttgagcattgtgcctgtagcttttccaggcacagggtgcaagctgctagtggatctaccattctgggatctggaggatggtggccctcttctcacagctctactaggcagtgccccagtggggactttgtgtgggggtttcagcctcacatttcccctccccactgccctagtagaagttctctataagggctccacccctgcagcag

SEQ ID NO: 923512 - DNA, 801 bp, Homo sapiens
aaggggaatggtgttaacccatgagaaactgcctccatgacccaatcacttcccactaggccccacctccaacaatgggaattacaatcgaatatgagatttgggtggggacatagatccaaatcatattattccacccctagcccctcccaatctcatgtccttctcacatttcaaaatataagcatgctttgccaatagtcctccaaagtcttaactcattccaatactaactcaaaagtccacagtccaaaatctcatctgagacaaggctagtaccttccacctataagcctgcaaaaatcaaaaacaagttagttattcccaagatacaatggaggtatatacattgggtaaatactcccattccaaaagggagaaatcagccaaaataaaggggctacaggatgcatgcaaatctgaaatccagcagggcaatcattaaatcttaaagcttcacagtaatctcctttgactccatgcctcacatccaggacacaytggtgtgaggggtggcctcccaaggtcttgggcagctctgcccctatggctttgcagggttcagcccctgcagccactctcatgggctagttttgagcattgtgcctgtagcttttccaggcacagggtgcaagctgctagtggatctaccattctgggatctggaggatggtggccctcttctcacagctctactaggcagtgccccagtggggactttgtgtgggggtttcagcctcacatttcccctccccactgccctagtagaagttctctataagggctccacccctgcagcag

SEQ ID NO: 923513 - DNA, 618 bp, Homo sapiens
tagctttcaatgtataaatgttgaaaatcttttatacttatccttcagtatttcatatttcttatgctattgtaaatgatattgcttttagcttaatttctaattgttcattgccaatatatagaagtacaattgatttttaccatgttgctcttgtatcctaaaaccttgctaaactcacttatgagttctaatgactttttttaatagattcagtaagattttctgcatagatgatcatgttgtctgtaaataaagataatcttagttcttcctttttctttttcttgccttattactctgactagaactagtacaatgttgagtagaaacaaagagagcggaaattcttgctttttcttggtcttaggtggaaagcwttcagtctttcaccattagctatgtcaatatgttctccatagatgttccatatcagattaaggaagttctttgctgttgttagtttgttgatacttttttttcaatcaggaatttatattggattttgtcagaattcctcaacatcaatagaagttatatttttcttttttagttaaacattgcaaatcacattgattgatatttgaatctaacttcgcattcctaagagaaaagcta

SEQ ID NO: 923514 - DNA, 595 bp, Homo sapiens
gaacatcagaagggacagactccagacgcgccaccttaagagctgtaacactcaccgcgagggtccgcggcttcattcttgaagtcagtgagaccaagaacccacaaattccggacacacttacctcctgcctgggttgccattttcctgttgacagtatcctttgatgcacaaaagtttttgtctattttttgttgttgttgttgttgtgtttttcctgtcatatccaagaaatcacrggcacatccaatgtcatgattttcccctatgtcttcttcagagagattatgggccgggcacagtggctcatgcctataatcccagcactttgggaggccgaggcaggcagatcacctgaggttgggagttcgaaaccagcctggccaacatggtgaaacccatctctactaaaaatacaaaaattagccaggcacggtggggcacacctataatcccagctactcaggaggctgaggcaggagaatcacttgaacccaggaggcgaaggttgcagtgagccgttgcactccagcctggacaacagagtgagaccgtctcaatcaatcaatcaatcaagagatttattattttaact

SEQ ID NO: 923515 - DNA, 568 bp, Homo sapiens
ttggatggggctcaagaggacacatggtcagggcagtgtttggggccaggagtttaagagtttgagaaattatattgaatgagttgtaaccttgtaactgaataagttactacccacttcctgaattagtcattttgcttcctttcttaatgggtttcagacatgtttccctaagcactgccattatttttccttatgatgattagtttgtttgtttgtttgtttattcattttacaattcttctatgttcagttagtgaaaggttgtaagatggataggaacagcaagactcaatgattatttaacaagtaataaactgacagtacagtcaaacaagcttgtcactggaagtcttactctgctatgtgaagttaacatggcagagctmatttatttaattagaagctgtttttactggaagacttccaggaggacagtgggtgtattctatggcgtttcggggctccttcgatttcagaggtctcacagatagaaattaaattgaagaggacaattaaaataaaaccctgtgaactgttacctccttcagtagtgtctgttgactgc

SEQ ID NO: 923516 - DNA, 603 bp, Homo sapiens
ctgggcctgtgctgcttctacacctccctcgccctgacacttccaccaggttgctcctcacctccgtctctgcttttatcctcttactgctcctttcaggaccagcagaaatgtcagcttcccaggaatccttccctggatctctgcagcaagaaatagcttctctgatcactgtagcacttggttctttaatatctttatcttgctctaccttgttatatttttcttgtgaacttaaaattccctgtgaggacgtaaacctttgaaggtatgtctcatatctctgaacctctttaaaatgcctagcatccctgtgtgggtgccaattgcttgtgtattgaattaaattgtgattgttaacttaacatcacargcatgtaacttattaagaatctaagaaagccactaggtttccagttatatggagagaaacgggtaacaagagaatacaagaatattaagcttcatcagattccatgttctgaaggtcaaggtggaaagaaaaccctaacacctcttcgtatttagaaaacaactatgttttttaggcataaaacaaatgcaatttctgaattattttggagttaactgggtatgatcatg

SEQ ID NO: 923517 - DNA, 603 bp, Homo sapiens
ctgggcctgtgctgcttctacacctccctcgccctgacacttccaccaggttgctcctcacctccgtctctgcttttatcctcttactgctcctttcaggaccagcagaaatgtcagcttcccaggaatccttccctggatctctgcagcaagaaatagcttctctgatcactgtagcacttggttctttaatatctttatcttgctctaccttgttatatttttcttgtgaacttaaaattccctgtgaggacgtaaacctttgaaggtatgtctcatatctctgaacctctttaaaatgcctagcatccctgtgtgggtgccaattgcttgtgtattgaattaaattgtgattgttaacttaacatcacaggcatgtaacttattaagaatctaagaaagccactaggtttccagttatatggagagaaacgggtaacaagakaatacaagaatattaagcttcatcagattccatgttctgaaggtcaaggtggaaagaaaaccctaacacctcttcgtatttagaaaacaactatgttttttaggcataaaacaaatgcaatttctgaattattttggagttaactgggtatgatcatg

SEQ ID NO: 923518 - DNA, 493 bp, Homo sapiens
aagggcatttgagaggtcccctaaccaccactcctcctcagcttcttccatatcctgcttgctcccttggctcctgcaagttggttctgttgcccgtgttcccaccatcccctctctgtgcctttgcacgggctgttccctctgcctggaatgactaccctcttctccatgaagccatgtcccaggagtcctgaagacccagactaactcctgcctcctgctgaaggcttccgagctgtctgaagcctcctgagttcttccttccttaactcctgtggtttataccaagcaacctcactcctgccatctttgagtgtgtgtgtgtgtgkgtgtgtgtgtgtgtgtatctacacgtagaggctcaatgaatgctgcactcctgtgatttcttggacaacagtcccatctcctccactgggtagaaaggaccccatccatcaggagccacatcttatccatctcccttgtccccacccctgcaggaaacagcaga

SEQ ID NO: 923519 - DNA, 649 bp, Homo sapiens
cacgactacttcgagttcttcgccgccgacctgagtctttatcctcatctctactcaagagcatacattaattttaggaatcctgatgacatccttctttttagagatcgttttgatgggatatatcttccttgacagcaaagatccagaatataagaagtttttagaaacctactgtgtggaggaagagaaggccagtgccaaccctgagactctgctgggggagatggaggcgaagacaagagagctcattgctagaagaaccacacctcttttggaatatattaaaaatagaaaattagaaaagcagagaattcgagaagagaagcgagaagaacggaggaggagagagttagaaaakaaacgtttgcgggaagaggaaaaaagaagaagaagagaagaagaaagatgcaaaaaaaaaaagagagacagataaacagaagaaaattgcagagaaagaagtaaggattaagcttcttaagaaaccagaaaagggagaggaaccaaccacagagaaaccaaaagaaagaggagaggagattgatactggaggtggcaagcaggaatcctgtgcccccggtgcagtcgtaaaagccaggcccgtggaaggctcgctggaggagccccaggagacgtcacacagcggcag

SEQ ID NO: 923520 - DNA, 676 bp, Homo sapiens
ggaggaggatgagggatgagaaactacctactgaggtacaatgtgtactactcgggtgataggcacactaaaatcccagacttcaccaccatacaattcatccatttaaccaaaaaccacttgtatacctaaagctatgaaattaaaaaaaagttttcaaaaagaataaaactgtataaattttttgaaaattactttgggtttagaaaagtgaccagttcatgctctgttgcttgaactataaattaacacaaacattcttgtgaaaaattaagaaatrttgatcagaggtctttttaaaaagttcctatatttcaaccaataattctatattggagaatttattcaaagcaaacagtttaggaatgtagaaaaacatttatataaaaaatgttctgggctgggcatgatggctcatgtctgtcatactaatgatttgggaggccaattttgcagaagtaatgcttgaggttgggaattggagatcatcctgagcaacatagtgataccccgtctctacaaaacacttaaaaagttagccaagcatgagaatgtgcacctggagtcccaactacttaggacgctgaggcaggaggatggagttcaaggctgcagggaggtatgatcacaccagtgaactccagttccaggcacagagaccctgtgtctacaaata

SEQ ID NO: 923521 - DNA, 577 bp, Homo sapiens
tttcacttaaactgctgtcatcatctccttgtagcagaccacaagttactaaattagccttctcaaacactggtgtaatcagagattattttagagattattttgaggtacattttttattttcatttttctttacttccttcatatgtaacgcagaaccacaactttaaaaaatctacaaaargccaatgttttataataattctactgataacaaataaaaaaaattttgtaaaattccaattcttccccatctcaattcattaattcaaaaaacacagttatgaattatcaacaacatataaagaaatatatatttcctgcctcaaaaaccaggtaatatgcaattatgatacaatgtgtagtttaagagttgatatatggaaagttatattttagcacaaggaagtcattacagaagaggcaaaatataagaggagctcaccagggaaaaaatagagaaaactactccacttggagaatggaatgacagcacaaagattagtcccatggagtctaggtgtttcctaggaacttgaaaggaaaagtgtaaaacacaaagaaagtaagaatggaa

SEQ ID NO: 923522 - DNA, 564 bp, Homo sapiens
tggtaggtcatgtgccactctagtccactgtctctgggcctagttcagcaataagactcactgtgagttgcagtccttatggcctagactgcctttcaagtttatatagatcacagagcactttagcttgtggtggtgaggtctgtgggaactcaagtttggaccacrgggtttggtgatttccctctggctagggctgattaaaatgccccctccatgggtgagcaatagctgagtttggttctattttcctttctactctaacaggacagcactaagtttaatgcctcacaattactgtgttctccctccccagcacccagagttgctctctgtaccatgcctctactgctaaggttggagggggctgaggttggggtgatgttgacaattcaagactgtttttctctatctcttcaatgcctcttttagtgataatggagttaaaactaggtactatgaaggctcacctgatttttggttctcatgaaagtgtttcttccgtgtagatagatcctccattggtggcctgtggagaggatatttggtggagttttctattct

SEQ ID NO: 923523 - DNA, 564 bp, Homo sapiens
tggtaggtcatgtgccactctagtccactgtctctgggcctagttcagcaataagactcactgtgagttgcagtccttatggcctagactgcctttcaagtttatatagatcacagagcactttagcttgtggtggtgaggtctgtgggaactcaagtttggaccacggggtttggtgatttccctctggctagggctgattwaaatgccccctccatgggtgagcaatagctgagtttggttctattttcctttctactctaacaggacagcactaagtttaatgcctcacaattactgtgttctccctccccagcacccagagttgctctctgtaccatgcctctactgctaaggttggagggggctgaggttggggtgatgttgacaattcaagactgtttttctctatctcttcaatgcctcttttagtgataatggagttaaaactaggtactatgaaggctcacctgatttttggttctcatgaaagtgtttcttccgtgtagatagatcctccattggtggcctgtggagaggatatttggtggagttttctattct

SEQ ID NO: 923524 - DNA, 550 bp, Homo sapiens; identical to SEQ ID NO: 921247

SEQ ID NO: 923525 - DNA, 745 bp, Homo sapiens
gtagtggcctggcagagcccccatgagctggtggtggtgctgcagggagaggctcctctgcctgtggaaagaggtaggaagagcaggaaggagtttgtcttgtggtttgcgtgccagcttagctgcagcagaatagaacattaggtaaatttccaagattttttactctaacccttcgattcaacacagcaactcttsacttgcctggggcctaggggaactcgccaccttgaagggaaggacaccaacctggctggttttgctacctgctgatcatagagccctagagccctgagtgaacatgggtggtagctaggtagtggttcaagtcgggtgggagagacccagtgctgtgttggcttcaggtctgacccagcacagtcccaatagtagtgaccacaggggtgtttgcattaccatattcccagttccaagcagctcagcacagagtgagagattccatttgtttgggagaaagtaagggaagagaacaagagtctccgcctggtaatccagagaattcttctgaatcttatccaagaccaccaaggcagtacctttatgagtctgcaagaaccacagcattattgggctttggacctacatccctttgcatatctggaaatccttcccaagaaggacaagcacaaacaagcccaaacttcaaagactacaataaatacctcatttatcaatgcccagacaaaaactaacatctacaagcatcaagacaatacaggaaaat

SEQ ID NO: 923526 - DNA, 703 bp, Homo sapiens
tcccatccaagggccaagtcctggaatctcaggccccccaccccaagagtctgcttggtgctctaacacactgtggctaaggtgatacctgaagccagcaaatctcagagcctcacccaaggaccttgacatagtacttgggtatcactgctggttgtttagggtccaagagctcttcagttagcaggtgacaagtcctgcccggactgggtccttcccttcaaggcagcaggttcctttctggcccagggcatgtctagaaatgttgtctgagagctaggacctggaaacaggaccttgcaactctaaccactgccccatcctgctgtggctgagctggtatccaagatgcaatgcagagtcctccccactctttcctctccattccttaagtggaagtaaggggtatcttttgggtaatgagctgtgcagcctggggttagggaaggggtaataccagcattgttctggctggtgtctcagtaggtcatgtgccccactstcgaagtccagtgtctctgggtccagtacagcactaggactcatgtaaaagtcgccgtccttgtggcctagactgcctttcaagtttattagcaccccagagcactttagcctgaggtggcaaggcttgtgggggaagtcaggttctaactgctaggatcaggggttcccctctggctagggctggtttaaatgcttcctc

SEQ ID NO: 923527 - DNA, 474 bp, Homo sapiens
agggtgctgggatcacaggcatgagccactgcacccggtcttgatttcttatttttacaaagagactaaagatacttggatctgtaaataaacattttttttatcacactgaaaaattgtattatgaagaggcatatacgaattatgaaatgatgtattcataaactgctagcctgctayggaatgttggaatatgacagacaattcacaattgtctacttttcactactgtctagttttctctataaaaggaaggttactaatgataaaaattaattataactaatataagtaaattaaactactaaaaataataacagtgaagggaaacaaacacaaggaaggggctgggcatagtggctcatgcctgtaatcctagcactttgggaggctgaggccagagactcacttgagtccaggagttcaagaccagcctgggcaacacagcaagaccctacctcttaaaaaagaaaa

SEQ ID NO: 923528 - DNA, 590 bp, Homo sapiens
gagggggggaaaccctggagcgcgggagaccaagggggaaagagaaaaggcttctcaccgtggggtctcatccatggaaacatgaggctgggagacgagttttgatttaagtggccttgtccttcgctactgttagtgttggcggaggatttacagtcgggatattgcaccacgctcgmctcttgctgagccccataaagggactgtctggggagcgcctcgtagccatagaatttggaggcgtctccgtggcagctaagcgagcacgggttctgctggtagcctgagttggagatgccggaggtgccgtggtggaagaagtcttgaacgtggtgcgaagcgtgctggaagccgggcgccgagccgccgggcccgtacaccagcgcatggctcctgcccacgctctgagggaaccggcagtcgtaataggccggttccagggactcgccggctttgtatttggagaacagggggttgacgaagtaggagctcatgctgggtacatgaaaacccgcggccccctcccctctggctcacgagtaccccgcccagtacccccgaaactcccctccccccgggaccgaacccca

SEQ ID NO: 923529 - DNA, 566 bp, Homo sapiens
gagtcaggaatccaggctctgtctacattgtggcatctccaatcctggcttttatttccaaggtcacttcagagtctgagatggtgctggggttccagccatttaatctataccccacatagcagcaaggaggagtggggacacacatgcccctttcaaagatactactcagaagttgcatacaccaccccagcttggattctagcagccagagcttaagtcacatgaccacatctgcaaaagaggctgggaaaagttgttcttattccaggcagccacatgcccagcttaaccttgcggattttatgaatcacgacaaaggggagaatggatacttgtggacaattgttgatctctgccacgtagtscttccatagctccttactgcacttgaaataaaacccaaactctttcctatgcctgcaaggtcctggctgttttcccaccctctctcttcactcatcctgcttcaggcctgctggcctcttcccggtttctcaaagaccatagttgtttcccatccagggctatctgtccacgctgtttcctggttggaatgccttcac

SEQ ID NO: 923530 - DNA, 661 bp, Homo sapiens
gtatatacccagagaaataaaaatcattctaccataaagagcaagatgcacatgaatgttcattgcagcattattcacaataacaaagatacggaattggaatcaacctaaacatccatcagtgacagagtggataaagaaaatggtgycacagatacaccatagaatactattgcagccataaaaaagaatgagatcatgtcttttgtgggaacatggatggagctggaggccattatctttagcaaactaatacagcaacagaaaaccaaataccacatgttctcacttataagtgggagctaaatgatgagaactcacgaatacgagaagggaacaacagacactggggcctacttgagggtagaggttgggagaagggagatgagtaaaaaaaaaataactattgggtactaggcttagtacctaggtgatgaaataatttgtacaacaaacccccatggcacaagttattacctaaataacaaacctgtatatgtattcccagatctgaaagaaaaaaaaagccactaaaaaagtaaataaagtttctgcacagaaaagaaaacaaaagagtaaagagataatctgcagaatgggagaaaatatttgcaaattatttatccagtaagagattaatatccagaatatataaagagct

SEQ ID NO: 923531 - DNA, 661 bp, Homo sapiens
gtatatacccagagaaataaaaatcattctaccataaagagcaagatgcacatgaatgttcattgcagcattattcacaataacaaagatacggaattggaatcaacctaaacatccatcagtgacagagtggataaagaaaatggtgccacagatacaccatagaatactattgcagccataaaaaagaatgagatcatgtcttttgtgggaacatggatggagctggaggccattatctttagcaaactaatacagcaacagaaaaccaaataccacatgttctcacttataagtgggagctaaatgatgagaactcacgaatacgagaagggaacaacagacactggggcctacttgagggtagaggttgggagaagggagatgagtraaaaaaaaataactattgggtactaggcttagtacctaggtgatgaaataatttgtacaacaaacccccatggcacaagttattacctaaataacaaacctgtatatgtattcccagatctgaaagaaaaaaaaagccactaaaaaagtaaataaagtttctgcacagaaaagaaaacaaaagagtaaagagataatctgcagaatgggagaaaatatttgcaaattatttatccagtaagagattaatatccagaatatataaagagct

SEQ ID NO: 923532 - DNA, 686 bp, Homo sapiens
gggaagcagcttgcagtgcacatggtccagccacaacctaaatgagccagcacccatgccagcacccaaagctgcccaccctgctgcagcagccagcatgtctcactgcacagtggctggaccccacactcactcacacatccctcactactccatgcctgacatgccctttacaggcctaggatccaggccagtagcatgaaccaagcacagcctgccaggctgagtaagtggaacgagcccaattggcccaagcaaaactcaggcaaatgcaccaccagccacagaggtktccagacaagcaacaccccaaagaccacataacaatgtgatagtatttggaggtagggcctttgggaagttattaagttatgagggcagagctctcatggatgggattaagaaccttagagaagaggtcccagagagcttccttgcctcttccactgtgtgaggacacagcaaaaagaagatgcctatgaaccaaagaatgggttcttaccagacacagaatctactggtgccttgatatcgattttggagccaagatggccgaataggaacagctctggtctacagctcccagcatgagcgacgcagaagacggtgatttctgcatttccatctgaggtactgggttcatctcaccagggagtgccagacagtgggcgcaggtcagtggttgt

SEQ ID NO: 923533 - DNA, 812 bp, Homo sapiens
gagggcagagctctcatggatgggattaagaaccttagagaagaggtcccagagagcttccttgcctcttccactgtgtgaggacacagcaaaaagaagatgcctatgaaccaaagaatgggttcttaccagacacagaatctactggtgccttgatatcgattttggagccaagatggccgaataggaacagctctggtctacagctcccagcatgagcgacgcagaagacggtgatttctgcatttccatctgaggtactgggttcatctcaccagggagtgccagacagtgggcgcaggtcagtggttgtgcgcaccgtgctcgagccgaagcagggcgaggcattgcctcacttgggaagckcaaggggtcagggagttccctttcctagtcaaagaaagaggtgacagaccgcacctggaaaatcggttcactccaacccgaatactgcgcttttccgacaggcttcaaaaacggcgcaccgcgagattatatcccccacctggttcagaggttcctacgcccagggagtctcgctgactgctagcacagcagtctgagatcaaactgcaaggcggcagcgaggctgggggaggggcgcccaccattgcccaggcttgattaggtaaacaaagcagccaggaatctcgaattgggtggagcccaccacagctcaaggaggcctgcctgcctctgtaggctccacctctgggggcagggcacagacaaacaaaaagacagcagtaacctctgcagacttaaatgtccctgtctgacagctttgaagagagcagtggtacccccagcac

SEQ ID NO: 923534 - DNA, 812 bp, Homo sapiens
gagggcagagctctcatggatgggattaagaaccttagagaagaggtcccagagagcttccttgcctcttccactgtgtgaggacacagcaaaaagaagatgcctatgaaccaaagaatgggttcttaccagacacagaatctactggtgccttgatatcgattttggagccaagatggccgaataggaacagctctggtctacagctcccagcatgagcgacgcagaagacggtgatttctgcatttccatctgaggtactgggttcatctcaccagggagtgccagacagtgggcgcaggtcagtggttgtgcgcaccgtgctcgagccgaagcagggcgaggcattgcctcacttgggaagctcaaggggtcagggagttccctttcctagtcaaagaaagaggtgacagaccgcacctggaaaatcggttcactccaacccgaatactgcgcttttccgacaggcttcaaaaacggcgcaccgcgagattatatcccccacctggttcagaggttcctacgcccagggagtctcgctgaytgctagcacagcagtctgagatcaaactgcaaggcggcagcgaggctgggggaggggcgcccaccattgcccaggcttgattaggtaaacaaagcagccaggaatctcgaattgggtggagcccaccacagctcaaggaggcctgcctgcctctgtaggctccacctctgggggcagggcacagacaaacaaaaagacagcagtaacctctgcagacttaaatgtccctgtctgacagctttgaagagagcagtggtacccccagcac

SEQ ID NO: 923535 - DNA, 646 bp, Homo sapiens
atgctgaagaaaggaatgtgatcgtttgttttggagccatgtaaacgaaatgaacactcttacagatagagagtagaagctaagagccctctttaaaactgctcaccgtggtgactcgtaaagacacaagcacttttgtgtaggargagggaaaagaactgttagataatgctttctttctttgagactgcagaatggattaaaattattaagatttaaagaaaataattgtgttaggatgattatcattgctgtctttcttttctcagagctttgatatcacagcttttcgatctaatttgccttcagtattgtgttctcacctgttatgctacttttctggtttaggatttttcttgcttaagaaatcaaaccaaataatctttgcttttgtgtgggtaacatggttgttttgtttcccattttgtaccccctactatctcaaatgatggatgttaagtatgaatccccttcttatatgccattattttaatgtaattatgctttacattactctcagtttaacgcttctaaactttcaatgcaaaggccatgtagttggattaatatgtatttcctcctcccccaagggttaaacattattctctaaaaataattggttgaactttagagttatgtaatttgt

SEQ ID NO: 923536 - DNA, 601 bp, Homo sapiens
cctattacttcttgacaccctttccatattgcctgagttgtagaacaagtatttatgtcgttcttaatactgtgtgttttttaagcacagggtggatagtcatgaaaaagtccggtatcataagtgaactttagaaaggagatgaattgtctgaaccgggtcatgtgggcaagtttccagccgtcctgctgatttacatgcatctatgcatgaaatcaaccagcacacacttaggactccatggggtgtgtcaggatatgtgtcatttgaggatttacacagcatttacctcggtcccagttctcaaacattttggtcatagtacccgctggactcckaaagtactttgagagcttttgtctttgtgagatatcttgatatttactatattagagattaaaacaattttaaagaatattaatcagtaaacctattttgtgtttatttttataaaaaatatatttccaaaacgaaaaattaggaaagtacattattttacattttggcaaatcttcttaatgtctagcctaataggagatagctggaatttctttcttttttttttgacacggagtctcgccctgtcgcccaggctggagtg

SEQ ID NO: 923537 - DNA, 605 bp, Homo sapiens
caattatgcattctggcaccggggaaatgaccacaggatgagtccagggacccactgaacccactgtaagtcagacctgagctaaaactccattaattacttggcctccataagctcctactttaactgggggaccacaatgatgttttgggtcccctggaatcaatgtcagctcagagccagcgtccagtggtcccccaaatgtctggtcatttccctttctgcaatgcacagtcacactggtaaaaggctggaggtctctctggggaaggatgggagaaagatccactgcataaattgytggtaatgtagtggggtcctccctcaaggagacccgacctcccctttattcaagggattctgggtccgtaaactggctcaagtctggaaattgaggggccgtgattctctgtttttataattcaaattagccttttgtctattcgacctagaagttttccacttgtataaattaagtaggaatgcagtaggctccctatcaatttcacttctaggaataccatgattaattagccaatgccagagctctacaccagactattctgattgtgactttgcctctgctgtccattacagtagatatt

SEQ ID NO: 923538 - DNA, 605 bp, Homo sapiens
caattatgcattctggcaccggggaaatgaccacaggatgagtccagggacccactgaacccactgtaagtcagacctgagctaaaactccattaattacttggcctccataagctcctactttaactgggggaccacaatgatgttttgggtcccctggaatcaatgtcagctcagagccagcgtccagtggtcccccaaatgtctggtcatttccctttctgcaatgcacagtcacactggtaaaaggctggaggtctctctggggaaggatgggagaaagatccactgcataaattgttggtaatgtagtggggtcctccctcaaggagacccgacctcccctttattcaagggattctgggtcygtaaactggctcaagtctggaaattgaggggccgtgattctctgtttttataattcaaattagccttttgtctattcgacctagaagttttccacttgtataaattaagtaggaatgcagtaggctccctatcaatttcacttctaggaataccatgattaattagccaatgccagagctctacaccagactattctgattgtgactttgcctctgctgtccattacagtagatatt

SEQ ID NO: 923539 - DNA, 646 bp, Homo sapiens
ctcagagccagcgtccagtggtcccccaaatgtctggtcatttccctttctgcaatgcacagtcacactggtaaaaggctggaggtctctctggggaaggatgggagaaagatccactgcataaattgttggtaatgtagtggggtcctccctcaaggagacccgacctcccctttattcaagggattctgggtccgtaaactggctcaagtctggaaattgaggggccgtgattctctgtttttataattcaaattagccttttgtctattcgacctagaagttttccacttgtataaattaagtaggaatgcagtaggctccctatcaatttcacttctaggaataccatgattaattagccaatgccagagctctacaccagactattctgattgtgactttgcctctgctgtccaytacagtagatattcccaccttgcctttgatggttgagtgccactacttggtccctgccacctcaggatccaattattcccattgtatttaaattttgtagttgagtgactgcagttcccaccattagctctgacatacagagaagagcaattatagggctcttcaaagatgcaggtgctgccctcacaaatctatttctaaatgcattggtcaagggtatttggac

SEQ ID NO: 923540 - DNA, 583 bp, Homo sapiens
agtctatggcataggttaaccatttgagctctgaatttttcttgtaatttgcctatcagtttaaaatgtacacaaaaatgagccataatatgtaatcagctatagtttcaaagggaacaacaaaattagaagataggatgttcgaaaccgttttttcttttcttttctttttttttttttaaatacagagatggggtttcactatgttgcccaggctggtctcaaattcctgggctcaagcgatccacctaccttggcctcccaaagtgctaggattacagggatgagccaacatgcccggcctgtttttccctttaagtctgagcycctggattgaacagaaaaagagaaaaagaaaagaaaggaatgcagaggaaaagattaagctttataggagggcttgtgagcctttcagccactgcatgatgtggggccagcacccctgccatccttgtttatctcgtgtcacagagaaccttagcaccccagacctacacagtgtggaacaaattccttccacccctgcaagtcactagttaaggtgagctgtttacagggggagtagagagccccttcagctcaa

SEQ ID NO: 923541 - DNA, 587 bp, Homo sapiens
agggacagaactaatggaatatatatatgagtttattcagtattaactcacacaattaccagctcccacagtaggccgtctgcaggctgaggagcaaagagagccagttggagttccaaagctgaagaacttggagtccgatgtttgagggcaggaagcatccagtaggggagaaagatgtaggctgggaggctaggccagtctctcttttcccatttttctgcctgctttttattctagccatgctggcagctaattagattgtgctcacccggattgagggtggatctgcctttcccarccccactgactcaaatgttaatctcctttggcaataccctcacagacacacccaggataaatacttcatatccttcaatcaagttgacacccagtattaacaatcacactcatttggacaagaatctccttccaagcttactcacatagttgttgggagaatttggtccctcaagggccattggactgaagcctcccttatttccttgccatatgggcctttccacagcaactcttcctcagggcaagcatatgacaagagccagagagagttccagtaagacaaa

SEQ ID NO: 923542 - DNA, 638 bp, Homo sapiens
gtcaatctaaccaacattatctttagccaagtcattgataatgtggattatggcaggaccaagctgaaaaattcatagtgccagccctggagcagttcacaggtggccaaggccccagggtgctctgtgggtccttaggaccaataactggccagaagcccagggatcctggcctcaggrgatgtgcaagggactctcgaggagaaatgagccctttgtggccatcttgcccagcgccttctctgcaggaatgtagcagctcctctcctgatagaaagatccctcctttccagagatgtcctcagactgaagagtggggcttctcatgatctgcttctagagaagccctttgagcaatgccaggctcctagtgtaggctttcttgattcgttgttgagaaagggagagaagaggcatggtcttgccaccaggagctgggagggggcaatcaaggcccttggctacccctgtgaatgtgaccacagggctggcccaggatggaataaaaacagccagagagggcttggggcagtcattaagcagtgcccaggccctggggatggtatcaagggtgactgaggcttatgcctgactcaggggcccaggaagaacaaggttcttgggccagaaaggccaca

SEQ ID NO: 923543 - DNA, 754 bp, Homo sapiens
aagtcaagcatttcttcatttattcaaaataggaaggcagcgtggtggagtgattacaaattctagagcaggccgggcgtggtggcacacacctgtgatcccagccgaggcgggcggatcacttgaggtcaggagttcaagaccagactggccaacatggtcaaaccctgtctctactaaaaatacaaaaattagctgggcattgtgacgtgcctgtaatcccagctactctggaagctgaggcaggagaatcgcttgaaccccagaggtggaggttgcagtgagccaggatygcaccactgcactccagcctaggcgacagagcgagactgtctcaaaacaaaaacaaactctagagcagcgattaccaacggggtgattttactcctcgcctcagagtctggagacatttttggtggtcacagttggggaggccaggtgatacatctactaggtagagaccagagatgctgctaaatagcctacaatgcacaggacagcccccaccacaaagaactatccagcccaaaatgtcaatcatgccgaggttgagaatccctgctctagagccagactgctcaggttcaaatcccggcttcactgcttactagccatacgaccttaggcaagttacgagaccactctatgcctcagttttcccacctgtgcaatggagacaagcatagtacctgccttgcaaagttgttgtattaaatgagctgctacaggtgaggtgatcagcacgtggcaagtg

SEQ ID NO: 923544 - DNA, 616 bp, Homo sapiens
tgcataagtgacaaggagccaaatgttaatccccaaggacaatgagaaatatgtctccatggcatgtcagaagtcttcagggaagctcctcctatcacaggcctgggggcctaggaggaaaaagtggttttgggggctggaacccagggtccctstgctatgtgcagcctaggcttggtgccctgcatcccagccacttcagccatggccgaaaggggccaatgtagaggttgggctgtggcttcagagggtgcaaattgcaagccttggcagcttccacatggtgttgttcctgccagtgcacagaagtcaagtattgggtttgtgaacctctgcctagatttcagaagatgtatggaaatccctgatgcttaggcagaattttgctgcaggggcggagccctcatggagaacctctgctaggacagtgtggaagggaaatgtgggatcagaacccctacagagtccttacttgggaaccaccacctagtggagctgtgagaagaaggccactgtcctccagacctcagaatggtagatccactgacagcttgcactgtgcacctagaaaaaccacagacactcaatgccagcttgtgaaagcagccaggaaggg

SEQ ID NO: 923545 - DNA, 606 bp, Homo sapiens
tttgcataagtgacaaggagccaaatgttaatccccaaggacaatgagaaatatgtctccatggcatgtcagaagtcttcagggaagctcctcctatcacaggcctgggggcctaggaggaaaaagtggttttgggggctggaacccagggtccctgtgctatgtgcagcctaggcttggtgccctgcatcccagccacttcagccatggccraaaggggccaatgtagaggttgggctgtggcttcagagggtgcaaattgcaagccttggcagcttccacatggtgttgttcctgccagtgcacagaagtcaagtattgggtttgtgaacctctgcctagatttcagaagatgtatggaaatccctgatgcttaggcagaattttgctgcaggggcggagccctcatggagaacctctgctaggacagtgtggaagggaaatgtgggatcagaacccctacagagtccttacttgggaaccaccacctagtggagctgtgagaagaaggccactgtcctccagacctcagaatggtagatccactgacagcttgcactgtgcacctagaaaaaccacagacactcaatgccagcttgtgaaagc

SEQ ID NO: 923546 - DNA, 616 bp, Homo sapiens
tgcataagtgacaaggagccaaatgttaatccccaaggacaatgagaaatatgtctccatggcatgtcagaagtcttcagggaagctcctcctatcacaggcctgggggcctaggaggaaaaagtggttttgggggctggaacccagggtccctgtgctatgtgcagcctaggcttggtgccctgcatcccagccacttcagccatggccgaaaggggccaatgtagaggttgggctgtggcttcagagggtgcaaattgcaagccttggcagcttccacatggtgttgttcctgccagtgcacagaagtcaagtattgggtttgtgaacctctgcctagatttcagaagatgtatggaaatccctgatgcttaggcagaattttgctgcaggggcrgagccctcatggagaacctctgctaggacagtgtggaagggaaatgtgggatcagaacccctacagagtccttacttgggaaccaccacctagtggagctgtgagaagaaggccactgtcctccagacctcagaatggtagatccactgacagcttgcactgtgcacctagaaaaaccacagacactcaatgccagcttgtgaaagcagccaggaaggg

SEQ ID NO: 923547 - DNA, 715 bp, Homo sapiens
tccatattttccctcctagatcaaattggccttatcatttggacattgtcaggatggatattgtttatgccaccttatgtgaatgaaaatttgctatctaggcaaggcgtggtggctcatgcctgtaatcccagcactttgggaggccgaggtgggcaggtcaccagagctcaggagttcaagaccagcctggccaacatggcaaaacctcgcctctactaaaaatacaaaaattagttgggtgtggtggtgggtacctgtaatcccagctacttgggaggctgaggcaagggcatcacttgaactcgggaggcagaggttgcagtgagctgagatcataccactgcaatccaggctgggcaatggagcaagactccatctcaaaaaaaaaaaaaaaattwaaaaaaaaaaaaaaggccaggtgcggtggttcacgtctataatcccagcaatttgggaggctgaggcgggcagatcatctgaggtcaggagttcgagaccagcctggccaacatggtgaaaccctgtgtctactaaaaatacacaaattagccaggcatggtgggaggtgcctgtaatcccagcttctccggaggctgaggcaggagaattgcttgaacctgggaggcagaggttgcagtgagccaagattgcgccattgtactccagcctgggtgacgagcaaaattccatctcaaaaaagaagaaaatttgt

SEQ ID NO: 923548 - DNA, 715 bp, Homo sapiens
tccatattttccctcctagatcaaattggccttatcatttggacattgtcaggatggatattgtttatgccaccttatgtgaatgaaaatttgctatctaggcaaggcgtggtggctcatgcctgtaatcccagcactttgggaggccgaggtgggcaggtcaccagagctcaggagttcaagaccagcctggccaacatggcaaaacctcgcctctactaaaaatacaaaaattagttgggtgtggtggtgggtacctgtaatcccagctacttgggaggctgaggcaagggcatcacttgaactcgggaggcagaggttgcagtgagctgagatcataccactgcaatccaggctgggcaatggagcaagactccatctcaaaaaaaaaaaaaaaattaaaaaaaaaaaaaaaggccaggtgcggtggttcacgtctataatcccagcaatttgggaggctgaggcrggcagatcatctgaggtcaggagttcgagaccagcctggccaacatggtgaaaccctgtgtctactaaaaatacacaaattagccaggcatggtgggaggtgcctgtaatcccagcttctccggaggctgaggcaggagaattgcttgaacctgggaggcagaggttgcagtgagccaagattgcgccattgtactccagcctgggtgacgagcaaaattccatctcaaaaaagaagaaaatttgt

SEQ ID NO: 923549 - DNA, 734 bp, Homo sapiens
caagttttttggggggtctgaagaaactccccaggcctccccaaacaaatttatgggggtctgaaggaactccccaaacctccatgatttagcaggagacaagtcctggacctatttagattaagtatatttactgaggctccagagaaaggtcttcgagactcagacctcagttacatattaaaakaatttaatcacttatgtctttagatgaatgcgcacttacacctagacatataacttagaaggtatataagctctggaaaactttataattttgagttagtctggggagaatttctgggccttcttcctacaaccagttacagaaataaaaactcccttttctcccagttcatgtgtatctcgttagtattagaaaaataatgaataagcagcttattagaataagcagcctgaccctcagtttagttcaggaacaagactatgagaggatctttgagttgtccagcctgtgttttctgagcatgcaaagatacacacagtggtcttagcatcccaaaggagcaggggtgatttgtttgggagttgcctggaactgccttggcatgcgtttttctaagggagacttcttgggaaaggaaagggtatctctgcccctctagtagatggagagcctgtggtgctccctcctgaactctaaggccatggcaagaggacactctgggctagaatcatggtcaaaggcatgggtaaagtacagtgccaaacaa

SEQ ID NO: 923550 - DNA, 562 bp, Homo sapiens
gagtgttacagcatgctaacagacctttcagtcccaccatctgcagcctgatgatcagagggtgtgtggcacccagcagctccctctcccattgctcagcaactgggaaggagagtgctacagggttacaactttgtttgctcttgctgatcagcaggtcttgagttcttgtcccatgtccaagaagaatgaggttatgctgacagccaacaggtgagcaaggcaaaaagttttattgagtgacaaaacagctttcagtggagagsgggacccgagttggtctgcccccttacccaaaataaggtagtctccacccccactcaaaatcaggtagtcccaaagcttgcctgagtctggggcttttatgggcacagaatgggggagtgcatgctggttggtttgtgagtatgcaaaaaaggcaccactcaaagatgggcacaatagtgtaaaaaaccaattagggaagggtagtaatatgtaaaataggtgaagggtggggatcaatcagagaaaagcacaccaaatgggaagagaggttctcaatctagtctgtggatttatc

SEQ ID NO: 923551 - DNA, 632 bp, Homo sapiens
gggaacatttaaaccaggcctagccagaggcaaatcaccaatcccagtcatccaaacttaagttcccacaaacctcaccatcaagggctataatagtgctctgtgtctccaagtgaacttgaaaggcagtctaggccataaggactgcaaatcttaggtgagtcctagtgctgaactagacccagagacagtgmactggggggcacgtgacacactgagataccagttggggcaggcaagggagtgctggcaactttcattcccaagcccctcagcgtgggtctccttccttcaacttgaggagaggagagaaagaatggtgagaattttgtattgcacctaggatactagttcagccacagcagggtagggcactggtcaaatatgaggccaccattccaggcctgagctcccagataagttttgtagacacagcctgggtgagaagggaacatgctgccttgaaggaaaggacccagacctggcagcatttattacctgctcactgaacagccgttgggccccaaagaaccaatagcaatacccaggtactatatcaagggccttgggtgagcttaagaagtttgctagcttcaagtactagcatagccacagagggttaaagaactaaa

SEQ ID NO: 923552 - DNA, 632 bp, Homo sapiens
gggaacatttaaaccaggcctagccagaggcaaatcaccaatcccagtcatccaaacttaagttcccacaaacctcaccatcaagggctataatagtgctctgtgtctccaagtgaacttgaaaggcagtctaggccataaggactgcaaatcttaggtgagtcctagtgctgaactagacccagagacagtgcactggggggcacgtgacacactgagataccagttggggcaggcaagggagtgytggcaactttcattcccaagcccctcagcgtgggtctccttccttcaacttgaggagaggagagaaagaatggtgagaattttgtattgcacctaggatactagttcagccacagcagggtagggcactggtcaaatatgaggccaccattccaggcctgagctcccagataagttttgtagacacagcctgggtgagaagggaacatgctgccttgaaggaaaggacccagacctggcagcatttattacctgctcactgaacagccgttgggccccaaagaaccaatagcaatacccaggtactatatcaagggccttgggtgagcttaagaagtttgctagcttcaagtactagcatagccacagagggttaaagaactaaa

SEQ ID NO: 923553 - DNA, 586 bp, Homo sapiens
tcctgattttttaatggttgccattctaactagcgtgagatggcatctcattgaggttttgatttgcatttctctaatggccagtgatgatgaactttttttcatatgtttgtgatatatagaccaatggaacagaacagagacctcagaaataacaccacacatctctaacgatctgatcttcgacaaacctgataaaaacaagcaatggaaaaagcattccctgtttaataaatggttctgggaaaactggtaagtcatatgcagaaaacagaaactggaccccttccttacactgtatacaaaaattaactcragatgaattaaagacttaaatgtaaaacccaaaaccataaaaaaccctggaagaaaacgtaggcaatacaattcaggacatacgcatggccaaagacttcatggctgaaacaccaaaagcaattgtaacaaaagccaaaattgacaaatgggatctaatcaaactaatgaccttctgcacagcaaaagaaactatcctcagagtgaataggcaacctacagaatgggagaaaatttttgcaagctacccatctgacaaaggtctgatatc

SEQ ID NO: 923554 - DNA, 577 bp, Homo sapiens
gccactacaaaaacacacttaagtgcatgggtcagtgacactataaagcaaccacacaaacaagtgtgcataataacaagctaactaaatgatgacaggatcaaatctacacctgtcaatactaaccttgaatataaatgggctaaatgtcccaattaaaggacacagagtggaaagttgggtaaggaagaatttttcctraatctcgatgatctttgttctattcatgttctgaattctatttctgtcatctcagccatttcagcctggctaagaaccacactgggaactagcatggtggtttggaggtaagaagccagtttggctttttgtgtagccagagttctttctctgattctctctctctctctctctgtctctctgtctctctccctctctctctggctcatgatccttcaatctttgaaattgctgtcctttgggtgtattttatttttcttttatctttgatgttcttgggggtttgtttgttttatatggtgggttcaatcaattggttgcgtttctggaagatttttgggggccaaggcttagctcagtactcttgggctgtgtg

SEQ ID NO: 923555 - DNA, 516 bp, Homo sapiens
ttcaatagtcaggtccatcttctgtagggctgctgtggtttgctaggggttcacttcaagccctattcatctggttctctcaaacacctggagatgtcacttaaggaggctgaagaacagcaaagatgggtgcctgcttattactctgggatctctgacttcaaggggcacagatctgatgccagtaggaatgctcctgcgtaggatgtctgacaacccctgttrgggacgtctcaccaagctgagaagcatgcgaagtaggtcccatttaacaagacactttggctgtcccttggtggaggggttgtgctgtgctcagggaaactcacttgtctgggctgcccagattcctcagagctagcagggggaaagactacatctgctggtctgcagagactacagccacctctcccactaggggcttaggcccaggaagatcagagttctgtccctgagctaaagttggagtgcctgcaaggaggagctgccaccccttccccagggagttcagatggc

SEQ ID NO: 923556 - DNA, 516 bp, Homo sapiens
ttcaatagtcaggtccatcttctgtagggctgctgtggtttgctaggggttcacttcaagccctattcatctggttctctcaaacacctggagatgtcacttaaggaggctgaagaacagcaaagatgggtgcctgcttattactctgggatctctgacttcaaggggcacagatctgatgccagtaggaatgctcctgcgtaggatgtctgacaacccctgttggggamgtctcaccaagctgagaagcatgcgaagtaggtcccatttaacaagacactttggctgtcccttggtggaggggttgtgctgtgctcagggaaactcacttgtctgggctgcccagattcctcagagctagcagggggaaagactacatctgctggtctgcagagactacagccacctctcccactaggggcttaggcccaggaagatcagagttctgtccctgagctaaagttggagtgcctgcaaggaggagctgccaccccttccccagggagttcagatggc

SEQ ID NO: 923557 - DNA, 516 bp, Homo sapiens
ttcaatagtcaggtccatcttctgtagggctgctgtggtttgctaggggttcacttcaagccctattcatctggttctctcaaacacctggagatgtcacttaaggaggctgaagaacagcaaagatgggtgcctgcttattactctgggatctctgacttcaaggggcacagatctgatgccagtaggaatgctcctgcgtaggatgtctgacaacccctgttggggacgtctcaccaagctgagaagcatgcgaagtaggtcccatttaacragacactttggctgtcccttggtggaggggttgtgctgtgctcagggaaactcacttgtctgggctgcccagattcctcagagctagcagggggaaagactacatctgctggtctgcagagactacagccacctctcccactaggggcttaggcccaggaagatcagagttctgtccctgagctaaagttggagtgcctgcaaggaggagctgccaccccttccccagggagttcagatggc

SEQ ID NO: 923558 - DNA, 718 bp, Homo sapiens
gggaatgtgctgaatctcaactgaagtgaggaggtctcagagtctcacccaaagccctcaatgtagaacttgggtattgctgctggttattcagggcccaaaggcttttaagttagcaggtgatgaatggtgccggcactatgtttcattccctttaaggctgcaggttcctttctggcccagggtgtatctagatttgttgtctggtggctgaggcctggaaagggagcctcatgactctgacccatttcctatcttattgtgtctaagctggtatcccagatgcaagacaaagtcttctccagtttttcccctcctctcctcaggcagaaggaggtgtctcttttggagctgcaagcagtgtggcctggggttaggggaggagtgatgccagcacttccttaagtgcccagttgatgtgtcagcaggtcacatgccctcccactgtcaacccctgtgtgctagctatgaacccagttcaataygagaactcacctaaaaattgcagtcctgtgacctagaccacctttcaagtttatttagagttccagagcactttagcccacagtgccaagacttgcaaggactcaagttctcatcacctctattggcaatttccctctggctagtgccggtttaaatgctccctctgtgggtgtgtgttagctgaattttgtctgttttttctttctgctatgaccagacagcactgagttca

SEQ ID NO: 923559 - DNA, 772 bp, Homo sapiens
acaggttttgccactaaaatggaataatagtctggttttcctaattccaggaaaggaaaatcaaggaatagatacattttttaaaaaagcatttaaagaatttctcctgtagacattatcttaaacttttggtccctgccattgtatgtgtatcttgaatccaagggtaataygatacgcagtctggcaaaagcagtcattttaaatgattgagcaatatttagtgactttcaaagagcagagagcacaacttggctaccatagaagctccaccatgatgggcgcagggtttcctctaggctggaagttgtgttctggttatcttgtgagagaaatgcatcctgtgtgatttatgtggattcatttattcttagaggaaatcagacaaaaaccatattgtaaggcccaacccatctaaaaagacaatagaaatgagttctgtgtgtttttcagcagggcctcatgggcaccactcgtaagtccagaatctcttccaagaacaggaagtttctggagggcagtggagaaggggagtgagggctcagctctgtgaggtcgaggtgggtgtgaggaccagcaccagtggggagtgggtttattagctgggaaaggccataaggatgaggaagagaagcttgtgtttgagaggataacagggaggaaaagtcgccgagcccagagtgtgtattcactgcctgtcctttggaggcagccgcttccacctcttttgactgattcttccaactcgtatcctccagtctccaaaacatga

SEQ ID NO: 923560 - DNA, 605 bp, Homo sapiens
  misc_feature 580: n = A,T,C or G
tgtatcatagttatttttgttcctgtttttttcccctcttcaagacaataagcttttggagggccaggaagttgtgttcccatctgccgagtgtggggcctcgagggccagaacctcagaatgtagaagctgagttagtttgtggcagggtgaagggctgacctctactgttggmaatgccaaaatctctgatctggctttaaataagcaaaacagccccgccagacatagagtcatccacaaaacctcatgacctctgttattgcccatcctgtgtggaagcccactgagaacttcacttgaagatgctgcaggaacaactgcagggaacctggagataaggccccgggtgatgatgtaagctaattgctgagctgggtggagctacttaaccttatggtaggaggtggagcttgacgcaacccccttttccaccaacaagcatttctttctacctgtcattgaagtgaatcatcagtataagtagcgagctgggcgcattccttctcagttgtgttaaaacttgctggtattcccccggtatcagcagaggtgtgtacgggcactgcttttaaactgngaaggaggaagacgaggccagggag

SEQ ID NO: 923561 - DNA, 635 bp, Homo sapiens
agacaattggtggttaagggactttcccaaggtgataaattgttttagcaaacagatccagaggacagctcctttcccctggtctatgtatgccttttgaacgccaagaccttatcctaaactcaagtttcacgaataggattaaaatacyctttggggacctttcttacattgagaacagaggctgggccacagcttggctaaagcattccagatctctcttctgagcaagagattttgacttgttcataaaccaggctctctctcatagtgggcaaggccttaaaaacaaacaaacctgcaaaacctgaggaaacatcttcctcctacgtacttagctgatgtaggcattaatggaaatggatattggagtgggaggctccttttagggggcagaaaagaaagaacgtttttatttttaattaaaaaaatattttcttttgagacagggtcttgctctgccatccaggctggagtgcagtggtgcgaatatggctcactgcagccttgacctccttgctcaagtgaccctctagccttggcctcccgagtagctgggatgacaggcgcacaccaccatgtctggctaatttttgtattttttgtagagatgaggtctcactggcttgcccagg

SEQ ID NO: 923562 - DNA, 710 bp, Homo sapiens
agtacagctgttggagagactgcctgcgcagcccgaggaggagaatgcaggtttaccacataaacaaggaaagtggttgtgaagaaaagaataaagctgtcctagaggacatgaccttggcaaaacaaacaaatttcacattaaaggatctctcagaaccatttcccagcatagaaaatgcaaaggatgaaatgtatgcttattcaaacttacggctcctagcagcactgttcacaatagtggaaaggtagaaacagcccagttatccatcagtgggtgaatagattaacaaatggatgaatagattaaaaaacagattgtggtatatccacgcactggaatattgatttaaaaagggacgaagtactgatacctgctacaatgcggatgaacctgaaagataccatgctaagcraaagaagccagatacaaaggtcacatatgataaggttctatttatatgaacgatcttggtaaatctgtagagaaagaacacagatttgtggtttggtttctaagatcacagcaagcttatctctaagatcggggctggggcgcggtagggaaatgaggaacaactgcttaatggatgtggagattccttctggggcgacagaaaatgttttgcaaccacgcggacgtggtggttgtatgacattgtgaatgtactaaatgcgcttaattgtttactttaaaatggtgatgttata

SEQ ID NO: 923563 - DNA, 622 bp, Homo sapiens
aagagatgatatctccatagagatcctgttcttttgtgtctctgggagcctgtcagctcattcccgtgtaggtaaagaggctggttaaggagcaggaacatttctgcccaggagggtggttcatgctcctgaagtgggatctgaacagcagcccagggaggcagctatcttttgtgtctccctcttgtttagggatatggaactcttaagagttcccactctttactgtattgcttaatgggcagcacttgagacctggttatgttgaaccaatgaacaaataatcttcagttccccaattgtgttccctttctgaacacaaatttttgatgcaggtgaagaaaacatgccaatactgttggccttttatcttttcttttgttaccaatttggttatgggagggatctggttttctcttccttgaatcttcccattattccttctttggaaaggttttggaaggtaayatttggggtggctagaaatatcctctgtggatatttccacagaccagagagactctggggtctcaaggaggccagagcagggtcctgaggtgtagagaaagtggaggaatggccgatttaagggagtgaggtgatggggtccttgaggtctcca

SEQ ID NO: 923564 - DNA, 464 bp, Homo sapiens
gcaatattttccacaacagtaaaacaaaatcagtaaaattatcccaagtaaactaaataagaaggatttccatgaactgcgcaattattgaaaccaagctgatatgggtttgctagctgattccaatatgtggtcagaattagaatattgatccaaatttttacattacccgtccttgtttcttytgagctgcagccagagatcacttgtcggttcacaggaataggcagtcagtctattgctgcaaaaaaaaaaaaagaaacaactcaaaaacaactgatggcattagaatctaataacagatatatcatagttcttgaaataatttttttctttttccagtttcccatttttactaaagacaaattatggcaagactgatttgctttattatatttggcctggttattcgtataaagtgcagcaaaaataattattttttacataggcttttaaaatgggct

SEQ ID NO: 923565 - DNA, 644 bp, Homo sapiens
gcctcttccttttcatgctatcaaagcggagttcagcacaacagaaacagatggacagaaagtttcagaagacatgggattttaaaaaccaccgatctgttaggaaacagccttgtttcctcatttccacggaagtaagggtttattggaatctatggacaccacagaaaaccaccactcctggtactgctgccctctgtctgtgtccaaagaaatggatttcaggtcctgcttccatttgataaaggagacatactcagctactcatattcatgcctttctttttctcattaacttactggtcttgatagtgtatcacaccacgttaatttcttttatggtcrgagttctccttagaatcggaaaactttttttaagtttatttttttcttttttgagacaaagtctcgctctgtcacccaggctggggtgtcatggtgcaatctcggctcactgaaatctccgcctcctggattcaagtgattctcctgcctcagcctcctgagtagctgggattacaggcacacagcaccacacccagctaatttttgtatttttagtagaaacagggtttcaccatgttggccaggctggtctcgaatcctcagtctcaagagatcagcccaccttggtctcctaaagtg

SEQ ID NO: 923566 - DNA, 644 bp, Homo sapiens
atcttagctttcaaaagagttcgagcattactacccaaccacaaaagaaccctgaactgggaatgaatgtatccatgacccatttgtgagtaagtcaggtgaatcgattttgtccgtactagaagaggatcaattgcttgagatcacaaatgatggtggccttaaaagtatgtttgagacagcttcaaatcccatgttctggattaaactcaaggtgggatatcctgagattgccacaaaagcactgaagagtctgcttccatttccaacatgctatctttgtgaagcaggattttctgcagtgacagcaaccaaaacaagattacggagtagactggacataagcaacacacttctggtgtcactgtctcccaccgttcccagatgggaccttctaattgcaggaaaacaaggtcagggctcccactgattccacattatggtgagttgtataattattttattatatattacaatgtaataataatagaartaaagtgcgcaatacacgtaatgtgcttgaatcatcctgaaaccgtctgccacccggccctggtccatggaaaaatcctcttccgtgaaactggtccctggtgccaaaaaggttggggaccactggtttatccagggtcatccaggttgga

SEQ ID NO: 923567 - DNA, 586 bp, Homo sapiens
acccccgcaaacagaggtcaccagacaccttataccagagtgttgctggagttctgttccaagatggccaaataggaacagctctggtctgcagctctcagcgtgatcgatgcagaagatgggggatttctgcattttcaactgagggacctggttcatctcattgggactggttggacaatgggtgcagcccacggagggtgacccaaagcagggcagagcgttacctcacctgggaagtgcaaagggtggggggatttccctttcctagccaagggaagccgtgagagactgcacctggaaaaagggacaccgtggcccaaatactgcacttttcctatggtcttagcaaccagcagactaggaaattctctcccgtgcctggctcggcasgtcccacacccatggagccttgctcactgctagtgcagcagtctgagattgacctgcgaggcagcagcctggctaagggagtggtgtcagccattgctgaggcttgactaggtaaacaaagtggccaggaagcttgaactggacagagcccaccacagctcagcaaggcctacagcctctatagatttcacct

SEQ ID NO: 923568 - DNA, 848 bp, Homo sapiens
  misc_feature 805, 806, 807, 808, 809, 810, 811, 812, 813, 814, 815, 816,817, 818, 819, 820, 821, 822, 823, 824, 825, 826, 827, 828,829, 830, 831, 832, 833, 834, 835, 836, 837, 838, 839, 840,841, 842, 843, 844, 845, 846, 847, 848: n = A,T,C or G
tattactggtaaccatcgtgagggcagtttcagtttggtgccagaggcagaaggcagatttcaataagttgaagtggaactggcaggtgaggaaaccagttcttcagtgagaagagattccttttcaaaaagcttggctatagagacacagtgagatctaggctagtgaggactgtgtggcaaaggaagggtcttttattttaatgtggaagaacatagaatgtattttttggggtgatacaaactggtagacagaaaattattgatttcacaagattcctaaagaatttggaagagatgggatccaaatttcaggtagagatacgtatttcaaataaaagactataaaattgaagcaaagttgttaaatatgactcctaatataataaatatcataaatttgtaggtgataacagaggaaatacctgcctgatgctctcaatgtcatcagttaaactgaaggcacaacagaaaggatttgtcagtaagttaagcaagaatrggagaaatgggtctgtagaaaagaagcacagcacagtggtggggaggggaggtatgagcagtgagagggtagatagaacgagaatcttctatttttgatgttggtagagttgatcctgtcaatcagaatggatgacacacaagtattaaatcttggaagctctctctgggctagatttcaacctttgcttatagcttggggagaaccagagtagccccaagagaagggcttggttatctgtgccatgggaacgaggaagccttaagatagcaaatgacaatttgtcaaattgcatggaattcnnnnnnnnnnnnnnnnnnnnnnnnnnnnnnnnnnnnnnnnnnnn

SEQ ID NO: 923569 - DNA, 653 bp, Homo sapiens
atgactgtcccttgatgcttactccttatacctggttgctaagggcaatgtgtcctaatgtccatcccacctgcacctcttcccagcaggtggcaggtgaatgtctgatgttttgagacatcaacagagcaggcaaattagagrcctatttgacttaatttaagaggtctcttgcaaaaggtcattaatgagacatattgataaagactcagtcatcgccacattgggaagttaaggaagctaagttcagagatgtcaaatgactgacaagcatgcaacgggactttgaatttccatcttctgggtcagattacaggaggagcaagtataagcttgcaaattaaacaggaaggagggaggttggagggagctgtgtcctctttgggatgagcttcctggcattactgattgtgcatttgtccctggccccatgctgctgagcaggacagagggaaagcctaagagtgccctgggcagagttcgaagatcccatcccagagcggtgacactctaggcatcctgtgctcacttgctgattctgctcttcagcctgggcagtggcatttatcctcttccgggttcctgtctgagtagagcatttcatctttctatgccatttgtaaaaaggatgtgtacatggaaactacatacac

SEQ ID NO: 923570 - DNA, 557 bp, Homo sapiens
ttaacatttactcatggctacagatagttctagttaaagatggtggaataaaggcattttaatgctactttccttttagaaattcttaaaaacaataaaacaaacaaaaagccctcattctctcacaaatccccaaagaataaaaacctaaggaagaaaactccaagtgaaaacagaacagaaatacaattattaagactatcagccaaatgtrgtgaaatttggatcaaatatgtaagactaattgggagccaaaatagcttattttttcaacttttatttttgattcagggtctacaagtgcaggcttgttacctgggtattttgtgtgatgttaaggtttggagtacaaatgtgatcctgtcacccaggtactgagcataatgcccaatagtttttcaactcttacttcccttttttctccctactttagtagtacccaatgttgactgttgcagtctttatgtccatgagtacctaatgtttagttcccacttgtgagaacatgcagtgtttggttttctgttcgtgtgttaattcatttaggataatggcct

SEQ ID NO: 923571 - DNA, 576 bp, Homo sapiens
ccggagagttgggactgcaggcacacaccaccatgcccagctaatttttgtatgttttgtagagacagggtttcaccatgttgcctaggctaatcttgaactcttgagctcaagccatctgctgatcttggcctctcaaaatgctgggattacagrtgtgagccactgtactggccaacttgaaaacctaatgtgcaccagaagcatctggaaaatttgttaacaaaaatataattgcacagattccacctctggatactctgattcagtagtatgtgttgaggtctaagaatctgcattttttaaatatattttttatttttttaaattatactttaagttctagggtacatgtgcacaatgtgcaggtttgttacataggtatacatgtgccatgttggtttgctgcacccttcaactcgtcatttacattaggtatttctcctaaccctatccctccccaaaccccaacaggccccagtgtatgatgttcccctccctgtgcccatgtgttttcattgttcaactcccacttatgagtgagaatatgcagtgtttggttttctgtccttgtga

SEQ ID NO: 923572 - DNA, 680 bp, Homo sapiens
ctgcctcctgccatccatgtaagaccatgactcgtagggtccagcaagatggctgaataggaacagctccagtctgcagctcccagcgagatccacctagaaggcaggtgatttctgcacttccaactgaggtacgtggttcatctcactgggactggttggacagtgggcagagaccatggagggtgagctgaagcagggtggggcgttgcctcacccaggaagtgcaaggggtcgggggatttccctttcctagccaagggaagccttgacagtctgtaccaagagraatgatacactcctgcccagatactgcacttttcccatagtcttcacaaccagcagacaaggagattccctcgggtgcctggctcagtgggtcccacatccattggcttgaaatccttgctgccagcgcagcagtctgagatcaacctgggatgcttgagcttggtagggggaggggtgtcggccattactgaggcttgagtaggcggttttatgctcacagtgtaaacaaagcaactgcaaagttcaaactgggaggagcccaccacagctcagcaaggctgactgccactctagatttcacctctgtgggcagggcatctctgaacaaaaggcagccccagtcagggacttatatataaaaccctcatctccctgggacagagcacctg

SEQ ID NO: 923573 - DNA, 680 bp, Homo sapiens
ctgcctcctgccatccatgtaagaccatgactcgtagggtccagcaagatggctgaataggaacagctccagtctgcagctcccagcgagatccacctagaaggcaggtgatttctgcacttccaactgaggtacgtggttcatctcactgggactggttggacagtgggcagagaccatggagggtgagctgaagcagggtggggcgttgcctcacccaggaagtgcaaggggtcgggggatttccctttcctagccaagggaagccttgacagtctgtaccaagagaaatgrtacactcctgcccagatactgcacttttcccatagtcttcacaaccagcagacaaggagattccctcgggtgcctggctcagtgggtcccacatccattggcttgaaatccttgctgccagcgcagcagtctgagatcaacctgggatgcttgagcttggtagggggaggggtgtcggccattactgaggcttgagtaggcggttttatgctcacagtgtaaacaaagcaactgcaaagttcaaactgggaggagcccaccacagctcagcaaggctgactgccactctagatttcacctctgtgggcagggcatctctgaacaaaaggcagccccagtcagggacttatatataaaaccctcatctccctgggacagagcacctg

SEQ ID NO: 923574 - DNA, 608 bp, Homo sapiens
ttcatgttctcccgtgtgcaaaatacatttacccatgtcccccaaattcttaacccatttaagcgttaactctaaaaaatgtcacattaatatcaactcaaaaagttacaaatctcatcattgaaatgatctaaattaggtatgggtgagactcttagttttcatccatactggggcaaagtcccttcatccacagaactgtaaaactaraaaacaaattatctgcttccaaaacacaatggtggaacgtatgaggttgtctctattttgccttcatattctgaagaatacatttgttggatgtagaattgtgggttggcagtttctttccttgcattaccttataatatttttcaactgtcttctcacatctaaaatttctgacaagaaaaagatatttgaaacattttttgcatgtatgtaatatgccatttttgtctggcttgtgaaaacattctttctttggctttaaatactttgactattacatacttgctcattttaatgatgtttgctcacacttggaatttactgagcttctataatctgtaaatttatcttttacctaattgaaaaagttcagtttttttttttcaataattgtgtgt

SEQ ID NO: 923575 - DNA, 766 bp, Homo sapiens
ccacacccacagcctactcctccccattcttccttgtttctgtgcatatcactcagttgctaaagacaaacacctaaaatcactttggttcctcttcttccctttccacccttctcctggctagacccttcatgcacatataagcaattcatcaatatgtcttggctgcaattgccaaaaacttatccctgttgcagtggcagagattcatccctccctatcttctccacattgcccttcctctcaaagtcactgtgaatgttcacctggaccattgcaaaggctttctcacccttcactctcttctcactcttgtccccaccctccagctcccagtcgatgtgcacacagaagttagagtgaccagaatcataactaccacctccaaaagtcctgcagtggctccaacacaccacttagagtaacatctggcttgctgyaatggtccctggcctgcatgagtgagtgctttttctttctcccgaatcttatctccaacactctgtctgctgcttactctgctccaggtgcactataatggtctttgtcctcaaacctctcaatctcctttcaagccctctagaggatgatccttctgcctgtaaactcttcttcagagatgtgcttacctggctcctcctccacattcaggcctttgctcacatatcaacttctcacagataaaatatctgaaaactctatccaaaacagctaccctggtccatctaactcattagccagcttttttttttttctctacagcacg

SEQ ID NO: 923576 - DNA, 766 bp, Homo sapiens
ccacacccacagcctactcctccccattcttccttgtttctgtgcatatcactcagttgctaaagacaaacacctaaaatcactttggttcctcttcttccctttccacccttctcctggctagacccttcatgcacatataagcaattcatcaatatgtcttggctgcaattgccaaaaacttatccctgttgcagtggcagagattcatccctccctatcttctccacattgcccttcctctcaaagtcactgtgaatgttcacctggaccattgcaaaggctttctcacccttcactctcttctcactcttgtccccaccctccagctcccagtcgatgtgcacacagaagttagagtgaccagaatcataactaccacctccaaaagtcctgcagtggctccaacacaccacttagagtaacatctggcttgctgtaatggtmcctggcctgcatgagtgagtgctttttctttctcccgaatcttatctccaacactctgtctgctgcttactctgctccaggtgcactataatggtctttgtcctcaaacctctcaatctcctttcaagccctctagaggatgatccttctgcctgtaaactcttcttcagagatgtgcttacctggctcctcctccacattcaggcctttgctcacatatcaacttctcacagataaaatatctgaaaactctatccaaaacagctaccctggtccatctaactcattagccagcttttttttttttctctacagcacg

SEQ ID NO: 923577 - DNA, 766 bp, Homo sapiens
ccacacccacagcctactcctccccattcttccttgtttctgtgcatatcactcagttgctaaagacaaacacctaaaatcactttggttcctcttcttccctttccacccttctcctggctagacccttcatgcacatataagcaattcatcaatatgtcttggctgcaattgccaaaaacttatccctgttgcagtggcagagattcatccctccctatcttctccacattgcccttcctctcaaagtcactgtgaatgttcacctggaccattgcaaaggctttctcacccttcactctcttctcactcttgtccccaccctccagctcccagtcgatgtgcacacagaagttagagtgaccagaatcataactaccacctccaaaagtcctgcagtggctccaacacaccacttagagtaacatctggcttgctgtaatggtccctggcctgcatgagtgagtgctttttctttctcccgaatcttatctccawcactctgtctgctgcttactctgctccaggtgcactataatggtctttgtcctcaaacctctcaatctcctttcaagccctctagaggatgatccttctgcctgtaaactcttcttcagagatgtgcttacctggctcctcctccacattcaggcctttgctcacatatcaacttctcacagataaaatatctgaaaactctatccaaaacagctaccctggtccatctaactcattagccagcttttttttttttctctacagcacg

SEQ ID NO: 923578 - DNA, 766 bp, Homo sapiens
ccacacccacagcctactcctccccattcttccttgtttctgtgcatatcactcagttgctaaagacaaacacctaaaatcactttggttcctcttcttccctttccacccttctcctggctagacccttcatgcacatataagcaattcatcaatatgtcttggctgcaattgccaaaaacttatccctgttgcagtggcagagattcatccctccctatcttctccacattgcccttcctctcaaagtcactgtgaatgttcacctggaccattgcaaaggctttctcacccttcactctcttctcactcttgtccccaccctccagctcccagtcgatgtgcacacagaagttagagtgaccagaatcataactaccacctccaaaagtcctgcagtggctccaacacaccacttagagtaacatctggcttgctgtaatggtccctggcctgcatgagtgagtgctttttctttctcccgaatcttatctccaacactctgtctgctgcttactctgctccaggtgcactakaatggtctttgtcctcaaacctctcaatctcctttcaagccctctagaggatgatccttctgcctgtaaactcttcttcagagatgtgcttacctggctcctcctccacattcaggcctttgctcacatatcaacttctcacagataaaatatctgaaaactctatccaaaacagctaccctggtccatctaactcattagccagcttttttttttttctctacagcacg

SEQ ID NO: 923579 - DNA, 777 bp, Homo sapiens
gtctcaggaagaaagaaaaaaaaaaaaacacaaaaaaaaaaacaaggaacaagaaagcaaggacttgtacaagtgtttgttagtcttataagaaagcctcaggatgaagacaccacctgcaccatccatacaggccccatccccaaccctcatttgmtatagaaaaagacagagacacagaagtttttgttgttttacccaggaaagtaacacgtagcctctactccattcccaggaataatcactgtgcattcatattatgcttaagcacaattttaatattacacttggttattccagatgacttgggcctcttcacactagaatggccagtcccacagagcaagcatcccaaaagagagagacagagagtgagcgagagagaaaggccaaaggtaccttttaggaactgggtttagaagttgggcagcatcacttcaaccttattcttttcttcccaaaggccagcccacattcgggggacagggagttagactctgcctcccactggaaagacggtcaaggcatttgtagacatgttttaaagccaccactgcagagatgaagagttgactgaaaatgggggaagacattggaaaatggagcagaatctaacacacaaacatcactacgtggacgcttcagtgtatttcagatcaccaaatgttgattcctgaagtttcttgagtgatggagtcataaccatttaagacttggtagggtgatgattttccattcatttgtaaactgtacaactcggctatatcttagtcaaaa

SEQ ID NO: 923580 - DNA, 664 bp, Homo sapiens
taggctgggcaggctggtccctaagcccccaggaaacacacataggtgcaggcagcaggaagggtgggcctatcaccaggcccttgaacaatgtacataggcagtggcagtgagcagggcccatcctcaggcccacagaargcaagtgttggtaccctgaaggcagggcaggttgatcctgaggttcccaaatgatgtgtggcaggcactggtgctggcaacacggggggcgggcctgtcctcaaactcctcaatgatgcacacaagtccccagtgctattgatggtggcagtggcagggtggacctgtcctcaggccctcagatggcatgaatgactgccaataatggcaggcagagtgagttgattaccaggctcctggatagcatgctcaggcagcagtaggggtgggttgaacaggactgttgtcaggccccttgatagtgtatgtgggtgtcagtggctatgggtggagcaagtcagtccccaggcccctaggcagtgcagcaatagaataccagcagtggtgctgataagtgggatgggcctgtcatcaggtcccctgatggtgtgcatgggctggcagaggcaggcctggttggctgatatctgggcccctggatagtgtgccctggtgccaacagtgatggcagtgggtggggtag

SEQ ID NO: 923581 - DNA, 664 bp, Homo sapiens
taggctgggcaggctggtccctaagcccccaggaaacacacataggtgcaggcagcaggaagggtgggcctatcaccaggcccttgaacaatgtacataggcagtggcagtgagcagggcccatcctcaggcccacagaaagcaagtgttggtaccctgaaggcagggcaggttgatcctgaggttcccaaatgatgtgtggcaggcactggtgctggcaacacggggggygggcctgtcctcaaactcctcaatgatgcacacaagtccccagtgctattgatggtggcagtggcagggtggacctgtcctcaggccctcagatggcatgaatgactgccaataatggcaggcagagtgagttgattaccaggctcctggatagcatgctcaggcagcagtaggggtgggttgaacaggactgttgtcaggccccttgatagtgtatgtgggtgtcagtggctatgggtggagcaagtcagtccccaggcccctaggcagtgcagcaatagaataccagcagtggtgctgataagtgggatgggcctgtcatcaggtcccctgatggtgtgcatgggctggcagaggcaggcctggttggctgatatctgggcccctggatagtgtgccctggtgccaacagtgatggcagtgggtggggtag

SEQ ID NO: 923582 - DNA, 638 bp, Homo sapiens
tggtcattttcacaatattggtcctaccctttcaaaagcattgtaagtgtttccatttgtttgtgttgtctatgatttctttcagcagtgctttgtagttttccttgtagagatctttcacctccttggttagatatattctcaagtattacattttttttgctgctgttgtaagtaaaaggggttgagttcttgatttgattctcagattggtatttrttggtatatagcaatgctactgctttatgtatattgattttgtatcctgaaactttactgagtttatttatcaaatctaggagctttttggatgagtctttagatttttctacacatacagtcatatcatcaccaaccactgacagtttgactttcctcttttctgatttagatgccctttatttctttctcttgtctgatttttctggctagggcatccagtactatgtcgaataaaagtggtgaaagtaggcatcaatgccttgttccagttctcagagggaatgccttcaactttttcctgttcagtatgatgttggctgtgggtttgtctgagatggcttttattactttgaagtatgtcccttctatgccaattttgctgagggtttttatcataaagggatgctggatttgtc

SEQ ID NO: 923583 - DNA, 781 bp, Homo sapiens
gaaatgctgccaatttttgtacattgaatttgtatcctgacactttgctgaaattgtttatcagataaaggagcttttgggtggagactatggtgttttctaagtatagaatcatattgtttgaaaatagaaatattttcacttcctttcttgctatttggatgattttttttctcttgatttctttggctaggackttcagtactatattgaataggagtggtgacagtgggtatccctgccttgttctggttctcaaggggaatgcttccagcatttgcccatttggcatgattttggctgtggatttgtcatagatggctcttattattttgaagtatgttccctcagttactagttttttgaaggtttttaacataaagagatgttgaattttattgaaaacctttctgcatctattgtgatgatcatgtaattttggttttagttttgtttatgtggtaaatcacatttattgatttgcatattttgaaccaaccatgcatcccacaaataaaaccaacttgatcatggtcaattagctttttgatgttcagtcagattcagtttgctagtattttgttgagaatttttgcatcaatgttcattaaaaatattgacctgaagttttttttttttttattgttgtgtctttgtcaggttttgatatcagagtgatgatggtctcacaaaatgagttaggaaggaatctctgctcctcaattttttggaatagatttagtaggaatggtaccagtgcttctttatacatctggtaaaa

SEQ ID NO: 923584 - DNA, 567 bp, Homo sapiens
acatccttggtccctttatttctctcatatcctacatctaatccattaggaccttggctctaggttaaaaatatatcagaatttaatcacttctcaagtctaatgccaccctcctgctaygcaccattactgtctctcccctggatagctataatagctttctaagaggtctctctgtttcttccacccttgctcccttagaatttgtaatcaacacggaagtcagagtggtcttttaaagacactaactcaaatcctctgatggaccaccaaagtcttcacaatagcccatgaggccttacatcatctggccctccatactcttctgatttcatctcttactctccactttgctccctctgctctagtcacacaggcctccttacctcaaatatgagaggcatagctttggtgctagctctccttctgcctgcatacatttatgtgactaactccctcaccttcttcaagtttttgctcagttctcatctttccaatgaatcctatcctgaccatcctatttaatctgcaaactgccccccaagcattcctcatccctgtgaccct

SEQ ID NO: 923585 - DNA, 566 bp, Homo sapiens
tctagttccaaagagaggcatgctcccagaaaaggcacaacaatgatccagttgacctggaagttaagaatgtcacctggccacactgacacttctcatgcctctgaatcaacaggcaaagaaggcagttactgtgctggccagggtgattgatcctaactaaccaagggagaactttgactactactccccaaaagaggtaaggaagactatgtgtggaacacaggagatcccttagggaatattgtagtattaccatgccctatgattaaggtcaatgaaaaactataacaacctaatttaactgaactactaatggcccagacccttcaggaatgaaagtttgggttctttaacactagcaaaagaggattctgataatcaaatggataraatgacccattctgtggatactagtcagtctctttccccagataaccctgccattgtccagtggattcatggataaattcaccatggtggcagggatggagcgtatgcatgggcccagcaacatgcacttcaactcaccaaggctgatctggttatggcaactgctgaatgtc

SEQ ID NO: 923586 - DNA, 634 bp, Homo sapiens
actccaatcaatagaaaaagaggaaatcctccctaactcattttatgaggccagcatcatcctgataccaaagcgtggcagacacacaacaaaaaaagagaattttagaccaatatccctgatgaacattgacgcaaaaatcctcaataaaatactggcaaaccaaatacagcagcacattaaaagyttatccaccatgatcaagtgggcttcatccctgggatgcaaggctggttcaacatgagcaaatcagtaaatgtaatccagcatgtaaacagaaccaaagacaaaaaccacatgattatctcaatagatgcagaaaaggcctttgacaaaattcaacagcgcttcatgctaaaaactctcaataaattaggtattgatgggacgtatctcaaaataataagagctatttatgacaaacccacagccaatatcacattgaatgggcaaaaactggaggcattccctttgaaaactggcccaagacagggatgccctctctcaccactcctattcaacatagtgttgaaagggcaatcagacaggagaaagaaatgaagggtattcaatgaggaaaagaggaagtcaaattgtccctgtttgcagatgacatgattgtatatttagaaaa

SEQ ID NO: 923587 - DNA, 583 bp, Homo sapiens
ccaccagggagtgaggcctgtccagagcagcgcatgagatgggcacggatggcactctccggcttcagggcgccctcgcatgcaccacccacgtgatcctcacaccggccaggtgtggctgccaggatgggcaaattcaaatgagggttctgaggctcaacggagttaagtgtggcagakcctggaaaagaagccaaatcttcttgcccactctgaactcagagctttccctcttcaacacaggctccaggcaaatgtaacaaatgctggcgtctcaggcagctcaaggaagagcagtcccacagaccctgatcagaatgtcacacctggaagggaggcccgatgtcccttcctgcctcgtcttctgaagaggccctgagagggtaagtagagtctgttttgtctgtgcctggggagacagtgaaggcaggacctgaatccaggcctggccttcctaagtcggggtaccccctacactaccacctggcccttggcgcacccgagcacctcactccaggccctgcctctcatgggcccaagacccagtgtggggtagaatggccaacagtgtgggggaaagagt

SEQ ID NO: 923588 - DNA, 583 bp, Homo sapiens
ccaccagggagtgaggcctgtccagagcagcgcatgagatgggcacggatggcactctccggcttcagggcgccctcgcatgcaccacccacgtgatcctcacaccggccaggtgtggctgccaggatgggcaaattcaaatgagggttctgaggctcaacggagttaagtgtggcagagcctggaaaagaagccaaatcttcttgcccactctgaactcagagckttccctcttcaacacaggctccaggcaaatgtaacaaatgctggcgtctcaggcagctcaaggaagagcagtcccacagaccctgatcagaatgtcacacctggaagggaggcccgatgtcccttcctgcctcgtcttctgaagaggccctgagagggtaagtagagtctgttttgtctgtgcctggggagacagtgaaggcaggacctgaatccaggcctggccttcctaagtcggggtaccccctacactaccacctggcccttggcgcacccgagcacctcactccaggccctgcctctcatgggcccaagacccagtgtggggtagaatggccaacagtgtgggggaaagagt

SEQ ID NO: 923589 - DNA, 589 bp, Homo sapiens
aggctgaagcaggaggattatttgatcctcccaggagctagactccagcctgggcaacatagcaagaccccatctcttaacaaaacatagtttgaccatatatgttagggtatgtttctgggccctctattgtattccattggtttatatgtctgyctttatgtcagtaccacactgttttgattagtatagctttatagtaagttttgaaatcaggaggcatgagtcctccagctttggtctcctttagaagggctgttttggctattcagggtcccttgagattccatgtaaattttaggatgggtttttctatttctgtaaaaaaaaaaaaaaaatcattgggattttgatagggattacactgaatgtgtattgtttgggtaattgtgacatcttaacaatagtaagtcttccaacccataagcgtgaatttgttctcatttatcttttaatttattccagtgatgttttttagttttcactgtacaaggctttcacctccttggctaattcctaagtgttttattatttttgatgctactgtagacaattattttcatcatttccttttcagactgttcactat

SEQ ID NO: 923590 - DNA, 668 bp, Homo sapiens
ccagctttggtctcctttagaagggctgttttggctattcagggtcccttgagattccatgtaaattttaggatgggtttttctatttctgtaaaaaaaaaaaaaaaatcattgggattttgatagggattacactgaatgtgtattgtttgggtaattgtgacatcttaacaatagtaagtcttccaacccataagcrtgaatttgttctcatttatcttttaatttattccagtgatgttttttagttttcactgtacaaggctttcacctccttggctaattcctaagtgttttattatttttgatgctactgtagacaattattttcatcatttccttttcagactgttcactattagtatataaaaatgtaactgatttttgtgtattaactttgtatcctgctactttgttggatttatgtactagccttgaacaggtttttctggtggaatctgtaggattttctacacataagatcatatcatctacaaatggagataactgtcttcctttccaatttggatgccttttaatttctttttctggcctaactgctctggatagaacttcaggattatgttggatagaagaggcaaaagtgggcatctttgtcttgttcctgatcatacgaggaaaagctttctgtctctcactgttgaaca

SEQ ID NO: 923591 - DNA, 647 bp, Homo sapiens
gttaggcagaaggtgcgggtgttatgaaacataagtaagctaatgagaataaacaagaatctttttctctagggcctgagaatatttaaggaacatagctctaaagtccccccctcatctgccagtgcatttaagattccagaaagcagaagaccgattccggaccacacaggaagcccgacgcccgacgagaacgggcacggaggcgctgcctgcgcgcagctggtttacattcccttgctgccgcagaatcacgcggtgcctcgagcaactcctttgaccctcttagaacccattccttttccaaggggattagttccttccgtgcaaaggcagacagaaacgcgttctgcccctgtccatttagggagctcggcaaacaccacgtgccgctcgctgctgtgacgagckccttccacccagttatctctccgccctccgcgttttatctgcctcacagtgcctttaacggatttcctttcctgttcccctcctattccaagtgcttcaggtgttcaagtaatcatagcgattttaaaagcctctcctgtttcttgcctgggaagtcagatggacccacaggaagaattcacctcaaggctcaggtgaagactgcgagaaaggtggcacctagagcagagaaggat

SEQ ID NO: 923592 - DNA, 640 bp, Homo sapiens
atcagcacttcatggtctctagcctgactgcctttggactctgaccgtaactctttcctgaatctccagcttactggcctcctccatcagattttgttgttgccagagactccacaatcacagtagccaattccttaaaataaatctctaacctgttggttctgtttctctggtgaaccctaactaacataccattacagcaaattccttgctggtggtttatatacattgtttccagtgtctctacttccattctctcttttcacccactccaatcaatttttcaccccgtaacttgtcaaaatttctcatcaagaacactaatgacttctaattaacaataatggccaattttcatcctctgtagacaggataatacctcttttgctctccccgtattctaattcctggcatttgttaatatgttgccttagatgtcaaaagttactttgcatatktgattaaactatggatggagagagtatcctggattatccatgatagcccaatgtaatcacaggggtctttatatgagagaggcaagagggtaagtgttggagaagaagatgtgacaacagaatctgagaagagattttagataccgtactgctggctttgaagtcagagaaagaggccacaa

SEQ ID NO: 923593 - DNA, 818 bp, Homo sapiens
tgttgaagtctgtctctctctttagctctaaaaatgttcactttatatatgtgtatgcttcaatgttgggtgcatatttgtttagaatttgtatggcctcttgctgaattgacccctttgttattatttagacctttctgtatccctcttagacttttggcattgaaatctatttttctgatacaagtaaagtggctcctactcttttctggtttccattggcatggaatatatttttccttccctttgttttcagtctatgtgtgtctttataggtgaagtgtgtttcttgtaggcaacagattaatgggtcttgctttttaatccatttatctactctatgtcttttgactgcagagtttagttcatttataaagttattgttgataaacaaggacttactccttccattttatttgttttctgtgtttgtgtgtgtgtgtgtgcgtgcrcgcacgtgtgtgtgtgtggtcttctcatccttctctctttccttcctctcttcctttgagtgaaggtgactttctttctcactaattacttcttctacttgaccaattctgctattaaaagactctgatgcattcttcaatacgtccattgaattttaaactccagaacttctgcttaattctttttaatgatttcaatctcttttttatctggtagaattcttaattccatctctgtattatcttgaatttcctggagtttccccaaaaactattttgaattatccgtgtgaaagatcacatatttctgtttctccaggattggtccctggaggtttatgtagttcattttgtaatgtcatgtta

SEQ ID NO: 923594 - DNA, 783 bp, Homo sapiens
ttctagggcattgctgaaggacagtggtgaagagaaatcttcccagtgggcagaactttgagcattgcaccttgttgtgcactttgcttggaaggagaaatggacagatgtgtgattatatactcattcatgggctatagccaatggtttgactggatgttcaggaatttggaaaaagcattattggaaaattggtgacaaagaaatttggggaagaggtatatagatggacctckctgagtggtcaaaaactgtgaagatatttgtatctcatgtgcgtgttcaccaaagggtgaccatagccagaggaggattttaataatcaagtggaaaggatgacttgttctatgtgcaccactcagtctctttccccagtcacccctgtcattgcccagtgggcccatgaaaaaagtggccatggtaacagagatggaggttatgcatgggctcagcaacacggacttccactcaccaaggctgacctggctatgaccaccactgagtgcccaatttgctggcagcagagaccaacactgagccctcaatatggcaacattccttgggtaatcaaccagctacttggtggcaggttgagtatactagacttcttccatcatggaaagggcagcaatttgtcctcaccggaatcgacttactccagatatggatttgcctatcctgcatgaaatgcttctgccgagactaccatccatggactcacataatgccttatccaccatcatggtattccacatagcattgcctctgaccaaggcactcact

SEQ ID NO: 923595 - DNA, 722 bp, Homo sapiens
ttcttggtaaaaccccagagtttggagtcagaagactgagtttcaaagttcatctgtcgcctttttcttttcttctttttttttctagccatgatatcaatctctttgagtcactaaatgattgtgacaacaccttgtacagttgttggtatcattaaatcagatggtgtataagagtattttataaaaactgtaaaggaggatgtggctgcaggggctgatagttctcatgwgtattactgctcttgtttctgacagttaaaagaatattggcagagaaacagccctggtgttccagcaggagccaagaggaacaggaaaacaaatggcagcatccatgagacagccacttctggtggttgccactcacctggagatgtgagtcttggctgactaggttcctggggacaggggacccaaggggcactagagggtaattgttaagattgtggatggactgttgggtacctgtgaagaattctgggtttgaatcctgcctctttgtctgctagggatatgaattagggcaagttgctagacctcatcgggcctctcttttcacatctgtataatagaggtggtattgtttcacttccatttgtgaagtttaaatgagatttgttattgttgtttttatgttaatccctagtacatggcctgctgtaaacacccagaacacccaggatatggtcattgctgttcgattttcctcatccccagtc

SEQ ID NO: 923596 - DNA, 821 bp, Homo sapiens
attcttggtaaaaccccagagtttggagtcagaagactgagtttcaaagttcatctgtcgcctttttcttttcttctttttttttctagccatgatatcaatctctttgagtcactaaatgattgtgacaacaccttgtacagttgttggtatcattaaatcagatggtgtataagagtattttataaaaactgtaaaggaggatgtggctgcaggggctgatagttctcatgagtattactgctcttgtttctgacagttaaaagaatattggcagagaaacagccctggtgttccagcaggagccaagaggaacaggaaaacaaatggcagcatccatgagacagccmcttctggtggttgccactcacctggagatgtgagtcttggctgactaggttcctggggacaggggacccaaggggcactagagggtaattgttaagattgtggatggactgttgggtacctgtgaagaattctgggtttgaatcctgcctctttgtctgctagggatatgaattagggcaagttgctagacctcatcgggcctctcttttcacatctgtataatagaggtggtattgtttcacttccatttgtgaagtttaaatgagatttgttattgttgtttttatgttaatccctagtacatggcctgctgtaaacacccagaacacccaggatatggtcattgctgttcgattttcctcatccccagtctcaaggggaagccaggacaatgagaacagtcacttggcacaggagtcactgaaagggccgcagggtgctgtggtggggagataagaaccatgagagaa

SEQ ID NO: 923597 - DNA, 729 bp, Homo sapiens
ttgccactcacctggagatgtgagtcttggctgactaggttcctggggacaggggacccaaggggcactagagggtaattgttaagattgtggatggactgttgggtacctgtgaagaattctgggtttgaatcctgcctctttgtctgctagggatatgaattagggcaagttgctagacctcatcgggcctctcttttcacatctgtataatagaggtggtattgtttcacttccatttgtgaagtttaaatgagatttgttattgttgtttttatgttaatccctagtacatggcctgctgtaaacacccagaacacccaggatatggtcattgctgttcgattttcctcatccccagtctcaaggggaagccaggacaatgagaacagtcacttggcacaggagtcactgaaagggccgcagggtgctgtggtggggagataagaaccatgagagaagttggcacaaaggagttatgggacaaagkgtccaagataggcagaaaagaaaattgtgccagttgatggggaagaaaagaagtcagagggcttagatactgagtgggacagaacatcttcatgtgcactctcatctcttgtagtcagcaacaggtatccacggggagagccctacatcatctgctaccctgaaggatctggaggtaagaggctctgggcagaggtgcagtgaccctgcaggccagccctccaacctcctcctccaggt

SEQ ID NO: 923598 - DNA, 621 bp, Homo sapiens
  misc_feature 348: n = A,T,C or G
gagttggggggcactctggggagagagccttgacgtagagcttggaggccaagtggggggcatgcctttacctggctgtggtcttggccaagtcctcagtgggtattgggtacttgtactgtgaaggtacagaagagtacctttagtatgttaccatttctgtagagagaggaaacgtgtgtgtgtgtgtacatattatgataatatacataaaayatgtttgcaagtgttcataaaaactcaggagagagcaacagggtggctgggagatacttcccttctgtaccttctgagtctgggactatgtgaatgtattatcctttcaaaaagtgaacaaaagattaattntccccttcctagctgtgcccccacccccagcaagaaaaatgggcttagagaattggatagatctgggtgtttaaatcccagctctgcctaagtgatcttaggcaagcacttaacctcaaatactccatgttttttcatctacacaatagaggtcatcatagtaactgtctcccatggtggttgcgaggattaaatgggattgctagcatggtatctggtgaagcactccataaaagttcaaacagtggtaataatatcagtaatagcaatagc

SEQ ID NO: 923599 - DNA, 634 bp, Homo sapiens
ctaacctggacctagatattttctttgtttttttgtgtttttgtttttggtttttttgtgatgacgtttcacttggcggtccaggctggagtgcagtggcgtaatctcggctcacttcaacctccgccttccaggtttaagcgattctcctgcctcaggctcccaagtagctgggattacaggcacgtgccaccaaacctggctaatttttgcatttttagtagagacggggtttcaccttgttggccaggctggtctcgaaatcctgaccttgcgatctgttcgcctcggcctcccaaagtkctgggattacaggtgtgagccacagcacccagccaacatttttttttattaaaaaacttatatgaaatttattttattgtggtatctagttgagtaaattttgatctctatagattcatgtaaccctcatcatcatcaggacggagacgtgtcatcaccccaaaagctcccttgtgctgctcctttttatcacctgttccctggtctcataccctggcaaccactgatctgttctccatcagtatagggtattctttttgagaatgtcatgtgagtggaaccatattttaagtaacgttttgaaaccatcttcatttattcctagttatat

SEQ ID NO: 923600 - DNA, 728 bp, Homo sapiens
attcttggtaaaaccccagagtttggagtcagaagactgagtttcaaagttcgtctgtcgcctttttcttttcttctttttttttctagccatgatatcaatctctttgagtcactaaatgattgtgacaacaccttgtacagttgttggtatcattaaatcagatggtgtataagagtattttataaaaactgtaaaggaggatgtggctgcaggggctgatagttctcatgwgtattactgctcttgtttctgacagttaaaagaatattggcagagaaacagccctggtgttccagcaggagccaagaggaacaggaaaacaaatggcagcatccatgagacagccacttctggtggttgccactcacctggagatgtgagtcttggctgactaggttcctggggacaggggacccaaggggcactagagggtaattgttaagatgtggatggactgttgggtacctgtgaagaattctgggtttgaatcctgcctctttgtctgctagggatatgaattagggcaagttgctagacctcatcaggcctctcttttcacatctgtataatagaggtggtattgtttcacttccatttgtgaagtttaaatgagatttgttattgttgtttttatgttaatccctagtacatggcctgctgtaaacacccagaacacccaggatatggtcattgctgttcgattttcctcatccccagtctcaagg

SEQ ID NO: 923601 - DNA, 687 bp, Homo sapiens
tggtaaaaccccagagtttggagtcagaagactgagtttcaaagttcgtctgtcgcctttttcttttcttctttttttttctagccatgatatcaatctctttgagtcactaaatgattgtgacaacaccttgtacagttgttggtatcattaaatcagatggtgtataagagtattttataaaaactgtaaaggaggatgtggctgcaggggctgatagttctcatgagtattactgctcttgtttctgacagttaaaagaatattggcagagaaacagccctggtgttccagcaggagccaagaggaacaggaaaacaaayggcagcatccatgagacagccacttctggtggttgccactcacctggagatgtgagtcttggctgactaggttcctggggacaggggacccaaggggcactagagggtaattgttaagatgtggatggactgttgggtacctgtgaagaattctgggtttgaatcctgcctctttgtctgctagggatatgaattagggcaagttgctagacctcatcaggcctctcttttcacatctgtataatagaggtggtattgtttcacttccatttgtgaagtttaaatgagatttgttattgttgtttttatgttaatccctagtacatggcctgctgtaaacacccagaacacccaggatatggtc

SEQ ID NO: 923602 - DNA, 740 bp, Homo sapiens
tgtgagtcttggctgactaggttcctggggacaggggacccaaggggcactagagggtaattgttaagatgtggatggactgttgggtacctgtgaagaattctgggtttgaatcctgcctctttgtctgctagggatatgaattagggcaagttgctagacctcatcaggcctctcttttcacatctgtataatagaggtggtattgtttcacttccatttgtgaagtttaaatgagatttgttattgttgtttttatgttaatccctagtacatggcctrctgtaaacacccagaacacccaggatatggtcattgctgttcgattttcctcatccccagtctcaaggggaagccaggacaatgagaacagtcacttggcacaggagtcactgaaagggccgcagggtgctgtggtggggagataagaaccatgagagaagttggcacaaaggagttatgggacaaagggtccaagataggcagaaaagaaaattgtgccagttgatggggaagaaaagaagtcagagggcttagatactgagtgggacagaacatcttcatgtgcactctcatctcttgtagtcagcaacaggtatccacggggagagccctacatcatctgctaccctgaaggatctggaggtaagaggctctgggcagaggtgcagtgaccctgcagggcagccctccaacctcctcctccaggtgggacggggtgcccctctgccagctgagac

SEQ ID NO: 923603 - DNA, 600 bp, Homo sapiens
cagagggagggatgtggaaggaagatgaccccaggtaaccaggagcaggtgaggaccagtgacagcccttcctaatttctgtgcccattcttgcagttgaaggagtcacttaaagaagtccagctagagagggatgaatatgctgaacatctaaaaggagagagggcccggtggcagcagaggatgagaaaaatgtcgcaggaggtgagatctgacccttcagcccccccacattagataggtcactggatctttctgggcacctgtaaaatgggaatagtagagccagaggtggtcatgggwctgggctttgtggaggtgggggcagagagggagagggcagcctgtccagcctccagcccctctctccagggccctttccccctgtgctttgggcaggtttgctcgttgaagaaggagaagaagcatgataaatatcgggtagagacgctggagaggagcttgtccaaactcaaaaaccagatgggtaagatggggctggcgtgacctggcagcaggactggcatcagagggctgtgagggtggcttggagtgccccagcgaggtgggtggatggaagggctttgaggcagagggaaa

SEQ ID NO: 923604 - DNA, 585 bp, Homo sapiens
ctgggcttggagctttgctgacacactctgcagctccttacccaggtggtcagcctccgcctgcagctgctgctggaatagtgaaagtgtttttttgaacctcagaaggaagcagaatcatgagctagccacataaatgtaatctataggctgggmgcggtggctcacgcctgtaatcccagcactttgggaggccgaggtgggcggatcacgaggtcaggagatcgagaccatcctggttaacacagtgaaaccccgtctctactaaaaatacaaaaaaattagccgggtgtggtggtgggcacctgtagtcccagctacttgggaggctgaggcaggagaatggcgtgaagccggggggtggagcttgcagtgagccgagattgcgccactgcactctggcctgggtgacagagtgagactacttctcaaataaataaataaataaataaataaataaataaatgtaatctataaaataatggttttcatccatgatcctttaaaaaaatatttttaagccctaactcttgagattctgattccccaggcagggccccaatttgtacatttttagtacactct

SEQ ID NO: 923605 - DNA, 585 bp, Homo sapiens
ctgggcttggagctttgctgacacactctgcagctccttacccaggtggtcagcctccgcctgcagctgctgctggaatagtgaaagtgtttttttgaacctcagaaggaagcagaatcatgagctagccacataaatgtaatctataggctgggagcggtggctcacgcctgtaatcccagcactttgggaggccgaggtgggcggatcacgaggtcaggagatcgagaccatcctggttaacacagtgaaaccccgtctctactaaaaatacaaaaaaattagcygggtgtggtggtgggcacctgtagtcccagctacttgggaggctgaggcaggagaatggcgtgaagccggggggtggagcttgcagtgagccgagattgcgccactgcactctggcctgggtgacagagtgagactacttctcaaataaataaataaataaataaataaataaataaatgtaatctataaaataatggttttcatccatgatcctttaaaaaaatatttttaagccctaactcttgagattctgattccccaggcagggccccaatttgtacatttttagtacactct

SEQ ID NO: 923606 - DNA, 600 bp, Homo sapiens
cagagggagggatgtggaaggaagatgaccccaggtaaccaggagcaggtgaggaccagtgacagcccttcctaatttctgtgcccattcttgcagttgaaggagtcacttaaagaagtccagctagagagggatgaatatgctgaacatctaaaaggagagagggcccggtggcagcagaggatgagaaaaatgtcgcaggaggtgagatctgacccttcagcccccccacattagataggtcactggatctttctgggcacctgtaaaatgggaatagtagagccagaggtggtcatgggactgggctttgtggaggtgggggcagagagggagagggcagcctgtccagcctccagcccctctctccagggccctttccccytgtgctttgggcaggtttgctcgttgaagaaggagaagaagcatgataaatatcgggtagagacgctggagaggagcttgtccaaactcaaaaaccagatgggtaagatggggctggcgtgacctggcagcaggactggcatcagagggctgtgagggtggcttggagtgccccagcgaggtgggtggatggaagggctttgaggcagagggaaa

SEQ ID NO: 923607 - DNA, 600 bp, Homo sapiens
cagagggagggatgtggaaggaagatgaccccaggtaaccaggagcaggtgaggaccagtgacagcccttcctaatttctgtgcccattcttgcagttgaaggagtcacttaaagaagtccagctagagagggatgaatatgctgaacatctaaaaggagagagggcccggtggcagcagaggatgagaaaaatgtcgcaggaggtgagatctgacccttcagcccccccacattagataggtcactggatctttctgggcacctgtaaaatgggaatagtagagccagaggtggtcatgggactgggctttgtggaggtgggggcagagagggagagggcagcctgtccagcctccagcccctctctccagggccctttccccctgtgctttgggcaggtttgctcgttgaagaargagaagaagcatgataaatatcgggtagagacgctggagaggagcttgtccaaactcaaaaaccagatgggtaagatggggctggcgtgacctggcagcaggactggcatcagagggctgtgagggtggcttggagtgccccagcgaggtgggtggatggaagggctttgaggcagagggaaa

SEQ ID NO: 923608 - DNA, 583 bp, Homo sapiens
ttgttgggctgtagtcctttctctcagtagtccttaactgctatgccactgtccgttccagcgttggagataaaaagtctaattacagcatcattcttcttctgtagataatatgttctttttaacggtatgtttttttgtcagatttttctctttctctttagagttcaaaatttgtactgacagatgcctcagtgtttcttttttctcatcactctagtccagtatttctccattgttttaatcaacccccacttaaggagacttctcagacatttttccctaatcgcttccccataaaattttaatagcatagatatattgtgtatttgtttatgtayggcatctgtgctctgtacataaagggagtgagatttctgttcactcccccgagaaccagattctgccccattagggacattatcactcctgttgagaaagcatggtttaacctgaaacagtgagccttttattacattcaagaaataatatactattctttaattattgtcttacttccacgaataccttttactccttgtgaaattctagtaatttacattttgttattcttgatttatct

SEQ ID NO: 923609 - DNA, 654 bp, Homo sapiens
agtcagggtacatgtacctttttctctatcagacctctctcagatcagtcagcgtttaggctctttctcatcagaccccactaaatacatacaggaattccaatatcttactctgtcctacaatttaacctggagtgacttaaatgtcatcctgacttctaccctctccccaggtgaacgagaatgagttttttctctagcccaatctcatgctgataaccaccrgcttcatgagccagacctccaggaaggtattagagcagttcctcgagaggatccccaatggaactatcaggcagattccccaggtatagctaggtgagattacatgatttcccgcctaattgaagggctttaaaaggcagcttacaaagctgttaattatgacaagctgaaagaaactacccaaggtaaagatgaaaacccagcccagtacatggcccacttagcagtgacccttagacgctttactgccctagacccagaagggccagagggccgccttattcttaatatgcattttatcacccagtccactcccaacattaggaaaaaacttcaaaaattaaattccggccctcaaaccccacaacaggatctaattaacctcgccttccaggtgtacaataatagagtagaggcagccaagtagca

SEQ ID NO: 923610 - DNA, 654 bp, Homo sapiens
agtcagggtacatgtacctttttctctatcagacctctctcagatcagtcagcgtttaggctctttctcatcagaccccactaaatacatacaggaattccaatatcttactctgtcctacaatttaacctggagtgacttaaatgtcatcctgacttctaccctctccccaggtgaacgagaatgagttttttctctagcccaatctcatgctgataaccaccggcttcatgagccagacctccaggaaggyattagagcagttcctcgagaggatccccaatggaactatcaggcagattccccaggtatagctaggtgagattacatgatttcccgcctaattgaagggctttaaaaggcagcttacaaagctgttaattatgacaagctgaaagaaactacccaaggtaaagatgaaaacccagcccagtacatggcccacttagcagtgacccttagacgctttactgccctagacccagaagggccagagggccgccttattcttaatatgcattttatcacccagtccactcccaacattaggaaaaaacttcaaaaattaaattccggccctcaaaccccacaacaggatctaattaacctcgccttccaggtgtacaataatagagtagaggcagccaagtagca

SEQ ID NO: 923611 - DNA, 654 bp, Homo sapiens
agtcagggtacatgtacctttttctctatcagacctctctcagatcagtcagcgtttaggctctttctcatcagaccccactaaatacatacaggaattccaatatcttactctgtcctacaatttaacctggagtgacttaaatgtcatcctgacttctaccctctccccaggtgaacgagaatgagttttttctctagcccaatctcatgctgataaccaccggcttcatgagccagacctccaggaaggtattagagcagttcctcgagaggatccccaatggaactatcaggcagattccccaggtatagctaggygagattacatgatttcccgcctaattgaagggctttaaaaggcagcttacaaagctgttaattatgacaagctgaaagaaactacccaaggtaaagatgaaaacccagcccagtacatggcccacttagcagtgacccttagacgctttactgccctagacccagaagggccagagggccgccttattcttaatatgcattttatcacccagtccactcccaacattaggaaaaaacttcaaaaattaaattccggccctcaaaccccacaacaggatctaattaacctcgccttccaggtgtacaataatagagtagaggcagccaagtagca

SEQ ID NO: 923612 - DNA, 667 bp, Homo sapiens
caattcaggtgctgagaatcttgccctgaacatgcacagcttaggaattggcaaactcctcaaggggaatcggcacgctgaactttggcccaattttctctaaggctgcctcttctatctcaggtctcagactccatggtatccctgaactgcaacttctttattcctagcctgctgggtttcactcgcgtccgtgtgaagagaccaccaracaggctttccgtgagcagcaaggctgtttatttcacctgggtgcaggcgggctgagtccgaaagagagtcagcgaagggagataggggtggggccgttttgtaagatttgggtaggtaaaggaaaaagggggttgttctctggtgggcaggagtggggggtcacaaggcgctcagtgggggagtttttgagccaggatgaagcaggagaaggaatttcacaaagtaatgtcatcagttaaggtgaggaccagccattttcacttctgttatggtggaatgtcatcagttaaggcaggaacaggccatttaaatatcacttcttttgtgattctttagtagcttcaggccctctggatgtatacaagcaggtcacaggggatatgatggcttagcttgggctcggaggcctgacattcctgtcttcttatattaataagaaaaataaaatataata

SEQ ID NO: 923613 - DNA, 635 bp, Homo sapiens
atgctacttcagagtggtactaccttcgtgggtgacactgtcctggttcttgcagtgccaagctcttggcagaacttccagacacttaagacaccacttctctcatttactccttcctttcccttggagaaaaatgtcagatgcacccgctggtatcactgggagcatcctgtgacctgccccctctaggagacatctgtcttgggcccttggtaagaaactaggggaagtgatggttcactaattcagcaaacatgcatggagctgacactatgaagatgacccagtcctagttgatatgaggggctgcaaagagagaaagaggtggggactaaatccctcgaggtggatgttaggttcccattctacatatgagaagattatgagaagattaaaacattgtgcccragctcccacatggtagtagcattactgggtttagactgaggtcctttgacttcattagagtccactggcttcattaggagctttagtccagtaagagaaatgcctgtgttcacagggctatacatttctgggctcaacaatgtcagaggcgtgagtcaaggacaggaaagtgtgaggagaagatggaggaggcaaggatcagggaaggcttcttggaggaggtggca

SEQ ID NO: 923614 - DNA, 733 bp, Homo sapiens
gacaatgcttatatgcatttctctctttcttctctttgccttctcttcctccctctttcctccttccttttccattcatccaacaagcattcactgagtcctcactccatgctgggcactgtgctaggcaccagagatgcaaagaacagccctgccctaggggacaagcactcatcagaaaagtsggccagaaatcacagtggtgttgtaaacatgacagcaggagggtgaggccaagccagggctcactcctcttccctctccacagcactcctcaggcatcccaggcctgctcctgccggcctgtctgctccccatgtctgggacgttcctcttcccagacacaggagtggctcactccctcagcattttgaggtcactgctcacctctcccagggcctcccctacccactgcctggacctaccaggcccctgccactctccatgctctagccctgctctagttttctccatagcgcacttaccaccactgactttttaatttttttttttagctaacgtatctctaggttattaactcccattagaatataagttccatgagggtaggaattttattctactttgctcactgctgtatcaccaaatgattagaacagtgtctgtcgcataggagctcgacaaatacttgttaaatgaatgagtggcatagaggtcatggtgcactagaaagtgaacgggccctggagtgaagctcacctactccccggga

SEQ ID NO: 923615 - DNA, 547 bp, Homo sapiens
gaagtttctcaggcctttgctctatcaatgaggcagaaggcagccctaaggggttcgtggctgggactagggctcccttggtctagtgcacctgacatgtgatagatactcaatatgtgtattttggataaatgagtaaatggcacccagtgtcccaaatctctgttactatgacaggagcagaatgtcagtaggatggcaccttggctcaattggccatgccagaattctcaggagttcaggctgaccagaagcaccttgaagagcagaagatgaaattttatgtccacttgagtttcaggatgaacacagaccatgagaggggctcaccatccttctgatctttggagtttttttwaaaattatttttatttatttatttatttattgttattattattattatttattattatactttaagttttagggtacatgtgcacaatgtgcaggttagttacatatgtatacatgtgccatgctggtgcgctgcacccactaactcatcatctagcattaggtatatctcccaatgctatccctcccc

SEQ ID NO: 923616 - DNA, 547 bp, Homo sapiens
gaagtttctcaggcctttgctctatcaatgaggcagaaggcagccctaaggggttcgtggctgggactagggctcccttggtctagtgcacctgacatgtgatagatactcaatatgtgtattttggataaatgagtaaatggcacccagtgtcccaaatctctgttactatgacaggagcagaatgtcagtaggatggcaccttggctcaattggccatgccagaattctcaggagttcaggctgaccagaagcaccttgaagagcagaagatgaaattttatgtccacttgagtttcaggatgaacacagaccatgagaggggctcaccatccttctgatctttggagtttttttawaaattatttttatttatttatttatttattgttattattattattatttattattatactttaagttttagggtacatgtgcacaatgtgcaggttagttacatatgtatacatgtgccatgctggtgcgctgcacccactaactcatcatctagcattaggtatatctcccaatgctatccctcccc

SEQ ID NO: 923617 - DNA, 713 bp, Homo sapiens
catgagaggggcatgattgattgagcaagtggggggtacgtgtctgggggctgcatgcaccggtaattacatcggaacaaaacaggatagggattttcacagtgcttttctatccaatgtctgtaatctatagataacataaccaattaggtcaggggtcgatttttaactaccaggcccagggtgtggygccgggctgcctgcttgtggatttcatttctgtcttttagtttttactttttctttctttggaggcagaaattgggcataagacaatatgagcggtggtctcctcccttattccccccctttgagaatctcactcaatagtgggagttctcactttcatttttacttcccatgtcttcttgcaagacagatcgatagtgattcacatagtacattgtgctgaagcattttggtgaactaaggtagtgatgaagctttttatcatttgaagaagtacaggtagcaaacaagggagcagtaagcaggttcctattactattataactcttattataagagttttaaatcctcttagtgctgggaaccattttccaaacatggccccaggatcaaatctatgccacacttgtacgggcatatgtgccagttttgtcatatctctaactatgtcttcaactacttacccttgattatctatgtgtaggcagcaattagtaaggttaaatttcctgcagacctctcct

SEQ ID NO: 923618 - DNA, 730 bp, Homo sapiens
catgtgccagtcacctcgcttcctggtcagggaaccaagaaatgtagcaggatgagctgcagacaaaactcctcagactccgagttaaagaaggaaggggtttattcggctgggggcattggcaagactcctgtctcaagagccaagctccccgagtgagcaattcctgtcccttttaagggctcacaactctaagggggtgcgtgtgagagggtcgtgatcgattgagcaagcagagggtacgtgtctgggggctgcatgcaccggtaattcgatctgaacaawacaggatagggattttcacagtgcttttctatccaatgtctgtaatcgataacataaccgattaggtcaggggtcgatctgcccagggtgtggcaccgggctgtctgcttgtggatttcatttctgcctttcagtttttactttttctttctttggaggcagaaattgggcataagacaatatgaggggtggtctcctcccttaatgcctctaaccccagcactttgggaggccgaggcatgtggatcatctgaggtcaggagttcaagatcaacctggccaacatggcaaaacctcgcctctactaaaaatacaaaaaaattagcctggcgtggtgacgggcacctgtaatcccagctactcaggaggctgaggcaagagaatcgcttgaacccagaaggcagaggttgcggagagccaagttcgcaccactgcactccagcct

SEQ ID NO: 923619 - DNA, 733 bp, Homo sapiens
gaccccgtctttataaaaaaaattaaaacaaagtctgggcgcagtggcttacgcctgtaatcccagcactttggaaggccaaggcgggcggatcacaaggtcaggagatcaagaccatcctgtctaacatggtgaaaccccgtttctactaaaaatacaaaaaaaatagccaggtgtggcggcgggcgcctgtagtcccagctactcaggaggctgaggcagaagaatggcatgaaccccagaggcggagcttgcagtgagccaagatcacgccactgcactccagcccaggcgacagagcgagactctgtctcaaaaaaaaaaaagaaaaaaaaattacaacaaaaaattatccaggcatggtggtgcatgccatcatcccagctacttgggaggctrcagtgagccatgatcacactactgcactccaccctgggcaacagagcaagaccctgtctcaaacaaaaacaaaaccaaaaccctcccccaaaacaatatactgtaataaaagttcattcttaccagaggtcgtagcaacctcagcacagaattctgttctttccttattcagttgagaacttccgccttctcgctaaaaggaagcgctttatggcttctctttggcatatccaaattgtcagcatcactgctctggtgctgtggggccattattcagtcaaataaaggtgacttgaacacaagcactgagatcctagggcagccgatctgatca

SEQ ID NO: 923620 - DNA, 603 bp, Homo sapiens
caggagaatcgcttgaacctgggaggcaggggttgcagtgagctgagatcgtgccactgcactccagcctgggccacagagtgagactccatctcaaaaagaaaagaaggacctgaggagctaggggggccagccagactgacgtgtggggaaggtcacgccaggcactgggaagagcaagtgcaaaggccaggggcagaagtgagctgggctgagtccaataattacggatgaaataattatgcagcyggtagtggaataataaccccagggaagcgctgcagagtgggggcacggggccctgtggaagtttaccgcggcggattccaccccattgggagggtcgagggctcctcaaggagccctaccaggccaagtagagagaacagcatgtcccacacagagggctcagagagctctgcactggcagagctccggaggggagagggcctggaggcacactgcaaaggaagtggagggggacagggatgcagaggcctgggaaggaggtgagggctggggaggtgggacaggcccaggtgtggcctcttaggcagttgccagtttctaagagcaaagagaagcctagaaaggttttatgta

SEQ ID NO: 923621 - DNA, 603 bp, Homo sapiens
caggagaatcgcttgaacctgggaggcaggggttgcagtgagctgagatcgtgccactgcactccagcctgggccacagagtgagactccatctcaaaaagaaaagaaggacctgaggagctaggggggccagccagactgacgtgtggggaaggtcacgccaggcactgggaagagcaagtgcaaaggccaggggcagaagtgagctgggctgagtccaataattacggatgaaataattatgcagctggtagtggaataataaccccagggaagcgctgcagagygggggcacggggccctgtggaagtttaccgcggcggattccaccccattgggagggtcgagggctcctcaaggagccctaccaggccaagtagagagaacagcatgtcccacacagagggctcagagagctctgcactggcagagctccggaggggagagggcctggaggcacactgcaaaggaagtggagggggacagggatgcagaggcctgggaaggaggtgagggctggggaggtgggacaggcccaggtgtggcctcttaggcagttgccagtttctaagagcaaagagaagcctagaaaggttttatgta

SEQ ID NO: 923622 - DNA, 693 bp, Homo sapiens
catagaacaacaaggcagaggaaaggagaaatctttctttctttctcctggacctgggacaccctgtttctgttgcccttggatatcagaactccaggcttttcagcctttagactccaggacaccctgggttctcaggcctttggcctcagactcagagttgcaccattggcttctctggttctgaggcttttggactgagccatactgcaggcatgcagtttgtgggcggcttgtcatgggacttctctgcctccataatcatatgagccaattcccctaataatcctctctttatctacctayctatctatctatctatctatctatctatctatcatctatccatccatccatctatccatccatctatctcctattggtcttgtctctctggagaactctgactaatactaagatcatctttgttagaaatggaatgttaatgctctgtcgttgcctgtatgatctataatttttttcttgtgtatcttttaaaatctttacctggcttgggaggaaaccatccttttttctgctcatattagcttttctagagtctggaagcacgtagtttctgcacagtaccaacctggactgaacaacagtaatatgcttaacattatccaaaactgattcttgttatcaattgtgcagtccttggagtcatatttgaaggtccacatcctggct

SEQ ID NO: 923623 - DNA, 759 bp, Homo sapiens
tgctgggagaaccactactctcttcaaagctgtcagacagggacatttaagtctgcagaggttactgctgccttttgtttgtctgtgccctgcccccagagatggagcctacagaggcaggcaggcctccttgagttgtggtgggctccactcatgagcttcccggctgctgttttcctactcaagccttggcaatggcgggcgcccctcccccagcctcactgccgccttgcagtttgatctcagactgctgtgctagcaatgagtgaggcttcgtgggcgtaggaccctccratcaaggggcgggatataatctcctggtgtgccatttgttaagcccgttcgaaaagcgcggtattagggtgggagtgacccaattttccaggtgccatctgtcacccatttctttgactatgaaagggaattccctgaccccttgtgcttcccgggtgaggcaatgcctcaccctgcttcagctcacgcacggtgcactgcacccactgtcctgcacccactgtctggcactccccgatgtgatgaacctggtacctcagttggaaatgcagaaatcacccgtcttctgcgttgttcatgctgggagctgtagactggagctgttcctattcagccatcttggctccacccctgagtagattgttttaaagaaccagtttgacatcttgccctgtaaaggttaactttctgttatcctctctcatgtatcacattatctccatcattttttggagttgctttgca

SEQ ID NO: 923624 - DNA, 759 bp, Homo sapiens
tgctgggagaaccactactctcttcaaagctgtcagacagggacatttaagtctgcagaggttactgctgccttttgtttgtctgtgccctgcccccagagatggagcctacagaggcaggcaggcctccttgagttgtggtgggctccactcatgagcttcccggctgctgttttcctactcaagccttggcaatggcgggcgcccctcccccagcctcactgccgccttgcagtttgatctcagactgctgtgctagcaatgagtgaggcttcgtgggcgtaggaccctccaatcaaggggcgggatataatctcctggtgtgccatttgttaagcccgttcgaaaagygcggtattagggtgggagtgacccaattttccaggtgccatctgtcacccatttctttgactatgaaagggaattccctgaccccttgtgcttcccgggtgaggcaatgcctcaccctgcttcagctcacgcacggtgcactgcacccactgtcctgcacccactgtctggcactccccgatgtgatgaacctggtacctcagttggaaatgcagaaatcacccgtcttctgcgttgttcatgctgggagctgtagactggagctgttcctattcagccatcttggctccacccctgagtagattgttttaaagaaccagtttgacatcttgccctgtaaaggttaactttctgttatcctctctcatgtatcacattatctccatcattttttggagttgctttgca

SEQ ID NO: 923625 - DNA, 642 bp, Homo sapiens
accactactctcttcaaagctgtcagacagggacatttaagtctgcagaggttactgctgccttttgtttgtctgtgccctgcccccagagatggagcctacagaggcaggcaggcctccttgagttgtggtgggctccactcatgagcttcccggctgctgttttcctactcaagccttggcaatggcgggcgcccctcccccagcctcactgccgccttgcagtttgatctcagactgctgtgctagcaatgagtgaggcttcgtgggcgtaggaccctccaatcaaggggcgggatataatctcctggtgtgccatttgttaagcccgttcgaaaagcgcrgtattagggtgggagtgacccaattttccaggtgccatctgtcacccatttctttgactatgaaagggaattccctgaccccttgtgcttcccgggtgaggcaatgcctcaccctgcttcagctcacgcacggtgcactgcacccactgtcctgcacccactgtctggcactccccgatgtgatgaacctggtacctcagttggaaatgcagaaatcacccgtcttctgcgttgttcatgctgggagctgtagactggagctgttcctattcagccatcttggctccacccctgagta

SEQ ID NO: 923626 - DNA, 759 bp, Homo sapiens
tgctgggagaaccactactctcttcaaagctgtcagacagggacatttaagtctgcagaggttactgctgccttttgtttgtctgtgccctgcccccagagatggagcctacagaggcaggcaggcctccttgagttgtggtgggctccactcatgagcttcccggctgctgttttcctactcaagccttggcaatggcgggcgcccctcccccagcctcactgccgccttgcagtttgatctcagactgctgtgctagcaatgagtgaggcttcgtgggcgtaggaccctccaatcaaggggcgggatataatctcctggtgtgccatttgttaagcccgttcgaaaagcgcggtattagggtgggagtgacccaattttccaggtgccatctgtcacccatttctttgactatgaaagggaattccctgaccccttgtgcttcccgggtgaggcaatgcctcaccctgcttcagctcacgcacggtgcactgcacccactgtcctgcacccactgtctggcactccccratgtgatgaacctggtacctcagttggaaatgcagaaatcacccgtcttctgcgttgttcatgctgggagctgtagactggagctgttcctattcagccatcttggctccacccctgagtagattgttttaaagaaccagtttgacatcttgccctgtaaaggttaactttctgttatcctctctcatgtatcacattatctccatcattttttggagttgctttgca

SEQ ID NO: 923627 - DNA, 502 bp, Homo sapiens
ctgatgagctaaaaaaagtcacaaaaaaatctcagaacgttataagaaagtttatgaatttgtgctgggccacaatcaaagccatcctgggctgcatatggcttgtgggctgcgtgttggagaagcttagtctaactggaacatgattctygaggctaccatctgaacactagaggcaaaagtgggaggagggcaagtggtggagaggaaacaggactaacgtgcagctcatgcttggatggacgaaacagcatctggagactcacattgtgaacttttgctccaggaacaactgcagaaacacaccaggaaaaccaaaagaattcaaagaccatttgaaagacgtggcttgccactgcaaatgctgtgacacagccaaaaaactccaaagacaaaagacataagctcttggaagcactatggccctgcccatcacctgagaaacataagtattcatcctggccaacataggacaacattatatcccccttttactactaca

SEQ ID NO: 923628 - DNA, 632 bp, Homo sapiens
ccaaaaatttgtggtacacagctaagagcagtgcccagagggaaagttaacagcactaaaatgcatccattagaaaagtgggaaaatcttaataatctaagctccatctcaagaacctagaagagtaaaataaaaccaaaacgagcagaaagaagaaaataataaagagcagacggccgggtgcggtggctcacacctgtaatcccagcacgttgggaggccgaggcgggcagatcacgrggtcaggagatcgagaccatcctggctaacaaggtgaaaccctgtctctactaaaaatacaaaaaattagttgggtgcagtggcgagcgcctgtagtcccagctactcaggaggctgaggcaggagaatggcgtgaacccgggaggcagagcttgcagtgagccgagattgcgccactgcactccagcctgggcgacagagcgagactctgtctcaaaaaaaaaagaaaataataaagagtagaaattgatggaattgaaacagaatcgggcatggtggcttatgcctgtaatcccagcactttgggaggctgaggtgggtgggtcacctgaggtcaggagttcaaggccggcccgggcaacatggtgaaaccccatctctactaaaaatac

SEQ ID NO: 923629 - DNA, 679 bp, Homo sapiens
gtgaatggacaaactgtgcttcattcacctagcaataaaaagaactactgatgcatggatgatggtctgtgaaacagagaaaaatgagtctatgctgtatgattccattcatatgaaattatagaaaagtttagccargcgtgatggcaggcgcctgtagtcccagctccttgggaggctgaggcaggagaatcacttgaaccctggaagggggaagttgcagtgagctgagattgtgccactgcactccagtctgggtggcagagtgagactccgtctcaaaaaaaaaaaaaaaaaaagaaatcatagaaaagacaaactatagggtcagaaatgagatcagtggtagcctggaaccaggggttgtgggaggagattggccgcaaaggagcatgagggaactttggagtgatggaattattctgcattttgattgtggggctggttgcacaggtgtatgtatttgtcaaaattcattcaacatctggtcatggtgggctcacacctgtaatcccagtgctttgagaggccaaggcgggcagatcacctaggtcaggagtttgagaccagcctggccaatgtggtgaaaccccgtctctactaaaagtacaaaagttagccgggcatggtggcatatgcctgtagtcccagctattcgggaggctgaggcagaattgct

SEQ ID NO: 923630 - DNA, 599 bp, Homo sapiens
tggttaatagtcttcttaactaatagctgtactttaaaagttgttttattggtcaactgaaagttgaatatagaataatttaaaccacttttaaaagttagctctccgttaatgttttccagatgaatactttgctggtggcttacactcatcttttgatgatctttgtggaaactcaggatgtggaaatcaggaaaggaagttggaaggatccattaatgacattaaaagtgatgtgtgtatttcttcacttgtattgaaagcaaataatattcattcatcaccatctttcactcacctcgataaatcaagtcctcagaaatttctgagtaatctttcaaaggaagaaataaacttgcaaakaaatattgcaggtaaagtagtcacccctgaccaaaagcaggctgcaggtatgtctcaggagacgtttgaagagaagtatcgtttgtctcctaccttatcttcaacaaaaggccaccttttgatacattcaagacccaggagttcctcagtaaagagaaaaagagtatcacatggctcccattcacctccgaaggaaaaatgcaagagaaagaggagcaccaggagatctatcatgc

SEQ ID NO: 923631 - DNA, 825 bp, Homo sapiens
tgactgtaatcacgtgagtttatttctgaacttcctactgtgttctgttggtctatatgtctgccatataatccagcaatcccacttctgagtatagatcccaaagaaatgaagtcaggatctcaaagagatatctatactgtcatgcccactgctgtattatttacaatagccatgatatgaaaacaacccaaaagtccatcaacagataaatggatttaacaacatggcatatacatacagtggaataatattcagcctctctaaaaatgaaaatcctaccatttgtgacaacatgaatgaacctgaaggacatcatactaagtgaaataagccagtcacagaaggacaaatactgcatgattccacttattggcgtaatattacataatcaaactcatagaagcagagaatagaatagtggttgccaggggctggtaggagagggaaatggagagctgttgctcaataggtataaagtctcagttacacaaaacaaacaagttccatttatctactgtacaatgtagggtctacagttaacaatatgatgttatgcatttaaaactttgttggggtagatcttgtgttatttgttcttagcataaaaaaagaaagaaaaataaaaaaaaaacagaaaagagcacaggaaaatttttsaagttttgtaaaaaaaaaaaaaaaaaagtatgtttaatacttgattgtgataatgatatcacaagtgtatgcatatatccagactcatcaaattatcaaattgaatatattaaacgtgtgccataaagtatgcgaagcaatatatattagcccgatgtagccatt

SEQ ID NO: 923632 - DNA, 738 bp, Homo sapiens
cagtcagctcaagctaccaaaaagtaccactagctttggcttaaacaacagaaatgtgttttctcatagctctggtggctagaagtccaagatcaaggcacgtgcaggatgggtttcttctgagtctctctctttggcttgcagatggccatagtctctctgtgtcctcaaatggtctttcttctgtgcatatgtattcctggtgtctctctgtgtgtcctaattcctcttcttataaggatatcagtcagactggattaggggccaacctaacagcctcattttaagttaattacctctttaaaggcrctgtcggccgggcgcggtggctcatgcctgtaatcccagcactttgggaggccgaggtgggtgtatcacgaggtcaggagatcgagaccatcctggctaacatgatgaaaccccgtctctactaaaaatacaaaaaattagctgggcgtgatggcgagcatctgtagccccagctactctggaggctgaggcaggagaatggcctgaacccgggaagtggagcttgcggtgagccgacatcgcgccactgcactccagcctgggcgacagagagagactccgtctcaaaaacaaaacaaaacaaacaacaacaaaaaaaaggctctgtctccaaatagagtcacattctgaggtactggaggttagggtttccacatatgacattttggaggacacaattaagctcatacagctgcctggtgcatcttt

SEQ ID NO: 923633 - DNA, 738 bp, Homo sapiens
cagtcagctcaagctaccaaaaagtaccactagctttggcttaaacaacagaaatgtgttttctcatagctctggtggctagaagtccaagatcaaggcacgtgcaggatgggtttcttctgagtctctctctttggcttgcagatggccatagtctctctgtgtcctcaaatggtctttcttctgtgcatatgtattcctggtgtctctctgtgtgtcctaattcctcttcttataaggatatcagtcagactggattaggggccaacctaacagcctcattttaagttaattacctctttaaaggcactgtcggccgggcgcggtggctcatgcctgtaatcccagcactttgggaggccgaggtgggtgtatcacgaggtcaggagatcgagaccatcctggctaacatgatgaaaccccgtctctactaaaaatacaaaaaattagctgggcgtgatggcgagcatctgtagccccagctactcyggaggctgaggcaggagaatggcctgaacccgggaagtggagcttgcggtgagccgacatcgcgccactgcactccagcctgggcgacagagagagactccgtctcaaaaacaaaacaaaacaaacaacaacaaaaaaaaggctctgtctccaaatagagtcacattctgaggtactggaggttagggtttccacatatgacattttggaggacacaattaagctcatacagctgcctggtgcatcttt

SEQ ID NO: 923634 - DNA, 734 bp, Homo sapiens
ccatgctgggcctatttgtaggttttaaaaatattttgaaaaataataataataataataaaagaaaagttttggatatcaattctttctcagttatatacattacaaatatctcttaatttgtagcttttcttctcatattatttatggttttccatgaaaatgtacaaaaggatttacattttatttatttttttatttttctttttttttttttgagacggagtttccctcttgttgcccaggctgcagtgcgtttattttgyttttttttttttttttttttgagacggagtttccctcttgttgcccaggctgcagtgcgatggcgcgatctcggctcaccgcaacctccacctcccaggttgaagcaattctcctgcctcagcctcccaaatagctgagattacaggcatgtgccaccacgcccgactaattttgtatttttagtagagatcaggtttcacatgttggtcaggctggtctcaaacctgtgacctcaggtgatctgcccacctcagcctcccaaagtgctgggattacaggtatgagccaccctgcccggcttctattttttttttttttcttttttttgagacggaacctcactctgtcacccaggctagacagctcagtgaggtgatcttggctcactgcaacctccgcctcctgggttcaagagattctcctgcctcagcctccggagtagctgggattacaggcccaaagcacca

SEQ ID NO: 923635 - DNA, 634 bp, Homo sapiens
ggaaacaacacgccacaagtggacctcatgaccccaggcattctgtcactgtataagtgatataagtgcacctctagctggacagctcctcaggtcctcccagtctaaagtacaggatgtgaaagtaagacggttcaactcgcactttatctctgggggatggatccaacgagtccgggaaggagggtagaatctttatgttgcatctcataatcccaaggttgttttttgacattctaattattgtacatagttagcttttcaaaaacatggcccaccagctatcaygccttctttcttctctctctcctcacaccttctaggtccacaaagtcccactaacatcaagcatgatctcacccttaaacagagctacagagcctccaaacatctgcatactcaccaactagtagtacaaggtaagtcagaattctttcaggctgaaccaggatagccaaatgaaaaattagagacttcaaagtatcttgtctctgcaagcgactgctaaatcctcagccccagccctaaatgttctccaaaatatgtttttgtttttgttttttgagacagggtctcaaactcctgggctcaagcgatcctcctgcctcagcctccctagaagctaggattacag

SEQ ID NO: 923636 - DNA, 634 bp, Homo sapiens
ggaaacaacacgccacaagtggacctcatgaccccaggcattctgtcactgtataagtgatataagtgcacctctagctggacagctcctcaggtcctcccagtctaaagtacaggatgtgaaagtaagacggttcaactcgcactttatctctgggggatggatccaacgagtccgggaaggagggtagaatctttatgttgcatctcataatcccaaggttgttttttgacattctaattattgtacatagttagcttttcaaaaacatggcccaccagctatcatgccttctttcttctctctctcctcacaccttctaggtccacaaagtcccactaacatcaagcatgatctcacccttaaacagagctacagagcctccaaacatctgcatrctcaccaactagtagtacaaggtaagtcagaattctttcaggctgaaccaggatagccaaatgaaaaattagagacttcaaagtatcttgtctctgcaagcgactgctaaatcctcagccccagccctaaatgttctccaaaatatgtttttgtttttgttttttgagacagggtctcaaactcctgggctcaagcgatcctcctgcctcagcctccctagaagctaggattacag

SEQ ID NO: 923637 - DNA, 671 bp, Homo sapiens
ttaggggataatgcagctgatgactttaagtttaatccaatgctcatttaccattatttaccattccaagaatcctaggacccctgagaatgatactaaatatattctgcttgtcttctacaaattgaacagcaaagcttggatgacagcacatctattttgcagtatagtctactgcatattttaagcccatactggatattttaagcccactgttgaaaccaactgcttagaaagaaagatttcattctgaacattagtgctcattgacaatgtacctactcacccaagagctctgatgatacaaggaggttaacttttttttttcacgcctgctaacacaacatccatttgcagcccatagatcaaggagtcagttcaaatttctagtcttattatttaaggaatacattccataaggatatagctgtcataaatagaagattaaattaattaatttaaattaaatattttgatcttyctctcatgtatctgaaattgaaaaccttctggaaaagatccaacattctagataccattaagaacattcatgattcgtgagagatggtcaaaatatcaacattaacaggagtttgaaagaagttaattccaactcttataaatagtttgagaggctcaagtgttagtggaagaagtttctgtagatatat

SEQ ID NO: 923638 - DNA, 582 bp, Homo sapiens
aaccactactctcttcaaagctgtcacacagggacgtttaagtctgcagaggttactgctgtctttttgtttgtctgtgccctgcccacagaagtggagcctacagaggcaggcaggcctccttgagctgtggtgggctccacccagtttgagcttcccggctgctttatttacctaagcaagccagggcaatggcaggtgcccctcccctagcctcgctgccgccttgcagtttgatctcatactgctgtgctagcaatcagcgagactccgtgggcgtaggaccctctgagtcatatgcaggatataatctcctggtgtrccgttttttaagcctgttggaaaagggcagtattagggtgggagtgacctgattttccaggtgctatctgtcacccctttctttcactaggaaagggaactccctgaccccttgcgcttcctgagtgaggcaatgccttgccctgctttagctcacgcccggcgcgctgcacccactgtcctgcacccactgtctggcactccctagtgagatgaacccggtacctcagatggaaatgcagaaatcacccgtcttctgcg

SEQ ID NO: 923639 - DNA, 544 bp, Homo sapiens
agagaatctgtgtgcttggggagagagaccacagcaactgtgggaccctgcattgaactcagtgctgctctgtcacactggaaagcaaaactgggctaaactcaggtgacacccatgcactagggggcatttagaccagccctagccagagaggaaccacccacaccagtggtcagcctcgccaccatgggctaatatgctctggggttctaaataaacttgaaagcagtggctatttgaaaacaatcctatggtttttgtcctttattctattgatatgctgtatcccattgattgatttgcatatgttgaaccatccttgcatcacagtaataaataacagtcatgatgaatcacctttttaatgtrttttttaattcagtttcttagtattttgttgaggttttttgcatcaatattcattagagatattggcctgcagttttcttttcttttcttttcttttttcttttttctttttttttttttttgatgtgtctttgtctggtgttggtatcagggtaatattgacctcatagaatga

SEQ ID NO: 923640 - DNA, 598 bp, Homo sapiens
ccatatggaactgtaagtccattaaacctctttcttttgtaaattgcagagtctcaggtatgtctttagcagcagcatgagaacagacgagtacagtaaactagtaccaggagtgggtgctgatgaaaagataccccaaaatttggaagcaactttgaaactggataacaggcagaggttggaatggtttgcaaggtccaaaagaagatagaaaaatgtgggcaagtttggaacttcatagagacttgttgaatggctttgccaaaaatgctgatagtgatatggacaattaaatccagcctgaggtggtctcagatggagataaaaaactttttgggaactgtagcaaaggtgactcttgttatggtttagcaaagaggctagtggcattttgccrctgccctagagatttatggaactttgaacttgagagagatgatttagggtatctggtggaagaaagttctaagcagcaaagcattaaagaggtgacttggttgctgttaaagacattcagttttaaaagggaacagagcataaaagtttagaaaatttgcagcctgccaatgtgatagaaaagaaaatccaattttctgag

SEQ ID NO: 923641 - DNA, 626 bp, Homo sapiens
gtcttgagcggggtccagaacaggagaaggctctgcaacaggtccaggctgctgtgcaagttgctctgccacttgggccatgtgacccaggagatccgatggtgcttgaggtgtcagtggcagatagggatgctgtttgcagcctttgacatgtccctctaggtgaatcacagcggaggcctctaggattttggagcaaggccctgccatcttctgcagatgactactctccttttgagagacagctcttggcctgttactgggctttggtggaaactgaacatttgattatgggtcatcaagtcaccatgcaacctgaactgcttaacatgaattgggtgctttctgacccatctagccataaagtgggtcatgcgcagtagcattcaatmatcaaaatggaagtggtatgtacgtgatcaggctcgagcaggtcctgaaggcgcaagtaagttacatgaggaagtggctcaaatgcccctggtctccactcctgccaccctgccttgtcttcctcggcctacatcgatggccccatggtgagttccttatgatcagttgacagtggaagagaagactatggcctggtccacagatggttctgcacaatatgcaggcaccaccag

SEQ ID NO: 923642 - DNA, 708 bp, Homo sapiens
agctcctttctaggacatcccttaaggatagtggtgaaggaaaatcttcccagtgggcagaactacaagcagtgcacctggttgtgcactttgcatggaaggagaaatgaccagatgtgcgattatatactgattcacgggctgtagccaatagtttggctggatggtcagggacttggaagaagcatgattggaaaattggcgacaaagaaatttggggaaaatgtatgtagatggacctgagtggtcaaaaactgaagatatttgtatcccatgtgagtgctcaccaatggrtgacctcagcagaggaagattttaataatcaaatggacaagatgactcattctgtggacattattcagcctttttccccagccaccccgtcatcacccgacgggcccacgaacaaagtgaccatggtgacggggatggaggttatgcatgggctcagcaacatggatttccactcaccaaggctgacctggctatggccactgctgagtgcccaatttgacagcagtagaggccaacactgagcccttgatatggcaccattccttggggtgagcagccagctacctggtggcaggttaattatattggacctcttccatcatggaaagagcagaggttcatcctcagtggaatagacacttactccagatatgggttttcctatcctgcatgcaatgcttctgccaagactac

SEQ ID NO: 923643 - DNA, 615 bp, Homo sapiens
tacagctcctttctaggacatcccttaaggatagtggtgaaggaaaatcttcccagtgggcagaactacaagcagtgcacctggttgtgcactttgcatggaaggagaaatgaccagatgtgcgattatatactgattcacgggctgtagccaatagtttggctggatggtcagggacttggaagaagcatgattggaaaattggcgacaaagaaatttggggaaaatgtatgtagatggacctgagtggtcaaaaactgaagatatttgtatcccatgtgagtgctcaccaatggatgacctcagcagaggaagattttaataatcaaatggacaagatgactcattctgtggacaytattcagcctttttccccagccaccccgtcatcacccgacgggcccacgaacaaagtgaccatggtgacggggatggaggttatgcatgggctcagcaacatggatttccactcaccaaggctgacctggctatggccactgctgagtgcccaatttgacagcagtagaggccaacactgagcccttgatatggcaccattccttggggtgagcagccagctacctggtggcaggttaattatattggacctcttcc

SEQ ID NO: 923644 - DNA, 512 bp, Homo sapiens
acactctgttcccaaaagggttttggaattcaaaaatgaaggagaataacaatagtgcatagctattgaataactactgggtcagatactacactcatgcacataaaatgcttactttgtctaatcctcaccacagccctaggaaataggtgctgttattatccccattttatagctgagaatctgaggctcaaagaatgtaaaaatgttgctcaaagctgaagtaacagagctacatttaatccctggtctgtctgatgcctaacaaaatccctttatttagtgagktgctatgcttatctttctggaatgcaaaggcaacactcactaactttcctttatggaagaccaaaaacccagacatttttttttatcagagccttctagggtacctcaggaggccaaagtttgaattaagcattattccatgggtatgatgcatgatggaattttatcagagacaaaacagaaatcagcatagatgaagaaataggaaaggcaatggtcccatc

SEQ ID NO: 923645 - DNA, 580 bp, Homo sapiens
ttccagcccagatactatgcttttcccatggtcttcacaacccacaggagaggagattccctagggtgtctacaccaccagggccctgggtttcaagcacaaaactagggggcagtttgggcagacactgagctagctgcagaagatttttttcgtaccccagtggcacctggaatgccagtgagacagaaccrttcactcctctggaaagggggctgaagccagggagccaagtggtctagctcagcggatcccacccccatggagtccagcaagctaagatccactggcttgaaattcttgctgctagtacagcagtcttaagtggacctgggatgctctggcttggtggagggagaagccacgtccaccattactgaggcttgagtaggtggttttccctcacagtataaacaaagccaccagcaagctcgaactgggtggagcccaccacagctcagcaaagcctctgtagcctgcttctctagtcctcctctttaggcagggcatctctgaaaggaaggcagcagccccagttaggggcttatagataaaactcccatctccctgggacagagca

SEQ ID NO: 923646 - DNA, 581 bp, Homo sapiens
gtctttgcaaccagcagaccaggagattccctcccacgcctggctcagtgggtcccatgcccacagatccttgctcactgctagtgcagcagtctgagatcaatctgggatgctggagtatggcagggggaggggcgtctgccattgctgaggcttgaataggcagttttatgcccacagtgtaaacaaagccgcagggtagctcgaactgggcagagsccactgcaactcaacaaggcctactgcctctctagactgtctagggcatatctgaaaaaaaggcagcagacagcttctacagacttaaacaaccctgcctgacagctctgaagagagcagtggttctcccagtatggcgttcgagatccattaatggacagactgcctcctcaagtgggtccctgacccccgtgtagcctgaatgagagacacctcccagtaggggctgacagacacctcatacaggcgggagaccctctggaacaaagcttccagaggaaggatcaggcagcaatatttgctgttctgcagcctctgctggtgatacccaggcaaacagtgtctggagtggacctccagca

SEQ ID NO: 923647 - DNA, 573 bp, Homo sapiens
agcagaccaggagattccctcccacgcctggctcagtgggtcccatgcccacagatccttgctcactgctagtgcagcagtctgagatcaatctgggatgctggagtatggcagggggaggggcgtctgccattgctgaggcttgaataggcagttttatgcccacagtgtaaacaaagccgcagggtagctcgaactgggcagagcccactgcaactcaacaaggcctactgcctctctagactgtctagggcatatctgaaaaaaaggcagcagacagcttctacagacttaaacaaccctgcctgacagctctgaagagagcagtggttctcccagtatggcgttygagatccattaatggacagactgcctcctcaagtgggtccctgacccccgtgtagcctgaatgagagacacctcccagtaggggctgacagacacctcatacaggcgggagaccctctggaacaaagcttccagaggaaggatcaggcagcaatatttgctgttctgcagcctctgctggtgatacccaggcaaacagtgtctggagtggacctccagcaaact

SEQ ID NO: 923648 - DNA, 570 bp, Homo sapiens
attgtaatccccagtgttggaggtgggacctggtgggaggcaattggatcatgggggtgatcctacacgaatgggttagcatcatctccttggtgctgttgtcacgatagtgagtgagtgagaccgagagagatctggttgtttaaaagcgtgtagcatctccccactctccctctttctgctgcagccatgagacattctggctcccctttcgccttccaccatgactgtaagtttcctgaggcttccccagaagctgagcagatgccagaatcatgcttcctggacagcctgtggaatcatgaaccaattaaaccccttttctttattaattccccagtctcagatatttctttatagcagtgcaagaatggattaatacaccagggaatactacttagtagtaaagaagaacagactatcartattgcaacaacttggatgagtctccagggagtcatgctaagtgaaaaaaaaaaaaaaagcccaaaagattacacactggtgcctccatttatagaacatttatgaaatgataaaaattttagaaaccgagaacagattagtggt

SEQ ID NO: 923649 - DNA, 626 bp, Homo sapiens
tgatatccgtgggcccttaatcagaaaactttaatttcccgcttcccttttctcttgtttgactttggattctgtttcaaagtttctaagtcaacaatataatcaactgaacttagaacaacttcctgctcctgacaggaagaaaaaaagaaatctctttgtttctccagtggttggggagtaaacgaacctcccagggaaagaaaaatcctytggctatatttctcttgcttgagaaagagcagaacaaggagggtcttctgattttgaatccgttgcatacactggagttaaaagtcgagttgtctatagcagccaggcagataagtggttactgttcaccaatctatatgctcccctgtatttcccagtctccgttgcagttagcttaggaccatgtgactagttctggccaatgggctgttaggggaagcttctcgtatcactttcaggtcaaggttgctaacagggggcctgccttctccatctccttcctctgctgtagtgactttggaggccacatcttccatataagagagagctatctggcctttgacctatagtccacattacataaagtagaaataaatcttcagcatgaggccactgagattttcaagatttgt

SEQ ID NO: 923650 - DNA, 620 bp, Homo sapiens
tgcctccacatcaataacgcttctgaatatcaattaccaacatgctctcgccagcatttcaatgggaagaaatgaactgaaccaaccctgtaggttgcttgctttcttcaagagaaaggaaagtttgcagaattgctcatgaactggaatctgcagaaccaccgcgatggggtgacttacagagtggggaagaggtctgctcatggcccagattagagtgaccctactgaaatggctgcctcaaaaacccaaggcccaccatgtccacctattgaaattaactaaagaattcaatgagtttcccagtgacccagctccctgtgagttgaacatggtttctgctatttcatttgaaactaccatagctcacagagctggaggagggktgcatgacagattgcagagcccagcccagccacacccccacctctcctctctgttgctaactgcacacacagaggtccttagggagggggaaatgcaataagaaaacacctgtgatttccttgcagaactcccccatggctacaatccaccctttcctctcttataaaagattccatttgctccatttctgaccccagggcatggacaaatggatggtggcctggtgtggcttc

SEQ ID NO: 923651 - DNA, 653 bp, Homo sapiens
agaggtggaatctagagaggcagtagcccttgctgagctgtaatgtgctccacccagttcgagcttccctgccactttgtttacactgagcatagaactgcctactgaagcctcagcaatcgtggatgcccctttccctgccaagctccagcgtcccaggtcaatctcagactgctgcactagcagcgagcaaggctccgtgggtgtgggaaccgccaagccaggtacgggagggaatctcctggtcttccggttgtgaagaacatgagaaaagtgccgtatttgggcagaastgcaccgttcccccagttacagtcactcatggcttcccttggctaggaaagggaaatcctctgatcccttgtgcttcccgggtgaggtgacaccctgccctgcttctgctcaccctccgtgggctgcacccactgtccaaccagacccaatgagatgaaccaggtacctcagttggaaatgcagaaatcacccgttttctgtgtcaatctcgctgggagccgtagactggagctgttcctattcggccatcttggagtttttgtttgtttttgtttttgtttttgacagagtctcactctgttgcccaggctggagtacagtggcacaatctcggctcaccataacctctgcctcccagg

SEQ ID NO: 923652 - DNA, 653 bp, Homo sapiens
agaggtggaatctagagaggcagtagcccttgctgagctgtaatgtgctccacccagttcgagcttccctgccactttgtttacactgagcatagaactgcctactgaagcctcagcaatcgtggatgcccctttccctgccaagctccagcgtcccaggtcaatctcagactgctgcactagcagcgagcaaggctccgtgggtgtgggaaccgccaagccaggtacgggagggaatctcctggtcttccggttgtgaagaacatgagaaaagtgccgtatttgggcagaagtgcaccgttcccccagttacagtcactcatggcttcccttggctaggaaagggaaatcctctgatcccttgtgcttcccgggtgaggtgacacccygccctgcttctgctcaccctccgtgggctgcacccactgtccaaccagacccaatgagatgaaccaggtacctcagttggaaatgcagaaatcacccgttttctgtgtcaatctcgctgggagccgtagactggagctgttcctattcggccatcttggagtttttgtttgtttttgtttttgtttttgacagagtctcactctgttgcccaggctggagtacagtggcacaatctcggctcaccataacctctgcctcccagg

SEQ ID NO: 923653 - DNA, 711 bp, Homo sapiens
aagcccctactttaactggaggaccacaatgacgttttgtttcccctggaatcagcgtcagctcagagccagtgttcagtatttccccaaatgtctgattatttccctttcccaatgcacagttatcctggtaaacggctggaggtctccttggggaagcatggsagaaagattcactgtataaattttcagtattgtagtggtgtccttccttaagagaacccggcctccccttcattcaaggggttctgggtttgtaaactggctcaagtctgaaaattgattgaggggccatgattcactgcttttataattcaaattagtctttttttccatttgatctagaagttttctgcttatataaattaagtaggaatgcagtaggcttcttaccaatttcacttctaggaatgccatgattgattagccaatgccagaactctacattagtcagattattctgattgctgctttgcctctgctgtccattacagtaggtacacccactatgcctttgacagttgagtgctaccatttggcccctgccaccttgggatccaattcttcccattgtatttaaattttgtagttgagtgactgtcattcccaccgttagatatgacatgcagagaagggcaattacagggctcttcaaagatgcaagtgctgccctcacgaatctgttttgcaaggcattggtcgagggtttat

SEQ ID NO: 923654 - DNA, 613 bp, Homo sapiens
aggaaataagagaggtcacaaacaaatggaaaaacattccatgctcatggataggaagaatcaatactgtgacaatggtcatactgcccaaagtaatttatagattcaatgctatccccatcaagctaccactgactttcttcacagaattggaaaaaactaccttaaacttcatatggaaccaaaaaagagcccacatagccaagacaatcctaagcaaaaagaacaaagctggaggcatcatgttgcctgacttcaaactatattacaaggctayagtaacaaaaacagcatggtactggtatcaaaacagacatatagatcaatggaacagaacagaggcctcagaaataacaccacacatctacaaccatctgatctttgagaaacctgacacaaacaagcaatggggaaaagattccctatttaatgaatggtgttgggaaaattggctagccatatgcaataaactgaaactggaacccttccttacaccttctacaaaaattaactcaagatgtattacagagttaaacataagacctaaaaccataaaaatcctagaagaaaacctgggcagtaccattcaggacataggcatgggcaaatactt

SEQ ID NO: 923655 - DNA, 601 bp, Homo sapiens
gatattgttcttttttcttgttcctttgagttttctttctttgcctttgattttttaataatttgattatgatgtgctttggggaattcctctgtaagttgaatttggttggtgacctctgagctttctgtacctgaatgtcatcatccttctccacatttgggacatttttagctgttattttattaaatatactttctagggcttttactctctgatctccttcagtaactgctrctatgtgaggttagtttgcctaataatgtctcataattttcttaatctttctttaatctttttaatttcttttatctttttgctcctttgattggatagttttataggtcccatctttaggctccctgattttttccctctgtttgattaagtctgcctttgaaaatttctggtagacattttcattttagttattgtattctgtatttctaggttttttatttgaacttaagttgttcctatttctttgtcaaagtctcatattgttcctgaatgtttatcaaatttcatttagtttttttcttacctgaattttcttatgattccttgaacttctttaagaaaattatactgagttttttgt

SEQ ID NO: 923656 - DNA, 601 bp, Homo sapiens
gatattgttcttttttcttgttcctttgagttttctttctttgcctttgattttttaataatttgattatgatgtgctttggggaattcctctgtaagttgaatttggttggtgacctctgagctttctgtacctgaatgtcatcatccttctccacatttgggacatttttagctgttattttattaaatatactttctagggcttttactctctgatctccttcagtaactgctactatgtgaggttagtttgcctaataatgtctcataattttcttaatctttctttaatctttttaatttcttttatctttttgctcctttgattggatagttttataggtcccatctttrggctccctgattttttccctctgtttgattaagtctgcctttgaaaatttctggtagacattttcattttagttattgtattctgtatttctaggttttttatttgaacttaagttgttcctatttctttgtcaaagtctcatattgttcctgaatgtttatcaaatttcatttagtttttttcttacctgaattttcttatgattccttgaacttctttaagaaaattatactgagttttttgt

SEQ ID NO: 923657 - DNA, 567 bp, Homo sapiens
gatggatatatgcaataccccagtggtggacagaagtcccagccttgacagaagcaactgggggagctctccttgaaaggcactgaggtctttgcaggagaaagggagggagccacctcagctcctcttccagaccagcacgaaagcaatctgcctccctgtcacactcatgtcgcaatgttctggatattcagatcagacgaggcacttctgtggatctgcagaaatgctgacattcatgtagagagggattgtgaacctaccccaaagtgctccagaaaggccatccataggtgcacccmagccaagctcctgtggaggagtcccagccacgtctgcagtgataggcaaagggtagaagtccccttctccaggtcccttcacgagcactggggctgcccaactgctggggtagaatgacagtctttctaccacttagcccagcactgcatctgtgcctctgctgaaagaaacttcccacaagcagaaagttctaggactcaaaggctgcactctaattaattttgtcccacagggtgctcccttgatatggtaccctttcccttc

SEQ ID NO: 923658 - DNA, 736 bp, Homo sapiens
tgggactacgcatgttcaaaatggtggctccatcttcccttctctttgccagccatgtgtacagtaaggagcaggcaacatggcacaggccaagcaaagacctatttgcataataagattaaggtggggccaccagcttccctgcgagttatgtaaacatcacacctggttcaaccaatctttgggccctatgtaaatcagacaccgcttcctcaagcctgtctgtaaaatctggtgcactccaccaagggccagaattcccattcgggtgcctctctctctctctctctcwcacacacacacacacacacacacacttgcacgagagagggctgttcccctttctctttcttttgcctattaaacttttgctcctagactcactccttgtatgtgtctgtatccttaattttcttggcatgagacaacaaaccttgggtattacccccagacaaggatgctgcttcaaaatgaccaggaaaagttaggcacacagacacactgaagggtgaggggaacagaatttactgggcaacaggaaaaaagaataaaaaaacaaaaaactctcagcaaagtgagagggagtcgtgaaaaaaaaaaaaaaaaaactcagcaaagtgagagagagtcatactagcaggctcctatctcacggactgaataccagaggccaccacacaggaactgaagaggccaggctcctccccactgcacacagagaacttccatggctcca

SEQ ID NO: 923659 - DNA, 702 bp, Homo sapiens
tcaggtttacctaacttttttttttttttcaaactttcatgttttcaaactaattttcagcatcacattgaaatttcagggaaacaatttcagtactttcatttaagattctgctttagtaatattcactaaataatagatagttgagtcattaatgatttcctagwactccccaattttgtgacttgctttgctgctatttgtgttgggtaattccttacatgctccataggttagtagtatccgtgtcattttatagatgagggaacaggcatggaaatttggagacttttctaagtttataagtatcaaataagaatcaaattaattatctgacaatatgttccatttaagtatacagaaaacttgtgtgaataaactttaaatgaagagttagaaagctggattttcatttcattactactataatctcactgaagaaaatctattaaccttttgcagcctatttttgtcatttgtaaaatggagttaataatacctgccttggatcctcttctcataaaccttgaaaaggtaaatgagataactttgatgtgatgctttgcatgcagaagcagagcacaaaataaatacaaggcatggcttttatcactagcagttaaatgacccagctaggccacagcatcaaagggataccataaccattttttaaaaagaataagaggtagtttccgatataag

SEQ ID NO: 923660 - DNA, 674 bp, Homo sapiens
ctattttaaaaggagaaataaaaacattaaatgtaggattatcatatgatccagcaatgtcacttctgggtatatacccaaaagaagtgaaagcagggacttgaacagttatttgtagaccacattttagcagcattacttacaatagccaaacgatggaaacaactcaaatgtccattgacacatgaatggataaatacagtgtaatataaaccacattggaatatatgatgcaatatcattcaccgttaaaatgaaagcagattctgatacatgttacaacatggatgaatcttgaggacattatactaagtgaaaatgaaacagtcacaaaaaggcagatgctrtaggattccacttatataaggtacctagagtagccatagagacagaaagtagaatgttggctgccaggaggtcagggagaggagaatgaggggttattgtttaatgggtatggagttttaatttggggtgatgaaaaaattctgtagatggatggtggtgagggtggcagaacaatgtgaatgtacctaatgccactgaactgcatacttaaaaatggttaaaatgctaaatattctgttatgtgtattttatcccaataataataataataataaatctagctcataaaaaggaggaagagaacaagcccacactcaactcagagt

SEQ ID NO: 923661 - DNA, 714 bp, Homo sapiens
aaagcaggcagaaaaatgtgagaaggacagatgggcctaacctaccagcccacatctttctcccgtgctggatgcctcttgccctagaacatccgactgcaggttcttcagttttgggtcttctctccttgctcgtcagcatgcagacagcctatgtgggaccttgtgatcatgtaagttaatacttaataaactatatatatatagagagacagagagagagagaaagagagagtgtgtttattagagtttatatatatgcttattataagtatatatatatatatatatatatatatagagagagagagagagagagagagagagagagagagagagagagagagagagagagagatctcctattagttctgttcctctaacagaactctaatacagaaattggtaacagtagagtggggcattgctgaaaagatacctgaaaatrtgaatgtgactttggaactggataacagccagaggttggaacagtttgaagggcttagaaaaagacaggaaaatgtgggaaagtttggaacttgctagagaatcgttgaatggatttacccaaaatgttgacagtgatattgacaataaaattcagatggaggtgatctcagatggagatgaggaacttgttggaagctggaacaaaggtgactcttgtcatgttttagcaaagagactggcagcattttgcccctgccctagaga

SEQ ID NO: 923662 - DNA, 714 bp, Homo sapiens
aaagcaggcagaaaaatgtgagaaggacagatgggcctaacctaccagcccacatctttctcccgtgctggatgcctcttgccctagaacatccgactgcaggttcttcagttttgggtcttctctccttgctcgtcagcatgcagacagcctatgtgggaccttgtgatcatgtaagttaatacttaataaactatatatatatagagagacagagagagagagaaagagagagtgtgtttattagagtttatatatatgcttattataagtatatatatatatatatatatatatatagagagagagagagagagagagagagagagagagagagagagagagagagagagagagatctcctattagttctgttcctctaacagaactctaatacagaaattggtaacagtagagtggggcattgctgaaaagatacctgaaaatgtkaatgtgactttggaactggataacagccagaggttggaacagtttgaagggcttagaaaaagacaggaaaatgtgggaaagtttggaacttgctagagaatcgttgaatggatttacccaaaatgttgacagtgatattgacaataaaattcagatggaggtgatctcagatggagatgaggaacttgttggaagctggaacaaaggtgactcttgtcatgttttagcaaagagactggcagcattttgcccctgccctagaga

SEQ ID NO: 923663 - DNA, 784 bp, Homo sapiens
attttaccagatgtataaagaagcactggtaccattcctactaaatctattccaaaaaattgaggagcagagattccttcctaactcattttgtgagaccatcatcactctgatatcaaaacctgacaaagacacaacaataaaaaaaaaaaaaacttcaggtcaatatttttaatgaacattgatgcaaaaattctcaacaaaatactagcaaactgaatctgactgaacatcaaaaagctaattgaccatgatcaagttggttttatttgtgggatgcatggttggttcaaaatatgcaaatcaataaatgtgatttaccacataaacaaaactaaaaccaaaattacatgatcatcacaatagatgcagaaaggttttcaataaaattcaacatctctttatgttaaaaaccttcaaaaaactagtaactgagggaacatacttcaaaataataagagccatctatgacaaatccacagccaaaatcatgccaaatgggcaaatgctggaagcattccccttgagaaccagaacaaggcagggatacccactgtcaccactcctattcaatatagtactgaamgtcctagccaaagaaatcaagagaaaaaaaatcatccaaatagcaagaaaggaagtgaaaatatttctattttcaaacaatatgattctatacttagaaaacaccatagtctccacccaaaagctcctttatctgataaacaatttcagcaaagtgtcaggatacaaattcaatgtacaaaaattggcagcatttcta

SEQ ID NO: 923664 - DNA, 799 bp, Homo sapiens
gggaggggattactttcaagtattccattatcactgacaactgcataccccactttttgaagtcctttttctgcaaaggaacttccatcagtatacaagttgaggtcaggatcagtcaagggaacctctaaaaggtcccttcaagtggcrtaggtttgagcaattgcttgttgacaattatgttccatcttttcttcattgtctggaagaaatttggctgggttgagagttgcacatgtgtgcagtcgcagcactggcctttcaagtaatagagcctgatatttgtctgacagccacaagtctcctttagcagtgagtatgctgttcacatcatgagatgtccacacagtaagatctcttccctgtattattttaacggcttcagatactaagcctgctactgtcagcactacctgtaaacagtgaggccaaccctttgccactacatcaatttccttactcaggtatgccatgggttgcaagctcttccctcggacctgagtaaggactactagagctattcctttttttctgtgacttataaagaaaagtcttgtccccttggcaagcttaacactgtggcttgggttagggccttctttagggcctggaaagccacttctgcctcaggtgtccatcttactaaatgggtattggctttctgagtttccttaattagtgtatataatggtctggctatttcaccatacctgggaatccatattccgcagaaacctgttatgccaaggaacgctcttagttgctttagggttttgggatgaggataagccagtgtagg

SEQ ID NO: 923665 - DNA, 774 bp, Homo sapiens
accacaatgcagcttctctctctgcctactcctgctttcttcacttcccagccacctcctgcacacaaacctcttcctcagaataggtttttttttttgaaattcagcctgacacataggtctgctgtcagatgcacacatctctgccctgctcaagcattcatcagtatatttctccagcatgccactggaaatgttgatcccactttttcttaagttttgcaataaaactcaggggggagaaaagaagaggagagggggaggcaacatggagggcaaactggtttttacagttccagtgctaagtgacgtaccttaccacttctctacctaatctgaaagcgaccaacagtaatgggcaaaatagcttacataggaattcctatgtatttgtgaaagttgtcagaatcaaaaccaagccacttgtgtttwaaaaaaaaaaaaaaaaaaagcctgacaaatagagccagggaaggccatgaaagaaagggtctgatagcaaggtaactgtcacaaaagactgcaaaaaccgcaagctagtacaaagactattggaaccttacacatacatgcaaaaatacttcttcaaggacttctgcccagcaactgcctgtccaacctcagactggtgctgctcttgttattgatccccatagccaaggataattatctcaaaaacaattatgtaatcctcctcatctctcctttaagacactttgccttccttttacctccctgaatgcacacataggttactatatgtgtcttcccatt

SEQ ID NO: 923666 - DNA, 494 bp, Homo sapiens
caacatgttccccttctttgttttgcaaagcgataagagcaaaggcagctttgtcactatgagctacttcttgcaggagtcaggatctgcatctgcagaggcaatggtgatcgctgctatcatagctaccattaaattactcattgtgactggttgtcctgctttcctmaggttttcttctgccatctgtgacagcttcttgatctgtccccaggtggatggctgtgttcaacgggtgttgcttgtgacagttggggtcctcctcagagtcattctccacatggctgcaactggggggagctcgggatcctcctggaatctcttcctcagcatctgtttcatggtaaggtttcaggtgtctcaatggtatccaaattggctgttgattttggcctggagaaacacaagcataacctctaccccaaattattattttacctatttcccaactttttgttattggatctctccaccaagccagttgttctgcttct

SEQ ID NO: 923667 - DNA, 601 bp, Homo sapiens
aaaagtacaaatacctaattggaactaataaagatcttggagttctgaggaggggaaaaattttttttttttttttttttttttttgagatggagtcttgctctgttgcccaggctagagtgcagtggtgccatcttggctcactgcaacctctacctcccgggttcaaacaatgctcctgcctcagcctcctgagtagctgggactatgggcaccygccaccatgcccggctaatttttgtatttttagtagagacagggtttcaccatgttggccaagctagtcttgaactcctgatcttgtgatccacctgcctcggccttccaaagtgctgggattacaggggttgagccaccgcacccagccgaaaaatcttatttaagcctgaccttgggagagttactcttatgcttaggatatagaaagctacaaaatacattgtttccatcataacaacaggaaaaagccagatagataagccacaaaaacataacttttcttgagtccagcagagagctgaagtcaaaaggtaaccaagtaatcaagtaatctgatttcaaaagaggaaccagcccctccagggagaaaagggacataaga

SEQ ID NO: 923668 - DNA, 778 bp, Homo sapiens
atgtaccagctataatcttaacgtactggtaaaggccaaaggtgcactagatgtcagtctggaattacctgggactccagacccaaggagaattcgcactcattagcaaacacttttccacgtgcctcacatgaaagatggaggcagggctgaaggccagagagagcgctcctattatcaagrcagagacaggagacactggctcaagactgaccacagagagaaggcagagtttggctaccacatgacggagggcaggaacaccgagaaagccccgtgtccaaagcccaggtgcacaagtccagcctaggcctaaggcaggcccagaacaacagggaacctcctgtactgctaaccagcccaaggctaagaaacaagagacagcaggctgccaccaggagaggggggcaagaatttggagagagatgccctttgtggggcatgctggcagagaaggctgaaagctgagggggaagcacagatgctgagaaataccctctggcaccccagccccaccctcaggcaaaaggtcttggcagccttctagaaggttttgaggcctgtagtacagtgaaggtaatgaaagcaacaataaaacccaagtccaactcctaaccagactgacctccccatacccacaccaattcaaggcctccctattttcccccattaggtcttaaattctccaaccactgatttacttaccatgagcgtttatcaagaatgcagccaatctagggattggattactgcaatccctagactgcctgcacgggac

SEQ ID NO: 923669 - DNA, 710 bp, Homo sapiens
tttgggtggtgcctgcatattgtgcagaataatctgtgaatcagaccctagtcttctcttcctctgtcagttggtcatagggaactccccatgaggccattggtgcagactgggggagagaaggcagggtggcaggagtggagaccatgagcatttgagccacttcctcatataacctacttgtgccttcaggacccgcttgagcccaatcacatatataccacttccatttgatgatgaaatgctgctatgcatgacccactttatggctagatgggtcagaaagcacccagttcatgataggcagttcaggtcgcatggtgacttgatgacccatagtcaaatgttcagtttccaccaaagcccagtaacaggccaakagctgtctctcaaaaggagagtagttatctgcagaagatggcagggtcttgctccaaaatcctagaggtctctgctgtgattcacctataggggactgccaaaggctccaaacagcatctctgtctgccactgacaccttaagcaccattggatctgctgggtcatatggcccaagtggcagagcagcttgcacagcagcctggacctgttgcagagccttctgttctggaccccactcaaaactggccacctttcaggtcactcgataaatgggccagagtaacacacccaaatgaggaatgtgttgcctccaaaatccaaataggcct

SEQ ID NO: 923670 - DNA, 423 bp, Homo sapiens
cctgtcattgcccgatgggcccatgaacaaagtagccatggtggtagggatggaggttgctcataagctcagtaaagtggacttccactcaccaaggctgacctggctacagccacttctgagtgcccagtttgccagcagcatagatcaacactgagccctcgatatggcaccattccttggggtgatcagacagctacctggtggcaggttgattatactgaacttcttccatcatgaaaagggcagaggtttgtcctcactgggatagatacttactccraatatgggtttgcctatcctgtatgcagtgcttctggcaaaactaccatctgtgggctcatggaatgccttatccaccatcatggtattccacacagcattgcctctgaccaaggcactcactttatggacaaagcagtg

SEQ ID NO: 923671 - DNA, 851 bp, Homo sapiens
aggtattgacatacacaacagaaaagtccagagataattctgacttcaagaaggcagatctgggggctcacatgacacccccggcactctgtgtccatctctgggagccttttctccatgttgttctatgctcagacagcctgtgttcatgtggtggcaaagatatacataacatctccagttcagagtcatctcaacttagccactccagcagaaaggcagctcctytctcctggaaagtccttcaaaagtggtaggaggagaccaggcatggtggcccaggcctgtaatcccagcacttcaggaggccaaggcaggtggatcacttgaggtcaggagtttgagaccagcctggccaacatgttgaaagcttgtctctactaaaaatacaataattagctgggcatgggggcggatgcctgtagtcccagctactggggaggctgaggcaggagaatcgcttgaactcgggaggcggaggttgcagtgagctgagatcgccactgcactccagcctgggcaacagagcaagattccatttcaaaaacaaacaaaaagtgctaggaaggctctggtcttcttggcttgggccaccagcccgtgtctgaccccatctctgcaacccagagatagatcatactcatctgctaagccaggaccacagagtcacccctggagccagagaagggagtaacccccaccaactgcctcggagggaggggttgattcccaaaggaaaattagggtggtcagcagaagaagggggaacagatgtccaccaccccaactccaactgcccctactttattacactactgttagcaaagtcacagatggcataccacataagt

SEQ ID NO: 923672 - DNA, 851 bp, Homo sapiens
aggtattgacatacacaacagaaaagtccagagataattctgacttcaagaaggcagatctgggggctcacatgacacccccggcactctgtgtccatctctgggagccttttctccatgttgttctatgctcagacagcctgtgttcatgtggtggcaaagatatacataacatctccagttcagagtcatctcaacttagccactccagcagaaaggcagctcctctctcctggaaagtccttcaaaagtggtaggaggagaccaggcatggtggcccaggcctgtaatcccagcacttcaggaggccaaggcaggtggatcacttgaggtcaggagtttgagaccagcctggccaacatgttgaaagcttgtctctactaaaaatacaataattagctgggcatgggggyggatgcctgtagtcccagctactggggaggctgaggcaggagaatcgcttgaactcgggaggcggaggttgcagtgagctgagatcgccactgcactccagcctgggcaacagagcaagattccatttcaaaaacaaacaaaaagtgctaggaaggctctggtcttcttggcttgggccaccagcccgtgtctgaccccatctctgcaacccagagatagatcatactcatctgctaagccaggaccacagagtcacccctggagccagagaagggagtaacccccaccaactgcctcggagggaggggttgattcccaaaggaaaattagggtggtcagcagaagaagggggaacagatgtccaccaccccaactccaactgcccctactttattacactactgttagcaaagtcacagatggcataccacataagt

SEQ ID NO: 923673 - DNA, 567 bp, Homo sapiens
cacagagaatggttaaacatttagtgagcatcattgatttgggatgtaacataaatcatatttgtgtatgctgctctgactagttaccaagtaacctgtacaactttatatatggcctggagaaagctccttagctttcccggtttgcattccaaataccgtatcacttgaaccttaacaccagcttatccaatggtgcttcagtttttttgtgagatattagaatgttgagtgaggcctgccaaaacctttatgtgagtatttcagagttttcagcaataaaatgcactcttcagtagttactttccatttgagwtacagctctggattgttccttgtcctggtggagactaaacatgttggtcaacctaagacaagtgaccaggaactgaaaatactcgtcttacgcggagtgttctctattccactaagccatatctgggcatgtgcagcagcagctcattatgcaatggaagtggtatattggagataaggcttgagcagctcctaaaggcacatgaaatttgcataaccaagtgattgacacacacgcttaaaccggatgca

SEQ ID NO: 923674 - DNA, 745 bp, Homo sapiens
aaaacagacacaagcttttatcgtgcaagtggctgacttgcaatgacaaaggtacatgcacagcctcaccaggtgtctactgttaaagtgagggcatcagttggaaaagaacgggaccctgcaacgtggaatggggatgtatgggaggacactgatgaagctggggacactgagtttgtaaattctggtgaaacttttttgccaggagtaacagcttccccatccccagtagtggcaacatcccctctacaacccgactcatgctgccatcagcctttccacctttgtctgaggagataaaccctgtgctgcctaaggcaacagtgatggcctcccctgaggsaactgccaggcaaaataatgttgactctcctcaggagacacccccaacacccctgtttgcttctaaacctataactagattgaagtcccagtgggccctagaggtgaggttgagagtgtgatccatgaggaggtgtgctacactcaaaaagaactgcttgagttttctaatttatataaacagaaatatggagaaccggcatgggaatggatattaagggtgtgggataatggtggaaggaacatagagttgaatcaggctgaatttattgatttggaaccgctaagtagggactctgcatttaatgttgcagctcagggagttaaaaaaggttctaacagttcatttgtttggttagctgaaatatggattaaaaaatggaccactatgagcaagctggaa

SEQ ID NO: 923675 - DNA, 665 bp, Homo sapiens
agttatctcttgtgaggaaatatatcacataaactggaagtcatccttaaccagagcaatatgtaagttgaccctggaggttcaaagagaaacttacgtagcctaatagtgtggcttgcacattctatgcactgtactaaaaaataatgtaactttcatgatttcgattgggtggaataatttttagttacgattaggtctttaaaaggttcttggtttttagttaygatactaaaatatttaccagtgaatttatatgatgtgtaggaggtacttcaaaacgatctaagagtgaaaggaacaagagaacatatagatgaaactggactggggatgaattgataattgttgaagtcgggtgataggtacatagaaatttatagttttccctcaaattttatgtgtatctgagattttctataataatttttttaaatgtatgagactatgtacgtctcaaagtactgctttccattcttcatgtgttaaagacagagggaccatcagatcttcagatcttgctttctttttttcttttcttttcttttttttttttttttttttggcacggggtcttacccttacacctaggctgagggcagtcatgctgtcgtagctcactgcagcctcaaactcctggtctcaagcgaagcccccagctcagc

SEQ ID NO: 923676 - DNA, 633 bp, Homo sapiens
tgggcatccctatactcttgggggcccaggaagtccccctaccccagcaggcttggaagtgcctgctcctgctgtctggcctcaccctgctcacagtgcctgctctgggatggagcaaagctgtggccaagcctgggcactgttgtgacctggctgggtgtgcacacactcagggtggcgctgacatgccagccccctgccaccgcatccctttccagactttgggaccaaggagcactggagggaggccgacggggttgggctgagggtagctccgcatgggcctgcaggtgaccctccacagaaacagcctgtagatgacatgattggtggcagcaggaggcagacaggctcatgggtggaaaggggcaggtccccattgaagccctaccttcaagacagggacagcctacagcctcagggccgggctgtcagttcctggtggagttcacagtgggagtgaaaacttayggagctttttctgggcctgcccttggaccagtcagcacacacttccttccttctgagcccatgaaaaactccagacccagccagactcacacagacatcagactaccagctacaggaagaagctacccaatttgagtctctttgactccttgggatgatctg

SEQ ID NO: 923677 - DNA, 611 bp, Homo sapiens
tctgggagggaggggttcagttcctttccacaccagctctctgcaggctatacgggcttcctcacagcatggtggctgggttcctagaccaagggacaagaagcaaaagctgcccctgtctaaaggtgggcccagaagctagcacagcatcaattctacttcattctagtggttgagtcattaaatatgagtatccacaggcctggcggggtggctcacgcctataatcccaacactttgggaggccgaggtgggcagatcacgaggtcaagaaatcgagaccatctggccaacatggtgaaaccccatctctaccaaaaatacaaaaattagctgggcrtggtggcatgcacctgtagtcccagatactcgggaggctgaggcaggagaattgcttgaacctgggaggcggaggttgcgatgagctgagattgtaccactgtactccagcctgggtgacagaccgagagtccgtctcaaaaaaaaaaaaaaaaaaaaaaaagatcaccagtcacagatcttgatgggggcagggccatggaatttcaggatctggttttaaattgccatacggccctattcattcttcaagtagaagttccaataccatc

SEQ ID NO: 923678 - DNA, 630 bp, Homo sapiens
gtccttcttaatttctgattttgtttatttggaccttacctcttcttggttggtgtaggtagtagttttccaattttgtttaaattttcaaagaaccaactttttgttttattgatacttctttttggtctctatttcatttagttctgctgtgacctttatttcttctgctaatttttggcttgattatttttctagtctcttgaggtacaatgtaagatttttaatttttgaactgtttttttgatggagacgttgaatgccataaacttctctctaagcactgcctttgctatatcccagaagttttagtatgtcgtttttctattttcatttgtctcraatgttcttaatacccatattcatttttacaatgactcagtgatagttcagaagcatgttgaatttccatatatttttatagttctgaagattctctttgcattgatttctagttttattctgctgtggtctgagaagatacttgatatgattttgatttttcctttggtttgtttcgttttgagacaaggtcttactctgtcacccaggctggagtgcattggcatgattttttacttactgcagccttaacctcctgggctcaagcgattcttccacctcagcctc

SEQ ID NO: 923679 - DNA, 630 bp, Homo sapiens
gtccttcttaatttctgattttgtttatttggaccttacctcttcttggttggtgtaggtagtagttttccaattttgtttaaattttcaaagaaccaactttttgttttattgatacttctttttggtctctatttcatttagttctgctgtgacctttatttcttctgctaatttttggcttgattatttttctagtctcttgaggtacaatgtaagatttttaatttttgaactgtttttttgatggagacgttgaatgccataaacttctctctaagcactgcctttgctatatcccagaagttttagtatgtcgtttttctattttcatttgtctcaaatgttcttaatacccatattcatttttwcaatgactcagtgatagttcagaagcatgttgaatttccatatatttttatagttctgaagattctctttgcattgatttctagttttattctgctgtggtctgagaagatacttgatatgattttgatttttcctttggtttgtttcgttttgagacaaggtcttactctgtcacccaggctggagtgcattggcatgattttttacttactgcagccttaacctcctgggctcaagcgattcttccacctcagcctc

SEQ ID NO: 923680 - DNA, 615 bp, Homo sapiens
gattttttacttactgcagccttaacctcctgggctcaagcgattcttccacctcagcctcccaactagctgggactacaagcatgtgccaccatgcttggctaatttttatacttttttgtagaaacagggtttcaccatgttgccagactggtttcaaactcctgagctcaagtgatcctcccacctcagcctcccaaagtgttgggattacaggcatgcgtgactatgtctggcctgattttggttttttaaaaatttgttcacagccaggtacagtggctccctctgtagtcccagcattttgggaggctgaggcagcaggtttgcttgaggtgaggagttcaagaccagcctcaacgacacagcgagaccctttctcaaaaaaaaaaaaaaatgttgagtcttgttttgtggtctaatggtctgacttggagaatgttccrtgtgctaatgagaaaaatgtatactctgttctatgaatgaatgttatgttcatttggtttaaagttcaatttcagtccaatatttgatttttctgtttccatctgtctagtgatgtttctgtggagattagtgattttccatgttaatggatgtcagatataaatcctg

SEQ ID NO: 923681 - DNA, 611 bp, Homo sapiens
agaatactgatatacagaaaacaaaaattaggtgtggaaacaactggattggttatggctcagcatgtgccatatttaaaaatagcttaaggccgggcgcggtggctcatgcctgtaatcccagcactttgggaggcccaggcgggcagatcacgaggtcaggagatcgacaccatcctggctaacgcattgaaaccccgtccctactaaaaatgcaaaaaaattagccagatgtggtggcrggcacctgtggtcccagctactcaggaggctgaggcaggagaatggtgtgaacctgggatgcagagcttgcagtgagccaagatcacaccactgcattccagcctgggtgacagagtgagactccgtctccaaaaagaaaaaaaaaaaaaatagcttaaacagttggccactcataattgggtgaaacttggctgctgtgattggctgagactcagctacttgctacaagagtaggttacagtctgtttacacatcaagttagtttacagttcactgtgcatggagaaacttttagtccagacttaaactacctatggaggcaggtttaggacaaacttaattcaattaaacatgtccttttgattata

SEQ ID NO: 923682 - DNA, 777 bp, Homo sapiens
aacattcttttcctcagcgcatgaatcattctcaaggatagatcatatgttaggtcacaaaacaagtcttaaagcattaaaaaagttgaattatctagcatcttctctgattacaatggaataaaactaaagatcaataacaagaggaatgttggaaactatacaaatacrtggaaattaaacagtatgctcctgaattaccagtgggtcaatggagaaattaaataggaaattgaaaattttcttgaaatagcaattgtaaggcattgaactcagtgctgtcctgttagaccaaactcacttgatgtctacccacagacagagcatttaaaccagctgtagccagagggacatcacagatccctctggacttgagttcccacaaaccttgccactgagggccaaagtgcccccactctctaagtaaacctgaaaggcagtctagaccataaggactgcagctcttaggcaagtcctagagcacttggcccagagacagtggactggggttacatgtgacatactgagacactagctggggcagccaaaggagtgctggcattactcctcccctaagtccagtctgcacagctcagagctccaagagacattctcctgtttgagaagaggagagggaaaagtggggaggactttattttgcatctttgataccagctcagccacagaagggtagggcactggtcagaatcatgaagccccttttccaggtcctagctcccagatgacatttctagacacactctgggccagaaggga

SEQ ID NO: 923683 - DNA, 741 bp, Homo sapiens
aacattcttttcctcagcgcatgaatcattctcaaggatagatcatatgttaggtcacaaaacaagtcttaaagcattaaaaaagttgaattatctagcatcttctctgattacaatggaataaaactaaagatcaataacaagaggaatgttggaaactatacaaatacatggaaattaaacagtatgctcctgaattaccagtgggtcaatggagaaattaaataggaaattgaaaattttcttgaaatagcaattgtaaggcattgaactcagtgctgtcctgttagaccaaactcacttgatgtctacccacagacagagcatttaaaccagctstagccagagggacatcacagatccctctggacttgagttcccacaaaccttgccactgagggccaaagtgcccccactctctaagtaaacctgaaaggcagtctagaccataaggactgcagctcttaggcaagtcctagagcacttggcccagagacagtggactggggttacatgtgacatactgagacactagctggggcagccaaaggagtgctggcattactcctcccctaagtccagtctgcacagctcagagctccaagagacattctcctgtttgagaagaggagagggaaaagtggggaggactttattttgcatctttgataccagctcagccacagaagggtagggcactggtcagaatcatgaagccccttttccaggtcctagctccca

SEQ ID NO: 923684 - DNA, 570 bp, Homo sapiens
aacaaaggggctacaggacccaagcaagtccaaaatctagcagggcagtcaaatcttaaagctccaaaatgatctcttttgactccatgtctcacctccaggtcatgctgaagcaagaggtgggctcccacagctttggggagtctcacacctgtggctttgcagggtacagccccctttctggctgccttcataggctggcattgagygtctgcagcttttccaggcttgtgctgtaagctgttggtggatctacaattctggggtctggagaacagtggccctcttctcacagctcagctaggcagtgccccagtggggactctgtgcgggggctgcaaccccacatttcccttccacattttccccagaggttctccatgagggctctgcccctgcagcagacttctgcctggacatcaggcatttccatacatcctcagaaatctaggcagaggttcccaaacctcaattcttgacttctgtgcacccgcaaactcgacaccatgtggaagctgccaaggcttagggcttgcaccctctgaagcaacaacccaaactataccttga

SEQ ID NO: 923685 - DNA, 570 bp, Homo sapiens
aacaaaggggctacaggacccaagcaagtccaaaatctagcagggcagtcaaatcttaaagctccaaaatgatctcttttgactccatgtctcacctccaggtcatgctgaagcaagaggtgggctcccacagctttggggagtctcacacctgtggctttgcagggtacagccccctttctggctgccttcataggctggcattgagtgtctgmagcttttccaggcttgtgctgtaagctgttggtggatctacaattctggggtctggagaacagtggccctcttctcacagctcagctaggcagtgccccagtggggactctgtgcgggggctgcaaccccacatttcccttccacattttccccagaggttctccatgagggctctgcccctgcagcagacttctgcctggacatcaggcatttccatacatcctcagaaatctaggcagaggttcccaaacctcaattcttgacttctgtgcacccgcaaactcgacaccatgtggaagctgccaaggcttagggcttgcaccctctgaagcaacaacccaaactataccttga

SEQ ID NO: 923686 - DNA, 782 bp, Homo sapiens
tagctttaaagtgagcaggaagagagaaggggaagttaggaaaaagaagactggctaaatagtatagttgaactatccatagaattttaaacatggatatgtctaatgattgtttttaagttgttaacataagcacaatttaagytcatttcctcttctcaaatttgcattagtcggccaatcacacacacacatacacacacacacacacacacacagagactcacacacatgaaatatgtgaaatgggtctatttttaagatatgctaactggttgcctggaggaaactggaaccaagatgggagccttttttaatagaataaaatagttgattttttttttgccttggcctattaccaatttttaccaacccttttaacttgcaagataatacaaggttcttgaacagttcacattcacctgcttgccatttattaggccaagaatgctccctccacctgcaatgctcttccctgcagatactcaaatgtttaatgccccttcaccttaggactccatttaaataggagaccctccccactatttaaaatcaacatatcccctatgattatgccagtccctgtcctcctaccatgttttatgtttcttaacagcacttattgccatctaaattaaattccatacttgtttattttctgtatgtacctggtcattgaaacaatggtattttgttggtttgttccatcctagccactagaataatgtttagcacaaacctacactggatatgtactgctgcagcagttctgaaaagtaact

SEQ ID NO: 923687 - DNA, 588 bp, Homo sapiens
caatataatcaggtagctggctgatcatcccgaggaatggtgctttatcgagggctcagtgttggtctctgctgctggcaaattgggcactcagcagtgtctggagccaggtcagccttggtgagcagaagtccatgttgctgagcccatgtktaacctatatccctgccaccatggccactttgttcatggactctttgagcaacgacaggggtggctggggaaagaggctgagtggtgtccacggaatgggtcatcctatccagttgattattaaaagcctcctctgctgaggtcacccattggtgagcactcacatgggatacaaacatcttcacagtttttgaccactcaggtcaatccacatacctcctccccaaatttctttgtcaccaattttccaatcatgtttcttccaagtccctgaccatccagccaaaccattggctacagcccatgaatcggtatatactcacacatctggccatttctccttccatccaaagtgcacaaccaggtgcactgcttgaagctctgcccactgggaagattaccctccaccgctgtcctttagggatgtcctaaaaa

SEQ ID NO: 923688 - DNA, 614 bp, Homo sapiens
gtgattcatctatgggggcctgccaaaggctccaaacagcatccctgtctgccactgacacctcaagcaccattgggtctcctgggtcatatggcccaagtggcagagcactttgcacagcagccagggcttgttgyagagcctgcttctgttctggaccccactcaaaactggcagcctctcagttcacttgataaatgggccggagtaacacaccccaacgaggaatgtgttgcctccaagatccaaataggcccactaggcattctgcctctttcttggttgtaggaggggccaaatacagcaacttatccttcaccttaggagtatctcaccaggccccacaccactggacccctaaaaattttactgagggggaagattcctgaattttagtcagatttatttctcatcctctggcacgcaaatgtctcaccaataagtccattgtgtttgctacttcttgctcagtggatccaatcagcatactgtcatcaacgtaatggaccattgtgatattttgcggaagcaaaaatgattaaggtctctctgaataagactatgacacggccgggcgcggtggctcacgcctgtaatcccagcactttgggagg

SEQ ID NO: 923689 - DNA, 620 bp, Homo sapiens
gtatcagtgatggaagactaaatgaatgaaatgaagcaagaagggaagtttagagaaagaataataaaaagaaatgaacaaagactccaagaaatatgggactatgtgaaaagaccaaatctacatttgattggtgtacctgaaagtgacggkgagaatggaaccaagttggaaaacactctgcaggatattatccaggagaacttccccaacctagcaaggcaggccaacattcagattcaagaaatacagagaatgctacaaagatactcctcgagaagagcaactccaagacacataactgtcagattcaccaaagttgaaatgaaggaaaaaatgttaagggcagccagagagaaagatcaggttacccacaaagggaagtccatcagacttacagcagatctctctgcagaaactctacaagccagaagagagtgggggccaacattcaacattcataaagaaaacaattttcaacctagaatttcatatccagccaaactaagcttcataagtgaaggagaaataaaatactttacagacaagcaaatgctgagagattttgtcaccaccaggcctgccctaaaagagctcctgaaggaagcactaaacatgga

SEQ ID NO: 923690 - DNA, 388 bp, Homo sapiens
atgaaatattcagaagcccagcccagctctagaactcacccctagcgcaaaggcaatgttgggcacgctggtaaaggacctctagaatccagcagcccagacccgtttctctgtggtcaagaaaggtgggaaaaggsgtgcaggactactacatcggtgagcgtaactaatccgataagcagaggtccatgggtggttatgcaccctggaaaggaataagcattaggaccatagaggacgctctaggactaatgctcattggaaaatgactagggttgccggcatccctatgttctttttccagatgggaaacatttctcccaaggcaaaaatgccactaagatgtattctggagaattcagcccagagtgcatatacctttttctct

SEQ ID NO: 923691 - DNA, 588 bp, Homo sapiens
gtgatttctgcatttccaactgaggtacctggttcatctcattgggactggttggacagtgggtgcagcccacagggggcaagctgaagcagggcagggcatcacctcacccaggaagtgcaagggatcaggggatttccctttcctagccaagggaagccatgagtgactgtatctagagaagcagtacactcctgtccaaatactgcacttttcccatggtcttcacaaccagcagaccagaagattccctcctgtgcctggctcggcgggtcccaagcccacggagccttgctcactgctagcgcaacagtctgagatcaacctgggatgctgaagtttggtggggtgaggggcgtccaccattgctgaggcttgagtagctggttctatgctcagagtgtaaacaaagcagcagggaagctcraactgggcagaggccactgcagctcagcaaggcctactgcctctctagatgtcacctctgggggcagggcatatctgaacaaaaggcagcagacagtttctccagatttaaatgtccctgcctgacagctctgaagagagaagcagttctcccagcatggc

SEQ ID NO: 923692 - DNA, 495 bp, Homo sapiens
atgtgcctatcattttgacccccacattctcaccacctgtttctctgttggattagcaataaatagtgtgggatcccagagttcggggccttcgcagcctccacaatcgcgatggcctcctggtcccactttacctctcaaactgtctttttctcaatcctttgattctgccggactttgttacccccaygacctggtgttggatctgattaccccaacattcctggctgcccgatgtggggcaacaaagaccctggtgaaggaacactagagcgtgggaaagtggaggatgcatcgtcaaaggacactcgaggacgtctaaaagaaactcagcgggaaagctgagcactcggaagaaccagggtaacaatgagacaaagtgaaagcagactttctgcttatttaaatttcttaaggcatttatcacaaagagggggagtgaaagttagtactcagaatttgttatcactcactctttagtgcagtaaagcagtt

SEQ ID NO: 923693 - DNA, 495 bp, Homo sapiens
atgtgcctatcattttgacccccacattctcaccacctgtttctctgttggattagcaataaatagtgtgggatcccagagttcggggccttcgcagcctccacaatcgcgatggcctcctggtcccactttacctctcaaactgtctttttctcaatcctttgattctgccggactttgttacccccatgacctggtgttggatctgattaccccaacattcctggctgcccgatgtggggcaacaaagaccctggtgaaggaacactagagcgtgggaaagtggaggatgcatygtcaaaggacactcgaggacgtctaaaagaaactcagcgggaaagctgagcactcggaagaaccagggtaacaatgagacaaagtgaaagcagactttctgcttatttaaatttcttaaggcatttatcacaaagagggggagtgaaagttagtactcagaatttgttatcactcactctttagtgcagtaaagcagtt

SEQ ID NO: 923694 - DNA, 495 bp, Homo sapiens
atgtgcctatcattttgacccccacattctcaccacctgtttctctgttggattagcaataaatagtgtgggatcccagagttcggggccttcgcagcctccacaatcgcgatggcctcctggtcccactttacctctcaaactgtctttttctcaatcctttgattctgccggactttgttacccccatgacctggtgttggatctgattaccccaacattcctggctgcccgatgtggggcaacaaagaccctggtgaaggaacactagagcgtgggaaagtggaggatgcatcgtcaaaggacactcsaggacgtctaaaagaaactcagcgggaaagctgagcactcggaagaaccagggtaacaatgagacaaagtgaaagcagactttctgcttatttaaatttcttaaggcatttatcacaaagagggggagtgaaagttagtactcagaatttgttatcactcactctttagtgcagtaaagcagtt

SEQ ID NO: 923695 - DNA, 773 bp, Homo sapiens
gaaaaaagtagtattaagattgcggtcagttaacagtatagtgatgccggcggctaggactcagagacaaaggagtagaagaactgctgtaattaggactaatcagatgaagaggggtgtgtgatattgggacatggctgggggttttatattaacaattgtggtaataaagttaatagcccctgaagtagaagaaacacctgccacgtggagtgaaaagatagtgaaatctacagaggcgtctgcatgtgttaggtttcctgctaagggaggactgttcagccggttccagtgccggcttctactatagtggatgtaagtaataataggaaggagggtgggaggagtcagaagctcatattatttatgcagagaaatgctatatctggggcaccaattatcagggggactaagcagttgccaagacctccaattatagtattactayaaagaaaattatgacaaatgcataggctataacaatgacataaatttgatcatctagtagagttcagctcgaataaggcttaaagctgtactgactatccctgctcatgtgccaaataataaatataatgtcccgatatctttatggttggttgagaatagtcaactgtcagccaacataaatgaagtgagaaaaaagggtaaaatgactgagtagggcattagactgtacatctaaaaacagaggtcaagtcctgtttttaccagtcccgaggtgattttcatgttgaattgtaaattcaaagaagcagcttcaatcctgcttc

SEQ ID NO: 923696 - DNA, 549 bp, Homo sapiens
ggctcatgcctgtaattccagcactttgggaggccaaggtaggcagattgcttgagatcaggagtttcagaccagcctggccaacatggtgaaaccccatctctaccaaaaatagaagttagccaggcatggtggaacctgcctgtaatcccaactactctgaaggctgaggcaggagaatcacttgaacccaggaggcagaggttgcagtgagccaagattgcgccactgcactccagcctgggtgagagaatgacactctgtatcaaaataataataataataataatagtaataataataataactattttctgtgagtcccaagataaaatagcattacagaatacmtaataatcctgtttgcttttcttggttttattttttcatttagttttgttcaccttgaccagtgggctggtggttcttaggtgcaccaaagttttcatttttcagttcaagattttaaaaccttaatgtggtaatttccctaattttttttgacaattacgtcccaggttgcaagttaaaataaaattcccattttac

SEQ ID NO: 923697 - DNA, 655 bp, Homo sapiens
ttccgtgtcgggtggggacttggagaacttttctggctagctagaggattgtaaatgcaccaatcagcactctgtaaaaacgcaccaatcagcactccgtgaaacggaccaatcagcaggacatgggtggggacaaataagggaataaaagctgcccgcccacccctcgccagccagcaacagcggcgaccggctgtggtctttttccctgctgtggaagctttgttctcttgctcttcacaagacattttgctgctacgcactctttgggtctgcaccacctttttcttttctttttttttttttttttttgagatggagtcttgctctgtcgcccaggctacagtgcagtggtgcaatctctgctcactgcaagctccacctccccgggttcacgcccttctcctgcctcagcctcccgaatagctgggaccacargcgcccaccaccaaacctggctaatttttttgtatttttagtacagacagggtttcaccgtcgcaccacctttaagagctgtaacactcactgccaaggtccctggctcattcttgaaatcagccagaccaggaacccagcggaagggacaaactgcggacacaggaggacaggtgtcctgacctctatgctgggaccaaccagggaacttttcact

SEQ ID NO: 923698 - DNA, 657 bp, Homo sapiens
gtagtgagtggcggctctggggcgtaaacccagtcctggcaggctcctgggcctcactcatgttgctactgcaggttggcgccaggctcaggatgcagaggacccctgggtttctttgcatttggcccagcccaggaagcctcaagctgacagtcgagctctgtccaggaattygggtgggtcctggacctggtcctgcctttgggaggctgagcagtcacaggctgccaggatggctgctaaaaagcaggatcgaaggtattgctttgtcctttgtcaagacgagtttgatcagagtgatgaatgactgagccacaaagagctgagcgagaggccatgcacctgggctgaggaagcctgaggccagccacccctgcatctgagtgctggtgctgaggctgacttgcagtggtgatcattggattcccgagggcccctccaccaggcgacctaggatatccaggacccttatcctcatggacaggagaaacagacttggtccaacttgcacagaaagcggctcctttggaagtctgcagagccactcatctggctggaagtgcgtccggaactggttccttctggtgggttcttggtctccctgacttcaagaatgaagctgcagactctcacagcaagtgttacaattcttaaaga

SEQ ID NO: 923699 - DNA, 610 bp, Homo sapiens
atggggaaaggggcacgaaggttctacccctccctgggcacgcggccctccaggaacctccatgtgttcagctatcctggaggttatacggaggcttcatttcttgggcgtggctggtgaaatcactggccatgggtgaccaacttaaccttcagcccctctccgctccccggaggctggggggtgaggctgaaagtcccaggcctctagtcctgccttggtccttctggtgaccagccccatcctggagctacctgggggctgcccgccttcacccacctctttagcatatgaaagacacyactgtggagattctgaggattctagcagttgtaggccaggaagcccggatgaagaccaaatgtatatttgataagatcacagccacattttgtgtagcattcatccactgaagtacattttgtttgttccccactcctcggctattgtgagcagtgtggctatgtacatttgtgtgcaagtttttgtgtgactgtatgttgtcatttcttttggaatggaatacctaggagggtggagttgctgggtcacgtggtcatgtttaattttctctagatcttatcactttctgaaattattacttttcttt

SEQ ID NO: 923700 - DNA, 630 bp, Homo sapiens
gccaccaactgctggatgatggttctactgttaagaccaggtcctgggaccaacatttctccacagtttgattcaattaaatgcaggtgcctctgcaggggcagtgttccaggtcagtcttcgaggttcattctgaccccagagggctctttgtggctgctttctccatggttctatctggtaaattggctggcttatggtttagcttgttgctctgttgaagctactagttatctgttaatcgcttaccaacacgatctctactgtttttgttttgtttttagacagtccagctctgtcgccraggctggagtgcagcggcacaatctcggctcactgcaacctctgtctcttgggttgaaacgattctcctgcctcagcctcccaagtagctgggattacaggcgtgtgccaccacaccaggctaattttttatatttttggtaaagacggagtttcaccgtgctggccaggctggcctcaaaattctgagctcgggtgatccacctgcctcagcctcttaaagtgctaggattacaggcgtcggcctccacacctagcctctcttgttttttgagtgcccttagccttgaacttacctacactgtgttcaaataaaggcaattcctt

SEQ ID NO: 923701 - DNA, 541 bp, Homo sapiens
aactgctggatgatggttctactgttaagaccaggtcctgggaccaacatttctccacagtttgattcaattaaatgcaggtgcctctgcaggggcagtgttccaggtcagtcttcgaggttcattctgaccccagagggctctttgtggctgctttctccatggttctatctggtaaattggctggcttatggtttagcttgttgctctgttgaagctactagttatctgttaatcgcttaccaacacgatctctactgtttttgttttgtttttagacagtccagctctgtcgccgaggctggagtgcagcggcacaatctcggctcactgcaacctctgtctcttgggttgaaacgattctcctgcctcagcctcccaagtagctgggattacaggcgtgtgccaccacaccaggctaattttttatatttttggtaaagacggagtttcaccrtgctggccaggctggcctcaaaattctgagctcgggtgatccacctgcctcagcctcttaaagtgctaggattacaggcgtcgg

SEQ ID NO: 923702 - DNA, 606 bp, Homo sapiens
aaaccagcatgacaggtcaccctactggaacaaagaaaattctacaaagttaagagagaagccagaaaacaatgccttcaaaattgtgaagacaaacgagcacagatctagaattctatgccttgctgaactataaactacactagcaagtgtgagtaaaatgagaacgtttacaggcatgtgagatcttaaacatttacttcctaagcacctcttctcaaaaagctactagagtatgtgctccattaaaatgaaagaccaacccaagaaagaagactttaaatacaggagacrggagcccaacacataaaggagaaggaatctcttggaggatggtgaaaggtgatctcagtgtaacagcttcgtaccacatccagagggcaactgagccccactgcagcagcgtgagctaggaagtagatgatcatcaccaagacccccactcccttcaagccatcttttaaaaaaatgggctttattttttagagcagttttaggttcgcagcgaaactgagcagaaagtagagatttcccacatccccctgcctccacacatgcagagcctcccccattatcgacgtcacccaccagaatggtatgtttgtt

SEQ ID NO: 923703 - DNA, 562 bp, Homo sapiens
caccacagggcaactctgggatcacatgggaatgggggactggctgctctgcaggaattccaaatggtgccagccctggggagccacctcaccgggacatgatacatgagctccactatggtttaaacatttgtctcttccaaaactcatggtgaaattaaatctccaatgtggtggtattgagagctgggcttttaagagatgattaggtcatggaggctctgccctcatgagtaaattaatccattcatggattaatggattaacaggttattttgggagtgggaatgctggctttataagaagaggaagagagacctgagctagaacacttttctccctcaccatgcgatgccctgtgtctgctcaggcaaacagcccccaccagcaagaaggccctcaccaaakgcagaccctcagccttggactgctcattctccataactgtaagaaacaaattatttttcaaataaattactcactttcaggtattctaagcaacagaaaatggactaagacaagacccttcctggggcgtcatcttctctccagtttctgtggc

SEQ ID NO: 923704 - DNA, 736 bp, Homo sapiens
atgcaccactgtgttgggctaattttttattttttgtagagatgggggtctcagtatgttgcccaggctggtctcaaactcttgggctgaagtgatctgcctgcctccgcctcccaacgtgttgggattataggcgtgagccaccatgcccggccccaacagatttttctgccatgttggagatgttctctctgtgctgtgcaacacagtagccatgagccacgtgcaaggtggtcagtgtgactgagaaaccggtttccttttttttyctttcttttttttttttttgagatggagtgtctccctctgtcacccaggctgtagtgtagtggtatgatctcggctcactgctacctctgcctcctgggttcaagcaattctcccctgccccagcctcctgagtagctgggattacaggtgcatgccaccatgtccagctaatttttgtatttttagtagagacagtttcaccatgttggccaggctggtctctaactcctgacctcagatgatccacccacctcggcctctcaaagtgctgggattacaggcttgagccactgcatccggcctgaggtttccttttagtttcattttaatgaatttaaatgtaaatagccacagtggctgctggctgctggctgcggtgttggacagcgcctcctaggaggctgttaatacctgtgccgtgcctttgtagagcatctgccgctgtcttctgcatttctgttccctg

SEQ ID NO: 923705 - DNA, 614 bp, Homo sapiens
ccgacagtgagaagctcctctccgtaggcaggtcatccatttgactgctcaagtctggctgagtccagggtttttatgagcttcagagtggaggaagtgtgtgctgattggtccatgggcagtcatgggcggggcccagaaaaagcaccataagttctaactcaggtccatgaactgacagctcagcccccaggcttcaggccatccctgccttgaaggtggggcttcaccagagacctgcycctttccagccaggagcctgtttcctgctgccattagcctgccatctacagtgccatagtgcccaggctattcctgctgatgggtgcctgcaggcccacactgagccgccattagctctccctcagcttccccatgctcgttggtgctgaaagtccggaagaagctgaggcagcagggggctggtgtgtcagcactgccccaagcacgtgcaaacctggccaggtcacgacaatgctcatgcttggccacaactttgctctaaaattggatcaggtgctaggagtggggagaggccaggcagcaggagcagacacttctgagcctgttggggaaatggggcttctcaggcctctgagactgcagagatgcct

SEQ ID NO: 923706 - DNA, 614 bp, Homo sapiens
ccgacagtgagaagctcctctccgtaggcaggtcatccatttgactgctcaagtctggctgagtccagggtttttatgagcttcagagtggaggaagtgtgtgctgattggtccatgggcagtcatgggcggggcccagaaaaagcaccataagttctaactcaggtccatgaactgacagctcagcccccaggcttcaggccatccctgccttgaaggtggggcttcaccagagacctgctcctttccagccaggagcctgtttcctgctgccattagcctkccatctacagtgccatagtgcccaggctattcctgctgatgggtgcctgcaggcccacactgagccgccattagctctccctcagcttccccatgctcgttggtgctgaaagtccggaagaagctgaggcagcagggggctggtgtgtcagcactgccccaagcacgtgcaaacctggccaggtcacgacaatgctcatgcttggccacaactttgctctaaaattggatcaggtgctaggagtggggagaggccaggcagcaggagcagacacttctgagcctgttggggaaatggggcttctcaggcctctgagactgcagagatgcct

SEQ ID NO: 923707 - DNA, 764 bp, Homo sapiens
aacatctacagtcaggtgactttcagtaaaaaatattctctataatataggtgagcctcatacaatcagttgaaagcacttaagagcaaaattggggatttttaaagaacatattcttcctgtaacatagctcttgctagagaattttcagccacctggtctgcatgtgtatttctgattcacccacttccaaaattatataagccaattcattgtaataaatcttttcacatacacacgcacacaaacacacacacacacattttgttttaactggttctatatctttgaataaccagataacccygactttctaaccaaggaaattaagaaagaaaaaataaataaaagatgttcacattcaaaagaaagtaaaccctatctctgcttgtggataacatggtgctatatagagaaaattctaaggaatccactaaaagaattagaattactaaacaaattcagcaagatgggagaaaatacaggatcaatatatgaaaatcgatatttctatgcacttgcaataaatattccaaaaaggaaattaagaaaaaatttaatttacagtaacatctaatagaataaaacacttaggtttaaatttaacaaaagtgcaatgcttattctttggaaactaaaaaactttgttaaaaaaaaggagttctaaataaatggaataaaattccatattttcggatcggaggacttaatatggtaaagatagtgatactagcaaattcatctatagattcaatgaaatctct

SEQ ID NO: 923708 - DNA, 764 bp, Homo sapiens
aacatctacagtcaggtgactttcagtaaaaaatattctctataatataggtgagcctcatacaatcagttgaaagcacttaagagcaaaattggggatttttaaagaacatattcttcctgtaacatagctcttgctagagaattttcagccacctggtctgcatgtgtatttctgattcacccacttccaaaattatataagccaattcattgtaataaatcttttcacatacacacgcacacaaacacacacacacacattttgttttaactggttctatatctttgaataaccagataaccctgmctttctaaccaaggaaattaagaaagaaaaaataaataaaagatgttcacattcaaaagaaagtaaaccctatctctgcttgtggataacatggtgctatatagagaaaattctaaggaatccactaaaagaattagaattactaaacaaattcagcaagatgggagaaaatacaggatcaatatatgaaaatcgatatttctatgcacttgcaataaatattccaaaaaggaaattaagaaaaaatttaatttacagtaacatctaatagaataaaacacttaggtttaaatttaacaaaagtgcaatgcttattctttggaaactaaaaaactttgttaaaaaaaaggagttctaaataaatggaataaaattccatattttcggatcggaggacttaatatggtaaagatagtgatactagcaaattcatctatagattcaatgaaatctct

SEQ ID NO: 923709 - DNA, 491 bp, Homo sapiens
caaaagccactgtgtaaagtttgagagaggtgactgctccaccagatgcacaaacgtcaatgcaggatacaagaaacacaaaaaacgaaggaaatatgataccatcaaaggaacacaacaattcttcagtaactgactccaagaaaatgaaaatttaccaactgcctaaaaaagaattcaaaataatgatttaaaggaaatccaggaagatacaaaagaatacagatagataattcaatgaaatcaggaaaacartttatgatctgaatgagaaattcaataaagagatagatatcattttttttaaaaccacacataaatcttagaattaaagaatttgatcaatgaaatgaaaaatacaatcaagagcttcaacagcagactagatcaagcagaagaaagattctgtgaacttgaagataggctgtttgaaatgaatcaatcagaggaaaaaaatgaaagtgaaaaagaatgaagaaagcctgttggac

SEQ ID NO: 923710 - DNA, 503 bp, Homo sapiens
atcagaaagaaatagaaagcttgaacagaataataacaaagagattgaagaaataatcaaaaccctcccccaaattaagagcccaagaccagatgccttcgcagctgaattctaccaaacattcaaagaggaactaataccaatacttcctaaactyttccaaaaaatagggctacaggaaatactcccaaacatactttatgaggcaagcatcatcttgatacctaatccagacaaagacatcacaagaaaagaaaactataggtcaatttctctgatgagaattaatgcaaaaaattctcaattaaatattatcaaaccgaattcaacaacacaccaaaaagactgtacatcatgaccaagtgagatttatttctggcatataacactgatttaacatatgcaaatcaatcaatataatatactacattaacagaatgaaatagtaaaaaccatctgatcctctgaattgacaaggaaaaagcatttaacgaagtccaaca

SEQ ID NO: 923711 - DNA, 556 bp, Homo sapiens
aaaatacaaaggatcaatgaaatgaagtttttaaaaaataaataaaatcaataaactgctaactgactaacaaaaaagagagaagacccaaataaataaagtcagaaatgacacaggaggtattactcctgataccacagaagtacaaagaataattagatgctattatgaacaactatatgctagcaaatcagaaaacctagaggaaaatgatgaatccctggatacatacaatctaccaagattgaaccaggaagaaataggaaatctgaacagaataataatgagtacaagattgaatgagtaataaaaagtcccctaacaacaacaacaasaacaaaaactcaggaccagatgactttactgatgaattctaccaaacttataaggaagtactaacaccaatttttctagaattactccaaaaaattaaagaggagggaattcttcctaactcattctacaaaaccagcattaccctaatactgaaacgaaacaaggatacaacaaaaaaagaaacctatagatcaatatccctaatgaacatagatgcaaa

SEQ ID NO: 923712 - DNA, 799 bp, Homo sapiens
tctggaatgaagcttccagaggaaggatcaggcagcaatatttgctgttctgcagtatttgctgttctgcagcctctgctggtgatacccaggcaaacaaggtctggagtggaactccagcaaactccaacagacctgcagttgagggacctgactgtcaggaggaaagctaacaaacagaaaggaatagcattgatatcaacaaagatcatctacaccaaaacctcatctgtagatcaccaaygtcaaagaccaaaggtagataaaatcagaaagatggggagaaaccagagcagaaaagctgaaaattctaaaaatcagagcatctcttctcttccaaaggattgcagctccttgccagcaacagaacaaaattggatggagaatgactgatgagctgacagaaatgggcttcaaaaggtcggtaataacaaacttttctgaggtaaagaaggatgttcgaacccattgcaaggaagctaatcttgaaaaaagattaggcgaatggctaactagaataaacagtgtggaggagaccttaaatgacctgatggagctgaaaaacatggcacaagaacttcgtgacacatgcacaagcttcagtagccaattcgatcaagtggaagaaagggtatcagtgactgaagatcaaattaatgaaataaagtgagaagacaaggttagagaaaaaagagtaaaaagaaatgaacaaagcctccaagaaatatgggactatgtgaaaataccaaatctacatttgactggtgtacctgaaagtgatggggagaaaggaaccaag

SEQ ID NO: 923713 - DNA, 799 bp, Homo sapiens
tctggaatgaagcttccagaggaaggatcaggcagcaatatttgctgttctgcagtatttgctgttctgcagcctctgctggtgatacccaggcaaacaaggtctggagtggaactccagcaaactccaacagacctgcagttgagggacctgactgtcaggaggaaagctaacaaacagaaaggaatagcattgatatcaacaaagatcatctacaccaaaacctcatctgtagatcaccaacgtcaaagaccaaaggtagataaaaycagaaagatggggagaaaccagagcagaaaagctgaaaattctaaaaatcagagcatctcttctcttccaaaggattgcagctccttgccagcaacagaacaaaattggatggagaatgactgatgagctgacagaaatgggcttcaaaaggtcggtaataacaaacttttctgaggtaaagaaggatgttcgaacccattgcaaggaagctaatcttgaaaaaagattaggcgaatggctaactagaataaacagtgtggaggagaccttaaatgacctgatggagctgaaaaacatggcacaagaacttcgtgacacatgcacaagcttcagtagccaattcgatcaagtggaagaaagggtatcagtgactgaagatcaaattaatgaaataaagtgagaagacaaggttagagaaaaaagagtaaaaagaaatgaacaaagcctccaagaaatatgggactatgtgaaaataccaaatctacatttgactggtgtacctgaaagtgatggggagaaaggaaccaag

SEQ ID NO: 923714 - DNA, 775 bp, Homo sapiens
tggaaaggaagacattatctctgtttacaataaggtgatcttgtatgtagaaaatcccaagaaatccataaaattgtagagctaatagaggaattcagcaagtttgcagtatacaagatatttgaaaattaattatatttctctgtaattatattatgaacaatctgatgatgaaatttagaaaacaattgtccccataatgaacaatctgatcatgaaatttagaaaacaactcccatttacaacagcatcaaaataatttcgtttacaatagcgtcaaaaacaacaaaatacttaggaataaactttaaaaagaagtgttaagacttgtacactgaaaactgcaaaacatcatggaaataaagacaacctaaatcaatggaaggacatgctgtgttcatgggttagaagattgttaagacgggccaggcgtgatggctcacgcctgtaatcccagcactttgggaggccraggcgggtggatcacgaggtcaggagatcgagaccatcctggctaacacggtgaaaccccatctctactaaaaatacaaaaaaattagccgggcgtggtggtgggtgcctgtagttccagctactcaggaggctgaggcaggagaatggcatgtacctgggaggcggagcttgcagtgagccgagatcccgccattgccctccagcctgggagacagagtgagactccgtctcaaaaaaaaaaaaaaaagaagattgttaagatgacgacagttctcctcaagttgatctgcagattcaacac

SEQ ID NO: 923715 - DNA, 653 bp, Homo sapiens
cagaaagcaaaaaggctcaaaccaacgtattcacaggagccaaaggcagatccaacccgaaccttcatcccccaatgatggatgcatgcgatctctgtccatataatggaacataagccactaaaggaatgaagtacagacacctgccacaacgcggataaacctgaagaccctaggctgagtgaaagaagccacacgctcagaccacatagtgcacgcaaaggagatcagaacgtgccaccccaaaatatgccatcctgcaattgacaattttgagtcagaggcacttgaagggcagcagatgcaggactctctctctgagcctcatgctgttcctgggaagcaggagatgcaattcccaggtgaatgatgctcttctgataccagaatgaaacgatcattctcatcactaggatgggargtggaggcggaaagaatcctgtctgctcagacccttttagaacagctctcaccttccagcctcttacacagattacttttctacaacttacgctttctgcaactcagtacttaagtgttcaactctaactgtgttttggagtcttcctttcctcccataccacagaaaacttggatttaaataatttgcatacttttctcctcttgatctatcttacgtcaatggaattctc

SEQ ID NO: 923716 - DNA, 662 bp, Homo sapiens
cttctgcttaaggagaagagggcgaagagtagagaggactttgtcatgcatctaggataccagttcagccagccatagcaagataggatgctgggcagaattgtggggcccccattccaggccttagctcccagaaggcgtttgtgtgtttttktttgtttgtttgtttgtttgtttgtttgttttttttgacatggagtctcactccgtcgcccagactggagagcagtagtgtgatcttggctcactgcaacctctctttcctgggtttgagcaattctcatgccttagcctcccgagtagctggaattacaggtgcacgctaccacgcccagctagttttataattttagtagagacggggttttgccatgttggccaggctggtctcgaactcctgacctcatgtgatccacccgcctcagcctcccaaagtcctgggattacaggcgtgagccactgcacccagcctcctgacgacatttctagacacatcctgggccagaagggaacctgctgcctagaaggaaaggacccagtcctggcagcatttatcacctgctaactgaagagcctttgggccctgaataaccagcagtgataccaggtactacactgagggccttgggtgagcctcagagacttgctggcttcaggtgaca

SEQ ID NO: 923717 - DNA, 603 bp, Homo sapiens
taaaaagtacaaatacctaattggaactaataaagatcttggagttctgaggaggggaaaaattttttttttttttttttttttttttgagatggagtcttgctctgttgcccaggctagagtgcagtggtgccatcttggctcactgcaacctctacctcccgggttcaaacaatgctcctgcctcagcctcctgagtagctgggactatgggcaccygccaccatgcccggctaatttttgtatttttagtagagacagggtttcaccatgttggccaagctagtcttgaactcctgatcttgtgatccacctgcctcggccttccaaagtgctgggattacaggggttgagccaccgcacccagccgaaaaatcttatttaagcctgaccttgggagagttactcttatgcttaggatatagaaagctacaaaatacattgtttccatcataacaacaggaaaaagccagatagataagccacaaaaacataacttttcttgagtccagcagagagctgaagtcaaaaggtaaccaagtaatcaagtaatctgatttcaaaagaggaaccagcccctccagggagaaaagggacataaga

SEQ ID NO: 923718 - DNA, 776 bp, Homo sapiens
atgtaccagctataatcttaacgtactggtaaaggccaaaggtgcactagatgtcagtctggaattacctgggactccagacccaaggagaattcgcactcattagcaaacacttttccacgtgcctcacatgaaagatggaggcagggctgaaggccagagagagcgctcctattatcaagrcagagacaggagacactggctcaagactgaccacagagagaaggcagagtttggctaccacatgacggagggcaggaacaccgagaaagccccgtgtccaaagcccaggtgcacaagtccagcctaggcctaaggcaggcccagaacaacagggaacctcctgtactgctaaccagcccaaggctaagaaacaagagacagcaggctgccaccaggagaggggggcaagaatttggagagagatgccctttgtggggcatgctggcagagaaggctgaaagctgagggggaagcacagatgctgagaaataccctctggcaccccagccccaccctcaggcaaaaggtcttggcagccttctagaaggttttgaggcctgtagtacagtgaaggtaatgaaagcaacaataaaacccaagtccaactcctaaccagactgacctccccatacccacaccaattcaaggcctccctattttcccccattaggtcttaaattctccaaccactgatttacttaccatgagcgtttatcaagaatgcagccaatctagggattggattactgcaatccctagactgcctgcacggg

SEQ ID NO: 923719 - DNA, 821 bp, Homo sapiens
cagctgctgtggtgggacaggcagctccaggtgccactccatgcaaggctgaaccaggtgtatctcaaggggcttccactgtgggcacaagcatctggaccaggggaatgcagtggtgcccgaaagctcagagacttcagggagtgaacagccccaaagatggtgttacatcacgccacagccctggcatggggagccccaaggtctaggctcccagaaggaccacagctcttctctccttcwcattgcctgcaacgtggcaagtagggggcatgtttcagtcctgtttgtgttacagctctttcagtcccgccattctgcagatcctgagttcttgtctcatgtccaagaagaatgaggtatgcagacaagtggtgggttagcaaggaggaaagcagtttcattgagctacagaaaagctctcagtagaccctaagtgggtagctctatccactggcaggtcatcctgacatctgtccaactctggctgagtcggggttttatgggctcagagggaggaagtgctgattggtccatggttggccatgggtaggcctggaaaaagcaccagaagttatcactctgggccacgattccacccagaacttatagccctaactccaggcttcaggctctccttggcttgaaggtggaccctcagctttctgcccagaaggctgtctgcctcctgctgccatcaacatgttgtatatggcccccaggctgttcatgccaaggggtgcctataggcccctgctgagccacatttattcttccctcagcctccctcctatgcttctaggtgcccaatgtccagaggg

SEQ ID NO: 923720 - DNA, 585 bp, Homo sapiens
ggacgtgtgttacagtatgctctttcagtttagccaactataggtggcttgtgttagtcagctcagttagaccctctgccttattgcaaggacagaaggctttctgtatgccggggtttcttgccttggtgtaccagaagaattggatcacacatggacttgaagagtgaatgcaaggttttattgagtgcaggcagtctcagcagatggaggagccagaagggagatggaagaggaaggtggttttcttctggagtggggctactcagcagccgggttctcctccgactgccctggccaaactccacatcattttgccaactgatggcctgccggcctgcaggcacctgtcagtgtgctcttacaytggtgcgttcctctcgacatccagtcacttgtgtcttcttgggctggtgtgtttctctctaagtccagccacttgtgtctctgcccactagggtcttggggtttttacaggcacaggatgacggcaaggcaggtcagggtggatttggccatgaaaacagaaatgcctgtcctcacctagctccgtaggcaaaggcccaagatagagccctagccacg

SEQ ID NO: 923721 - DNA, 660 bp, Homo sapiens
tttgtgatttctttgattctgctggatttgggtttggtttgttcctgtttctctagttccttgaggtgtgatcttaggttgtatatttgtgctctttcagactttttaatgtagtcattcaatgctatgaactttccccttagcacttcttttgctgtatcccaaaggttttgataagttgtgtactattatcattcagttcaaatatttttttaatttccatcttggtttcattattgacccaaagaccatttaaaatcagattaatttccatgtatttgtatagttttgagggttctttttggagttaatttccagttttattccactgtggtctgagaggacacttgatataatttttactttgttaagtttattgagatgtattttgtgacctatcctakggtccatcttggagaatattccagataagagaaagaaataaagggcatccaaattggtaaagaggaagttaaactgttgttgtccattgatgatatgattgtatacctagaaaactctaaagactcatccaaaaagccctggatatgataaatgaattcaggaaagtttgaggatacaaaatcaatgtacacaaatcagtagcactgctatacaccaacagtgaccaagctgagagtcaaatcaaaaactcaaacc

SEQ ID NO: 923722 - DNA, 702 bp, Homo sapiens
caaaaggacacttgtattagtctgttctcacactgataataaagacatacctgagactgggtaatttataaggaaaagaggtttaattgactcacagttccacatggctggggaggcctcataatcatggtggaagcaaaagaggagcaaagtcatgtcttacatgatggcaggcaagagaaactgagagcccagtgaaagggaaaaccctttatctaaccataagatctcattaaacttattcactaccatgagaacagtatggggaaaatcaccaccatgattcagttatctcccactgggtccctcacataacatstgggaattatgggagctacaattcaagatgagatttgggtggggaagaaccaaaccacatcattgtgcacttgacccctcccaaatctcaggtcctcacatttcaaaaccaatcatgccttctcaacagtcccccaacatcttatctcatttcagcattaactcaaaattccaaaattcgaagtttcatctgagacaaagcaaatccctttcatgtatgtatgcattcccatacatcctctgaaatctaggcagaggttcccaaacctcaatccttgacttctgtgcatccacagactcaacaccacatggaagctgccaaggcttggggcttgcaccctctgaagccacagcccaagctctaccttggcctctttagccatg

SEQ ID NO: 923723 - DNA, 740 bp, Homo sapiens
ctgatctttgacaaagcaaacaaaaacatcaagtggcaaaaggacacttgtattagtctgttctcacactgataataaagacatacctgagactgggtaatttataaggaaaagaggtttaattgactcacagttccacatggctggggaggcctcataatcatggtggaagcaaaagaggagcaaagtcatgtcttacatgatggcaggcaagagaaactgagagcccagtgaaagggaaaaccctttatctaaccataagatctcattaaacttattcactaccatgagaacagtatggggaaaatcaccaccatgattcagttatctcccactgggtccctcacataacatctgggaattatgggagctacaattcaagatgagatttgggtggggaagaaccaaaccacatcattgtgcacttgacccctcccaaatctcaggtcctcacatttcaaaaccartcatgccttctcaacagtcccccaacatcttatctcatttcagcattaactcaaaattccaaaattcgaagtttcatctgagacaaagcaaatccctttcatgtatgtatgcattcccatacatcctctgaaatctaggcagaggttcccaaacctcaatccttgacttctgtgcatccacagactcaacaccacatggaagctgccaaggcttggggcttgcaccctctgaagccacagcccaagctctaccttggcctctttagccatggc

SEQ ID NO: 923724 - DNA, 702 bp, Homo sapiens
caaaaggacacttgtattagtctgttctcacactgataataaagacatacctgagactgggtaatttataaggaaaagaggtttaattgactcacagttccacatggctggggaggcctcataatcatggtggaagcaaaagaggagcaaagtcatgtcttacatgatggcaggcaagagaaactgagagcccagtgaaagggaaaaccctttatctaaccataagatctcattaaacttattcactaccatgagaacagtatggggaaaatcaccaccatgattcagttatctcccactgggtccctcacataacatctgggaattatgggagctacaattcaagatgagatttgggtggggaagaaccaaaccacatcattgtgcacttgacccctcccaaatctcaggtcctcacatttcaaaaccaatcatgccttctcaacagtcccccaacatcttatctcatttcagcattaactcaaaattccaaaattcgaagtttcatctgagacaaagcaaatccytttcatgtatgtatgcattcccatacatcctctgaaatctaggcagaggttcccaaacctcaatccttgacttctgtgcatccacagactcaacaccacatggaagctgccaaggcttggggcttgcaccctctgaagccacagcccaagctctaccttggcctctttagccatg

SEQ ID NO: 923725 - DNA, 627 bp, Homo sapiens
agtctgataggcttccctttgtgggtaacctgacctttctctctggttgcccttaatattttttccttcattttaaccttggagaatctgatgattatgtgtcttggggttgctcttcttaaggagtatctttgtggtgttctgtgtatttcctgartatgaatgttggcctgtcttgctaggttggggaagttctcctggataatatcgtgaagagtgttttccagcttggttccattctgcctatcactttcagatacaccaatgtaacataggtttggtcttttcacatagtcccatatttcttggaggctttgttcatttcttttcattcttttttctctaaccttgtcttcatgctttatttcattaagttgatcttcagtctctgatatcctttcttctgcttgattgattcagctattgatacttctgtatgcttcacaaagttctcatgctgtgtttttcagctccatcaggtcatttatgttcttctataaactggttattctagttagcaattcctctaaccttttttcaaggttcttagcttccttgcattgggttagaacacattcctttagctcggaggagtttgttattacccaccttctgaagcttacttct

SEQ ID NO: 923726 - DNA, 654 bp, Homo sapiens
tccacaccaaatcaacagaatatacattcttctcagcaccacattacacttattttaaagttgaccacataattgaaagtgaaacactcttcagcaaatgaaaaagaatggaaagcataacaaacagtccatcatatcacagtgcaatcaaattagaactcaagattaagacactcactcaaaaatgcacaactacatggaaactgtacaatctgctcctgaatgactrctggataaataacaaaattaagacagaaataaataagttctttgaaaccaatgagaacaaagacacaatgtaccagaatttctgggacatagctaaaatggtatttagaggaaaatttatagcactaaatgcccacaagagaaagcgggaaagatctaaaatcaacaccctaacataacaattaaaaggactagagaagcaagaacaaagtcaaaagctagcagaaaacaagaaataactaagatcagaacagaactgaaggagatagagacatgaaaaccccttcagaaaaatcaatgaatccaggaactagttttttgaaaagattatcaaaatagatagaccactagccacactaacaaagaagaaaagagagaagaatcaaattgacacaataaaaaatgataaaggggatatcacctctg

SEQ ID NO: 923727 - DNA, 500 bp, Homo sapiens
gaaagatctaaaatcaacaccctaacataacaattaaaaggactagagaagcaagaacaaagtcaaaagctagcagaaaacaagaaataactaagatcagaacagaactgaaggagatagagacatgaaaaccccttcaraaaaatcaatgaatccaggaactagttttttgaaaagattatcaaaatagatagaccactagccacactaacaaagaagaaaagagagaagaatcaaattgacacaataaaaaatgataaaggggatatcacctctgatctcacagaaatacaaactaccatcagagaatataataaacacctctatgcaaataaactagaaaatctagaagaaatgaataaattcctggacacatacaccgtcccaagactaacccaggaagaagttgaatccctgaatagaccaataataagttctgaaatggagtaagtaattaatagcctaccaatcaaaaaaagcccaggaccaggtggattcac

SEQ ID NO: 923728 - DNA, 500 bp, Homo sapiens
gaaagatctaaaatcaacaccctaacataacaattaaaaggactagagaagcaagaacaaagtcaaaagctagcagaaaacaagaaataactaagatcagaacagaactgaaggagatagagacatgaaaaccccttcagaaaaatcaatgaatcsaggaactagttttttgaaaagattatcaaaatagatagaccactagccacactaacaaagaagaaaagagagaagaatcaaattgacacaataaaaaatgataaaggggatatcacctctgatctcacagaaatacaaactaccatcagagaatataataaacacctctatgcaaataaactagaaaatctagaagaaatgaataaattcctggacacatacaccgtcccaagactaacccaggaagaagttgaatccctgaatagaccaataataagttctgaaatggagtaagtaattaatagcctaccaatcaaaaaaagcccaggaccaggtggattcac

SEQ ID NO: 923729 - DNA, 555 bp, Homo sapiens
ttctagtgagcatggtgcttaccggagcacatgccactgttccactatttcgttaatattttcccttaagtcgactcacattttttacttcaataatttttaaaagtcaactttacagcactgatgtaaatggaaagttagtatctcttgataaggagaatgtaactaaaaataaacacaataaaagcaaagcgatgtgattaagctctagctagacatcactacccrcccagggctctgtgctgcaggcctggatctgtctgttaaatgagaagattagcaggtgctggacaggcccacaccaagctgagactctccttgatacaatcaggtggtgtggaagagaatggaaaagggaagagctttcccactgggtgcctcaaagataagcaacactgcatctgctcaccacctaacaatcaaatagggaaaagcatgctcactgtagttaactgctcattttcagggccatcctttatttatggcagggatgtctggctttcctcctccttagggacataaagttcctttttgaaataaatgcgtttggatttg

SEQ ID NO: 923730 - DNA, 616 bp, Homo sapiens
aagaaattgtacagacactttgaaaggaaatttggcagtttcttacaaagctaaacatactcagtataaaattcagcaacttttacttcttggaaattagcaaaatgagtagaaaacttacatccacatgaaaacttccacattaatatttacagcagctttatctgtaattgccaaaacttggaagcaacatccattccttggaatattattaagcactaaaaagaaatgagccatctagccacargaagacatggaggaagtttaaatgcatgttgttaactgaaagaagccaatcttaaaacgctacatactgtacaattccaaccatgtgatattctgaaaaggggaaaacaatgggagcagtaaaaagataagtaactgccgatgggtttgaagcaagagagggaggaatgaataggtagagtgcaggaaatgattttagggcagtgaaatgattctgtatgatattataatgatggatatatatcattatacatttttcaaaacccataaaatgtacaacacaatgagtaaactctaatcaaactagaaacttaagttaataataacgattcagtaccagtttattacttttaacaaatgcaagatgtta

SEQ ID NO: 923731 - DNA, 731 bp, Homo sapiens
ccagagtgaggaatccaagacagaaaacagggcagaggctgaagtgctcatgacttagtcagaagtcacacaccaacattcctatcatgttctaaactctagtagaaagtcattaagtccaggccacactaaggggaggtgaattacactccatcttttgagaggacatatttcagagccaccacatgtaaaagcaaaatgtctaacaacagtggcacaaaggacagaagatggaaagtggaagtctacagtcttaagtatcttatgctgcaggtgaagtggatgatgccaagtgaaggtagactgcaataaattaaatcatatgttggaaactctagagaaacactaaatgaaacctgtattgctaayaaatcaatatgagggataaaatgaatccataaaaaagtactcaagtaatcaaatagaaggcaggaaaaggagaaaaaagaataaagaacagataggacaaacaggaaaaaaacagcaaaacagtacatttaaactaatcaacaattacattaaatataagtggctgaacatcaaaagaaaaaatcaaagattactagcttggttcaaaaagtaaaactatgttctggatacaagaaacatactttaaattgtagctatgttaaaagtaagaaggtgggaaaataaatatcgtaaaaagatgaatcaaaagaaagctggagtagctatgttaatagacaaagtagatttcaaaacaaggaata

SEQ ID NO: 923732 - DNA, 595 bp, Homo sapiens
gcttttggaccaagactatggggttttatagatagagaattatcttgtcatatgcaaacagagctagtttggcttcctctcttcctatttggatgcccttaatttctttctcttgcctgattgctccaaagaagacatacatgcgaccaacaagcatatgaaaaaagctcaatatcactgattattagagaaatgcaaatcaaaaccacamtgagatagcgtctcacaccagtcagaatggctattattacaaggtcaaaaaataacagatgctggtgaggttgcagagaaaagggaacccctctacactgttggtgggagtgtaaattagttcaatcattgtggaaagcagtgtggtgatttctcaaaaagctaaaagcagaactggtaaccatttgacccagcaatcccattactgggtatatacccagaggaatataaagcattctaccataaagacacattcacgcgaatttttgttgcagcactattcacaatagcaaagacatggaatcaacctaaatgctcatcaatgacagactggataaaggaaatgtggtacatatacaccatggaatattatgcagccataaaa

SEQ ID NO: 923733 - DNA, 595 bp, Homo sapiens
gcttttggaccaagactatggggttttatagatagagaattatcttgtcatatgcaaacagagctagtttggcttcctctcttcctatttggatgcccttaatttctttctcttgcctgattgctccaaagaagacatacatgcgaccaacaagcatatgaaaaaagctcaatatcactgattattagagaaatgcaaatcaaaaccacaatgagatagcgtctcacaccagtcagaatggctattattacaaggtcaaaaaataacagatgctggtgaggttgcagagaaaagggaacccctctacactgttggtgggagtgtaaattagttcaatcattgtggaaagcagtgtggtgatttctcaaaaarctaaaagcagaactggtaaccatttgacccagcaatcccattactgggtatatacccagaggaatataaagcattctaccataaagacacattcacgcgaatttttgttgcagcactattcacaatagcaaagacatggaatcaacctaaatgctcatcaatgacagactggataaaggaaatgtggtacatatacaccatggaatattatgcagccataaaa

SEQ ID NO: 923734 - DNA, 627 bp, Homo sapiens
ctttgattacttacctaccatgagattaagaatgaaggtgaaattaaaagtgggtataaatatgactgcagaactgttcctgagctgttgctccaggcacactgcctataggctagccctgctccataaagaacagtacctctgctgctgctatacactgtcgcttcaataaaagttgctgtctaggtccggttccaagatggccaaataggaacagctayagtcaacagctcccagcgtgagtgatgcataagacaggtgatttctgcatttccaattgaggtactgggttcatctcactggggcttgttggacagtgggtgcagtccacggagtgtgagctgaagcagggcggggcgttgtctcaccggggaagtgcaaggggtcagggaattcccttttctagccatgggaaaccgtgacagacggtacctgggaaatcgggaaactcccaccctaatactgcgcttttccaatggtcttagcaaatggcacaccaggagattatatcccgcatttggctcagagggtcccacgcccacagagcctggctcactgctagcacagcagtctgagatcgaactgcaaggcagcagtgaggttgggggaggggcacccgcaattgct

SEQ ID NO: 923735 - DNA, 589 bp, Homo sapiens
attgcaaccagcaataggaaactaatttataatgttccacaaaattttatatcagcatttcttatatgtatatttgcaaggaagtttttagaaaaatcccttctattgggcatttgggggtggagccaagatggccgaataggaacagctctggtctacagctcccagcgtgagcgaggcaaaagacacgtgatttctgcatttccatctgaggtaccgggttcatctcactagggagtgccagacagtgggtgcaggacagtgggtgcagcgcaccgtgcgcgagctgamgcagggcgaggcattgcctcactcgggaagtgcaaggggtcagggagttccctttcctagtcaaagaaaggggtgacagatggcacctggaaaattgggtcactcccaccctaatactgcacttttccaaagggcttaaaaaacggcacaccaggagattatatcctgcacctggcttggagggtcctatgcccacgcagtctcactgattgctagcaaagcagtctgagatcaaactgcaaggcggcagcgaggctgggggaggggtgcctgccattgcccaggcttgattaggtaa

SEQ ID NO: 923736 - DNA, 593 bp, Homo sapiens
gtggagaaaggggaacacttgtacactgttcatgggaatataaattagtacagccactatagagaacagtatggaggttcctcaaaatgctaaaaatagaaatgccatatgattcagcaattacacaactgggtatgtctccaaaagaaaggaactcaatagattgaaaagacatattcactcccatgcttattgcagcactattcacaatagccaaaatatggaatcaacctaactgcccatcaatggatgaatggataaagaaaatatggtttctatacacaatagaatcttattgtcatagaaaagaatgaaatcttggcatttctggcaatctggatggaacttgaagccattatgttaagcraaataagccaagcacagatagataaatattacatgttctcactcatagtggaagcaaaaaagtttatcttatgagagagagagaaagacagtagattggtggctatcagaggcagggaagaagaggaaagtgggaaggatgaagagaagttgattagtgggtacagatataaggtttgatagaagaaataagacctagaattagatagatgagtaggtgactatag

SEQ ID NO: 923737 - DNA, 567 bp, Homo sapiens
tttctattttcagttttttgaggaatctccatccttttctccatcgtgggtatactaattcacattcccactaacagtgtgtgagagtttccctgtctccatatcctggccatcaactgttgttacctgtctttttgataaaaatcattttaacttaggtgatatgatatctcattatagttttgatttgcatttttctgatgattagtgattttagcatttttttcttatagctgttggccatttatatttcttcttttaagaaatatctattcagatcttttgcccagtttttaattgacttacttatttataggctattgagttgtttgagctctgtatacattgtggttcttaatctcttatcagatggatggtttgccagtgttgtctcccattatgcaggttttctcttcactrtgttgattgtttatgttgctgagtagaagcttttagcttgacgagcaaccatttgtttatttttgttttggttgcctgtgattttaaagtcttacacaatgatctttgcccggaccaatgtcttgaagcatttcttcagtgtttcct

SEQ ID NO: 923738 - DNA, 659 bp, Homo sapiens
gaatttttttgttgttgttgttactgtttttgagacaggatctcactctgtcacccaaactggtatgcagtggcaccatcacagctcactgcaaccttgacctcctgtgatcaagcaatcctcctgcctcagcctcctgagtagctgggactataggagcatgccaccaagcccagctaatttttgaaattgttgtaaagatggggtttccctatgttgcccaggcaactccttggctcaagcgatcctgccacctcagcaaagtgttgggattacagatgtgagccagcacacccagcccagggaactcttaatggagggctttcatagggttgcagtccactggagtcatctgagagctcgcctgagttggacatccaagatgtgacgctcacatgtcagttaagttaccattgactgcttactaggaattcagctagagctgccacctaaaggatcttcaaaggaacctccatatgtracttgagcttcttgcagctcaagaaggctcaattcctttggggaatggctggattccttggggaagtgtccagagaatgaacgttccaagagatccaggcagaagccacaacactttctatgacctcgcattggaaatcccagaatgtcacttcttctgccacattctactggttcaa

SEQ ID NO: 923739 - DNA, 670 bp, Homo sapiens
aaaataatcagttaacatgaggtcatactggagtcgggtgggcctctaatctaaaatgactgctatcctcataaaaagggaaaatttggagatagacatacacacaggaaggataacttgtgaagatgaaggtagagattgaggtgctgagtctacaagccaaggaacactgaagataccaaaaaaccccaccagaaacaaagacggaaacatgaaacagatttctccctagtgccttcagagaaagcattgcccagccaacaccttgatttcagatttcttgtctccaaaactgagacartacatttctattctttaagccacctagttttgagtactttgttatggcaggcctagcaaactaatacagccttgaagtgatagaagacttggcatgttgtagaaacatcagggaggccactgtggatagagcagataagtaagggagagaatcgtatgggaaggagaggtatccaggggccagatctgtagatcatgactttgtaaaccaatatagcaacatttgtttttattctgagtgtgatgggaagccattgtagggcttgaagagggcagtggcctgatttcacttatatctttaaagtaccactctggctcctgtctggaaataatagtttgccgaggagcagaagtggaggcagtgcaacca

SEQ ID NO: 923740 - DNA, 670 bp, Homo sapiens
aaaataatcagttaacatgaggtcatactggagtcgggtgggcctctaatctaaaatgactgctatcctcataaaaagggaaaatttggagatagacatacacacaggaaggataacttgtgaagatgaaggtagagattgaggtgctgagtctacaagccaaggaacactgaagataccaaaaaaccccaccagaaacaaagacggaaacatgaaacagatttctccctagtgccttcagagaaagcattgcccagccaacaccttgatttcagatttcttgtctccaaaactgagacagtacatttctattctttaagccacctagttttgagtactttgttatggcaggcctagcaaactaatacagccttgaagtgatagaagacttggcatgttgtagaaacatcagggaggccactgtggatagagcagataagtaagggagagaatcgtakgggaaggagaggtatccaggggccagatctgtagatcatgactttgtaaaccaatatagcaacatttgtttttattctgagtgtgatgggaagccattgtagggcttgaagagggcagtggcctgatttcacttatatctttaaagtaccactctggctcctgtctggaaataatagtttgccgaggagcagaagtggaggcagtgcaacca

SEQ ID NO: 923741 - DNA, 611 bp, Homo sapiens
acgctaccacctatgaaatattctagccaaaaatttaaaactttattgaatcagatttcagcatctaaataacagtgtataggaagcactggaaaccaaggaacatgttaaatgaccccatggggatggaaccagtaaaatccagaccgtgggaaattccacatgaggaacagcaggctttttcaacaaataattagcaaggagaaaaaaaacaaaaacaaaagggagtaaaatctatagattgaaggatacgtaaaagacatacaagccaaatacaataaccagagcttgtttggaatcctgattcaaacaaactgtataaaaattataaaggaattatttttagttgttttagttgcaatgatagaattgctgtttggttaaaaaagagagatgcatatcttttagagatatataytaaagtatttatagatgaaatgtatgatatattttgcttcgaaatattccaggatgatcaaatgctgataatggttgaagctggatgataggtacataaaggctcatcagactcccttctctacttttgtgtatatttgaattttcctgtaattaaaaaaatacatctaaggttttaaattaacctctcagta

SEQ ID NO: 923742 - DNA, 630 bp, Homo sapiens
caacttccctaacagccaacatccagtgatttaacaaggtggcagtataaaggcccaacatttccagcccaatcagacctgcattgtaagctaatcctgctttcaccccttcctttcaaaggtattggtccccaatgagcaccttacaccttaaattttgtctccccatctgcttccagagaacccaagctggaatggttggtaccagkaatggctggttaaagagtgtcggcaatgagataccgttttggagtaggattattcaccacctgtctgtagtgaggagcttatcactgttggtgggtgatcacagacagcatctggtataagatggaggtccaactgttaaacagtggtgaattgggggtattgtacagtggaaaggaatatactagcagacaagatgtgtcaggctgtttgaaaggtatgaagaaacaggagctctaagggtaacagtattggatagctattgctaagtgccagtgatagcctacactaagataatgaacagtgcaggacaagtagcaggcaattgaaaggcaggtgtgaaagccaaagagtctccttggttatatacaaagaagcccccttgtcttgcttgaagaacaagaggaagccaaggatcaagct

SEQ ID NO: 923743 - DNA, 581 bp, Homo sapiens
atgtggccctgggctttatttgctgttgttggcaatttcttttgtcactgtttcaatctcactgcttgttactggtctgttcaggatttctatttcttcttgattcaagctgggagggttgtatgtttccaggaatatattcatttcctctagattttctattttgtgtgcatagaggtgttcatagtwgtcttgaatgatcttttgtatttctgtggtgtccgttgcaatgtttctactttcatttctaattgagcttatttaaatcctcactcctcttttcttagttaatttagctaatggtctattgattttattttttctaaaaacaaactttttgtttcacagatcttttgtattttttgctccaatttcatttagttctgctctgatctttatttcttttcttctgctagcattgttcttgtttttctagctccttgaagtgtgatgttacattgtcaaattgtgatctttcagacttttttgatgtaggtgtttagcagtataaactttcctcttagcactgcttttgctgtgtccgaaattttgataatttgtgtcattatcatcattcatgt

SEQ ID NO: 923744 - DNA, 576 bp, Homo sapiens
taaaggcttatcttcaagctctgaaattctgccttctagttggcctagtctattattaaaactttctactgcattctgtaattccctaaatgtgtctttcatttccagaagttctggttggtttgtcattacaatatctatctctttagaaaatttcttattcatatcctgaattgtttttttttttagtttatgttgaatttcacctttcttttgtatctccttgagtaacttaataatcaacctattctytacctggtatgtcaaatatttcatcttggcctaggtccattgctggagagctagtatgatcttttgggtatgttatggaatcctgtttggtcatgttgccagaattatttttctggttcctttttatattggtagactatttcttctaattatttttaagtttatttttaatttggctgtgtttttttttatttcttttttctccctttgagggtatatttttaatgattgtggtttatagtaacctaatttggctctgggtgctttcagggatgaagactctgtatgagttccttgtttatagagagtctttatattatggcc

SEQ ID NO: 923745 - DNA, 714 bp, Homo sapiens
aggcaggagaatcgcttgaatctgggagacaaaggttgcagtgagctgagatcatgccactgcactccagcctgggcaacagagtgagactgtctcaaaaaaaggaaagataatatgatatattttgtgttttgtggggttatttttacataccttacctcctcctctaaaggcttaagtagaaagaaagcaatagaaacgtatatttagggccacgtgcggtggctcacacctgtaatcccagcactttgggaggccgagggaggtggatcacaaggtcaggagttcaagaccagcctggccaatatgatgaaaccccgtctctactaaaaatacgaaaaaaattagccgagcgtggyggcgggcacctggaatcccagctacttgggaggctgaggcagaagaatcgcttgaacccaggaggcagaagttgcagtgagccgagatcacatcattgcactccagcctaggcaacagagcaagactccgtctcaaaaagaaaaagaaaaagaaaaaaagaaacatatatttaggaaagtaagatgtatggaagtatgaagctggtacaaaacatgtatgtcttaatgatctgggaagtgttttttggggttggggacagggcaagtcagggactgagcttcctagcatttccctaggtgacgtccccaggaaatttctatctcagccactgatgataatgttgaattcagggcc

SEQ ID NO: 923746 - DNA, 746 bp, Homo sapiens
gagcaccttcactcaggagaatggaaggggaatgcatcacctctcacaactttagcatcaccatatagaaaatggggacaacagcatcttccttgcatggctaaggcatgtgaggacaagacagtgacatgaacaggacacactcagagcagagtgcctggcatatatgctcggtcttcaatcagtggactctaatgacaatgacatcctgtctcaggtgcactcaaaagaagtggtccagaaactctgcttttagggaaatcaccatgcgtggaaatctctgtgtgacttataacatggaagatctcattccaacgcattctatcaggtgtaagccacataaatttctactttttgttgaactttcctgtaatttctgagtcaaataacttgccttaaaattttttcaacctggtttaggcccaggtagagagaacagctactcccctcttcccagatttaggccccacctgggctaactgctatcactttctgggtctttacatcaaaaggtttgtttgaaaactccttgcagagctaactcttccagggtgccatgatactacctgtaacaaccacacttctggytgggcgtggtggctcacacctgtaatctcagcactttgggaggctgaggcgggcagatcactgacgtcaggagttcaagaccagcctgaccaacatggagaaaccccgtctctactaaaaatacaaaattggccgggcgtggtggtgcatgcctgtaa

SEQ ID NO: 923747 - DNA, 556 bp, Homo sapiens
acatcaaagaaaattgatttgagctgacaaagcaaaacaaaaaaacaaacaaacaaaaaacccagggataccccttctggaatgtattgcaaaattacactcatttatcttttcgttaaagggatctatattaacatcagatcctaacattgtttacatttggacagtaggtcttgcttttgagcaragatatatctgcttccaccaccataccctttcgaatttcattccaaatgcattttgttattcccgtataatcataatcataaagcaccatccaaaagaaaagacaaataacagagagaagagattcctgtgtgttatgtctaggctgacaacggaaacctctgtgaccctggtacgtcatttgctttgctatacactcagttctccgtttgtaaattgagttttgctttttttttgtttaactttaaggacctcttgagtgctaatatttgtgtcgcacaatatgccagttccaaggagggagaaggaaaaaagaaacagcctatggaagcagcatgagcttccagatctaataaattcaaataaagtt

SEQ ID NO: 923748 - DNA, 592 bp, Homo sapiens
tcagaaatcatgaaggacgtgaaggacaaaatggagtcaggtgacatcttcaaagtgctgaaataaagactgccagtcgctaattctatattcagcaaaaactacacaaaatacataggtgaaattggacattcccagataaacaaaaacagagaagtcaccactagcagacccctctcctacaagaaacaataaacagagtccttcaggctgaaatgaaagcacactagactgtaacttgaatagatcagaagaaataaagagcaccagtaaaagtatctactaagtaaatataaaatgcaaaggtagtttttctttgtaactcttttttccccttgatttaaaagacataaagcaacatttacaaatctatgttgatgggcatacaaggtatacaagatgtaattgacaggacttgacaacaccagcmcagtggagggaggatggtggggctacatatgaacaaagttttcatggcactgtaattaaggtggtattaatctgacctacattgctggaaatttagatgctaattaaaacccacaaggtgattactaaggaaataacccccaaagtgataaaataaatgaca

SEQ ID NO: 923749 - DNA, 564 bp, Homo sapiens
tgccatttaatattcttcacttagatgctaatgcacatctcaaatttaatgaggacaaaacagaactcccgattcccctttttcctgccctaatgtgctccttccccaatattctcatctgagaaaatagtcccacccagttgctcaagtgaaaaactgtttactcatctttcattcttccccagcctcactgctcacaccagccccctggctctccctttggagtccgcttctccctttgcagtccagatcatgactcaccactccagtctcatgcaaacacttccaactggcctcccagttccccctctgcttctaccctccatacagcagcttgagggaagtttttaaaacataattcagatcatgtcaagcacctgcttagaaccactcttttggtttcctgccacatttagaatttaaatctaatccaaactctttcccctggcacacaaggtcctgygtgatctggcccccacctacctctaaacacatgtgccactctccagcccagtgtgttctgccagctcacttccacctcagggcctttgcactgtatgtggc

SEQ ID NO: 923750 - DNA, 597 bp, Homo sapiens
aggctgaggctggaggatcgcttgagcctgggaggtcaaggctgcagtaaactatgattgtactactgcgctccatcatgggcaacagagcaagactctctctcaaaacaaaccaaaacagatgagactgaggcctggcctgaactgaaaggatacaagggccaggggtgcaccctgaatctcccatctagtttgctgcctgactttgaaagccaaccaagagaccatggcaggagactggttcagggttgctgaccctggggttaggaatggaacccaagcctcttgacccctcaggtagtgttccttccacctacatgtctagctcctcagcctggcattcaaggscctgccctgtccagactcccttccagccattcttcccaccacccacactctctcccaagactacaggttgtgcaggtcagactggagtccaggtcctgcgagggcctctcctcgtggccctgtggccaccccaagtcccccacaggccacagtggacagttggtccaccccaccatgccagccatcccctaactccaacctttttgctgtggagggtgagcactggctgatggaggactcctgggctgc

SEQ ID NO: 923751 - DNA, 631 bp, Homo sapiens
aggctgtgacacggcctggtgttttcagcgctcccaattagtgtagaggcaaattgagcttccttactagtactggttaacgttttccgtagcccaaagtcccagttaagtggaaaaaagatacactgttgagaaaactgtactgatttttgttttaattttttaaatttttgttgttgttttgagacagagtttccctcttgtcgcccaggctggagtgaagtggcacgatctcggcttactgcaagctccgcctcccgggttcacgccattctcctgcctcagcctcccgagtagctgggactacaggtgcccgccaccacgcacsgctaatttttttgtattttttagtagagatggggtttcaccgtgttagccaggatggtctcttatctcctgacctcgtgatccgcctgcctcggcctcccaaagtgctgggattataggcgtgagccaccgcatccggtctaacttttctatttttagtagagatgggatttctctatgttggccagtctggtctccaactcctgacctcaggtgatctgctcgcctcggcctcccaaagtgctgggattaaaggcatgagccacctcagtgggccactgtactgatttttaaggtgttgaag

SEQ ID NO: 923752 - DNA, 618 bp, Homo sapiens
aagggcaggaaggatgaaggagacggggaggcaggggcccaacccggcagagagaatggcctccgagccaggaggaaggcctatataaggtcgagggggcacggagaaggggaaggggcttggcaccaccttttcccacacaagaggcccacatgaaggaaggttctaggtcattatcagggtatgaccacaccccacactaacaggtgattccatatggaagcaatactaacacactcggtccaacacaattctgcctttccccatgaaactgttacttaacaaacacattcttttaaaaatgcagcctgtaatttggttgtgaaccagctttgattgtgccctaagcacatgctgagtgggggtgtccggatgcccaccacttcctggcataactacccacatctgcttgcctggtcagcggccacctggccaagcctcttggratcaagatcactgtgctccttctgaagagccaaggtgaagggactcacaatcagaaggtatctgctgtccttcctgggtctctcctcttcatctgtttgcccccttctggctctggctctgaaggaagctctcctaccaggcatggactgacctgaccctaggccaaggcct

SEQ ID NO: 923753 - DNA, 584 bp, Homo sapiens
cgtgtgttagagtgtgctctttcagtttagccatttataggcagcttgtgttagtgaattcaattagaccctctgtcttattgcaaggtcagagagctttctgttccccaggatttcttgtcttggtgtaccagaagaatcaggccacacatgggcttggagaatgagcgcaaggttttgttgagtgaaagtagctctcagcagattgggaagccagaagggagatgcagtgggaaggtggtttttcccctggagtcgggctgctcagtggccgggctctccttagaacatcctggccaaactctgcattgttctgctggtcgatggcctgccggcatctgctggtgcctgttagtgtactcttccaccgatgtgttcttctcaatattcagcygcttatgcgttcctctgctgatgtgttcctctcagcatccagccgcctgtgtgtttctacccgctagggtctcagtgtttttataagcacaggatgaaagcatggtgggccagggtggtcttaggaaatgcaacatttaggcacaaaaacagaaatgcctgtcgtcacctagatccatgggcataggccc

SEQ ID NO: 923754 - DNA, 584 bp, Homo sapiens
cgtgtgttagagtgtgctctttcagtttagccatttataggcagcttgtgttagtgaattcaattagaccctctgtcttattgcaaggtcagagagctttctgttccccaggatttcttgtcttggtgtaccagaagaatcaggccacacatgggcttggagaatgagcgcaaggttttgttgagtgaaagtagctctcagcagattgggaagccagaagggagatgcagtgggaaggtggtttttcccctggagtcgggctgctcagtggccgggctctccttagaacatcctggccaaactctgcattgttctgctggtcgatggcctgccggcatctgctggtgcctgttagtgtactcttccaccgatgtgttcttctcaatattcagctgcttatgcgttcctctgctgatgtgttcctctcagcatccagccgcctgtgtgtytctacccgctagggtctcagtgtttttataagcacaggatgaaagcatggtgggccagggtggtcttaggaaatgcaacatttaggcacaaaaacagaaatgcctgtcgtcacctagatccatgggcataggccc

SEQ ID NO: 923755 - DNA, 622 bp, Homo sapiens
gcccaggctggagtgcaatggtgcaatcttggctcactgcaacctccacctcccgagttcaagcgattctcctgcctcagcctcccaagtagctgggcttacaggtgcccaccaccacgcctggctaattttttgtatttttagtagagacggggtttcaccatgttggccaggctggtctcaaactcctgacctcaggtgatccacccacctcggcctcccaaagtgctggaattacaggcatgagccaaagaccttcccttactctttacctgcagctacaccacacacttaagatttccaatacccttgcacatgttatttgctcagcctaaagtggccttttccccttccttcccatcctacccaaccttaactcccaacaaacagctcctccttttcctttgagacacagttacaatgttatctctacaatttcctcaggtagtattaatgrattcccttttgttctctttgtaatttgcctaattactctgaattgccatcatttacttacacatttgtctccttcaaaagactttgagcctcaagaagatctgtgtcttgtatggatttttatggcctagtccatgtcaggcactcagtaaatgatgaaagaata

SEQ ID NO: 923756 - DNA, 533 bp, Homo sapiens
gacctccctgcctccctccccgcctccctcccggatggggcgcctggccgggcggggggctgacccccccacctccctcccggatggggcggctggccgggcagaggggctcctctcttcccagtaggggcggccgggcagaggcgcccctcacctcccggatggtgcggctggccgggtggggggctgacccccccacctccctcctggacggggcggctggccgggcagaggggctcctcacttcccagtaggggcggccaggtagaggcgcccctcacctcccggacggggcggctggccgggckgggggctgacccccccgcctccctccccggacggggcggctggccgggcagaggggctcctcacttcccagtaggggcggccaggtagaggcgcccctcacctcccggacggggcggctggccgggcggggggctgacccccccgcctccctcccggacggggcggctggccgggcagaggggctcctctcttcccagtaggggcggccggcagaggcgcccctc

SEQ ID NO: 923757 - DNA, 601 bp, Homo sapiens
atcagttaatgggaaaatgtggaagttctctcctggttgcttctgtttttatcaatggaatatgaaacatgcttctgagctgagagtgtggaggaggatggaataataaaatttttaggtatacaatagtcacctggacagtgagggagtgaagtgaatagaaaaataactaagaaaacatgatgacattggcaggcactatcaagggcccatttgcagtttgtggtcacaaattcaatttgaggccagacmttatagatgtttgactgtgattgccacattccaccccttgaatgtaagcacatagcaggaggggaattggagttgaacaagttggttttttaccaggtgtattataccgagggggaaagaaaagaaagtagagattcatgcaagggaatgtaataataatggataaggagggaccacacaatctgagcatagttgggagaaatatgtggataaaaatgaagtgataagacactgcaaaggcagtagggccaatggattggaggttctggtttggtaaagaattaaggaaataagacaatgtgaaagggaattatagtagataacagtcagagagtataataatttaaac

SEQ ID NO: 923758 - DNA, 645 bp, Homo sapiens
accatagttaaacccccaagggcataaaagaatataaaagcaaaaaaccctggcaactcaaaattccagagtatctttttacctccaaacaactgccctagctccccagcaattatccttaaacaggctgaaatggccgaaatgacagacataggattcaggatccaaattgaataaagatcactgagattcaggagaaagtctaaacccaatccaaaagaatctaagaaatccaacaaaccaatacaggagcttgaagatgaaatagccattttaagaaagaacctaactgatctcatagagctgaaaaactgactacaagaacttcataatacaattgcaagtattaacagcagaataggccaaactgaggraaaaaatttcagagcttaaagaccagttcttcaaattaacacagtcacataaaaataaagagaacagaataaaaaagaaagagcaaaaccaccaagaaataagggattatctaaggagactaaagcttatgactcattggtggccctgaaagagagagaaagggtagagagcaacatggaaaacatttgaggatatcgtccatgaaaatgtccccaaccttgctagagaggttgacattcaaattcaggaaatgcaaagaacccctatgag

SEQ ID NO: 923759 - DNA, 645 bp, Homo sapiens
accatagttaaacccccaagggcataaaagaatataaaagcaaaaaaccctggcaactcaaaattccagagtatctttttacctccaaacaactgccctagctccccagcaattatccttaaacaggctgaaatggccgaaatgacagacataggattcaggatccaaattgaataaagatcactgagattcaggagaaagtctaaacccaatccaaaagaatctaagaaatccaacaaaccaatacaggagcttgaagatgaaatagccattttaagaaagaacctaactgatctcatagagctgaaaaactgactacaagaacttcataatacaattgcaagtattaacagcagaataggccaaactgaggaaaaaaatttcagagcttaaagaccagttcttcaaattaacacagtcacataaaaataaagasaacagaataaaaaagaaagagcaaaaccaccaagaaataagggattatctaaggagactaaagcttatgactcattggtggccctgaaagagagagaaagggtagagagcaacatggaaaacatttgaggatatcgtccatgaaaatgtccccaaccttgctagagaggttgacattcaaattcaggaaatgcaaagaacccctatgag

SEQ ID NO: 923760 - DNA, 591 bp, Homo sapiens
ataaagagaacagaataaaaaagaaagagcaaaaccaccaagaaataagggattatctaaggagactaaagcttatgactcattggtggccctgaaagagagagaaagggtagagagcaacatggaaaacatttgaggatatcgtccatgaaaatgtccccaaccttgctagagaggttgacattcaaattcaggaaatgcaaagaacccctatgagatactgcataagaagaccatcccyaagacacatagccatcagattttccaagttcactcagaaagaaaaaatattaaaagcagctagagagaatgggtgggtcacctacaaagggaaccccatcaggctaacagaagagctttcagcagaaaccctccaagccagaagagattacaggcctatattcagcattcttaaaaaaaaaaaaaaaaaaaaaaaattcaaacaaaaactttatatccagtcaaactaagctttaagcttcgtaagtaaaggagaaggaagatccttttctgacaagtaaatgctaagggaatttttaagcaccagacctgccttacaacagatccttaaaggagtgctaagcatagaaa

SEQ ID NO: 923761 - DNA, 605 bp, Homo sapiens
aagtggacttgatagatatctacaaaactcttcacctaaaaacaacagaatgtacatcttatgaccacacaacacttactctaaagttgatcacataatcggaagtaaaacacccctcagcaaattcaaaagaactaaagtcataaaaaacagtctctccaaccacagcacaatcaaattagaatttgggattaagaaatttactcaaaaccacacaaaactacatggatattgtacaacctgctcctgaatgactcttggataagtaatgaaattaggctggacatggtgactcacacctgtaatcctagcaatttgggaggtcaaggcaggcagatgacctgaagttaggagttcgagacgagcctggccaacatgatgaaactccatttctactaaaaacacaaaaattagccaggtgtggtggmacatgcctataatcccagctactagggaggctgaagcaggagaattgctggaatccaggaggcagaggttgcagtgagtcgagatcacgccactgcactccggcctgggtgacagagcgaaactccatctcaaataataataataataataataataatgaaattaaggcagaaatg

SEQ ID NO: 923762 - DNA, 576 bp, Homo sapiens
tgcacagctcccttctgtcctctcattgttcacaggacagccattcatgggatctatggcgcactctgtgctagggcagaatgccagggaagagctgcctgtcttcagcgcccttgctgggaaccacacgccagaacccgaccctgccatgctttgtgcttcaggcagcaggaccccacccctaacagagtctyaagtcagacactaagcgatgatcacgacttgggaactcagccaggaaagaaaagacatacagcttgaaaacaatgtgggaaatggctgagaaagagaggaagataagaaataaagagggctctctgaagagtgagctgaactttggttgtgacaggttctcaatagtaccaaaatccatgaactttttttttgaggattcaaaaaagtttataattaaagagaaatgcttctaattaaggagacagttttctgtcttttgggagatggggtttgtttgtttgtttttgatttctctgttatgcctttatataatgagcccttaacaaaggtaatgatcatgaagtagattactacatgtacagcacactatgtttctgggca

SEQ ID NO: 923763 - DNA, 580 bp, Homo sapiens
ttgggtctcaaaaggcagtgagttccctgggttttctctttgtctcatttagcctggacttgtagctgaagaaaccagcagcatggaaacatcaataatcaatagacacagccccccaaaaattaaaaaattctaaacaaaagccccattttctaaccaagatatsacaaaagggacagccagcctaccaagacagaatactttaagacaataactgttctactctagccaaacatcacagtaaaaacagagaccccaactccactcttgctaggaaagactgagtggggactctagatgtttaccaggaagtaacaagacacctcaacacccttgcagaagtgaagtcagagaagactgagtaggaagccagaactcctgccagtgacaccttccttcttccctgccatgatgtcaaagaaaaccttgtaatgaagcacctctactcctttccactagagtggtatcagagaaggcctaggggagaatcaggacattcaccatcactcagcagcaaagaggtcactctcccacaatgtcagtggagggcacatggggagcattagtgaagcactcctgt

SEQ ID NO: 923764 - DNA, 617 bp, Homo sapiens
attcacagtgttggggtgcaagcatcaccatcatccatctctagaactcttcatcttgcagaactgaaactctgttatcaattaaaccaggggtgtccaatcttttggcttccctgggccacattggaagaagtcttgggccacacataaaatayactaatgatagctgatgagctaaaaaaaaattgcaaaaaaaatcataatgttttaagaaagtttaccaatttgtgttgggccgtattcaaagccatcatgggccacatacagcccgtgggcaatgggctggataagcttgcattaaacaatagctccccattcctcccttcccccagcctctgacaaccaccattctactttccatctccatgaatttcactactctaggtataagtagaatcataaaatatttgtcctttttgtgactggcttatttcacttagtataatgtcttcaaggttcctccatgttgtagcgtatgttagaattccctccctttttaaggctaaataatattccattatctgaatagaacacattttgtttatccatgcatccgtcaatggacattggagttgcttccaccttttgaatattgtgaaaatgggtgtataaatatc

SEQ ID NO: 923765 - DNA, 723 bp, Homo sapiens
ttaatagagatggggttttgccatgttgcccaggctggtctctaactcctgagctcagacaatctgcccaccttggcctcccaaagtgctgggattacaggtgtgagccactgcacctggcccagacatgagttctaatctctctagttctgagaacccagcatgcttaatttctcagttccttgtggactcataagtaaaataaggctaataacaccaaactcatagagagacaatgtacatmaagtccctataaataatcaattgcagctattatagccatgactgttgaaggagtttagggcttttactatccccttatttttcttaactattggttatgatgatgatgatgatgattattattattattattattgagacagagtctcactctgtcacccaggctggagtgcactgatgtgatcatggctcactgcagccttgatctcctggtctcaagcaatcctcccacatcaacctcccgagtagctggtactacaggcatgtaccaccacacccaactaattttttaaattttttatagagatgggacctccctatgttgcccagattggttttgaattcctgcattcaagtgatcatcctgctacagcctcccaaagtgcttagattacatgcatgagccactgtacctggctggctcttggttctatatgaattaatctattttgcattttctaatctgaagtgcattttctt

SEQ ID NO: 923766 - DNA, 593 bp, Homo sapiens
cacgcaagccacatttgtagttttaaattttcctagtgagaacatttcaaggaagaaaacgaagaattgtaataaaataccgtatttaacttgctatatttaagatactataatttcaatatgtaaacacaatttaaaatttttaatgcaatattttacactcttttttccacactawgtatgtaaaattcattgtatattttgtttgttcttgtatttttaaaaatattttatttttaatttctgtgggtacatagtagttgtatatattgatggggtacatgtgctattttgatagaggcatgcaatgcataataatcacatcatgaaaaatgaagtaaccatcccttttcatgtttatcctcggtgttacaaaccacccaattatattcctttaggttattttaaaacatacaattaaattattcttagtatagtcactctatggtgctatcaaatactaggtattgttcattctttctaacaatattttgtactcattaaccatccccaccttccccccaccccatactaacctttctagcctctgggaaccatccttctattatctatcattgtgtattttatactta

SEQ ID NO: 923767 - DNA, 622 bp, Homo sapiens
gaggcagcagaatggcgtgaacccaagaggcggagcttacagtgagccgagatcgtgccactgcactccagcctgggcgacagagcgagactccatctcaaaaaaaaaaaaagaaacctccaagtatatctgtgcggttttgcttaaaaatttttgaaacaaacttgataaaatactaatgtaagagaaaccagagtaatagatacatgaatattcattatactattttctacattattctgcatgcttgaaatatttagaaaagtatatgacatatttcagacaaatttctatcaaatgcatttgaaactgcccctaacatagcaagctgggagtatttcmtctctctaatctcctatagtggtttgtttctctcacctatggctcaaatcctcttgtgacttgtgaatcaggcagacctgtgtttaaatcccaactccacagcttactggttgtataaccatagacaaattaatttatctctttgaacctcagtcacctaatctgtaagatgtagataatagtatgtatctcacctgcttattgtaaagattgactatattaaatataataataatgtacagagagcctggcacatagctgaatgcattatattatttct

SEQ ID NO: 923768 - DNA, 594 bp, Homo sapiens
attttcccattctcccccacatgtttgtttatttaatcacttatttatatccgtatggacttatggacacctattgtatgctttggtttacactccagtacttcgggggatgaattatttaataattgaactaattattttgtcaaatattttacttaactatttaattattaatcatttagctaattactttgttactcaacgtttccagctttggccaccgggagctcctttagttggcttccgtgtccctttgtcaacctcccatcgctgtggcttttggctttgtttggttttgggcggctcctttctccctggcaccacaggatgctccatgcttatttgcatattctcrtccttattgggatttcgtgtgctcactgactgaacccatagattcttctgtgaagtttctcttcaaaacttttatctttcttattgggataacttctctctctcttttttccattttgagacaaagttttgctcttgtcacccaggctggagtgcaatagcatgatctcggatcactgcaatggcgcagtctgggctcactgcaacctccgcctcctgggctcaaaggattctcccgcc

SEQ ID NO: 923769 - DNA, 594 bp, Homo sapiens
attttcccattctcccccacatgtttgtttatttaatcacttatttatatccgtatggacttatggacacctattgtatgctttggtttacactccagtacttcgggggatgaattatttaataattgaactaattattttgtcaaatattttacttaactatttaattattaatcatttagctaattactttgttactcaacgtttccagctttggccaccgggagctcctttagttggcttccgtgtccctttgtcaacctcccatcgctgtggcttttggctttgtttggttttgggcggctcctttctccctggcaccacaggatgctccatgcttatttgcatattctcgtccttattgggatttcgtgtgctcactgacygaacccatagattcttctgtgaagtttctcttcaaaacttttatctttcttattgggataacttctctctctcttttttccattttgagacaaagttttgctcttgtcacccaggctggagtgcaatagcatgatctcggatcactgcaatggcgcagtctgggctcactgcaacctccgcctcctgggctcaaaggattctcccgcc

SEQ ID NO: 923770 - DNA, 646 bp, Homo sapiens
cttagtcgtgggagtcaccccagccaagttgggacaggtgaagaggctgcagagagaaagccctacccggcctgggggggcaccttgggttctccccatccccgccccaaatgacaccaccaagatgactccatcatcattacagcctgcggaaactgtacctgtgggagatccaagaaaggggacaaagcggagaggaggtcagatgcagaatgcagagatatgccacacgacatccttcaaatccagagctgcaaacctcaaagctcctctccctgggaagagtgactgctttccctcccccaggaactgtccagccccacccgctgggctcccaccccagcctcaggactctcattctgtaaacttggttgctgaagaaaagttaacttggcactcrtcttaagtattgactatctgtcttgagggtgagggctgtaaattctctctcctaagatccaagtcgatttgttatcaaatcaggcattgagaagctgattcattgctattcagcgctatgctgatttatatgcagaatgtaaaacagatgccttatgtgatacatatttatggtgagtgctgttctaggaagatttattacggattcctttgtcggggtttgcatgagcagagccatgatgacttg

SEQ ID NO: 923771 - DNA, 587 bp, Homo sapiens
ttccccctttgctcagttctcattcttctctattctgccaccatgtgaaaaaggacatgtttgctcccactccgactgtaggtttcccaaggccatattaaactgtgagtcagttaaacctctttcctttataaattacccagtttttatgggtaatttagatggacagttcattatagcagcatgagaatggacaaatatagtaaactggtgctggtagagagaggtgctgctataaagatatccaaaaatgtggaagcaactttggaactgggtagcaggcagaggttgcaagagtttggagggctcagaagaatgtakgaagatgtgggaaagtttgtaacttcttagagacttgttgaatgatggccttgatcaaaaacaatgaagtctaggctgaggtggtctcagatgaagatgaggaatttgctgggaactggaataaaggtgactcttgctatattttagctaagagactggtggcatgttgcccctgctctagagatctgtagaactttgaatttgagagagattatttaggctataaggtggaagaaatttctaagtggcaaagtgttcaagaggtg

SEQ ID NO: 923772 - DNA, 632 bp, Homo sapiens
accaggagacacaacaatgatccatcaaactggaagttaagattgccacctggccactttgggcttctcttacttctaaatcaacaggctaagaaggaagttacagtgttgtctggggtgattgacccagaccatcaagatgaactcagtctaccactccacaattgaggtaaggaagggtatgtgtggaatacgggagatcccttagggcatctcttagtattaccataccctgtgattaaggtatacaggaaactacaacaacccaattcaagcaggactacaaattgcccagacctgcaggcwtgaagatttgcatcactccaccaggtaaaaatcaagatttgctgaggtgcttgctgaaggcaaagggaatacagaatgagtagcagaagaaggtagtcatcaatactagctaccaccatgtgatcagttgcagaaacagggactgtaattgttgtatttggatttcctccttattttcttaatatgtttgtgcaggtatacacttgtattaagaaatgatttccattttatttattttctttttcctttatcatgtgacataagatttgttgacttcacaacagcatttaagtgttgttaacttcatgtattagcatttatgttaa

SEQ ID NO: 923773 - DNA, 836 bp, Homo sapiens
gacagggcacagccaggacccttgacatcatgtttactgcccccagcttcttctacgggccttcacctcccaaaggaatctccaatgctggtgaggccttagcatcaccatagatatctccatcgtacctggtgtggaccttgaacttggctggcactcgctgagcaaaaaaaattaaaaagatgctctgccatcatttcaaaaatcaagccaatkcattttagtcttttatttttccagatttgggataaatttttctttcttggtaacaaagaatttttgaatgaaaatatcattttaaattaggagaaagccaagggagacgagtgtgttgaagcaagaactccagtcgtaagagttctgctttcttttgtggaactaagggaactttgtctgacagaagcagtattctcttccaaaaggaatttgtatttattaaaatgttttaccaaaagttaactgagagccatcaactgtgtcttgagcctgtacgtttcagtgatgctgaccagaatagacccaaaccaggccataatggctggggtgaaatgtgagaaacaagaagttggggaatgcaaatggggctgttgagaacattcaaagatgtggttggaaattatactggaaaggtatgttagggtgaaactatgaaaggttttgaatgtccaagaaaaaaaaaaaaagtctagaattaacaccctaaacaataaagggccattgaagtttttaagcagatcagtttctagagttcagagcctaggctgctccagctcccttctcacgctgctcagggccctggagctcacctgtaatgagagagagcaagccctgcgcct

SEQ ID NO: 923774 - DNA, 615 bp, Homo sapiens
gagacccacatgtgggggaactgaggcctcctgccaacagccatgtgagtgagcatcttggaagcagatcctgcagtcccagtcagatcttcagatgaccgttgccttggttgacatcttgactgcagcttcatgagagactcccagccagtagccactactacccacaaccatccagctaagctgttcctgaattgatgaccacagaaactgagataatacatgtatgttgttttagctgctaggttttagggtagtttgtaacacagcgatagatgactaaatatttcttccttcaaaattcagctcaggccttaccttctgaggaagccttctttgctctgtgctgggtttggtgcctccttgatacccccaagctccagttcttcccgtatagcagtctccatccctctgggtttgtactgcctgaccctccckaccctcatgctatgaacttccaagggcagggaccattctgattcactatgggatcccctgcaccttgcatggggattcggtaagaaggtagaaggaaggaggatcagtcaagtctgatgacttgaactgaataagggtcggactgggaggagcggggcagaccgtccctcagtagca

SEQ ID NO: 923775 - DNA, 696 bp, Homo sapiens
aatataaattgtgaaggtttcatggactttcatcagttcccaaaattaatacttttctaatttcttatgtctgtctttaccgcaatcgctgaacataaattgtgaagatttcatggacatttatcacttccctaataatactcttataatttcttatgtctgtctttactttaatctcataatcacgttatctttgtaagctgagaatgtacgtcatctcaggaccactattgtaaaaattgattgtaaaacatatatgtttgaacaatatgaaatcagtgcaccttgaaaagaacagcataacagggaagataaccataaggtctgactgactggggggttgggcagaatagagccatatttttcttcttgcagagagcctataaacagacgtgcaagtaggagagwtatcagtgaattcttttcccagcaaggaatattaataattaataccctggggaaggattgcattcctggggggaggtctataattggccactctgggagtgtctgtcttaagtggttgagataaggactgaaaaagccctggtctcctgtagcaccctcaggcttactaggattgggaattccagcctggtaaattctagtcagactggttctctgctcttgaactctgtttcttgttaagatgtttatcaagacaatgtgtgcacagcaggacatagaccctcatca

SEQ ID NO: 923776 - DNA, 617 bp, Homo sapiens
ccccagcaactgcttctgagaaaacagagggatggagaagaggacgccacccagatggtggaaacatctatcaaaagttaggatgtcctctagaaagcctctttgggtgtctgatttcatatctccttcctcatcagagaatggcgtcgcctcctatttgatgagaatttaaacacatctagaacatgtgcttaccttttcctatctcctgtctctgggatcacatcatactgcctccaagaatcctgtccttaacccccttccttagaatttacagcatagcctggaaacaaccaagcattcatctttattctaaagtacctagaacagagctggatctgtgacacatattcaawggctgtttaatcaaacaggaaaaactcatatttggagtagggagtagggggaggcaaaatggtactctcaatgaattataatattttaaaatttgtctaatagagagtataaaacaaaccagagaagcataaaggaaggtcatgctaattttcatgaggtattttctaactccaggaacaaaatggtgaaagggcattctaagtcaaaggaatttatcatgtaaagacgggagtaacacacacacacacacacacacacca

SEQ ID NO: 923777 - DNA, 544 bp, Homo sapiens
aggtagggattttaagcagagtggttagagtgaattgcattgggaagttaaactttcagcaaaggtttgaaggaagtgaaggagttgcccctgtggacgtcttggggaggagagcttcgggcagtctgtgcaaaggccctgaggtaggagtatgcctggtgtgctccaggaatagcaaggaggccaatgaatggggagacattgtaaggactttgacttttatgcattgacacatggggggcgactctgagcagaagggtgatatgatttgtattatagttttaaaatatcactctggtttgcaagtgagccasggtgcagtggggagatctgttataaggctattacagtggcccagtgagaggtgatggtggcgtggcccagcatggtaaagggcaactgcggagtggtggatgggtggtggatatattttgaaggtagagcccacaggattttctgactgctgagttgtgagatgtgggagaaagagaggagttaaggatgacttccaggttttttggcttgaacaagcagattaatgggg

SEQ ID NO: 923778 - DNA, 577 bp, Homo sapiens
ggccgcaacctagacctaactgaatcagacactctgttctcagagcccagcagtctgggttttaacaggccctctgggggaccctgaggcacactctgccccctcattactcaatgcgggactccgtccggtggcatcggcattgccagggagcttattagaaatgcagactctcaggctccaccccagacctcacgaactggaatttgcattctaccatctccaggtgatttgtatgcacattaaagtttaagaattaggccrggcacggtggctcacgcctgtaatcccagcactttgggaggccgaggtgggcagatcacaaggtcaggagtttgagaccagcctggccaacatagtgaaacctcatctctactaaaaatacaaaaaattagccgggtgtggtggcaggtgcctgtaatcccagctacttgggaggctgaggcaggagaatcacttgaacccagaaggtggaggttgcagtgagccaagattgcaccactgcactctagcccggatgacagtgtgagactctgtctcaaaaaaagaattaaaaagtactgctctgcactgtgag

SEQ ID NO: 923779 - DNA, 486 bp, Homo sapiens
caggcccagagaaatgtgggagagctcttccatgaaatgtttatatttcataaacaaaatgatgtgcttaacagagtgatgggagggttccggctaatgcattttccaatgtgtgaggcagattattaatgcgctccagtagctgttaatttcagtttgccggaatgatttatggggaggtaaaggagagagacataatctaattgagatcagaatcactgttctagcagcaaagcaccaacatggaccgtaggcacagcagaataattaatacctaataagcaaataatccattaaattattataaacmttacttttgacaactcttttgttggcagatggaagagggaaaaaaagaaaaaagaaacaaaagatataaaaatcactactttctctaataatatttattgtaaaggtagattttgtcagagcaagggtgatgaatatcatgatgggcttgagaattgtgacgaattctgagtatac

SEQ ID NO: 923780 - DNA, 634 bp, Homo sapiens
gttcctaacaggccatggggaggtactgagggttggagacccctgctttatcagatgtgttttttcaaatattttatacaatctgtggcttatcttctcacactcttggcattgtcttttgcagagcagaaattttaaattttaatgaaatccatttgatccgattttttctttcatgggtcatgcctttagtattgtaccttaaaatttatcacttgggcttaatacctggatgatggattgatctgggcagcaaaccgccatggcacacgtttacgtctgtaacaaacctgcacatccagcacatgtatcccggaacttaaaataagttgattaaagaagtaagawataagcattgaaaagttatcaccatacacaatgtcttctaggttttccttttatgtcatcttctaggagctttatagtttttcattttacatttaggtctataatccattttggattaattttatgaaaaatgtatggtaagttctatgtctagatcttttttttgttttgtttttgtttttgttttttgcatgtggatatccagttgctctagcaccacttattgaaaagacagtctttgctctgttgtatcgactctgttcctttgtcaaagatcagttggcta

SEQ ID NO: 923781 - DNA, 571 bp, Homo sapiens
tcttctaggttttccttttatgtcatcttctaggagctttatagtttttcattttacatttaggtctataatccattttggattaattttatgaaaaatgtatggtaagttctatgtctagatcttttttttgttttgtttttgtttttgttttttgcatgtggatatccagttgctctagcaccacttattgaaaagacartctttgctctgttgtatcgactctgttcctttgtcaaagatcagttggctatatttatatgggtccaaatctggcactgtattcagttccattatttatttctctattcttttgcctgtaccacactgtcttgattactgtagctttatagtattgtaaagcccctctccttgtcagagaggaaattccttcccaaggagaatacatccttccctaatagatgtatctttattaatttatttatttttgagacagattctcattctgtcacccaggctggagtgcagtggctcactgcaacctctgcctcctggcttcaagcgattttcctgcctcagcctcccaagtagctgggattacaagtgtgca

SEQ ID NO: 923782 - DNA, 537 bp, Homo sapiens
actgtttgctgttcctcctatctacctttcactgtctgtctgcttgcctttgttcctgtggttctctcacttcaatctcttcggtctgatcaacttttaaagctcactttatccattccagcaggtatagcttaaaaacaaaaacaaacaaaaaccaaaaaacctctcattttaaaaaccaggrgatttcctgataccccagccgaaaataatttcttaaacctcagaattcccccaaacagtggcttttcattaaaaaccttacatcagagttattaagcagggtggttttggctcctctcctagactgtctgccatctgggggcaatggcagcttggaaaatttctttgcacagataactacactacgtaaaagtttgctgcctttgcaaactttgaaacgcctacaggaagaaatgggataaaaacgactttggccgggcgcggtggctcaagcctgtaatcccagcactttgggaggccgaggtgggcggatcacctgaggtcaggagttcgagaccagcctggccaacatgg

SEQ ID NO: 923783 - DNA, 714 bp, Homo sapiens
ctctgcactcctggggactcaggaagcccccctccccaggaaggcttgaaagtgcctgctcctgctacctgtcttctccccactcccagtgcccactccgattttgaagcaaagttgtggctgagcccaggcactatcatgagtcggccgggtgtgtgtacactcaggacaaactgacatgtcaaccccctgccaccttggcccactccggactttgggtgccaacaagcacaagagggaggccaagggggtgctaagggtgacttaacrtgggccttaaggcaccccttggcatgaacagcctgggtgccatgggcatcatggatggcaggtaaatggcagcaggaggcagacaggttcctgggcagaaagagtcaggtcctcagtaaaaccccacttttaggccagggatggcctgaggcctgggggctggtttgccagctccacagacccgagtgagaacttaagagtgctttttcggagcctgcccatggccacccatggaccaatcagcacgcatttcctaccttctgaagccaataaaaacaccagattcaggcagacttgggcagatgacaggacaacctgcctgtggagaggagctactgactgtgggtctcctctctgctgagaggtggacactcgtcaagatgatctgcctgcggacaggagctacctactgcaggtctcctctgagctgttctgtcactcaat

SEQ ID NO: 923784 - DNA, 679 bp, Homo sapiens
tggtttgccagctccacagacccgagtgagaacttaagagtgctttttcggagcctgcccatggccacccatggaccaatcagcacgcatttcctaccttctgaagccaataaaaacaccagattcaggcagacttgggcagatgacaggacaacctgcctgtggagaggagctactgactgtgggtctcctctctgctgagaggtggacactcgtcaagatgatctgcctgcggacaggagctacctactgcaggtctcctctgagctgttctgtcactcaataaagcaccttttcaccttgctmaccctccacttgtccatatgcttcattcttcctggacacaatacaagaactcaggacccaccaaatggtagggctaaaagagctgtaacacaaacggctgaaacacgtcccttacttgccatgttgggggtgacaagaaggaaaggagggagaaggagagaagacttatggcccttcagagagcccagaccaatgggctccctgaaggctgtgacaccctcttcgggatctgtggttcctggcatctccaagcttagggacaacactgcattccccggtgccagccatggaagctgcttgcagtacgcttggtcaagccaaagcctctcagggagttggcacccatgccagtgcctggagctgcccaccccac

SEQ ID NO: 923785 - DNA, 577 bp, Homo sapiens
aagactgacaaaccgaatccagcaacacatgaaaaagcttatccaccatgatcaacttggcttcatccctgggatgcaaagctggttcaacataagcaaatcaataaatgtaatccatcatataaacagaatcaatgacaaaaaccacatgattatctcaatagatgcagaaaaggccttcaacaaaattcaacagccctttatgctaaaatatctcaataaactaggtattgatggaacgtatctcaaaataatgagagctatttatgacaaacccacagccratatcataatgaatgggcaaaaactggaagcatttcctttgaaaactgccacaagacagggatgtcttctctcaccactcctattcaacatagtgttggaagttctggctggggcaatcaggcaggagaaagaaataaagagtattcaattaggaaaagaggaagtcaaattgtccttgtttgcagatgacataattgtatatttagaaaatcccatcatctcagcccaaaatctccttaagcttataagcaacttcagcaaagtctcaggatacaaaatcatgtccaaaaaa

SEQ ID NO: 923786 - DNA, 779 bp, Homo sapiens
cagcctagaggcaggcattcttacttccatttcacagatgagaaagaggaggtagagggtgggctcatctcagatctcactgctggcaagtagtagagcaagagttggccaaggcaagctggctccacaacccatgtccttgatccccagagggaggaaaatccaggtcgagagctctcttcgaggaaggctgcatccagaggctcaaaaaatacccccagtgtccacttcyctcgccacccctcaccagccctcggcgtggcttcagtctctgccaggcctctccatgtggtggccaccagccgctcaaggcctacagtaccccactgtgtaaaggaaggtcccagaagtcagtctcgctgggctcctggggtcacatgctcacctaccagccacctctacagcccatggcccctgatgctttaaagggccaggattgggtcacaggcttcacctgggagccaggtctggcatcagaacctgagaatcttgtaacctgggtgaacgggtgccacacaggcaaacagaacacgtgtgcctgaaacaatgtcacttactcccagtgttttttaaaggcagggggtgggtgaggggatctaacaccaccattaaataatgttctagaagcacacacaccccattgtgcctccagcctaacatggtagctctttttactcttggtctttcctctgggccttgtctgcccgcacacatcttttgaggtagttagaaatgacagtacaattcaccggcctcaggagagagcttgagaagtgata

SEQ ID NO: 923787 - DNA, 734 bp, Homo sapiens
ccggccagcagcggcgggacacagtcgcgcagcgcaggacccccgaaacgttacctgacacccggggtagggacccggcattgcctcccaacccgcgctcggaattatgcaattattcaataatctggggaaagccgccgtcgcctagacgcgcgccgccgcctaatgcactccaggtgtcggggcgcggcaggaacctccggcccgaggggcgcgcggctgggagcgggaagccagccctgagctctccgccctagggtaccctggccccggccgtcccacaccgggctccccggctccaccctccacgcggggcggctgccagtgatgctgttctgcggaagacggccaagtgctccggcaagggccagcgcctcggttactggccgggtgtgggcgctcaaccttgcctccccttytgcgtgggctccaggcccgagctggggccagtagtgggggtcagatgcggtggtagtgggagaggtgccctcagggagctcaggtggagacccctatcccgcagccgcttgccccagtccccgggtaccacgcgaagcaagtccaccctcctgtcggcctacagaggagcttctcagagggcccatggttgaaagggcctctggctagtggaatcctagagtcacagtttaaaacaatcattgatacattgagttgtgggggcttggaagggagagcaggggaagaactgccaccaggccaatatgcaactagaa

SEQ ID NO: 923788 - DNA, 604 bp, Homo sapiens
gtaaaattaatgaaagcccaccatagtaggagtttcagaggcatctgaattcataaacaattaccaactattattccagagatcacgagatttgccacttccccaaatactcctccaaacaacattgctgttgtagaacctatttttggccttttgagatgtcttttcagacttttgcatttctgatgaccagatagccccactcagattagtgactcttgtggtccccacccagattcagactcagctcaagagggctgtttcacacrcccctattattgcatccccaaccaactcattccctagcccactgccagccaaactatccttgaagaaccctggcttccgaattttaggggaggttgatttgagtaataattgaactctggtctcctgtttagtgagtaccacatcttgatacatgtatcaagataacttctagggagttaagcaagatggccaaataggaacagctctcatctcattgggactggttaggcagtgggtgcagcccacagagggtgagcagaagcagggtggggcattgcctcacccaggaagtgcaaggggccagggacctccctcccctagccaagggaagttg

SEQ ID NO: 923789 - DNA, 678 bp, Homo sapiens
tgggatcttgcaaaattgagaggtttttgctgatggttccataaaatgggaaaataagatttcttttgtaatgtggcttgtccctcacatctatggtgctgcaagcaggggcatcaaaagctgctctgctatttcggaagctacagagaaagcaaacccagaaacttgtcaagccagaaaaggggtaagaatttcttaccagccagggcttctggcytctctgtatgcaaactgcttgaatgaatggtaaaattaaccattcgtctcctctgcaatgttttaattaataaggaaaatgatttgtgagactagtcttaggctgtagaaaatctggtatattttgtgctataaatttgtctctgttattctgttatagagaggggtaccacaggatacaacacattctgtgaacccctataagcctactgttcatgctggcttacagactggtgagacacaaactttgctgtaggtccctgaaaaagaaaaatttaacaaagttacctctcatcttgttttatgtctttgaaaacttgaccatatggaagtacacgctcttggtctctactatctggaggttgggaagtttcaagttcatatcatggctagctttaagaattctcttaagcagtgaaaatcctttgcaagctcaaaaacgactgccttagattccttctg

SEQ ID NO: 923790 - DNA, 655 bp, Homo sapiens
tccagctggaatgagaaatgttagtttagctcccctatgcagctgtttgggtgggatcttgcaaaattgagaggtttttgctgatggttccataaaatgggaaaataagatttcttttgtaatgtggcttgtccctcacatctatggtgctgcaagcaggggcatcaaaagctgctctgctatttcggaagctacagagaaagcaaacccagaaacttgtcaagccagaaaaggggtaagaatttcttaccagccagggcttctggcctctctgtatgcaaactgcttgaatgaatggtaaaattaaccattygtctcctctgcaatgttttaattaataaggaaaatgatttgtgagactagtcttaggctgtagaaaatctggtatattttgtgctataaatttgtctctgttattctgttatagagaggggtaccacaggatacaacacattctgtgaacccctataagcctactgttcatgctggcttacagactggtgagacacaaactttgctgtaggtccctgaaaaagaaaaatttaacaaagttacctctcatcttgttttatgtctttgaaaacttgaccatatggaagtacacgctcttggtctctactatctggaggttgggaagtttcaagttcatatcatg

SEQ ID NO: 923791 - DNA, 618 bp, Homo sapiens
tgggatcttgcaaaattgagaggtttttgctgatggttccataaaatgggaaaataagatttcttttgtaatgtggcttgtccctcacatctatggtgctgcaagcaggggcatcaaaagctgctctgctatttcggaagctacagagaaagcaaacccagaaacttgtcaagccagaaaaggggtaagaatttcttaccagccagggcttctggcctctctgtatgcaaactgcttgaatgaatggtaaaattaaccattcgtctcctctgcaatgttttaattaataaggaaaatgatttgtgagactagtcttaggctgtagaaaatcyggtatattttgtgctataaatttgtctctgttattctgttatagagaggggtaccacaggatacaacacattctgtgaacccctataagcctactgttcatgctggcttacagactggtgagacacaaactttgctgtaggtccctgaaaaagaaaaatttaacaaagttacctctcatcttgttttatgtctttgaaaacttgaccatatggaagtacacgctcttggtctctactatctggaggttgggaagtttcaagttcatatcatggctagctttaagaa

SEQ ID NO: 923792 - DNA, 526 bp, Homo sapiens
tccagaaaaaaagctgaggcatatttatagaaatacaaaaatatctgtaatcccagcactttgggaggcccaggagggcggatcacgaggtcaggagatcgagaccatgctggctaacacggtgaaaccccgtctctactaaaaacacaaaaaattagccgggcgtggtggcaggcacctgtagtcccagctcctcgggaggctgaggcaggagaatggcgtgaacccrggaggcggagcttgcagtgagccgagatgacgctactgcattccagcctgggcgacagagcgagaaaagaaagaaaaaagaaatacaagaatatctagcacccaagaaggcaaaattcataataattggcatccagttaaaaattgtcacacatgcaaaaagcagaaaaatgtgacccagaatatggaaaaaacaccagaatttaaaataacccaagtttaaaataacccagaattgatagaaatagtagaactgaattaaagacaaaaatattgagagaagtattcattctatatt

SEQ ID NO: 923793 - DNA, 526 bp, Homo sapiens
tccagaaaaaaagctgaggcatatttatagaaatacaaaaatatctgtaatcccagcactttgggaggcccaggagggcggatcacgaggtcaggagatcgagaccatgctggctaacacggtgaaaccccgtctctactaaaaacacaaaaaattagccgggcgtggtggcaggcacctgtagtcccagctcctcgggaggctgaggcaggagaatggcgtgaacccgggaggcggagcttgcagtgagccgagatgacgctactgcaytccagcctgggcgacagagcgagaaaagaaagaaaaaagaaatacaagaatatctagcacccaagaaggcaaaattcataataattggcatccagttaaaaattgtcacacatgcaaaaagcagaaaaatgtgacccagaatatggaaaaaacaccagaatttaaaataacccaagtttaaaataacccagaattgatagaaatagtagaactgaattaaagacaaaaatattgagagaagtattcattctatatt

SEQ ID NO: 923794 - DNA, 583 bp, Homo sapiens
caaaggggctggatacgatggctcacgcctgtaatcccagcactttgggaggccgaggtgggcagatcacctgagtctaggagtttgaggccagcctagacaacatggtgaaacccagtctttacaaaaatacaaaaaaaattagctgggtgagtggcacacacctgcagtyccagctactcagaaggctgaggtgggaggaccacttgagcccaggaggtggaggttaacagccagccgagattaggccactgcagtccagcctgggcaacagagtaagaccccatctaaaaataaaataaaataaaataaaggttttaaaaagactgagcaaaggcttaacaaacactttaaaaaaaggatatacaagatatacaggcagccaaaaactgttcaacatcattaaccattagagaaatgcaaattaaccatagttaatgccactacatacttgtgagaagaccacgcacacacagaacaattgctggcaaagtcaaatactggaggggatgtggagccactggggctcccattggttgctggtggaaggcagcatggtgcagccatcctggaagatggtttg

SEQ ID NO: 923795 - DNA, 656 bp, Homo sapiens
tgctcagtcattggcttttccaaacatgagctgggctctgaaaagttctgacagccagagttcatcagttaaggacatgccttagagcttaactgatggactctagcagtcagcttttctgtgggagaatgaggaactctagctgtcaacttttctataggaaaccagatcagttttcccatagaactgatgtttatggtttttcaataaatgttgaaatcaaccatcccagtcttagagcttgagaaacttacatttgtcttatctgagttcctttctcaggaaaccgaccatcaggcctcccagatagtatcaaagaactgaaaattaccagatcattgcatccaaaaaaagagacaccagacgcctaacctatcatgattgcctaaccaactacctgcttcctgttgamcaactcttctttcttacctttcctaatccctgttttcctgcacatagtttccttccttccctactatataaatacttaattttagtcagttgggagatggatttgagacttatctctccgtctccctgctgatgtcacttgcattaaagcctttcttagctggtagtacttgtctcagtgattggctttctgtgcagcaagcaggtggactttggcagaactcctggcatttagcaacaagggg

SEQ ID NO: 923796 - DNA, 656 bp, Homo sapiens
cctgagataaggaaaccagaatcttttataatgggctgcaagcaaacctgctcttgtccaagagggagacattatctttactacgttggatagtgaggaaatctgccctctgctccagagggaggcactatctttatcttccaaggcagtctgctgtaccaacaatcttttttttttttttttcttttttagacagagtctcgctctgtcgccaggctggggtgcagtggcacgatctcggctcactgcaagctccacctcccgggttcacgccattctcctgcctcagcctcccaagtagctgggactacaggcgcccrccaccacatctggctaattttttgtatttttagtagagatggggtttcaccatgttacccaggatgaactcgatctcctgacctcgtgatccgcccgcctcggcctcccaaagtgctgggattacaggcgtgagccactgcacctggcctataccaacattcttgaaaagagcctggaacaaaaggtcagttggtccctctgctcacagcatgatcctgcccatgcaccctcaccttattgctccagactctcctccttccagggagagccagcctcttcactgtgacctcccattcttcagctcttgcttcagcagccctccctgccccctctgc

SEQ ID NO: 923797 - DNA, 636 bp, Homo sapiens
caacgtttgtatagtgcttcctgtttccagaactgttgcaagcacatttaatgagcacagcaatcctcatgaagttggtactatcatcatttctgtgctatagatgaggaaactgacgcatagagagtctaagtaatttcccctgggttcacacggttaacaaatagagctgagattgttgggctttggagtcccctctcctaagtgctctactgccgtttggagtgtgtgaagctcagagatgttcgaagtgtcctcttccttggcattcctccccacttccttttttyattccaagggaacccagctacgggattctcggggaacagtggctggagcagatgtccctgactctgtctgtccccacaactgcctctctgaagtaagacagcagccagggaggcaatcacacaggacttggcaagtacatctgagatccagggctccctggggaaaggagcaggtgaggacttgctttgttttggtgctgaggtgagagattgtcactagggaccagcagcaaaaaggagagcttgcctggtcttgcattctgggggaaagtgcagcctctgggagtttcccaagaggactcagccagagtagattggaggctggggaggcatgcacagtttcaga

SEQ ID NO: 923798 - DNA, 588 bp, Homo sapiens
agtatggtcattttcttaatattgattcttcctatccatgagcatgggatatgttcccatttgtgcatgtcatctctgatttctttcagcagtgtttggtagttttccttgcagagatcattcacttccttggttaagtatattcctaagtattttatttgttttgcagtctttgtaaaaagagttgcattcttgatttgattctcagcttggtcattcttggtgtgtagcagtgctactggtttgtgtacattgattatgtattctgagactttattgaatccatttattggatctagragctttttggatgagtttttaggttttctgcgtatatgatcatatcacgatgtgttatctttttgatatgctgttggatttggttagctagtattttattgagaagttttccatctatattcatcagggttattaatctgtagttttctttttttgttatgtcctttcctggtttttgtattagggtgacagtggtttcctagaatgaattagggatgattccctctctctctatctttgggatagtttcagtagaatcaacaccaattcttcttagaatgcctagta

SEQ ID NO: 923799 - DNA, 612 bp, Homo sapiens
ccaatgtctgtaccccattgtatctaggaagtaactgacttgcttttgattttacaggctcacaggcaaaagggacttgccttgtctcagatgagatgttggactgtggacttctgagttaatgctgaaatgagttaagactttgggggactgttgggaaggcatgactggttttgaaatgtgaggacatacgatttgggaggggccgggagcaaaatgatatggtttgactgtgtccccacccaaatctcaatcttgaattgtaactcccacaattttcatgtgtcatgggaggaacccagtgagaggtgattgaattatgggggtgggtctttcctgtgctgttctcatgatagtgaatgagtctcacttgagatctgattgtttttaaaatgttttttttgtaaaaccattgaaagtgcrtggagtttccctgcacaagccctctcttgcctgccatcatccacgtaagatgtgacttgcttctccttgccttccaccatgattgtgaggcttccccaaccatgtggaactgtaagtccattaaacctctttcttttgtaaattgccctgtcttgggtatgtctttagcagcagcgtgaaaatggacta

SEQ ID NO: 923800 - DNA, 612 bp, Homo sapiens
ccaatgtctgtaccccattgtatctaggaagtaactgacttgcttttgattttacaggctcacaggcaaaagggacttgccttgtctcagatgagatgttggactgtggacttctgagttaatgctgaaatgagttaagactttgggggactgttgggaaggcatgactggttttgaaatgtgaggacatacgatttgggaggggccgggagcaaaatgatatggtttgactgtgtccccacccaaatctcaatcttgaattgtaactcccacaattttcatgtgtcatgggaggaacccagtgagaggtgattgaattatgggggtgggtctttcctgtgctgttctcatgatagtgaatgagtctcacttgagatctgattgtttttaaaatgttttttttgtaaaaccattgaaagtgcatggagtttccctgcacaagccctctcttgcctgccatcatccaygtaagatgtgacttgcttctccttgccttccaccatgattgtgaggcttccccaaccatgtggaactgtaagtccattaaacctctttcttttgtaaattgccctgtcttgggtatgtctttagcagcagcgtgaaaatggacta

SEQ ID NO: 923801 - DNA, 623 bp, Homo sapiens
gcagactctgcatgaaaaagagaaaagatcatggactttggacccagattgtcctcttgcagccctcggtccatctctcataaattgtgtgctcctggacaatgttacttaatgctcttgaactcaatttctctattgtataaaataggagtaataatgcttatgttgacagtttttttttgtgaggcctaaattttgtagcgtaggcacccagaaggatgtctgataccactaggcatttgatattttaagtcctctctcttaatctttttttttttttttaatttttttttgagatggartttcgctcttgttgcccaggctggagtgcagtggtgcaatcttgactcaccacaacctctgcctcctggttcaagcgattctcctgcctcagcctcccaagtagctgggattacaggcatgcaccaccacacccagctaattttgtatttttagtagagatgggggtttctccatgtttatcaggctggtctcaaactcctgacctcaggtgatctgcttgcctcggcctcccaaagtgctgagattacaggcatgagccaccatgcccggccaagtcctatctttctcaaaagaatcttcctctagtaaattaatttctg

SEQ ID NO: 923802 - DNA, 751 bp, Homo sapiens
atattagaatgctgttttcccacaggtacctgaggctctgttcatttttttcagtctattttctctctgtttttcagattgggtaatttccattgttctattatctagttcactggttcttccctctgtcccctccattctgttgttgagcctatccactgggatttttagaaaattttaattattgaattttttaaattctaaatttccatgtggttcttcttgatatattctatttccgtattgagacttcatatttttaatttgtttctagtgtttgtaattgctaattggagcatttttatgttggctgctttaaaatttgtgtcaataattccagcatctgtgtcatcttgatgttggtgtctgttgattatcttttctctttaaagttaagattttcctggttcttggtgtgacctgattttccatcattttcttggaattttgggtactatgttatgagattgggttttgcttaaatctttcttagcaggcctcctctgatgctgctcatttkggaagaaggacgtactgctttgctacgtgacagggtgaaggtctaggctcccctccaggcctttggggacacctcccatgctcagaggggtagaggtgcttttttactgatcctcatgtggcttctactaggaggtaggtgaaaggccttgttatctctgggtgatggtgaaagtttgactgttcactcagtcttctcaggcatcacttgggtgggacagggaggggtgcc

SEQ ID NO: 923803 - DNA, 648 bp, Homo sapiens
ctcaaagtgtattccccagggctctcagcatcagaaaaatggttagaaatgcaaatggtcctactttccccagacctatagggttagaaactcaagggtggggtccagcactattctgattgaacacttacattattagaaattgaatcaggctgggtggtgtgactcacacctgtaaccccaacactttgggaggccgaggcaagaagattgcttgagcccaggaaatcgagaccagcatggggaagatagggaaaccccgtttctactgaaaattaaaaaatagcaaaaattagctaggcatggtggcatacacctatggtcccaaatagaggtcgaggtgggaggctcactggagcccggtaggtagaggctgcagtaagccrtgatcgcaacactgctctccagcctgggccacagagcaagacccaaaaaagcaaaacaaaacaaaacaaaacaaaaaaacaaaaaaaaaacattaaatcgcaaaaatctactgataaataagttatagtaaaaacaaaggttaaaaagtattcaaaatatatcatttcctaacttaatgtactatgacttcacgtactatgtcttaagctctggaggttactgacatccattgcatccatgtggtgcaaacactatggtgca

SEQ ID NO: 923804 - DNA, 585 bp, Homo sapiens
agcagctgccgccaatgctcagaggcaggcaggccgtctgagaactgtggcttcaagctgtttggagaggtaggcaacaacctggagggtgggtcccttagactgggttagaacaccagtacaactccacgccgttcgtcggtatagagggagaaagatttggtgaagtctgagagagtgagcacgggggctgaggtgagagccttctggagcagacagaaaggttggggaataggctgtgcagggtttgaagtcttatggagagggcctttagcagcttagtataacggtttggcaagtagagcgaaggagggaacccagagcctaaaatatcctgctagtcctagaaaasagagaatttcttgcttagtttgcggaggcgggagggactggaggagggatatgcggtcggttgtgagccctcgggtttgcagggtaagagctaggcctagataggtgaccgaggaggtgcatatttgtgctttcttaggggagacctaatactcccgttctgccaagaagtttaaaagagatagtatgggcgttgcagtccctttgagaggggctacacaggagcagatcatt

SEQ ID NO: 923805 - DNA, 698 bp, Homo sapiens
cattgtttcatccattccgagcactgtaagaacagaggcacagcctgtggtgaggcactaggtttctgagcttgactgtcttggtttaaagtctggatttgccatttactgaactcttacaagttatgaagactttctgtgcctcagtttcctcatctgtaaaattaagataatagtatcattgccctcatagagttgtatggatcaaatgagttaaaacatgcagaacccttagagaagtacccagaaaatggtcagtatttattggctaccatttagacttataaatatgyattattttctatcactaccataagcagtttccacaagcttaatggtaacacagatttaatatattatagttccgtagaagcctgatatggtcttgctgggataaaatcgaggtgttgacagggcctcctttgtggaggctctggggagaatcttctgttgctgttgtcatgccttttctagcttccagaggctgcctacattctttggctcagtggcattcctccatcttcagagccagccacattgcttttcattgtccattcttccatagtcacagttcctctgatcacagctcagaaagggttctctagcttttaagaatttatataatttcactgggctcacccaaaaaattcaggataatgtctccatctcaatgtccttaacttaatccaatctacaaa

SEQ ID NO: 923806 - DNA, 568 bp, Homo sapiens
acccctgcttcccgggttcaagtgattctcctgcctcagcctccctaatagctgggattacaggtgcatgccaccacgcccagctaatttttgtattttagtagaaatggagtttcaccatgttggccaggctggtttcaaattcttgacctcaagcgatccactggcctcagcctcccaaagtgctgagaytacaggtgtgagccaccactcctggcccataccttttattaagataataaaaacttctacacttgttaataaatagccaccaccctgagccctttgagtctactctttcaagttcccccaccacccacccaacaccaatgcctgtgctgatctactccttggcttagcagctcctgaacctcctacatttagcatataaagaatgaatgtctactatagtggcctaaggttgctgtttgctgccttcctcttctgattatttgacgcaagtacagctcctgtttttaatactgttaaaatttcctctggatggtaaagacttcacagaactatgatgaggatcaaagaaagttgtgtttatgatagtgacattaag

SEQ ID NO: 923807 - DNA, 588 bp, Homo sapiens
cataaagattctccacatccccaccagacgcaggaggccagctggcttcaccctgtggatcccgaagcagggatggggtggagctgcctgccagtcccgcgctgtgcgcccgcactcctcagcccttgggtggtccatgggactgggcgccctggagcagggggcggtgctcatcggagaggctcgggccgcacaggagcccacggaggggctgggaggctcaggagtggcrggctgcaggtcccgagccctgccccgcgggaaggcagctaaggcccggctagaaattgagtgcagcgcgggtgggctggcactgctgggggacccagtacaccctccgcagctgctggcccgggtgctaagcccctcattgcctggggccggcagggccgccggctactcgcagtgcggggcccgccaagccgacgcccacccggaactccagctggcccgcaagcgccgcgcgcacccgtggttcccgctggcgcctctcgctccacacctccctgcaagctgagggagctggctcctgccttggccagcccagaaaggggctcccccagtgcagtggtgggctgaaggactcct

SEQ ID NO: 923808 - DNA, 571 bp, Homo sapiens
cctttccattatcttgaatttaaggtatattaatatgtaatacaaggatttagtcagcttgccttttttcccaaactttatttcggtgatgttagtgcagagatatcagccagagacctctactgaaatattctgtctttctttggccacttccatgakgttttggaagctttatttttctgcggtagacaatgactttcattattttgttgtcgctactttaaaaaaatggcggggaagggaagatgtgggagtgtcttctttgataggaaatgtggagattatctgaaattaaatacatcttgcttcttgacacagatcctaatttattacatgtagagtattgaaggtttaacgttgtttaacgagatggagttttatttctgttacaagactgttggtatgttttacatatatgaatgcatcttttatattatattcttcctcttctaaattctaattaaagtatatagaattttaaatccaataaataaaaaatataaatacaattagtttctcaacactaattatattagtagctttgtaataaatacagctctcttactatttc

SEQ ID NO: 923809 - DNA, 649 bp, Homo sapiens
aggcaaaaactatcagcaatatggttgcaacagaggacccagtcgatcctgcagtgagctctggagctgggatggcccttcagaattgtgccaaaatattggggcagtgggatgggactttatttatttgtaattgaaaaataataactgtacatatttataaagtacaatagtttcaatactcaatatatagtgatcagatcagggtaattagcatatttcaatactcataatgttgagtgatcagatcagggtaattagcatagccatgtttcaatactyatgatgtatagtgatcagatcagggtaatcagcatatccatcatctcaaatatttatcatttatttgtgttggtaatgttcagtattctccttctagttatttgaaactatatattactgttaactatggtcatcctacagtgccacagaacactataacttattcttgctatctagatgtaattttgtatcctttaacaaatctctccttattcctcctttcccccacccttcccagcctctaatatcctctgttctactgtttacttacattagatcaaattttttttagcttccacatatgggtgagagcacacagcatttaactttttgtttctggcttatttcacttaatatccttcagttc

SEQ ID NO: 923810 - DNA, 502 bp, Homo sapiens
ttatttatgatgtcaagccatacctactgtcttctaaaagggtctacggctggagaagagactgcctagtgtcaaccaaataagatgatcatggcaagagaaaacctcattagaactcagcaatgtgactttttaaagaatgktctaaattgcctataacagtataagggtttcaaagttctggggtgaaaacactgtctccagcatgagctctcttcaactacttgagaagaaatgcacctcaccttgagttgactcaagtacctacagccactggtaacacgttaaatgagcccttgccttgaagagagcaaaagcctagagatagttcactaccaataagctacagtaggtgagcatatgaggattacttatgcagggtgaatacactaaaattaaaattgttctaaatggagtctgacatacatatgcaaaatgaaaggggaaagggagagcagaatcattaacattactagtaacctgtaaaaaccaacagctaaat

SEQ ID NO: 923811 - DNA, 590 bp, Homo sapiens
catctacaatatggcaataatagtagtacttaatagaatggtgaaaatgaaatgagataagtagcatttaacagtgtgccaagtccacagtaaaactctcaataaaaattagcccctacctcatcaacatcatcatcatcatcatccttaggtgcaaagctaaaaggcatgagagaagtaacgaccccagcattccaagatcttagagcctgataggttgggataatgaaatatacaaatgattatattatatatatatatatatatatatatatatatakagagagagagagagagagagagagagtaaatgtcaaaaggtaatatcaacgggctgttaagaaggagcaataatgtttggcctaggggaaggaggaagggttgtcagaagagactttgtgaggtagatgacttttgagcctgaccttaaaatattggtatagttagaacatgcataccatagatagggaggacattaggccaaagtgttgctatatatacattttggcgtctgcctccattaggcagatatctaattattgaatattattaggacatccaaggtgaacagcagggagatgcaaaaacac

SEQ ID NO: 923812 - DNA, 753 bp, Homo sapiens
gcaaccccaacaatgtggacgggttaggtactgttggatggaaagtcactgtagcttgattaaccaagcacaaatcccgtaccggcctgtagtccttggtccctggcttgggaacaggcaggaggggagtgttccatggagactgacaaggaactataattccaaaagttcttaggtgtttgaggcgaacctggatacctttaagagcttctcyggggactggggactgtttttgcctaaccggctgggccccaggcttaacttccatattcaggggcttggttgactgccaatcctggagggttgtcttccgcccacactcttggccaccgcttagccaaagctggtcttatctcttggcccggctcagttaagaaaagtctctattcctcctctcaggggaccataagggtcataacgactcccgttccgggtaactttagcagcaaagagccatgctctgtaaaagagacagtggctctcagcttgctaagcaagtcccttcccaacaagggcaagggacagtcaggcatgtacagaaactgacgaatcactgtatgtcctcctacagcacaagtccgaggcaagcagaaagcttgctttgctgaaacccccatggctccgatgatgtcaatagtctttttggataagggggcaactggggcggttactaccgaatgttcagcaacggtatctacaagaatatcaatgtctttacccccgactgtcatgctgaccataggctctttcggg

SEQ ID NO: 923813 - DNA, 776 bp, Homo sapiens
tgatgctgctgtggggaggacacagggaggaggtggagctgggcctgggatggtgccacattccatggagacaccatgatggggccaggccaagccatctgccagtaggggagcagcatggtcaggcacagaggagtgggcaaagaggggccctgtgaggacctgaagtccccaaatcaggctgtgaggaggcacaactggtgctgcctgtatgctctaccaagtgcatatgcatgcgctccactgccttcccatgtgcaggtcccaggcatctctggattctgcaccctcaggggtctgggaaggccctcctgaccccacaggcttggtggtgacwgctctcacttcctggcctttccccattcccagtgcctgctccgatcttgtagtggggttggggccaagcatgggtgctatcacagcccagccaggtgtgtgcacgctccagcagtgctgacacatcatccccctgcaccctggcctgctccatactttgggcaccaaagagtgggtgggggaaacaagtaggggcttagggcagttcaacactgacctataggtgccccttggtgagagcagcctgggcccatggacggcagcaggaggcagacaggctcctggacaaaagggggcaggtccctggtgaggccctaccttcaggccaggctgccagtcccactcactgaagtgggaattgcagtgacttttctgggcccacccatggccacccatggaccaattggtgcacatttcctcccatgtgaggcccataaaag

SEQ ID NO: 923814 - DNA, 647 bp, Homo sapiens
ctccgtggcccacagcaggtaattgactcagttccttctgtgcgcgacacactgatcaggtcagcttgactgggttctgccaacatctaagatggcagagccccgccctcttgcatgatggccagtgtttctgctgcacacatatttcatcatttgagagcatcaaacgagtccgtggagctatattcatttttcacagtcatttttcttcacattagatcatttataggggatagtgtaagagctcacaccccctctcctttgaaatgtccgtgtagctgttaagtccgtcttttgagttttataatttcataaatcatgtgtgagagcttttstgtttatgtgtttatagtggcgccttttatttgccaagatctcatatcaccttgttgagatttttttgttcattaaaaactgagttttttgttgtgtttttacaacactgtaggttggtgtaactgccactttaaaatccttcacacttaccccatcaacttggctgtctctctgaggaatagtgatgagagccaccttccctcctccccactgaggccagccctgagatgtcgggtgacaaggatgttaaggccccccactgggggagcaagaggggccatctgtgcacggatcagggccgatgccggcct

SEQ ID NO: 923815 - DNA, 647 bp, Homo sapiens
ctccgtggcccacagcaggtaattgactcagttccttctgtgcgcgacacactgatcaggtcagcttgactgggttctgccaacatctaagatggcagagccccgccctcttgcatgatggccagtgtttctgctgcacacatatttcatcatttgagagcatcaaacgagtccgtggagctatattcatttttcacagtcatttttcttcacattagatcatttataggggatagtgtaagagctcacaccccctctcctttgaaatgtccgtgtagctgttaagtccgtcttttgagttttataatttcataaatcatgtgtgagagcttttgtgtttatstgtttatagtggcgccttttatttgccaagatctcatatcaccttgttgagatttttttgttcattaaaaactgagttttttgttgtgtttttacaacactgtaggttggtgtaactgccactttaaaatccttcacacttaccccatcaacttggctgtctctctgaggaatagtgatgagagccaccttccctcctccccactgaggccagccctgagatgtcgggtgacaaggatgttaaggccccccactgggggagcaagaggggccatctgtgcacggatcagggccgatgccggcct

SEQ ID NO: 923816 - DNA, 647 bp, Homo sapiens
ctccgtggcccacagcaggtaattgactcagttccttctgtgcgcgacacactgatcaggtcagcttgactgggttctgccaacatctaagatggcagagccccgccctcttgcatgatggccagtgtttctgctgcacacatatttcatcatttgagagcatcaaacgagtccgtggagctatattcatttttcacagtcatttttcttcacattagatcatttataggggatagtgtaagagctcacaccccctctcctttgaaatgtccgtgtagctgttaagtccgtcttttgagttttataatttcataaatcatgtgtgagagcttttgtgtttatgtgtttwtagtggcgccttttatttgccaagatctcatatcaccttgttgagatttttttgttcattaaaaactgagttttttgttgtgtttttacaacactgtaggttggtgtaactgccactttaaaatccttcacacttaccccatcaacttggctgtctctctgaggaatagtgatgagagccaccttccctcctccccactgaggccagccctgagatgtcgggtgacaaggatgttaaggccccccactgggggagcaagaggggccatctgtgcacggatcagggccgatgccggcct

SEQ ID NO: 923817 - DNA, 647 bp, Homo sapiens
ctccgtggcccacagcaggtaattgactcagttccttctgtgcgcgacacactgatcaggtcagcttgactgggttctgccaacatctaagatggcagagccccgccctcttgcatgatggccagtgtttctgctgcacacatatttcatcatttgagagcatcaaacgagtccgtggagctatattcatttttcacagtcatttttcttcacattagatcatttataggggatagtgtaagagctcacaccccctctcctttgaaatgtccgtgtagctgttaagtccgtcttttgagttttataatttcataaatcatgtgtgagagcttttgtgtttatgtgtttatagtggcgccttttatttgccaagatctcatatyaccttgttgagatttttttgttcattaaaaactgagttttttgttgtgtttttacaacactgtaggttggtgtaactgccactttaaaatccttcacacttaccccatcaacttggctgtctctctgaggaatagtgatgagagccaccttccctcctccccactgaggccagccctgagatgtcgggtgacaaggatgttaaggccccccactgggggagcaagaggggccatctgtgcacggatcagggccgatgccggcct

SEQ ID NO: 923818 - DNA, 625 bp, Homo sapiens
acactgtagtgcttttattcatttactcaaacttgttttgagcccctaatatgtgtcagccaccaaggattacattattagcaaaaactaaataaaaataaaaatagctgggcatggtggctcatgcctgtaatcttagcactatgggaggccaagacaggtggatcatttgatgaaacactgtctctacagaaaatacaaaaatcagccaggcatggtgaccctcacctgtagtcccagctcctcaggaggctgaggtggatggatcacctgaacccgggaggtggaggttgcagtgagccaagattgtgccactgcactgcagcctggctgatagagtgagactctgtctcaaaaaaaaaaaaaaaaggaaatgttgcatgtgttcacgaagctcacaatcaaatgggtgaggccaattgttagtcaaataatctcttaaagaaatctcaccttgtaactgtgaygagaacagagcagtggcccaggtcagtggtgacttatcacagtagaagtggtggccactcaaggaactgatgaaggaactgaaatctgatggatgagcatagctgagcctttgttttcccccaaagtctcagtataattttggaactcacatcaactt

SEQ ID NO: 923819 - DNA, 735 bp, Homo sapiens
gactgttttctttaagataaccattgtacttggatttgcagcagaagtgctttctgcattcttcctattttgtcacacagaatattagaaagatatgtactcaaagattaagatttaatgaaatcaatcatttttattgctcyatcaaaaactttttttttttttttttttaatttgagacagagcctcactcttgttgcccaggctggagtgcagtggcgcaatcttggctcactgccatctccccctcctgggttcaagcaattctagtgcctcagcctccatagtagctgggattacaggcatgcaccaccatgcccggctaatttttgtatttttattagagacgtgttttctccatgttgtccaggctggtctcgaactcctgacctcaggtgatctgcccacctcggcctcccaaagtgctgggattacagttgtgagccaccacccctggcctcatcaagaacattcttaagccaaattggtgtggttttgttttgttttgttttgttttaaaggggctgtaagtacacggtagtagagactatgattattcgtactgtttgaagccacagccttgattcttgctatagcccaccatttacatatcatttaatttattttgccattttatcaattttaccattttacccaccattgtttttaactgtgcaaatgttagcacagttaaaaagacaaagaatatcatggtatactatgaaaatagctttg

SEQ ID NO: 923820 - DNA, 780 bp, Homo sapiens
cccaggtgctaagcccctcactgccccgggcttgtgggccgtccggctgctccgagtgcggggccggccaagcccatgcccacccggaactcgcgctggcctgcaagtgctgcgcagccccagatcccacctgcgcctctgcctccacacctccctgcaagctgagggagctggctctggccttggccagcccagaaaagggttcccacaatgcagcagtgggctgaagggctcctcaagtgcggccagagtgggcaccaaggctgaggaggcgccragagtgagtgagggctgcaagggctgccagcactctgtcacctctcactggcaggaggccaacccgcacaaaaatagtgaattaaacgatcaaagccaagaacactcacagagtccatttcaccccctgccacttccaccatagcaggtgctagtatccaaggcttagagacccataaatggttcatatcacaggactctgtgtagacaacttccagtcccaccatggagcctagtagacttgctgggtggctagatccagaagagagacaacaagcaccacagctcagctcccaggaagccacatctctaggaaaagggggagagtatcacatcaagggaacaccccatgggacaaaggaaactgaacaacagccttcagccctagaccttccctctgacagaggctacccaaatgagaaggaaccagaaaaccaactctggtaatatgacaaacaaggttctttaacacccccaaaaaatcacactagctcaccagcaatg

SEQ ID NO: 923821 - DNA, 608 bp, Homo sapiens
tccatgatgcccacctgagctgcaaaacgagcaggtttttattaaggactttaaaggtggggggtgtacaaacagggagtaggtcacaaagatcacatgcttctgaggccaataaagatcacaaggcaaggggcaaagcaaagatcacaaggcaaagggcaaaattagaattactgatgagggtctatattcaactgtgcacgtattgtcttgataaacatcttaaacaacagaaaacagggttggagagcagagaactggtccaacctcaaattgaccagggcgggattttttccccaccctagtaagcctgagggtactgcaggagaccagggcatatttcagtccttatctcaaccacgtaagacagacactcccagagtggctgtttatagacctctccccaggaatgcaattcttttcccagagtattaattatcaayattccttgctaggaaaagaatttagcaatatctctcctatttgcacgtccatttataggctctctacaagaagaaaaatatggctctttttgcctgacccacaggcagtcagaccttatggttgtcttcccttgttccctaaaatcgctgttattctgttcattt

SEQ ID NO: 923822 - DNA, 808 bp, Homo sapiens
ggattctagataaagcacagcctattgacaagagtaaggctgtccctcggcagtgccacgggctagcgtccccacacacgtactttgagaagcatgtgtttctcactgggcgtcaaatacatcctgttctcgtagtaatccacacacagattcacaatatctgccaggagctcttcgtagccagaaatcacttcgagctgctgctgcagagactgaaacacagagcaagagactcatgcatgggcccggcgcccggccggctgcttggcccatcaacctgagtgtgcaaacaccagccttacctgtgtgatcttgttatgattggccaggaacatggacagattctgcgattcctggatggactgtggatctgccattttacgtaaaaactgagcggccctttgaaaacaaaaagaattcatcccaaaatgyaccaacgtgccacatttaaaaaaaaaaaaaaaaaaaaaaaagcctggttcgagtgggatccctttcccctacagtcatctgcagaaatgtgggtcaatctcagaagccacctatgatttcagccttttcaggcgtctctggccctgcactccaggtcagtcttctgccaacttagacgtgtcttgcacaggctgggacagctctccacccggctggtcacagctgacggctccctgcagggtccctgcacactggtctctgccctatactggtggacgcccacctcatctagggggcacagggctcctggaccccgagtctgagaagggccactgccatctccgtgactcccacaagccctgccatgaagccggcc

SEQ ID NO: 923823 - DNA, 658 bp, Homo sapiens
acttcataaccacacctggccagaggtgccggggggacatcataaccacacctggccagaggtgccggggggacaacataaccacacctggccagaggtgcccggaggacttcataaccacacctggccagaggtgccgggaggacttcataaccacacctggccagaggtgccgggcggacttcataaccacacctggccagaggtgctgggggacatcataaccccacctggccagaggtgccaggggggacatcataaccccacctggccagaggtgctgggggacatcataatcccacctggccagaggtgctgtggggccatcataaccccacttggccggaggtgctggggggcggggggaacttcataaccccacctggccagaggtgctgggggtgamttcattactgtcacctggccagaggtgctggggggatttcataaccccacctggctagaggtgctgcgggggacttcataaccacacctggccagaggtgccgggaggacttcataaccccacctggccagaggtgctggggggacatcataacttcacctggccagaggtgctggggggtatcataatcccacctggccagagatgctggggggacatcataaccccacctgccagaggtgctggggggcg

SEQ ID NO: 923824 - DNA, 812 bp, Homo sapiens
gggacagactaagctatggatattcagacacaggacataaaaatacccatgatgatagtacttcaaggcatcaagtgtttattttatatgcagttgttaaaattatagatttttgaatcagtcacttggatttgactaagtagtcttataaatcattagctgcatgacttggaactctgttcccttctctataacacagcaacactgaaaacatctgttacatatatttgctgtggagattaaaagaaataaggtactagcactgtgcctgacctattcagcaaatattagctattattattgatactatggatcttctatgtgccatgtactgtaccaaactcctttcataatattattacatggtcataaaagatctgcagagtaagcataactgtctctattttataaaagagtgagacacagagaagaagccaagaaatgatagcacctggtaagaggctggacaatgattcaaacccaagtctcttgcctccatgctcttttcttcatgcatgacstatctagtgcagtaccagtcacatacatatggctatttatttaaattaattaaaattaaataaacactttagtgcctctgtttcgccagccagatgtcaaatctcaataaccatgtgtttctagtagctatgatattggacagcacagatatggaatatttccattattgcagaaagccctattggacagtactatagtctgtaccactatcatctctctaggctgctttactctcaataggaaacaatacatttttcttaaaatcttaataaatgctcatatataaatta

SEQ ID NO: 923825 - DNA, 589 bp, Homo sapiens
cttaaggctccaaaattatctcctttgactccatgtcttgcctccaggacacaatggtacaagggatgggttcccaatgccttgggcagctctgcccctatggctttgcaaagttcggctccagaggctgctgtcacaggtcgttgagtgcctgtgrcttttccatgctgagtatgcatgctggcggtggatctaccattatggagtctgcaggacagtggctttcttcccacagctccattaggtagtgccccagtgaggactctaagtggggcctccaactcattttcctctgcatttccctagggttctttgtgagggctctgcccctgcagcaggcttctgcttgggcacccaggctttcttatatttactattacttttaatggcaaaaaccgcaattacttttgcaccaacataatacatcctctgaaatctagacagcgaacatcaagcctcattcattcttgcactgtgtgcggccacaggcttaaagccacatggaagccaccaagtcttacagtagcttatgccctctggaactatggcccaacctgtacctgggccccttggagccgaggctggagtg

SEQ ID NO: 923826 - DNA, 709 bp, Homo sapiens
cagccccactaggtggctagacccagaggagcagcagcattcacagtagtctggttctcagaaaatcctactcctaggcggagagtgaatgtaccacattaagagaacaccttgggagataaacaagtctggatggcaggccttgagtcccagaactttctgctggtgggaagtgtctttcagtagaggcacagatacagtgctgggctcagtggggaaagtctgcagctctgccccaactgtcaggcagcccttgtgctcacaaagggtcctggagaagaggaattcttttccctcctgccaatcactgcagacacagctagggcttctcccrtaggagttcagcatgagtgcacctataggcagcctttctggaacacttcagggtgactggatccccacaagaggagtgccctctgggttcaggcttgcctgaggggtagagtcacaattcgtctctacttggaatatcaaatattcaactctacttggaatttcattcctgcagatgaaaagagatgcctgtctgatttgaatagctgtagcactgggtcaggagtgtgactgggaggtggattgctttcctgctggcctggcaagggagaggccatccttccccctggtaagatctcagtgcatttcactgagagctcccccagccacctctgtcaagattgggacctctgccgatgattgggtgttgcattta

SEQ ID NO: 923827 - DNA, 549 bp, Homo sapiens
aatactcttggagctaatccagtgaaattgaagaggccttatttggtgagggagcatcaccttgaaacgcaaaccagacaagggcacaacaacaacaacaacaagaaaactacacgttaataatcctaatatacctagacacaaaaatcctcaacaaaatgccagcaaatcaaatccaayggcacatcagaatgataatacaaaatgataccgtgggatttataccagagatgcatcagcatatgcacatcaataaacatgatatatcacatgagcagaatgaagaacaaaaatcacatgattatctcaatagacacagaaaaagcattaataaaattcaacattcttgtatgataaaaactctcaaaaaactagggatagaaggaacaaatcccaaaacacaaagatcacattaataccacagataacattatgctgaatggagaaatgtttaaagccttcattctaagacctggtacaagtcaaggatgcccacttttccaactcttatttaacatagtactggaagtcccagccagagtgatcagg

SEQ ID NO: 923828 - DNA, 675 bp, Homo sapiens
aagagcaatactcttggagctaatccagtgaaattgaagaggccttatttggtgagggagcatcaccttgaaacgcaaaccagacaagggcacaacaacaacaacaacaagaaaactacacgttaataatcctaatatacctagacacaaaaatcctcaacaaaatgccagcaaatcaaatccaacggcacatcagaatgataatacaaaatgataccgtgggatttataccagagatgcatcagcatatgcacatcaataaacatgatatatcacatgagcagaatgaagaacaaaaakcacatgattatctcaatagacacagaaaaagcattaataaaattcaacattcttgtatgataaaaactctcaaaaaactagggatagaaggaacaaatcccaaaacacaaagatcacattaataccacagataacattatgctgaatggagaaatgtttaaagccttcattctaagacctggtacaagtcaaggatgcccacttttccaactcttatttaacatagtactggaagtcccagccagagtgatcaggctagataaagaaataaaagacattaaaattgaaaacagaaagtcaaatagtgcctcattgctgataagatcttttacataaaaatacctaaagactccaccaaaaaactcttagatttga

SEQ ID NO: 923829 - DNA, 675 bp, Homo sapiens
aagagcaatactcttggagctaatccagtgaaattgaagaggccttatttggtgagggagcatcaccttgaaacgcaaaccagacaagggcacaacaacaacaacaacaagaaaactacacgttaataatcctaatatacctagacacaaaaatcctcaacaaaatgccagcaaatcaaatccaacggcacatcagaatgataatacaaaatgataccgtgggatttataccagagatgcatcagcatatgcacatcaataaacatgatatatcacatgagcagaatgaagaacaaaaatcacatgattatctcaatagacacagaaaaagcattaataaaattcaacattcttgtatgataaaaactctcaaaaaactagggatagaaggaacaaatcccaaaacacaaagatcacattaataccacagataacattatgctgaatggagaaatgtttaaagccttcmttctaagacctggtacaagtcaaggatgcccacttttccaactcttatttaacatagtactggaagtcccagccagagtgatcaggctagataaagaaataaaagacattaaaattgaaaacagaaagtcaaatagtgcctcattgctgataagatcttttacataaaaatacctaaagactccaccaaaaaactcttagatttga

SEQ ID NO: 923830 - DNA, 528 bp, Homo sapiens
ctgcgtcagaagaacataaattgtgaagatttcatggacatttattcacttccccaatcaatattcttataatttactatgcctgtctttactttaatctcttaatcctgtcatcttcgtaaactgaggatgtatgtcgcctcaggaccctgtgatgattgcattaactgtacaaattgtaaaacgtatgtttgcacaatatgaaatctgattgtaaaaaatgggtgtttgaacaatatgaaatcaggacaccctgaaaaagaacagaataacagtgattttcagggaacaaggaaagataaccataaggtctgactgcctgtggagtcyggcagaatagagccatatttttcttcttgcagggagcctataaatggacatgtgagtaggagaaatatcactgaattcttttcccagcaaggaatattaataattgataaccctggggaaggaatgcattcccaggggtaggcctatagacgaccactctgggattgtctgtcttatgcagggatgaaatacgccctg

SEQ ID NO: 923831 - DNA, 811 bp, Homo sapiens
ttaagtctgcagaggttactgctgtgtttctgtttgtctgtgccctgcccccagaggtggagcctacagaggcaggcaggcctccttgagctgtggagggctccacccagttccagcttccccactgctttgtttacctaagcaagcctgggcaatggcgggcgcccctcccccagcctagctgctgccttgcagtttgatctcagactgctgtrctagcagtcagcgagactctgtgggcgtaggaccctccgagccaggtgcgggatgtaatctcctggtgcgccgttttttaagcccgtcggaaaagcgcagtattcgggtgggagtgacctgattttccaggtgccctctgtcacccctttctttgactgggaaagggaactccctgaccccttgcgcttcccgagtgaggcaatgcctcgccctgccttggctcgcacacggtgcacgcacccactgacctgcgcccactgtctggcactccctagtgaggtgaacccggtacctcagatggaaatgcagaaatcccccgtcttctgtgtcactcacgctgggagctgtagaccggagctgttcctattcggccatccatcaatatttctggctttcaaggtttactaaaggtaacttcccaggtgctgagagaaaaaaaaatttaaggcggttcatggaggggaagagagtcaacaaatggtaaagttcacatagatatcaaaacagaaaggactcattccctaagccaagattgaacctgggccaccattacaaaatgcaggaggctaaaacaaagcactgccacatggttaca

SEQ ID NO: 923832 - DNA, 811 bp, Homo sapiens
ttaagtctgcagaggttactgctgtgtttctgtttgtctgtgccctgcccccagaggtggagcctacagaggcaggcaggcctccttgagctgtggagggctccacccagttccagcttccccactgctttgtttacctaagcaagcctgggcaatggcgggcgcccctcccccagcctagctgctgccttgcagtttgatctcagactgctgtactagcagtcagcgagactctgtgggcgtaggaccctccgagccaggtgcgggatgtaatctcctggtgcgccgttttttaagcccgtcggaaaagcgcagtattcgggtgggagtgacctgattttccaggtgccctctgtcacccctttctttgactgggaaagggaactccctgaccccttgcgcttcccgagtgaggcaatgcctcgccctgccttggctcgcacacggtgcrcgcacccactgacctgcgcccactgtctggcactccctagtgaggtgaacccggtacctcagatggaaatgcagaaatcccccgtcttctgtgtcactcacgctgggagctgtagaccggagctgttcctattcggccatccatcaatatttctggctttcaaggtttactaaaggtaacttcccaggtgctgagagaaaaaaaaatttaaggcggttcatggaggggaagagagtcaacaaatggtaaagttcacatagatatcaaaacagaaaggactcattccctaagccaagattgaacctgggccaccattacaaaatgcaggaggctaaaacaaagcactgccacatggttaca

SEQ ID NO: 923833 - DNA, 517 bp, Homo sapiens
ttgctcagctgtaaaatgtaggaaataattttaggtgcttcatgttgtgggaattagcgctgtgataacgaatgtaacatgcttggcacatgggacttagtctattagctcttcccttctgcctttcctcaatctgctcctctccctagcctggagctttcttaaagggttttgaggagagaaaaaccaargtcacagactttataggccccccaaaattgaatatcagaaattgtaaatggttcaacctaacaaatgcactaggctctgattgcaagaagtgctgctgagtgtgtacaagaagggaggaccgggattggactgaactgcagaacaaaggaaaccatgtggactggcacactggactgagcaaattaaaacctaagggacacgtcaacccgcattagtcctgcctcagcagtatggctgccctcttagggctgcagagtcatgggactgtgtcctcttgggggctgcagtggatctaggagtccagctcccccaagactcctgcacc

SEQ ID NO: 923834 - DNA, 590 bp, Homo sapiens
tgcaggtctgttggagtttgctggaggtccactccaggccctgtttgcctgggtatcaacagcggaggctgcagaacagcaaatattgctgaacagcaaatgttgcttcctgattgttgctccggaagcttcatctcagagggtacccggcagtgtgaggtgtcagtatgcccttcctggggggtgcctcccagttaggctactcgggggtcagggacccacttgaggaagcagtctgtccattctcagatctcaaactctgtgctgggagaaccactactctcttcaaagctgtcagacagggacatttaagtctgcagaggtttctgctgccttttgttcagctatgccctgcccccagaggtggagtctacagaggcaggcaggcctccttgagctgtggtgggctccacccagttcgagctttcctgcygctttgtttacctactcaagcctcagcaattgcgggcgcccctcccccagcctcactgctgccttgcagttcaatatcagactgctgtgctagcaatgagcgaggctccgtaggtttgggaccctccgagccaggcacggggtataatctcctggtg

SEQ ID NO: 923835 - DNA, 733 bp, Homo sapiens
tttcttcttccaggtactctaaatcgtctctctcaagttcaaagtttcacagttctccagggcaggggcaaaatgctgccagtctctttgttaaagcataacaagagtgacctttattccagttcccaataagtttctcacttctatctgagaccacatcagcctggacttcctttttcatatccctatcagcattttggtcaaaaccattcaacaaatctctaagaagtttaaaactttcccacatttttctgtcttcttctgagccctccaaactgatccaacctctgctcattacccagttctgaagttgcttccacattttctggtgtctttataccagtgccccaaacttctggtaccaattttctatattaatccattttcatactgcctgagactaggtaatttataaagtaaagaggtttaatttacttacagttccccatgcctggggaggcctcaggaaccttaaaatcatggcagaaggygaaagggaagcaaggcatgtcttatacggtggcagaggagagagcaagagtggaagtgccacacctttaaaccagcagatctcatgagaactcactcactatcatgagaacagcatgcggtaaaccactcccctgatccaatcacctcccaccaggtccctctctctacatgtggggatgacaattccaaatgtgatttgggtgggcacacagcgccaacatatataaggggataatttttc

SEQ ID NO: 923836 - DNA, 733 bp, Homo sapiens
tttcttcttccaggtactctaaatcgtctctctcaagttcaaagtttcacagttctccagggcaggggcaaaatgctgccagtctctttgttaaagcataacaagagtgacctttattccagttcccaataagtttctcacttctatctgagaccacatcagcctggacttcctttttcatatccctatcagcattttggtcaaaaccattcaacaaatctctaagaagtttaaaactttcccacatttttctgtcttcttctgagccctccaaactgatccaacctctgctcattacccagttctgaagttgcttccacattttctggtgtctttataccagtgccccaaacttctggtaccaattttctatattaatccattttcatactgcctgagactaggtaatttataaagtaaagaggtttaatttacttacagttccccatgcctggggaggcctcaggaaccttaaaatcatggcagaaggtgaaagggaagcaaggcatgtcttatayggtggcagaggagagagcaagagtggaagtgccacacctttaaaccagcagatctcatgagaactcactcactatcatgagaacagcatgcggtaaaccactcccctgatccaatcacctcccaccaggtccctctctctacatgtggggatgacaattccaaatgtgatttgggtgggcacacagcgccaacatatataaggggataatttttc

SEQ ID NO: 923837 - DNA, 607 bp, Homo sapiens
cttacatttaaatctttagttcatttctagttaatgtttgtccataggtataaggtaggtttccatttcattcatttgcatatatatatccacttttgccaacaccatttattaaagagaactttctttttccattgtgtattatttgtgcccttatcaaaaattagttgactgtatatgcatggatttatttctgkgctgtctattctgcgtcattcatccatgtgtctaattttatgccaataccatactgtttagattaccatagctttgaaatatatttgaaatcaggaagtgggatgcccccaactttgtccttctttctcaagattactttgattatttggggttatttctagttctatatgaatttcagtactttttttatttctgtaaaaagtgccattggaatacttataaggattatgttgaatcattagatcacgttggatagtgtgatggttaatattgactgtcaacttgattggattgaaggatgcaaagtattgttcctgagtgtgtctgtgaggggtgttgccaaaggaaattaacatttgcatcagtggacttggaggggcagatacaccctcaatctgggtggacacca

SEQ ID NO: 923838 - DNA, 628 bp, Homo sapiens
aaagcaataacaaacaatggcaggctttcagtctctagttacaattctgtgttttaattaaaaggttatggtagaatgcctttttttttttttgagaagaaacatcagaagcagttgagggaccaggaggtggttcgtttaggaggcattcttctgggtgatttttaaaatattttccccagagttatctgactaattaacaataggttttgtcttagaagtccctctttgattttataacctggcataatttcttgtacttgtcttcaataagcccatcacacattttcatcatgttatctgcattagtccttttttgcattgttatmaaggtatacctgggactaggtaatttaaaatgaaaagaggcttaattggctcatggttctgcaggctttgcaggaagtatggtgctgccatctgcctgatttctgatgaagtctcagggaactttcaatggcagaagatgaagaggaaagccagtgtctcacacggctgaagcaggagcaaaagagagacagtgggaggggaggtgccacacacattgaaatcaccagatctcgtgagaactcattatcatgaagacagcaccaagccatgagtgatctgccccatgatccaaacactt

SEQ ID NO: 923839 - DNA, 628 bp, Homo sapiens
aaagcaataacaaacaatggcaggctttcagtctctagttacaattctgtgttttaattaaaaggttatggtagaatgcctttttttttttttgagaagaaacatcagaagcagttgagggaccaggaggtggttcgtttaggaggcattcttctgggtgatttttaaaatattttccccagagttatctgactaattaacaataggttttgtcttagaagtccctctttgattttataacctggcataatttcttgtacttgtcttcaataagcccatcacacattttcatcatgttatctgcattagtccttttttgcattgttatcaaggtatacctgggactaggtaatttaaaatgaaaagaggcttaattggctcatggttctgcaggctttgcaggaagtatggtgctgccatctgccygatttctgatgaagtctcagggaactttcaatggcagaagatgaagaggaaagccagtgtctcacacggctgaagcaggagcaaaagagagacagtgggaggggaggtgccacacacattgaaatcaccagatctcgtgagaactcattatcatgaagacagcaccaagccatgagtgatctgccccatgatccaaacactt

SEQ ID NO: 923840 - DNA, 644 bp, Homo sapiens
acaaacaatggcaggctttcagtctctagttacaattctgtgttttaattaaaaggttatggtagaatgcctttttttttttttgagaagaaacatcagaagcagttgagggaccaggaggtggttcgtttaggaggcattcttctgggtgatttttaaaatattttccccagagttatctgactaattaacaataggttttgtcttagaagtccctctttgattttataacctggcataatttcttgtacttgtcttcaataagcccatcacacattttcatcatgttatctgcattagtccttttttgcattgttatcaaggtatacctgggactaggtaatttaaaatgaaaagaggcttaattggctcatggttctgcaggctttgcaggaagtatggtgctgccatctgcctratttctgatgaagtctcagggaactttcaatggcagaagatgaagaggaaagccagtgtctcacacggctgaagcaggagcaaaagagagacagtgggaggggaggtgccacacacattgaaatcaccagatctcgtgagaactcattatcatgaagacagcaccaagccatgagtgatctgccccatgatccaaacacttcctgcctgaacccacctccagcatt

SEQ ID NO: 923841 - DNA, 609 bp, Homo sapiens
cagctgactgcaacctccacctcctgggttcgagcagctctcctgcctcagcctcctgagtagctgggaatacaggtgtgtgtcaccacgcccggctaattttttgtattttagtagagacagggtttcatcatgttgcgcaggctggtttcaaactcctgagctcaggcaatccacctgcctcaggttccccaagtgctaggattacaggcgtgagccaccatgcccggccattctcacttaaaaaaaaaaaaaaaaaaaattaacactgcactgctggcttgaatactctttccttggagcattttcttcaggtataacttgttctgcttgatttttctccagccctactggattccccacttgcagttttctttgctggttcctcctttccttcccagcttccccrtatcagatgacccaggtctcaatcctagcccccgttctctgcttacatcctcttctctgcttacatcctttcgcttgatgatcttatctagttccatagctttcagaagctgtctctttgctggtgactttcaaatacatatttccaacccgttccaaatccagattgcttatttgaaatctctgcttaagtgtctcaac

SEQ ID NO: 923842 - DNA, 448 bp, Homo sapiens
aaaaaaaaaagcttgcttacacatgtagaaagttgaaagtgcagtgaagtgttactgctttcaaatgaatgacaggatactttgcagaaatccacaacttttctgggggtagagcrttaagtctgtctctggtgtacagtcagattgtacctataaagctcttttcttgaagtcagattctcaggctgagcagagattcagagaaaggatcccttacctaatcatatgctggtgttgaaagggaggaaaaatatttaattatctcctacagtttttccatgtggcactcagacttgagactttccaatagctttcctcacttgatatcaagcccaagcaaaaggtggacattttaaggttttctgttgtaacatgattatttccaaagacatactccgttacctttgaaatgcaagaatcttgtcacttgaagtcaaacattttctcc

SEQ ID NO: 923843 - DNA, 577 bp, Homo sapiens
tttatttagttctcaataatccactgtcatctgccaagttccgtcaggcttcttgactggccatactggaaaattgtagggtctgtaggtgttacacattatctgcaccttttctaacttcttaatagtctcagttatctctgtatgctcacctggcaagtggtattgacacgtggaagtaatccataagggttgtggcaagacatggagctagtgatgtgtatgtctgtggagtaccagcttaaccccacatacttggagtctgaattccccatccgtggtttgtaaagccaagccatgtaaagtatccacccccaaaatgtattcaggtatgggagaaacatagtttataagtggggagccaagcagccratgccaaggtgcaaagatgcaggtttcactttcactgactgacctctatagccatctatatatgcagccttgcctggaaatttatccaggttcccacagatgagagtacaatctgtgccagtgtctaccagcaccagcacccgctgtatgttggtgggggaccagtggattgtcaattccacttgtggcctccagttgtccagtg

SEQ ID NO: 923844 - DNA, 814 bp, Homo sapiens
tcctatccaaagcaaataccacttctctcagggctaccacaagccaaggacactgtgagtacctggatgtgacatcagcattccatttggatccttgagaccagataataccaccatatgtcatatttctgtaatctttagtgatataaggattaatttaatcatcagtgggggatgttattggcatttaaagtaaggacaattgtgcagcactgtcttgagcccacaggatgttagcactcctgctccctcaatctcaaatgctgctacattaacactcttcattgtagaagttgaaaacactcgtcatctttcccaacaccccttacattgtagtaccatcaccaattgaacatctttgagtttctcaatttttggagacaaggactcactctgtcacccaggctagagtgcagtggcactatcatagctcacagcatcctgaaactcctgggctcaagcaatcctcctgcctcaacctcccgagtagctgggactgcaggtctgtactatcatgcctcaacctccaacagtrctaggattacaggcatgagccaccgaccggcctctcctgtactttaatctccattgtgttcggtgctttcctggacccttcccattctctcccaaaacttccaacaacaacctctaaaaaaacaataaacaagacaaatgccactgttgaaggtgtaaatgtccaaggggttcaccttgcctgctgcctatacagagccaattcctcaagacaggggagccgggcatggtggctcacccctgtaatcccagcattttgggaggccgaggcgggtagatc

SEQ ID NO: 923845 - DNA, 607 bp, Homo sapiens
gtaatcccagctactgaggaggctgaggcagcagaatcgtttgaacccaggaggtagaggttgcagtgagctgagatcatgccactgcactccagcttgggcaacaaagcaaaattctatctcaaaaaaaaaaaaattgttaatcctcaaacttatccttatcaaattttactttatgtattttgaggctcagttattaggagaaagtggtacctcattgtggtttttatttgcatttctctaataactatgttgagcatcttttcatgtgcttgttagccatttgtatatcttctttggagaaatgcctattcaatgtcgaactgatttttgacaaaggtatgagagcaattcaatgcaggaaagakagctttatcaactaatagtgcagacgcaactggacatctgcaggtagaaaaaaaaaagaagaatcttgatctaagcctcacaccttatacacaaactaactcaaaatggaccatgatttaaatgtaaaaggtgaaactacaaaaattttagaataaaacataggagaaaatctttgagatttagggctaggcaaagagtttgaaaacttgacactgaaagcataatccataaaggaaaa

SEQ ID NO: 923846 - DNA, 607 bp, Homo sapiens
gtaatcccagctactgaggaggctgaggcagcagaatcgtttgaacccaggaggtagaggttgcagtgagctgagatcatgccactgcactccagcttgggcaacaaagcaaaattctatctcaaaaaaaaaaaaattgttaatcctcaaacttatccttatcaaattttactttatgtattttgaggctcagttattaggagaaagtggtacctcattgtggtttttatttgcatttctctaataactatgttgagcatcttttcatgtgcttgttagccatttgtatatcttctttggagaaatgcctattcaatgtcgaactgatttttgacaaaggtatgagagcaattcaatgcaggaaagagagctttatcaactaatagtgcagacgcaactggacatctgcaggtagaaaaaaaaaagaagaatcttgatytaagcctcacaccttatacacaaactaactcaaaatggaccatgatttaaatgtaaaaggtgaaactacaaaaattttagaataaaacataggagaaaatctttgagatttagggctaggcaaagagtttgaaaacttgacactgaaagcataatccataaaggaaaa

SEQ ID NO: 923847 - DNA, 594 bp, Homo sapiens
cacagaaatcaagaagttatttgaaaccaatgagaacaaagacacaaagtaccagaatctctgggacacagctaaagcagtgttaaaagggaaatttatagcactaaatgcccacatcagaaagctagaaagatctcaaatcgacaccctaacatcacaatcaaaaaagctagagaggcaagagcaaacaaatctaaaagctaacagaagacaagatataactaggatcagagaagaattgaaggagatagagagaagaaaaaccctccaaaaaatcagtgaatccaggaggtgttttttttgaaaaaattaacaaagtagatagacaactagctagacaaagagagagaagaattaaatagayacaataaaaaatgataaaggggatatcaccactgaccacacagaaatactataaaaacctctatacaaataaactagaaaatctaggagaaatggataaatttctggacacatacaccctcccaagactaaaccagaaagaagtcaaatcccctaatagaccaataacaagttctgaaattgaggcagtaattaacagcctaccaaccaaaaaaagcccaggaccagaca

SEQ ID NO: 923848 - DNA, 594 bp, Homo sapiens
cacagaaatcaagaagttatttgaaaccaatgagaacaaagacacaaagtaccagaatctctgggacacagctaaagcagtgttaaaagggaaatttatagcactaaatgcccacatcagaaagctagaaagatctcaaatcgacaccctaacatcacaatcaaaaaagctagagaggcaagagcaaacaaatctaaaagctaacagaagacaagatataactaggatcagagaagaattgaaggagatagagagaagaaaaaccctccaaaaaatcagtgaatccaggaggtgttttttttgaaaaaattaacaaagtagatagacaactagctagacaaagagagagaagaattaaatagacacaataaaaaatgataaaggggatatcaccactgaccacacagaaatactayaaaaacctctatacaaataaactagaaaatctaggagaaatggataaatttctggacacatacaccctcccaagactaaaccagaaagaagtcaaatcccctaatagaccaataacaagttctgaaattgaggcagtaattaacagcctaccaaccaaaaaaagcccaggaccagaca

SEQ ID NO: 923849 - DNA, 551 bp, Homo sapiens
acccagccatggctgcagacccaggtatctttgcactatcgggggcgggaaccccccaacgcccacaggcttgaaagtgcctggtcctgctggttggcctctccccactcccagtgcccacaccaattttggagcaaagttgtggccaagcccagggtgctttcacaacccaaccagatgtggaggtgcttggggcagcaccgacacgccagccccctgytgcctcggcctcctttagacattgggtgctgatgagcacaggagggaggccaagagggggctaagggcagcttagcttgtgtctgcaggtgcctcttggcatgaacagcctgagcgccatgggcacagtggacagcaggtaatggcagcaggaggcagacacggtccctggtggaaaagggcaggtccacggtgaaaccccaccttcaggccaggaactgccttaagcctgggggctgggagtgagaacttactgtgctttttccagggccacccatggccacccatggcccaatcagcatgcccttcctcccctctgaacccccataaaa

SEQ ID NO: 923850 - DNA, 551 bp, Homo sapiens
acccagccatggctgcagacccaggtatctttgcactatcgggggcgggaaccccccaacgcccacaggcttgaaagtgcctggtcctgctggttggcctctccccactcccagtgcccacaccaattttggagcaaagttgtggccaagcccagggtgctttcacaacccaaccagatgtggaggtgcttggggcagcaccgacacgccagccccctgttgcctcggcctcctttagacattgggtgctgatgagcacaggagggaggccaagagggggctaagggcagcttagcttgtgtctgcaggtgcctcttggcatgaacagcctgagcgccatgggcacagtggacagcaggtaatggcagcaggaggcagacacggtcsctggtggaaaagggcaggtccacggtgaaaccccaccttcaggccaggaactgccttaagcctgggggctgggagtgagaacttactgtgctttttccagggccacccatggccacccatggcccaatcagcatgcccttcctcccctctgaacccccataaaa

SEQ ID NO: 923851 - DNA, 728 bp, Homo sapiens
cattgccatagggcaatgtggaacacagaccatgacaacaaaaattactggacagaacattaagaaaatcttttggattcttaataacaagcatccactattagagacctgtcttaatgacagatgtcttcggttgttgttttttttaaatcagtcatcgatttgttaaaatgccttctaaccctacacttgatagcagtagacagacaataggaatgtctacgggaaaataatgcaagagtctctgtgactatttggagtgtgtaaaatgtattatactcatgaatacctgtttatgttgcattcactaccctatgaagtaaaaatttagaagggaaaaaacactcgaattttcamtgatttaaattgttaagatttttaaaatgtttgtctgtttcgaactttttttttttttttttttttgagacggagtctcgctctgtcgcccaggccggactgcggactgcagtggcgcagtctcggctcactgcaagctccgcttcctgggttcacgccattctcctgcctcagcctcccgagtagctgggaccacaggcgcccgccaccgcgcccggctaattttttgtatttttagtagagacggggtttcaccttgttagccaggatggtctcgatctcctgacctcatgatccacccgcctcggcctcccaaagtgctgggattacaggcgtgagccaccgcgcccggcctgtttcgaactttttat

SEQ ID NO: 923852 - DNA, 728 bp, Homo sapiens
cattgccatagggcaatgtggaacacagaccatgacaacaaaaattactggacagaacattaagaaaatcttttggattcttaataacaagcatccactattagagacctgtcttaatgacagatgtcttcggttgttgttttttttaaatcagtcatcgatttgttaaaatgccttctaaccctacacttgatagcagtagacagacaataggaatgtctacgggaaaataatgcaagagtctctgtgactatttggagtgtgtaaaatgtattatactcatgaatacctgtttatgttgcattcactaccctatgaagtaaaaatttagaagggaaaaaacactcgaattttcactgatttaaattgttaagatttttaaaatgtttgtctgtttcgaactttttttttttttttttttttgagacggagtctcgctctgtcgcccaggccrgactgcggactgcagtggcgcagtctcggctcactgcaagctccgcttcctgggttcacgccattctcctgcctcagcctcccgagtagctgggaccacaggcgcccgccaccgcgcccggctaattttttgtatttttagtagagacggggtttcaccttgttagccaggatggtctcgatctcctgacctcatgatccacccgcctcggcctcccaaagtgctgggattacaggcgtgagccaccgcgcccggcctgtttcgaactttttat

SEQ ID NO: 923853 - DNA, 728 bp, Homo sapiens
cattgccatagggcaatgtggaacacagaccatgacaacaaaaattactggacagaacattaagaaaatcttttggattcttaataacaagcatccactattagagacctgtcttaatgacagatgtcttcggttgttgttttttttaaatcagtcatcgatttgttaaaatgccttctaaccctacacttgatagcagtagacagacaataggaatgtctacgggaaaataatgcaagagtctctgtgactatttggagtgtgtaaaatgtattatactcatgaatacctgtttatgttgcattcactaccctatgaagtaaaaatttagaagggaaaaaacactcgaattttcactgatttaaattgttaagatttttaaaatgtttgtctgtttcgaactttttttttttttttttttttgagacggagtctcgctctgtcgcccaggccggactgcggactgcagtggcgcagtctcggctcactgcaagctccgcttccygggttcacgccattctcctgcctcagcctcccgagtagctgggaccacaggcgcccgccaccgcgcccggctaattttttgtatttttagtagagacggggtttcaccttgttagccaggatggtctcgatctcctgacctcatgatccacccgcctcggcctcccaaagtgctgggattacaggcgtgagccaccgcgcccggcctgtttcgaactttttat

SEQ ID NO: 923854 - DNA, 589 bp, Homo sapiens
agaaagttaaaatgccacaaagcttactgagattcagtgctttccttgaataaacactgcctggtggctgcaagcctctagttaatttccagagttgaaaaaagttgcttctgatcatttttgccagtttttttatttkcttttatggaggggtaaaatattagagtgccttactccaccattttcactgaaatcactcctctctgtattctttcttattgcctcttgctatgacaacaattttgtaatataatttttcattgaaaaagtagaaagataatccaatttttcctttatcatggttgaccacttttttttttttttgagaaggaatcttgctctgtcacctaggctggagtgcagtggcgcaatctcggctcattgccagctccgcctctcgggttcatgccattctcctgcctcagcctcctgagtagctgggactacaggcgcctgccaccatgcccagctaattttgtatttttagtagagatggggtttcaccgtgttagccaggatggtctcaatctccagaccttgtgatccacccacgtcggcctcccaaagtgctgggattacaggtgtgagc

SEQ ID NO: 923855 - DNA, 595 bp, Homo sapiens
gtttatagactgaccctgaacaatttcttttaatttacgtgtgtctcggtttgataagcattctctgcttttaacctaatctaaccctgatgcttaactaattaatttcatccttcccggcttcttattctgaccacaacagggcctggtctcatgtaaatgaaggacaaagaggaaagaggttcatgggactattttaactgatgggtgttaccttcatttatttgtattatagtgacaagtgtatttatcctatttctttcttgtaagcatgattccagggatttgtttttctatgtaaaatggggctttgaacataggargtgctcaaatggttaataattggaatagatacactaattatcagtttagaagagtgatactaatgcagtcctgtgtgtgtgtgtgtgtgtgtgtgtgtgtgtgtgtgtgtgtgtgttgcatacccaaaaagaagaggaggaggaataggacaatgacagcaggctcaaccataggttacattttgaaatttttcttttttcccttctttttcactttccctttctataggaagtcaggattcaagaccagatgtttaattttagcaccaagt

SEQ ID NO: 923856 - DNA, 587 bp, Homo sapiens
gtcagggtgtccagggaccagaggccacatgtagaactaactgtatattagttacctaagaataaacaaactgtgcatgccctagtagacactgcagcctaatgcactctcatatatgataatattcatctgttccgaaggcctataacagcaatagatggttttagaaagggggccatggaagtcagatgggttgaaccagtagtactagttgggagactgccaccaaaactcaatgtagtatacattgctcccatcccagaatgcatcttggraaaggatatcttatcaggcttgaccctccaaacaactactgagaaactctctaagagttagggtggtgaagcaagtggtgaagtgatgaggggaactcaaaacggacaccaacggtgcagttgccagcccttcagggagtagcagtggtgtgtgggcatgatgaaatcacaggaacttttaaggagttaggtaggcattataaggtcaatgcacagcccatacaacagccctgtaaagtcagtgtggaagcctgatgggacatggagaatgacagtaggttagtgggaattaaataaagtggtacaccaatg

SEQ ID NO: 923857 - DNA, 593 bp, Homo sapiens
agagcaatggtggtcagggtgtccagggaccagaggccacatgtagaactaactgtatattagttacctaagaataaacaaactgtgcatgccctagtagacactgcagcctaatgcactctcatatatgataatattcatctgttccgaaggcctataacagcaatagatggttttagaaagggggccatggaagtcagatgggttgaaccagtagtactagttgggagactgccaccaaaactcaatgtagtatacattgctcccatcccagaatgcatcttggaaaaggatatcttatcaggcttgaccctccaaacaactactgagaaactctctaagagttagggtggtgaagcaagtggtgaagtgatgaggggaactcaaaacggacaccaacggtgcagttgccagcccttcagggagtagcagtggkgtgtgggcatgatgaaatcacaggaacttttaaggagttaggtaggcattataaggtcaatgcacagcccatacaacagccctgtaaagtcagtgtggaagcctgatgggacatggagaatgacagtaggttagtgggaattaaataaagtggtaca

SEQ ID NO: 923858 - DNA, 563 bp, Homo sapiens
agagtggaaatggcaattgaaaatgagaggcccatctctgaatttcgaagaagttgggagtatcttaaatgccatgcactgaaagaggaggttgtatgcatacataaaaagcttaccagaaataatgaaataattttgtaaaaccaaaaatcatgattatagatttttcccaatgggcataaattaaaagaagttttccatagacactccacaagctgaacagcgtcctggtggcactaaaatatttcctttcatgtattctttctctcttttcccatataattccagctaactrttcctggaatataacagcaatattgatctagctagggtctttaatttgtttggggaatgtaattggatttgagagaatagatacagaagttaaaatttttctcacatcgtctaaatgtttagatggagaacttgccatgatgttcttacgttgtatcctttttctaaaaattagaaaatattagcactttatggttgaagtaactcaaatatacaaattgctaaggaagccccatttattttattggaagaagtgaggatggaacttt

SEQ ID NO: 923859 - DNA, 563 bp, Homo sapiens
agagtggaaatggcaattgaaaatgagaggcccatctctgaatttcgaagaagttgggagtatcttaaatgccatgcactgaaagaggaggttgtatgcatacataaaaagcttaccagaaataatgaaataattttgtaaaaccaaaaatcatgattatagatttttcccaatgggcataaattaaaagaagttttccatagacactccacaagctgaacagcgtcctggtggcactaaaatatttcctttcatgtattctttctctcttttcccatataattccagctaactgytcctggaatataacagcaatattgatctagctagggtctttaatttgtttggggaatgtaattggatttgagagaatagatacagaagttaaaatttttctcacatcgtctaaatgtttagatggagaacttgccatgatgttcttacgttgtatcctttttctaaaaattagaaaatattagcactttatggttgaagtaactcaaatatacaaattgctaaggaagccccatttattttattggaagaagtgaggatggaacttt

SEQ ID NO: 923860 - DNA, 563 bp, Homo sapiens
agagtggaaatggcaattgaaaatgagaggcccatctctgaatttcgaagaagttgggagtatcttaaatgccatgcactgaaagaggaggttgtatgcatacataaaaagcttaccagaaataatgaaataattttgtaaaaccaaaaatcatgattatagatttttcccaatgggcataaattaaaagaagttttccatagacactccacaagctgaacagcgtcctggtggcactaaaatatttcctttcatgtattctttctctcttttcccatataattccagctaactgttcctggaatataacagcaatattgatctagctagggtctttaatttgtttggggaatgtaattggatttgagagaatagatacagaagttaaaatttttctcacatcgtctaaatgtttagatggagaacttgycatgatgttcttacgttgtatcctttttctaaaaattagaaaatattagcactttatggttgaagtaactcaaatatacaaattgctaaggaagccccatttattttattggaagaagtgaggatggaacttt

SEQ ID NO: 923861 - DNA, 454 bp, Homo sapiens
tttttttgcttgtgctacacatccattaggtcatcaagggactcaccttgtcaagttactcagagattcaggctgatataaaggtttgatcttgacatacgctttcatgatgacagaaagcagggaagagaaggtggtgagccatgtgctttctcccccttctatccagaaatgacacatactcacatttcattcgccagagaaattaacatggccmctcctaagttcaaatggatagagaaatgccttcctaccaggtgcccagaattagaagagcaaacatttgtgaacagttctgagtaccacaaataccgttatctttccacttaagtcttctgtttcactcagtagtgctttaaacttttcttcatatgtttttcagtgtttcttgttgaatttcttgatattttatcatgtttgttcgtactggaagtagcctttttttccatttcat

SEQ ID NO: 923862 - DNA, 581 bp, Homo sapiens
tgggtgcctgtaatcctagctactcaggaggttgaggcaggagattcagttgaacctgggaggaagaggttgcaatgagtagagatcacgccacagcactccagcctgggcaacaaagcaagactgtatctcgaaaawggaaggaaggaaggaagggatggatggagggagggagggagggagggaggcagggagggacgaaggaaggaaatttatttatttcatatggaaatatttactttgttgggaagggtaaaatattaaataaagaaaataaaggtggacactctagttatataaccatcttggttcttaaaacaattcaaactgatttacactagagtcacacctccatctccaagttcctattattcatcatattcatctcagtttgttgagtttaagttgtgtactgaacattctctctcctgttttctgattcctttcccccatttcttttctagcacctgaggagattgagttgtatatatttagtcacaccttatcctactaccttcccttgaaaatatccttggctgtgactgaatatattttgcatagcatttttaacagaaataaca

SEQ ID NO: 923863 - DNA, 680 bp, Homo sapiens
aggaaagcctgttatgtacaggaggttgtcaggagagaaattggagacagtgagtatggtcaactcttccaagaagttttgcaataaagtagacaaagaagagggggtagaaactgcattggaaagagaggtcagaactttataaaactgsagaaatagccaggcgcggtggctcacgcctgtaatcccagcactttgcgaggccgaggcgggtgggtcacgaggtcaggagatcgagaccatcctggctaacacggtgaaaccccgtctctactaaaaataaaaaaaaattagcctggcgtggtggtgggtgcctgtagtcccagctattggggaggctgaggtaggagaattgcatgaacctgagaggcggagcttgcagtgagctgagatcgtgccactgtactccagactgggcgacagagcaagactccgtctcaaaaaaaaaaactggagaaataggccaggcatggtggctcatgcctgcaatctcaacgttttgggaggtcaaggtaggaggatggcttgaggccaggagtttgagactagttgggcagcatagtgagatgccatctctacaaaaaaatttaaaattagccaagtgtggtagtgcacacttgtagttccagttactaaggaggtcagtgagcaagttatgtgggtgggaggattgcttgacc

SEQ ID NO: 923864 - DNA, 680 bp, Homo sapiens
aggaaagcctgttatgtacaggaggttgtcaggagagaaattggagacagtgagtatggtcaactcttccaagaagttttgcaataaagtagacaaagaagagggggtagaaactgcattggaaagagaggtcagaactttataaaactggagaaatagccaggcgcggtggctcacgcctgtaatcccagcactttgsgaggccgaggcgggtgggtcacgaggtcaggagatcgagaccatcctggctaacacggtgaaaccccgtctctactaaaaataaaaaaaaattagcctggcgtggtggtgggtgcctgtagtcccagctattggggaggctgaggtaggagaattgcatgaacctgagaggcggagcttgcagtgagctgagatcgtgccactgtactccagactgggcgacagagcaagactccgtctcaaaaaaaaaaactggagaaataggccaggcatggtggctcatgcctgcaatctcaacgttttgggaggtcaaggtaggaggatggcttgaggccaggagtttgagactagttgggcagcatagtgagatgccatctctacaaaaaaatttaaaattagccaagtgtggtagtgcacacttgtagttccagttactaaggaggtcagtgagcaagttatgtgggtgggaggattgcttgacc

SEQ ID NO: 923865 - DNA, 638 bp, Homo sapiens
ggtgggcaaatctcttaagcccaggagtttgagatcagcctgggcaacacggtgaaatcctgtctctacaaaaagtacaaaaacagccaagcgcggtggctcacgcctgtaatcccaccactgtgggaggccaaggtaggcagatcacttgaggtcaggagttctagatcagcctgaccaacatgcaaaaccctgtctctactgaaaaatacaaaaagtagctgggtgtggtggtgtgtgcctgtaatcccagctactagggaggctgaggcacaagaatcgctttaacccaggaggcggaggttgcagtgagctgagatcacaccactgcactccagcctgggtgacagaatgagactgtctcgaaacaaaaaaaaacaaacaaaaagcaaaccccaaacacgtaaacaaacaaaaagtacaaaaattagcccggcctggtggcrcgtacctgtagtcccagctactcaggaggctgtggtgggaggatgacctcagcccaagggaagtcgaggctgcagtgagccatgatcgtgccactgcattccagcctgggtgacagagtgagattctatctcaaaaaatatatatacatttttgtggggaggaaagaggtgagagaagcctattatttcctt

SEQ ID NO: 923866 - DNA, 653 bp, Homo sapiens
atgggcttttcttttctgtctcatcgtcaggctgcaaattttccaaacttttatactctgcttcctcttgaatgctttgctgcttagaaatttcttcctccagataccctaaatgatctctctcaagtttaaagttctacagatctctagggcaggggcaaaaagyctccagtcttttggctaaagcgcagcaagagtgatctttacttcagttcccgataagttcctcaggtccatctgagaccaccttagcctggacttcattgtctatatcactatcagcattttagtcaaagccgttcaacaagtctctaggaagttccaaactttcccacacttttctgtcttctgagccctccaagtctctgggaagttccaagctttctcacatttttctgtcttcttctgagccctctaaactgtttcaacactgcctgttagccagttccaaagtcacttccacattttcaagtatctttatagcagtgccccaccacctcagtaccaatttactgtattagtctgttctcatgctgctttgaagaaatactcaagactaagtaatttattaaaaaaaaaaaaaaaagaaagaggtttaattgactcacagttccacatggctggggaagcctcaggaaaattacagtcatggc

SEQ ID NO: 923867 - DNA, 653 bp, Homo sapiens
atgggcttttcttttctgtctcatcgtcaggctgcaaattttccaaacttttatactctgcttcctcttgaatgctttgctgcttagaaatttcttcctccagataccctaaatgatctctctcaagtttaaagttctacagatctctagggcaggggcaaaaagtcwccagtcttttggctaaagcgcagcaagagtgatctttacttcagttcccgataagttcctcaggtccatctgagaccaccttagcctggacttcattgtctatatcactatcagcattttagtcaaagccgttcaacaagtctctaggaagttccaaactttcccacacttttctgtcttctgagccctccaagtctctgggaagttccaagctttctcacatttttctgtcttcttctgagccctctaaactgtttcaacactgcctgttagccagttccaaagtcacttccacattttcaagtatctttatagcagtgccccaccacctcagtaccaatttactgtattagtctgttctcatgctgctttgaagaaatactcaagactaagtaatttattaaaaaaaaaaaaaaaagaaagaggtttaattgactcacagttccacatggctggggaagcctcaggaaaattacagtcatggc

SEQ ID NO: 923868 - DNA, 598 bp, Homo sapiens
attgctggagttccactccagaccctgtttgcctgggtgtcaccagcggaggctgcagaacagcaaatattgttgcctgatccttcctctggaaacttcgtcccagaggggcaaccgcctagtgaggtgtctgttggcacctattgggagatgtctcccagttaggctacacaggagacagggaccaacttgaggaggtagtctgtccattctcagagctcagacgccgtgctgggagaaccactgctctcttcagagctgtcagacagggacgtttaaatctgcagaagttgtctgctgccttttgttcagctatgtcctgcccacagaggtggagtctagaggcagtggaccttgttgatctgtggtgggctccgcccagttcragcttcccggtcgctttgtttatctactcaagcctcagcaatggtggatacccctcccctagccaggctaccacctcgcagattgatctcagactgctgtgctagcagtgagcaaggctccgtgggtgtggaaccctccgaggcaggcatgggagagaattaccttgtctgctggttgctaagaccttgggaaaagcacagtatttgggcag

SEQ ID NO: 923869 - DNA, 621 bp, Homo sapiens
aatgacaaaaacaaggggaaaataatctaagctgggacatcagagcctacactgccagggaaatagagttcacagaactagttcagccgagtcgctaaacaaacagatgaaacaaacagagagcaaaaacaagccccagtcgggggagaggggtagagtcagtacacagattagctacaatacattgtctaaaatcgtcaagattttaacaacaacaaaaaaatacagaacatgcggagacataggaaagatgacccatattcaagggtttaaagaggaagcaaaagaaattgtctttgaggtgatatagatgttagactcagcaggcaggcttcaaagcagctattataaatatgttcgtataactaaaggaaagcctgtttaaagacttaaaagaaaatatagttttagctctytgaggaattgccacactgatttccacaatggttgaactaactcaccctcctgccaacagtgataagcactcccttttcttggcaacctctccagcacctgttattttttgactttttagtaaatggccattctgaatggtgcgaggtggtatctcattgtggttttgatttgcacttctctaataatcaatgatattgatggttt

SEQ ID NO: 923870 - DNA, 635 bp, Homo sapiens
agaaagaacaggtttgaaataaaagataaattgttctgtactgagttccaaatacctgtagaaaaccaagaaaacgtgttcagcaggcaatagtttaactgggtctgaagttcagaaaagacatatgtgttggaaataaaaatttcgaaaatgtcagaatgtggatggaaaattaaacctactgaaatagatatgctcttacatttagaggagactgtgaccaataccaacactgaagacctggacagatgaagatgagaacacaaggaaaactgagaggaaggggccagagagttatggaagaaaccaggagtatataacaacacataagccaacgaggagattttcttaagttagaggaagttatttccagtgtcaaatgctgtgagggggttaaatatgattatgcctgaaaagcatctatttaataaattttgcaacaagcttattccttgtgacctataggagtaggctcagaasagtagcaggagaataactcagattactttgggttaaagagtgattgagaggtgaataaatgaaagtaacatatagacttcttatttcagtaaggtttgctgtaaagagaaagaaaaatgaggcagtagctaaaggaagatctggggtccatggga

SEQ ID NO: 923871 - DNA, 577 bp, Homo sapiens
gcccatgtgagagaacctaagataattactaataacccgggactcctggggaaaaacagaggaggcaccacagagcccattcttggaaaaacctctgttttcctcatgaaactccaggggcaaaaatgaaggtttaaacaagttgaaaatgttttgtgargggttggtcttgtaaagaaagttctgtgggtagaagcaattggctaaggcttgaaggggattatttaatttatttcaataggttgaacattaaaataaaagcacactaatgcagggccagaatctgggcccatgtgtctgaatcacagggttttcttagaaaactgatctgctatttaacagaaaattgtaagttctaaaaagttgatgaaaatcttaccttatggtcaaactaattaaaattggatagatttataaaattttatttaaaaactagctatagcattaaagatgcactaatggaaacatgaaatctggttttttcttttgaaaaaaatttttatgtcatattgagacaatggaagatttttgtttgccttttgagtaaactacaaaaagtggggagggagagaagaga

SEQ ID NO: 923872 - DNA, 617 bp, Homo sapiens
aaaatataataaaagatgcaaaaggagacattaaaactgataccacagaaattcaaaaggtcattagtagctactgtgagcaacggtatggcaactgtatgaactaatttacaaattagaaaatctagaggaactagataaattcctagacacatacaacctataaaggttgaaccgtgaagaatccaaaacctgaacagaccaataacaagtaacaagatcaacactgtaataaaatgtctcccggggtaaggccaaggtggccgacaagaagcagtcccatttggaggctctccttgaaaaaaaaccataataagtatgtgaatccttcaccagcaaccaaggtatccaggttttctcatgaaaattgaatagaaggctggcatgacccacagagagaaggaagagcagtgtggtgcagcagcccacctgagaaccacaagaggaagatgacccctcacccccagccaarggaggtggtgagtgagcacgctacctagccggggaaactgtggctttttccacagaactgtgcaacccagggattggaagttcccactcgcgtacccacgccaccaggacctagcatcccaaccctggaacacacagattcttac

SEQ ID NO: 923873 - DNA, 580 bp, Homo sapiens
agaatctatatggaacttaaatcaacaagcaaaaagcaaatcaccccattaataaatgggcaaaggacatgaacagacacttctcaagagaagacacacaagcaaccaacaaacatatgaaaaaaaaatgctacacatcactagtcatcagagaaatgcaaatcaaagccacaatgagataccatctaacaccaatcagaatgcctgttattaaaaagtcaaataataatatatgctggagaggctgcagagaaaaggggacacttatacattrttggtgggaatgtaaatgacttcagccacagtggaaagtagtttggagatttgtcaaaggacttaaaacataactatcatccaatccagcaatcccgttactgggcatatacctcccaaaaaacccaaagtgttctgccaaaaagacacatgcactggcatgttcattgcagcactattcacaacagcaaagacatggaatcaacctaggtggccataattggtggactgggtaaagaaaatatattacatatacactatggaatactacacagccaccaaaaagaatgaaataatgtcctttgca

SEQ ID NO: 923874 - DNA, 577 bp, Homo sapiens
ggacatgatgttaaataaaataagagaagcacagaatgataaataccacatgttctcatgcatgagagagctaagaaaaagtagagtacaatcgtgggtattagaggcggggaagggtggcggggcagggaggatggggagatgctgattaacaattacggaattrccgttggataagaggaatgagttcaggcgttctgcagcatcacaggggggatgtggttaaccagaatttattgtacattttcaaaaagctagaagagaggatttttaatgttcacaacacaaagaaatgatccaagtttgaggtgatggatgtgctaattcccctgaattattatacatggtatacacatatggaaatactactctgcatcccataaatatgtacaattattacgtgtcaactaaaaattaaagaaaaaagtggaaacaactcaaatgtctatcaactgatgaaaggatagataaaatgtgttatatccacactattattgggtaatatgataaaggactgatgcatgctactatatggatgaaatttgaaaacattatcctaagcaaaagacagacccaa

SEQ ID NO: 923875 - DNA, 560 bp, Homo sapiens
atggaatcacaaaagatctcaaatagccaaagcaatcttgagcaaaaataacaaagttagagtcacaatactctgatttcaaaatataaagtgattataattaaaacgtcctggggctggcacaaaagcggacacatcactcaatggaacaggatggaaagtttggaagtacgcccatgtgtttatgaacaattgatttttgaaaaaggtgccaagaacacaggatgaagaaaggacagtctcttcaataaaygatattgaaacaagtggatatccacatgcacatgtgtgaaattgaacccttatctcacaccatgtacaaaaacgaactcagattaaaaagttaaacataagacctgcaactataaaactgctagaagaaaatatatgggcaaagctccatgacattgatcttggcaataatttttttgaatatgacataaaaagcacagacaaaaaagcaaaaatagacaaatgggattacatcaaactaaaaagcttctgtacagcaaagaaaacagttaacaaggtgaaggactacccacagagtgagagaaaat

SEQ ID NO: 923876 - DNA, 560 bp, Homo sapiens
atggaatcacaaaagatctcaaatagccaaagcaatcttgagcaaaaataacaaagttagagtcacaatactctgatttcaaaatataaagtgattataattaaaacgtcctggggctggcacaaaagcggacacatcactcaatggaacaggatggaaagtttggaagtacgcccatgtgtttatgaacaattgatttttgaaaaaggtgccaagaacacaggatgaagaaaggacagtctcttcaataaatgatattgaaacaagtggatatccacatgcacatgtgtgaaattgaacccttatctcacaccatgtacaaaaacgaactcagattaaaaagttaaacrtaagacctgcaactataaaactgctagaagaaaatatatgggcaaagctccatgacattgatcttggcaataatttttttgaatatgacataaaaagcacagacaaaaaagcaaaaatagacaaatgggattacatcaaactaaaaagcttctgtacagcaaagaaaacagttaacaaggtgaaggactacccacagagtgagagaaaat

SEQ ID NO: 923877 - DNA, 634 bp, Homo sapiens
ctccaaaatacatcacatgtgaagccacaagacaagttttaacaaatttaaggagatcaaaattgtatgaagtatcttttctgaccacaatgaagtggaactagaaatcaataatgaagaaaggtggacaattcacaaatacatggaaactaacataatcttaaaaactactggatcaaaaagagaattttaaatacatcttgaactgaataaaactgaaaaaacatactaaaagttatgggatgcaataaaagcagtagtatgaagaaagtttgtagtgataaatgcctaaatttaagaagtggaaagatatcaaataaacaacctaactgtacacatcaaggaactagaaaaagaagmagcagctaagccaaagctggcaaaaggaagaaaataatagggattagaatagaaaaaagtcaaacggaaagtagaaaaactatagaaaaataccaaaaataaaaattgccttttagagaagaataaaattggcaaactcttagctatactaagaaaaaaagtaaagaaacaaaagcagaattaaagaggagacattacaacagatccctcgaaataaaaaggatcataagagactattatgaacaattatatgccaacaaattggataacatag

SEQ ID NO: 923878 - DNA, 647 bp, Homo sapiens
tctcatgattagattgatgatgagcttcaaggtaggcactttcagccggaatattatataggtgatgagttcttctcaaggtactcactcacaatgtctgtctgcccctcgttggtgatgctaactttgatcatctgcttgaagtgttgtctgatttgtttaccatatagtcactgtttttttctttttacaacctcaaccaatatgcagtctgttggaggatactgaaggtcatgctaatagcctgctcctcatcaccatttctccccagatttagcatccgttgatgattcttgccagatccaaactttattgtgatggttgcaaaatgatgattttctagctgtaacatttcttccatgtgtaccagtgggcttggcattctgctgtaaggtagagttctcccttctctcttacrtatttgtttacccatttattatggactcaggggttctgatttttcaatggtctgtaatgttactatccttaattattgtggtgctcaaattgtccgatttttggccagtgggcccccgcttcccatgtccttaggggatgtcctcatcattttttttttggagaacctctttcctttttggcattaaaaaatgttccaggcccatcttgtatctgccctgccttcactc

SEQ ID NO: 923879 - DNA, 608 bp, Homo sapiens
aaagcttcctccttacgtattttaagctcaacctgaaatatttgaagttctggacatcgtgaactatagccaatggaggtgtaaacagactgtagcctacacttgtgccaattcaccaagttttggtcaatcaaatgtagtcaactgtttgaaccatatttaaataaggcacatgccaactggtaaccggctgttttgtacctcacttccattttctggacatcactttcctttttctgtccataaatcttctaccacgtggctgtgctggagtctctgagcctactctggcttaggaggctgcccgattcaygtgttcattgctcaattcaactcctttaaatttatttatttatttattttgacagggtcttactctgttgcccaggctggagtgcagtggcgtgatctcggctcactgcagcctatacctcccaggctcaagagattctccagcctcagcctctcaagtagctgggactataggcacatgccaccactcctggctaatttttgtatttttctgtagagacagggcttcaccatgttgcccaggctggtcttgaacccgtgagctcagcgatgctcctgcctcagcctcccaaagt

SEQ ID NO: 923880 - DNA, 610 bp, Homo sapiens
ttgggtattgatacttctgtatgcttcacgaaattcttgtgctgtgtttttcagttccatcaggtcatttatgttcttctctaaattggttattctagttagcaatttctctaaccttttatcaaggttctcagcttccttatattgggttagaacatgctcctttagcttggaggagtttgttattacccaccttctgaagcctacttctgtcaattcgtcaaactcattctctgtccagttttgttcccttgctggcgaggagttgttatcctttggaggagaagaggcattctggtttttggaattttcagtctttttgtgctggtttttcctcatcttcgtgtatttatctaccattggtctttgctgttgrtgaccttcggatggagtttttgtgtggtcgtccttttagttgatggtgatgctattgcttcctgtttgttagtgttcctctaacagacaggcccgtcttctgcaggtcttctggagtttgctggggttccaatccagaccctgtttgcctgggtatcaccagcggaggctgcagaacagcaaagattgctgcctgctccttcctctggaagctttgtctgagaggggcacctgc

SEQ ID NO: 923881 - DNA, 603 bp, Homo sapiens
aaggaaagaggtttaattgaatcacacttcagcatggctgagaaggcctcaggaagcttacaattgtggcagaaggggaagcaacacattcttcttcatgtggtgtcaggaaggagaagtgctgagtgaagagggggaaaagccccttataaaaccatcagatcttatgagaactcacttactattatgagaacagcatgaggtagccacccccatgattcattacctccacctggtccctcccacgacacatggggattatggggactacarttcaggatgagatttgggtggggacacagccaaaccatatcacttatctttcaaataaatattttttccatgctgtttcttgaatggagaaaacttcccacatcactggctcctgctcttatcttcactaccacttcactacttccctcactcctaccacccatgttcacaagatcatagtgaaatgtaatacatcaatgtgtgcaaaatagttggactcatactgatgtcttggtgaacattctgtgactttcccttcatgcccacagatttaactgcatccaacactgataggaagtttcccatgattaagtttactcaccaacactt

SEQ ID NO: 923882 - DNA, 535 bp, Homo sapiens
cacaaaaagctcaggaccagacagattcatagccgaattctaccagaggtacaaagaggagctggtaccattccttctgaaattattccaaacaatagaaaaagagggaatcctccctaaatggcatcatcctgataccaaaacctggcagagacataacaaggaaaattttaggctaatatccctgatgaacatcagtgtgaaaatcctcaataaaatactggcaaaccraatccagcagcacacatcaaaaagcttatccaccacaatcaagtcagcttcatccctgggatgcaaggctggttcaacatacacaaatcaacaaacataattcatcgcataaatagaaccaatataaacaaattctactataaagacaaagaccacatgattatcacaatagatgcagaaaaggcctttgataaaattcaacatcccttcatgctaaaaactttcaataaactaggtattgatggaacatatctctaaataataagagctatttatgataaacccatagccaatatcatactga

SEQ ID NO: 923883 - DNA, 716 bp, Homo sapiens
agtgagagacgccagacacgaaaggacacacaaggcaggtggctcacgccagtaaccctggcactttgggaggcggaggtgggtgggtcacttgaggtcaggagttcgagacaagcctgggcaatatggtgaaacctcgtctctactaaaaatacaaaaattaggccaggtgcagtggctcacgcctgtaatcccagcactttgggaggccgaggcgggcggataacaaggtcaggagatcgagaccctcctggctatcatggtgaaaccccgtctctactaaaaatacaaaaaaaaaaatcagccaggcgtggtggcgggtgcctgtagtcccagctacttgggaggctgaggcaggagaatggcgtgaacccaggaggcagagcttgcagtgagccaagatcgtgccactgcactccagcctgggcctcggagtgtgactctgtctcaaaaaaaatacaaatattagctgagtgtggtggtgcacgcctgtaatcctagctastcagaagtctggggcaagagaatcacttgaacctgggaggcggagattgcagtgaactgagatcgcgacactgcactccagcctgggcgacagagtgagattctgtcttaaataataataataaacgaaagccacatagtatgtgattccacttctatgaaatgtccaggacagacccatttacagacaggaggggatgcgtgggggccag

SEQ ID NO: 923884 - DNA, 806 bp, Homo sapiens
gcacctcaactaccagcactgtcttggaactttctcaattaaaacccacgagaagccgggtgcagtggctcacgcctgtaatcccagcactttgggaggccgaggcagtcggatcatgaggtcaggagatagagaccatcctggctaacatggtgaaaccccgtctctactaaaaatacaaaaaattagccgggcgtggtggcaggcgcctgtggtcccagctactcgggaggctgaggcaggagaatggcgtgaacctgggaggcggagcttgcagtgagctgagatcctgccgctgcrctccagcccgggcgacagcgagactccatttcaaaaaaaaaaaaaagaaaaaagccagactccctgggctcggctcccagccctgccagggcctctgtggcctcagcctgcacgtcccgcccatgttgacctgtttcttcggggaccggtgccgggtctgtggctggccctcaggaagagggggctgccacagccggttcccgtttatatgctcagggcacagccagtctctgcagaggtgatgggctgtggagtcccggctgggcccttgaggaaggccgcctaattgggaggggggcacacaggccacctgcagacgcgcccaggtctgccctgagtgccaggggagcaatggttcaggggcagggaggctgcacgggagcctacacctgagctgggccttgagcttccaggctgggtcggaggtgaaaacacagacaccccacccctcagtgtctcagaaggaggtaggggagaagggtgggtccccagcaggcagcaaggga

SEQ ID NO: 923885 - DNA, 806 bp, Homo sapiens
gcacctcaactaccagcactgtcttggaactttctcaattaaaacccacgagaagccgggtgcagtggctcacgcctgtaatcccagcactttgggaggccgaggcagtcggatcatgaggtcaggagatagagaccatcctggctaacatggtgaaaccccgtctctactaaaaatacaaaaaattagccgggcgtggtggcaggcgcctgtggtcccagctactcgggaggctgaggcaggagaatggcgtgaacctgggaggcggagcttgcagtgagctgagatcctgccgctgcactccagccygggcgacagcgagactccatttcaaaaaaaaaaaaaagaaaaaagccagactccctgggctcggctcccagccctgccagggcctctgtggcctcagcctgcacgtcccgcccatgttgacctgtttcttcggggaccggtgccgggtctgtggctggccctcaggaagagggggctgccacagccggttcccgtttatatgctcagggcacagccagtctctgcagaggtgatgggctgtggagtcccggctgggcccttgaggaaggccgcctaattgggaggggggcacacaggccacctgcagacgcgcccaggtctgccctgagtgccaggggagcaatggttcaggggcagggaggctgcacgggagcctacacctgagctgggccttgagcttccaggctgggtcggaggtgaaaacacagacaccccacccctcagtgtctcagaaggaggtaggggagaagggtgggtccccagcaggcagcaaggga

SEQ ID NO: 923886 - DNA, 806 bp, Homo sapiens
gcacctcaactaccagcactgtcttggaactttctcaattaaaacccacgagaagccgggtgcagtggctcacgcctgtaatcccagcactttgggaggccgaggcagtcggatcatgaggtcaggagatagagaccatcctggctaacatggtgaaaccccgtctctactaaaaatacaaaaaattagccgggcgtggtggcaggcgcctgtggtcccagctactcgggaggctgaggcaggagaatggcgtgaacctgggaggcggagcttgcagtgagctgagatcctgccgctgcactccagcccgggcgacagcgagactccatttcaaaaaaaaaaaaaagaaaaaagccagactccctgggctcggctcccagccctgccagggcctctgtggcctcagcctgcacgtcccgcccatgttgacctgtttcttcggggaccrgtgccgggtctgtggctggccctcaggaagagggggctgccacagccggttcccgtttatatgctcagggcacagccagtctctgcagaggtgatgggctgtggagtcccggctgggcccttgaggaaggccgcctaattgggaggggggcacacaggccacctgcagacgcgcccaggtctgccctgagtgccaggggagcaatggttcaggggcagggaggctgcacgggagcctacacctgagctgggccttgagcttccaggctgggtcggaggtgaaaacacagacaccccacccctcagtgtctcagaaggaggtaggggagaagggtgggtccccagcaggcagcaaggga

SEQ ID NO: 923887 - DNA, 621 bp, Homo sapiens
actatgctgcagtctgggcgacccctgcctgaaagaaagaaagagagagatgaagaaagatctggaacaatataagtcacacttgaggggggaatggtggaagtgatgcggcgtccaggttatttatcctcatttgaattttttataagaaaaatgtgtttgccgggtgcggtggctcaagcctgtaatcccagcactttgggaggccgaggcgggcggatcacgaggtcaggagatcgagaccatcctggctaacaccagtagtgaaaccccrtctctactaaaaatacaaaaaattagccgagtgtggtggcgggcacctgtagtcccagctactcaggaggctgaggcaggagaatggcgtgaacccgggaggcggagcttgcagtgagccgagatggtgccactgcacccccgcctgggcaacagagcgagactccgcctcaggaaaaaaaaaaaaagaaagaaaaatgtgttcacctactacctacgtaacaaaattacagttacaagaccattttaaacatcacacacacacacacacacacacacacacacacacacacacacacacacggtagacgtgtatggtcatgcacagagtgagatttggggtcagca

SEQ ID NO: 923888 - DNA, 542 bp, Homo sapiens
aagacaccaaaatcacaagtgaccaaaaaaaaaaaaaaaaaccaaatggataaacaacttcaccaaaattaaaaacttttgtgcttcaaaggacgcccccaagaaagtgaaaggacaactgagagaatagragaaaatatctgaaaaataatctatctgataaggaacttcttctcagtataaagaacgtttaaaactcaataaggaagagagaatcccattgaaaaataggcaaaggatctgaacagacatttctccaaagaggacagacaaatggccaataagcacaggaaaagatactcaatgtaatatcaggcaaaagcaagcaaagtccacactacgataccacttcctaatcagagaataaaaactgtgctcaaaaagacagtaacaagtgttgacaagaacgtggacaaagtggaactctcctgtgccctgccggtgggaatgtcaaaatagtgcagccactttggaaaatagtccagcaattcctccaaaagttaaatagtatttaaccatgtgacccaggtcagggtcctaat

SEQ ID NO: 923889 - DNA, 542 bp, Homo sapiens
aagacaccaaaatcacaagtgaccaaaaaaaaaaaaaaaaaccaaatggataaacaacttcaccaaaattaaaaacttttgtgcttcaaaggacgcccccaagaaagtgaaaggacaactgagagaataggagaaaatatctgaaaaataatctatctgataaggaacttcttctcagtataaagaacgtttaaaactcaataaggaagagagaatcccattgaaaaataggcaaaggatctgaacagacatttctccaaagaggacagacaaatggccaataagcacaggaaaagatactcaatgtaatatcaggsaaaagcaagcaaagtccacactacgataccacttcctaatcagagaataaaaactgtgctcaaaaagacagtaacaagtgttgacaagaacgtggacaaagtggaactctcctgtgccctgccggtgggaatgtcaaaatagtgcagccactttggaaaatagtccagcaattcctccaaaagttaaatagtatttaaccatgtgacccaggtcagggtcctaat

SEQ ID NO: 923890 - DNA, 481 bp, Homo sapiens
atctcttagaactgctaaactctttaacaaatgacaaattgctggaggaaaaacaagaactcttttcattgccggtggaacacagtgtataagaccaaaatatgccaccccaaaatataatggtaggaaaccagaatatgcaaccccaaaatatgtccctttggcttaagaattattccaagctaattattttgaaaaaaaaaaacgctaacaaaggaagttgtgaaaacagagtagaagttacacttgtgtaaggaaaatttacatctataaaggaaatcaccatttaaaagctacctctctcgacaccaagaagagaaggataactaaatcactraagagtcttatcaatggagaatgcatggacttaagtctgtataacgaaccttacccttgtctaatgtgcttttgctggttaactccccaatactgcacctcaaatcttctttctttaagttgaagacagtacttatgcttgaat

SEQ ID NO: 923891 - DNA, 567 bp, Homo sapiens
ctcccagaaacaaacccaaatcttactatatattatggcacgttatgatgatgagcagtgatgagcagccgaagcctcaaggaagggatgcttttgtaaaacaagacttgtagaatataacgtgtgaaagtaaagcacatggcagagctccctcctcagcacacrcggagcagacaggaagcttttgcctcaccttcctcaatggcctgcagccacgtctcccaggtcagtcttaaggacaacgaaactctggtcttcactgtggacacgccacactaccaggtgctccaaagccatggtgactcaccctcgggtgggtcctgagcacaacaaagctctggttctaatcctaaccctaaccctgtcccaagactttgaccctgaaccgaaatcctgatccctaccctggtccctaattctgacccttactttgaccctgactttgatcttgaccctggccatgaccccacctctaaccatacttccggccctgactctgacccagatcctaatcctatgcctaaccctattattatcatttacaatctaactctaatcttaccctct

SEQ ID NO: 923892 - DNA, 567 bp, Homo sapiens
ctcccagaaacaaacccaaatcttactatatattatggcacgttatgatgatgagcagtgatgagcagccgaagcctcaaggaagggatgcttttgtaaaacaagacttgtagaatataacgtgtgaaagtaaagcacatggcagagctccctcctcagcacacgcggagcagacaggaagcttttgcctcaccttcctcaatggcctgcagccacgtctcccaggtcagtcttaaggacaacgaaactctggtcttcactgtggacacgccacactaccaggtgctccaaagccatggtgactcaccctcgggtgggtcctgagcasaacaaagctctggttctaatcctaaccctaaccctgtcccaagactttgaccctgaaccgaaatcctgatccctaccctggtccctaattctgacccttactttgaccctgactttgatcttgaccctggccatgaccccacctctaaccatacttccggccctgactctgacccagatcctaatcctatgcctaaccctattattatcatttacaatctaactctaatcttaccctct

SEQ ID NO: 923893 - DNA, 618 bp, Homo sapiens
accagatgtggtttcattgcttgaggaaattaacatatctcctggtacctggtatgcagccaatgatttgccaaatgcctttttctccattcctgtccataaggcccaccagaagcaatttgcgttcggctggcaaggccagcaacacacctttactrtcctacctcaggggtatatcaactctccagatttgtgtcataaccttgttcaaagagaccttgatcgcttttcacttccacaagttatcacactggcccataacattgatgacattatgctgattggatccagtgagcaagaagtagcaaacacactggacttattgatgagacatttgcatgccagaggatgggaaataaatccgactacaattcagggaccttctacctcagtaaagtttctaggggtccagtggtgtggggcctgttgagatattccttctaaggtaaaggataggatgctgcatttggcccctactacaaccaagaaagaggcacagcacaagttggcctatttggattttggaggcaacaaattcctcatttggttgtgttactccagcccatttatcgagtgacccaaaaggctgccagttttgagtgggatccagaacaggag

SEQ ID NO: 923894 - DNA, 736 bp, Homo sapiens
agatgtggtttcattgcttgaggaaattaacatatctcctggtacctggtatgcagccaatgatttgccaaatgcctttttctccattcctgtccataaggcccaccagaagcaatttgcgttcggctggcaaggccagcaacacacctttactatcctacctcaggggtatatcaactctccagatttgtgtcataaccttgttcaaagagaccttgatcgcttttcacttcyacaagttatcacactggcccataacattgatgacattatgctgattggatccagtgagcaagaagtagcaaacacactggacttattgatgagacatttgcatgccagaggatgggaaataaatccgactacaattcagggaccttctacctcagtaaagtttctaggggtccagtggtgtggggcctgttgagatattccttctaaggtaaaggataggatgctgcatttggcccctactacaaccaagaaagaggcacagcacaagttggcctatttggattttggaggcaacaaattcctcatttggttgtgttactccagcccatttatcgagtgacccaaaaggctgccagttttgagtgggatccagaacaggagaaggctctgcgacaggtccaggctgctgtgcaagctgctctgccacttgggccatatgatccagcagatctaatggtgcttgaggtgtcagtggcaggcagggatgctgtgagaagccttt

SEQ ID NO: 923895 - DNA, 675 bp, Homo sapiens
aagagaagactagggactggttcaaagatggttctgcatgatatgcaggcaccacccaaaagtggacagctacagccctatagcccctttcctgaaggacactggtgaaggaaaatcttcccagtgggcagaacttcgagcagtgcacctggttgtgcackttccaaggaagtagaaatagacagatgtgtgataatactgattcatggactgcagccaatggtttggatgacggtcagggacttgaaagaagcatgattggaaaactggtgacaaatttggggaagaggtatgtggatggacctctctgagtggtgaaaaaatgaagttatttgtatcccctgtgagtactctaccaaagggtgacctgagcagaggaggattttaataatcgagtggataggatgacttgttctgtggacaccacacagcctccttacccagccgcccctgtcatcacccaatgggtccatgaacaaagtggccatggtgacagggatggtggttacgcatgggctcagcaacatggacttccactcaccaaggctgacctggctaaggccactgctgagtgcccaacttgccagcagcacagaccaacactaagcccttaatatgacaccagtccttggggtgatcagacagctaattggtggcaggttgattacactggac

SEQ ID NO: 923896 - DNA, 617 bp, Homo sapiens
caaagatggttctgcatgatatgcaggcaccacccaaaagtggacagctacagccctatagcccctttcctgaaggacactggtgaaggaaaatcttcccagtgggcagaacttcgagcagtgcacctggttgtgcacgttccaaggaagtagaaatagacagatgtgtgataatactgattcatggactgcagccaatggtttggatgacggtcagggacttgaaagaagcatgattggaaaactggtgacaaatttggggaagaggtatgtggatggacctctctgagtggtgaaaaaatgaagttatttgtatcccmtgtgagtactctaccaaagggtgacctgagcagaggaggattttaataatcgagtggataggatgacttgttctgtggacaccacacagcctccttacccagccgcccctgtcatcacccaatgggtccatgaacaaagtggccatggtgacagggatggtggttacgcatgggctcagcaacatggacttccactcaccaaggctgacctggctaaggccactgctgagtgcccaacttgccagcagcacagaccaacactaagcccttaatatgacaccagtccttggggtgatc

SEQ ID NO: 923897 - DNA, 580 bp, Homo sapiens
gtgacctgagcagaggaggattttaataatcgagtggataggatgacttgttctgtggacaccacacagcctccttacccagccgcccctgtcatcacccaatgggtccatgaacaaagtggccatggtgacagggatggtggttacgcatgggctcagcaacatggacttccactcaccaaggctgacctggctaargccactgctgagtgcccaacttgccagcagcacagaccaacactaagcccttaatatgacaccagtccttggggtgatcagacagctaattggtggcaggttgattacactggacctcttctatcatggaaagagcagaggtttgtcctcactggaatagacacctactctggatatgagtttgcctctcctgcacgcaatgcttctgccaagactaccacccgtggactcgcggaaggccttatccatcatcatgctactccacacagcattgcctctgaacaaggcactcactttacggcaaaagcagtgcggcagtgggctcatgctcatggaattcactattcttaccatgttccccatcatcttgaagcagctggat

SEQ ID NO: 923898 - DNA, 600 bp, Homo sapiens
tagtgtcttaatcaacccttacaaacccatgaagtaagtaaaagaataacactttacagatgagaaaaacggaggctccaaacatgtatgcatctcactggagatctaggcaccactgaggatatggcacagtggaacctcgcacccaggtgtgttggagtctgaaaattacttttttttccattgcattacacatctgatgagacacraacacacaacccactgtgaaagattgcccacaattatgaaaatacaggaggtttggaatgcggcatgcctgccgcctcacttttcattaagccccagtcagaactcaggggtaatagtgatccactctcctgtcacccaactcacgttaccgtgtcacttaattctcagagtggggagagggactttggaaatattggatagctatttagcacgggcccttgacaacctgcctaatggagatgtctgagtttgttcatttgtcatggtcttcatctgaatccagacagtaaatgctaagttaaaatttagagccaggaaataagtccagtttccactctcagtaggtgccacttacatgctcctcagccacatctgtcgagatgaagtggc

SEQ ID NO: 923899 - DNA, 600 bp, Homo sapiens
tagtgtcttaatcaacccttacaaacccatgaagtaagtaaaagaataacactttacagatgagaaaaacggaggctccaaacatgtatgcatctcactggagatctaggcaccactgaggatatggcacagtggaacctcgcacccaggtgtgttggagtctgaaaattacttttttttccattgcattacacatctgatgagacacaaacacacaacccactgtgaaagattgcccacaattatgaaaatacaggaggtttggaatgcggcatgcctgccrcctcacttttcattaagccccagtcagaactcaggggtaatagtgatccactctcctgtcacccaactcacgttaccgtgtcacttaattctcagagtggggagagggactttggaaatattggatagctatttagcacgggcccttgacaacctgcctaatggagatgtctgagtttgttcatttgtcatggtcttcatctgaatccagacagtaaatgctaagttaaaatttagagccaggaaataagtccagtttccactctcagtaggtgccacttacatgctcctcagccacatctgtcgagatgaagtggc

SEQ ID NO: 923900 - DNA, 600 bp, Homo sapiens
tagtgtcttaatcaacccttacaaacccatgaagtaagtaaaagaataacactttacagatgagaaaaacggaggctccaaacatgtatgcatctcactggagatctaggcaccactgaggatatggcacagtggaacctcgcacccaggtgtgttggagtctgaaaattacttttttttccattgcattacacatctgatgagacacaaacacacaacccactgtgaaagattgcccacaattatgaaaatacaggaggtttggaatgcggcatgcctgccgcctcacttttcattaagccccagtcagaactcaggggtaatagtgatccactctcctgtcacccaacwcacgttaccgtgtcacttaattctcagagtggggagagggactttggaaatattggatagctatttagcacgggcccttgacaacctgcctaatggagatgtctgagtttgttcatttgtcatggtcttcatctgaatccagacagtaaatgctaagttaaaatttagagccaggaaataagtccagtttccactctcagtaggtgccacttacatgctcctcagccacatctgtcgagatgaagtggc

SEQ ID NO: 923901 - DNA, 600 bp, Homo sapiens
aagagaaagaattggggttttgttttatgattattcttgctactgcttataaatgcattgagaggaaacaagagtagaagcagagaggcttgtcgggaggctattgtcatctgattcaggattgggtaataaagaaaataggggttgagtggttaattttatgtgtcaacttggctgggccatggtgcctagatatgttgtaaaacactgttggagatgtttccgtgagagattgtttggatgagatcagcatttaaatcagtagattttgagtacagyagattgccttcaaaatgttggtgggcctcatccaatcagttgaaggcctgaatagaacaaaaagactgatcttccccaagcaagagtgaattacacagatggccttcagacttgaactgcaacattggcctgtccctgggtctccagcctgctgaccaaccctgcagattttgcatttagtagcctccataattgtatgagccaatttcttaaaataaatctccctctctcactccctctccacacacacacacacacgcacacacacgtgtacatgcacatacacatacactctattggttccatttctctggggaaccc

SEQ ID NO: 923902 - DNA, 654 bp, Homo sapiens
ccagtggaactttttctcccctggccaaggagttcagcctggcctgaaccgggggaaggctataatgattaaaggaacctatttgcacagagcaagaggttctttccccaggacctcccctttttgccccttaagctgtgtttttctttcttttatttttttccttttctaatcgagagggttccttttcccagcacgctgcttctgatagagaaaataatggaggagcgacccctgctggctgataactgcaaattcggcagggcccatttgagacaatctaaacaagatacmtgcagcccctgaaatccgtttttgtcccaaactcaattccaggtttcaggctgagggcctagaaaggaaaacccgatctgcccgatctgagggatcaaaagtcaggcaacaggcacaatgtaaatgggcaggacaaattcctgctgactaaacccccacttcatggagggaggccatgctccaggcataaatgaggcccagggaactcaaaggttttcaacagcaggggaaatagaggcataggtgaggggagataattcctattctctagccccaccctgcttcacgggtgcagaccacagtggcacctgtgggtggcatccataaagttgccaggactcagggacaacagatggaaga

SEQ ID NO: 923903 - DNA, 603 bp, Homo sapiens
cagccactggatggctgaactccaggaagaccatcttcccattccgtctcctttccagctccccatgcatcccatccccaccactcaataaaacccccacattcaccatcttcaagtctatgtgtgacctggttctttctggatgccagacaagaacctgggtaccaagagggcgttgagctggttaacacttaagccgtctgtagattgcaaagctaaaagagtgcactgtaacacacaccatgctcacgtgggctttaggagttgcaggcacccacccttatatactgctgtggggccagagccccaaagcactcacccaggctcatgcacctgcccgtctgcatgctcccccttctgtaaggagtttgagcagcagcggaggctgcggccaaactgacaagccacacccttgtcacataccctgtgagggggggtcagggaactttcccatttcactgtcatcaaaatttatttgaccataatgcaaaagtctatttccgggctcastcttctattccactggtccatgtgtctatctttatggcagtactacactacttggattactgtaactttgtaatatgttttgaaatcagcaat

SEQ ID NO: 923904 - DNA, 624 bp, Homo sapiens
agcctgagaccttaattattttccatatgggcattcccatatgatttgttgagtttccttgtagcatggtagctaggttctaagtgagaggacacagaagctgtcagccctcttcaaggttaggctcagaactggcagtgcataatttctactgtattctactgatcaaagtagtcaatggcttagcccagattcagcrgggtggagaaatctactccaccactcagagtgtatggggaatggctgcaaagaacttgtagccatctttaatcaaccacagcaattaattaaaagattcacagacaacttgaacaagtactttgcaaaaaaaggttattcaaattaccaataggcatcaaaatgtgctcaccttgtgttatcagagaaatacaagttgttatcagagaattacaagataacactacataccgatccagatggctaaaatgaaaaaagcagacaaacaaatctggcagcacaactattggggaggatgcagagcaatatagactctttaaatattgctggtgggactttaagttggtgcataacactgggaatctgttttgcgtgatccagcaagtcacccacatggctgcaagctggtactggctatcacttagg

SEQ ID NO: 923905 - DNA, 624 bp, Homo sapiens
agcctgagaccttaattattttccatatgggcattcccatatgatttgttgagtttccttgtagcatggtagctaggttctaagtgagaggacacagaagctgtcagccctcttcaaggttaggctcagaactggcagtgcataatttctactgtattctactgatcaaagtagtcaatggcttagcccagattcagcggggtggagaaatctactccaccactcagagtgtatggggaatggctgcaaagaacttgtagccatctttaatcaaccacagcaattaattaaaagattcacagacaacttgaacaagtactttgcaaaaaaaggttattcaaattaccaataggcatcaaaatgtgctcaccwtgtgttatcagagaaatacaagttgttatcagagaattacaagataacactacataccgatccagatggctaaaatgaaaaaagcagacaaacaaatctggcagcacaactattggggaggatgcagagcaatatagactctttaaatattgctggtgggactttaagttggtgcataacactgggaatctgttttgcgtgatccagcaagtcacccacatggctgcaagctggtactggctatcacttagg

SEQ ID NO: 923906 - DNA, 608 bp, Homo sapiens
atactggcttatcctcaccccaaaaccctaaagcaactaagacggttccttggcataacaggtttctgccgaatatggatttccaggtacagtgaaatagccagaccattatatacactaattaaggaaactcagaaagccaatatccatttagtaagatggatacctgaaacagaagcagctttccaggccctaaagaaggccctaaccaagccccagtgttaagcttgccaatggggcaagacttttytttatatgtcacacacaaaaaaacaggaatagctctaagagtccttacacaggtccaagagatgagtttgcaacccgtggcatacctgagtaaggaaactgatgcagtggcaaagggttggcctcattgtttacaggtagtgacggcagtaacagtcttagtatctgaagcagttaaaataatacagggaagagattttactgtgtggacatctcatgatgtgaatggcatactcactgctaaaggagacttgtggccgtcagacaaaagtttacttaaatatcaggctctattacttgaagggccagtgctgcaactgcgcacttgtgcaactcttaacccaggcacatttctttca

SEQ ID NO: 923907 - DNA, 644 bp, Homo sapiens
gaagctgtgagggaacatggcagagtctcagtgatgttccccttggccagccccataaatttgggtttgagtcctatggagaaagtggctactggcacacatgaaaggaactgttttcataagggattctgagacactgtgagacatgaggatgcaggcagggtgaggaggaggggtcttctgtccagttaggcatagggcacagcatagcttcagaacactaagaactcagaagagggcagcacgctagtgtgtgcagctttggggtggtgtcaagagtcagcatctgtggccagaacatcagtcraatctcagtggtctcccatgacagtggcagtggatattaattagctagatcctagaaaactcctcaaagagagttaatctaagtatcttctatgtattcaaccagctccaagtgtaggttgtctgggtaatattcagtccccctccaaatgttgctcttcccatttaaccaagtcatacaacttcatataaaatactggcaagagaacaggatagcttcagtatcaactcccatttgagaaaagagagaacacaatagttcctggactgtgacatatgttttttcctcctggacaggaacagcagggactccatgccttggcagtccttggtctacc

SEQ ID NO: 923908 - DNA, 740 bp, Homo sapiens
gaaatatatttatggtggattttttttttccaatcacagatatgcttgtaagcagatagtgtaccatgaacattcctctgtattaatgcaaacctttcagtgtgggagtccatgtggcatgatctcagctcactacaacctccaccatccatgctgaagtgatcctcctgcttcagcctcctgagtaggtaggactatggcatgcacccttgggcccagctatttttttaatttttttgtagagatgaggtctcactatatcacccaggctgttcttgacctcctgagctcaagcaatccatccaccgtgacctcccaaagtgctgggattacatgcgtaagccaccacccctggcccctcaaacwttttacagtctgcaaaagctactgctaaacacttcactgttaatttttggggggattcactaggtgataggaattttccaggttcataataatcttatggaactactcttctatgtatgatcagtaattgactgaatgtcattatgtggtgcatggctttaccacattttgtttatgtattcatcaattgatgaacattggggttgtttccactttttgggtactacgaataatgctgccattaacatttacataaaagtttttgcatttacgtatgttttcagtcctcttgggcatataccaagtagtggaattgttgggttatatggtaactatgttaaacgcttttaggaattttcaactgttttccaaag

SEQ ID NO: 923909 - DNA, 723 bp, Homo sapiens
aatgtctttcaaatttgtgtagttccctactctatgactgttaattttctcgatgtcattgaaagtttcctttgtttgtttatttattcattcgctctttcattcaacaagtgtttatcaagtacctactatgtgccaggcactgttttggactctggggacatatcagtggacaaaatcttaagaaagtgtgcattctagaggggagaaatgattataaacagaccaactaaaaacaaaatccaatctrccaactaatgataagtgatatgagaaaaataagccgagttcgtggaaaagagaaagctgggtgggagggctgctgctttgtattgggtggtcagtgaatactgctctgatactattcattgagcaggacctgaaggaagtgaggggtgcattatgcagatatctgggaaaagatccatttaggcagaggaaacaggaatttaaaaggtcctgagtgtgcttgatgtgttcagggaacggctggaccactgtggctggagcagaatgtgcaatgtgttcgaggatggaggaaatgacatcaaataaaacagagctgggaccagacctgggccttggtgtccactttaagggctttgacatttattccaagtgagatgggaagctatggaagaacttttagcagtgaagtgacacgatcagatttaagttttaaaaggatcattttaacttttacattgagccacagactgtagg

SEQ ID NO: 923910 - DNA, 723 bp, Homo sapiens
aatgtctttcaaatttgtgtagttccctactctatgactgttaattttctcgatgtcattgaaagtttcctttgtttgtttatttattcattcgctctttcattcaacaagtgtttatcaagtacctactatgtgccaggcactgttttggactctggggacatatcagtggacaaaatcttaagaaagtgtgcattctagaggggagaaatgattataaacagaccaactaaaaacaaaatccaatctgccaastaatgataagtgatatgagaaaaataagccgagttcgtggaaaagagaaagctgggtgggagggctgctgctttgtattgggtggtcagtgaatactgctctgatactattcattgagcaggacctgaaggaagtgaggggtgcattatgcagatatctgggaaaagatccatttaggcagaggaaacaggaatttaaaaggtcctgagtgtgcttgatgtgttcagggaacggctggaccactgtggctggagcagaatgtgcaatgtgttcgaggatggaggaaatgacatcaaataaaacagagctgggaccagacctgggccttggtgtccactttaagggctttgacatttattccaagtgagatgggaagctatggaagaacttttagcagtgaagtgacacgatcagatttaagttttaaaaggatcattttaacttttacattgagccacagactgtagg

SEQ ID NO: 923911 - DNA, 599 bp, Homo sapiens
ctgaggcaaaagaatcacttgaaccctgggatggggaggttgcagtgagctgagactgcaccactgcactccagcctgggtgacaaagtgagactacgtctcaaaaaaaactaaaaaaaactaaaaaaaaaaaaaaaaaaaaaaaaaaaaaaakattatgtgaggccagcattaccctgataacaaaattaggtaaagatgttacaagaaaggacaactacagactagtatctctcatgaacatagctgtaaaaattctcaacagaatattagcaaatctaatataacaatatataacaaaaaactatacaccacagtcaggtggcatttatttcaggtatgcaaggctggttcaacaaatcagttcatacagtccattacattatcacactaaaggagtaaggtcatgatcatatcaatacatgcagaaaagccgtttgacaaaaaaagccaacatctatttgtgattaaaaacaaacctctcagccagctaggaatataagaaaaccctcaacttcataaagaatatctacaaaaaacctacagctaacaacatacttaatggtgggacatcagatgctttcccttgaagaacagaa

SEQ ID NO: 923912 - DNA, 604 bp, Homo sapiens
ccagcaatataccttcactgtcgtacctcagaggtatatcagctctccggctttgtgtcataatcttgtttgcagagatcttgatcacttttcccttccgcaggatatcacaccagttcattagttcattacattgatgacagtatgtgaccggatctagtgagcaagaagtagccaacacactggacttattgatgagacatttgcatgccaggggatgggaaattaactaaaattcagggaccttctacctcagtaaaatttctagtggtccagtggtgtggggcctctcaagatattccttctaaggtgaaggataagttgctgcatttgccccctcctacaaccaagaaagagggacaacgcctagtgggtctatttggattttggaggcaatacattcctcattctggtrtgttactccagcccatttatcgagtgacctaaaaggctgccagttttgagtagggtccagaacaggagaaggctctgcaacaggtctaggctgttgtgaaagctgctgtgccacttgggccatattacctagcagattcaatggtgcttgagatgtcagtggcagatagggatgctatttggagccttt

SEQ ID NO: 923913 - DNA, 556 bp, Homo sapiens
cgagtgacctaaaaggctgccagttttgagtagggtccagaacaggagaaggctctgcaacaggtctaggctgttgtgaaagctgctgtgccacttgggccatattacctagcagattcaatggtgcttgagatgtcagtggcagatagggatgctatttggagcctttagcaggcccccataggtgaatcmcagcagaggcctctaggattttggagcaaggacctatcttctgcagataactactctccttttgagagacagttcttggctggttactgggctttggtagaaactgaatgtttgactatgggccatcaagtcaccatgtaacctaaactgcctgtcataaactcgtgctttctgacccatctagccataaagtggggcatgcacagcggcattccatcatcaaatcgaagtggtatatatgtgatcaggcttgagcaagtcctgagggcacaagtaagttatgtgaggaagtggctcaaatgcccatggtccctgctcctgccatctagctctctttcccccagcctgcaccagtggcctcatg

SEQ ID NO: 923914 - DNA, 486 bp, Homo sapiens
gatagggatgctatttggagcctttagcaggcccccataggtgaatcacagcagaggcctctaggattttggagcaaggacctatcttctgcagataactactctccttttgagagacagttcttggctggttactgggctttggtagaaactgaatgtttgactatgggccatcaagtcaccatgtaacctaaactgcctgtcataaactcgtgctttctgacccatctagccataaagtggggcatgcacagcggcattccatcatcaaatcgaagtggtatatatgtgatcaggcttgagcaagtcctgagggcacaagtaagttatgtgagsaagtggctcaaatgcccatggtccctgctcctgccatctagctctctttcccccagcctgcaccagtggcctcatggggagctccctgtgaacagttgaaaaaggaagagaagacaagggcctggtttacagatggttctgcatgatacg

SEQ ID NO: 923915 - DNA, 773 bp, Homo sapiens
tcctggagtttcccaaccttccgggtgcgggcggggcatgttacgtcacgtcgtttaatccggaaacggcggcggcggcgacaggaccgaggggccttagttggtgggcaagtcggggatcccagaaagagaagcgtgacccggaagcggaaacgggtgtccgtcccagctccggtgagtggcccctgctggaccgtggatcccgggcgggcgtgcgggcggcagcgtacgaggccttctactcgcccgggtgtccggtgcctcgcttctccctgggaccctgtcgtcaacatcgaggtctccaacaccaccttgctttggtgccgggcccactgactgtcctcggtgtatagtgcgaccgaatctccatcatcccgtcctcagtgtacaggatgccccagcgcccccaaccgtctccctcagcattcagggtccccaaatcctaatgccttgtcctgagcttcacagccccacattcacctgttcttggtacttagcgtttccgcccatcctgtcctcctctatcagaacccccacaattgctctgtcctcggtgcccacagtctccaaaacaccrgtgcaccggcccgcgtcatcccccgctctcagtcgtatcaaggactccagggcctcacccatagttctggagagggaagctgaacttgcaagccataacttcttttggggcatggcgatgaaggaggggctcgggccagcacttggataattttcaggtctacctgtccccctttatgtgtccccgggacaatccc

SEQ ID NO: 923916 - DNA, 720 bp, Homo sapiens
cccattccccactccccccagcccctgtaaaccactgttacactttctatgaaagaatgcatttgactattctgggtacttcacataaatggaatcatactgtgtccagaattggttccttctggtgggttcttggtctcactgacttcaagaatgaagctgcagaccttcgcagtgagtgttacagtttttaaagatggtgtgtccggagtttattccttcagatatgtccagagtttcttccttccagtgggctcgtggtctcgctgacttcaagaatgaagctgcggaccttcgtggcgagtgttacagctcttaaaggtcgtgcggacccaaagagtgagcagcagcaagatttattgtgaagagtgaaagaacaaagcttccacagtgtgraaagggacccaagcaggttgctgctgctggctcaggtggccagcttttattcccttatttggccctgccgatgtcctgctgattggtccattttacagagtgctgatttgtccattttacagagtgctgattggttcatttttacagagtgctgattggtgcgtttacagtcctttagctagacccagagtgctgattgatgcatttttacagagtgcggattggcgcatttacaatcctttagctagacacagagcgctgattggtgcgtttacaatcctctagctagacagaaaagttctccaagtccccactcagcccagg

SEQ ID NO: 923917 - DNA, 802 bp, Homo sapiens
ctcacatcactcttatctacattaaatttttaaaaagcttttaatttttgtgggtacataataggtgcatatagtcatgggtacatgagatgttttgatacagacatgcaatgtgtaataatcacatcatggagaaagagtatccatcccctcaagcatttatccttcatgttaaaaatccaattacactcttttagttacttaaaaatgtacaattggccgggtgcggtggctcacgcctgtaatcccagcactttgggaggccgaggcgggtggatcatgaggtcaggagatcgagaccatcctggctaacaaggtgaaaccccgtctctactaaaaatacaaaaaattagccgggcgcggtggcgggcgcctttagtcccagctactcgggaggctgaggcaggagaatggcgtgaacccgggaagcggagcttgcagtgagctgagattgcgccactgcagtccgcagtccggcctgggcgacagagcragactccgtctcaaaaaaaaaaaaaaatgtacaattaaattattacggactgtagtcaccctgttgtgctttcatatagtaggtcttattcattctttctatttttatgtgtatccattaactgttcccacatttgatctcttcccactcattcctctaattctctgtgccccactttccctgcatagaggaatttgcattctcatactcatgggaaccgtagggctaaaggcatcctgtctgttgggcatttcctcctcgccctctccctaaactggatgaggacctggttccagaaagaatgggtcc

SEQ ID NO: 923918 - DNA, 802 bp, Homo sapiens
ctcacatcactcttatctacattaaatttttaaaaagcttttaatttttgtgggtacataataggtgcatatagtcatgggtacatgagatgttttgatacagacatgcaatgtgtaataatcacatcatggagaaagagtatccatcccctcaagcatttatccttcatgttaaaaatccaattacactcttttagttacttaaaaatgtacaattggccgggtgcggtggctcacgcctgtaatcccagcactttgggaggccgaggcgggtggatcatgaggtcaggagatcgagaccatcctggctaacaaggtgaaaccccgtctctactaaaaatacaaaaaattagccgggcgcggtggcgggcgcctttagtcccagctactcgggaggctgaggcaggagaatggcgtgaacccgggaagcggagcttgcagtgagctgagattgcgccactgcagtccgcagtccggcctgggcgacagagcgagactccgtctcaaaaaaaaaaaaaaatgtacaattaaattattacggactgtagtcaccctgttgtgctttcatatagtaggtcttattcattctttctatttttatgtgtatccattaactgttcccacatttgatctcttcccactcattcctctaattcyctgtgccccactttccctgcatagaggaatttgcattctcatactcatgggaaccgtagggctaaaggcatcctgtctgttgggcatttcctcctcgccctctccctaaactggatgaggacctggttccagaaagaatgggtcc

SEQ ID NO: 923919 - DNA, 674 bp, Homo sapiens
catgtgcatactggatgagtctttaaaatgcatgtgctgagggaggagccaagatggccgaataggaacagctcaggtctacagctcccagcgtgagcgacgcaggaaacggtgatttctgcatttccatctgaggtaccgggttcatctcactagggagtgccagacagtgggcgcaggtcagtgggtgcgtgcaccgtgtgcgagccgaagcagggcgaggcactgcctcacttgggaagcgcaaggggtcagggagttccctttctgagtcaaagaaaggggtgacggacgcaccttgaaaatcgggtcactcccacccgaatactgcgcttttccgaccggcttaaaaaacggcgcaccaggagattatatcccgcacctggctctgagggtcctacgcccacggagtctccctgattgctagcacagcagtctgagatcaaactgcaaggyggtagcgaggctgggggaggggcacccgccattgcccaggcttgcttaggtaaacaaagcagaggggaagctcgaactgggtggagcccaccacagctcaaggaggcctgcctgcctctgtaggctccacctctgggggcagggcacagacaaacaaaaagacagcagtaacctctgcagacttaaatgtctctgtctgacagctttgaagagagcag

SEQ ID NO: 923920 - DNA, 726 bp, Homo sapiens
gaactccccattccccactccccccagcccctgtaaaccactgttacactttctatgaaagaatgcatttgactattctgggtacttcacataaatggaatcatactgtgtccagaattggttccttctggtgggttcttggtctcactgacttcaagaatgaagctgcagaccttcgcagtgagtgttacagtttttaaagatggtgtgtccggagtttattccttcagatatgtccagagtttcttccttccagtgggctcgtggtctcgctgacttcaagaatgaagctgcggaccttcgtggcgagtgttacagctcttaaaggtcgtgcggacccaaagagtgagcagcagcaagatttattgtgaagagtgaaagaacaaagcttccacagtgtgraaagggacccaagcaggttgctgctgctggctcaggtggccagcttttattcccttatttggccctgccgatgtcctgctgattggtccattttacagagtgctgatttgtccattttacagagtgctgattggttcatttttacagagtgctgattggtgcgtttacagtcctttagctagacccagagtgctgattgatgcatttttacagagtgcggattggcgcatttacaatcctttagctagacacagagcgctgattggtgcgtttacaatcctctagctagacagaaaagttctccaagtccccactcagcccagg

SEQ ID NO: 923921 - DNA, 811 bp, Homo sapiens
gtaccatgtctcacatcactcttatctacattaaatttttaaaaagcttttaatttttgtgggtacataataggtgcatatagtcatgggtacatgagatgttttgatacagacatgcaatgtgtaataatcacatcatggagaaagagtatccatcccctcaagcatttatccttcatgttaaaaatccaattacactcttttagttacttaaaaatgtacaattggccgggtgcggtggctcacgcctgtaatcccagcactttgggaggccgaggcgggtggatcatgaggtcaggagatcgagaccatcctggctaacaaggtgaaaccccgtctctactaaaaatacaaaaaattagccgggcgcggtggcgggcgcctttagtcccagctactcgggaggctgaggcaggagaatggcgtgaacccgggaagcggagcttgcagtgagctgagattgcgccactgcagtccgcagtccggcctgggcgacagagcragactccgtctcaaaaaaaaaaaaaaatgtacaattaaattattacggactgtagtcaccctgttgtgctttcatatagtaggtcttattcattctttctatttttatgtgtatccattaactgttcccacatttgatctcttcccactcattcctctaattctctgtgccccactttccctgcatagaggaatttgcattctcatactcatgggaaccgtagggctaaaggcatcctgtctgttgggcatttcctcctcgccctctccctaaactggatgaggacctggttccagaaagaatgggtcc

SEQ ID NO: 923922 - DNA, 811 bp, Homo sapiens
gtaccatgtctcacatcactcttatctacattaaatttttaaaaagcttttaatttttgtgggtacataataggtgcatatagtcatgggtacatgagatgttttgatacagacatgcaatgtgtaataatcacatcatggagaaagagtatccatcccctcaagcatttatccttcatgttaaaaatccaattacactcttttagttacttaaaaatgtacaattggccgggtgcggtggctcacgcctgtaatcccagcactttgggaggccgaggcgggtggatcatgaggtcaggagatcgagaccatcctggctaacaaggtgaaaccccgtctctactaaaaatacaaaaaattagccgggcgcggtggcgggcgcctttagtcccagctactcgggaggctgaggcaggagaatggcgtgaacccgggaagcggagcttgcagtgagctgagattgcgccactgcagtccgcagtccggcctgggcgacagagcgagactccgtctcaaaaaaaaaaaaaaatgtacaattaaattattacggactgtagtcaccctgttgtgctttcatatagtaggtcttattcattctttctatttttatgtgtatccattaactgttcccacatttgatctcttcccactcattcctctaattcyctgtgccccactttccctgcatagaggaatttgcattctcatactcatgggaaccgtagggctaaaggcatcctgtctgttgggcatttcctcctcgccctctccctaaactggatgaggacctggttccagaaagaatgggtcc

SEQ ID NO: 923923 - DNA, 721 bp, Homo sapiens
attgtttttcctgttgagttgcttgagttccttgtttattctggatattagttcccttttggatacatagtttgcaaatattttctgccattcagcaggttgtcttttcattctgttgattgtttctttgctgtacagaagctttttagtttaatatagtttcgtttgtgtgattttgtttttgttgcctgtgcttttgaggtcttagtcataaattctttgcctagaccaatgtccacaaaagttttttgtaggttttcttcagtgtttttatagttttgggtcttatatttaagtatttaatccattttgagttgatttttatatgtggtgagagatagaggtccagtttaattcttctgcatgtggctatacaattgtcacagcaccacttgttgaagagggtgtagtataagtgaggtaacatgatgcttccagctttgttctttttgctcagaattgctttggctatttgggctctttttaagttccatatgaattttaggattgttttttygaattttgtgaagaatgatgttggtatttggatagattttgattgtgttgtttcatgtggccttgcccacaaaaccatttttccctcctaggtctccaggcctgtgatgaggggagcttccatgaagatctttggaatgccctggagacattttctccattgtttcagctactaacattcggctccttgttacttatgcaaatt

SEQ ID NO: 923924 - DNA, 721 bp, Homo sapiens
attgtttttcctgttgagttgcttgagttccttgtttattctggatattagttcccttttggatacatagtttgcaaatattttctgccattcagcaggttgtcttttcattctgttgattgtttctttgctgtacagaagctttttagtttaatatagtttcgtttgtgtgattttgtttttgttgcctgtgcttttgaggtcttagtcataaattctttgcctagaccaatgtccacaaaagttttttgtaggttttcttcagtgtttttatagttttgggtcttatatttaagtatttaatccattttgagttgatttttatatgtggtgagagatagaggtccagtttaattcttctgcatgtggctatacaattgtcacagcaccacttgttgaagagggtgtagtataagtgaggtaacatgatgcttccagctttgttctttttgctcagaattgctttggctatttgggctctttttaagttccatatgaattttaggattgtttttttgaattttgtgaagaatgatgttggtatttggatagattttgattgtgttgtttcrtgtggccttgcccacaaaaccatttttccctcctaggtctccaggcctgtgatgaggggagcttccatgaagatctttggaatgccctggagacattttctccattgtttcagctactaacattcggctccttgttacttatgcaaatt

SEQ ID NO: 923925 - DNA, 774 bp, Homo sapiens
agcttcctgtccactttgtttacctactcaagcctgagcaatggcaggcgcccctcccccagcctcactgctgccttgcagtttgctctcagactgctgtgctagcaatgagcgaggatccatgggcgtaggaacctccgagtcatgtgtgggatataatctcctggtgtgccatttgataagcccattggaaaagtgcagtattagggtgggagtgacccgattttccagttgccatctgtcacccctttctttgactaggaaagcaaattccctgacaccttgtgcttcccaggggaggtgatgccttgccctgcttcagctcacacacggtgcactgcacccactgtcctgcacccactttccggcactccccagtgagatgaacccagttcctcagttgggaatgcagaaatcacccatcttttctgtcgcttatgctggsagttgtagaatggagctgttcctgttcagccatcttggctccgccctctggacaatcttttttaaagtgacattgtaaaccacactgataacaggccctgctgggtgattggcctgctccaatttttctcctctctgaaccaccaaggtttgtttggctgagggccattactaaggctgtggcctttctcttatcctgcttttcctttttggcttgttcctcttggtccctactatagaacaccatggttgccaggtttaataatgcctctaaattttgctcggggcccaaggctaactttcagagctttttcctaatatctgcagctg

SEQ ID NO: 923926 - DNA, 831 bp, Homo sapiens
ctttggaaggaaggaaaatgttaaggacactctgaacttatttagacaaatcttgggcttaaaatgcttcactagattcctatattctacagccgtagttctcaatactcccatctttatagaaaatatttattaatagtcctctttttattatcctgaaataaaattcataagtgtaatctgcctacatatatttaaaataaaacaaaacaaaatgaaaaactagaattttttctagctggattatgaaagaaaaataaaagtaccatagtaaaataatatatttttcattagtaaatgcctagacacaaaagcaatagaagacataataaagcaaacagattcttacacctgtatgttgagtcactatgcatgtgacagttacatatgctgactgatagaggcatacatattggaaaaacaaacaccaagagtggttttattgtgccaacatgattttctgaaattgtaaataatgtttggacactaaaaaaatatttttgatcacagatgatcctaaagatttcatatacaaatatagtcttgttggagttgataaatgaatttagcaaagcagcaggatgcaaagtcaagatgtaaactttggttggatttctatatactaataatgaatgataygaaaagggaattatgaaaattccatttacaatactccttgctattgtaaggagtgaaggacttgtaaaatgcaaactgtgaaatattgctgaaataaattaaagacataaataaatggaaacaggccaggtgtggtggcctttgttatcccagcactttgggaggccaaggtgggaggatcacttgagccta

SEQ ID NO: 923927 - DNA, 636 bp, Homo sapiens
ccatcttcccagccagcagtattcacttcttttttctacaccatcccctcctcaggacaattctagtattgcctgtacccattcttctcccccatctccctctcctgaggcttgtaaacccgtcccgccaccttacacccctatctatcctccactgcctgttractcaaccccacttcccccttcaaaccctcagcaggaaccacctccagattcttccttttatcccacccatactcactcaggcaccatctttggcccatgccccacccttacttcagtgcctgtgctacagtgccccctttgggaagtagcaggaactgaaagtattgttagagttcatgttcccttctccctcactgatcgctctcaaattaacaaaggactttgttcattaccagaagaacctacctcttatattagagagcttcagtaccttacccagtcttatgaacaaacctggcatgacctctatgttatcctctcttccaccctcaccccagaagacctggactgtatctggaccctagttcaggcacatgctgatacaattcatcaccaagctcctgtccagcctactggtgcagagccagtctccaaccaggacccccactgggattatcaagacggagcccc

SEQ ID NO: 923928 - DNA, 613 bp, Homo sapiens
tattatgtcatagagggccagtatttgtggaaaataaaaccagtattgctcggctgggtgcagtggttcacgcctgtaattcagcactttgggaggctgaggcaggtggatcacctgaggtcaggagttcgagaccaccctgacccacttggtgaaactcygactctactaaaagtacgaaaattagtcaggcatcatggcaggtgcctgtaatcccagctcctcgggggctgaggcaggagaatctctcgaacccaggaggcggaggttgcagtgagctgagatcacacccctgcactccagcctgggcaacagagcgagactccatctcaaaaacaaaaactaaaactaaaacagtattgctttagcaatttaaacacaccttgatatagatgaaaatcagtgatgtcctcattagtattttgcaatctgcattgtgagctttctgacttggtaacattgtgaccaatttaacctggattccaatttttttgagacagagtttctcactctatcgcccatgttggagtgcagtattgcaatctcggctcactggaaccttcacctcccaggttcaaatgattctcatgcctgagcctcccaagcagctggg

SEQ ID NO: 923929 - DNA, 782 bp, Homo sapiens
ggtagtgattcctctgatgaatctgggtaaatcaaaaaccttccagaaaggatttaccattctcgataccattaagaatattcattgttcatgcgagggactaaaataaccaacattaacaggagtttggagcattgatttggagttgattccaaccctcatggatgactttgtggggttcatgacttccatggaggaaataattgcagatgttgtggaaatagcaagagaattagaattggaagtgcagcctgagggtgtgactgaattgctgcaatctcatgatcaagtttgaatggatgaggtgttgcttcttatggatgggcaaagaaaatgatttcttgagatggaatatacgcctcatgaagatgccatgaacattgttaaaatgacaagatatttaaaatattacataaatttagttgtttatgtaagttgtttatgkaagctgtttatggaagcagtggcagggttggagaagactgactccaattttgaaagaagttctgttgtgggcaaaatgctatcaaacagcttcacatgctacagagaaatctttcatgaaaaaaaaagagtcaattgatgcaacaaacttcactgcagttttattttcataaattgccacggccactctaaccttcagcaactacaaccctgatcactcagaggccacccacattgaggcaagaccctccaccagcaaaaagattatgactcactgatggctcagatgattgttagcattttttagcaataaagtgtttttaagttagggtatatac

SEQ ID NO: 923930 - DNA, 782 bp, Homo sapiens
ggtagtgattcctctgatgaatctgggtaaatcaaaaaccttccagaaaggatttaccattctcgataccattaagaatattcattgttcatgcgagggactaaaataaccaacattaacaggagtttggagcattgatttggagttgattccaaccctcatggatgactttgtggggttcatgacttccatggaggaaataattgcagatgttgtggaaatagcaagagaattagaattggaagtgcagcctgagggtgtgactgaattgctgcaatctcatgatcaagtttgaatggatgaggtgttgcttcttatggatgggcaaagaaaatgatttcttgagatggaatatacgcctcatgaagatgccatgaacattgttaaaatgacaagatatttaaaatattacataaatttagttgtttatgtaagttgtttatgtaagctgtttatggaagcagtggcagggwtggagaagactgactccaattttgaaagaagttctgttgtgggcaaaatgctatcaaacagcttcacatgctacagagaaatctttcatgaaaaaaaaagagtcaattgatgcaacaaacttcactgcagttttattttcataaattgccacggccactctaaccttcagcaactacaaccctgatcactcagaggccacccacattgaggcaagaccctccaccagcaaaaagattatgactcactgatggctcagatgattgttagcattttttagcaataaagtgtttttaagttagggtatatac

SEQ ID NO: 923931 - DNA, 782 bp, Homo sapiens
ggtagtgattcctctgatgaatctgggtaaatcaaaaaccttccagaaaggatttaccattctcgataccattaagaatattcattgttcatgcgagggactaaaataaccaacattaacaggagtttggagcattgatttggagttgattccaaccctcatggatgactttgtggggttcatgacttccatggaggaaataattgcagatgttgtggaaatagcaagagaattagaattggaagtgcagcctgagggtgtgactgaattgctgcaatctcatgatcaagtttgaatggatgaggtgttgcttcttatggatgggcaaagaaaatgatttcttgagatggaatatacgcctcatgaagatgccatgaacattgttaaaatgacaagatatttaaaatattacataaatttagttgtttatgtaagttgtttatgtaagctgtttatggaagcagtggcagggttggagaagactgactccaattttgaaagaagttctgytgtgggcaaaatgctatcaaacagcttcacatgctacagagaaatctttcatgaaaaaaaaagagtcaattgatgcaacaaacttcactgcagttttattttcataaattgccacggccactctaaccttcagcaactacaaccctgatcactcagaggccacccacattgaggcaagaccctccaccagcaaaaagattatgactcactgatggctcagatgattgttagcattttttagcaataaagtgtttttaagttagggtatatac

SEQ ID NO: 923932 - DNA, 756 bp, Homo sapiens
ggaagatgtagccagacagcttgtaaagtgagtcaccaatcccattccacctcactgggcaggacctcccaaatggggtcttcagccacccatgccagtgcactccaaccatagagactgaaaacttccctggtacagagctcccaggggasgggctggctgccatctttgctgtttgagtgatttaactatcctgggcattggggtttggagtctttgaggtaaccaggtgctgaagcggacccccagcacagcacagttgctctacaaaaatgtggccggactgctttttaaattgggtccccaatcccattcctcctcattgagcaggacctccaaactgtgatttccagccatgtcctacagttgcattggggctggcagtaggtccatacctccctggggtggagctcccagagggagggccaggctgctgtctttgcttttttgccaccttcactggttgatacctccaggtactagaaaatttgaggtgactagggaatggagcaagcccccagcatactgcagcagccctttgggaaggtggccagactgttacatgggtgcctgttcccataactcctcactggacaggtccttcaggcctgggcctccagccacttgccgctggagctattaagtcagtagcaacttggcaactgcctgggtggagtctctggggaaaattgaaagcttctttgccactgcttcttcagtggaactggtcttgctaccctcagaataatgaaggaa

SEQ ID NO: 923933 - DNA, 566 bp, Homo sapiens
aaaggaaaccatgtctaaagaattaaaataatatttgagaataatgaatcaccaatagaaaatgtgagtaaatacataaaaattatttttttagaaaatagaaattttgaaatagaaaagtacagtaaataaaatggaacaactttactaatttttttcttttgctcatccctagggaractcaacagcatatttgaactagaaaagaaaaacatcagtaaacttgaaaataggtcaagtgagagtatgtactctaagtaatccaatgaaaaatgaacagaacatcagaatctatagaacaatatcaaatgtgtcatatcataaataatgtgagtccaagaagaagggaaagggggacagaaagaatcaagaattaatggccataaacttcctaaaatggataaaaacattaatctacacgtcttatttgctcaaggaactctaaatagtacaaatttaaagatatataaacttatacataaagtagtaaaagataaaaagccaaagggaaaacataataatcttgaaagcaataagagaaaaataatttcttcatacaaaagatt

SEQ ID NO: 923934 - DNA, 608 bp, Homo sapiens
aaaggaaaccatgtctaaagaattaaaataatatttgagaataatgaatcaccaatagaaaatgtgagtaaatacataaaaattatttttttagaaaatagaaattttgaaatagaaaagtacagtaaataaaatggaacaactttactaatttttttcttttgctcatccctagggaaactcaacagcatatttgaactagaaaagaaaaacatcagtaaacttgaaaataggtcaagtgagagtatgtactctaagtaatccaatgaaaaatgaacagaacatcagaatctatagaacaatatcaaatgtgtcatatcataaataatgtgagtccaagaagaagggaaagggggacagaaagaatcaagaattaatggccataaacttcctaaaatggataaaaacattaatctacacrtcttatttgctcaaggaactctaaatagtacaaatttaaagatatataaacttatacataaagtagtaaaagataaaaagccaaagggaaaacataataatcttgaaagcaataagagaaaaataatttcttcatacaaaagattctcaatgtaattaacagctgactccttatcagaaaccatgga

SEQ ID NO: 923935 - DNA, 723 bp, Homo sapiens
aataagtctcatgagatctaatggttttataaggggaaattcctttcacttggttctcattctgtctcttgcctgctgccaacataagacctgcctttcaccttctgccatgattggaaccgtgagtccattaaacctctttttctttataaattacccatcttgggtttgtctttatcagcagcatgaaaacagactaatacagtaaattggtactggtagagtggggtgctgctgtaaagatacctgaaaatgtggaagcgactttggaactgggtaasaggcagaggttggaacagtttggagggctcagaagaagacaggaaaaggcaggaaagtttggaacttcctagagacttgttgaatggctttgactaaaatgccaacaatgatatagacaatgaaatccaggctgaggtggtctcagatggagatgaggtacttgttggcaactggggtaaatgtgactcttgctatgttttagcaaagagactggtagcattttcctgctgccctagagatttatggaactttgaacttgagggagatgatttagggtatctggaggaagaaatttctaagcagcaaagcattcaagaggtgacttgggtgctgttaaaagcattcagttttaaaagggaaacagagcataaaggttcagaaaatttgcagcctgactactcaatagaaaagaaaacccattttctgaggagaaattcaagc

SEQ ID NO: 923936 - DNA, 824 bp, Homo sapiens
gaagatatacccttgaccaatgccttgcaaaatagattcgtgagggcagcacctgcatctctgaagagccttgtaattgctcttctctgtatgtcagatgcaacagcgggaactgcagtcactcaattacaaaatttaaatacaatgggaataattggatcccgaggtgtcagggaccaagtggtagcactcaaccatcaaaggcaaggtgggtgtagygaccgtaatggacagcagaggcaaagtggcaatcagaatagtctgactcgtgtagagctctggcactggctaattagtcacagtgttcctagaagtgaaattgataggaagcctatcgcattcctactttgtataagcagaaaacttctagttcaaatgtataaaagactaatttgaattataaaaacagagaatcacggaccctcagtcaatttccagacttgagccagtttacagacccagaaccccttgaatgaaggggaggactggtccccttgaggaaggaccccactacattaccgacaatttatgcagtggatctttctcccatccttccccaaggagacttctggccttttaccagggtaactgtgccctggggaaagggaaatgatcagacatttggggactactggacactggctctgagctgatgttaattccaggagacccaaaacatcattgtgttcctccagttaaagtaggggcttatggaggtcaggtaatttatggagttttagctcagttctgacttacagggagtccagtgcgtccctggactcatcctgtggtatttccccagtgccagaatgcataattggcat

SEQ ID NO: 923937 - DNA, 824 bp, Homo sapiens
gaagatatacccttgaccaatgccttgcaaaatagattcgtgagggcagcacctgcatctctgaagagccttgtaattgctcttctctgtatgtcagatgcaacagcgggaactgcagtcactcaattacaaaatttaaatacaatgggaataattggatcccgaggtgtcagggaccaagtggtagcactcaaccatcaaaggcaaggtgggtgtagcgaccgtaatggacagcagaggcaaagtggcaatcagaatagtctgactcgtgtagagctctggcactggctaattagtcacrgtgttcctagaagtgaaattgataggaagcctatcgcattcctactttgtataagcagaaaacttctagttcaaatgtataaaagactaatttgaattataaaaacagagaatcacggaccctcagtcaatttccagacttgagccagtttacagacccagaaccccttgaatgaaggggaggactggtccccttgaggaaggaccccactacattaccgacaatttatgcagtggatctttctcccatccttccccaaggagacttctggccttttaccagggtaactgtgccctggggaaagggaaatgatcagacatttggggactactggacactggctctgagctgatgttaattccaggagacccaaaacatcattgtgttcctccagttaaagtaggggcttatggaggtcaggtaatttatggagttttagctcagttctgacttacagggagtccagtgcgtccctggactcatcctgtggtatttccccagtgccagaatgcataattggcat

SEQ ID NO: 923938 - DNA, 688 bp, Homo sapiens
gcaatatgcctttactgtcctacctcaggggcatatcaactctctggctttgtgtcataatcttatttgaagagaccttgattgcttttcacttttgcaagatatcacattggtccgttacattgatgacattacgttgatttgatccattatgtgagcaagaagtagcaaacacactggacttattggttagacatttgtatgccaggggatgggaaataaatctgactaaaattcagggaccttctacctcagtaaaatttctaggagtccagtggtgtggcctgttgagatattccttctaaggtgaaggataagatgcatttagctcctcctacaactaagaaagaggcaaacagtgarcccatctggattttggagacaagacattccttatctgggtgtgttattctggcccatttattgaatgacccgaaaggctgccagttttgagtggagtccagaacaggagaaggctctgcaacaggttcaggctgctgtgcaagctgctctgccacttgggccatatgacccagcagatccaatggtgcttgaggtgtcagtggcagatagggatgctgcttggagcctttgccagtcccccataggtgaatcacagcagaggcctctaggattttggagcaaggccctgccatcttctgcagataactactccccttttgagaaa

SEQ ID NO: 923939 - DNA, 504 bp, Homo sapiens
ttatattttgacttcttcccatgaatcagggatgttcttaatgacatctaaagtaatgaatgctttcagagattttcaatttactttgctgaaaaccattagaggaatcactatctgtggcagctatagtgttacaaaatgtatttcttatataataagacttcaaagttgaaattactcctygatctatggtctgcagaatggatgcaaccctcacctccctgtgcatctccatcagaattcttgggtgaccaggtgccttgtcaatgagcagtaatattttgaaagaaaatttttttttctgagcaggtctaaacagttggcttaaaatattcatgctgtaagccgatatgctgtcagctaggctttgttgttccatttctagagcatagcagagttaatttagtataattcttaaggactccaggattttcagaatggtaaatgagcattgattttaacttcaagtcaccagctgcattagtccctaagaaaaaatcagcc

SEQ ID NO: 923940 - DNA, 504 bp, Homo sapiens
ttatattttgacttcttcccatgaatcagggatgttcttaatgacatctaaagtaatgaatgctttcagagattttcaatttactttgctgaaaaccattagaggaatcactatctgtggcagctatagtgttacaaaatgtatttcttatataataagacttcaaagttgaaattactcctcgatctatggtctgcagaatggatgcaaccctcacctccctgtgcatctccatcagaattcttgggtgaccaggtgccttgtcaatgagcagtaatattttgaaagaaawtttttttttctgagcaggtctaaacagttggcttaaaatattcatgctgtaagccgatatgctgtcagctaggctttgttgttccatttctagagcatagcagagttaatttagtataattcttaaggactccaggattttcagaatggtaaatgagcattgattttaacttcaagtcaccagctgcattagtccctaagaaaaaatcagcc

SEQ ID NO: 923941 - DNA, 513 bp, Homo sapiens
caaagggcaggctgattttttcttagggactaatgcagctggtgacttgaagttaaaatcaatgctcatttaccattctgaaaatcctggagtccttaagaattatactaaattaactctgctatgctctagaaatggaacaacaaagcctagctgacagcatatcggcttacagcatgaatattttaagccaactgtttagacctgctcagaaaaaaaaawtctctttcaaaatattactgctcattgacaaggcacctggtcacccaagaattctgatggagatgcacagggaggtgagggttgcatccattctgcagaccatagatcgaggagtaatttcaactttgaagtcttattatataagaaatacattttgtaacactatagctgccacagatagtgattcctctaatggttttcagcaaagtaaattgaaaatctctgaaagcattcattactttagatgtcattaagaacatccctgattcatgggaagaagtcaaaatataa

SEQ ID NO: 923942 - DNA, 513 bp, Homo sapiens
caaagggcaggctgattttttcttagggactaatgcagctggtgacttgaagttaaaatcaatgctcatttaccattctgaaaatcctggagtccttaagaattatactaaattaactctgctatgctctagaaatggaacaacaaagcctagctgacagcatatcggcttacagcatgaatattttaagccaactgtttagacctgctcagaaaaaaaaattytctttcaaaatattactgctcattgacaaggcacctggtcacccaagaattctgatggagatgcacagggaggtgagggttgcatccattctgcagaccatagatcgaggagtaatttcaactttgaagtcttattatataagaaatacattttgtaacactatagctgccacagatagtgattcctctaatggttttcagcaaagtaaattgaaaatctctgaaagcattcattactttagatgtcattaagaacatccctgattcatgggaagaagtcaaaatataa

SEQ ID NO: 923943 - DNA, 513 bp, Homo sapiens
caaagggcaggctgattttttcttagggactaatgcagctggtgacttgaagttaaaatcaatgctcatttaccattctgaaaatcctggagtccttaagaattatactaaattaactctgctatgctctagaaatggaacaacaaagcctagctgacagcatatcggcttacagcatgaatattttaagccaactgtttagacctgctcagaaaaaaaaattctctttcaaaatattactgctcattgacaaggcacctggtcacccaagaattctgatggagatgcacagggaggtgagggttgcatccattctgcagaccatagatcraggagtaatttcaactttgaagtcttattatataagaaatacattttgtaacactatagctgccacagatagtgattcctctaatggttttcagcaaagtaaattgaaaatctctgaaagcattcattactttagatgtcattaagaacatccctgattcatgggaagaagtcaaaatataa

SEQ ID NO: 923944 - DNA, 555 bp, Homo sapiens
tatacctgactactggctctgcctttccttttcttagagcacttgcttttgaaaacttgcagttgtaaattctttctctgctcttttgagatgtaaatcttttcccagcctcttgtcagttttacaactcagaaaatgtttttctgaaggatctgggagctattcctttaaaatatgaycatcagaaagatagggtgggccgagcatggtggctcatgcctgtaatcccagcactttggaaggctgaggctggtggatcacctgaggtcaggagttcaagaccagcctggccaacagtctctactaaaaataacaaaaattagccaggcatggtggtaggtacctgtaatcctagctacactagggaggctgagtcaggagaatcacttgaatctgggaggcagaggttgcagtgagctgagatcacgccactgtactctagcctgggtgacagtgagactccatcttaaaaaaaaaaaaaaaaaaaaagctaggttccctgttttctcatctctgagggatagtaggaacctaactttaataagtgccaattag

SEQ ID NO: 923945 - DNA, 555 bp, Homo sapiens
tatacctgactactggctctgcctttccttttcttagagcacttgcttttgaaaacttgcagttgtaaattctttctctgctcttttgagatgtaaatcttttcccagcctcttgtcagttttacaactcagaaaatgtttttctgaaggatctgggagctattcctttaaaatatgaccatcagaaagatagggtgggccgagcatggtggctcatgcctgtaatcccagcactttggaaggctgaggctggtggatcacctgaggtcaggagttcaagaccagcctggccaacagtctctactaaaaatracaaaaattagccaggcatggtggtaggtacctgtaatcctagctacactagggaggctgagtcaggagaatcacttgaatctgggaggcagaggttgcagtgagctgagatcacgccactgtactctagcctgggtgacagtgagactccatcttaaaaaaaaaaaaaaaaaaaaagctaggttccctgttttctcatctctgagggatagtaggaacctaactttaataagtgccaattag

SEQ ID NO: 923946 - DNA, 551 bp, Homo sapiens
aatctggggaggctccataagagaaattaaacttcagtacttccctacagaaatagaatgggccagtgctcgagggtatacttttcagccctcaggatgtctatagtcagagaatggcaaactcttcttgccagcctccagccaatggaaagtccttaaaatcsttcaccaaacttttcacttgggaaaggataaaacttatcaatgtgcccagagattgttttcaggagagaacctactagaaacattcaaacaagttgttaatgctggtgaattctgtttcaaaataatccccggaataggcgactccttcctcctcaaacccgaagaataggaagttatccatgggaagactggcagatagacttcacccacatgccaaagatgaagggcattcaatacctcttggtataggtagatagtttcactaattgagtagaagcatttgcatgctgcatagaaaaagcctctgaggtaataaaagtgttagttaatgaaataactccttgctttggcctacctaagtaccttcaaagtgacaatggctccgt

SEQ ID NO: 923947 - DNA, 551 bp, Homo sapiens
aatctggggaggctccataagagaaattaaacttcagtacttccctacagaaatagaatgggccagtgctcgagggtatacttttcagccctcaggatgtctatagtcagagaatggcaaactcttcttgccagcctccagccaatggaaagtccttaaaatcgttcaccaaacttttcacttgggaaaggataaaacttatcaatgtgcccagagattgttttcaggagagaacctactagaaacattcaaacargttgttaatgctggtgaattctgtttcaaaataatccccggaataggcgactccttcctcctcaaacccgaagaataggaagttatccatgggaagactggcagatagacttcacccacatgccaaagatgaagggcattcaatacctcttggtataggtagatagtttcactaattgagtagaagcatttgcatgctgcatagaaaaagcctctgaggtaataaaagtgttagttaatgaaataactccttgctttggcctacctaagtaccttcaaagtgacaatggctccgt

SEQ ID NO: 923948 - DNA, 771 bp, Homo sapiens
cactagacatagaatatcatctacgttgtgcttggagaccccagtctgcaggaaaggtagagaaaaataatgatattatcaagagacacctcagaaaattatcccaagaaattcaccttccttgggccactcttcttcctaaggccttactacaaataagaaataccccttcaaaagtaggtcttagcccttttgagatgctgtatggacaggctttccttaccaatgattttctattagatcaggaaacctctgagttagttaagcatgtaacctctctggctcatctctaacaggaattagcgcaattagcaaaagtccaaccccaggaaataggatcacctctatttaacccaggagatttggtactggtaaagtctctcccttctctctctgcttccttaagcccaagctgggaagtgccttacattgttcttctttcaaccccctcggcaataaaatttacaggaatagactcctggatgcattgcacttgagtcaaagcctggagagctgakggaacaacccctgacagcccacaggaacatcctgaatatcaatgtgaagaaatagggggccttaagctgaaaatgataaaagagaagtcactgagtgagaactactcatcttactcatttccacccctacctcaccaaatattttttgtcatttctacctttcctttcaagattcactgccaaatattagaatttctttttgaggcatatttgcaaggacatttttaattatccatggaattacatctgtaac

SEQ ID NO: 923949 - DNA, 618 bp, Homo sapiens
cattaagtcccttaggctgtcttcactctttttgttttttgagacagggtctcactctgttgctcaggctggagtgtactggcatgatcatggctcactgtagcctcaactttctgggctcaagcaattctcctgcttcagccttctgcatagctgggactacaggcatgtgccaccacacctggctatttttttatttttytttttgtagagacagggtctcactgggttgcccagcatgatcttaaactcatggcctcaagtaatcctcctgccttggccttctaaagtgctgggcctagagtcatgagctactgcacttgaccctttcttcattcttttttattctttttcttttttttaatggagtctcactctgttgcccaggttggagtgcagtggcacaatctcggctcactgcaacttctgcctcctgggttcaagcgattctcctgcctcagcctcccaagtagctgggattacaggtgcccaccaccatgcccagctaatttttgtgtttttagtagagatgggttttctttcaccatgttggccaggctggtctcgaactcctgacctcaggtgatccaccagcctcagcctcccaaagtgctggga

SEQ ID NO: 923950 - DNA, 595 bp, Homo sapiens
ggataagttttcttgattatttcaaccaacagaaaataacaaaagcaatgctatgtggctttaaaggccatagagcctctgagttgtttgcttattcttgaagtattctgctgtcatagaagcaatctgactggcctgagaccaccatgctatgagaaagaccaaactagctcatatggaaataccagactagcacatggcarggccctgagattacataaagagagagatgcctagccaaccttcagctgatttggctctctgttactttagctctaaccattatttggcagaaaccacatgagaaaccctaagccacaacttcttagctgatttctttccaaattactgactcacataaaccttgcaaaataataaaatgattcttgttaagtcactaagtttctgggtgatttaatatgcatcaatagatcactgaaacacatggctcttcagaatttgggcaaaagatctctattttatgtgcctacatctacccatcattgaataaggactgatctgaaattcaggagtgacgttgggcaaggtggctttcttcaacctagggcaattctcaaaaagtgttgatatctga

SEQ ID NO: 923951 - DNA, 666 bp, Homo sapiens
gtttggaaggacagtatcaaggtttatctgtcacacttttatttttcactataactacccaggtacaaatcctggcacctaataggtgctaagtaaatagtagtatgtgtctacctgccctatccatttcctattttctgacaaatacagtcttttttttttttttttttaagagatagggtctcactttgttgcccaggctggtcttgaactctgagmtcaagcaatcctcccacatcagcctcccaaagtgctgggattataggcatgagccactgcacccggtcctgacaagtacaatctttctgtagctgtgtttatactgcagtctggttttgccttgtcacgtgagtcctttgatctctataagatgatttttctaattcagatctattttatgttatattttagttgtctgcaacattatttaccctcttcccttgtgttgcctacagagggattgaaagtcagcaccttatctagtaattctagtaacttctgatttctcagaaacatgattttgttcatcaaatttcattattacccaagtctttaccttaaagaccttccactttcatctcatatatctgatgcggtagctatatgaaaagtgttcatatggagtctgtcatgaagtcagcagaactctgcaggtgaagtggccaa

SEQ ID NO: 923952 - DNA, 472 bp, Homo sapiens
tggcactctgcgcatgatttaggatgctgggtcttgattaaacctgctgtacattgttaccacctggcattctctccaggtggtatggaacggcactctcagaggaaggaaatgtacctctatatgtttctgtactataaagattctataaagagccaatttcctttctgccttcctgatgaccaagcttccratggcatgtgctttgtacacagatttcacattggacacttgtactcatacaaaggccatccttgatgttttccattcattcatacagaacaggatgtgaatctatttagtgcaccagatacttaggtaaatgagttaattgctcatcaaggacactgttctcttgcggctctttctgcccatgagagcttggaggcagatctgcatctgctgaaatcactgcatgaggcgggtctggctgcatcccatctgtattaactactttcccttcaggagtgtg

SEQ ID NO: 923953 - DNA, 614 bp, Homo sapiens
aggagaccaggaaagcctccaagacaccatgggcctattggtaggggacaagtgggcttccctgccaggtggcctggtgacagggtcattagcagttgaaaattttgagaaaatgattctgtgagctggagggcaattggacgggtgaggatggaggagaaagccaaaatccgcaactcrgatcactgtcagggcgaggctgggagtgggggagcgggggatccctccccagaggagcacaggctgcaagctggtggcctggaggcctgggggagaggagcgcagccagggcaggactgttgctggaagtctgtggaggaagctgccttgtcagtcagcctcccgaccccaggcacacagcgattacaacctcatgccaaaaaacaaaaacaaaaacaaaaacaatgctcttttgaaaagaaattgaacaaactaccagactgggccccatccttaaacctcatttaatttttttttttttttttttttttgagacggagtctcactctgtcacccaggctgcagtgcagtggcgtgatcttggctcactgcaacctcggcctcctggattcaagcgattctcctgccttagcctcccgagtagctgggattac

SEQ ID NO: 923954 - DNA, 614 bp, Homo sapiens
aggagaccaggaaagcctccaagacaccatgggcctattggtaggggacaagtgggcttccctgccaggtggcctggtgacagggtcattagcagttgaaaattttgagaaaatgattctgtgagctggagggcaattggacgggtgaggatggaggagaaagccaaaatccgcaactcggatcactgtcagggcgaggctgggagtgggggagcgggggatccctccccagaggagcacaggctgcaagctggtggcctggaggcctgggggagaggagcgcagccagggcaggactgttgctggaagtctgtggaggaagctgccttgtcagtcagcctcccsaccccaggcacacagcgattacaacctcatgccaaaaaacaaaaacaaaaacaaaaacaatgctcttttgaaaagaaattgaacaaactaccagactgggccccatccttaaacctcatttaatttttttttttttttttttttttgagacggagtctcactctgtcacccaggctgcagtgcagtggcgtgatcttggctcactgcaacctcggcctcctggattcaagcgattctcctgccttagcctcccgagtagctgggattac

SEQ ID NO: 923955 - DNA, 614 bp, Homo sapiens
aggagaccaggaaagcctccaagacaccatgggcctattggtaggggacaagtgggcttccctgccaggtggcctggtgacagggtcattagcagttgaaaattttgagaaaatgattctgtgagctggagggcaattggacgggtgaggatggaggagaaagccaaaatccgcaactcggatcactgtcagggcgaggctgggagtgggggagcgggggatccctccccagaggagcacaggctgcaagctggtggcctggaggcctgggggagaggagcgcagccagggcaggactgttgctggaagtctgtggaggaagctgccttgtcagtcagcctcccgaccccaggcacacagcgattacaacctcatgccaaaaaacaaaaacaaaaacaaaaacaakgctcttttgaaaagaaattgaacaaactaccagactgggccccatccttaaacctcatttaatttttttttttttttttttttttgagacggagtctcactctgtcacccaggctgcagtgcagtggcgtgatcttggctcactgcaacctcggcctcctggattcaagcgattctcctgccttagcctcccgagtagctgggattac

SEQ ID NO: 923956 - DNA, 614 bp, Homo sapiens
aggagaccaggaaagcctccaagacaccatgggcctattggtaggggacaagtgggcttccctgccaggtggcctggtgacagggtcattagcagttgaaaattttgagaaaatgattctgtgagctggagggcaattggacgggtgaggatggaggagaaagccaaaatccgcaactcggatcactgtcagggcgaggctgggagtgggggagcgggggatccctccccagaggagcacaggctgcaagctggtggcctggaggcctgggggagaggagcgcagccagggcaggactgttgctggaagtctgtggaggaagctgccttgtcagtcagcctcccgaccccaggcacacagcgattacaacctcatgccaaaaaacaaaaacaaaaacaaaaacaatgctcttttgaaaagaaattgaacaaactaccagactgggcsccatccttaaacctcatttaatttttttttttttttttttttttgagacggagtctcactctgtcacccaggctgcagtgcagtggcgtgatcttggctcactgcaacctcggcctcctggattcaagcgattctcctgccttagcctcccgagtagctgggattac

SEQ ID NO: 923957 - DNA, 859 bp, Homo sapiens
ccctggcagttacaaatgggagtatggagtgacaagttagaagctatgtccacagataaataaacagcacagattgcaagacagagaagcgcaatcaagaggcagttattcttcgtccatgagaaaaatgaaaggtaaatcaaacatgggggggatatcaaaaagttgtctgtgaaagccacagtctaatcatgaaaaaactaaaaatatgttatggttttctgttttgagacggagtctcgctctgtcacccaggctggagtgcagtggcatgatcttggctcactgcaacctccacctcccaggttcaagcaattctcctgcctcagcctcctgagtagctggaactacaggcacctgccaccacgcccggctaattttttgtgtttttagtagagacggggtttcrccgtgttagccaggatggtctccatcttctgacctcatgatccgcccgcctcggcctcccaaagtgctgggattacaggcgtgagccaccgcgcccggccacgttatggttttgagcaagaagaaagtttatgagagacagaatgcattcagccttgacgctgaagtcattctctcctgtggccccgggaaagccaccaaccacagagaaggaagccacttggctgctatgaatggtacttacaaagttgtaaaaacgcgaatgccgttgacttgttttcaacacagataaaacttaacaaagaacagaaaacttaattatgctcatcaaacagaatatgatgccatccttggtgctgcaaaagaaaaacccacgggatggaggaagagaaggggaagaggggaggggagacggaggacaggacagggcttcagaggcctccacggtgtg

SEQ ID NO: 923958 - DNA, 636 bp, Homo sapiens
tgaaaaaactaaaaatatgttatggttttctgttttgagacggagtctcgctctgtcacccaggctggagtgcagtggcatgatcttggctcactgcaacctccacctcccaggttcaagcaattctcctgcctcagcctcctgagtagctggaactacaggcacctgccaccacgcccggctaattttttgtgtttttagtagagacggggtttcacygtgttagccaggatggtctccatcttctgacctcatgatccgcccgcctcggcctcccaaagtgctgggattacaggcgtgagccaccgcgcccggccacgttatggttttgagcaagaagaaagtttatgagagacagaatgcattcagccttgacgctgaagtcattctctcctgtggccccgggaaagccaccaaccacagagaaggaagccacttggctgctatgaatggtacttacaaagttgtaaaaacgcgaatgccgttgacttgttttcaacacagataaaacttaacaaagaacagaaaacttaattatgctcatcaaacagaatatgatgccatccttggtgctgcaaaagaaaaacccacgggatggaggaagagaaggggaagaggggaggggagacggaggac

SEQ ID NO: 923959 - DNA, 790 bp, Homo sapiens
tacatatcgagcaattcaacttgttcctgtgaggtcatgaccttacttcttaggagctcttccagcatcactagtggcacttcgtatgggtcccatgatgctattcaaggtttacagtattgcactaaccatgaaaataaatgagaactgagagagatcatggttttcackgcaatatgcaatttactggagattgcaatagtaaattgtaaattgctatatgcaatctactgctcacgtggagatggtcagtatttcatagtgttttaagcagacactcgcaacacgagctcaccgcaatagcaacaggaggtagctacaaaaatattacagtagtacagtgcttactacagtgaattttatgtagttatgattgaatacttcatctttacatttgtttacatttccctcaactacaaatggtgccatgtatgatctgtgttttttgcatgttttcataaattttaactttttataatagatttgtgtaattttatagtagtaacttataaaatagactagtactcgcatatactttatgcattcatgacatacctaactttttgttgttcttttttgatatttctgggctacacaagggcagtgacatgatcgtagcgcactgtaacctgtaactgtaagttttttcaaactgtcacaaatctcaaaaaaaaaatctaatatatttaatgaaaactatccaagtataagttgacccttgcagttcaaacctgtgttgttcaagggtcaaccttacaaggattttaggaactctgctgggaactgggga

SEQ ID NO: 923960 - DNA, 726 bp, Homo sapiens
cacatgcatagcttatttaatattcacaagaaccctacgaattaagtaatactggctaggcacagtgggtcctgcctgtaatcccagcactttagaaggtcaagtttggagaattgctagagcccaggagttcaagaccagcctgggcaacatggtgaaacctcatctctacaaaaaatacaaacaatttgctgagcatgatggcagacacctatagtacctgctactcaggacyctgaggtgggaagatcacttaagcctgggaggcagaggctgcagtgagccaggatcgcaccactgcactccagcctggataacagaatgagaccctgtctcaaaataataaataaataagtgggccaggcacggtggctcttgcctataatcccagcactttgggaggccaaggcgggtggatcacttgaagtcgggagttcaagaccagcctggccaacatagtgaaaccccatctcaactaaaaagacaaaaattagccgggcatggtggcacactcctggaatcccaactacttgggaggctgagacaggagaatcacttgaacctgggaggcggaggttgcagtgagctgagatcatgccactgcactccagcctgggcaacagagcaagactccatctaaataaataagtaaataaataaataaatacataataaaactattgcccctgtcttaatgtaaatggaacatgaggcttagagaggtaa

SEQ ID NO: 923961 - DNA, 685 bp, Homo sapiens
tatattttcatagagtccagatgcaaaagaaacagaaaaaaaattcatgatatcttttttaattaaagaaattaatagtcaaattaaagttgtatacttttattgagttctatatgatgttttaaatatggatgcattgtgaaatggttaaatcaagctagttaacatatatactacctcacatattttttggggagagaataaaaagtccactatcttagcaattatcaagtatacaatagwtggttattattagttatagacaccatgttttacaatggatcttttgaacttatccctcctgtgtaacaaaaaggttgtgttttttcacagatatctccccaatatcaccttatcccaaccctctactctctgcttctgagttctgctcttatagattccatgtataaataagatcatggaatatttttctttcagtgcctggcttatttcacttcagttttttttaaggctaaataatattccactgtgtataaatatcatactttatcaactgagaaacccttaggctgatttatatattggctattttgaataatgctgcaatgcatgtgggcgtgcagacatcccttaaacatacttacccaatttcctttggatatccaccacagggatgggattactgggtcataaggtaattgtatttttaggtttttaagaaacc

SEQ ID NO: 923962 - DNA, 615 bp, Homo sapiens
gtgaggctcagagcacattttacatcattttacaaaactgaaaccaatcaagtgcctggcactgtggtgtactaagcacttgggcacaatggggagcaaaactcatataactgttctagtggaacccacaggctagagtagccactaaggatataatcaaacaaacaagaagtaagagacaaattgtgttacataaagagatatctgagccataacagtggtcccaaggttgccgtctcacataggcagcagatcggtgctggctagtggtaggaagcctcagctcctctccacactgggtctatccacaagtctatttgagtgtcctcacaacataaacagcaatttaaaagaagaaggtggaagscaaaatgccctttatagggctgccaggtttcacaaataaaactacataacacccagttaaatttgaatttcaggtaaataataaatgaagtgttagtataagcatgacacatgcaatatttgggacacacactaaatttttattatctgaaattcaaagttaattggatatactgtattttatctaaaaacccacccttcattacctaggttcagaaatcatacaccatcacttttgccatacttaat

SEQ ID NO: 923963 - DNA, 641 bp, Homo sapiens
caacaatgccactcaattctgctttcattactgcaatactgcatttcaaattgagaaactgagaaattacacctgattcccaatcatcaggatggagttcagatagaacatccaacataggagaataattactttataaattgaggactgactaaaggaattggaggaagagaagagtaagaatgtagaacaagttttgaagtatgtaatagactattctgaaaaaggaataaaactcactttgattggccctaggacaagaatttggtctaactggatgcaagaagcagattttttgcttcttatgaggaagatcataaacattgaagttatccaatataaggtaggttacccttattaattacccrgaaactgtagatgttggacctggattagcatttaggggagatgttgttaggacagaaatttcagactccaatgtgtacatgcataacctgaagatcttgtttaaatgaagatttaaatgaagattctgaaaacttatgtgagagtaggttgtatcattttacttttttttttttttttgagatggatcttgctctgttgcacaggctggagtgcagtggcatgatctcgcctcactgcaacctctggctgctgggttcaagcgattctcctgc

SEQ ID NO: 923964 - DNA, 614 bp, Homo sapiens
ctttcaccaccaaggtaaacaaataaagctcccataatggattcagaagaattgaagatctatgaactgactgacaaagaattccaaaagatcctcttaaaacaattcagggcatcacaagaaaatatgtttagaaaattaaataaattttagaaaacaatttatggtgttcacaaaaacatttgacagaggaatagaaataaagaaacaaattaaaaccctaaaactaaaaaatataatagctgaattgaaaaactcaatagaaagccttgaaagcagacttaaacataggaaagcatcagtaagctcaaaggacgtataaaattgttcaagtagggaagtaaaaataatraataaaaataaacaccacgggaatcatgggacaccatcaagtgatctaaacttcacataatgtaaagttcttgaaagaggtaagagagaaaaaagcctagaaataatatttttaaaaataatgactaaaacttttctgtatctggggaaaaataacaacatacaggtacaggaagctcagagatcaccaatcaaatgtaagacaaagaataattccccaacaaatccttaaaaatcagagacaaagaaagaatactgaatgt

SEQ ID NO: 923965 - DNA, 644 bp, Homo sapiens
  misc_feature 1, 2, 3, 4, 5, 6, 7: n = A,T,C or G
nnnnnnnttcataaattaaccagcctcaggtgttctattatagcagcacaaaatgcactaagatgtactaacagtgtaccaggatttctccctaggtccttactccaaatttttgacatctaccttatgatatattgcaactctactttaggaccagagttctgttctaagccagctctgttttatgctatggtcttgttgctttctctcccatgggcccatgtcttgatccctacttcagcctaatgactggaatgccacctctgttttcatttacctgcctcactactgagtatcaattgccttctgcattccttgccatggtgcattacttatccactgggattctgggatcgtgtagtaatgatttccgtttcttcccaaagatttatactmcctttcctttacaacattatgtgataatgtaacattattgctgagatgtgactgactacccagaaagtacatttccttccctgccatcttccaatgagttggaaacatagagcaattttgtctaatatatatgtaagagatgtatgctgcttccaacccagttcataaaacctccacagagccaagtgatatcaccatccagagtaacttggtcctgttaaagtggcagaacctctgtgaacttgtgt

SEQ ID NO: 923966 - DNA, 592 bp, Homo sapiens
tggctcacgcctgtaatcccagctactatgggaggacaaggcaggcagatgacgaggtcaagagatcgagaccatcctggccaacatggtgaaaccccatctctacaaaaaaaaaccaaaaaaattagctgggtgtggtggcacgcacctgtagtcccagctactcaggaggttgacgcaggacagtcacttgaacccaggacatggaggttgcagtgagctgagattgcaccactgcactccagcctggcaacagaacaagactccatctcaaacaaacaaaaaaccccccccaaaaaaaccaactaaggtgctttcatatttgtagcccaaatgaagtgagataagacttgccagggcaaaaggaatgctgctaggagagaacatggtaaagctcttaagagctctgtggtcttkagaaggaagctgccaaggcaggaaaaacatcaaataatagggcataaagatgaatgaggccaggcacagtggctcacgcctgtaatcccagcactttgggaggccaaggcgggtggattacttgaggtcaggagtttgagaccagcctggccaacatggcgaaaccctgtctcta

SEQ ID NO: 923967 - DNA, 561 bp, Homo sapiens
aagaacatcttttgaaggctcagcagatcagcatagaattaaacaaattgtgggatattatgcaaattcaaaaaccactgtagttaggcaattacctaggattgttggaatgttaaacctgaaagaatgttcatttccacaaagaaacgctcagatctgcggccagatctcttgcattttcaaaggcaaggcagagttagtctctcgtctctacttctgtattttgatattggcaatgaattacattttctcaaaaaaacactgagtttaaaaaaattataactagttgccagttgataatattgccacaaaagccttatgggcmtcaagcctgagaagaaaagttggcaaatgaggtattcattttaaaaagtgagttctaaggcctggccaggcacagtggctcatgcctgtgatcccagcactttgggaggctgaggcaggcggatcacttgaggtctggagttcgagaccagcctggccaatgtggtgaaaccccgtctctaccaaaatataaaaaattagtcaggcatgatgatgcatacctgtagccccagctag

SEQ ID NO: 923968 - DNA, 605 bp, Homo sapiens
cttccctccgctggaaacagaagctcccagcgaatgtttctaactcctgagtccactcagccatgtcccccttgcaaaatcctccccttcccgcacccccctgcacccagccagccaatccgcggcctacgagcctcgccagacccatctcccagggcctcagcgggataaaaccggtcggtgatgccgggtggatgggaacaaacttcagaaggaggagagacaccgggcccagggcaccctcgcgggcggacccaascagtgagggcctgcagccggccggccaggtatgtcacccaggggttagctggaagctggctagcagtgaggacgggggatggaagaaaggagagggtcccaggatgcctggcagccttttccctcccaagttaaacgggataagactgggacagcggagggagtgggcacggaggttggagtctggagcttcttcagcgcactcccaatccttgatcctcccgggaagcctgttagctaggctaggctgaggttggccctacttcgcctaaaaatcctcctactcctggcagacgatgcaggtgtaaaggatgaggcctggggagggggcctgaggatgcaggcat

SEQ ID NO: 923969 - DNA, 644 bp, Homo sapiens
cttcaggtctagccctgacccttccttcctcagtaggcagggctttcctgcagggtctccaataactccagccagaggctcagagacagaattcggatctccctcggcctgagctcctaggggaaggggtggctgcagtctctgtggatcagcagatttagcctctccttctggtagttctgaggaatctgggcagtcyagacaagtgggtttgcccccagcgaaacacaccctctcaactaagggacaaagtgtttcattaaacgggttctgttccctgtgccacccaactgggtgagaccctcctacaggggttgtcagacagcctataccggagcaatcctactggcattaggttggtggtcctcgaggtcagaggtcctagaagaaggagtagacatccatctttgctgctgtccagcctccttgagtgacatctccaggactggagagaatcagatgaacagggcctgaagtgaactcccagcaaactgcagcagccctacagaagagggacctgactattgaaagaaaaacaagcagaaagcaacaacaacagcatcatcatcaacaacaacaacaacaacaacaacacaataacaacaaaaaggcccccaggaaaaccctgtctaagtgttgacaac

SEQ ID NO: 923970 - DNA, 589 bp, Homo sapiens
attacaggcatgagccaccgcccccggccatgaccattcttttaaggtgaaaaaattagggcacagagaggctagtcacctgcttctaggtcacacagctaggaaatggtgatgttgggttttgtctcagctctttcctttgttcctttcttcgttcctttctctctctctcttttctttcctcccttccttcccttctttcctttccagctttattgggaaataattcacacactatataatttacccatttaaagtgtacaactcagtggttttttatattcacgcagttgtgtaactgtcaccacagtcaattttggaacattttcatcacctcaaaaagaaaccctgtcttcaccccctctatttccctttccctctcccccggcccctggcaaccrcgaatccactcctgtctctgtggtttgcctgttctggacgtttcctagaaatgggctcagacaataggtggccttttgtgtctggcttctttcactcagcaccagggtttcgaggctcggccgtgttgtggtgtgcgtcagaactgtatttctctttattgatgaataatattgccccaggcagatgt

SEQ ID NO: 923971 - DNA, 620 bp, Homo sapiens
aagctatatgaagacactataagaaaattacagatcaatatcccttgcaatactgatgcaaatatcctcaatgaaatactaataaaccaaattcagcatattaaaagattttgttttcttctaacttggtcttcgggtctctctctggagagtggccaggaactctagctctgccccgacaaggctctagaggaggtggtcactgatgtttacagtaaatcaaaagaggatacttctttatcttggtgaatgggacaatgccttcttgcctgacctgtggccaagtgtatgtctcacaggaaacttgtttatactagcagatgccctcgtggttcttgtccracctgtgtccagtttattcctgccaagatagccactctccaggagtgctgactgggaggaaagttaggtatgtgtatgtcagtcaggtgagacacagaggcagcaaaacaaaacacatgaaataaaagcagcattttgttaatcacagataagagtgaatctgtggaactctgcctttattaaggtccacaggcattacctcttaaggctttccagcaggggttgtgaactggctaatttaaagaaaatatgtgtaaaggggggaaattatttgcatg

SEQ ID NO: 923972 - DNA, 585 bp, Homo sapiens
tgaattctaccagaggtacaaagtggagcggtaccattccttctgaaactattccaaacaacagaaaaagagggactcctccctaactcattttatgaggccagcatcatcctgataccaaaacctggcagagacacaacaaaaaaagaaaatttcaggccaatatccctgatgaagattgatgcaaaaatcctcaataaaatactggcaaaccaaatccagcagcacatcaaaaagcttatccaccatgatcaagttgccttcatccctgggatgcaaggctggttcaacatacacaaatcagtaaacataatccatcacrtaaacagaaccaacaacaaaaaacacacgattatctcaatagatgcagaaaaggccttcaataaaggccttcaaaacaccccttcatgctaaaaacactcaataaactaggtattgatggaacatatctgaaaataataaaagctatttatgacaaaactacagccaatatcatattgaatgggcaaaaggtgtaagcatttcctttaaaaaccggcacaagacaaggatgccctctctcaccactcctattcaacatagcac

SEQ ID NO: 923973 - DNA, 636 bp, Homo sapiens
gctgaattctaccagaggtacaaagtggagcggtaccattccttctgaaactattccaaacaacagaaaaagagggactcctccctaactcattttatgaggccagcatcatcctgataccaaaacctggcagagacacaacaaaaaaagaaaatttcaggccaatatccctgatgaagattgatgcaaaaatcctcaataaaatactggcaaaccaaatccagcagcacatcaaaaagcttatccaccatgatcaagttgccttcatccctgggatgcaaggctggttcaacatacacaaatcagtaaacataatccatcacataaacagaaccaacaacaaaaaacacacgattatctcaatagatgcagaaaaggccttcaataaaggccttcaaaacaccccttcatgctaaaaacactcaataaactaggtattgatggaacwtatctgaaaataataaaagctatttatgacaaaactacagccaatatcatattgaatgggcaaaaggtgtaagcatttcctttaaaaaccggcacaagacaaggatgccctctctcaccactcctattcaacatagcactggaagttctgcccagagcaatcaggaaagagaaagaaataaagggtat

SEQ ID NO: 923974 - DNA, 774 bp, Homo sapiens
tctgaccccatgtgcaccttcagggaacccattctgcagcctcagacactgggtgattttctggcaagggagtgagagacaacttccttcttctgtttcaaacctaatttatctccaggtggagtcagggctttctacttaatgataggagtgaaaaggcagaaaaaatgacaaaatcagggcgagggtgaatgttcccatcaaagcagaaatgatgtaaaccttttgtattttcccagagaagcgggggctgtagatagcagcgactgtgctccttaaataaaagaagggtcagcgacttctgagaaatgggaaaatggagtgcctgggggtgcccaggaagaactgaaaagactgtatgttggcttccatccgaggctgatctatgggcttcgggaccagacaagtgtgagttagaatcccatttctgtgactcaccggttgagtgaaattaggcaagttccttatcctctctgagccatagttttctcatttgtaaaataaggacaatcccaagtgactaaattattttaccataatcatatggattagttttaatccatatgaatatagttaaaattatatgaatatataatcttaatccatgaacattttatctctctstctgtgtgtgtgtgtgtgtgtgtgtgtgtgtgtgtgtgtgtgtgtgtgtatagcatctggcttttaaactgttgctcaaaaatattattttcattgtcacttgcaaagctcaaatcaaaactgagcagaagggaacacccttccctgttt

SEQ ID NO: 923975 - DNA, 774 bp, Homo sapiens
tctgaccccatgtgcaccttcagggaacccattctgcagcctcagacactgggtgattttctggcaagggagtgagagacaacttccttcttctgtttcaaacctaatttatctccaggtggagtcagggctttctacttaatgataggagtgaaaaggcagaaaaaatgacaaaatcagggcgagggtgaatgttcccatcaaagcagaaatgatgtaaaccttttgtattttcccagagaagcgggggctgtagatagcagcgactgtgctccttaaataaaagaagggtcagcgacttctgagaaatgggaaaatggagtgcctgggggtgcccaggaagaactgaaaagactgtatgttggcttccatccgaggctgatctatgggcttcgggaccagacaagtgtgagttagaatcccatttctgtgactcaccggttgagtgaaattaggcaagttccttatcctctctgagccatagttttctcatttgtaaaataaggacaatcccaagtgactaaattattttaccataatcatatggattagttttaatccatatgaatatagttaaaattatatgaatatataatcttaatccatgaacattttatctctctctstgtgtgtgtgtgtgtgtgtgtgtgtgtgtgtgtgtgtgtgtgtgtgtatagcatctggcttttaaactgttgctcaaaaatattattttcattgtcacttgcaaagctcaaatcaaaactgagcagaagggaacacccttccctgttt

SEQ ID NO: 923976 - DNA, 665 bp, Homo sapiens
ctcctgacctcaggtgatccgcccctctcggcctcacaaagtattgggattacaggcgtgagccactgcacccggccaggaatttttttttaacctttattttagattcaggggtacatgtgcaggtttgttatacaggtaaatcgcatgtcatgggggtttggtatacaggttattttgccacccaggtaataagcatagtacactctataggggtaatatggtagttttttcacgagttatgtaggttatatattcactttccagagataaagtacataatctattttggaaayacactttaaaaagggagacagcatgctgccaaaattgcataggagctcactaggttttgatggtcatttttacacttaattcacttttttttttttttttttttgagacaaagtcttctctgttgcccaggctagagcgcagtggtgcgatctcaactcactgcaacctctgcctccctagttcaagcaattctcaagtctcagcctctcaagtagctgggactacaggcgtgagccaccacacctggctaattttttttaatttttagtagagacaggttttcaccaggttggccgggctagtcttgaactcctgacctcatatgatctgcccacctcagccttccaaagtgctaggattacagctgt

SEQ ID NO: 923977 - DNA, 410 bp, Homo sapiens
aggtcatcagctgagaacagagtaggaagggaggaagtggtttgtaagaggaggaagtggtttgtaagaggagaaagtcagcccagcattgtaggagaacaaatagattaaggaaatgtaatatggtatcagggagcattgaaggctcacttgagcttagtggtcaaaatttaaagaccactcaaaaattttgtgtgtatttcacattcaccakctatatgcagagtatacagagttggatttaaccagatgcatacaacaggaagagggtcaagaaattcaagggtatgtggaaaggcataatgataagtggctgtgtataaagaagacccaatgaggtactctggtaggtgtccaacaaataagatgaatcaaaaaaagagatatcaatacaagactcctgaaatctt

SEQ ID NO: 923978 - DNA, 741 bp, Homo sapiens
gtaaataataggccaacaaaaacaacaaataatctcaaaatcaaaagttggggatgagaagtccttagggtctttgaaaagctctgatatatttaagggaatctagaaggccacttgcatgcaaagggctatgaatgtgaccagtgctayaaagatggtcaggaaagatctgagaacaccctgaagccctagtgagcaggaagtgaaaagctaagccagagttgtaaattacctggctaaatgttgaaaggccggcgcagtggctcatgcctgtaatcccagcactttgggaggccaaggcaggcagatcccttgagctcaggagtttgagaccagcctgggcaacatggtgaaaccctgtctctaccaaaaatacaaaaattagccaggcatggtggcatgtgtctgtgtttgtggtcccagccgctcgggaggctgaggcaggaggataccttgaagcagaggttgcagtcaaccgacattgtgccactgcattccagcctgggtgacagagtgagactctgtctctaaataaataaataaataaataaataaataaataaataacgtgtgccccagcaaacacataaagccttttagcgaagactgggagaattactgcttccaggcatttagggaaatctctatccagtcatcgggtgatcactaagataactgaacaaagacttccatagttacatacaataaagaatacagacttcatagaattagctcaggaaa

SEQ ID NO: 923979 - DNA, 694 bp, Homo sapiens
aagataactgaacaaagacttccatagttacatacaataaagaatacagacttcatagaattagctcaggaaagctgtgaaacaaacaaataacaacaacaacaaacagcaacaacaaaacaccctagagaaggggagattctaaatgccaaagttttcacattatgttcttttttttttaattttactttaagttctgggatacatatgctgaacacgcaggcttgttacataggtatacatgtgccrtagtagtttgctgcacccatccacccatcaacccttcatctaggttttaagcccagcatgcattaggtatttgtcctcatgctctccctatccctgcaccccaccccccgacaggcccgtgtgtgatgttcccctccctgtgtccatgtgttctcactgttcaactcccacttatgagtgagaacatgcggtgtttggttttctgttcctgtgttagtttgctgagaatgatggtttccagtttcatccatgtccctgcaaaggacatgaactcattcttttttatggctgcacagtattccatggtgcatttcacattatattatttcaatgaccagttttcaaaaagaaaacattagacaaggagcaagaaattatagcccatacacagggcaaaaaccagtcaatagaaactgtcccagaggaagtccaaacactggactta

SEQ ID NO: 923980 - DNA, 694 bp, Homo sapiens
aagataactgaacaaagacttccatagttacatacaataaagaatacagacttcatagaattagctcaggaaagctgtgaaacaaacaaataacaacaacaacaaacagcaacaacaaaacaccctagagaaggggagattctaaatgccaaagttttcacattatgttcttttttttttaattttactttaagttctgggatacatatgctgaacacgcaggcttgttacataggtatacatgtgccatrgtagtttgctgcacccatccacccatcaacccttcatctaggttttaagcccagcatgcattaggtatttgtcctcatgctctccctatccctgcaccccaccccccgacaggcccgtgtgtgatgttcccctccctgtgtccatgtgttctcactgttcaactcccacttatgagtgagaacatgcggtgtttggttttctgttcctgtgttagtttgctgagaatgatggtttccagtttcatccatgtccctgcaaaggacatgaactcattcttttttatggctgcacagtattccatggtgcatttcacattatattatttcaatgaccagttttcaaaaagaaaacattagacaaggagcaagaaattatagcccatacacagggcaaaaaccagtcaatagaaactgtcccagaggaagtccaaacactggactta

SEQ ID NO: 923981 - DNA, 629 bp, Homo sapiens
attacaggcgcttgccaccatgcccagctagtttttgtatttttagtagagacggggtttcaccttattggccaggctggtctcgaacttcctgacctcaggtgatccacccgccttggccttcccaagtgctgggattacaggcgtgagccaccgcgcccagcctatgctaagtatcttatatttgtatctcacttaaacctcatgactgcttaatgaggtagagattacttgtaaaacaagtgccaacatacatatttgcatcctgattatcaaacttgttttaaatttaatgtgtattwtgaaaatttccaaacataaatgaaaataaaatcataaactaaatcctcatatagccatttctcagattcagaaataattaggattttgccacatttgctttatctgttttttctgggtcgggggcagcgggggagctgagtgttttaaagcaaacctcaggccttctttcatttcatccctacagatttcagtgtgcacttcagaaacgtgtggacttcttcttctgtgatttgctgccattgtcagacctaatagaattactaataattccttgacatgatcagatttccctgattaactcaaagacatctttttgcagcttgttc

SEQ ID NO: 923982 - DNA, 590 bp, Homo sapiens
aagggacaaattccctaccggtcagcaagccatccccagtatggatgcccactgggatctagactcaagatcatggggactggagttgtaaacatctgctgacctgtgtcctggaaggactaagaagaattaggaaaaagcccatgagttattcaatgatgtccaccataactcagggaaaggaagaaaatccttctgccttyctcgagcagctacgggaggtcttaaggaaatatactctcctgtcacccaactcccttgggggtcaactgatcctaaaagatgagtttattacccaatcagccacagataacaggaggaaggtccaaaagcaagccctgggccctgaacaaaatctggaggcattattaatcctggcaacctcggtgttctataatagggaccaagaggaacaggcccaaaaggaaaagcgagatcagagaaaggccacagccttagtcaaggccctcaaacaaaccttggtggttcagagaggaaagaaaattgagcaggccaatcacctggtagggcttgttatcagtgtggtttacaaggacactttaaaaaagattgtccaatgaaaaataagc

SEQ ID NO: 923983 - DNA, 733 bp, Homo sapiens
ccccaccagcactgcacgagtgatctgacttctccacatccactcccacagttgcttttgcccatttttcctttacctttttttttctttcggaagtgctatctcatttgcatttccctaatgattaataatgttgagaatcttttcatgtgctcattaatgagtcaatggtatgtcttaaagaaatgtttgttcaaatcctttgtccattttttacttagactgtctttctattgttgatttatacaaaggtctttatatawgttggatgttagattcttccccaatatatgatttgcaagtactaggcccattctgtgagttctcttttcaatttcttgatacacttttcttgtacaaagagtttcaatgtcatgaagtccaccttctccattgttttcttttgttgctggtgctcttgtgtcttagtctgtgtgtgctgctgtcaacaaaatgccttagactgggtaattcatcaacaacagaaatgtattgctcccagctctggaggctgggaaaaccaagatcaaggccactcctgtccgggtgtgtcaccagcaaaatctgccaagcccttaacctcctctgaaagttctgctcacctccttgctgaagccaaaacttaaaaacacaggtctataaattgtggcatagacaacgttggttgtgcttgagcaagagcccttccattgtattttaatcctcactggacttacagagagtaactgtatat

SEQ ID NO: 923984 - DNA, 709 bp, Homo sapiens
gaaggtttcttattcatcaagtaagtagcccttgaactcctatcatgcgcatgtagttcactgggtgctgaagatatgtcggggaccaggagtgatggtcccttccctcacagacaggcacaggggaggcagccgagccgtgcggatgagctgggcagtgggcaggcctggtttgagggtactccctgctccatcccctaagggtgygcctcccatctagttccccaacctcccagagcagccatgtcttcttgttaaacgagggggccgaccagctcagctatagatcacagccaaaccagacaagcagtgggtcttctcgttctcgagtctcctggattcccatgggtggtggcgcttggggctccgcctgctttcctgtgctgggtggatgggtcttctctaagaggtcctggacttggagaacttctgggctgagcccagtcccgctacagggtaagttaaaaacagccctgtttagagaagcgtgggtgtgtctgggtaagcttgcggatgctcctcatgggcgaattcgtgggcggagttaaatgacagggagaactgggctggttggctggggggctcccttgcaaggttctgtagataagccagcacagcagtgctgggaggagagacctggcaccatacctcctccccagacgagagcacactgcacggccccatttgtgtcccggtgagatgctcccca

SEQ ID NO: 923985 - DNA, 793 bp, Homo sapiens
gatgcttttgaggggatctgtagcagtccttttttgcgagggtgctctctggagttctcagaagaccccaatgttactgctcacttaactcgcccttcccagcctgtgtgtttgccttaaagcgcctcgttacaacacaggcagacagtcacactggcttctgttcactgtggacctactaggagcctggtccaggcccagtgacattccaggcattctctctgtgggacaagtatcattatccccattttgcagatgaagaaaaggtgagcatggaaatgggagctggctggcaaactttttctcgtgccttttcctccatggttcaggcrggggcccaggaacttcggtacacagttggtggttgaagctttggagggccagggactcagggagcagccctcatcccaggaccctcagtccccagatgggcgggattggtcaccgcagaacctcagcagctcttgggctgcactgctcaatggaactttctgtgtggattgaaatgctgtctacgtgcgctgtccaatacgagagccacttgcacatcaaactgactagtgcaaccgagggactagcttttcaattttaatgagtttaaacgtcaagaggcacacgtgactagtggctactatattggtcagtgcaggttggaggatgggttttctttttttctctttttttttttttttttttgagccagagtcttgctatgtctcccaggcttgagtgcaatggcgtgatcttggctcactgcaacctctgactccctggttcaagcaattctcctgtt

SEQ ID NO: 923986 - DNA, 608 bp, Homo sapiens
tgaccagcccccactctgccagtgtggtgttgaccaggctaggcaggaagagaggaagggagagaacgagggtgatctaagcgtgggccccaacccccttgcttgagtaggactttaacgagggtctcatggagagttccagatgcaagagacacagcaggggacaggagacaaggcccctgttcctacgaggctcacgatctcattagaggacgcgcaagatgaacaagcagcaaactaatgagaagtaatcatttcacatggtcatgattgctgcgaagaaataaaaccagatgaggggctagaatgggccttgggtgggggctcaaggcagaacttgcaaagtcccagaggaggtgacagtgagcagaggcctgggtcctggggctctggcgggccctttccagcctcagctctgccccaggaactcagcccctctggccctggcacatccccatggattcytgaggccctgagggccacgttctctctgtccctcatcaccctgccttcctgcattgggggaaagaggctcaatagagaaatgagggccctgagttgaggccactgtggacgtggggcagagagacctgccgtggggagcagct

SEQ ID NO: 923987 - DNA, 608 bp, Homo sapiens
tgaccagcccccactctgccagtgtggtgttgaccaggctaggcaggaagagaggaagggagagaacgagggtgatctaagcgtgggccccaacccccttgcttgagtaggactttaacgagggtctcatggagagttccagatgcaagagacacagcaggggacaggagacaaggcccctgttcctacgaggctcacgatctcattagaggacgcgcaagatgaacaagcagcaaactaatgagaagtaatcatttcacatggtcatgattgctgcgaagaaataaaaccagatgaggggctagaatgggccttgggtgggggctcaaggcagaacttgcaaagtcccagaggaggtgacagtgagcagaggcctgggtcctggggctctggcgggccctttccagcctcagctctgccccaggaactcagcccctctggccctggcacatccccatggattcctgaggccytgagggccacgttctctctgtccctcatcaccctgccttcctgcattgggggaaagaggctcaatagagaaatgagggccctgagttgaggccactgtggacgtggggcagagagacctgccgtggggagcagct

SEQ ID NO: 923988 - DNA, 736 bp, Homo sapiens
attctattgcttaaaaggatgtagctcaaactttttgcaagatatacaaaactacatattatatatatatatatatatatatatatacacacacacacacatatgaatatgagactattgcaggagctgctaacctgtattgtagaaataggcaaatgacatgtttaaccaaaggatttagtcttctctctttaattatacaatttcattttgtatcttgttcaaattatcactattaaagattttgggaattattttttaggcagagcagagcaggatgatgtggaagataaagaaatgtgatatctggatggatggatgctagtctttgaatatcactggctggcttgtaagtataatagagtaagttcatcttgccatctggctaatgtaaaatggaaagcagaggtacttgccaataagaactgcagaactgaatgaattcaataaggtttagatcggcaacacttgatcatcaaacatttccaatttctaaattcaggtccastgtcagtcaagttgtgagttccagaattacctgatgtgaacttcaaaaaacagatctggggccgggcatggtggctcactcctgtaatcccagcactttgggaggccgaggcaggtggatcacctgaagtcaggagttcgagaccagcctgaccaacgtggtgaaaccctgtctctactaaaaaatacaaaaaaatttagctgggcatggtggtggacgcctgtaatc

SEQ ID NO: 923989 - DNA, 619 bp, Homo sapiens
tcatggtaacctcaaatttaaaaaaatacaatgaaggcacaaaaaattgaaagcaaaaagctaaattatatcatgagagaaaaattatcctcactaaaaggaagacaagaaaaatggaatgaaggaagagaagaacacaaataactagaaaacatatcacaatgtggcaggagtaaattgttatatatcattacatattacgtatttayatattaaatgtaaatggactaaactcttcaatcaaaagacatagagtggctgaataaatggaaaaagcaagacccaatgaattgttgcctactataaacaaacttcacctaggaaaactcacatagactgaaaatagaaatatgaataaagatatttgatgccagtggaaacccaaaaagaagagtagtagctatacttatatcacacaaaattgattttatatcacacaaaatagagaccaaaattctgagaagagacaaatgaagagaaaaaagaaggcaactatgtaaagataaatgggtcaattcagcaagaagatataatgattgtaagcatacatgcacccaacagtggagcatcagatacataatgcataaattattagtgctagagaaagaaatagacccca

SEQ ID NO: 923990 - DNA, 620 bp, Homo sapiens
agagatgaatggataaagaaaacatggtacatatacagaatggagcactattccaccatagaaaagaatgagatcttgccatttgcaataaaaggaatgcgactggaggtcattatgttaagtaaaataagccaggcacagaaagacaaatatcacatgttctcactcatctgtgggtgctaagatttacaacaattgaactcctgaatataaagcgtagaatgaagatttccggaagatgggaaaaatagtcaggaatgagtgaggggtagacagggaaatagctaatgggtacataaaatagagtaaataagacctagtatttgctagcaaaactggatagctacagtgaaaaataatttaattgtacattaaaaaaataactcagagtataactgaattgtttgaarcacaaagggttaatgcttgaggtgatgaatatcctgtttaccttgacatgattagttcatgttgaatgcctgtatcaacatatatcatgttactcataaatatatatacatgtatacacacacacacccccctaatatgtatccacaaaaatttaaaaaaataaaagtttaaaaaataaatattaaacacaaataaaataaaattttgta

SEQ ID NO: 923991 - DNA, 572 bp, Homo sapiens
cactgataatcagagaaatgcaaatcaaaactacaatgagatatcatctcatcccagttaaaatagtttatatctaagagacaggcaataacaaatgctggtgaagatgtggagaaaagggaacccttgcacactgttggtgggaatgtaaattagtacaaacattatggagaacagtgtgcatgttcctccaaaaactaaagacagagctaccatatgatgtggcaattctactgctgggtatatacccaaaagaaaggaaatcagtttatcgatgtgctatctgcackcttatatttgttgtagcattgttcccaattgccaaatttggaaacagcataagtgtccatcaatagatgaatggataaaaaaatgtggcatctatacacaatggagtattattcagccataaaaatatgagatcctgtcatttgaaataacatggatggaaccagagatcattatgttaagtgaaataaaccagacatagaaggacaagcatggcatattctcatgtatttgtgggatctaaaaatgaaaacaattgaattcatgtagctatagagtagaaa

SEQ ID NO: 923992 - DNA, 607 bp, Homo sapiens
tgcaaaaaaaaaaaaatgccagcaatgatgctagtaatttttcctcctttctacttatttttattttttattttggggaatttcatttttccatatgtaaattctaagtctgaaatcacactttatatcagggtagatatttggcaatagttcatatcagaaaatgttcatcttctttctttaggtataatctaatgttatagtctgaatgtctgtctgccccccaccaaaaatttcatatattgaaattctaatcttcaaggtgataaatagtattaggaggtaggcctttgggaggtaatcagatcatgaaaatggaaccttcatgaatggaattagtgcccttataaaaaagaccccagaaaatttatttactccttctaccatgtgaggacacagctcataaaccagagagtgtgaccttaccagacattgaatttgctggcagcttgatcttggacytcctagcctccaaaactgtgagaaataaagttctgttgtttataagtcacctggtttatggtattttgtgatagcagcctgaatgaactatgacattgtaacaaagaacaaaaagataaggcattgctggaaatacagcttttta

SEQ ID NO: 923993 - DNA, 573 bp, Homo sapiens
ataggacagtttagattagaaaatgaaaaagaattgtgtgtccagtcgaaatgacagggaggaatctgatggcaagtaaatgcctgtttatggaaggcagtgcgctttccaatcagacaaacctcctctgtccaaaagtgctgagacaaatgtgtgcttctaaacagtgggtcgattttgttcctggatccagcatacaaatgttacattttaaaaactgcattactagatctaggggaaacttagtgcaggcttctccttttaggagagctgggccatacactgtcctagactcccactccctgcccctttatattctattacgtgctgagagaaaataacttcrccctccttccctttgtttttctttcagagcaaatgaagtcaagggcagttctggggggctgggtggggacaggtggagtctgtgcagtgcaggagactttctttaatgttacaaaagtagccctgagctaaatggctctgacaacaaaattaactatccaaaccaggtgagacttgtttttccattcatgacagagcaggttggaattcatttcagtttactaaccc

SEQ ID NO: 923994 - DNA, 771 bp, Homo sapiens
tgtatccttctttgttgatcagttatagaatcaccttatttgtaggtggtttgctttctgttttttttttttttctttttttctttttttgagacaaagttttgctcttgttgcccaggctggagtatagtggcaggatcttggctcactgcaacctccccctcccgggttcaagcgattctactgtgtcagtcagcctctctagtagctgggattacaggcatgcgccactatgcctggctaattttgtatttttagtagagatgggtttctccttattggtcatgctggtctcgaactcccgacctcaggtgatctgcctgcctcggcctcccaaagtgctgagattacaggcgtgagccaccrtgcccagccagccttttgtttttttaggaagatttgaggatattcttatactctgagctttgagaatttacgtggctctgtctagaagtcagttattttttccctcattcatctgcccagtcctttcaaaccgaagactagtatttatcagctctgggatattatattgcagtgtgctttaggaatttctgcttgcaaaatgcttcaggaatttttgcctctttgttctttttttctttttatttctggaactccttgtaatggaacttgaatctcttggattaatttaacaccttattttttaaaatgagaattaaattttctatattctaccccttgcttttgctcttctttgtctggaaaagagtctccacctcattttctgacacttgtattgactcctta

SEQ ID NO: 923995 - DNA, 630 bp, Homo sapiens
ttaaagtaaatccacaccattttaaaaatgttaaaacagtataggaaggtacatattgaaaaacagaagcctcctccacccccagaggcttctggagggcagaaaatgttgattcttgatcagggagctggttacagaggtatgtttatttaatgaaagttcaagacgctatctgcttagaartatgcattttctacgtatatgttacacttcaataaaaagctttctgccaggcgctgtggcccatgcctgtaaccctagcactttgggaggccaaggcgggcagatcacaaagtcaggagttcaagaccagcctgaccaacatggtgaaaccctattctactgaaaatacaagaattagccaggcatggtggcacatgcctgtaatcccagatactcagaaggctgaggcaggtgaatcgcttgaacccaggaggcggaggttgcagtcagccgagatcgcgccactgcaccctagcctgggcaacagagcgagactccatctcaaaaaaaaaaaaaaaaaaaggtttcagtggcccctgttatttgggttcaattgtgctttctcaaaatatagtgaagtcccctaaactccagtatcaaagaatgtaatatgatatggaaataggg

SEQ ID NO: 923996 - DNA, 502 bp, Homo sapiens
tacagaggtatgtttatttaatgaaagttcaagacgctatctgcttagaaatatgcattttctacrtatatgttacacttcaataaaaagctttctgccaggcgctgtggcccatgcctgtaaccctagcactttgggaggccaaggcgggcagatcacaaagtcaggagttcaagaccagcctgaccaacatggtgaaaccctattctactgaaaatacaagaattagccaggcatggtggcacatgcctgtaatcccagatactcagaaggctgaggcaggtgaatcgcttgaacccaggaggcggaggttgcagtcagccgagatcgcgccactgcaccctagcctgggcaacagagcgagactccatctcaaaaaaaaaaaaaaaaaaaggtttcagtggcccctgttatttgggttcaattgtgctttctcaaaatatagtgaagtcccctaaactccagtatcaaagaatgtaatatgatatggaaatagggtcat

SEQ ID NO: 923997 - DNA, 782 bp, Homo sapiens
tactaggcattttgctagatgctcaggatacagtagcaaatcaaatagacaaaatcattatcttcacagagcttctagaccaagaatgtgagtattaagtaaacagtatatatgctaaagagtgcatgaaaaaaaagtaagtactatgaaaaagtatggtgggaagggtatagaaagtgtgtgtgtggggggcgcagacgcagtggctcaggcctataatcccagcactttgggaggcagaggcaggtgaatcacaaggtcaagagttcaagaccagcctggccaacatggtgaaaccccgtctctactaaatatacaaaaattagccaggcatggtggcataggcctgtaatcccagctactcgggaggctgaggcaggagaattgcttgaacctgggaggcagaggttgcagtgagccaagatggtgccacttcactccagcctggacaacagagcaaaactctgtctcaamaaaaaaaaataaagtgtgtgtgtgtgtgtgtgtgtgtgtgtgtgtgtgtgtgtgtgtgtgtgttggggaggtgagaagagggcaaggttgcaattgtaaaccaagaagtcagggaaggccaccccttgatcttgggcaggagtttgtgactccttcaaccaataaagaatggtgggaatgacattatatgacttaccaggctaaattataaaaatgccatgcacctcctccaggttctgttggatcacacactgttggagcccaaccaccatgctgtgaggaagcccaagcagccacctggagttctg

SEQ ID NO: 923998 - DNA, 499 bp, Homo sapiens
atccccccaggctgtgtggtgtagcctattgctcctgggctacaaacctgtttagcgtgttactctactgaatgctacaggcaattataacacaatgggaagtattggtggatctaaacatatataaatattaaaamggtacagtaaaaaaaagatattaaagacaaaaaatgtggctgggcatggtggctcatgcctgtaatcccagcactttgggaggctgaggcgggcggattacttgaggtcaggagttcgagaccagcctggccaacacagtgaaaccccatctctactaaaaatacaaaaattagctgggcatgatggcacacgcttgtagtctcagctactcaggaggctgaagcaggagaatcgcttgaacccaggaggcagagtttgcagggagccgagattgcgccactgcactccggcctgggcgacagagactctgtttcaaaaaacaaaggataaaaaaagttacacctgtgcagggcacttacca

SEQ ID NO: 923999 - DNA, 866 bp, Homo sapiens
cttccccttctcccagaaaccccgggatcactccccaggaagaagttatttttctagcctgaaaagattgagcacaaaattctaaaatctcatcttagtgggttttttttttctacaaagacatgattatttcatcacgttcacctactgttcctctcccatctgatctctgaatctccagagtaaacatcccatgaccctgaattacatgctggtaatgcaggtctggaagaggggggatcatgagcctgtcactcactgactaactcccccagaaaggaagatacctctgcatatggaagacttgctttctgaactgaaagaacaagagttaattctcctaagtcaacgccaacacttagacatgaatttgtccctaaaattcctcactgtgactccgtttcttcatctgtagaatggggmcaacagcagagctttcccccatgattgctctgaagattaaataaaaccatgcaaacagagcatttagcttcattccctagcacacagtcaatgttgtataaatgttcatgtacaaagagtgtaaaaccatctgtttcacagaacgccactgaggattaaataaatgcatacagtgcttttcattttgagcctgacacagagctcacactcaagaatcatccagtcctgccaggtgcggtggctcacacctgtaatcctagcactttgggaggccgaggcgggtggatcacctgaggtcaggagttcaagaccagactggccaacatggtgaaactccatctctactaaaaatacaaaaattagccaggtatggtggcacatgcctgtaatcccagctactcaggaggctgaggcaggagaatcactttaacctgggaaggtga

SEQ ID NO: 924000 - DNA, 755 bp, Homo sapiens
gcctctccttctcatggatatcttctgaatggtatagtctatttatccattgtccatgtcctaccatttgcacattgacctaggtatttgtcttctccacagattatccacatacttctatgtaaagtctctagtcacttcctaattattaaatccaatgaatacttaaccagccttattttattttaattctgggactgacatgttgactactctctgctcaaaattctcttctcatttgtactctatgacaccactgccttccacccctgcagccattcctttcaggcttttcctcagggttctcttccatttcctatacctaaagcatagatgatcatcagtgttttatcattagtcctctttcctacgcattttaaaaatattttcctgaattagctcatctcttctcatgagttagttgagaaaagctagctctttaatgctgacgacttctaaagctacatctacaaacataaaaataaaccagaaatccaccccaatgggcccatgcataaaccacatttgatgattttctcaaaaytctgcaacatgaactcaactccaggaagactcactgaacatacctgactcatctccaccttcatgccatttctcttgttctatctacaactatcgcttgtctccatcttctttcatctatccagatgttatgcatcgttcatgctccaccagtttcccacggctttccaacaacttatcttggttcacagcttttttctttttctgaatgt

SEQ ID NO: 924001 - DNA, 571 bp, Homo sapiens
ccaaattgttgtatagtatatggtgcgtgattagtacatagcaacctaatttaattaatcatttttaaaatttattttaaattgatacataaaaactgtatatacttatcatgtacaacttgttattttgaaatatacatactgcagaatgactatattgagctaattaatatagattacctcacatacttatttttgtggtaagaacacttaaaatctactctcagcaattttcgagaatataatacattgttattaactatagtcaycatagttttttgtttgtttatttgtttgttttttgagatggagtctcgctctgtcacccaggctagagtgcagtggcacgatctcggttcactgcaacctccgctcctgggttcaagcgattctcctgcctcagccccctgagtagctgggattacaggcacctgccaccacacccggctaatttttgtatttttagtagaaacagggtttcaccatgttggccaggctggtcttgaactcctgaccttaggtgatccacccgcttggcctcccaaagtgctaggattacaggcgtgagcca

SEQ ID NO: 924002 - DNA, 571 bp, Homo sapiens
ccaaattgttgtatagtatatggtgcgtgattagtacatagcaacctaatttaattaatcatttttaaaatttattttaaattgatacataaaaactgtatatacttatcatgtacaacttgttattttgaaatatacatactgcagaatgactatattgagctaattaatatagattacctcacatacttatttttgtggtaagaacacttaaaatctactctcagcaattttcgagaatataatacattgttattaactatagtcatcatagttttttgtttgtttrtttgtttgttttttgagatggagtctcgctctgtcacccaggctagagtgcagtggcacgatctcggttcactgcaacctccgctcctgggttcaagcgattctcctgcctcagccccctgagtagctgggattacaggcacctgccaccacacccggctaatttttgtatttttagtagaaacagggtttcaccatgttggccaggctggtcttgaactcctgaccttaggtgatccacccgcttggcctcccaaagtgctaggattacaggcgtgagcca

SEQ ID NO: 924003 - DNA, 547 bp, Homo sapiens
ccattgctttgattgtgctttatcttcaggatcatactggtaaagccatgcttctaccctgtcacaataccataaagaaatccttcaggttctcaatcccacttgtttaaaatttccattgcttccattgctgatagactgcttttgtctgcagtctatctgggcataacagttttggcaccyacaaagtggaagtttgctcaagtttaatttttcagtcaggattatgtttactgaaacaatcgagatgtctatggtgttggctattgtttttgctgttaatcgttggacctcttcagttagggcatgaaaaacatgaattttttccttgcaaatagatgttgatggtctgccactgcaggcttcatctttaacattgccttgtcccttcttaaaatgaataatccattttgttgttgttgttgttgttgtttgttggttgtcttttgtttgtttgcttgtttgtttttattttactttaagttccaggatacatgtgcagaatgcacagatttgttgcataggtttacatgtgccatggtggttt

SEQ ID NO: 924004 - DNA, 615 bp, Homo sapiens
tgacaaaagtgctagactatttaactattgttcattaataatattaatctcaagtccttttttgcaatctgaaatattgccttctttccacttcagagctttagttatatgtcagctagccccttcactctttgaggtgtggagtggggcggtgaagtttagaaagggagggctgagtgggaaaaaaaaaagatgggggagttcctcaaaccacaggatgtagaatcttttagaacatggagaagggacattttctaaagttctatgttcaatgccaggaatttaaattgcatcctgctataattgaaaatgtgtatgtctaacctagggtttcttaacctcagcgctattgacattggaggtggataactctgttgtggagcctgacttgtgtgttatagaatgtttagtaacatctctggcctyttcctccagatgccagttgtcctgtcctccattaagacaaccaaaatgtctcaagacattgccagaggtcccctgggggacaaaatcataccctgtggagaaccattgggctaactggcctggatctgccacatgggtgacccttcacatgtgaggcagtacccagcctccatccggcccaccttccac

SEQ ID NO: 924005 - DNA, 618 bp, Homo sapiens
agtttgctagtgttttgttgagaatttttacatctgtattcatcagagatattgtcatgtagttttcctttttcgtggtatctttatctggctttggtatcgggctaatgcagctcttataaaatgaatttggaattcaccagtgaagtctataatcctgggcttttcattgttgggaggtttttgattaatgattcaattgccatastagttatagatctgtttagactttctgtttcttgaatttatcttggtaggttctatgtttctaagaatttttctgtttcttctaggttatccagtttgttggcgtataattgttcgtagtagtctcttatgattctttttatttctgtagcatgagctgtaatatctcttctttcatttctgattttatttgagtattctctttttttcttagtatagctaagagtttgtcaattttgtttattccatatgtctcttgtattcttttcaatattttgtattttctccttgatttaatctggatgcattttaattgttcatttttctgacttctcttccagttcagctgagtttaatctgctattatgaccatcctttgagtttctaatttttgcaattgcatttttcagg

SEQ ID NO: 924006 - DNA, 627 bp, Homo sapiens
attgtgcagaaccatctgtgaaccaggccctagtcttctctttctttgttaactgaccatagggaactcctcatgaggccattggtgcaggctgggaagaggaggcagggtggccggactggagaccatggacattttagccacttcctcatgtaacttacttgtgccttcaggacttgctcaagcctgatcacatacataccttttccatttgatgatggaatgctgctgcgcacaacccactttatggctagatgggtcagaaagcacctagttcatgataggcagttcaggtcatatggtgacttgaggacccatagtcaagtgttcagtktacaccaaagcccagtaacaggcaaagagctgtcttttcaagggagagcacttatctgacaaagatggcagggccttgttccaaaaccctagaggccaccactgtgatacacctatgggggcctgccacaagcttcaaacagcatccttatctgccactgacatctcaatcaccattggatctgctgggtcatataccccaagtggcagagaagcttgcacagtagcctggacctgttgcagagccttctcctgttctagaccacactcaaactggcagccttttgggtcact

SEQ ID NO: 924007 - DNA, 627 bp, Homo sapiens
attgtgcagaaccatctgtgaaccaggccctagtcttctctttctttgttaactgaccatagggaactcctcatgaggccattggtgcaggctgggaagaggaggcagggtggccggactggagaccatggacattttagccacttcctcatgtaacttacttgtgccttcaggacttgctcaagcctgatcacatacataccttttccatttgatgatggaatgctgctgcgcacaacccactttatggctagatgggtcagaaagcacctagttcatgataggcagttcaggtcatatggtgacttgaggacccatagtcaagtgttcagtttacaccaaagcccagtaacaggcaaagagctgtcttttcaagggagagcacttatctgacaaagatggcagggccttgttccaaaaycctagaggccaccactgtgatacacctatgggggcctgccacaagcttcaaacagcatccttatctgccactgacatctcaatcaccattggatctgctgggtcatataccccaagtggcagagaagcttgcacagtagcctggacctgttgcagagccttctcctgttctagaccacactcaaactggcagccttttgggtcact

SEQ ID NO: 924008 - DNA, 736 bp, Homo sapiens
gtggtgcctgcatattgtgcagaaccatctgtgaaccaggccctagtcttctctttctttgttaactgaccatagggaactcctcatgaggccattggtgcaggctgggaagaggaggcagggtggccggactggagaccatggacattttagccacttcctcatgtaacttacttgtgccttcaggacttgctcaagcctgatcacatacataccttttccatttgatgatggaatgctgctgcgcacaacccactttatggctagatgggtcagaaagcacctagttcatgataggcagttcaggtcatatggtgacttgaggacccatagtcaagtgttcagtttacaccaaagcccagtaacaggcaaagagctgtcttttcaagggagagcacttatctgacaaagatggcagggccttgttccaaaaccctagaggccaccactgtgatacacctatgggggcctgccacaagcttcaaacagcatccttatctgccactgacatctcaatcaccattggatctgctgggtcatataccccaagtggcagagaagcttgcacagtagcctggacctgttgcagagccttctcctgttctagacyacactcaaactggcagccttttgggtcactcagtaaataggtgtgagtaacaaacccagtgagaaatgtgttgcctccaaaatccataggcccactaggcgttgtgctctttcttggctgtaggtg

SEQ ID NO: 924009 - DNA, 706 bp, Homo sapiens
taacaggcaaagagctgtcttttcaagggagagcacttatctgacaaagatggcagggccttgttccaaaaccctagaggccaccactgtgatacacctatgggggcctgccacaagcttcaaacagcatccttatctgccactgacatctcaatcaccattggatctgctgggtcatataccccaagtggcagagaagcttgcacagtagcctggacctgttgcagagccttctcctgttctagaccrcactcaaactggcagccttttgggtcactcagtaaataggtgtgagtaacaaacccagtgagaaatgtgttgcctccaaaatccataggcccactaggcgttgtgctctttcttggctgtaggtggggccaagagcagcaacttatccttcaccttagaaggaatatctcaacaggctccacaccattggatccctagaaattttacagaggtataaggtccttgaattttaatcggatttatttcccatactctggcacacaaatgtctcaccaataagtccagtgtgtttgctacttcttggtcactggatccaatctgcataatgtcatcaatgtaatggaacagtgtgatatcttgaggaagggaaaaattaaccaaggtctctctgaataagattatgacacaaagtggtagagctgatatacccctgaggtaggacagtaaaggtatattg

SEQ ID NO: 924010 - DNA, 659 bp, Homo sapiens
ctagaacatgcaacccattgaggtcaccctcatccaatgcaagggtgatagagcaagaccttttctctaaacaaaagaaactgcagtttctttggtggcagtgtattaagttctcagttggagaatctggaagccgcacccttgttttttcctctacttgtgcagaacgcacaccttttgcatcctactccctgttagaaggaattccagggttcagagattaccacagggcccaacagcaagagactgttgttaaccaggcttgagattttagggacacaggattacctcaatcatttgttagacttctgatcaatttcatgtatagtaatcacaaataacttacctaaagtcttatttatttatttagagayagagtttagctcttgctgcccaggctgaagagcaatggtgcgatctcagctcacctcaacctctgctgcccgggttcaagcaattctcctgcttcagcctcccgagtatctgggattacaagcatgcgtcaccacacccagctaattttgtatttttagtagagacagggtttcaccatgctggccaggctggtctcgaactcctgacctgaggtgatttgccgcctcggcctcccaaagtgctgggattacaggcgtgagccaccacacccagcctatctagag

SEQ ID NO: 924011 - DNA, 591 bp, Homo sapiens
ggtgaaaccccatctctactaaaaatacaaaaattagccaggtgtggtggcacacaactgtaatcccagctatttgggaagctgaggcatgagaatagcttgaacccaggaggcacaggttgctatgagccgagatccctcactgcactccagcctgggggacagagtaagactctgtctcgaaaaaaaaaaaaaagaaaaaaagaaatgacaagagattggtagacctgctactagatcttactatgctaattaggaagcacatatattctgacaaaggcttataaaaagaaaaataataagcacatatgttactaaatcactcatttttaaatattttgatgcttacatttcaatatgattaatttcttygaaatcctttgttttttattttatgcatttgaaaacattgttctgtaagggggtccacacacacaaaaggtaaaggatcgctgctctggagtctcagagaagggacaggtgaccatggctggacaaggcagagagggcttcccagatgagaaaagacacaggactttgcactttattaaaagagagccccaggagctctcttttaataaagagagcggt

SEQ ID NO: 924012 - DNA, 591 bp, Homo sapiens
ggtgaaaccccatctctactaaaaatacaaaaattagccaggtgtggtggcacacaactgtaatcccagctatttgggaagctgaggcatgagaatagcttgaacccaggaggcacaggttgctatgagccgagatccctcactgcactccagcctgggggacagagtaagactctgtctcgaaaaaaaaaaaaaagaaaaaaagaaatgacaagagattggtagacctgctactagatcttactatgctaattaggaagcacatatattctgacaaaggcttataaaaagaaaaataataagcacatatgttactaaatcactcatttttaaatattttgatgcttacatttcaatatgattaatttcttcgaaatcctttgttttttattttatgcatttgaaaacattgttctgtaagggggtccacacacacaaaaggtaaaggatcrctgctctggagtctcagagaagggacaggtgaccatggctggacaaggcagagagggcttcccagatgagaaaagacacaggactttgcactttattaaaagagagccccaggagctctcttttaataaagagagcggt

SEQ ID NO: 924013 - DNA, 736 bp, Homo sapiens
agcccaggaggcaaagcttgtagtgagccaagattatgccactgcactccagcctagacaacagagccagactctgtctagaaaaaaaaagaaaacaggtctcaggtgactaatcagtctgggaaagaagggtcagacaccatctgagacgaaaaaacaaaaaacaaacaaacaaaaaaaaacgggagaagaggatttagatgaagttggaaatttgaagagatcagagagaggacaagtcccagtaaaagaagcaatgaggctattggcccaagcaagaagaattgagtgggatggggtgtctctgcaagcatttgcmaagattcacaacaaattctattttcttcaagtttaaactgccttttgagacttttactccatcatgactccaagtagaaagtaaagaacaaaggagagttaaaaaacacaatcaggaaatattgtagaattaatctagcgccacccagtaggattgatagggagccgcagtgtaaatcagccctcaacccgataactccactcgcttcctgacgggaggcaaactgaagagaacatgccacagcagaggccaagactccatcaaagacctaagggaaccacacaaatacctctcgtgaatggtgagcctatgcctggaaaatctgatttctcaagatccttttagatctatgatattagaaagtttctcttttcacctagaataccattcaatgctcagtggtcttctgggtttaac

SEQ ID NO: 924014 - DNA, 736 bp, Homo sapiens
agcccaggaggcaaagcttgtagtgagccaagattatgccactgcactccagcctagacaacagagccagactctgtctagaaaaaaaaagaaaacaggtctcaggtgactaatcagtctgggaaagaagggtcagacaccatctgagacgaaaaaacaaaaaacaaacaaacaaaaaaaaacgggagaagaggatttagatgaagttggaaatttgaagagatcagagagaggacaagtcccagtaaaagaagcaatgaggctattggcccaagcaagaagaattgagtgggatggggtgtctctgcaagcatttgcaaagattcacaamaaattctattttcttcaagtttaaactgccttttgagacttttactccatcatgactccaagtagaaagtaaagaacaaaggagagttaaaaaacacaatcaggaaatattgtagaattaatctagcgccacccagtaggattgatagggagccgcagtgtaaatcagccctcaacccgataactccactcgcttcctgacgggaggcaaactgaagagaacatgccacagcagaggccaagactccatcaaagacctaagggaaccacacaaatacctctcgtgaatggtgagcctatgcctggaaaatctgatttctcaagatccttttagatctatgatattagaaagtttctcttttcacctagaataccattcaatgctcagtggtcttctgggtttaac

SEQ ID NO: 924015 - DNA, 592 bp, Homo sapiens
agcccaggctggagtgcagtggtgtgatctcaaatcactgcaacctccgccttccgggtcctggttcaagcaattctcctgcctcagcctcctgagtaactgggattacaagtacgccccaccatgcccagctaatttttgaatttttagtagagacggggtttcaccatgttggccaggctggtcttgaacttctgacctcgtgatccacccaccttggccacccaaagtgttgggattamaggcgtgagccacggtgcccacccgagcatacgattgttttaaaaaagactagaataaaagccaagctaaagattataaggtatctttgtcagaaatggttgtgagagtgcttcctaccctgtttttgatgctttattgtttataaccatagaattaaacccatgataaagtaaagtataagagaaagataactgacagattttaaagtcatcaaacttttttcttgctctgtcacacaggctggagcacaatggcttgatcacagctcactgcagccttgacttcccaggctcaatcttcccacctcagcctcctgagtagctgggaccataagtgcgtgtcccaccac

SEQ ID NO: 924016 - DNA, 679 bp, Homo sapiens
agctgaaaaatataatagaaaaaaagataccagcagcagcaacaaaaaccatcaagtacctgggaattaacagaatattgaagaacacagaatatggaatgcatatagaacattttatatttaaatacatacatataatatctttaaaatgayatactatacaatatacagtattaaagaatatattaataatgtcaatatactccaactcaaactacaaattcaattcaatcccaatcaaaagtccagctcgatttatttaggaacttgactgactcaatctaacatttatatggaagacgaaaggtctttagaaaagaacagctaagaggaccaagatggccgactaggaacagttggggtcagaggctcccatccagactaatgaaaactgtgagcgacctgcactggcaactaacgtatctaggttctctcactgggactgactaggtggctggcgcatggagagtgaggaaaggcagggtggagccgtggttcacctaggagctgcacaggacaaggggagctcccaccgccagccaagggaggcggcgactgattgtgctaccccgcctgggaaaccatgcttcttccacagatctgcaacccatggatcaggagacccctcatgagcccatgccaccagggccttgggtctcaagcacggagctgtgcagat

SEQ ID NO: 924017 - DNA, 558 bp, Homo sapiens
tatgtccccaccacatctcatcttgaattgtactcccataattcccatgtgttgtgggcgggacccaatgggagataatcgaatcatggctgaggtttctcccatactgttctcttggtagttaatatgtcttacgaaatctgatggtttgataagtagaaagccgtttcatttagctttcattctttctcttgccactgccatgtaaaaagtgccttttgccttctgccatgattttgaggccttcctagccacatggaactgtaagtccattaaacctctttcttgtgtaaattgcccagtctcaagtatgtctttatcagcagcatgaaaatggactaatacagtaaattggtaccagaagtgaggtgctacagaaaagatacctgaaaatgtggaagtgactttggaackgggtaacaggcagaggttggaacagtttggagggttcagaagaagacaggaaaatataggaaagtttggaacttcctagagacttgttgaatggctttgccaaaaatgttgatagtgatatggacaataaactccaggctgagt

SEQ ID NO: 924018 - DNA, 500 bp, Homo sapiens
gtcatattttttcagactgacagattccctttagctgttattatagggcgggtcaattagttaggcacatctttaacttttgtttatctgggtatgtctcagtatcttcttcattcttgaaatagagtttttccaaacatagaatttttggataaatttcatttacctttcagcactttagaagcatcatctcactgcyttcttgtccacgtggtttgtaatgtttcttagtgtagatattgtttttagtttatcctatgtgagatttattgagcttcttgaatgtctagagtcatattttttatcaaagttttatcaagatatttttggaattatttattcaattatttttttctgtccctttcttttttgctcttcttctggaactccattaatattagtactaatttagtatgctggatgatgcatcataggtcccttaggctctcttcatgtcgtgtatctttattgtttttcatcctgcttctcagactgataat

SEQ ID NO: 924019 - DNA, 591 bp, Homo sapiens
gtaatgtgtcctttttcatctctgttttgattatttggatctcctctctttttttcttagttggctaaaggtttatccattttgtttatcttttcaagaaaccaacttttccttccattaatcatttgtgttattttcttcatttcaatttcacttatttctgcccttatctttattttttcttttcttctaccaattttgagcttgctttgctcttgcttttctagttatttaagatgcattgttaggtcgtctacctgaagctttttttctttttgatgtaatcacttacagctataaatttccctcttagtaatgcttttgctgtaccacaaaggttttggtatgttgtgttgccattataacttgtctcaagaaatgctttattttcttcctaatttcttyattcacacgctcatcactcaggagcatattatttaatttccatatatttgcatagtttccaaaattcctcttgttattagcttttagttgtactccattgtgatcagagaagatgctggatagtatttcaattttttttgcatgttttaaggcttgttttatgatctaacatatggtttacccttg

SEQ ID NO: 924020 - DNA, 606 bp, Homo sapiens
ttaccgccagcctcagttcctcttgaaggagttctgagtggcatacagccatagccatcacactcacaaagatttacattaaaggatgtgtgtatgtttgtgtatacacacaacattgtacctgaggaatcttaaatgttcagctagtgagtttaatatcatgcccttgataattagtcttccttgggcaattttttttttttttttttttttttggagactgagtcttgctctgtcgcccaggctggagtgcagtggcacaatcttcgctcactgcaacctctgcctcctaagttctagcaattctcctgccttagcctmccgagtagctgggactacaggcgtgcaccaccacacctgactaattttttatttttagtagagatggggtttcaccatattggccagggtggtcttgaactcctgacctcatgatccacctgccttggcctcccaaagtgctgggattacaggcctgagccaccacgcctggcattttcttttgtttgtttgtttttttgagatggggtctccctctgttgcccaggatggagtgcaatctcggctcactccaacctccacctcctgggttccagtgattctcct

SEQ ID NO: 924021 - DNA, 576 bp, Homo sapiens
tatatttagaaaaattcttgtaggtgggcaatagtgaatgtatataaaaatattcaatgtaggctggatgcggtagctcacgcctataatcccagcactttgggaggccaaggctagatcacctgaggtcaggagtttgagaccagcgtgaccaacatggtgaaaccccgtctctactaaaaatmcaaaaattagccaggcatagtggtgcacaccagtgatcccagctacttgggaggctgaagcaggagaatcacttgaacccaggaggcagaggttgcagtgagccgagactgtgccattgcactccagcctgggcgacagagcaagattccatctcaaaaaaaaaaaaaaaattcaatgtatatgaaaacaacatgaagattctgagaaggtggcagccttgatggtataattatttaatctcttcaaatcccccataaagatacacaaagcagccaggattgcaaaactaaaaacccatggaaaatccctacaacaaaccagatgacactgaatccctacaaaccctaaaacataaatgggtggagacacacctacaagatctgcatggta

SEQ ID NO: 924022 - DNA, 599 bp, Homo sapiens
aaggggacagggcatgagtgccgcggtgtcagcgccggagcccgttggtcccctccctccccctggggcccgcgcgttcaacaccgacctctgtcccagtgcccggattggcagaggcaggcgggaggagccagaggtcgccccacatagctcggtctcagacaagggtctacactggagagaagggaggggcccctgggtcacctctccccgggccgcgattctcctcgtcccgcactctgagcagccggccccgtacttcccctgacctccaagctcycggccacggactcctcgcttccccactccgccgcgacgtcctgccctgtgcttcgggatggggactgagtctcctcgctcctccaatccgtgcaaccccttcccccatctctccatcaagcaccctcgactcccacccctctcccgctacacagcgaagtccaccccatgggcaactttccggcagttgcggggtgggcagcagatttagaaatccccaaacggaaaatcccgctcacaaggctctgtccaacgaatcagggctagcatgggcccatgagcaagtgaggggcacggaaggaaagagcccgagagcttct

SEQ ID NO: 924023 - DNA, 635 bp, Homo sapiens
tcactgagtcccggggggccgagggccgatgggagaggagttgctgttcttggcggctgtttgaaaactttcatacaagatcgcatcattcttcatcccgttcacttgtgtttccacaggtactgctttctgagggtctgggtggctccttggaaaaggggtctgggtggctccttggaaaaggagtctggtccccactgtgatagtattaaatacaagtctctgaaaacgtcttaaaatccctcccaaaattaatgcattgatttagaagtgagaccaaaatgtgaagacttcaccagtctaaaataaattcaaaacaagttaaatgagcatgaccgaatagccagccatttctaaattgttcatttcacatagtgtagcctttacagtggtggcaactatgataacagatcctatgacttagataagatcaacaaattaccaagtgctarttgtttctgctgggtgtaggtgaggagataaatagcttgtaaattaaacagcagtgcctaagggtgccattcctgtactcacacgggctgctccgtgctctccagcaaataatttcctcttatctcataattaaacatttttacctttaaaaaccacaatcattagtgaatatgttatcctcc

SEQ ID NO: 924024 - DNA, 670 bp, Homo sapiens
agaaggcacgagggaagtagaaaatcaccatttgaacaccacagtaataactgctgcagctaagattcactgatgaatactaaaattagtgggtgaaactttaagcagaaatagaatctttgtatagcctcaaagtatctacccaaaaacattaataagtcactgtggtggttttaacgtatgtccacaaattctttgatactccttcctctagaaaaggagcttaattcctttccccttgagtatgggctggacttagtgacttacttctaacaaatggagtattgaaaaagaaaattagtaacttcatagaggcaaaacctggcagacacctccttaaccaagtgatcaagcttaacgtcacctgtaatctttcaggctgataccatgtacccccaataggatgtcatgagaaaggcacttcccctagtgatattcttccccaaaattcataagaaaacgttagtcaatctcaaactgaaagacatcctacagtatacctgaccataacttttaaaagtgtcaaggtcaygaaaaacaaagaaagcctttaaaaccatcacatattggtgaagactaaggagacaggacaactcaatacaatgtgagaccctggattggattctaggacagaaaaaaaggatgagtggggaaattggtgaaatctgaa

SEQ ID NO: 924025 - DNA, 794 bp, Homo sapiens
ggtggggactaggagaacctttatgtctagctcagggattgtaaatacaccaatcggcactctgtatctagctcaaggtttgtaaacacaccaatcagcaccctgtgtctagctcagggtttgtgaatgcaccaatccacactctgtatctagctactctggtggggacttggagaacctttgtgtctagctcaggcgttgtaaacacaccaatcaaaaccctgtcaaaacggaccaatcagcgctctgtaaaatggaccaatcggctctctgtaaaatggaccaatcagcaggatgtgggtggggccaggtaagagaataaaagcaggctgccggaggccctagtggtaacccgctggggtcgcgttgtgtgcagtgggtgctgtgtgtgtggtttttttttttttkgttttttttttttttttttttttttttttttgctcttttgcagtaaatcttgctgctgctcactgtttgggtctactctgcctttatgaggtgtaacactcattgggaaaatctgcaggtttacttctgaaaccagcgagaccactgaaccattgggaggaaaaaaaaactccagacgcgccgccttcagagttgtagcactcatcgcgaaggtccgcagtttcactccggagctggtgagaccacgaacctaccagaaggaaaaaactccgaacacatctgaacgttagaaggaacaaactccggacacgccgcctttaagaactgtaaccctcactgtgagggtctgcggcttcatgcttgaagtcagtgagaccaagaaccca

SEQ ID NO: 924026 - DNA, 794 bp, Homo sapiens
ggtggggactaggagaacctttatgtctagctcagggattgtaaatacaccaatcggcactctgtatctagctcaaggtttgtaaacacaccaatcagcaccctgtgtctagctcagggtttgtgaatgcaccaatccacactctgtatctagctactctggtggggacttggagaacctttgtgtctagctcaggcgttgtaaacacaccaatcaaaaccctgtcaaaacggaccaatcagcgctctgtaaaatggaccaatcggctctctgtaaaatggaccaatcagcaggatgtgggtggggccaggtaagagaataaaagcaggctgccggaggccctagtggtaacccgctggggtcgcgttgtgtgcagtgggtgctgtgtgtgtggtttttttttttttgkttttttttttttttttttttttttttttttgctcttttgcagtaaatcttgctgctgctcactgtttgggtctactctgcctttatgaggtgtaacactcattgggaaaatctgcaggtttacttctgaaaccagcgagaccactgaaccattgggaggaaaaaaaaactccagacgcgccgccttcagagttgtagcactcatcgcgaaggtccgcagtttcactccggagctggtgagaccacgaacctaccagaaggaaaaaactccgaacacatctgaacgttagaaggaacaaactccggacacgccgcctttaagaactgtaaccctcactgtgagggtctgcggcttcatgcttgaagtcagtgagaccaagaaccca

SEQ ID NO: 924027 - DNA, 557 bp, Homo sapiens
ttagcgtgcactgtggcctgtgggtgctgtcgtggccacttcccagagagcaagagtcaccctctttgagagtcaggcgtggcccctcttcagaggcgtccctcagccccctcgtgcccttctgcctgagcctcctgcctctgccacagcctcacctcctctgacccctccagagccctsccctgaccctgggctcaccctgtccttgctgtgaggaggtgaagactggctgtgtctgtccctgccacctccgtgctcgcatgcccagcttccttgcaggttctgctgctcagtgaagtaacaagggctgattggatctaacagggatgagaagcttgttaaccacccattgatgcagcggccatgggaggatgtgtttgccagacaggatggggtgagatgagagccaagcctggcaggtggcacagggttgaggtgggtcagtgccctgggccctggcgacccgcactccagcgctctctgcttccagtctggccacagcaggggcagatggcccgtcaggtctgaggaacctgctggcacgtgactgggaagta

SEQ ID NO: 924028 - DNA, 814 bp, Homo sapiens
gaagacaaccgtggaacccagtgactagtgttcagctcgattagaacgaacccaggcacttagccatgcaggaacaatggcaagcctttagcccgatcaggagcggcaatgggcgcctcgctggatcaggagcacagcggacaccctgctggatccggagggatggaagtcagcggccggtctccgaccgcaacaaacyagcagtggtggatggcaagagaaagctcagtttgagccgtaacaaacacggaccagaagagtgcagttgcaagatttaatagagtgaaatagagtgaaaacagagctcccatacaaggggaggggacccaaagggggttgccgttgctggcttgaatgcctgggtttatatcccgatccttgtccttcccgctgtgctctcaggcaatagatgattggctatttctttacctcctgtttttgcctaattagcattttagtgagctctccgattggttgggtgtgagctaagttgcaagccctgtgtttaaaggtggatgccgtcaccttcccagctaggcttagggattcttagtcggcctaggaaatccagctagtcctgtctctcaatgggaaagagagaagagctgcagttctttcaggagcccagacctaggggccctctgagccagggcagtgacaccctctttgggggtctgcggttcctggtgtctccaagggtccaggtgccccgagttccatggtgctcacagtgaaatctacttgtggtatgcctggtccagccacagcctcacaaagagccggcacccgtgctggtgcctggagctccccacct

SEQ ID NO: 924029 - DNA, 814 bp, Homo sapiens
gaagacaaccgtggaacccagtgactagtgttcagctcgattagaacgaacccaggcacttagccatgcaggaacaatggcaagcctttagcccgatcaggagcggcaatgggcgcctcgctggatcaggagcacagcggacaccctgctggatccggagggatggaagtcagcggccggtctccgaccgcaacaaaccagcagtggtggatggcaagagaaagctcagtttgagccgtamcaaacacggaccagaagagtgcagttgcaagatttaatagagtgaaatagagtgaaaacagagctcccatacaaggggaggggacccaaagggggttgccgttgctggcttgaatgcctgggtttatatcccgatccttgtccttcccgctgtgctctcaggcaatagatgattggctatttctttacctcctgtttttgcctaattagcattttagtgagctctccgattggttgggtgtgagctaagttgcaagccctgtgtttaaaggtggatgccgtcaccttcccagctaggcttagggattcttagtcggcctaggaaatccagctagtcctgtctctcaatgggaaagagagaagagctgcagttctttcaggagcccagacctaggggccctctgagccagggcagtgacaccctctttgggggtctgcggttcctggtgtctccaagggtccaggtgccccgagttccatggtgctcacagtgaaatctacttgtggtatgcctggtccagccacagcctcacaaagagccggcacccgtgctggtgcctggagctccccacct

SEQ ID NO: 924030 - DNA, 814 bp, Homo sapiens
gaagacaaccgtggaacccagtgactagtgttcagctcgattagaacgaacccaggcacttagccatgcaggaacaatggcaagcctttagcccgatcaggagcggcaatgggcgcctcgctggatcaggagcacagcggacaccctgctggatccggagggatggaagtcagcggccggtctccgaccgcaacaaaccagcagtggtggatggcaagagaaagctcagtttgagccgtaacaaacacggaccagaagagtgcagttgcaagatttaatagagtgaaatagagtgaaaacagagctcccatacaaggggaggggacccaaagggggttgccgttgctggcttgaatgcctgggtttatatcccgatccttgtccttcccgctgtgctctcaggcaatagatgattggctatttctttacctcctgtttttgcctaattagcattttagtgagctctccgattggttgggtgtgagctaagttgcaagccctgtgtttaaaggtggatgccgtcrccttcccagctaggcttagggattcttagtcggcctaggaaatccagctagtcctgtctctcaatgggaaagagagaagagctgcagttctttcaggagcccagacctaggggccctctgagccagggcagtgacaccctctttgggggtctgcggttcctggtgtctccaagggtccaggtgccccgagttccatggtgctcacagtgaaatctacttgtggtatgcctggtccagccacagcctcacaaagagccggcacccgtgctggtgcctggagctccccacct

SEQ ID NO: 924031 - DNA, 630 bp, Homo sapiens
ccctttaccattatgtaattcccttctttgcctcttttgatctttgttggtttaaagtctgttttatcagaggctaggattgcaacccctgctttttttttgttttccatttgcttggtagatcttcctccatccctttattttgagtctatgtgtgtctctgcatgggagatgggtctcctgaatatagyacattgatgggtcttgacttttatccaatttgccagtttgtgtctcttaattggagcatttagccaatttacatttaaggttaatatttttatgtgtgaatttgatcttgtcattatgatgttagctggttattttgctcattagttgatgcagtttcttcctagcctcaatggtctttacaatttggcatgtttttgaagtggctggtactggttgtgcctttccatgtttagtgcttccttcaggagcccgtagggcaagcctggtggtgacaaaatctatcagcatttgcgtgtctgtaaacaattttatttctccttcacttatgaagcttagtttggctggatatgaaattctgggttgaaaattctttccttcaagaatattgaatattggcccccactctcttctggcttgtagagtttctgccgagagatc

SEQ ID NO: 924032 - DNA, 572 bp, Homo sapiens
aaaggtgcagaatacaaaaccagcctacaaaaaataagttggccttctgttcactaacaatgaatcatttcaaaggaaactataaaaaatcgcatttacagtaatatccagaaaaataaaatttttaggaatagaygtaaccaaggaggtgaaaggcttgtattatgaaaactgcaaattattgatgaaagaaataaaagaagacataaataaatgaaagaatatctatgttcatggattgtaaaatttcatattgttataatgttcatactaccaaaagcaatcgacatattcagtacaatccctaataaaattccaatggatttttttaaagaaatagataattctatccaaaaattcatatggaaccaggaaaaactccaaataaccaaagcaatcttgagaaggtagaacaaagctggagatttcacatttcctgatttcaaaatatttgtagagctacaaattaagcagtatgatatggcataaaaatggacaaacacacaaatggaataaaaaagagagtcgagaaataaatcaacaaacatacagccaactgattttcaccaaga

SEQ ID NO: 924033 - DNA, 572 bp, Homo sapiens
aaaggtgcagaatacaaaaccagcctacaaaaaataagttggccttctgttcactaacaatgaatcatttcaaaggaaactataaaaaatcgcatttacagtaatatccagaaaaataaaatttttaggaatagacgtaaccaaggaggtgaaaggcttgtattatgaaaactgcaaattattgatgaaagaaataaaagaagacataaataaatgaaagaayatctatgttcatggattgtaaaatttcatattgttataatgttcatactaccaaaagcaatcgacatattcagtacaatccctaataaaattccaatggatttttttaaagaaatagataattctatccaaaaattcatatggaaccaggaaaaactccaaataaccaaagcaatcttgagaaggtagaacaaagctggagatttcacatttcctgatttcaaaatatttgtagagctacaaattaagcagtatgatatggcataaaaatggacaaacacacaaatggaataaaaaagagagtcgagaaataaatcaacaaacatacagccaactgattttcaccaaga

SEQ ID NO: 924034 - DNA, 572 bp, Homo sapiens
aaaggtgcagaatacaaaaccagcctacaaaaaataagttggccttctgttcactaacaatgaatcatttcaaaggaaactataaaaaatcgcatttacagtaatatccagaaaaataaaatttttaggaatagacgtaaccaaggaggtgaaaggcttgtattatgaaaactgcaaattattgatgaaagaaataaaagaagacataaataaatgaaagaatatctatgttcatggattgtaaaatttcatattgttataatgttcatactaccaaaagcaatcgacatattcagtacaatccctaataaaattccaatggatttttttaaagaaatagataattctatccaaaaattcatatggaaccaggaaraactccaaataaccaaagcaatcttgagaaggtagaacaaagctggagatttcacatttcctgatttcaaaatatttgtagagctacaaattaagcagtatgatatggcataaaaatggacaaacacacaaatggaataaaaaagagagtcgagaaataaatcaacaaacatacagccaactgattttcaccaaga

SEQ ID NO: 924035 - DNA, 619 bp, Homo sapiens
taaagagcttttgcacagcaaaaggaacagtcagcagagtagtcagacaacccgtagagtgggagaaaatcttcacaatgtatacatctgacaaaggactaatatccagaatctacaatgaactcaaacaaatcagtaagaaaaaaagaaacattcccttcaaaaagtgggctaaggacatgaatagacaattctcaaaagaaaatatacaaatgaccaacaaacatgaaaaaatgctcagcatcactaatgatcagggaaatggaaatcaaaaccacaatgtgataccaccttactcctgcaagaatggccataatcaaaaaacagttgatgttgatgtggaygaggtgaacagggaaaacttctacactgctggtgggaatgtaaactagcacagccactaatgaaaacagtatggagattccttaaagaattaaaagtagaactaccatttgatccagcaattccactactgggtatctacccagaggaaaagacgtcattatacgaaaaagatacttgcacacgtatgtttatagcatcacaatttgcaacagcaaaatcgtggaaccaacccaaatgcccatcaatcaacgagtggataaagaaactgtggtat

SEQ ID NO: 924036 - DNA, 658 bp, Homo sapiens
ctactcaatcagaatctgcattttaacaaaattcccaggtgattcatatgcacattaaactttgagaagcactgggctagaagactattgcctttttcagagcaatgatttttttttctttcctaatatttgttgaaaatccaggtgaattgatgtttgtatagcttctaaagtcaagtctctgagcctcaatttcctcattcatgaaatagggataaagatggtgtctaatgtgaaggctgcrgtgatgatgatagatgaaattatataatatgctgtatgtgtatgtatgccaagtgctcaatgttgcctaccatttgaattattagtgtttattttatttattttattttaacagagtctggctctatcacccaggctggagtgcagtggcatgaccttggctcactgcagcctccacctcctgggttcaagtgattctcctgccttggcctcccaggtagctgggattacaggtgtgcgccaccatgctcggctttttttttttttttttttatgtttttggcagaggatggggttttaccatgttggccaggctggtctcgaactcctggcctcaagtgatccacccacctccgcctcccaaagtgctgggattacaggcgtgagccactgtgcccggcctaatgactctttc

SEQ ID NO: 924037 - DNA, 658 bp, Homo sapiens
ctactcaatcagaatctgcattttaacaaaattcccaggtgattcatatgcacattaaactttgagaagcactgggctagaagactattgcctttttcagagcaatgatttttttttctttcctaatatttgttgaaaatccaggtgaattgatgtttgtatagcttctaaagtcaagtctctgagcctcaatttcctcattcatgaaatagggataaagatggtgtctaatgtgaaggctgcagtgatgatgatagatgaaawtatataatatgctgtatgtgtatgtatgccaagtgctcaatgttgcctaccatttgaattattagtgtttattttatttattttattttaacagagtctggctctatcacccaggctggagtgcagtggcatgaccttggctcactgcagcctccacctcctgggttcaagtgattctcctgccttggcctcccaggtagctgggattacaggtgtgcgccaccatgctcggctttttttttttttttttttatgtttttggcagaggatggggttttaccatgttggccaggctggtctcgaactcctggcctcaagtgatccacccacctccgcctcccaaagtgctgggattacaggcgtgagccactgtgcccggcctaatgactctttc

SEQ ID NO: 924038 - DNA, 658 bp, Homo sapiens
ctactcaatcagaatctgcattttaacaaaattcccaggtgattcatatgcacattaaactttgagaagcactgggctagaagactattgcctttttcagagcaatgatttttttttctttcctaatatttgttgaaaatccaggtgaattgatgtttgtatagcttctaaagtcaagtctctgagcctcaatttcctcattcatgaaatagggataaagatggtgtctaatgtgaaggctgcagtgatgatgatagatgaaattatataatatgctgtatgtgtatgtatgccaagtgctcaatgttgcctaccatttgaattattagtgtttattttatttattttattttaacagagtctggctctatcacccaggctggagtgcagtggcatgaycttggctcactgcagcctccacctcctgggttcaagtgattctcctgccttggcctcccaggtagctgggattacaggtgtgcgccaccatgctcggctttttttttttttttttttatgtttttggcagaggatggggttttaccatgttggccaggctggtctcgaactcctggcctcaagtgatccacccacctccgcctcccaaagtgctgggattacaggcgtgagccactgtgcccggcctaatgactctttc

SEQ ID NO: 924039 - DNA, 570 bp, Homo sapiens
tcttactgacaatacctaaattattgtttgttatagaacataatgatttaaatatacaaaacactaaactgtttgagattttttacattttatgcgtgcagaatttacattttatgtgtgcagagacaaaaattgttataagattacaagttaatgtgcaagatgatttccgattcatgagtttcaggttttgatagcatatccttatccactagattagtcttttaaaaatgtgtatgatagggaaaaaatcgaggccatgaaattctgagacttatgggaactaaacttaaatgttcgttgttagattttttttttttttttttttgctgcgtatgaagttytaggcagtcattgtccaacaacattaaatactgaacatatgggaaaagcatatgatttttcgaaatgtttttctaaagtaatctcattctacatacacttaagagcagttataatgctttagtgacacttgaagtagctatttaatgtgatctcaccactatagggaaggccgttgcatgacttttttgtgtgtgcttaactgctaaacaggagaatcttttcctg

SEQ ID NO: 924040 - DNA, 596 bp, Homo sapiens
ttccctgttagagaatggtgaaacaagcttataaaacttaccaaaagtgagttttctttagtaaaaacagagaagcctgaattttctataatgagtctggcaactaatttttaagaactttgcacattggtcagggatgaaaggaaaagataggctgggagtgatggctcacgcctgtaatcccagcactttgggaagctgaggtgggtgactgcctgagctcaggaattctagactagcctgggcaacatggtgaaaccccatctctactaaaatacaaaaaattggccaggcatggcagtgcatgcctgtagtcccagctactcgggaggctgaggtgggagaatcgcttgaacctagraggcagaggttgcagtgagcagagatggcaccactgaattctgggcctgggtgacagagcaagactctgtcttaaaaaaaaaaaaaaaaaaagaaagaaagaacaagacagaccagtatgtcatcatgtttgcttcttctgattctcttgcatgagttttgtgaaaggagaaaagaaaggtcttcttttacatacaagtctctacttcaggtggatttagaagtgagaggagagt

SEQ ID NO: 924041 - DNA, 656 bp, Homo sapiens
aacataaattgtgaagatttcattttaatatggacatatatcagttcccaattaatacttttataatttcttatgcctgtctttacttcagtctctgaacataaattgtgaagatttcattttaatatggacatctatcagttcccaaaattaatacttttataatttcttatgcctgtcttactttaatctcttaatcctgttatcttcctaagctgaggatgtacgtcaccttaggaccactattgtgttaaccatacaaattgattgtaaaacatgtgtgttcgaacaatatgaaatcagtgcaccttgaaaaagaacagaataacagtgattttagggaagaagggaagacaaccataaggtctgactgcctgcggggtcaggcagaatagagccatatttttcttcttgcagasagcctataaacagacatgcaagtaggagagatatcactaaattcttttcctagcaaggaatattaagaccctaggaaaagaattgcattcctcgggggaggtctataaatggccactctgggagtgtctgtcttatgcgattgagataaggactgaaatacgccctggtctcctgcagtaccctcaggcttactaggattgggaaaccccagccctggtaaatttgaggtcacacac

SEQ ID NO: 924042 - DNA, 656 bp, Homo sapiens
aacataaattgtgaagatttcattttaatatggacatatatcagttcccaattaatacttttataatttcttatgcctgtctttacttcagtctctgaacataaattgtgaagatttcattttaatatggacatctatcagttcccaaaattaatacttttataatttcttatgcctgtcttactttaatctcttaatcctgttatcttcctaagctgaggatgtacgtcaccttaggaccactattgtgttaaccatacaaattgattgtaaaacatgtgtgttcgaacaatatgaaatcagtgcaccttgaaaaagaacagaataacagtgattttagggaagaagggaagacaaccataaggtctgactgcctgcggggtcaggcagaatagagccatatttttcttcttgcagagagcctataaacagacatgcaagtaggagagatatcactaaattcttttcctagcaaggaatattaagaccctaggaaaagaattgcattcctsgggggaggtctataaatggccactctgggagtgtctgtcttatgcgattgagataaggactgaaatacgccctggtctcctgcagtaccctcaggcttactaggattgggaaaccccagccctggtaaatttgaggtcacacac

SEQ ID NO: 924043 - DNA, 620 bp, Homo sapiens
cgccactgcactccagcttgggtgacagcgagactccgtctcaaaaaaaaaaaaagaaaaagaaaaagaaagtaaaggaataaaagaatggctaccccataggcagagcagtgacaggggctgctcaactgagtatactcatagttatttattgattacatgttaaacaagggaggaattattcatgggttttctgggaaagtggcaggcacttcccagaactaagggttcctcccccttttagaccatatagagtaacttcctgacattgctatggcatttatttgtaaactgtcatggccctggtgggaatgtcttttagcatgctaatgtattataattagcatataatgagcattgaggacaaccagagatcacttctgttgccctcttggtttcagtgggttttggctttcttctttactgcatcgtgttttatcagcagcgtctttgtgaccygtatcttgtgataccagtcctgtcaacatcctatcccatcttgtgactaagaatgtctgacctcctgggaatgcagcccagtaggtctcagccttattttacccagtccataatcaagatggagtcactctggtgttgttttttttgtttttgtttttgta

SEQ ID NO: 924044 - DNA, 648 bp, Homo sapiens
ctgttatgtagctcaggttccataataacattcttttaaggcgcaaaataacttaaagttccaacagctttgattttgaattacgttcgcagcattaaaccatcaaagagtaagagccagcagctttgtctagcatgttttttgttttttttttttgagacggagtctcgctctgtcgcccaggctggagtgcagtggcgggatctcggctcactgcaagctccgcctcccgggttcacgccattctcctgcctcagcctcccaagtagctgggactacaggcgcccgccactacgcccggctaattttttgtatttttagtagagacggggtttcaccgttttagccgggatggtctcgatctcctgacctcgtgatccgcccgcctcggcctcccaaagtgctgggattacaggcgtgagccaccrcgctcggcctgtctagcatgttttaacagcttgacatatttacatactgtatcattctcacccgtcttaagtgtacgatttttagtacatgtatagtgcaaccatccccacaatccagtttggaggcatttccatcccaccgaaaagatcccgagtacctgtttgctatcaatcccctggcgggttcccacttgcagacccaggtttgcctaattatttt

SEQ ID NO: 924045 - DNA, 611 bp, Homo sapiens
ggtcactgattaaagaaaaagacaggggaggccgaggcgggcagatcacctgaggtcaggagtttgagaccagcctggccaacctggtgaaacctcatctctactaaagatacaaaaattagctgggcgtggtggcaggcgcctgtaattccagctactggggaggctgaggcaggagaatcacttgaacccgggaggcagtgattgcagtgatccgtgatcacaccattgcactccagcctgggygacagagcgagactccatctcaaaaaaaaaaaaaaaaaaggaaaagaaagaaaaagacaggaaagcctaatgctgggatgggaaacaatgcttacagcagaccgaagcagagaacgtgaacaagattagcgggtcaggtggggaatgtggcaaactaaagagtgtcctcagactccttttggtttattacagaaaagctgaaaacctgtgttcagatgtcaactctcccaacttttaaatactggagaaaatcatcttgttttcttcttttccccaaaatacaatgcaagccaaacagtacatgtctgatgccaaagtttggcccacgggctgccagtttgagactggcatgggactgagtgggg

SEQ ID NO: 924046 - DNA, 765 bp, Homo sapiens
taaaacacggatctcatttgagaaaaaaagagatgagactattttctggttggcgtagatttaggcaatgtataaaaaagcttcctggttggaatgagttaaaaaatattgctggccactaatgtgccatcttgagttggaaaacaaaccccctccccccmaaaaaaaccctgccgctttggtgtcctatttatatatttttaaaaacattcattaaaaaaatcaaatctataataaaaatgtccctgtttgttttaaaaaagcattagtaggcatcccttatctactaaaaccatttgtttttcctaagatgcctggaagcagaaaagcgagtgagattaactcactgcgcaattaattaaaattagaattctttcctctaaacaacttccagagcaccagaaagaagaaggggccccatcaaagggagaaataaagcccttctgactcacaggagatgaaatgttcagccagagttctaacacattctggctgtcatcaaaagttctttattggattactcagaaaataactcaagtgctattttaaaaatgaaagatacaggcagctaggttcctttccgtttttctttctttctttctttctttttttttttaaacaaaacaaaataccagtggctagcttttctgtaacatcctttggatttggttaaaaaaagaaagaaaagtctacagaacaggatcactgaatgccactttagccccacttcctgcaggctctgttttaattagcgtcaaacaggtt

SEQ ID NO: 924047 - DNA, 713 bp, Homo sapiens
ttagaggtccttataatcacaaactatgctcaactcactctctacagctctcataatttccaaaatctattttcttcctcacacctgatgcatatactttctgctccccggctccttcagttgtactcactctttgttgagtctcccacaattaccattgttcatggcccggacttcaatccagcctcccacattattcctgataccacacctgaccttcatgactgaatctctctgatccacctgatgttcaccccatttcccctcatttccttcttccctgtttctcaccctgatcgcacttggtttattgatggcagttccaccaggcctaatcaccacacaccagcaaaggcaggctatcctatattacaagccactagtccgcctcttagaacctctcatttcctttccatcgtggaaatctatcctcaaggaaataacatctcagtgttccatctgctattctactacttctyggattattcaggccccttcccttccctaaacatcaagctcagagatttgcccccacccaggactggcaaattagctttacttaacatgccccaagtcaggaaactaaaatacctcttggtctatgtagacactttcactggataggaagatacctttcccacagggtctaagaaggccaccacggtcatttcttcccttctgtcagacacaattactcggtttggccttcccac

SEQ ID NO: 924048 - DNA, 685 bp, Homo sapiens
attcaggccccttcccttccctaaacatcaagctcagagatttgcccccacccaggactggcaaattagctttacttaacatgccccaagtcaggaaactaaaatacctcttggtctatgtagacactttcactggataggaagatacctttcccacagggtctaagaaggccaccacggtcatttcttcccttctgtcagacacaattactcggtttggccttcccacctctacgcagtccgatagtagactggcctttatyagtcaaatcagccaagcagtttttcaggctcttggtattcagtgaaacttttatatcccttactgtcctcagtcttcaggaaaagtagaacggactaatggtcttttaaaaacacacttcaccaagctcagccaccaacttaaaaagaactggacaatacttttacctctttcttttctcagaattcaggcctgtcctcggaatgctacaaggtacagcccatttgagctcctgtatggacgctcctttttatttagccccagtctcattccagacaccagaccaacttagattttgcccccaaaatcttgtcatccctactatcttctgtctagtcatactcctattcaccattctcaactacttatacatgctctgctcttgtttacactgctggtttacattgtttctccaagccatca

SEQ ID NO: 924049 - DNA, 685 bp, Homo sapiens
attcaggccccttcccttccctaaacatcaagctcagagatttgcccccacccaggactggcaaattagctttacttaacatgccccaagtcaggaaactaaaatacctcttggtctatgtagacactttcactggataggaagatacctttcccacagggtctaagaaggccaccacggtcatttcttcccttctgtcagacacaattactcggtttggccttcccacctctacgcagtccgatagtagactggcctttatcagtcaaatcagccaagcagtttttcaggctcttggtattcagtgaaacttttatatcccttacwgtcctcagtcttcaggaaaagtagaacggactaatggtcttttaaaaacacacttcaccaagctcagccaccaacttaaaaagaactggacaatacttttacctctttcttttctcagaattcaggcctgtcctcggaatgctacaaggtacagcccatttgagctcctgtatggacgctcctttttatttagccccagtctcattccagacaccagaccaacttagattttgcccccaaaatcttgtcatccctactatcttctgtctagtcatactcctattcaccattctcaactacttatacatgctctgctcttgtttacactgctggtttacattgtttctccaagccatca

SEQ ID NO: 924050 - DNA, 685 bp, Homo sapiens
attcaggccccttcccttccctaaacatcaagctcagagatttgcccccacccaggactggcaaattagctttacttaacatgccccaagtcaggaaactaaaatacctcttggtctatgtagacactttcactggataggaagatacctttcccacagggtctaagaaggccaccacggtcatttcttcccttctgtcagacacaattactcggtttggccttcccacctctacgcagtccgatagtagactggcctttatcagtcaaatcagccaagcagtttttcaggctcttggtattcagtgaaacttttatatcccttactgtcctcagtcttcaggaaaagtagaacggactaatggtcttttaaaaacacacttcaccaagctcagccaccaacttaaaaagractggacaatacttttacctctttcttttctcagaattcaggcctgtcctcggaatgctacaaggtacagcccatttgagctcctgtatggacgctcctttttatttagccccagtctcattccagacaccagaccaacttagattttgcccccaaaatcttgtcatccctactatcttctgtctagtcatactcctattcaccattctcaactacttatacatgctctgctcttgtttacactgctggtttacattgtttctccaagccatca

SEQ ID NO: 924051 - DNA, 593 bp, Homo sapiens
  misc_feature 1, 2, 3, 4, 5, 6, 7, 8, 9, 10, 11, 12, 84: n = A,T,C or G
nnnnnnnnnnnngatacgaattcgagctcgtacccctgcctttcccagtccactgactcaaatgttaatctcctttgccaacancctcacggtcacacccaggaacaatactttgcgtccttcaatccaatattaaccatcacaggcatgatcctgtgagtgttagggaggattgaaagcaggggagcagaacacttgtaactggtgggcattctgacagcagtgaggaggggctgtgaccagaagcaggaagcctagtcagggaaggtgtagcagaccaggtaggtgaggacctgaacaaacactctgataatgatggagcaaccgaaaggattggaacaggaagaatcaacagaatttggtgattgaatggagagatttccaggtttctgacttgacctgcyagacagatgatgatgctaccctcaggatgagaatatgggaggaggggaaagttctggaggaaagtattcagttgagggtatgatgaatttaagatgtgatttccttaggtaatacaactaggtcgagttcttgattacaattaagttatataactcactcatgagttgtttttcattaacaccatcaag

SEQ ID NO: 924052 - DNA, 593 bp, Homo sapiens
  misc_feature 1, 2, 3, 4, 5, 6, 7, 8, 9, 10, 11, 12, 84: n = A,T,C or G
nnnnnnnnnnnngatacgaattcgagctcgtacccctgcctttcccagtccactgactcaaatgttaatctcctttgccaacancctcacggtcacacccaggaacaatactttgcgtccttcaatccaatattaaccatcacaggcatgatcctgtgagtgttagggaggattgaaagcaggggagcagaacacttgtaactggtgggcattctgacagcagtgaggaggggctgtgaccagaagcaggaagcctagtcagggaaggtgtagcagaccaggtaggtgaggacctgaacaaacactctgataatgatggagcaaccgaaaggattggaacaggaagaatcaacagaatttggtgattgaatggagagatttccaggtttctgacttgacctgctagrcagatgatgatgctaccctcaggatgagaatatgggaggaggggaaagttctggaggaaagtattcagttgagggtatgatgaatttaagatgtgatttccttaggtaatacaactaggtcgagttcttgattacaattaagttatataactcactcatgagttgtttttcattaacaccatcaag

SEQ ID NO: 924053 - DNA, 627 bp, Homo sapiens
tgaggcaccccttttctcttcccctctctggcatggtgtctgtggaggcgtattggctagcctgaaatcccacccctgcctagtaataaccaggcagtcctcctctcagggagtcaaaagtggttgagtggggaacctggacattcactcccatctggcatcaatgaggtggcactccacttcctccgttagctggatgtgagagaaaacatgytaaaggagaagatttaaataatatctagaatctaatgatgtagccccaaatgcccaaatacaattgaaaatccctcaccatataaagaaccagaaacaactcaacttgaatgagaaaaaacaatcaacagatgaccataatgaaatgacacaaatggtggaattagctgacacgtattttaaagaagccatcatgaaaatgcttcaataagcaattacaaacatgcttgaaacaaataaaaagcagaaagtctcagccaaaaacatagaaagcctcatcaaagaaatagaagctatcaagaggagccaaatggaaatcttttaactgaaaaagacaataactgaaataaaaatctcaatgaatgggctcaatagcagaatggaagaatagaggaaatagtgaatgttaagata

SEQ ID NO: 924054 - DNA, 598 bp, Homo sapiens
acaaaccaccttttgaagagaatcaaaagaagacaacaattgtctgtgtatgacaaaaagtcttagggcaaccaccattaaagccacaattgactaggaattttggttacttctgtggcatacaactttacaaaacaattataactattaacaatatacactaagtcacgtgagaattataggcatttcccgtaattttggaacacatgccaataacatatttatacaaatatagcccaaagaaagctacactatttcatatttgacaatgcttcctgtatgatttttatgccaaataagccaaatgtgtcatttttggactttaggggatataatatctaaaagattaactaggtcagaaaaagacatactttgtaatttgattttggaacatttgttaaatatcaaaagctgtaaaacactggataccacaaaatagaatcccaggtaaccattagtcaytcatttggccaaaatgataactccaaaattttaaacaatgaaaacctttattctgatagaggacttaactttccaaacaacaagactcgatgaagatagcatgaggccaaatcaatctgtctcttctctctcccct

SEQ ID NO: 924055 - DNA, 573 bp, Homo sapiens
ctattcccaagttggcaggatgaaagcatcttccgtgtgatcagcatgccaggagatgtggaggccagagagtttggtgcaggagtgtctgtagcagaacatggccaagaacacccatttccctaggcttgatttattcccacagcagactttagccctagcagaactgtcttacatgaattctgcagggcaatcttgcccattggactgggcagtctgacctaagcagcacttggtctattgtcctcttctgggaccccagcttgtctgaacctgttggcagggcagcctcaggtgccctgggactccgcrtcatagctcctaagcaagtggaccatgcctgaatggtggagaaatatgggggttaaccccatggccacgcaccagcccatctacttgctgcccatattgcagcttcccacaggcccacagcaaccaaccacatagctttactagcatgtgtgtgcatgggcaggttttgccatccttgccctaccagtgcatgtgtgtatatgcaccttgctctgccactgctgaggcaaagttcacttggaacctatacccccactaatc

SEQ ID NO: 924056 - DNA, 567 bp, Homo sapiens
aagaggatctagtgtggagcactaagaaatatatcagtttgaaacaagccactatcagagcaacataaattctgttaaaattgaagcaagaccaaacatcaaatttttggtgaagctggggtgaaagaatggtgatgtggtttggctttgtgttcccatccaaatctcaccttgaattgtaatggtcacaatccccatgtgtcgaggacaggacctaatgggaggagatttgatcatgagggtggttcccccatgcttytctcatgatagtgagtgagttctcatgagatttggtggttttataaggcagtttttcctgcccttgctagctctcttttctgccaccatgtaaaggaagtctttgcatccccttcaccttctgccatgattgtaagtttcctgaggtttccccagccatgtggaaccgcgagtcaattgaacctcttttctttataaattacccagtcttggacagttctttatagcagtgcaaagagaaactaatacaagtggtgaaatcactgacactttacaaaaagtgtatggggacaaggccctaaataaatc

SEQ ID NO: 924057 - DNA, 815 bp, Homo sapiens
tgcagacccaggcatctctacactcttgggggcctgggaagcccccagcccctgcaggctcggaagtgtctgcttccaccgcctggcttctccccattccagtgcctgctccaatcttggagaaaagttgaggccgagcctgcgtgctgttgcaacccakccgggtgtgcgcatgctcagggcagtgctgacatgccagcaccctgctgcctcagccccctccagactttgggcaccaatgagcacagaagggaggataagtgctggctgagggcagcttggcactggcctgcaggaggcccttagcacgaacagcctgggcatctgggcaccataaacagtggcaggaggcagacaggctcctgggcggaaatgggcggtccccggtgaaaccccaccttcaagccagggagggcctgacgcctgggggctgggctgccagttccacggactggagtgggaacttatgatgctttttccgggattgcccataaccacccatggaccaatcagcacaaacttcctcccctctgaaccccataaaaacccaggactcagccagaattaggcagatgccaggattacctgtctgcagaatggagctacccactgtggatctcctttctgctgagagctgacactcatcaggatgccctgcttatggagaggagctacccactgtgtgtctcctctctcctgagggctaaacactcatcaggatgccctgcctgtggagaggaactaccctctgtgggctctctgctgagagctggatgctcatcaggatggcctacctgcggaaaggagctacccaa

SEQ ID NO: 924058 - DNA, 768 bp, Homo sapiens
tgcagacccaggcatctctacactcttgggggcctgggaagcccccagcccctgcaggctcggaagtgtctgcttccaccgcctggcttctccccattccagtgcctgctccaatcttggagaaaagttgaggccgagcctgcgtgctgttgcaacccagccgggtgtgcgcatgctcagggcagtgctgacatgccagcaccctgctgcctcagccccctccagactttgggcaccaatgagcacagaagggaggataagtgctggctgagggcagcttggcactggcctgcaggaggcccttagcacgaacagcctgggcatctgggcaccataaacagtggcaggaggcagacaggctcctgggcggaaatgggyggtccccggtgaaaccccaccttcaagccagggagggcctgacgcctgggggctgggctgccagttccacggactggagtgggaacttatgatgctttttccgggattgcccataaccacccatggaccaatcagcacaaacttcctcccctctgaaccccataaaaacccaggactcagccagaattaggcagatgccaggattacctgtctgcagaatggagctacccactgtggatctcctttctgctgagagctgacactcatcaggatgccctgcttatggagaggagctacccactgtgtgtctcctctctcctgagggctaaacactcatcaggatgccctgcctgtggagaggaactaccctctgtgggctctctgctgaga

SEQ ID NO: 924059 - DNA, 597 bp, Homo sapiens
taatccccaaacctgtgggtattccctcatttggaaaagcagtctttgcagatgtcattaagttaggtctcttaagctgaagagatcatcccagattatccacacaggccctaaatccaataacaggtgtccttacaagagacacactgagaaggcagacacattcatgcccgcccagagacacacacagagtcacagaggagaaggckatgtgaagtcagaggcacagatgggagtaatatggccacaagcaggaagctggcagccaacagaaactggaagaggcgggaaaccatcttccccttgagcctctggagggagtgcggccctgccagcaccttaatttcagatttctggcctccagaactgtgagagaataaagttctgttgttttaacaacagttaacacaaagtttatgctgatctgttacagcatttgccctgggaaactaatacacatggtaacagggcttccagtgaagaggtggaaggaacctggctgctctcccagggccagggccagagggccagtaaagacgtctacgggaggaaggaacagagcaccctcctggagatgctcaggaagcagagacgctg

SEQ ID NO: 924060 - DNA, 640 bp, Homo sapiens
aatgttcatcttacatatgttggttaatgtctcatgtctccctaaaaccaaactgtgctctgaccaccctgggcacatcgtcaggacctcctgaggctgtgtcacaggtaggtgtcttcaaccttggcaaaataaactttctaaattaactgagacctgtctcagattttcagggttcaaacattttggtaaccactgaaggattctgagtggagatgcccctgacttttcacaagtctcctattggtgcttggtaccagcttgagctaactttatggctcaaaccaataagacaatttgctgaggcctggaagcacctcccccygtgccccacccctaccccctgccgcagagaatccctgatctctcaaaatttggtcgagatctaaagtttattttgttttacaacttctctttttggagttttacttgcttccgatacaaggaaggcaagttttccctgcttccatgacgatggaaggcaggtaactcctttatggagttcgagtttgcttccaacagggaagatgaattttttttttttcctgctcccaggatggtggagatctgagttttcagcctgagacccatccctaggggagtaactgaattgtggtttgtcttagctaaagttaagatt

SEQ ID NO: 924061 - DNA, 636 bp, Homo sapiens
caatgttcatcttacatatgttggttaatgtctcatgtctccctaaaaccaaactgtgctctgaccaccctgggcacatcgtcaggacctcctgaggctgtgtcacaggtaggtgtcttcaaccttggcaaaataaactttctaaattaactgagacctgtctcagattttcagggttcaaacattttggtaaccactgaaggattctgagtggagatgcccctgacttttcacaagtctcctattggtgcttggtaccagcttgagctaactttatggctcaaaccaataagacaatttgctgaggcctggaagcacctccccctgtgccccaccccyaccccctgccgcagagaatccctgatctctcaaaatttggtcgagatctaaagtttattttgttttacaacttctctttttggagttttacttgcttccgatacaaggaaggcaagttttccctgcttccatgacgatggaaggcaggtaactcctttatggagttcgagtttgcttccaacagggaagatgaattttttttttttcctgctcccaggatggtggagatctgagttttcagcctgagacccatccctaggggagtaactgaattgtggtttgtcttagctaaagtta

SEQ ID NO: 924062 - DNA, 636 bp, Homo sapiens
caatgttcatcttacatatgttggttaatgtctcatgtctccctaaaaccaaactgtgctctgaccaccctgggcacatcgtcaggacctcctgaggctgtgtcacaggtaggtgtcttcaaccttggcaaaataaactttctaaattaactgagacctgtctcagattttcagggttcaaacattttggtaaccactgaaggattctgagtggagatgcccctgacttttcacaagtctcctattggtgcttggtaccagcttgagctaactttatggctcaaaccaataagacaatttgctgaggcctggaagcacctccccctgtgccccacccctaccccctgccrcagagaatccctgatctctcaaaatttggtcgagatctaaagtttattttgttttacaacttctctttttggagttttacttgcttccgatacaaggaaggcaagttttccctgcttccatgacgatggaaggcaggtaactcctttatggagttcgagtttgcttccaacagggaagatgaattttttttttttcctgctcccaggatggtggagatctgagttttcagcctgagacccatccctaggggagtaactgaattgtggtttgtcttagctaaagtta

SEQ ID NO: 924063 - DNA, 597 bp, Homo sapiens
tttttttagagacaggagtctgactatgttgcccagggtcataaactcctggcctcaagcggtcctcctgccttggcctcccaaagtgctgggattacaggtgtgagccatggctcccagcctcttgctaagaactattttaaatcaacaaggaagagaaagcaactatcccagagggaaaaaaaaacagartccagaccccagtgtgtccagggtgagcataatcctgagggaataattgagctgatgcccaaaaaggtgcctacacaggtgttcagggggcactttacaacagtcgtcacctggcctccgtttgcaactttgcaggaggtggaagggagagcacctgaccagcatttcaaatgttcaacaagattcactgtagccagtgtcactatttggagagctccagatgtcactctttggagctcctggggcaggattcatcaaatgaatatgccatagaggctgtcaaggttcgggggaaatcaactcatctgaaatcaaaagcccaggctgcactgattatattgaagagggcgcagtgagagcttccagctcatcagaagaaaatcctccatgcctccaaccgtgttg

SEQ ID NO: 924064 - DNA, 597 bp, Homo sapiens
tttttttagagacaggagtctgactatgttgcccagggtcataaactcctggcctcaagcggtcctcctgccttggcctcccaaagtgctgggattacaggtgtgagccatggctcccagcctcttgctaagaactattttaaatcaacaaggaagagaaagcaactatcccagagggaaaaaaaaacagagtccagaccccagtgtgtccagggtgagcataatcctgagggaataattgagctgatgcccaaaaaggtgcctacacaggtgttcagggggcactttacaacagtcgtcacctggcctccgtttgcaactttgcaggaggtggaagggagagcacctgaccagcatttcaaatgttcaacaagattcactgtagccagtgtcactatttggagagctccagatgtcactctttgragctcctggggcaggattcatcaaatgaatatgccatagaggctgtcaaggttcgggggaaatcaactcatctgaaatcaaaagcccaggctgcactgattatattgaagagggcgcagtgagagcttccagctcatcagaagaaaatcctccatgcctccaaccgtgttg

SEQ ID NO: 924065 - DNA, 640 bp, Homo sapiens
caagatgaaaattttatagattggaattttggaaaacaatttaattggcttcatgatgttattagggcttattgtttggaaaactaagtctcctgtctcaaagaatgaaggcttttgccttttttttttttttttaaatccttgaggtatcactttgttcaaatgagtgaattattttacaatgacttgtaatcctactttgtaatatcaagtgttttaaaccttyaaaatttgacaaactttccaaaatcaaattataaattatgtctttttctaacctaatccttgaagatattattaataggttccctaaagtccaaaaatgacatatttggcttatttggtataaaaaattatacaggaagcagtgtcaaatataaaatggtatttggtcttctttgggctatatttgtacaaatatgttactggtatgtgttccaaaattataggaaactcctataattctgatatgacctaatatacattatcagtaatgattataattgttatgttaaattattttgtgccacagaggtaacaatttccttgtcaattgtgtctttgagtatggctgccctaaaactttttatcatccacaaacaatcattgtcttgttttggtcctctttagaaggtggttt

SEQ ID NO: 924066 - DNA, 729 bp, Homo sapiens
tctaacaggtgctcttgaatgctggtttctgataacattagagactgtgacatcagaatagaggaaaaactttcagggttcatggagagctgaaatgttcataaatttgaagcagaacaggaattaactgcatggactaaactaatagaagtgtgaagtaattgccaggtgtggtggctcacgcctgtaatcccagcactttgggaggccatggtgggcggatcacttgaggtcaggagttcgagaccagcctggccaacatggtgaaaccccatctctactaaaagtacaaaaattagctgggtgtggtggyggatgcctataatcccagctacttgggaggctgaggcaggagaattgcttgaacccaggaggtggaggttgcagtgagccgagatggcgccactgcactccagtctgggcaacagagtgagactccatcacaaaaaaaaaaaaaaaaaaaaaaaagaagtgtgaagtaatctttttgactttttgcttaaaacattgtggatcctttcttttgtttttcagagtcaagaaaactttaagctatttacagcttttaacaattgagtatactcctgtgaacaaaatttggagcatatttgtttctctctacctaatttttacagaatttgaaaactatctgtgagtattcgtaacttatgacaatacagttatttgcataagtgcagtaagaatctgttttcatttgtaacaggacac

SEQ ID NO: 924067 - DNA, 614 bp, Homo sapiens
gatggttcacaactcccgactctgtgcagactaccccccagtaccagcctggagcctggtagacttgctgggtggctggatccagaagagagatagcaatcactacagctcagctctcaggaagccacatccataggaaaagggagagagtactacatcaagggaacaccccgtaggacgaaagaatctgaacaacaaccttcagccctagacattctctctgacagagcctacccaaatgagaaggaaccagaaaaccgaccctggtagtatgacaaaagaaggttctttaacaccccccaaaaaatcacactagctcaccagcaatggatccaaactaagaagaaatccctgacttacttgaaaaagaattcactaggttggttattaagctaaggcaccagagaaaggtgaagcccaatgtaaagatatwaaaaaaaaaaagatacaagaagtaaagggagaaatattcaatgaactagatagcataaataaaaaacaatcaaaactttaggaaataatggacatacttatagaaatataaaatgctctggaaagtcttagcaatagaattgaacaagtagaagaaggaaattcagagcctgaagacaagg

SEQ ID NO: 924068 - DNA, 624 bp, Homo sapiens
  misc_feature 43: n = A,T,C or G
aagaccctaaaggccaagttagacagcaatcaaagaaaaaagncaacacatctggacctaactactcttaaagatggaatcagaaagccacgtcttgttggctgggtgcggtggctcacacctgtaatcccagcgctttgggaggccaaggcagacagatcacttgaggttaggaattccagaccaacctggccaacatggcaaaacctctgctaaaaatacaaaaaaattagctaggcatggtggcgcatgcctgtaatcccagctactcaggaggctgaggcatgagaattgcttgaacctgggaggcggaggttgcagtgagccgagattgccccactgtactscagcctgggtgacagagcaagactctgtctcaaaaaaaaaccaaaaaaacaaaaaaacaccatgtcttgttattaagcagtatgatcacctggggtcaaaagaaatctggtcgggtgcagtggctcacacctgtaatggcagctcaggaaggtggcatgtgcaggagcaaaggaaaagccttccacaggaggcagtgcccaggtctgaggtcacctgttcacagggggtaggggagctgtcatcagagcccaccaacagagccctgagtggaatcaa

SEQ ID NO: 924069 - DNA, 624 bp, Homo sapiens
  misc_feature 43: n = A,T,C or G
aagaccctaaaggccaagttagacagcaatcaaagaaaaaagncaacacatctggacctaactactcttaaagatggaatcagaaagccacgtcttgttggctgggtgcggtggctcacacctgtaatcccagcgctttgggaggccaaggcagacagatcacttgaggttaggaattccagaccaacctggccaacatggcaaaacctctgctaaaaatacaaaaaaattagctaggcatggtggcgcatgcctgtaatcccagctactcaggaggctgaggcatgagaattgcttgaacctgggaggcggaggttgcagtgagccgagattgccccactgtactccagcctgggtgacagagcaagactctgtctcaaaaaaaaaccaaaaaaacaaaaaaacaccatgtcttgttattaagcagtatgatcacctggggtcaaaagaaatctggtcgggtgcagtggctcayacctgtaatggcagctcaggaaggtggcatgtgcaggagcaaaggaaaagccttccacaggaggcagtgcccaggtctgaggtcacctgttcacagggggtaggggagctgtcatcagagcccaccaacagagccctgagtggaatcaa

SEQ ID NO: 924070 - DNA, 624 bp, Homo sapiens
  misc_feature 43: n = A,T,C or G
aagaccctaaaggccaagttagacagcaatcaaagaaaaaagncaacacatctggacctaactactcttaaagatggaatcagaaagccacgtcttgttggctgggtgcggtggctcacacctgtaatcccagcgctttgggaggccaaggcagacagatcacttgaggttaggaattccagaccaacctggccaacatggcaaaacctctgctaaaaatacaaaaaaattagctaggcatggtggcgcatgcctgtaatcccagctactcaggaggctgaggcatgagaattgcttgaacctgggaggcggaggttgcagtgagccgagattgccccactgtactccagcctgggtgacagagcaagactctgtctcaaaaaaaaaccaaaaaaacaaaaaaacaccatgtcttgttattaagcagtatgatcacctggggtcaaaagaaatctggtcgggtgcagtggctcacrcctgtaatggcagctcaggaaggtggcatgtgcaggagcaaaggaaaagccttccacaggaggcagtgcccaggtctgaggtcacctgttcacagggggtaggggagctgtcatcagagcccaccaacagagccctgagtggaatcaa

SEQ ID NO: 924071 - DNA, 598 bp, Homo sapiens
gacgcgagaggactgcttgagcccaagagtttgagatcagcctgggcaatattgtgagattccatctctacaaaaataaaataaaatagccagtcatggtgtcacacacctgtagtcccagctacatgggaggctgaggcgggaggatcacttgagcttgggagattgaggctgcagtgagctatgattgtaccactgcactccaggctgggcgacagagagagaccctgtctcagggaaaaaaaaaaagtactttgtaatctgtaaggtttatttcaacacacacaaaaaaagtgtatatgctccacgatgcctgtgaatatacacacacaccacatcatataccaagcctggctgtgtcttctcacaaatgcactgctaggcaccacccccagttctaaatcacaccagccagttcaccctccagatggttcaccctcaacttcataaaagttcyctacctaatctactgacagcctcatccccgacctaattttaaagatttcctaggagctgcaatgggaatcctggacctcagcctggacaaagaacagctgcaggtcattctcatgtgtggacacggaagccctgcctgcct

SEQ ID NO: 924072 - DNA, 463 bp, Homo sapiens
gctttagttatttgatgggaggaaaaataagtgggaggtgaggagtaactcctgggctctgatgagtattctaggcaagtacagatctggaaagcctgtatgcaaaggaggaactcactgaaaagtgctggcctgaggagggcagaagggagggctggggaagccagcagggggagcaaaggagtaggctccagctgggtgaagatgttggtgtggtaygttatgtaaaatatacaaattattattgggaataaccacgtctcagcagtgcgagttctcagtttgaagaatgggaaatggaaaggatcagattcagagacggcaacttactcaaggtcacagcattttaaacccaaatgaaatctcctaggcccttcatgccacactcatccatccctacctacttgtgttgcaaccaagggccccactgtagtgcctaggggagcaggtctagggcatagtg

SEQ ID NO: 924073 - DNA, 618 bp, Homo sapiens
gcatgaagggatctcaagaggggtgaatgtgttttgcatgcacaagggacatgagtcttggggacagaggacaggctgcggtggcagatactaaggggacccccacaacccgcacctgtgccattcacacccttgaataatccccttctctggttgccagcagaacctgtggcttgcttatgaaggaggtggtatatatgtgattcatgtactgatcatattgtataagatcactggctrgatgcagtggctcgtgcctgtaatcccaacactttgggaggctgaggtgggtggatcacctgaggtcaggagttcgagaccaggctggccaacctggcaaaaccccgcctctactaaaaatacaaaaattagccaggcatagtggtgcacgcctgtaatcacagctactcaagaggctgaagcaggagaattgcttgaactcaggaggtggaggtggcagtgagccaagatcgtgccactgcactccagcctcagtgacagagcgagactctgtctcaaaaaataaataaataaaatgttaagatcataacctgtctttctggggactctctcttgacgcctttgaagaagcaggctgccatgttgcaagctgcctca

SEQ ID NO: 924074 - DNA, 639 bp, Homo sapiens
tagattgtaaacattttgctatatttgtgtcatgattattttttgcttgtgtttgaaagtatattaaagaaaatgatattttacccctaaattatttagtgcagatttctaaaaaataagaacattttcctgtatggttacaaaatcatcttttcaaacaraataaaaaatagtttttttatatcatttattacccagtccacattcagatttcctcaattattatgaaatgtccttttattttttgagacaaagtcttgctctttcacacagcctgaagtgcagtgaaacaatcatagctcattgcagcctcaaactcctgggctcaagtgatcttcctgcctcagcttcctgagtagctaggactataggtgcacaccaccatgcccagctaatttattgtttttgtagagatggaggtcttactacgttgcccaggctggtctcaaactcctggcctcaagtgatccttccagcttggtctccctgaaatatcttttgtggctggtttgctcaaattagtttcttctaatcaagggacacacattgcatttgattatttagctcaagacttttttaacctggaaaataccctcactctttgtttatgtatttatttaatgaaattgacttgttgaa

SEQ ID NO: 924075 - DNA, 642 bp, Homo sapiens
tattgggattgtgttgaatctctagatcaatttggagatagttacattatgacaatattgaatcttctgaaccatgaacatattctctctatttgtttaaggcttaatttctttctttctttcttttttttttttttttttttttgcaacagagtttcgctcttgttgcccaggctggagtataatggtaaggtctcggctcactgcaacctccgcctcccgrgttcaagcaattctcctgcctctgtctcctggagtagctgagattacaggcatgcgccaccatgcctggctaattttgtatttttagtagagacggggtttctttatgttggtcaggctggtctcgaactcccgacctcagatgatccgcccacctcggcctcccaaagtgctgggattacaggcgtgagccaccgcgcccagcctaagtcttaatttctgtcagcagtgttttatagttttcagtatataggttttatacatctttcgttggatttatccctaaatatttcatatttttaatattatggtaaatggtatttttaaaagtttcaatctgctattgttagctttagaaatacagtaaatttttcctgtattgatctggtatcctgcaacatggctaatctcacttattag

SEQ ID NO: 924076 - DNA, 590 bp, Homo sapiens
tggctctggaggaggctccacagacctggtatagaggctgggcatagaaagtgcttgggcagctcctgttaaggttgatttccaggagagaatgggcactctcgtttggagttctgggataggtatatgtgaataaactggtcaagagaagggcctttwcaatggagggcaaggagccctctgcttagtgccccatgccctagacctgtcctcattcacttggaggaaaggctggcaggaatccgtaagtggccaaatgggttggcttgcctcctcaataccactaagtttggagataagggaactaactctcttctccctccttctacccagaggacaagagaggttacagctctccgaacccaactgacctctactagggccaggagactcagaggaaggaggagagttcacaagggcaggtaggggtcccctagccagatggcagcagcacctaggagattaccttacctctatctttgaggaatgagtctgggcaacagagattaaggaaaaaaaaagcaacactaaagacagtcccacacaaatcaatttttaataatttcaacttgccaccagctccaaatcca

SEQ ID NO: 924077 - DNA, 590 bp, Homo sapiens
tggctctggaggaggctccacagacctggtatagaggctgggcatagaaagtgcttgggcagctcctgttaaggttgatttccaggagagaatgggcactctcgtttggagttctgggataggtatatgtgaataaactggtcaagagaagggcctttacaatggagggcaaggagccctctgcttagtgccccatgccctagacctgtcctcattcacttggaggaaaggctggcaggaatccgtaagtggccaaatgggttggcttgcctcctcaataccactaagtttggarataagggaactaactctcttctccctccttctacccagaggacaagagaggttacagctctccgaacccaactgacctctactagggccaggagactcagaggaaggaggagagttcacaagggcaggtaggggtcccctagccagatggcagcagcacctaggagattaccttacctctatctttgaggaatgagtctgggcaacagagattaaggaaaaaaaaagcaacactaaagacagtcccacacaaatcaatttttaataatttcaacttgccaccagctccaaatcca

SEQ ID NO: 924078 - DNA, 539 bp, Homo sapiens
agctgtatttttatgtactagcaacagaaaactgaaatggagatataaaccatgttcatggattagaagatgtgataattaagatgacaattgatatggtttggacgtgtgtcccctccaaatctcatgttgaaatgtgatgcccattgtttgtttgaggtggggtctggtgggaggtgtctgggtgatggagaagatcccttatgaatggcttagtgccatggtaattagtgagtttttactgttagttcatgcaagagttggttgtttaaaagagtctgcatctcttttgctccctctctcaccatgtgatatgccggctccactttgccttccgctaggattatwagcttcctgatgccctcactagaggcagatgccagcaccgtgcttcctacacagcctgcagaaccataagccaaaattagcctcttcttcacaaattacctggcctcaggtatttctttatagcaatgcaaataaacaaacacagcaattctccccaaattgatttacattagagtcaatgcagtcctaat

SEQ ID NO: 924079 - DNA, 738 bp, Homo sapiens
agggaagggcactccttcccaggctggcagatggtgagaagggaccagcactgacaggggagtgtcctgcactcactcagggctctgtgttcacacttctgcttacttacataatgtgtgacccccacgtacctgcaggtaacagaagaatcaagagactgggtaacaacgtcccagagcatcctacggaagaggtccgctcacrctgcagcaacagacagcccccgtgtctcagtgactgacacagcagaggcgcctcccgctcacctgaccatgccctccccagctcagcaggtgccctgcccacggctgtcactcaggaacccaggctgatgacacatctcccatctcgaatgttgctggtcaccacgtgagagggaaaagacagggtggcaagcaaaccctggccggtgaaggtccctccaagaagtgacaggtcaccttggcacacaactcacgggccgtgcccgtgttcaacagcgtggggtgtgtggtctcagggtccctggagggacacagccacatgagcagctctaatgaccaccaaacagtggaggggaaagggtgcgaatcaagtcgaagcacactgaaaacattcccacacgaaggcatgtgagcttggtttcccaggatctgcagcttccaggctcccggactctcagcagtcagagcaaggggtgatgcagggggagagaggaccccgacattcacaggtgctggctgctcaggggtaaatgg

SEQ ID NO: 924080 - DNA, 589 bp, Homo sapiens
gcacacattcgccctagcctgtgagttaggctcggggctccaacttctagcgggagaggcttcagcttatttttctattgagattgaacttgaggatatgtgtgtagagctgcttggtggggattgcttttctgcacatgaagcccaggttagaaatggtgctaacgtggaggagaaggaagtcagagagagaggaggccaggtttcagcctgtgcctgaagcagaggtcccctttactttcagccattgtctgagccaaagcattcctttccttctcttctcttttctccttctcctccctctcctctctctttgtgtgtgtgcgtgygtgtgtgtgtgtgtgtgtgtgtgtgtgtgtgtaacacctgttttaattcctgccaccgcttacagcagaccaggtcctgacggacacggtgggggagtgcagttggctccatgacctgggcaggctcctgtgtgaggctccgccactgcttccctcctcagccaagcccttcccagccactttcaggttccaggctccccctggaccagccacaccaggtttccccctttattggaaggggcatggcaggaaagcggatc

SEQ ID NO: 924081 - DNA, 722 bp, Homo sapiens
tacccatgaaaaataggatatatccactaaaagatttgtgtatcaatgttcatagtagctttgtttgttagtagccaaaaactggaaccacccaaatgtccaccaacaagaatggataaacaaagtctggcatatccaaggccaggcatggtggctcatgcctgtaatcccaatactttgggaggccgaggtgggcggatcasgaggtcaggagatcgagaccatcctggctaacatggtgaaaccctgtctccactaaaaatgcaaaaaattagcctggcacggtggcaggcgcctgtagtcccagctatttgggaggctgaggccggagaatggcgtgaatcagggaggtggagcttgcagtgagccaagatcgtgccactgcactccagcctgggtgacagagcgagactctgtctcagaaaaaaaaaaaaaaaaaaaaagtctggcatatcctttcgattgaatactactcatcaatgcagccaacaaactactgaagcatgctacattgtggatgaatctcagagtaattatgttgtgtgaaagaaactagagtaaatactgtataatttatatcaaattttagaaaatgcaaactaatctttaatgacagaaagcagaccattggctgtctacaggtgatcaaggcatatggagacaggagggagagaaggattgcaaacatccatgagttggggagtcatcaatatgttcattgc

SEQ ID NO: 924082 - DNA, 722 bp, Homo sapiens
tacccatgaaaaataggatatatccactaaaagatttgtgtatcaatgttcatagtagctttgtttgttagtagccaaaaactggaaccacccaaatgtccaccaacaagaatggataaacaaagtctggcatatccaaggccaggcatggtggctcatgcctgtaatcccaatactttgggaggccgaggtgggcggatcaggaggtcaggagatcgagaccatcctggctaacatggtgaaaccctgtctccactaaaaatgcaaaaaattagcctggcacggtggcrggcgcctgtagtcccagctatttgggaggctgaggccggagaatggcgtgaatcagggaggtggagcttgcagtgagccaagatcgtgccactgcactccagcctgggtgacagagcgagactctgtctcagaaaaaaaaaaaaaaaaaaaaagtctggcatatcctttcgattgaatactactcatcaatgcagccaacaaactactgaagcatgctacattgtggatgaatctcagagtaattatgttgtgtgaaagaaactagagtaaatactgtataatttatatcaaattttagaaaatgcaaactaatctttaatgacagaaagcagaccattggctgtctacaggtgatcaaggcatatggagacaggagggagagaaggattgcaaacatccatgagttggggagtcatcaatatgttcattgc

SEQ ID NO: 924083 - DNA, 582 bp, Homo sapiens
cttgtgctgtgtttttcagctccactaggtcatttatgttcctctctaaactggttattctaattagcagttcctgtaaccttatatcaaggttcttagcttccatgcattgggttagtacatgctcctttagctcggaggagtttgttattacccaccttctgaagcctacttctgtcaatttatcaaactcattctctgtccagttttgttccattgctggcgaggtgttrtgatcctttgggaaagaagacgcatcctggtttttggaattttcaaccttttcgcactggttttttctcatcttcgtggatttgtctacctttggcctttgatgttggtgaccttcagatagggtttttgagtggtcattttttgttgttgttgttgatgttgatgctattgctttctctgtgttagttttccttttaacagttggacccctcttctgcaggtctgctggagttgactggaggtccactccagagcctgtttgcctgggtatcaccagtggaggctgcagaaaagcaaagatttctgcctgctgcttcctctggaagcttggccccagaggggaacctg

SEQ ID NO: 924084 - DNA, 614 bp, Homo sapiens
cacatctgttagaatgactatttaaataaaaaagataacaggtattaccaaggatgtgagaaagttaaaacccttgtatgctgttggtggaaatgtaaaatggtgaagttgttctgaaaaatataggtttgttaaatgagattttcagaaaattaaaatggaactaccacatgatccagcaatcccacttctggatatatatccaaagaatctagatmagcatctcgaagagatatctgcactcaatgttcattgcagcattattcacaataatcaagacatggaaacaatttaaaacctgtaggacattatgctaaataaagtaaggctgtcatgatctcacctacatgaggactctaaaatagttaaagtcatagaaacagaggaaaatggtggttgccagtgactggggagagagagaaatggagagatgctctttcacaggtacgtagttccagttatacgatatgagcaaattctagagatctgctgtatatccttgtgcctatagttaacaataccatactgtgcacttaaaaatttgtcagaatagtagatattatgttaagtgttctcatcaaaattataaaaaaaatctttaatccatgggaatg

SEQ ID NO: 924085 - DNA, 585 bp, Homo sapiens
tgggagaaccactgctctcttcaaagctgtcagacagggagattgaagtctgcagaggttactgctatctttttgtttgtctgtgccctgcccccagaggtggagcccatagaggcaggcaggcctgtttgtgctgtggtgggctccacccagttcgagcttcctggctgytttgtttacctaagcaagcctgggcaatggtgggcgcccctcccccggcctcactgccgccttgcagtttgatctcagactgctgtgctagcaatcagtgaaactccgtgggtgtaggaccctccaagccaggtgcgggatataattgccaggtgcaccattttttaagcccttctgaaaagcttagggtgggagtgacccgattttcgaggtgtcgtctgtcacccctttctttgagtagaaaagggaactccctgaccccttgcactccccgagtgaggcaatgcctcaccctgcttcagttcatgcatggtgcactgcacccactgtcctgcgcccactgtctgtcactccctagtgagatgaacccagtacctcagatggaaatgcagaaatcacccatcttctgcatca

SEQ ID NO: 924086 - DNA, 790 bp, Homo sapiens
aaaatggttccaagtggttctaaagcacactttagaaacacttatactcaaagcaggagagtagttatgaaaacctacatacccactacataagtataacttgggaacaggacagggtaccaaaggcaagccttagctggaagagctgagtgctatggtaggaatgctcccaccaaaattcatgttgaaacttaattacttaatcgctaatgtaacagtactgggaagcagaacctttaagaggtgattaggtcataaatggattctcactgttatcctgggagtaggttaattatctcaggagttcactttttctctttgtctttcatggcttgctttcgccttccacccttccacaatgggtgattctcgccagatgccagagccatgtacctggacttcccaggctccagaaccatgagccaaataaattacccttgttccttgtaaattacccaggctgtgacagactgctctagcagcagaaaacagactaggacagtgggcaagcagctctgcgtataacttgagagatgtagtaaaacatccttctttaccacattgatacagtkgctgaaatttcaggcactgttacaagcatttctatgtgctttctcataaagtcatgcaccacataactatgctttagtcaacaatggactgcatatataacagcgatcccataagattgtaataaagctgaaaaattcctattgctgagtgatggcacagtttcctaacatcatagcacaatgcattactcatgtgtttgtggtgatgctggtgtaaa

SEQ ID NO: 924087 - DNA, 790 bp, Homo sapiens
aaaatggttccaagtggttctaaagcacactttagaaacacttatactcaaagcaggagagtagttatgaaaacctacatacccactacataagtataacttgggaacaggacagggtaccaaaggcaagccttagctggaagagctgagtgctatggtaggaatgctcccaccaaaattcatgttgaaacttaattacttaatcgctaatgtaacagtactgggaagcagaacctttaagaggtgattaggtcataaatggattctcactgttatcctgggagtaggttaattatctcaggagttcactttttctctttgtctttcatggcttgctttcgccttccacccttccacaatgggtgattctcgccagatgccagagccatgtacctggacttcccaggctccagaaccatgagccaaataaattacccttgttccttgtaaattacccaggctgtgacagactgctctagcagcagaaaacagactaggacagtgggcaagcagctctgcgtataacttgagagatgtagtaaaacatccttctttaccacattgatacagtggctgaaattkcaggcactgttacaagcatttctatgtgctttctcataaagtcatgcaccacataactatgctttagtcaacaatggactgcatatataacagcgatcccataagattgtaataaagctgaaaaattcctattgctgagtgatggcacagtttcctaacatcatagcacaatgcattactcatgtgtttgtggtgatgctggtgtaaa

SEQ ID NO: 924088 - DNA, 790 bp, Homo sapiens
aaaatggttccaagtggttctaaagcacactttagaaacacttatactcaaagcaggagagtagttatgaaaacctacatacccactacataagtataacttgggaacaggacagggtaccaaaggcaagccttagctggaagagctgagtgctatggtaggaatgctcccaccaaaattcatgttgaaacttaattacttaatcgctaatgtaacagtactgggaagcagaacctttaagaggtgattaggtcataaatggattctcactgttatcctgggagtaggttaattatctcaggagttcactttttctctttgtctttcatggcttgctttcgccttccacccttccacaatgggtgattctcgccagatgccagagccatgtacctggacttcccaggctccagaaccatgagccaaataaattacccttgttccttgtaaattacccaggctgtgacagactgctctagcagcagaaaacagactaggacagtgggcaagcagctctgcgtataacttgagagatgtagtaaaacatccttctttaccacattgatacagtggctgaaatttcagkcactgttacaagcatttctatgtgctttctcataaagtcatgcaccacataactatgctttagtcaacaatggactgcatatataacagcgatcccataagattgtaataaagctgaaaaattcctattgctgagtgatggcacagtttcctaacatcatagcacaatgcattactcatgtgtttgtggtgatgctggtgtaaa

SEQ ID NO: 924089 - DNA, 605 bp, Homo sapiens
gccatggcatgcagatggagaagggcaattcaagctaaacatccccttaggggactattcagtaatgattccatgggaattattgtgcagcacctctgcctgttctgcaatgcaatcttcccaaacaagcacatttattttttctgaccaggtccaatcctgtttacaaataggtttttgatgtggtatgcctcagttataggagcagatttattatggtaaatactaagaccagaaagcaagtgtaactgtgtcatagagtgattacatccaggcattattgccagccaagattgatagtgaaggtgtaggcaactagtggcctttcccaaacagataggcagatgttcaaatcctaaagaaatattcataacagttccttcctcmtgtgggtgagatgggcctctatcatctgtaggactgaacatccaagagctatcattagtgtatacctccactggggggtccagccaagttacaggccgtagaagtggtggaaaaggtaaatatgcccaataagtataattgttctctgtgtcagcccttgttaaaggaatactctaggcaatggtgatcaccactatcatagctatcattaagttact

SEQ ID NO: 924090 - DNA, 528 bp, Homo sapiens
tatcattagtgtatacctccactggggggtccagccaagttacaggccgtagaagtggtggaaaaggtaaatatgcccaataagtataattgttctctgtgtcagcccttgttaaaggaatactctaggcaatggtgatcaccactatcatagctatcattaagttactcattgtgactggttgtcctgctttcctcaggttttcttccaccatctgcracagcttcttgatctgtccccaggtaggtggctgtgttcaacgggtgttgctcgtgacagttggggtcctcctcagcatgaacttgagcaatgctgccaatgatgggtctttgggatcctcccaaaacctcttcctgggtagctggctcatagtacggctttagatgtctcgatggtgcccaaattggctgttgattcagtcctggagaaacacaagcatagtctctaccccaagttattattttacctatttcccaaccttttgttatcggatctctccaccaaaccagttgctctgcttctgtcttt

SEQ ID NO: 924091 - DNA, 597 bp, Homo sapiens
ttcacctcagaccaagtgaatcaaaatccctgtggggtgggggtagacctcagtattttttaagtcttgccagatgattccgaagcacagtgagagggtagaaacgtttattatctcagcaggtaggagataataaagggaggagaaaacaagatgagagattttgttcctggaccaaactgagggttgggctgctatttctcgtggcccagtaacaagatgcagatgaactggggaggaagagagttttttatttccataaccggttacagggagaaggcctggaaaatatcgccagaccaactcaaattacaaagttttccagagcttrcatatcttctaagctacatgtctatgtgtaagtgtgcactcatctaaagacataagcgattaatttcttttaatctgtagctaacatctaagtcctgaagaccttcctctggagcctcaatagatttacttaatctaaatgggtccaggtgctggggtgattacccttatcttgtctcctgctaaatcctgaaggtttggggagttccttcagacctccaataaacttgtttttggaggcctggggagtttcttcagacacccagt

SEQ ID NO: 924092 - DNA, 459 bp, Homo sapiens
ctctcctgtatgaggagtcagtcaacccttgttgggagatctttcccagtcaggaggcatgggggttagggactcactggaggaggcactcagtcccttaacagagctctagtgctgtgctgggaggatcctgcttgtcaggatcygctgcactcttcagagccatcaggcaagatcgtttaattccactgaagctacaaccacattcgccccttctctcaggtgctctgtcccagggggatgggagttttatctataagcccctaactggggctgctgcctttctttcagagataccctatgaacatgaatctagagaggcattctggccacagcctctttgctgcattgtgttgagttctgcccagtctgaccttcccagcctccttagcagtgacgggaaaactgcctactcaagtctcagtaatggtggatgcccctcccccaaccaagctcgtt

SEQ ID NO: 924093 - DNA, 603 bp, Homo sapiens
attaataataataagggcctgtgatgattaaggattaagtcattatgtttcctccctcctcagggcccttgcccaggctgttccccctgcctgtccctcctctgcccagcttctctccacctggtgaatgagttattcttcagctcacagcctaaatgtcacctcttccgggaagcattcctggcaccactggtttaaatcaggtccctcccgcttagatgtgctcagagctctgactctgccccttttctttttctttttctttctttctttytttttttttttttttttttttggggggggagacagagtctcgctctgtcacccaggctggagtgcagtggcgaaatcttggctcactgcaacctccgcctcccgggttcaagcaattctcctgcctcagcctctcaaatagctgggattacagtcgcctgccaccaagcccggctaatttttgtagttttagtagagacggagtttcaccatgttggtcaggctggtctcaaactcctgacctcaagtgatctgcccgccttggcctcccaaagtgctgggattacaggcgtgaaccaccgcacctggcctctgccccttttctctcgg

SEQ ID NO: 924094 - DNA, 624 bp, Homo sapiens
gttgctggggaaagcctgcgttttgggtgtgcctagggccagggctcagaccattatctccctgcagccttgcatgccttcccttgcctggctaccattctcatcagaaaaagcaggattcttgctttaagtcctggtgatttacatggagaataataagttctggtttaatcatccctccaaagatgaagaaattctccaccgagcccactcttctcttgacttctgttcagaaatcaagtattaatataaatcgaagctctytccttcctcccatgccagaggctgttctgcaaagctgccattcatagggagaactggcgatgaagtgtctgtcaaaaggactgtttttacaattgggacctgcctgtagtggtgatgaggtaatttcttcttaagcttctggtatccaaggagagaaaaaagaacagcaaaacaagctctgttaataaaggtgtgagagtctttgggtgtttgctgttattaaagagaccttaaggaaggctgcttctgagctaaaagcaaacttttgtcaaaggttcattttagaaggttcaaaagacaccagagagagagagaacaagaggcaggaagaggcaggcacagagagaggggatgagagga

SEQ ID NO: 924095 - DNA, 610 bp, Homo sapiens
aggcctcacttgctgtcatgcagctttttgtttttaattatggtaaaaaaaaatcacacaacacaaaactcaccatttaaaccattttaaagagtacagttcagtggcctttagtacactcacaatgtacaaccatcaccactatctagttggagaagaatatcatctcaaacggaaatgctctacccatgaagcagtcactcccttaccccttctccagtctatgacaaccactaatccaccttctgcctctatggatttgcctatcctggacatttcatacaatatgtgtcccattgtgtctggcttgtttcatttagcataatgttttcaaagttcagtatgctgtggtatggttcagtacttcattccttttgtgactgactaatattctattgtatggatatacygcattatatttatccattcatccattgatggacatttgagttgtttccaccttttggctactgtaaatatttctatggtgaaaacatatatacaagttttttttaaacatgtgttttcaattcttttggttacatacctagaagtggaattgttgggtcttatggtaattcaacatttaactttttgaggaactgcctaa

SEQ ID NO: 924096 - DNA, 750 bp, Homo sapiens
  misc_feature 733, 734, 735, 736, 737, 738, 739, 740, 741, 742, 743, 744,745, 746, 747, 748, 749, 750: n = A,T,C or G
ggacaaaagactaatttgaattataaaaacagagaatcatgacccctcattcattttccagacttgagccagtttacaacagaaccccttgaatgaaggagcggctgggtccccttgaggaaggactccattacactactgacaatttatgctgttaatctttctcccattcttccccaaggagactgctggccttttaccagggtaactgtgcattagggaaagggaaatgatcagacatttcagggactactggacactgactctgagctaacattgattccaggggacccaaaacattattgtggttcttcagttaaagtaggggcttatggaggtcaggtaattaatggagttttagctcaggtctaacttacagtgcgtccagtgggtccccggactcatcctgtggtcatttccccagtgccagaatgcataattagcatagacatacttcgaagctggcagaaccyccacattggcaccctgactggtagggtgagggctgttatggtgagaaaggccaaatggaagccattagagctgtctctacctagaaaaatagtaaaccaaaaacaatattgtgtccctggagggattgtggagattagtgccaccaccaaggacttgaaagatgcaaaggtggtgattcccaccatatccctgttcaactctcctatttggactgtgcagaagaatgatggatcttggagaatggcaggggcatccattnnnnnnnnnnnnnnnnnn

SEQ ID NO: 924097 - DNA, 750 bp, Homo sapiens
  misc_feature 733, 734, 735, 736, 737, 738, 739, 740, 741, 742, 743, 744,745, 746, 747, 748, 749, 750: n = A,T,C or G
ggacaaaagactaatttgaattataaaaacagagaatcatgacccctcattcattttccagacttgagccagtttacaacagaaccccttgaatgaaggagcggctgggtccccttgaggaaggactccattacactactgacaatttatgctgttaatctttctcccattcttccccaaggagactgctggccttttaccagggtaactgtgcattagggaaagggaaatgatcagacatttcagggactactggacactgactctgagctaacattgattccaggggacccaaaacattattgtggttcttcagttaaagtaggggcttatggaggtcaggtaattaatggagttttagctcaggtctaacttacagtgcgtccagtgggtccccggactcatcctgtggtcatttccccagtgccagaatgcataattagcatagacatacttcgaagctggcagaacccccacattggcaccctgactggtagggtgagggctgttatggtgagaaaggccaaatggaagccattagagctgtctcyacctagaaaaatagtaaaccaaaaacaatattgtgtccctggagggattgtggagattagtgccaccaccaaggacttgaaagatgcaaaggtggtgattcccaccatatccctgttcaactctcctatttggactgtgcagaagaatgatggatcttggagaatggcaggggcatccattnnnnnnnnnnnnnnnnnn

SEQ ID NO: 924098 - DNA, 587 bp, Homo sapiens
ctggagcaagatgtccaaggtcagaaaaaaatagaggatttgaggaaaccaagccttagagtgggtggcttcagaaatagctaaattgagactggtaccccaagactctgatgcctgacacctacctcacctctctctttctccctctctcttccctctgctacaaatacggaattttagccagtgattaacaaatgactgatgatttcaaaccgaaggcaaagacatttcaaaaggaagccacactttggaaaagagcaaaaatcaaacaaacgcatcccctgtctctctgtggggcattccctacctttctctgagttatatgtgattacaaggggattttaactcttttaggtttggcatcaccaatctcattaaaaaacaccctgctagtttacataatctaaattaataaaaatccaaaaatayattaaaaaaaaaattgcattctaaaatggaagacagtaaaccactgccacaatggaaatctcattttcaataatattttgtctaccgttggagcagtgttggaagacatttgaggagctcagaaggtgaatgtacagccgagttccacctttcccaaa

SEQ ID NO: 924099 - DNA, 767 bp, Homo sapiens
aggtggtgcctgcatatcgtgcagaaccatctgtgaaccaggccctagtcttctcttcctctgtcaactgatcatagggaactccctatgaggccattggtgcaggctggaggagagaaggtagggtggcaggagtggagatcatgggcatttgagccacttccttatgtaacttacttggccttcaggatctgcttaagcccaatcacgtatataccacttccatttgatgatggaatgctgctgtgcatgacccactttatggctagatgggtcagaaagcacccagttcatgataggcagttcaggtygcatggtgacttgatgatccatagtcaaactttcagtttccaccaaagcccagtaacaggccaagagctgtctctgaaaagaagagtaattatctgctgaagatggcagggccttactccaaaatcctagaggcttctgctgttattcaccaatgggggcctaccagaggctccaaacagtatccctatctgccactgacacctcaagcaccactggatctgctgggtcatatggcccaagtggtagagcagcttgcacagcagcctggacctgttgcagagccttctcctgttgtggaccccattcaaaactggcagcctttcaggtcactcaataaatgggccagagtaacacacccaaatgaggaatgtgctgccttcaaaatccaaataggcccactaggctttgtgcctctttcttggtttgggagggacctaatgcagcaagttatcctt

SEQ ID NO: 924100 - DNA, 757 bp, Homo sapiens
tttctctccatctaatttctccagaatttggaaaatatttgtgagtgttcttaacttatggcaatgtaattatttgcataagtgcaataagaatgttttcttttgcaacaggacacaattggagaaactgattgttttaccaaggctttgacttaaatggcatgctctcctttaaggaatcaagcttgacttagccaataagagctccttgggaaaactggccttatagcttgtctgcacagtccctgtatagggcttctgacctataataagtaaagaatattgatagtgactggaggcagtcaaatgactaggcagatgatgcggtccctggtgaaaccccactttcaagccaaaaacaccctggagtgcttgttctggacgaaacccatgacccacagtgagaacgtctattgctgtttgcccaacctttcctgattggttctttctgaataatgcttttaaccaatcaaatgtygccttatccagtactatgtatggcctgcccctcccccatcccatgcctataaaaactccagactcagcaacaatgggggggatgatgtgacttcaggtgagagaccacctccccattccctctctgctgaaagctgttttgtcacttagtaaaattatccaccgtcatcaccctccaattgtcagcatgacctcattcttcttgggcacatgatatgagctcaggacccactgaaaacaggtacctagaaaggctgtaacactgtggccctctgccctt

SEQ ID NO: 924101 - DNA, 612 bp, Homo sapiens
gaagggcaaaaaatgcctacccagtttaaatcaggctaaaagaccccaccacttttccttatcaaaggcaatattgtttaaggcctgaagctcataaaagattacagaatattgttagacatttaaaagctcagctcggcgtggtggctcacacctgtaatcccagcactttggcaggccaaggtgggtggatcacgaggtcaggagatcgagaccatcctggttaacacagtgaaaccctgtctctactaaaaatacaaaaaattagccaggtgcggtggcaggcgcctgtaatcccagctactcagaaggctgaggcaggagaatggtgtgaacctgggaggcggagtttgcagcgagcagagattgcaccattgcactctggcctgggcaacagcgtgaaactctgtctcaaaaaaaaaaaacaacaaaccaaaaaccaaaaaaaaaaaaaaaacacacacamaaaaaaacaaaaaacaagacatttaaaagctcaaggcttagtaagaaaatgcaacagtccctgcaacaccccagttctagaagtacaaaaaccgaatggtcagtggagactagtgcaagatcttagactcatcgatgaggcagtaa

SEQ ID NO: 924102 - DNA, 602 bp, Homo sapiens
tactgtggctaagtattaggagttgggggaatgctatttggaatgaagtcagagaagcatatagacgctgtcagatgtagtggcttgtagtgcatggtaaagagcctagttgtactctaagaataaagaaaagtcattggagagctttaagaagcagaatggcctaattttacctatgttttgttttgttttgtytttttagatggagtcttgctctgttgcccaggctggagtgcagtggcatgatctcggcacactgcaacttccacctcccaagttcaaggattctcctgcctcagcttcccaagtacctgggactacaggcacacatcaatccacgcccagcactttttttttttttttttttgagatggaatctggctctgccgcccaggctggagtgcagtggcgcgatctcagctcacactgcaaccaccatgtccctggttcaagtgattctcccgcctcagcctcccaagtagctgggattataggcacccgccatcgtgcctggctgatttttgtattttagtagagacggggtttcaccatgttggccaggctggtattgaacgcctgacctcaggtggtccgcccacctt

SEQ ID NO: 924103 - DNA, 602 bp, Homo sapiens
tactgtggctaagtattaggagttgggggaatgctatttggaatgaagtcagagaagcatatagacgctgtcagatgtagtggcttgtagtgcatggtaaagagcctagttgtactctaagaataaagaaaagtcattggagagctttaagaagcagaatggcctaattttacctatgttttgttttgttttgtctttttagatggagtcttgctctgttgcccaggctggagtgcagtggcatgatctcggcacactgcaacttccacctcccaagttcaaggattctcctgcctcagcttcccaagtacctgggactacaggcacacatcaatccacgcccagcactttttttttttttttttttgagatggaatctggctctgccgcccaggctggagtgcagtggcgcgatctcagctcacactgcaaccaccatgtccckggttcaagtgattctcccgcctcagcctcccaagtagctgggattataggcacccgccatcgtgcctggctgatttttgtattttagtagagacggggtttcaccatgttggccaggctggtattgaacgcctgacctcaggtggtccgcccacctt

SEQ ID NO: 924104 - DNA, 662 bp, Homo sapiens
tgtatattttaagtgggacatttaatctgtttacatttaagattaatattgataaatgaggatttattttggtccttttgttaattatcttcttattgtctttatccttggccctttctgtcttatttttctttgtggcttggtggttttctgtattgataaggtttgattcttttctctttctctttgtgtatctgctttaccagtgagttttatagttttgtgtgtttttgtgatggtgatttttattttctcacatccagatgtaggacttccttgagcatttcttgtaaggctggtctagtggggataaattacctctgtttttgcttgtctgagaaaaactttattctccctcattcctgaagtatagatgttctcagtatagtattcaaggctagtattttttttctttcagtgctttgaatatagcttctcatttttgcctggcttgaaaagcttatattgataattctgatgttagtttaatgggagttaccttatatgtgacttgaygcttttatcttgatgtttttaaaatatatatttgcctttgacttttgacgatttgactataatgtttcttgtagaagaatttttttgggttgaatctatttaagaacttttgagcttctgggatctgaatgttcagaaatcctttt

SEQ ID NO: 924105 - DNA, 766 bp, Homo sapiens
gacaggtacaagcatcccacaaatattcctgagagaacctgtccttgactgtagcccaagaggccctgagcctagctctgtgagtcataggctcaaagcaccaacattgaggaggggaagcagcaacaacagcactggtttctcaaattattgctcaggacaactcgtcagcaggcccacagcctttgctgagagcccataaaccactctgcacgaggtatgatgaaaaaacacaagcaaaagaaagaaaaaatgctggaactttagtcaatagaatatggctcaaaagaagtcggaaagttgggcttgtgtctctttttgttgctcagatttcttgtcacagggtttggtttctaatgaaatctggctcaacatggacagcttgtgccttccaatgacttttcatctaatgatatgtgacaagcaccaaaaaagtactggccttaaacatatattagagacaaattgtctagatcccagacctccaaaacaaaattgtgcaagtggggagaggggtgtctttccactaattaattgcaaagaaaacaatgcaacaaaggtcaacctcttcatatcccttctatttcttcaccctccctcttcttcactccagctamacacacacaaaataaaggtcacttgaaataccaccagccttaatattttggtgtatagtgattatgattaagtggatggactctggggtcagtgggccttagtgtgagtcatggctctatgtgcccttgggcaattacattaattctct

SEQ ID NO: 924106 - DNA, 604 bp, Homo sapiens
cccctgaattactgttttttgtttttttttagatggagtcttgctcttttcacccaggctagagtgcaatggcgccatcttggctcaatgcaacctccacctcctgggttcaagcgattctcctgcctcagcctcctgggtaactgggactacaggcacccaccaccacacctggctactttttgtatytttagtagagacagggtttcaccatcttggcaaggcaggtctcaaactcctgacccccagtgatcttcccttcttggccacacaaagtgctgggattacaggcatgagcacctctgaggtaggccctttggggactggagccatgcctcactctctgcccctgggggaccaggtccccaggtccctgtctcagtcctctctctgctcctgggggaacagggacctgtctcagtgccttctctgcccctctcagggtgtgcatgatggaggagttcaagaattgctgaaccaagaggtagaacccaaatggcttatgtggctcaatccttaggtgtttggaatggaaacttacctgtacctaccacctctctcttgctgtgttcccccaagggtccccactgagtgtccggggagc

SEQ ID NO: 924107 - DNA, 465 bp, Homo sapiens
gtttataccttttggctattaggaataatactgctatgaacatagatgtataaatatcactttaagaccctgctttcaattcttttgagtatattaccagaagtgaaatcgctggatcatgaaataattctattttaatttttttaaagagccatcatactgttttccaccatggctacacaattatacgtcagtgcagaagggtcccactttctctacattcttgccaacattgctattttctttatctttttttttaagagcagccatcctagtgggtgtaaggtggtatctcatygtagttttgattgcatttcccaaatgattactgatgttgagcatctttttttttttttttggagacagagttttgctctgacgcccaggctggagtgcagtagcatgatctcagttcactgcaacctccatcttccgggctcaggtaatcctcccacctcagcctcc

SEQ ID NO: 924108 - DNA, 633 bp, Homo sapiens
gctgagtgacagagagagagaaagacgagaaaagagagaggcgaggagaaaaaggagtcagaaaggaatacagaagaaggagaaagggaagtggagggggcagtggggcagggaagacaagcagcctcagatgagggagagatttaaagcaaagaaacaagttggtgaaaatcaggrgggaggagcagagagcagacaagaataaaaggtaaggagggacacaaatggagaagcgggggatagaaatgcacacatctatcagttaatttccagagcatacaaaatagaaataatcctccttcaaagcatgcatttgagggtgaagtgggagacagtatgacatgaaatgaaagccggaagcatttttcaatgcggacacataagcaaggctttaattattaactgattgcttgtgtatgtgcgtgcatgtgcacacacacacgtgcaagtaacaggccattgtgtccaggcattgtgaaacaagccacggaatccactggtcagagtcaatatttcctcaaaatggcagtcatttaaccattgtgcctgtctctgctctcagaatgtaactaacatcttaagtcaatagctgttgatggagatgcccgtgcagaatccctgtgctgctgcttg

SEQ ID NO: 924109 - DNA, 734 bp, Homo sapiens
aagaggtgctttattgagcaatagtgcagctctcaggagacctaaagtgggtaactcctttctgcaggcaggttgtcccgatgagtgcagctctcagcagagaggagacctggagtgggtagttcctatccataggcaggttgtcccgatgtctctgtgagtctggttgagtccagggtttttacaggcttcagaagggaggaagtgtgtgctgattgtttcatgggaggccatgggtgggcccggaaaaaacaccattaagttctcgctctgggctgtcgactctacccagaactgacagcctggccctgtgctttaggccgtccatggcttgaatgtggggcttcaccagggacctgcccctttccacccaggagtctatctgcctcctgccaccatctacatgtcatccatggcacccaggctgttccagccgaggcctggcaggccagcaggcccaggctgagccacactcagccccacctcagcctccctcccaggcttgtttgtgcccagagtccggarggggctgaggcggcagggggctggcatatcagcaccatccaagcatgcgcacacctagccgggtcacgagagtacccgggcttggccacaactttgctccgtaattggagcaggcactgggagcaggaagacgccaggcagtgggagcaggcacttcagagcctgcagggcagggggcttcccgggcctctgagagtgcagggatgctt

SEQ ID NO: 924110 - DNA, 660 bp, Homo sapiens
ggtcttgcctggatccactcacatggatatagttagcagttgggctgatgggctggatgggctaagatggtttcactcacatgtcaggcagttggtggctgtcagcaaggagccatggctctacttcgtgtggtctctccagcaggctagctcagaactgttctcatgacaagtcaaggcatttgattcctagggttagaactcaaacctcacttccatcacgttctattggtgaaaacaagtcagaagtgcagcatagattcagaaggtggagaaatagattctacctcttgatagaagctgtaaggagttcatggtcatttaaaatctcccaaataggctgggcgcagtggctcatgcctgtaatcccagcactttgggaggctgaggtgggtggatcacgaggtcaggagattgagaccatcctggctaacatggtgaaacccagtctctactaaaaatacaaaaaaaaaaaraaattagctgggcgtggtggcaggcacctgtagtcccagctacttgggaggctgaggcaggagaatggcgtgaacccaggaggcggagcttgcagtgagccaagatcgcgccactgcactccacgctgggcgacagagcgagactccatctcaaaaaaaaaaaaaatctgccaaatagaggtta

SEQ ID NO: 924111 - DNA, 703 bp, Homo sapiens
attatcagtaggaccatgatgcccacctgagccttaaagccagcaagttttattaaggatttcaaaaggggagggggtgcaagaacagggagtaggtcacaaagatcacatgcttcaaagggcaaaaaggaaaacaaagatcacatgcttctaagggaaaaatcagaaactcctcataagggtccaacaaagatcacaaggcaaagggcaaaagcaaagatcacaaggcaaagggcaaaagcagaattactgataagggtctaccttcagtggtgcacatattgtcttgataaacatcttaaacaacagaaaacagggttcgagagcagagaaccagtctgaactcaaatttaccagggtggagtttcccaatcctgagggtactgcaggagaccagggtgtatttcagtccttatctcaactgcataagagagacactcccagagcggccgtttatagacctccccctaggaatgcagttcttttcccagagtrttaatatcaatattccttgctaggaaaagaatttagcgatatcttccctacttgcatgtccgtttataggctgtctgcaagaagaaaaatatggctctttttgcccaaccccgcaggcagtcagaccttatggttgtcttcccttgttccctgaaaatcgctgttattctgttctttttcaaggtgcactgatttcatattgttcaaa

SEQ ID NO: 924112 - DNA, 515 bp, Homo sapiens
cagggtggagtttcccaatcctgagggtactgcaggagaccagggtgtatttcagtccttatctcaactgcataagagagacactcccagagcggccgtttatagacctccccctaggaatgcagttcttttcccagagtgttaatatcaatattccttgctaggaaaagaatttagcgatatcttccctacttgcatgtccgtttataggctgtctgcaagaagaaaaatatggctctttttgcccaaccccgcaggcagtcagaccttatggttgtcttcccttgttccctgaaaatcrctgttattctgttctttttcaaggtgcactgatttcatattgttcaaacacacatgttttaaaatcaacttgtacagttaacacaattatcgtagtggccgtaaggtgacatacatccccagcttacgaagataacaggattaagagattaaagtaagacaggtgtaagaaattatgaagtattatttgggaactggtaaatgtccatgaaatc

SEQ ID NO: 924113 - DNA, 718 bp, Homo sapiens
agggtggcctttactccagtttccaacaagttcctcatctccatctgagaccacctcagcctggacttcattgtccacatcactatcagcattttggtcaaagccattcaacaggtctctaggaagttccaaactttcccacatttctctgtcttcttctgagccttccagactgttccaacctctgcctgttacctagttccaaagttacgtccacattttggggtatatttatactagtatgtcactcctggtaccaatttactgtattagtttgttctcatgctgctaataaagacatatctgacactgggtaatttatgaaggaaagaggtttaattgactcatggttctgcagggctggggaggcctcaggaaacttacaatcatgatggaaggggaagcaaatacatcatttttcacctggcagcaggaaggagaagaatgagcaaagggggccggtgtggcrggggggagcccctcataaaaccatcagatctcatgagaattcactcactatcacgagaacagcatggagataacctccctcatgattcaattacctcccactgggtccctcctatgtcatgtgaggattatgggaactataattcaagatgagatttggatggagacatagccaagccatatcgagcagtaaatctaacaattaagatacacaggctttggaatgagacagacctgggtttgaaagtct

SEQ ID NO: 924114 - DNA, 589 bp, Homo sapiens
tagaactcctgacctcatgatccacccgcctcggcctcccaaagtgctgggattacaggcgtgagccaccacgcctggcctgaattctttacaacaggcaaatacactttttagaagcccctaaaacagtaaagattttaaaaaacattcttttaatagttacctctctcctttttatcgcatcccttagtaaggtgactacatcgtggcccacgcagtctgttgccttaaaaccctttgtccacgtgatcaagattccctacaacataaaaagcaccaggagagtcctgtgtaattaacctggaaggggagaacacaaaattccaaccctccctcctgagtcaacaactgctgagggcttacaacatcggagacggagttcaaacatctgaggacaaaccaataaaatatgaatagaccctcctcaccatcctcataggggtytgaaataatcccacttcacagatggagcatgaggcacattaggtaaatagcaatgtctaagttcactcagcagacggcaaagacggcactcaatactggacaagagcccagatcacccgattccaagcctggtgctgccactggc

SEQ ID NO: 924115 - DNA, 748 bp, Homo sapiens
gaagcatgtttcatctcctaatttgtcttttactatctgttcatatttttttgcacttttcccccaataaaatgcactatagtatacattttaatctttgcagaccaatgtgatcatgttgccaagtagtcaactccaacacttgtagccctaaagcaactatagataatatgaaagaaatgggtatgtgctatagtagtgtgtacagatagttctagaaaaaaatctaaagaaaaaatcatttctgttggcaccagagtttcaaaagtctcattttaaatgaacgtgactttgggtctttaaaccactattgtgagaatatcttcactcctttttcctgtcttacagccatggataactgctactatctgattagtgcaattctttctccattgagtcagtaactattaacattgacttgtggaaagaaatacaaacaatctctcctcagatgtttctctttcactgctgttacagttcacatcacctagtattgctgtttaatagatggtttyatgggataccttattgtgtggagttttgtaatgctggaagatctatggacacctgcttacttactgtcatcaaaatccgtgcaatctacaactaagcatggtattatcccacatagaaaatttatttgttgtcctaggagcaaatttcattattggtccttcaacagtttctacttcagctccgtcaaactggcctccctccccatttcgctttctaccttagccatctcaca

SEQ ID NO: 924116 - DNA, 655 bp, Homo sapiens
attcttcaaaagaaggcattcaaatgtccaacagtcaacatcacttcaaaagaagacattcaatccgttaacagtcaacatcactaattatctgagaaatgcaaatcaaaaccacaatgagatatcatctcctaccccagttagagtgacaattatcaaaaagacaaaaaataacaaacgctggcaaggatgtggagaaaaactctcatatactgttgaggggaatgtgaatcagtactaccataatggaaaacagtatggttgtttttcccaaatctaaaaatagaactaccatatgattcagcaatcacactactgggtatttatccaaargaaaggaaatctttatatcaaagggacacctgcacccccatattttttacagcattattgatagtagccagtatcagggatcaacctaagtgtccatgaatagataaatggaaaaacaatatatggtttatatacatgatgaaattttattcagacataaaaattaatgaaatcctgtcatttgtaacaacatcaatggaagtggagataattatatttagttaaataagccaggcacagaaagacaaaaattgtatattctcacttgtggagtagagagtagcataatggttattagaggctggagagagaggaaaggttg

SEQ ID NO: 924117 - DNA, 619 bp, Homo sapiens
  misc_feature 560, 561, 568, 569, 574, 575, 582: n = A,T,C or G
actcttttcacagaagtagttatggtatttactacacacagaggaaaatccagccccagcctggcaatcgctacccttccacagcacaggattttcctgtgtgtagctccctccacactgcaccccacgggcatgtacaattattatgtgtcaattataaacaaaattttcaaaagcaggtaaaccacgccaagggaagagagttaaggtcgcagtgtcatgggtggaggggtgagggtacacaagggccactttacagagagagggtaggggtgacaggagggggagtacagcaaagaagcctagagaactctttcaggaatgttccctgcaagcaggagagaagaggggagagtggtatggaggggcagggtgccccttgctagaacgggagggacccgagccggtttaagtgcatttggactggcagaygtggaggctgtgggtgagggtcaggtagggtgatgagtcaagagggagcttcctgggaggtgacaggatgtggagcctgagctcagggggtcagaggttagcatgagatggcaagacactgtcctcgnngttgtgnngtggnngggcacnaggaggtgcccttgtagcaagaatgaggccttcctct

SEQ ID NO: 924118 - DNA, 587 bp, Homo sapiens
tttacagaagtcaaaatcttccctgtatttgaatttgttagtcttttctcctatggtttcttttgttacttatggaaacattttaaggttatgatgataccttattacttatggaaacattttaaggttaaagttctgatactccctgatactgtttaaaggtagctagagaggatgaacgtgaaccagatacatgagtcccttctagccctgtgacagacaagccagcttcttgaccgggacaggcgtgtatctgtgtggctggtgtcccatacagcttggtgaggggctgagtagcagagtccarctcaaggacagtcgccctcagccctggggaaataagtcaggtcgacctggtttgctacaaaatgggccacctcctcacgttggttttcattttagctctagccggcccggtccttggactgaaagaatgcaccaggggctcggcagtgtggtgccagaatgtgaagacggcgtccgactgcggggcagtgaagcactgcctgcagaccgtttggaacaagccaacagtggtgagtgccgctgccctccagtcccagccgcagcactcctcttgggtcccc

SEQ ID NO: 924119 - DNA, 628 bp, Homo sapiens
tttttgtctgcctgcgttgctttgaaggagtggtcttcaagttcttagattctttcttcaggttggtctattccaattgttgttaatgcttccaattgtattatgaaattcctgtaaattttctatttccagaagttcattttggttctttcttaaaatggtgatgtcatctttcaacccttggatcattttattgttttccttggattgggtttcaaccttctcttgtgtctcattgagcttycttgccatccagattctgaattctatgtctgacatttcagccatttcaatctggttaagaaccattgctggggagctagtgtgatcatctggaggtaagaagatactctggtttttagagttgccaaagttcttgcactggttctttctgtgagggctaatgttcctttatcctttgaagttgctgtcttttggatgaggctttttgtttacatgttctttattgccctcgagggtttgactgtcgtacaggttgggtatagttgaatgtttgtttctggatgctttcagagggccaagactcagcttgacactcctaggctgcatgctttaaccctggggagctgggactgggcccatagctttttcttctggccccttgagg

SEQ ID NO: 924120 - DNA, 597 bp, Homo sapiens
catggccaacagtctctaagcatctctgatgctgccatcgctgctgtgctcatcagcgccaggtgctgctctcccacccctgtccctgtcccatcacagcctgacaattctcagccacaacaaggagctttgttggtggaggagggaggaatatggctagaacctctgtaagctgactttctgygggctggggacagtccacgctaaagggtagctgccattcccctgggggctccaggtgccaggagtgagcactctgcatcttccccctgaccaagctgctcctcctctcttggcttccaacactggcactggcctcccgggacccatgctacctccagacttcaactggcaacagaaaagagacagagggctgggtgcagtggggtgcctgtaatcccagcactttgcagggatcacctgagcccagcagttcaagaccagactgggcaacacagagagagcttgtctctccacaaaatttaaaaattagtcgggtgtggtggtgtgggcctgtagtcccagctactcaggaggctgaggttgggggatggcctggcccgggaggtcaaggctgcagtgagcggagatcatgcc

SEQ ID NO: 924121 - DNA, 660 bp, Homo sapiens
gcagcaaacttttaatattgattaagcagcctgaacaaggtgattgtgaggccaatacttctgagttgttctttgccaggtccagccatagtcaatcaagttaattctcactcccatagctctctcttttctcatccccagagagctctaaaatgtctctgcttatctgagtgctttctttatgcattcaaacatttattgggcacccactacaagcaaagaactggcagcttgtgtggggttatcctgatggatccgcacatgaagtgtgtacttagtgcatggggtgattaaatatcagacccccttccgtaaggaaggaatctgcctgagmacctcagagagtgcaagtggatcccatctacggcgaaatgtaggtgctcacgttgggaagtctgcccccctagtaggagaaggagcactaggttgagaaatggccctgggttggggagatgggcagtgtcctgcggaggtggagagtgcccagaaataactggacacttagtaaacaatagggagaatcatctaattcaatccacaatggagccggtagaagatttgtggaatatgctatcttattttcaatttaaaaaatattttctgggctggtgacggtggctcatgcctctaatctcagcagtttgggaggtcgagaagggc

SEQ ID NO: 924122 - DNA, 807 bp, Homo sapiens
cttctgacatgcagtgtgaccttaggccagtcccatcttctctaaagcttcattttcccactaaccttaaagaagttcaagtcaaagagcacagtgatgagtcccacagatcatgcttgagatggtgacagtgttaaaatactgactccaaaatacagcctggcagtttatcttctcgagtttcctgtttctatgacactgtacggtgagatggccaaatgcagactccagagccagaatgccaagctctgccaccagctcctcacacaaccctgcacaaatcactttaactctctgtgcctcagtctcctcatctgtaaaatgagggtaataggccgggtgcggtggctcacgcctgtaatcccagcacttttggaggctgtgatgggcggatcacgaggtcaagagattgagatcatcctggccaacatggtgaagtctcrtctctataaaaatacaaaaattagctgggcgtggtggcatgtgcctgtagtcccagctacctgggaggctgaggcaggagaatcacttgaacctgggaggcggaggttgcagcagtgagacgaaatcgcgccactgcactccagcctggcgacagagtgagactccgtctcaaaaaaaaaaaaagatggtaataactggacctagcacataaggttgttgtgaggattaaatcaggtaaatatgatgaagccatctgaaccagtgttagcacaatgtaaatattcagtaaatggtagctatgataataaaagtaatacattagttttcaataagcacattataaacagagatgtggctaagaga

SEQ ID NO: 924123 - DNA, 637 bp, Homo sapiens
actagtcaggaaaggtctctcaggatgtgacatgtaagttgactcccagaggacaagaaacatcagtcaagctgattttgaggttttgagctggaatgttccatggcatgcaaaatctccaatggcaatgtcacagggcaaacccccaaattagggttcatcccaggaggccacatgggtccttggctttgagcaggaaggaattcaagagccagtcaaaagagtaaagtgaaagcaagtttattaagagagtaaaggaataaaagggtggctactccacaggcagagcagccccaagatcttctagttggctacttttatggttatttcttgagcatatcctaaataaggggtagattattcatctgagttttccaggaaaggggccgggaattcccawaactgagggttcctccccatttcaggccatacaaggtaacttccagacgttgtgatggcatctataaactgccatggcactggttggggtttcctttagcgtgctaatgtattataattagtgtataatgcacagtgaggatggccagagatcacttttgtcaccatcttggttttggtggagtttggctggcttctttcccgcatcctgctttatcagtggggtctttgtgacctg

SEQ ID NO: 924124 - DNA, 459 bp, Homo sapiens
cctgactgtgagaaggaaaactaacaaacagaaaggaatagcatcagcatcaacaaaaaggtcatctacaccaaaaccccatctgtaggtcaccaacatcaaagaccaaaggtagataaaaccacaaagatggggagaaaccagagcagaaaagctgaaaattctaaaaatccgagtgctttttctcctccaaaggatcgcagctcctcgccaccaacggaacaaagctrgacagagaatgactttgacgagttgacagaagtaggcttcagaaggtcggtaataacaaacttctctgagctaaaggaggatgtttgaacccattgcaaggaagctaaaaaccttgaaaaaagattagacaaatggctaactagaataaacagtgtaaagaagagcttaaatgacctgatggaactgaaaaccatggcacaagaactttgtgatgcacgcacaagcttc

SEQ ID NO: 924125 - DNA, 589 bp, Homo sapiens
cttttttacatgtctttcccctacttagtgtttccttttttttcgttgtttcataaataacttttccaagtccataatttgaatcaacctttagataacttctgaatttagacaaaattattctttttctcaataaggacacatcttctttggcatgctttatatacagaattatatattaactagaattcttatttttagtaaccttaaattttagtgaaaacctaggatgtaagaaatcctgaactgtctatcagaatttagcatttcacagatgaaaactttccacaatttttaaaaacrtgtttctctaggtcataaccctttctttattggaaatgacccagacatctaatgagcttccaaaataattagaagatttttaaatccacaaagattcccttacagtatttaccccatttatatttcattcatttttagcagtttatctagatgacttatgaaaacagtgatatcagaaaaagctagtaatgatttccttgttaaccatttttatgaccggtgcctaataggcattcatctaggtaagaatcttaaaggcacacacataggtattttcacccataac

SEQ ID NO: 924126 - DNA, 571 bp, Homo sapiens
ccagatggatgttaggtatgaggcttatttctgggctctctattctgttttattggtccatgtgtctgtttttgtaccagtactgtgctattttggttactgtagccctgtggtataggttgaagttgggtagcatgatgcctccagctttcaacagtcaagctgagagccaaatcaggaatgcaatcccattcacaattgctataaaaagaataaaatacctaggaatacccctaaccaagtgtattagtccattttcacattgctataaagagctacctkgactgggtagtttataatgaaaagaggtttaattgactcacagtttttcaggctatagaggaggcaagactgggtgaggccttgggaaacttacagtcacgacagaaggcaaagggggaagcacacacgtattcatgtgacaggagagagagagagagaagggggggatgccacacatttttaaaccatgagatctcatgagaactcactcactatcacaagaacagcaagggggaaatccgcccccatgatccagtcacctctgaccaagtccttcctccaaaagtgg

SEQ ID NO: 924127 - DNA, 625 bp, Homo sapiens
gttgactgcagacttggagaacttttctgtcttacgagaggattgtaaaatgcaccaatcagcactctgtaaaaacacaccaatcagtgctctgtagctagcaagaagattctaaaatgcaccaaccagcactctgtaaaatgcaccaatcagcgctctataaaaygcaccaatcagcgctctgtaaaatgcaccaatcagcaggatcctaaaagtagccaatcacagggagaactgaaaaaagtgcactcggataggaaagaaacagaacgtgggaggggccaataaggggataaaagctggccactccagccagcagcaacaacccgctcaggtccccttccacactgtggaagctttgttcttttgctcttcacaataaaccttgctaccgctcactctttgggtctgtgccatctttaagagctataacactcaccgccaaggtcacggcttcattcttgaagtcagcaagaccacaaacccaccagaaggaaccaactctggacacactaatacttaaaagacacaatagacggggcacagtggctcatgcctgcagtctcagcactttgggaggctgagatcagcagatcacttgaggccaggagttcaaagatcagcc

SEQ ID NO: 924128 - DNA, 625 bp, Homo sapiens
gttgactgcagacttggagaacttttctgtcttacgagaggattgtaaaatgcaccaatcagcactctgtaaaaacacaccaatcagtgctctgtagctagcaagaagattctaaaatgcaccaaccagcactctgtaaaatgcaccaatcagcgctctataaaatgcaccaatcagcgctctgtaaaatgcaccaatcagcaggatcctaaaagtagccaatcacagggagaactgaaaaaagtgcactsggataggaaagaaacagaacgtgggaggggccaataaggggataaaagctggccactccagccagcagcaacaacccgctcaggtccccttccacactgtggaagctttgttcttttgctcttcacaataaaccttgctaccgctcactctttgggtctgtgccatctttaagagctataacactcaccgccaaggtcacggcttcattcttgaagtcagcaagaccacaaacccaccagaaggaaccaactctggacacactaatacttaaaagacacaatagacggggcacagtggctcatgcctgcagtctcagcactttgggaggctgagatcagcagatcacttgaggccaggagttcaaagatcagcc

SEQ ID NO: 924129 - DNA, 640 bp, Homo sapiens
tggcttatgccaataatcccagcaccttaggaggctgaggcaggaggataacttgagcccaggagtttgggaacagcctgcacaacatagcaaaaccccatctcaaaaaaaaaaaaaaaaaaaaaaaagattagctgggcatggkggtgcacaagcatggtcccagctatttgggtggctgaggtaggaggattgctcgaacctgggaggtcaatgctgcagtaagccattattgtgccactctactccagcctgaaagatagagcgagcgagatcctgtctcttaaaaaaaaaaaaaattggccaggcgggtggcttatgcctgtaaatcccaccactttgggagactgaggggggcaaataacctgaggtcaggagttcgagatcagcctgtccaacatggggaaaccccatctctaccaaaaatataaaacattagctgggggtggtggggcactcctgtaatcccagctactcaaaaggctggggcaggagaatcacttgaacacaggaggcggaggttgcagagagctgaaatagtgctgctgcacttcaccctgggtgacacagcgaaactccttaaaaaaaaaatatatgtatatatatacaaaatataaaataaaaaaagatgtgtatattg

SEQ ID NO: 924130 - DNA, 640 bp, Homo sapiens
tggcttatgccaataatcccagcaccttaggaggctgaggcaggaggataacttgagcccaggagtttgggaacagcctgcacaacatagcaaaaccccatctcaaaaaaaaaaaaaaaaaaaaaaaagattagctgggcatgggggtgcacaagcatggtcccagctakttgggtggctgaggtaggaggattgctcgaacctgggaggtcaatgctgcagtaagccattattgtgccactctactccagcctgaaagatagagcgagcgagatcctgtctcttaaaaaaaaaaaaaattggccaggcgggtggcttatgcctgtaaatcccaccactttgggagactgaggggggcaaataacctgaggtcaggagttcgagatcagcctgtccaacatggggaaaccccatctctaccaaaaatataaaacattagctgggggtggtggggcactcctgtaatcccagctactcaaaaggctggggcaggagaatcacttgaacacaggaggcggaggttgcagagagctgaaatagtgctgctgcacttcaccctgggtgacacagcgaaactccttaaaaaaaaaatatatgtatatatatacaaaatataaaataaaaaaagatgtgtatattg

SEQ ID NO: 924131 - DNA, 576 bp, Homo sapiens
tttttttttttttttaatagctcttagattctggttaagaatcatcttaggctctcttgagaacagacatgaacctgatgttgctggcgttccccaagcctgcttaattctctcctactccatttccagaccaacttggagccttagatctttctggttggattccagaccctgcaatgtgggtttgcagtgatgtggggacaatcagagaactagaacctggttgccacatttttctactctccagccttctgttttagatagtccttcagcctctgatcttctagtaattggctaggtaacctggactctgttctttcctaggtaaatagagttgggagtgaatgatcctccaggtcatttctgcctgtatcttrtggtctctgcctggccttttatctgtcaaggcaataacatctaattggaggtgtaggtttacctgataactctgccttttcctccgcctttgtcacttatttctgttcctccaagaaatgcagtgagctgaaatgattatctcactttcttggtgtatgtatgtgtgtatatgtgcatatacacatacatgcacacaca

SEQ ID NO: 924132 - DNA, 616 bp, Homo sapiens
tgttgcccaggctggtcttgaactcctgggctcaagtgatcctccctcctcagtctcccaaagtgctgggattagaggtgttgagccactttgcctggtgatctccatttctttagggttagtttctagagatttatttgttcctttgatagggccatgtttccctgtttcatggtatgccttgtgatttttttttttttttgagacagagttttgctcttgtccccaaagctggagtgcaatggtgcgatcttggctcactgcacccttcgcctcctgggttcaagagattctcttgcctcagtctcccgagtagctgggattatggcgccctccaccacgtccagctaatttttgtatttttagtacagatggggtttcaccatgttggccrggctggtctcgaactcctgacctcaggtgatctgcccgcctcggcctcccaaagtgttgggattataggcatgaaccaccacacccagccgttttttttttttaaagacagggtctgggctggggtacagtggcttgatcacggctcactgcagcctcaaactcctgggcgcaggcaattctcctgcttcagcctccccagtagctgggataacaggcatgc

SEQ ID NO: 924133 - DNA, 609 bp, Homo sapiens
atagatttattttgtttaaaaaaattaattgacataataattgcacatattcatggggcatatgtggtatgttgatacatgtatacaaagtgtcattatcaaattatcaaactgcaaagtgtaattatcatcatcctsaaatatctatcatttctttgtgttggtaacattaaaaatcctctcttctaactattttgaactatacaatacattattaagtatagtcatcctgctgtgctatagaaccctagaacttattcttcctatctaaatgcaatattttacccattaaccaagctcttcctattcttccctccctgctacccttcctagactctgataaccactattctactctctccttctttgagatattttttttttagctcccacatatgaatgagaacatgttgtatttgtctttctgtgcctggctcatttcacttagcatacaaaaaatcctaaaaatagaattaccatatgatccagtaattccggatatatatccaaaggaaagaaaatcagtacatcaaagagagatttgcacttccatgtttattgcagcagtagtcacaatagccaaactattaaatcaacctaagtgcttat

SEQ ID NO: 924134 - DNA, 749 bp, Homo sapiens
cagaaatgactcgcaaatcactgggcctatatgggaattgagccagaggtctctagcctaggagaaatgggatttgggagagtaacagaagtgaagctttcattcatttacttcactaatttacaaattgattcatttgttcacttacttatcaattcaatatctattttttgagcacctaagaggcttgagtcactgtaattggcatttgatcagaaaatgaagagtcttcatttttttttttttaatttttagagacagggtcttgctatgttgcttaagctggtcttgacctcctgggctcaagctatccttccaccccatagtcccaagtagctgggattacaggcatgcaccactgtacccaggtgaaagtcttagttttaaagaaaatgtttgtccttgaatgaggcaagatgtttagggagtttagtgtctgggtgcccagrggcaacatggcacctggagcctatgatgatgggaattagaggctggtttggggacaaaggtcgtttgatgggaaatgaccaaaactagtgcctatgaagatgttggcccatctgtgaagatagcagtcactctaggaagaggtaatttggactccaactcagcagctttgctactttgagtggaattggtaggatttttgagaacctgaccaacttaatgttatttttgttttattcattttcaataagatttattgtaataaaaggagcctgcctaaactatactaaaaggaagagtat

SEQ ID NO: 924135 - DNA, 588 bp, Homo sapiens
tagaatggcgatcattaaaaagtcaggaatcaacaagtgctggagaggatgtggagaaataggaacacttttatactgttggtgggtctttaaactagttcaaccattgtggaagacagtgtggcaattcctcaaggatctagaactagaaatactatttgacccagccatccgattactgagtatacacccaaaggattataaatcatgctgttataaagacacatgaacatgtatgtttattgtggcactattcacaatagcaaagayttggaaccaacccaaatgtccatcaatgatagactggattaagaaaatgtggcacatatacaccatggaatactatgcagccataaaaaatgatgagttcatgtcctttgtagggacatggatgaagctggaaaccatcattctcagcaaactatctcaagggcaaaaaaaccaaacaccacatgttctcactcataggtgggaattgaacagtgagaacacttggacacaggaaggggaacatcacacaccggggcctatcgtggggttgggggagggaggagggatagcattaggagatatacctaacgtaaatga

SEQ ID NO: 924136 - DNA, 600 bp, Homo sapiens
acattgtcagcagcctaggcatttgctcatgttatgtttgtggaaggactaacataggagaccaatggccttgggaagcaaaaaagttaatgcctcaagataactttactctgagtgactctttccccaaacagatgcccacaagttcaagcgtctggctcttaaaaacttctattattagaagatactktgttgctcgctgaggaaaggcttttacagacccagtaggagaaataacctgcttaggatggcaatattacaatgaaacattaaggaaaactttgtggcagggcacagatgactacagagcaccttatccaaatctgttctcccgtttctcttctctaaaccacacttggtatcaacttgaatctccaaatacttggcaagcaacccccagtctttattggatctgtgggctatgggcatatcaacagttgccagttaaatgggcaggggcctgtgtgcttagaacaattagaccatctttattcctactcccactgcaatagagaaaaactttaggggatcctgtgtatgatgaacttagaagaagaaacaaaagagatgcagacataaagagagatataaaaataggat

SEQ ID NO: 924137 - DNA, 600 bp, Homo sapiens
acattgtcagcagcctaggcatttgctcatgttatgtttgtggaaggactaacataggagaccaatggccttgggaagcaaaaaagttaatgcctcaagataactttactctgagtgactctttccccaaacagatgcccacaagttcaagcgtctggctcttaaaaacttctattattagaagatactttgttgctcgctgaggaaaggcttttacagacccagtaggagaaataacctgcttaggayggcaatattacaatgaaacattaaggaaaactttgtggcagggcacagatgactacagagcaccttatccaaatctgttctcccgtttctcttctctaaaccacacttggtatcaacttgaatctccaaatacttggcaagcaacccccagtctttattggatctgtgggctatgggcatatcaacagttgccagttaaatgggcaggggcctgtgtgcttagaacaattagaccatctttattcctactcccactgcaatagagaaaaactttaggggatcctgtgtatgatgaacttagaagaagaaacaaaagagatgcagacataaagagagatataaaaataggat

SEQ ID NO: 924138 - DNA, 554 bp, Homo sapiens
ttgcaacctctgcctttttttgttttccatttgcttggtagatcttcctccatccctttattttgagcctatgtgtgtctctgcatgtgagatgggtttcctgaatacagcacactggtgggtcttgactctttatccaatttgccattctgtgtcttttaattggagcatttagcttacttacatttaaggttaatattgttatatgtgaatttgatcctrtcattatgatgttagctagttattttgctcgttagttaatgcagtttcttcctagccttgatggtctttacaatttggcatgtttttgcagtggctggtaccggttgttcctttacttgtgtagtgcttcctttaggagctctttcagggcaggcctggtggtgacaaaaatctctcagcatttgcttgtctgtaaaggattttacttctccttcacttatgaatcatagtttggctggatatgaaatcctggtttgaaaattcttttctttaagaatgttgaatgttggtccccactctcttctggcttgtagagtttcttctgagagatc

SEQ ID NO: 924139 - DNA, 725 bp, Homo sapiens
tttgctggaggtccacttcagaccctatctgcctcagtatcagcagcggtggctgcagaacagcggatattggtgaactgaaaatgctgctgactgatcgttcctctggaagttttgtgtcagaggattacccggccgtgtggtgtcagtccgcccctactagagtttgtctcccagttaggctmctcgggggtcagggacccacttgaggaggcagtctttccattctcagatctcaagctgcatgctgggagaaccactagtctcttcaaagctgtcagacagggacatttaagtctgcagaggttactgctgccttctgtttgtgccctgcccccagaggtggagcctacagaggcaggcaggcctccttgagctgtggtgggctccacccagtttgagcctccaggctgctttgtttacctacccaagcctcagcaatggtgggtgcccctcccccagcctcgctgctgccttgccatttgatctcagactgctgtgctagcaatgagcgagtctctgtgggtgtagcaccctccaagccaggggcggtatataatctcctggtatgcatttgttaaatccattggaaaagcacagtaatagggtgggagtgacccgattttccaggtgccatctgtcacccttttctttgactaggaaagagaattccttgaccccttgcacttcccgggtgaggtgatgcctcaccctgctttgggtca

SEQ ID NO: 924140 - DNA, 725 bp, Homo sapiens
tttgctggaggtccacttcagaccctatctgcctcagtatcagcagcggtggctgcagaacagcggatattggtgaactgaaaatgctgctgactgatcgttcctctggaagttttgtgtcagaggattacccggccgtgtggtgtcagtccgcccctactagagtttgtctcccagttaggctcctcgggggtcagggacccacttraggaggcagtctttccattctcagatctcaagctgcatgctgggagaaccactagtctcttcaaagctgtcagacagggacatttaagtctgcagaggttactgctgccttctgtttgtgccctgcccccagaggtggagcctacagaggcaggcaggcctccttgagctgtggtgggctccacccagtttgagcctccaggctgctttgtttacctacccaagcctcagcaatggtgggtgcccctcccccagcctcgctgctgccttgccatttgatctcagactgctgtgctagcaatgagcgagtctctgtgggtgtagcaccctccaagccaggggcggtatataatctcctggtatgcatttgttaaatccattggaaaagcacagtaatagggtgggagtgacccgattttccaggtgccatctgtcacccttttctttgactaggaaagagaattccttgaccccttgcacttcccgggtgaggtgatgcctcaccctgctttgggtca

SEQ ID NO: 924141 - DNA, 604 bp, Homo sapiens
agatcaatggaacggaacagagccatcagaaataacgccgcatatctacaactatctgatctttgacaaacctgagaaaaacaagcaatggggaaaggattccctatttaataaatggtgctgggaaaactggctagccatatgtagaaagctgaacctggatcccttccttacaccttatacaaaaattaattcaagatggattaaagacttaaacgttagacctaaaaccataaaaaccctagaagaaaacctaggcattaccatccaggaaagagatcaaataagaataaatgactattccagggctcaggccacaaaatacatccttaaaatcactatggaatacaaaactgttaagttttgttaatattgttatttagagaagggtagcacggtttaaaaagagaatctgtgtacatactaagcactccataaacattccttaaactaaattggctgatgcmtgaataaatctgtaaattaattagctgtggctatgaattacaacattaccacaatggttggtcaatttaaagggatcctagacaggagttggagcttccataggtggttgtctcagtgttatttcatgatagtctga

SEQ ID NO: 924142 - DNA, 578 bp, Homo sapiens
aataaatttcttctctcctttatcagcctgagccagtctctgctgcttacagaccaaagccataagaggcccaggacacaaatgggaagactgggagataggcatgcttattcttccttagaagctctcctgaaatccaagctgaaaactggctccaactgggctgcaaaaaaaaaaaaamaaaaaaagcactgaaaagtttccagtagcgtcaccagggaagagtcccaggttttctctttcaatacacagctttaaaaaatgaaaagatttcctatcctcaagcctctgtatttatattttggaaactgtcagcaaagacagaggtttcttcctgaccagaactttggtcaatctaagagtcagatgttctgaggagccatttttcatgtggggaactccttaaagagaaatccaggtggctgtcagcctaatagccaagttgttgacaaagcacaagagtttctgatatttcctggacaccaatccatattgctttaacagaacttttttgcattgaagctgatgttccccccaaaatcattaatccagtctcagctacttctgttggttggaat

SEQ ID NO: 924143 - DNA, 728 bp, Homo sapiens
gcagggagaggcatcgcatcacctgggaagctcaaggggtcagggaactccctctcctagtcaaagaagggggtgacagatagcacctggaaaatcgtgtcactcccaccctaatactgcacttttctaatggtctgagcaaacagcacaccaggagattatatcccacacctggcttggaggttcctatgcccacggagccttactcattgctagcacagcagtctgagatcaaactgcaatgcggcagcaaggctgggggaggggcgcccgccattgcagaggcttgagtaggtaaacaaagcggcctggaagcttgaactgggtggagcccactgcagctcaaggaggcctgcctgcctgcctctgtagactccacctctgggggcagggcatagccaaacaaaaggcagcagaaaactctgcagacttaaatgtccttgtctgacagctttgaagggagtagtgattctcccagcatggagctggagrtctgagaatggtcagactgcctccttaagtgggtccctgacccccgagtagcctaactgggaagcatcccccagtaggggcagactgacacctcacacggccaggtacccctctgagacaaaacttccagaggaatgatcaggcagcaacatttgctgttcaccaatatcttctgttctgcagcctccgctgctgatacccaggcaaacagggtctggagtggacctccagcaaac

SEQ ID NO: 924144 - DNA, 589 bp, Homo sapiens
ttctccctgtggtctttccccaattccactggcagtcctccccaaggacccctgtgagaaaaagtcagaaatggcttccctgggaatgagagtacccacagggctctccccactgcttcctctacccctgtattttgcttggctctcttaaattcatctcagctccaggtaaggtcaaatccatctcacaagatctggaccttcgggttccccttctcacactttggtygctcacagttttttggctgtctcacggagcctgcagtagcaagctgcttccatcaaagggtctgtggattctctcagcttttatgtttctgcagtatttcttggatcaaaagcccacgatgtgagtctctacaggctgctctgtccatccaagtcggagctgagagttagttctgcctcctacccgccattttttccccatcccttcttgtaagggcactaatctctttcatgaggggctccatttttataagctaatttcctccaaaggccccaccttctaataaatacgtcacatgggagattgaggcctcaatataggaattttgggggaacacaaacgttcactccacagcaacat

SEQ ID NO: 924145 - DNA, 580 bp, Homo sapiens
cattatatctaaaaattaactcaaaatggatcatatacctaaatgtaatacttaaaactataaaacctctagaagaaaacattggagaaaatatttgtaaatttgagttaggcaaagactttaaaaaatatgacaccaaaagcacaacccatgaaagaaagaattaacacacctgacttcatcaaaattaaaaacctctgcatttaaaaagatactgtgaaaaggatgaaaagaaaagccwcaggttggaggaaagtatctgcaaagcaaagatttgataaaggacttgtatgcagaatatatacaactctcaaaactcaataataaaactaaaaacctaatttaaaatgggcaaaaatcttgaacacacactttaccaaagaagatagatagatggcaaataaacacgtgaaaagatgcttggccgggcgtgatggctcatgcctgtaatcctagcactttgggaggccgaggcaggtggatcacgaggtcaggaggtccagaccatcctggctaacacagtgaaaccccatctctactaaaaatacaaaaaattagcggggcgtggtaatggacgcct

SEQ ID NO: 924146 - DNA, 579 bp, Homo sapiens
gaatttgctggaggtccactccagacactgtttgcctgggcatcaccagcagaggctgcagaacggcaaatattgtagaacagcaaatgttgctgtctgatccttcttcaggaagcttcatctcagaggggcacctggctgtatgagatgtcagatggcccctactgggaggtgaattccagttaggctacttgggggacaggcaccacttgaggaggcagtctgtctgttctcagatctcaaactccatgctgggagaaggactactctcttcaaagctgtcagacagggacrtttaagtctgcagaagtttctgctgccttttgttcagctatgccctgcccccagaggtggagtctacagaggcaggcaggcttccttgagctgtggtgggctccacccagttcaagcttccaggccgcttggtttacttactcaagcctcagcaatggcggacacccctcccccagccttgctgccacctggcagttcaatctcagactgctgtgctagcaatgagcaaggctccgtgggcgtgggaccctccaagccatgcgtgggatataatctcctggtgtg

SEQ ID NO: 924147 - DNA, 579 bp, Homo sapiens
gaatttgctggaggtccactccagacactgtttgcctgggcatcaccagcagaggctgcagaacggcaaatattgtagaacagcaaatgttgctgtctgatccttcttcaggaagcttcatctcagaggggcacctggctgtatgagatgtcagatggcccctactgggaggtgaattccagttaggctacttgggggacaggcaccacttgaggaggcagtctgtctgttctcagatctcaaactccatgctgggagaaggactactctcttcaaagctgtcagacagggacatttaagtctgcagaagtttctgctgccttttgttcagctatgccctgcccccagaggtggagtctacagaggcaggcaggcttccttgagctgtggtgggctccacccagttcaagcttccaggycgcttggtttacttactcaagcctcagcaatggcggacacccctcccccagccttgctgccacctggcagttcaatctcagactgctgtgctagcaatgagcaaggctccgtgggcgtgggaccctccaagccatgcgtgggatataatctcctggtgtg

SEQ ID NO: 924148 - DNA, 458 bp, Homo sapiens
acttgagtgctggctgcagattactactttagtactcctgggctacacagcgcagttgtgaggtgatgtcagggtttctgttccctccccaaattggaggcagcacaggaaggggctttagcagtggttgtgccccagaaagatgcagagctgcaatcagtcagtatgattggcctgggatggtgggctgcactgtgggtcccagctaggkagtggggagcaggtgcctggtaatgggcagtggggtgggacctgtgagagacaggccttttttccttagggaaactgcagcttgctggaagggtggataaggaacttagagtcttggttctttgcccagtgggagggaagcaggggcagtaccactgcagaggcagtggccaaggggctttcagttgccccttggagctccacctccaagaaacacagtcactggtactgaaagtattcagctagag

SEQ ID NO: 924149 - DNA, 775 bp, Homo sapiens
tttgcctgtgtatcaccagttgagattgcagaacaagaaatattgctgcttgttccttcctctggaagcttgatcccggaggagtacctgccagatgctagtcagagctctcctgtatgaggtgtctgtcgacccctgctgggaggtgtctcttagtcaagaggcacgggggtcagggacccatctgaggaggcagtctgtccgttagcagagctcgagtgtggtgctgggagatctgctctcttcagagccggcaggcaggaatgtttaagtctgctgaagctgcacccaccaccgtcccttctgccaagtgctctgtcccagggagatggaagtttgatctataagcccctgactgaggcygctgcctttctttcagagattccctgcccagagaggaggaatctagagaggcagtctggctacagtgcatttgccaagctgtggtgggctccacccagtttgaaattctggtggctttgtttacactgtgaggggaaaaccacctactcaagcctcagtaatggtggacccccctcctcccactaagctagagcattgcaggtcgacttcagactgatgtgctggcagcgagaatgtcaagccaatggatcttagtttgaagggctctgtgggggtgggatctgctgagctagaccacttggctccctggtttcagacccttttccaagggaatgaaaggttctgtctcattggtgttccaggcaccactggggtattaaaaaaaattcctgcagctagctcagtgtctgtc

SEQ ID NO: 924150 - DNA, 694 bp, Homo sapiens
gccaatgacaaggatgaagcgccatgaaaggagagtgattttacttaccaaagctagcagtgggggagtggtctaggctcctgccttaaaccatttcagagttctgggttgagtgtaggtacttaaaaaggggaaacacagtaggargggcatgtaagagtagcgaggaggtgttggtctacatggcttgttctgatgacttaccttgagttattaccccacatggtgaataggctggtgccatcttggcaatgagtaatcttttttttttctttttttttgtttttgttttgagatggagtctcactctgtcaccaagctagagtgcagtggtgcgatctcggctcactgaaacctctgcctcctgggttcaagcaattctcctgcctcagcctcccaagtagctgggaccacaagcgtgcgccaccatgcccagctaatttttgtatttttagtagagatagggtttcaccatgttggccaggatggtcctgatctcttgaccttgtgatctgcctgcctcggcctcccagagtgctgggattacaggtgtgagccaccacgcccggccagttataagtaatgtttagaagattactcaggaaagaaaattccactgctgcctggactgttacaagatttaatctctgaaacttataaggaataattaaataaggaaaacattgtgcaaagg

SEQ ID NO: 924151 - DNA, 591 bp, Homo sapiens
cattgtttgtgttctcgttcaattgagttcaaatttaatatttaacttttcctacacaaacacacacacacaactgaaatataacccaaggtagtagttgtggttatggtaaaatataaataggaccctctgtgtataccgggattagcaaaagagagggtgtactagagaaggttgtgtaatttgaacaaggactttaaaagtgcatgcttattccttgtagaagcagacgtgttttctaggcgagagaaagatctttaggatggtgaagatgtgaagaagttcatgggggtgtgtgwgtgtgcgcgcacgcgtgtggtggggggtggcagttaggaatggagaagatggacctcttgagaaaaaagagagatattctgcaattctggggcctatgaaaggtgggagccaggttgtaaaatcttaaaagtgagatagccctgaggtgatgcctccctagaggctaacagatccttatagctaaacttaataccagaaaatcttatgttacactctggggttactgagtcaggggttcaccaataagcagaacagtctcaatctgaaattgaggggtggatctggggttca

SEQ ID NO: 924152 - DNA, 655 bp, Homo sapiens
ctgctttgtttaccaaagcaagcctgggcaatggcgggcgcccctcccccagactcgctgcctccttgcagtttgatctcagaactgctgtgctagcaatcagcgagactccgtgggcgtaggaccctccgagccaggtgcaggatgtaatctcgtggtgcaccgttttttttaagccggtccaaaaagcgcaatattcgggtgggagtgacccgattttccaggtgagtccgtcacccctttctttgactcagaaagggaactccctgaccccttgcccttcccaagtgaggcaatgcctcgccctgcttcggctcgcgcatggtgcgcgcacccactgacctgcgcccactgtctggcactcccttgtgagatgaacccggtacctcagatggaaatgcagaaatcacccrtcttctgtgtcgctcatgctgggagctgtagaccggagctgttcctattcggccatcttggctcctcctcagaatagctgttttatctgaaagacagatgagatctgaggtaataattccagaattgaaggatttagtctgcaaaaactttggtaatgctatataaaaactctttgagagtaaaagaaaattctgagctggaaatttctttaaaaatatccataaaatagaggagttgggaa

SEQ ID NO: 924153 - DNA, 637 bp, Homo sapiens
gaaacatacctcaaaataataaaagccatatatgacaaccccatagccaatattatactgaatgggcaaaagctggaagtattctttttcaaaacttgcacaagacaaggatgccctctctcaccactgttattcaacgtagtattggaatttctgaccagggcaatcaggcaagagaaagaaataaagagtattcaaataggaagagaggaagtcaaattgcctttgtttgcagctgacataaccctatatctagaaaccctcatcatctcagccccaaagcttcttaagttgataagcaacttcaacaaattctcaagatacaaaatcaatgtgcaaaaattgttagcattcctatacaccaacaacagacaagcagagagcggaatcataaatgaactcccattcacaattgctgcaaaaagaataaagtacctmggaatacagctaacaagggaagcgaaggacctcttcaaggagaactacaaaacattgttcaaagaaatcagagaggacacaaacaaatggaaaaacattccaggctcacggataggaagaataaatattgttaaaatttccatactgctctaagtaattcgtatattcaatgctattcctattaaattaccattgacat

SEQ ID NO: 924154 - DNA, 562 bp, Homo sapiens
catgtgcatgcccaggcttgtgcacctgcctcgagaaagacttgaggaagccccagactttcacctctgcctaaccttgagggtctgtgctagcaggaagtgaaggctaaggcagagctgtcaactatctggctgagtgttgagggtgtgctctaacaaacacaaagctcttctgcaaatratggaagatttcttggttctaagagtttaaggaaatctctttatagtcgttagatgaccactaagctaatggaacagaaataaaagaatgaagagaaatgaacaaagtcttagagacacatgaggtgccatcaagtgtagcaaccataatggcaaccccagaagtagaagaaaaagagaaaagagaagaaataatatttgaagataataatggtaaaaagtaatccaaatgtgacaaaaaacaataagctacacttccaagaagctcagtgaatccctagtaagataaactaaaaaagaaccacaccgagattaattaaactgtcacagttaaacacagaattttgaaagcagcaagggagaagtgactcatcaggtgtag

SEQ ID NO: 924155 - DNA, 588 bp, Homo sapiens
tgggagtcagaggtcaccatgcattcagaggaaagagggaagctgctctctgtaaccaagtgaggtgatttgggtcctgggaggaaagtggggtttagaatctgggaggcaaagtgtgagaagttgatacggaagcaaagagaagggacaagaaaggctgtaggtaggcagaagttcaggcattatgggatgtgatgctcagcagagccccccaatatcttaagcaagtrctgaaaaactgacaagaggctttgtttgaacttgagtgtatgtgcatgtgcacgtgtgtgtgggtgtgagagagagggagagaaagagaaacagtgatgaggctgagctttgcaccccctcagagtaacctgagttcacaataagaggatgaatacgcgcaggggccacggaagcttaagccgttagaatgagcagaaattgtgaaagagcccctggcatctgtgggtcctatgactatctgggctcctgagctaactacatctagatctgaggtgattgaggatggaggagcccctgacttctggctttcattcatttccctcccctcctcccaccatctgcctttcctccccactc

SEQ ID NO: 924156 - DNA, 797 bp, Homo sapiens
aaccccggtgacgtgcaatttaccgatataacaaatctgtacgtgtacccctgaagctaaaataaaagtttttaaaatttaagaattttaacaaaagatagttgtttttggttttctttgtttttcatttttttgacacagagtcttgctctgtcacccaggctggagtacagtggcatgatctcggctcactgcaacctccacctcccaggttcaagagattcttctgcctcagcctcccaagtagcggggattacaggcacccaccaycacacctagctaatttttgtatttttagtagagacaggattttgccatgtaagccaggctggtctcgaactcctaacctcatgatccgcccacctcagcctcccaaagtgctgggattacaggcgtgagccacagcgcccggccttaacaaaagatagtttttaaaaggagaaaagggttccatgaggtggttttaatgtgtctagaagcctaacagaaattgtagggcagcagactcctaaaacacctcctgcctctacacctgccctctctactgggttgaatagcgtcctcttcccctcgaattcacatccactcagacccgtgaatgtgacctatttgtggatgtaatcaagttaagatgaggtcatagttgattagcatgggccctgatccagcgactggtgtccttacaagagggaaatttggacacataaacacacacaggaagaagaccatgagacgacagagacagggatcagagtgatgccgccacaagaccgggaacacaaaggatcgcaggcgcc

SEQ ID NO: 924157 - DNA, 767 bp, Homo sapiens
tgggtgcgggtgtgggtaggagggcctgaggctgagacgggaaagtggcagaggctccatttgtgctttaagatttaggtggctattaagcttcagctctgggactggggtccaggagcagtgccgtggacagagcccgccatgcactgagaggaaaagaatgggctgctgagaccgcctgctgggtacctgacggaacagaggcatggcccggagacgagggcaacacacacaccttgaggttctccatcctcttccagtggagctgcgcgttggctgcagccatggcctctatcacaaaggtggtggtcacgaagctgagggggccgagtgcccagcgccaaaggcggacaggttggaggagacagagagagaaggaaaacaccattgtaagaaccgaccagacccaccagcccagaccattctcttttctgagagctgttccctagagatgggctttacttggtaaaaaggtgtgcatgctttgacgttgctgtctatagtgagaacgtatttccggtgcacgagagagagaggtgtgaactaagtgatgggagggaaaataaccaaaggagagagggagctgggggcagacgtgatactgggacaagccgygctcacacccaggaggggctgttgggggcagacatcagaggacgctctcagtgaggggaggctggttcacaaagggccccccagcctctggaaggacagcaggcagctttcacgtcaaccttgcaaggacacaggcgagtggtcacctccca

SEQ ID NO: 924158 - DNA, 536 bp, Homo sapiens
ccgggaggcggaggttgcagtgatccgagatcgcgccacggcagtccagcctgggcgacagagcgagactccgtctcaaaaaaaaaaaaaaaagttagggtcctttacccgagggccggctttcctcactccccgccacaggtaggggaaaccaggccggagccggcgggcccacccgcccagaaccgggaattcggcgagccccgcccctgccaccccagcgccggccgctcggtaacaaacacttccacttcctgagcgctagtcttcgcccgccgcggggcgccgcgccragcgcaggccccgccccgcgcgttcccaatggccggcgccgttcacccggccggagcgcccaggcctgcagccccctattggcccgcggaggtccccaccctcagcgcggccccgcccccggggtaaggagccggggcggactctgggacgctcagacgccgcgcggggcggggattggtctgtggtcctctctcggctcctcgcggctcgcggcggccgacggttcctgggacacctgcttg

SEQ ID NO: 924159 - DNA, 594 bp, Homo sapiens
tgggaggtcgaggtgggtggatcacctgaggccaggagttcgagaccagcgtagccaacatggtgaaaccccgtatctactaaaaatacaaaaattagccgggcgtggtggcttatgcctgtagttccagctacttgggaggatgaggcaggagaatcgattgaacctgagaggttactgtgagctgagattgcgccactgcactccagcctgggcaacagagtgaggctccatctcaaaaacaaacaaacaaacaaacaaataaaatacaaagctgcatctggactgggcatagtgtcttatacctgtaatcccaggactttgggaggtccaggtaggattgcttgaggccaggagttcaagagcagcctgtgcaacatggcaagaccctacctatacaaaaaaaaaawtttttaataaaaattaggccgggtgcagtggctcatgcctataattccagcacttttgggaggtcgagggaggcggatcacttgaggtcaggagttcgagaccatcctggccaacatggtaaaaccccgtctctactaaaaatacaaaaattaactgggcattgtggtgcgtgcctgtagtcct

SEQ ID NO: 924160 - DNA, 752 bp, Homo sapiens
ccatctgcattagagctgaaccaacacttccacaaacacctgcagccaaggctactcagacagctacaaacatgcagacattgattacaaccaaataaatatcatgaagactgcactactgtactcatgcagaatacaaaccaaagcaccctacccaactgacactatgagacacatctacaggaaaaagttttttcctactaaaactacattctaatattaggagaaattgttttgtcagatgtatagatactaatgtaggaacacaagaaatgtctaaaaagcaagaaacatgacacccccaagggaacaaaatcattttctaattscatatcccaaagaaaaggacagctacaaaatgcctatatgatttttaaaataatgatgttaaagatacgccgtgagaatcagtagaataaaaatagacaattcaaaaagtaggaaaacaattcatgatctgaatgagaaattcaacagagatattacacaaaaagaactaagcagaagtcttgaaactgaataataaaatgaatacaatttaaaaaataaaatcaagagcttcaacaacagactagatcaagatgaaaaaagaatttctgaacctggagacaggattttcggaataagccagtcagacaaaaaagaataagtaagaataaggaatgcctacaaaatgtgtggaacaaaatgcaggggacaaatattcccattatgggagttctagaaggagaagagatcagaaaggtgtagga

SEQ ID NO: 924161 - DNA, 752 bp, Homo sapiens
ccatctgcattagagctgaaccaacacttccacaaacacctgcagccaaggctactcagacagctacaaacatgcagacattgattacaaccaaataaatatcatgaagactgcactactgtactcatgcagaatacaaaccaaagcaccctacccaactgacactatgagacacatctacaggaaaaagttttttcctactaaaactacattctaatattaggagaaattgttttgtcagatgtatagatactaatgtaggaacacaagaaatgtctaaaaagcaagaaacatgacacccccaagggaacaaaatcattttctaattccawatcccaaagaaaaggacagctacaaaatgcctatatgatttttaaaataatgatgttaaagatacgccgtgagaatcagtagaataaaaatagacaattcaaaaagtaggaaaacaattcatgatctgaatgagaaattcaacagagatattacacaaaaagaactaagcagaagtcttgaaactgaataataaaatgaatacaatttaaaaaataaaatcaagagcttcaacaacagactagatcaagatgaaaaaagaatttctgaacctggagacaggattttcggaataagccagtcagacaaaaaagaataagtaagaataaggaatgcctacaaaatgtgtggaacaaaatgcaggggacaaatattcccattatgggagttctagaaggagaagagatcagaaaggtgtagga

SEQ ID NO: 924162 - DNA, 604 bp, Homo sapiens
ttttctaaaggtcttagcaaatggcacaccaggagattatatcctgcacctggctttgagggtcctacgcccatgaaggcttgctcattgctgagacagcagtctcagatcaaatagcaaggcggcggcgaggctgggggaggggcacccaccattgcccaggcttgagtaggtaaacaaagcagcccggaagctcgaactgggtggagcccacctcagctcaaggaggcctgcctgcctctgtagactccacctctgggggcagggcatagccaaacaaaagacagcagaaacctctgcagacttaaatgtccctgtctgacatctttgaagagagtagtggttctcccagcatgcagcttgagatctgagaacagacagactgcctcctcaagtgggtccctgacccctgagtagcgtaactgggacgcatccccagtaggggcagtctgacacctcagatggycaggtactcctctgagacaaaatttccagaggaaggatcaggcagcagcatttgctgttcagcaatatccactgttctgcagcctctgctgctgatacccaggcacacaaggtctggagtggacctccagcaaattcc

SEQ ID NO: 924163 - DNA, 595 bp, Homo sapiens
agactgaaaacaggtgggaggcagagcaagcatagaaggctccactgatcatgcccatgcccccgccaacaaggataccaaattaagatctacatagaaaaaacaccttcataaaaaacaaaaatcaggtgagtactcatagtacctggttttaactgaaacaccttcataaaaaacaaaaatcaggtgagtactcatagtacctggttttaactgcgtatcactgaagggagaaacaacagtcctcaattagcaactacgcacacttcctgttcccccagccagcagcaaaaggcctggtgcctagagcctctcggtgctgagggagggacaacacagcaaytgcaagccactgaactcagtgctgtcctgtgagagcagaaaagaaaaccagatcaaacccaggtgactcccacccagggagggagcatttaaaccagccctaaagcggagggcaactgccgatcccaggagtcccaacttgagttcccaccagcctcaccatggagggctacagcactccatgtttccaagtaaactttttggcagtctgagccgtaaggactacaactcttaaccgattcttagtaatgaa

SEQ ID NO: 924164 - DNA, 629 bp, Homo sapiens
gaggtgttacacacttttaaacaacaagatcttgtgagaactctatcacaagaacagcactagggggatggtgctgaaccattcatgagaaaccaccgctacaagcaaatcacctcccaccagagcccacctccaaaactgaggatttcaattctatgtgagatttgagtggggacacagacccaaaccatatcaatcctcccctggccccytcctaaatctcatgcccttctcacattgcaacatataatcatgccttctcaaatgttccccaaagtcttaactcatttcagcattaacggaaatgtccaaagtccaaagtctcatctgagacaaggcaaatcccttctgactataagcctgtaaaatcaaaaacaagttaattacttccaagatagagtgggggtacaggcattgggtaaagactcctgttccaaaagggagaaatcggccaaaagaaagaagctagagaccccaagcaagtctgaaacctagcagggcagacattaaatcttatacttccaaaataggctccttggactccacgtctcatatccagagcacaatagtgcatggtgtgtactcccaaggacttgcatagctgtgctcctgtgtctttgcagggttca

SEQ ID NO: 924165 - DNA, 609 bp, Homo sapiens
acttttaaacaacaagatcttgtgagaactctatcacaagaacagcactagggggatggtgctgaaccattcatgagaaaccaccgctacaagcaaatcacctcccaccagagcccacctccaaaactgaggatttcaattctatgtgagatttgagtggggacacagacccaaaccatatcaatcctcccctggccccctcctaaatctcatgcccttctcacattgcaacatataatcatgccttctcaaatgttccccaaagtcttaactcatttcagcattaacggaaatgtccaaagtccaaagtctcatctgagacaaggcaaatcccttctgactataagcctgtaaaatcaaaaacaagttaattacttccaagatagagtgggggtacaggcattgggtaaagactcctgttccaaaagggagaaatcggccawaagaaagaagctagagaccccaagcaagtctgaaacctagcagggcagacattaaatcttatacttccaaaataggctccttggactccacgtctcatatccagagcacaatagtgcatggtgtgtactcccaaggacttgcatagctgtgctcctgtgtctttgc

SEQ ID NO: 924166 - DNA, 592 bp, Homo sapiens
aaatcttataatatgcatacaattcaccccatcctttgtcatatttttaattacatttattaatgttctaatccccacacacatatttgtttacactgttattattgactgatgaataaaataataaaatgccctctgtgtgaagccccaaaatttgagacaggtctcaggtaatttaaaaagttaattttgctaaggttgaggatgsgcatccatgacacagactcaggaggtcctggtgacattatgtccaaggtggtgagagcacaggatggttttatacatttggggagacatgatacatcggtcaacatatgtaagataaacatttgttcagtctgctccagaaaggaggaacaactcaaagcaaaagtgggacaactcaaagtggggaggaggcttccaggccacaggtaggtgagagacaaacgattgcattcttttgagttactgattcacctttccaaaggaggcagtcagacacgcatttatctctgagcagagggatgactatgaatagaatgggaggcaggtttgccctaagcagtgcccagcttgaatatttcctttagcttagtgtttttcgggccct

SEQ ID NO: 924167 - DNA, 634 bp, Homo sapiens
gcttaagcaacaaggagctgaatgttaatatccaagagaatggggaggcctcaaagtcatctcagagacctctgcagtaatccctcctcccatcacaggccgagaagactaggaggggagaatgctttcatggaccacacccagggccccactgccctgtgcagtgtctggacactgctcccggtagcctgggtgccccagtgccagccttggcccaaaggaccccaatatagcttgagccactggttcagagggtgcaaaccatgagctttggtagcttccacttggtgttaagcctgtgggtgcacagagaaagtgttgaggcctcggagcctcggmctagatttcagaggatgtataaaaaagcatggatgtccaggcagaagcctgctgcaggggtggagtcttcatggagaacctttactagggcagtgcagaggggaaatgtgtgattggcacccccacacagagtccaccctgagcactgcctagtggagctctgagaagagtgccaccatcctccagaccccagaatcatagatccactgaccgcttgtagttaggcctggaaaacgcgtaagcactcagtggcagcccactgggggctaaaccatgtaaagtcacagggttggag

SEQ ID NO: 924168 - DNA, 615 bp, Homo sapiens
gtgttcatggagcaatacgcacagaacttgccgaaactagggtgggcaaaaagtactgcccaaaaagtattgatgatctgtgctctaatcatcgatcactgcttctgatcacagaagtgaagacaaagaggtggatggccattgttgttgctccttccrccattattgtaagcctctccccctcaagctggtaccctttcccacccccgcccctttatttctctctttttacctttttggaagccagatattaaagaccagaacattccaaagcaattgtatatatagggaaaattagaaggtgaccacacacgcccagagaaaggcacaagctcaagaaagacctcagaagatcttaggtttatatctcagcctgatcacagagctttgtaggcacagagagtgcccacaactattttaaaaaccaaaagcaataaaaagaaaaacctcacaaaccctagagaagggggagaattggatttccagagttattagattcaagtgtctaatgtttaacaacaacaacaaaacgcaaggcatacaaagaaacagggaagtatggcccatgcaaaggaaaaaaaataaatcaacagaagctgtccctgaaaatgacct

SEQ ID NO: 924169 - DNA, 615 bp, Homo sapiens
gtgttcatggagcaatacgcacagaacttgccgaaactagggtgggcaaaaagtactgcccaaaaagtattgatgatctgtgctctaatcatcgatcactgcttctgatcacagaagtgaagacaaagaggtggatggccattgttgttgctccttccaccattattgtaagcctctccccctcaagctggtaccctttcccacccccgcccctttatttctctctttttacctttttggaagccagatattaaagaccagaacattccaaagcaattgtatatatagggaaaattagaargtgaccacacacgcccagagaaaggcacaagctcaagaaagacctcagaagatcttaggtttatatctcagcctgatcacagagctttgtaggcacagagagtgcccacaactattttaaaaaccaaaagcaataaaaagaaaaacctcacaaaccctagagaagggggagaattggatttccagagttattagattcaagtgtctaatgtttaacaacaacaacaaaacgcaaggcatacaaagaaacagggaagtatggcccatgcaaaggaaaaaaaataaatcaacagaagctgtccctgaaaatgacct

SEQ ID NO: 924170 - DNA, 568 bp, Homo sapiens
ggtctttgatgcagaagtttttaactttggtgaagtccaatgtagtaattttttctttcgatgcttatacttttggtgtcatatccaagaaatcattgcctcccagcactttgggaggtcgaggcagatagatcacctaaggtcaggagttcaagactagcctggccaaagtggtaaaaccccatctccactaaaaatataaaaattagtcgggyatggtggcatgcacctgtggtgccagctactcaggaggatgaggcaggaaaatttcttgaacccaggaggccgaggttgcagtgagccgagatcgcaccacggcagtccaacctgggtgacagagtgagactccacctcaaaaaaaaaaaagaaagaaatcattgccaaatccaacatcatgaagatttacccctatgtttttgatacaggaactagaaagaaattatttaggcagatggtgagggtaagagagtccttggtaaagtttcattttaataaaaagcaccccccaaatgatatcttttctaacaaaaagcagcctgaaaaatcaagctgcaagcatagataagca

SEQ ID NO: 924171 - DNA, 832 bp, Homo sapiens
tatcagctcaacctctacaggggctggagtctaagttcagccacatgagtggctggccatgcctacatatccagcctccaataaaaactctagacaccaaggcctaggtgagtgtccctggttggtaattctccattctagtggtcatgcacagttactaggagaaataagtgctgtctgcatcactgccctgggaaacgacaactagaagcttgcaccaggtctatcctggaccccgtcctatgggactcttctccttactaattttaatctgtatccttttgctataataaattgtagctgtgagtgtaacatcttttctgagttctgggagcccttctcatgaatcatgggaccggaggagtggtctgggggatcctcaaactgcagtactaggcagtgcacacttataatgcatgawtgtaaggtatgaatccaattaactcttttccttctgtattagggttctctagagggacaggactaataggacagatgtatatatgaaggggagtttattaaggagaattgactcacttgatcacatggtgaggtcccacaataggccgtctgcaatctgaggagcaaggaagccagtccaagtcccaaaacctcaaaagtagggaagcgaacagtgcagccttcagtctacagccgaaggcccgagagcccctggcaaaccactggtgtaggtccaagagtccaaaagctgaagaacttgagtccgatgttcaagggcaagaagagtccagcatgggagaaagatgaaggccagaagactcaggcagtctagtccttccacattcctctacctgcttttatcctagctgca

SEQ ID NO: 924172 - DNA, 832 bp, Homo sapiens
tatcagctcaacctctacaggggctggagtctaagttcagccacatgagtggctggccatgcctacatatccagcctccaataaaaactctagacaccaaggcctaggtgagtgtccctggttggtaattctccattctagtggtcatgcacagttactaggagaaataagtgctgtctgcatcactgccctgggaaacgacaactagaagcttgcaccaggtctatcctggaccccgtcctatgggactcttctccttactaattttaatctgtatccttttgctataataaattgtagctgtgagtgtaacatcttttctgagttctgggagcccttctcatgaatcatgggaccggaggagtggtctgggggatcctcaaactgcagtactaggcagtgcacacttataatgcatgattgtaaggtatgaatccaattaactcttttccttctgtattagggttctctagagggacaggactaataggacagatgtatatatgaaggggagtttattaaggagaattgactcacttgatcacawggtgaggtcccacaataggccgtctgcaatctgaggagcaaggaagccagtccaagtcccaaaacctcaaaagtagggaagcgaacagtgcagccttcagtctacagccgaaggcccgagagcccctggcaaaccactggtgtaggtccaagagtccaaaagctgaagaacttgagtccgatgttcaagggcaagaagagtccagcatgggagaaagatgaaggccagaagactcaggcagtctagtccttccacattcctctacctgcttttatcctagctgca

SEQ ID NO: 924173 - DNA, 637 bp, Homo sapiens
agactcaaggagaagctgtatcaccttttttttttttttttgagacagtctcactctgtcgcccaggctggaatgcagtggcgtgatcttggctcactgcaagctccgcctcccgggttcgtgccgttctcctgcctcagcctcccgagtagctgggactacaggcgcccgccaccatgcccagctaattttttctgtatttttagtagagacggggtttcaccacgttagccaggatggtctcgatctcctgacctcgttcgtgatctgcccgcctcggcctcccaaagtgctgggattgcaggtgtgagccacagtgcctggcctgtatcaccttttataaccccaactttgggagtcctatagtgtcatttatgccagggtcacaagcctacsaaggttcgagttgagggaacatagatcctatcacttgatggaggactctctacatcaaattgtaagaagagcaagtagactggaaggtgttgctgtggcaagaggacagttcatattaaaatcagttattggccaggcatggtggctcatgtctgtaatcctagcactttgggaggctgaagtgggaggattgcttgaagccaggagttcaggaccatcctaggctacataataagacctt

SEQ ID NO: 924174 - DNA, 622 bp, Homo sapiens
tgtgtccccagtcaaatctcatctcaatttataatccccataatccccacgtgtggaaggagggacctggtgggaggtgatcagatcatgtggacagttttcccccatgctgttctcatgatagtgagtgagttctcacaagatttgatggttttattaatgtttagcaggtaccccattctccccctttttttcctgccaccttgtgaaaaaggcccttsgttccgcttcaccttccgccatgaatataagtttcctgaggcctccccagccatgtggaactgtgagccatttaacctctttcctttattaattacccagtccaggtgcgtccggaattgctgggttcctggtctcactgacttcaagaatgaagccgcggaccttcgcggtgagtgttacagctcttaaggtggcgcgtctggagtttgttctttctgatgttcggatgtgttcggagtttcttccttctggtgggttcgtggtctcgctggctcaggagtgaagctgcggacctacgcggtgagtgttacagctcttaaggcggtgtgtctggagttgttcgttcctcccggtgggttcgtggtcccgctggtttcaggagtgaagctacagaccttcg

SEQ ID NO: 924175 - DNA, 622 bp, Homo sapiens
tgtgtccccagtcaaatctcatctcaatttataatccccataatccccacgtgtggaaggagggacctggtgggaggtgatcagatcatgtggacagttttcccccatgctgttctcatgatagtgagtgagttctcacaagatttgatggttttattaatgtttagcaggtaccccattctccccctttttttcctgccaccttgtgaaaaaggcccttcsttccgcttcaccttccgccatgaatataagtttcctgaggcctccccagccatgtggaactgtgagccatttaacctctttcctttattaattacccagtccaggtgcgtccggaattgctgggttcctggtctcactgacttcaagaatgaagccgcggaccttcgcggtgagtgttacagctcttaaggtggcgcgtctggagtttgttctttctgatgttcggatgtgttcggagtttcttccttctggtgggttcgtggtctcgctggctcaggagtgaagctgcggacctacgcggtgagtgttacagctcttaaggcggtgtgtctggagttgttcgttcctcccggtgggttcgtggtcccgctggtttcaggagtgaagctacagaccttcg

SEQ ID NO: 924176 - DNA, 570 bp, Homo sapiens
agtagtgtgaaaatggattaatacagaaaattggtactaggagagtaggacacttctacaaagatacctgaaaatgtggaagtgactttggaacttggtaataggcagagattggaggagattggagggcctagaagaagacaggaagatgagtgtaagtttggaacttcctagagacttactgaatgattttgaccaaaatgctaatagtgatatggaygatgaagcccaggctgaagtggtctcagatggagatgaggaacttattaacaatggtgtaaaggcactcttgctatgctatagcaaagagacagacagcattttactcctgccctagagatctgtgaaactttgaacttcagagagatgatttagggtatctggcagaagaaatttctaagcagcagagcatttaagatgtcacctgacttttctaaaagtgtacactcgtgtgaagaaagagatggcctgaaattggaacttacatttaaaagggaagcagagcataaaagtgtggaaaatttgcagcctgaccagcagtagaaatgaaacaccctttttctggagaga

SEQ ID NO: 924177 - DNA, 644 bp, Homo sapiens
ggcttccttattcacatgcccttgacattcacatgtcaagcggggagtgaagactaaaactctcacatctttttcttcaagctcctaggaaagagtctctgatcagcccagttgggcccattttatctacctatggtttaatcaggaatttcttggaaatcctaaaggccaaatgtgkacccccaagaaaaaagaactccttaggtagcattgtggtgagcacttcatgggcattgtctttgtctaaagttcatagaaatcctatgaggttgctattacagtctaattttctatgtaacaaagcagagtctcaaacagttaagtaatttgcccaggatcatacactgacttttatttcttttagagacagggtctcactctgttgctcaggctggagtgcagtggtacaatcatagctcactgcaatctcaaactcctatgctcaaatgatcctccagcctcaacctcctgagtagctagggctacaggcgtttgtcaccacaacaagctaaatttttgtttcaatattttattttttgtagagatgtggtcttgctctgttgcccaggctggtcttgaactcttggcctcaagtgatcctcctgcctaggcctcccaaagcactgggattacaggcgtgagcc

SEQ ID NO: 924178 - DNA, 618 bp, Homo sapiens; identical to SEQ ID NO: 923893

SEQ ID NO: 924179 - DNA, 724 bp, Homo sapiens
agatgtggtttcattgcttgaggaaattaacatatctcctggtacctggtatgcagccaatgatttgccaaatgcctttttctccattcctgtccataaggcccaccagaagcaatttgcgttcggctggcaaggccagcaacacacctttactatcctacctcaggggtatatcaactctccagatttgtgtcataaccttgttcaaagagaccttgatcgcttttcacttcyacaagttatcacactggcccataacattgatgacattatgctgattggatccagtgagcaagaagtagcaaacacactggacttattgatgagacatttgcatgccagaggatgggaaataaatccgactacaattcagggaccttctacctcagtaaagtttctaggggtccagtggtgtggggcctgttgagatattccttctaaggtaaaggataggatgctgcatttggcccctactacaaccaagaaagaggcacagcacaagttggcctatttggattttggaggcaacaaattcctcatttggttgtgttactccagcccatttatcgagtgacccaaaaggctgccagttttgagtgggatccagaacaggagaaggctctgcgacaggtccaggctgctgtgcaagctgctctgccacttgggccatatgatccagcagatctaatggtgcttgaggtgtcagtggcaggcagggatgctg

SEQ ID NO: 924180 - DNA, 656 bp, Homo sapiens
cagcccatttatcgagtgacccaaaaggctgccagttttgagtgggatccagaacaggagaaggctctgcgacaggtccaggctgctgtgcaagctgctctgccacttgggccatatgatccagcagatctaatggtgcttgaggtgtcagtggcaggcagggatgctgtgagaagcctttgcsaggcccccataggtgaatcacagcggaggcctctaggattttggagcaaggccctgccatcttcttcagataactactctcctttagagagacaagtgctgtttggagcctttggcaggctcccataggtgaatcgcagtggaggcctctaagattttggagcaaggccctgccatcttctgcagataactgctctccttttgagaaacagttcttggcctgttactgggctttggtagaaaccgaatgcttgattatgggtcatcaagtcaccatgtgacctgaactgcctatcatgaactgggtgctttctgacccatctagtcataaagtgggtcatgcactgcagcattccatcatcaaattgaagtggtatatatgtgatcgggcttgagcaggtcttgaagacacaagtaagttacatgaggaagtggctcaaacgcccatggtctccactgctgccaccctggcc

SEQ ID NO: 924181 - DNA, 617 bp, Homo sapiens
caaagatggttctgcatgatatgcaggcaccacccaaaagtggacagctacagccctatagcccctttcctgaaggacactggtgaaggaaaatcttcccagtgggcagaacttcgagcagtgcacctggttgtgcactttccaaggaagtagaaatagacagatgtgtgataatactgattcatggactgcagccaatggtttggatgacggtcagggacttgaaagaagcatgattggaaaactggtgacaaatttggggaagaggtatgtggatggacctctctgagtggtgaaaaaatgaagttatttgtatcccmtgtgagtactctaccaaagggtgacctgagcagaggaggattttaataatcgagtggataggatgacttgttctgtggacaccacacagcctccttacccagccgcccctgtcatcacccaatgggtccatgaacaaagtggccatggtgacagggatggtggttacgcatgggctcagcaacatggacttccactcaccaaggctgacctggctaaggccactgctgagtgcccaacttgccagcagcacagaccaacactaagcccttaatatgacaccagtccttggggtgatc

SEQ ID NO: 924182 - DNA, 585 bp, Homo sapiens
ctaaattaccactttacaacattataataaatcaccactttacactaggttgactactatcagaaaaaaaaaaaggaagaagacaaagaaaatacaagcattagcaagaatatattgcaagtgggaatgtaagatggagtgcagtccctgtggaaaatggcatggaaattcctcgaaaaattaagtgtagttaccatatgattcagaaattctacttctggatatatataccaaaaagaagtgaaaacagagactcgcacagatatttgtatactcatgttcatagcaacattagtcayaatagccaaaaggtggatgcaaccaagtcaccatcaatagatgaacggataaagaaaatgtggtacacacatacaatgaaatattatttagccccaaaaagggaataaattattacatgttacaacatggatgagccatgaaaacattatggtaagtgaaagtaactgttcacaaaaggataaatactgtatgattctccttattccacgtacctagagtagtcaagtttatagagacaggaagtggaatggtggctgctaggggctgggcaggagaagggaatag

SEQ ID NO: 924183 - DNA, 600 bp, Homo sapiens
aagtggaccctgctgcccagcacttggctggtatacatggagcacaggcctgcttgtgtctcaaaataaattccacttctataaaataatcctgagagctggtggctggtggttggcaagtactgcagcgagctggcctgcagcagaggaggcaggaccaaccaggctgttactgcagaactaccgttcacctatggcccctggaggcctgagccccacaggcaggaggctcagcaccatgcgattctgacgcctcccctggagcccagatcatccaggttcrctgtatcccccacaccaatcttgggagactcagtacaagtagatcaacccatctcctctctacattttcagggaaatttggctcagagtccaaggctgaaccttgtgatgaggaaaccttgctggaagctgacctttactgtaggggccctgattcaatatcctatatccacaaaaaatgcacatacagggcagcgaggttctagccttcccctctgccatcttgatctgtgagggtctccttggaaaagtctatgtgtctcctacagtgccaagcaggggaggaatcagaattagtccaggtggcagcatcctttt

SEQ ID NO: 924184 - DNA, 608 bp, Homo sapiens
gagtttgttaaaaataccggttcctaggttccagcaccagacatttttttttttcttttttgagacggagtctcgctctgtcgcccaggctggagtgcagtggcgccatctcggctcactgcaagctccgccccctggagttcacgccattctcctgcctcagcctccagagtagctgggactacaggcgcctgccaccacgcccggctaatttttttgtattttyagtagagacggggtttcaccgtgttagcaaggatggtctcgatttcctgacctcgtgatccgcccatctcggcctcccgaagttctgcgataacaggcgtgacgaccgcgcctgccctccagcactagacattcttactcgatggggctagagctgagtctaggaatctacatttctaacaagcttcagtggtgatgcccggtgggattgagaaccactaaactagatcatgtgtacggttccacgcaattcaggcattctattacattttaagtgtctgtgtgcatgtccatttagtaaaagctccccaaatttgatgaacaaccctcaatcattttatctggctaggatcagtcatgcctggcattaggcatttccattt

SEQ ID NO: 924185 - DNA, 734 bp, Homo sapiens
catgcctgtaatcccagcagtttgggaggccgaggcgggcggaccacctgagatcaggagtttgagaccagcctgaccaacatggagaaaccccgtctctgctaaaaatacaaaattagctgggcatggtggcgcatgccactacttggaggctgaggcaggagaattgcttgaacccgggaggtggaggttatggtgagccgagatggcaccattgcactccagcctgggcaacaagagagaaactccatctcaaaaaaaaaaaaaaaaaaaaaaaaaaatctaacaaaaggatatcactatgttacycaggctgttctggaactcttgggctcaagagatctacctgcttcagtctcccaaagtggtgagattacaggcttgaaccactgtgcctggccagaatctttaccttagcaagcttgcctggtgatttttatatgtgttatagtcccagaaacttgttctacattatagcagggccccattttttctcacactttttaaagcattggttagaggatggtgcaaaattcctgaaggtcagctcccgagtctgcctcatctactgtgtcactcctgtgagctgcattccagatgaggagtgctgttcgcagaggggtggaaaaggaaggtggatgatggtgacactgcaaggaagtcattttcccatcaagataaagggtttgaaattgttcattcatagccatttattttctctacagcatatgctg

SEQ ID NO: 924186 - DNA, 573 bp, Homo sapiens
gaatctgaccatgctggcaccctgatctcaggcttcccagccttcagaattgtgagaaataaattcctgctatttgtaagccatccagtttatggtattttgttatagcagcatgaactggctaagactccattgcagcaggaactcagtgagggcatgtgtggacctccaagccttgcttgtaggtcccaggcagaaagcaccctgcaatagttacaggagatgtcaatgttccccaagtccctgctgtaaggttatgaattcagcatatcagccccaattgctatctatgctgccatatgctcctttgagagtggtgaaggagacctgcccagaaatgctctcccacgtggctctgggactgccagctcccctttgggtgggaccttgyagatgctcatgtgggcagcagcatctctgctctggagcctgttcagccttgtgttatttctggggcatgttctaaccctttcccaaacatgttctctgttccctagcacaggactcgctgctagtccttctaatttccagcggaaagcagtctgttttgacgcttcccaggtgttcagtccc

SEQ ID NO: 924187 - DNA, 674 bp, Homo sapiens
ctcctttctttgactaggaaagggaactccctgaccccttgcgcttcccgcgtgaggcaatgactcaccctgctttggcttgcacacagtgcactgcacccactgtcctgctccctctgtctggcactccctagtgagatgaagccagtacctcagatggaaatgcagaaatcatctgtcttctgcrtggctcacgctgggagctgtagaccagagctgttcctattcggccatcttggttccacctatatgtgtgtctcttctacacagaactttaaaaaaacccaacctgccagtctctgtcttttaattgctgaactgatcccttttatattcactgaagttattgatctatttggatttatttgtattacctttgcttattgcttcaattgtcctgcctttgtttctggagatctgagaaccggcagactgcctcctcacgtgggtccctgacccccgagcagcctaactgggaggcaccacccagtaggggcagactgacacctcacatggcccagtactcctctgagacaaaacttccagaggaacgatcaggcagcagcatttgtggttcaccaatatccactgttctacagccactgctgttctgcagccactgctgctgatacccaggcaaacagcatctggagtggacctctagcaaactccaa

SEQ ID NO: 924188 - DNA, 599 bp, Homo sapiens
atgcattttttgaatttggagaacagagacacttctgtttcaatctgctgggagaagcctacacacaaaaggtgggttagctgggcattaggtgggagagagaaggtatgaaaatttaagtggcttatgagaaagctgctttattcccatcaatggagaagccaatatgcatgtgtcctagaggttggccccagagctcacctgaaattgtcttcacagggatgtcatctaagatgccagtccacaggggccaagaaacccctgyagaagggaagtttaggggaagcccatgggctgagaaggggagtgtcctaaaaacctgttagtgtttagagtgcttcaccaggcattcctcagcagaagaatctctccaaaaaccatgtgagctccctgggagatttacaaaaagaaaaagatgaagaaaaaaacaataatcatattgattacaattgtatcagcatcatgagattaggctcatacttctctctgcctttgggttctgaagtagcctccagcaagtagggaaggaagagcaagaaatattaacaaaaccaacctggtgcttttgcctcactgcaggatttttgtccctaaaatga

SEQ ID NO: 924189 - DNA, 784 bp, Homo sapiens
cctaacaagagagtcagcctgtcctttaaagctttgatggcgggcattgacttctcctctctagctatgaaaatcctagatggcctcttcttccaatataagattgacccctacatcaaaaaatctgttgtttagtgtagtagctttcatccattatttgaactagatcttctaaataacttgttgcagctttacatctttacatgaagcagtggttgtttcaccttgcactttcatgttatggtgacaccttctttccctaaacctcatgaactaccctctactagcttcagacttttcttctgcaacttcctaacctctctcagccttcatagaattgaagagttagtaccttgctctggattaggttttggcttaagggaatgtcgtggctggtttagtcttctatccaggccamtgaaactttctccataatagccataaggctgttttgctttctcatcattcatgcattcactggagtaccactgttaaattccttcaacaactattcctttgtactcacaacttggctgtttggggcatgaggcccggctttcagcctgtcttggcttttgacatgtcttcctcactaagcttaatcatttctagcttttgatttaaagtgaaagacatgggccgagcacagtggctcatgcctataatctcagcactttggaaggccgaagcgggcagatcactggaggtcatgaattcgagaccagcctgaccaacatggtaaaacaccatctctactaaaaatacaaaaaattaagcattgtgg

SEQ ID NO: 924190 - DNA, 784 bp, Homo sapiens
cctaacaagagagtcagcctgtcctttaaagctttgatggcgggcattgacttctcctctctagctatgaaaatcctagatggcctcttcttccaatataagattgacccctacatcaaaaaatctgttgtttagtgtagtagctttcatccattatttgaactagatcttctaaataacttgttgcagctttacatctttacatgaagcagtggttgtttcaccttgcactttcatgttatggtgacaccttctttccctaaacctcatgaactaccctctactagcttcagacttttcttctgcaacttcctaacctctctcagccttcatagaattgaagagttagtaccttgctctggattaggttttggcttaagggaatgtcgtggctggtttagtcttctatccaggccactgaaactttctccataatagccataaggctgttttgctttctmatcattcatgcattcactggagtaccactgttaaattccttcaacaactattcctttgtactcacaacttggctgtttggggcatgaggcccggctttcagcctgtcttggcttttgacatgtcttcctcactaagcttaatcatttctagcttttgatttaaagtgaaagacatgggccgagcacagtggctcatgcctataatctcagcactttggaaggccgaagcgggcagatcactggaggtcatgaattcgagaccagcctgaccaacatggtaaaacaccatctctactaaaaatacaaaaaattaagcattgtgg

SEQ ID NO: 924191 - DNA, 693 bp, Homo sapiens
agccacagcttcagtacacactcaggagacaagccttctacgccccccatcgaagggtcaggcaaagtccgcactcagatcattaccaataccgccgagagaggcaattctcttacccggcagaactcttccacggaaagctctcccaacaaggccccttctgctcccatgttggagagtctccccagtgttgggaggccctcggggcacccctcctccgggaagggctccctggggagctcaggcagcttcagcagtcagcatgggagcccaagtaagttgcctttgaggatccctccaaagtctgagggactcctcakcccacctggaaaggaagaccagcaggccttcacccagggagagtgccccagtgccaatgtggctgtacttggggaaccaggcagtgaccgccgcagttgcccacccaccccaacagactgccctgaagccctgcagagcccagggaggactcagcatccaagcacttttgaaacaagcagtacatccaagctagaaacttctggaaggcatccagatgcctctgcaaccgcgactgatgctgtgagttcagaagcccccctctcacccacaatcgaagaaaaggtcatgttgtgcattcaggaaaatgtggaaaagggccaagtgcaaacaaagcccacctctgtggaagcaaagcagaagcctgggccttct

SEQ ID NO: 924192 - DNA, 693 bp, Homo sapiens
agccacagcttcagtacacactcaggagacaagccttctacgccccccatcgaagggtcaggcaaagtccgcactcagatcattaccaataccgccgagagaggcaattctcttacccggcagaactcttccacggaaagctctcccaacaaggccccttctgctcccatgttggagagtctccccagtgttgggaggccctcggggcacccctcctccgggaagggctccctggggagctcaggcagcttcagcagtcagcatgggagcccaagtaagttgcctttgaggatccctccaaagtctgagggactcctcatcccacctgkaaaggaagaccagcaggccttcacccagggagagtgccccagtgccaatgtggctgtacttggggaaccaggcagtgaccgccgcagttgcccacccaccccaacagactgccctgaagccctgcagagcccagggaggactcagcatccaagcacttttgaaacaagcagtacatccaagctagaaacttctggaaggcatccagatgcctctgcaaccgcgactgatgctgtgagttcagaagcccccctctcacccacaatcgaagaaaaggtcatgttgtgcattcaggaaaatgtggaaaagggccaagtgcaaacaaagcccacctctgtggaagcaaagcagaagcctgggccttct

SEQ ID NO: 924193 - DNA, 775 bp, Homo sapiens
aacccatagcccttgctcataatctagaatatttaaaaattaattagcaaatatcttaattattttatttactcgggttttaatgacattttttactataaataagcttgaccatttgagctatctgattgaaactggaaaagttgaagacctatccttaaatacacgaagataaaagggtgagtaggtttgtattgtgtcaaaatttaaaacaaacactaacttcttcctcttttcccttccatcaaaaattccttccatccataaaattgcctaagaaaggaagttttaagaaagaaaaggacagggccaccagttaacgggatatgtgattacttaaacacacttgacaaaagagaataatgaatttttttkaagtaaaaaattagagagattaaaaaagtatttttagccttatgtttacacacacacacacacacacacacacacacacacacactttaaattgtggtgatttctgagcactaataaattccctttaaaaattctgttaggttatgttcaaggaaataatgtttttttctgaaattgtaactgatgaatattgtttgagaatttcctcagtgaggcaatcatttaaatggaaaacatttgtgataggtcctggggaaaacccattctttccccctaaaactacctgagattggctgttaatcatttattttgctgtccatacttatgagtaataaggaagaataaaatgtcatgtttgaaaaaggaacaggtattcgttttctttaaaatacattggctt

SEQ ID NO: 924194 - DNA, 775 bp, Homo sapiens
aacccatagcccttgctcataatctagaatatttaaaaattaattagcaaatatcttaattattttatttactcgggttttaatgacattttttactataaataagcttgaccatttgagctatctgattgaaactggaaaagttgaagacctatccttaaatacacgaagataaaagggtgagtaggtttgtattgtgtcaaaatttaaaacaaacactaacttcttcctcttttcccttccatcaaaaattccttccatccataaaattgcctaagaaaggaagttttaagaaagaaaaggacagggccaccagttaacgggatatgtgattacttaaacacacttgacaaaagagaataatgaattttttttaagtaaaaaattagagakattaaaaaagtatttttagccttatgtttacacacacacacacacacacacacacacacacacacactttaaattgtggtgatttctgagcactaataaattccctttaaaaattctgttaggttatgttcaaggaaataatgtttttttctgaaattgtaactgatgaatattgtttgagaatttcctcagtgaggcaatcatttaaatggaaaacatttgtgataggtcctggggaaaacccattctttccccctaaaactacctgagattggctgttaatcatttattttgctgtccatacttatgagtaataaggaagaataaaatgtcatgtttgaaaaaggaacaggtattcgttttctttaaaatacattggctt

SEQ ID NO: 924195 - DNA, 635 bp, Homo sapiens
aaccagcttttgattttttctatttattggttctatgtattttttttccacagattttcactctkatctttataatttccattcttctcacatttttggattttatttgctctttttattctgcttttttaaggtgaaagctgaagtcatgactggagatcttttctaatattggtatctttcatgctataaatttccccctaagtacagctttagctgcaaagcactgtgaaatcctatattatcattttctgttttaagtactttctaatatgttttttctttgacctatgtattatttaaaagtgtattacacagtttccaaatatttgaagattttccagatctctttatggatttttaacttaattccattgtggtcagagaacatactttgtaggacttgaatccacctaaatatattgagacttgttttatggcctggaatgtgttctgtcttcataaattttctacatgaacttgacaaaaatgtgcattcagctgttgttgggtggaatgacctaaaaagtatcagtttggtcaagttggtttatactgttgtccaagtcttctatattcttactggttttctatttgtttggatttttctattcctccttgaagtgctatcaatt

SEQ ID NO: 924196 - DNA, 626 bp, Homo sapiens
aaggtggcatagggaggctggttctgggagcgttgaaaggagctagaaactagagccagcttctgccacgaggaagaagggccattgctggggcaaccctggcaagcatagaggaagcataaaggaaagatcagtttcctgcttcctctgcctgccttccagtgtccaactagtatcactgccaatgaaaaccagaagtcccatgtcaaaggatataccagccccagcatcacaaagagagcattaaaaggtgggatttgagccaggcgcggtggctcacacatgtaatcccagccctttgggaggccaaggcaggcagatcacttgagatcaggagttcaagaccagcctggccaacatgatgaaatttcatgggcttgtggaccttaaattccaggtagggaagatagacaacawaccaataaaaagagagtagtaaaaatctactaaaaacacaaaaattagtcgggcgtggtggtggacacctgcaatctcagctacttgggaggctgaggcaggagaatcacttgaatccaggatgtggaggttgcagtgagctgagactgtgccactgctctccagcctgggcaacagagtgagactccaactcaaaaaaaaaaaaaaaa

SEQ ID NO: 924197 - DNA, 552 bp, Homo sapiens
caacctgtgagagcagctatgtgtactgtgtcctgcaaagccacaggcacagggctacccaagtccttgggggcccatccttcacaacatgctgtggaacatgaagtcgaggattgtgttggagctttaagatttaatgcctgccctgctgggtttcagagttgtacagggtctattaccccttgctttttgccaatttctcccttttggaatggtaatgcttacccaatgccagtagcatcattgtattttgggaccaaataactcattttgattttacaggctcataggtggaaggagatgagtctcagatgagacaggactttagacttaatgttggaatgattaaaaactcttggggcctattggcaagcgatrattgtattttgcaatctgaaaagaacatgtgatttgggggggccagggatggaatgacaaggtttggatgattatcccctccaaatctcttattacaatgtaatcaccaatgtgggaggtggggcctagtgagacgtattagatcatggggatagatacctcatgaatggctcc

SEQ ID NO: 924198 - DNA, 506 bp, Homo sapiens
tctgcatcatttgtattaccacctgaactccacgtcctgtcattagatggcgttagattctcataggggtgtgaaccccactgtgaactgtgtatatgagggatgtaggctgcatgccttttatacaaatctaatgcctgatgatctgtcactgtctcccatcactcccagagcggactgtccagttgcaggaaaacagcctcgggcctcccaccgattctacattatggtgagttgtataactatttcattatatattacgaygtaataataataggaataaagtgcagaataaatgtaaagtgcttgaatcattgaaaaaccaccttcctctcatctgtggaaaaatcaccttccacgaaaccggtccctggcaccaaaaagtttggggaccgctgccatatgtgatatagtatagtatcatttaaaggaagctttggtaaggtaaaggtttataagtgctgaagcaaaccataaaaaataaacaaagaagtataagtatataa
